United States Patent Application Publication US 2026/0103690 A1 - sequence listing, part 12

SEQ ID NO: 44158 - protein, 536 aa, unidentified
MLLATIAGRGKQYTDAPLVLNMFVSPSVSMVPGRVRKSLVRPRRFSRLMAIPLRRVPALSHDRGRLPAMAFPLTKETAMPRGRRRTTRVATLPILTPHAAGIDIGATEIYACVPLDRDPRPIRRFGTFTEELRALASWLAQCRVTSVAMESTGVYWIPLYQILESQGFEVCLVNARHVKNVPGRKTDVQDCQWLQYLHAVGLLRGSFRPPETICAIRALLRHRDSLVRLAACHTQHMQKALNQMNLQLHHVLSDITGVTGLAILDAILAGERDPHVLAQQRDRRIKASRETIAKALVGDYRSEHLFTLRQSLASYRHYQALIAECDAQVQARFAAFDSAIDPAVHPLPPATTSHRKPQGNAPRFDLRAELYRILGIDLTQVDGLNTSTVYSLFSELGADLAPFPSSKHFASWLGLCPDNRISGGKILSVQTRHVKHRVAQALRLAAQSLYRSHSALGAYFRRMRAKLGAPKAITATAHKLARILYHLLTTREPYAESRLAQAEVEHRRRMEIRLHTQARALGFQLVPTPQPVGEVS

SEQ ID NO: 44159 - protein, 349 aa, unidentified
MRHIGVDLHKTNFVVCFLSDDETSRLETFPLTKVGINRFISHLDKEDEVAVEVTQNIYYFYDQIKAHVARVVLVDTYRFSVIAKSKKKTDKADASALARFLKLGYLPEVSVPSERVRRLRQLLEARETLVSMRTKLKNMGHAALARNGIALSRAAFASAASRTRLSVRDDLPSTDALIMQATLRQITELNKEVEQLEAEIIKVGKTLPGIPRLLQLHGMNLLSAISLLAEIGDIHRFETSKQLTAYAGLVTSTRQSSETTRHGKITKQGRKRLRTVAIRAVLAIVNRTDTALMDFYDKKKREKGSGKAICATARKLLTIIFVMLKKDLDYWYLEDRLYNRKLRALNAVA

SEQ ID NO: 44160 - protein, 345 aa, unidentified
MSEFYEGRQFVGMDLHRRRSVLVRMSETGEHLETVRILNDRDSLAEVMSRAGECPEAVLEATYGWYWAADALAELGATVHLAHPLGVKAFSYRRVKNDQRDAADLADLLRMGRLPHAWIAPQETRELRELVRHRAKLVAMRSQCKAHVHAVLAKGGIWVPMSDLFGVEGNLLLDKLTMPAPYKARIASLRRFIEAFDAEIDLFNGLVQRRLTHDAGYTAIQQIPGIGPVLAAVFVAEIGDVHRFAGPAQLTCWAGLTPSHHESDTTVRRGRITKQGSRLVRWAAIESVKILPKTSRIGAIREQVAHRRGNPNIGAVAAARKQLELVYYALRDHHIRALHRAPRAA

SEQ ID NO: 44161 - protein, 412 aa, unidentified
MNIIHHCCCGVDVHAKTVVVCLIKNGKKQIRTYSTMTDDLLALSDWLVSEGCKQVAIESTGVYWKPVFNILEGVLEVVLVNARHVKAVPGRKTDVRDCEWLADLLRHGLLRASFIPPLPIRELRELTRHRHTLVRDQTALSNRIIKLIESANIKLAQVASSALGVSGRAMLRALARGEQDTTKMADLARGPLREKQGQLRRALRGKLTRSQRFVLTELLDQLEQLEAAVARVSGEIREQTEENSDPFVKDAVRLLQTIPGVGEHVAEVIVSEIGTDMTRFPSDKHLSSWAGMCPGNNESAGKRKSGKTTKGSNYLRAALTQAGWAASHTKLTYLAAQNKKLSRRLGKKKALVAVGHSILVIAYHILKNRASYRDLGGDYFDRQNVESQRARYIKRLEALGLKVSVEAASEAA

SEQ ID NO: 44162 - protein, 413 aa, unidentified
MRLFVGDDWAEDHHDVELMDSAGRRLAKARLPEGVAGIARLHAMIGEQLGEDADEDDAGQVAIGIETDRGPWVAALIAAGYTVFAINPLQASRYRERHGVSGAKSDTADAHVLADMVRTDSHQLRPVAGDSAQAAAIKVVTRTHKTLIWERTRCTQRLRHALRDYFPAALEAFEDLDAADTLELLGRAPDPAAAAKLTTAQISAALKRARRRDIAAKAERIQAVLRAAHLGQPDIVAAAYAASVRALIAVLATLNEQVKTLQGQVEAYFGQHPDAEIVLSQPGLGPVLGARVLAESGDDPGRYISAKARKNYAGTSPITRASGKKKTVMARHVHNDRLIDALISQAFTALRTSPGARACYDHQRARGAGHNPALRQLANRLTGILHGCLKTRTLYDEATAWPQYTATSEKTAA

SEQ ID NO: 44163 - protein, 347 aa, unidentified
MKFYTTLHKYYCGIDLHAKILYVCLLDQQGNKLVHQKIGADPLALLRLLEPYMGNVIVGVECMHCWYWVSDFCQAHEVDFVLGHALYMKAIHGGKAKNDKIDSYKIASLLKGGNFPLAYNYPKEMRATRDLLRRRTGIVRHGASLKAHVVNTDSQYNLPAQSLNLKNLSARESLRHHYEDEVVQRTIKLDIVLLDCYAKELAKVECFIEKQAKQHHGTYLYIIRSFPGIGQILGLTILYEIGHITRFNSVQNFASYSRLVKCKAESAGKTYGTSGNKIGNGHLKWAFSEAAVLYLRGNDKAKNYLNKLQRRISKGKALSALAHKIGRCIYFMLRDKTVFDEKKFLKG

SEQ ID NO: 44164 - protein, 304 aa, unidentified
MFGIGIDVSGENLDVAVHEQAFRQFKNNKRGWTSLIGWLQQWPAKQVVLEASGGYEQKALDALHEAGLPMVRINPGRGRSFASATGKQAKTDRIDAMVLAHMADALKLTRYVPPAAWQRRLGELCQRRRHLVQMRVSEHQRMRAFSEPSLISMLNEHLCQIQKSIKQLDATIAALLAEQEGWRDFATLKGAGAVLMATLACELPELGRLSGKAIAALVGVAPMNRESGTWKGRRSVTGGRAVVREALYMAALTAKRYEPRLKEFFESLVNQGKPGKVALVAVMRKMLVILNARKRDAEAQMASA

SEQ ID NO: 44165 - protein, 331 aa, unidentified
MKNVNESAGIDVSKLTIDVHLFKKNKHHQFVNKSNGFKEMIQWIKKEGLVVEEVLFCFEHTGWYCLELSFFLHEIALKYTCANPIEIKRSIGLKRAKTDKDDAGYLAHYAWLRREEIKQSVPPSQNIIELQRMMSLREQLVKQSVALKNLRTGMLQIVISREIDPSILILDQTIKELEQQTKNIEKEMELLIKSDTNLKENYLLSKTVKGVGKILAVQMLIHTHNYTRFLSWRQFSSYCGLVPYPYQSGTSIRGRNKIHSISDRKMKSLLSMSAISAIRSDKELKMYYEQRVKEGKPKMVVINIIRNKIVARVFSTVKRGTPYVELNKFTA

SEQ ID NO: 44166 - protein, 334 aa, unidentified
MENIAPIGIDLGKNSFHIHCQDRRGKAVYRKKFTRPKLIEFLATCPATTIAMEACGGSHFMARKLEELGHFPNLISPQFVRPFVKSNKNDFVDAEAICEAASRPSMRFVQPRTESQQAMRALHRVRESLVQDKVKTTNQMHAFLLEFGISVPRGAAVISRLSTLLEDSSLPLYLSQLLLRLQQHYHYLVEQIKDLESQLKRKLDEDEVGQRLLSIPCVGILTASTISTEIGDGKQYASSRDFAAATGLVPRQYSTGGRTTLLGISKRGNKKIRTLLVQCARVFIQKLEHQSGKLADWVRDLLCRKSNFVVTCALANKLARIAWALTARQQTYEA

SEQ ID NO: 44167 - protein, 387 aa, unidentified
MQSVTSATAVATTARANNITLFASLELSKSKWVVTINSPGSEKFSKHVVEGGDGACLLDLLSRSRAKAEQRYGVQIKAIVIQEAGLDGFWIHRLLLANGIESHVVDAASIAVARRHRRAKTDAIDGETLLRTLMAWARGERRVCSMVRAPSREDEDRRRLTRERGTLLKERIQHTNRIRGLLGGQGVRDYNPLRRDRFERLEALRTGDGRELPAMLKAEIRRELDRIALVTTQLAAVERARDALIHTDAEERNNPAALLLKLKGLGPEFASLLWLESLFRSFGNRRQVAAYGGLAPSPWQSGNVERDQGISKSGNRRLRKTMIELAWFWLRHQPDSALSRWFQARVGAAKGRIRRIAIVALARKLLVALWRYATQGVVPEGAVFKAA

SEQ ID NO: 44168 - protein, 354 aa, unidentified
MDKYIGFDIDCKKTVACVVQNGKKDLYATIGSDIGSMRKFLIKQKAVGCKRHLVFEISGQAGFIYDSLAGYSDTITVANPSKMTWIYRTAKKNDRIDARKMAVLLSIGEVPAVYMPGKEVRQWRETILHRKKIVTKIVQVKNRIRATLKSHGYSKPGIKGGWWKKANRLWMRNICQQSIGVCDLWHMHVCNLLDEFELLESQLKRVTLYLDGYLAKNPGGKLLMSIPGVGPRTAEAVLAYTDDVTRFGNYKQYCSYFGLTPKLDESGLCRRLGHISKHGPSVVRWVMCESSWMAIRKSKGLKAFYERVRCGQDGRKKIAIVAVARKLLSIMRAMLLTGELFNEGLVNEVIRQVA

SEQ ID NO: 44169 - protein, 324 aa, unidentified
MNVPKVKTGSYNRDCFVGIDVSKDKLDICIMPGGESWTQANGDFDELCDKLEVINPELIVLEPTGGCELGVLNALIRRGLRVSREHAYKIHHHGRASGQLAKSDKLDASVIAHYAEVYSRKIKPMTEPLEKQELLHQLSSRRKQLVVMRGAEKARLGQPGVFEGIRQSCERMIRSLSEEIEELERQIREAIGQDKEWRDNQEILESAKGIGEKTSSVLLANLPELGKINRKKIAALVGVAPFQNESGRFKGQQRIKGGRSEVRAALYMAALSAIRHDPRIRALYNRLLEKGKKKKVAITACMHKLLRMLNAMLSKRECYRPCVS

SEQ ID NO: 44170 - protein, 406 aa, unidentified
MNLNAVGIDVSKRKSTVSVLRPGGDVLMKPFDISHRTADFQTLADKLKALDGETRVVMECTGHYYEPVARELSQAGLFVSAVNPQIINKFQGQGNPLRKVKTDKADSVKIARYTLDNWANLKQYTLMDELRSQLKNMNRQFDFYMKHKTAMKNNLIALIDQTYPGANTYFNSLAREDGSQKWVDFLDTYWHVDCVRKMSLQAFTEHYQKWCSRKKYSFRKSKAEEIYGIAKELVPVLPKDNFTKCIIKQAVAQVNAASQTVEQLRSLMNETASKLPEYPVVMAMKGVGPSLGPQLMAEIGDATRFTHKGAVTAFAGVDPGVNASGDYSQKSVHASKHGSPMLRKTLFQIMDVLIKTKPDDAVYLFMDKKRAEGKPYYVYMTAGANKFLRVYYGRVKEYLSALQESY

SEQ ID NO: 44171 - protein, 367 aa, unidentified
MKKNSIVQQSPKRATARRAGPITIGMDLGDKSSRYCVLNSQGEIVQEGNVSTTKKALAQKFGALRRCRLAMEVGTHSPWVSRLLKSYGHEVIVANARQVKLITQSSRKDDRLDAQTLARLARVDPQLLRPIQHRSEEAQAHLMVIRVRAALVETRASLVNTARGLAKSVGERLPKCDTDQMGVERMEGLPERLQQALQPLLQEVESLTEKIKESDEAIEQIARTEYPETALLKQVRGVGTLIALTFVLTIEDRERFQKSREVGCYVGLRPKRSESGQSQPQLRITKEGDVYLRKLLVQGAHYILGYRGPDTDLQRWGRGLASHGGKNAKKRAIVAVARKLGILLHRLWVTGEVYEPLRNSQARPAAA

SEQ ID NO: 44172 - protein, 426 aa, unidentified
MSESEVLRQEPEFAALVGIDWADQKHAWCVQAAGTTQRESGEVEHTPEAVEAWVGQLCQRFGSRPIAVAVEQVKGALVFMLSKYEPLHLFPVPPAMSAKMRAALYPSGAKDDPGDADLLVDLLLKHRDKLRRLSPDSEATRRIQNLVEERRQLVEEKTAQSNRLTNHLKIYFPQMLEWFDRLDTELVCALLEQWPTLEALQKVPPARLRTFFRKQRCRYPELVERRLIGIQQAMPAIRDRAVIEAKSAVVKVSVQVIRSLIRGVAELDRKIEEAAAAHPDFFIFESLPGAGAVLAPRLLAAMGSQRERYANAAEVQAYSGIAPVTEQSGKKKWVHFRWACPKFLRQSFHEWAGHSIAHSQWARSYYQQQRERGKGHHAAVRGLAFKWIRIVFRCWKDRMAYDESRYLAALAKRNSPLAAVAGATSL

SEQ ID NO: 44173 - protein, 417 aa, unidentified
MKSARNTLTEEPVNAVTSGIDWARDDHAVSVVDARGREISRHTIEHSAAGLRELVSVLARAGAGEAAIERPDGPVIDALLGAGITVVVISPNQVKNLRGRYGSAGNKDDRFDAFVLADTLRTDRARLRPLTPDSPATVALRRACRARKDLVSHRVAVANQLRAHLRNVFPGAAGLFADLDSPVSLAFLARFDTQDRADWLTPARMAKWLASIGYSGHTDPAVLHARLTAAPRGITGPDADAQACITHALHAVLTTLAEQIKKLSAQISSQLAAHADSHIFTSLPRSGTVRAARLLAEIGDCRARFPTPESLACLAGAAPSTRQSGKMRTVGFRWACDKQLRDAVTDFAGDSRHASPWAADLYNRARARGHDHPHAVRILARAWLFVIWHCWQDGTAYNPARHRALQTLLNQDQQAAA

SEQ ID NO: 44174 - protein, 461 aa, unidentified
MIRRLVGVDLGIASAHTVRVLAEDGREVCRRRCEPTVDSLARVEAAALAGTPAGTVLEVVMEPTGPAWLPVAVFFTARGHLVFRVSSAKAADLRRFLSRHAKSNGIDADTLARLPLVDPAGLHPLELPGAEAAALDRRVRVTDRLTVLAARHKTRIKDLTRQLLPCSPLTGELGVADLAVLERWADPRALLAAGPARLTALIVKASHGKLGAERAQQWRAAATAAVELYADHPAIAFTDLAAEVGTEVRLLRATQAELAGHAQERETAYRYTDLGGLARSLPGVAEVGGPVLVAGMGRPGRFGSGAAFKSYTGLAPRASETGNTDRKGQPMSKAGSSLLRTTLIRAADNARRQDPQLARIYYTQMVERGAEHLKAVCVVAGALAERAWAVMNRQMPYVICDIDGTPVTPEQAKRIIARDFTVPDEVRRRRRSSKTPGRKPAQQPTTSSKGGRPLSKPHTAA

SEQ ID NO: 44175 - protein, 406 aa, unidentified
MSEAEFDWFVGIDWASREHEVRLLDAQGQDCGRRAVAHSGVGLQELADWLVEHSGGRPERVAVAIELSRGPIVESLLARGIAVFGVNPKQLDRFRDGYTVAGAKDDRRDAYVLADTLRLSRDRYRRLKLGDPKIIALRALVESEEDLSADERRLANRLRSLLESYYPQALTLCPAADESWLWSVLERAPTPEDARHLTKGRLGKILREHRIRRVGASEVLRALREKPLPVAPGVAEAAGGQVVLLTARLRLAHSQRARCARKVELALAELEDDPDGDVALVRSLPGLGSSVSAALFVDAADLLATCDYAGLRSHAGIAPVTRRSGKQRVVSMRRANSARLRQALYHWARCSVQRSTHCRAIYVAARARGQSHGRALRGLADRLLRILMAMLRTRTPYDPQRLSAHA

SEQ ID NO: 44176 - protein, 410 aa, unidentified
MRYYLGVDWADQTHAIWVVDEHGTKVAGRTVPHTAAGFSEWGRELDEWRAQGIELWAAIERPEGRVVDFLLDHGVVVYPVNPKALDRARDRFRPSAAKSDPFDARVLADFLRTDHGHLQALQPSSEVAQELKYLTEDYRRHVRQQTRLVNQLTATLKAYYPRALEVSELTTALARQFLPAYPTPAAVVALTEKQWQRWARAHRLSAARTQELWAVLQRPQLPVPDHVVRAKARLMLTLVEELTPVVAAVDQYREAIDAFFAGLPEGQWIRTLPIGKHGVTAPTLWALLGDTAGRWESFQHLQGHAGAVPVTIRSGQQRVVRFRFACNKAMRDIIDQVAFLSLRKCEWARAYYDQQRARGHDHHPALRALGAKWLKIIFVMWDRHIPYDEQHHLATMARHQLRQGAQKKIA

SEQ ID NO: 44177 - protein, 337 aa, unidentified
MRIIGVDLHTRQQTIAMLDMKTGEVVEKTLQYEGENVREFYAALPGPVRVGIEATGSMHWFLNLMEELRIDCQVGHPAKIRTAETRKQKHDRRDAALLLKLLAEDRFPSIWMPSTEQRDLRALLLHRHQWVRMRTIVQNSLQAIALSNGLRRGSSLWSQGGQHTIESLPLAQFAARRRTELQTLHRQLNERIEELHEQVREQALQRPGAQHTARFGNGKALASYVGMIPSEYSSAGRQRLGALSKQGNSFLRFLWGEAAMHAVRKDPNLKRFYRRKLIQKGLGKARMAAARKLGIRLWIMLRDQIDYEEFCRRGQMRQKNGGAYAGIPESDTGPAEQ

SEQ ID NO: 44178 - protein, 342 aa, unidentified
MNITTIGLDLAKNVFQVHGVDERGKTVLKKQLKRAQVLPFFANLVPCRVGMEACAAAHYWGRRLVALGHEVKLMAPQFVKPYVKANKNDARDAEAICEAVGRPNMRFVALKNAAQQAVLSIHRARQGFIKARTAQANQLRGLLGEFGIAIPKGIRELPAHIPDILEDAENELPSLMRALVQRLWEHFRELDRQVGELDREIQRLHREDESMQRLAEIPGIGALTASALAATVGDAKTFDNARQLPAWLGLVPRQHSSGGKQVLLGISKRGDCYVRTLLIHGARSVIQQAERRNDGDPWIKKLLARRPRNVVTVAVANRNARIAWAILAHQRRYDRGYQPQPQ

SEQ ID NO: 44179 - protein, 312 aa, unidentified
MADMVRLAGIDVSKDKLDVHVTPSGESRTVSYDRRGLAGLRRWLVGLGVALVAVEASGGYEREVSEVLEEAGLIVHRLNPLRVRRFAQLKGRLAKTDSLDARTIAEFARAHPQEHQLRRDPRRERLAEHLLVRRHTQEAILDCINQLEHLRDSRLRRLVTARKASMERTLAKLDRCLVELIAEHDDLAELSERLRSVPAVGPVLAATLIALLPELGSLTRRQVASLVGVAPFDRSSGRKIGAKSIQAGRVFIRNTLYMAALTAAQHNPAIAAFAQRLAGKPGKVRLVACMRKLIVTLNAVVRDGTQWQPRTA

SEQ ID NO: 44180 - protein, 343 aa, unidentified
MHGVTTIGFDIAKSVFQVHGIDAIGKVVIRRQLKRRYVLAFFEKLAPCLVGIEACASSHHWSRALQALGHTVRLMAPAYVKPYVKRQKNDAADAEAICEAVSRANMRFVATKTPEQQSCLMLHRTRHLLIRQQTAVINAIRAHLAEFGVVAPVGRRGVAELLDVAAASSEERVPEVARACVGALGVQLRLLKAQILEFDRQIMAWHRSNETSRRLDEIPGVGPALATALVASVADPKAFRSGRNFSAWIGLVPKQHSSGGKDRLGSISKQGDRYLRSLFTAGALAVIRYAKIHGTRHRPWLAALLARRPTKVAAIALANKIARMAWAMMVKGERYKEPAALAA

SEQ ID NO: 44181 - protein, 301 aa, unidentified
MDDIIFVGLDVHKATVCIAIAEGSRGGEVRQLGIFENRPEILSKVASRLSKGGRRLSFCYEAGPCGYGLHRLLTGYGHECVVVAPSLIPMKAGDRVKTDRRDALMLAKLHRAGELTAIWIPDAAHEAMRDLVRARATSVRVLPKARQHLQGFLLRHERIYCGARAWTLAYRRWLTTVRFEHPAQQIVLQDYIHAVQEAETRRDRLTQQIEELLPNWSMAPVVAALQSMRGVALVVAVTVVAEVGDFRRFANPRQLMAYLGLVPTSTRPGARFDVAASPRPAMPWRGACSSRGPGPTECRLG

SEQ ID NO: 44182 - protein, 340 aa, unidentified
MTITTVGIDLAKNVFAVHCVDQHGKTVLVKPKVSRAALPELIASLPPCVIGMEACSGAHYWARLFRQYGHEPRLMAAKFVSPYRMAGKSGKNDAADAQAICEAVRRPHMRFVPVKDESQQAMQCLHRIRQGFIEEKTATYNRLRGLISEFGVIAPQSTDALRHMVSEQKSSLPLQVQQCVNDLLEHIDRIEDNITEYDRILSRMAKTDHRSQRLMELKGIGPTTACALVASIGNAHDFKNGRQLAAWLGLTPSQYSSGVKSKLGRITKAGDSYLRTLLVQGARSVLIGAEKRTDLFSRWVCSLVDRRGYWRAVVAIAAKNARLCWASLHYGDDFRLYSAS

SEQ ID NO: 44183 - protein, 340 aa, unidentified
MSEISIIGLDIAKYVFQAHGADASGRAVLRKKISRAKLLPFFASQPRCRVVLEACGGAHHWARELARLGHDVQLIAPAYVRPFVKRQKNDAADAEAICEAAQRPSMRFVPIKSEAQQAAAMVFRGRDLLVRQRTQISNALRGHMAEYGWVAPKGLAHLDKLATLLADPTAVPEGVRSVCTALLENLALLDRQIAALDKEIVRRSREDEIARRLMTIPGIGPITATAITALAPPPGTFAKGRDFAAWVGLTPRQHSTGGKQKLGAISKMGERTLRRLLIIGSSAVVLQASRRGAPRGSWLEQMLARKPRMLVTVALANKTARIVWALLMKNEDYRAPVVAA

SEQ ID NO: 44184 - protein, 450 aa, unidentified
MIGNAGDEWISARRACGRKAAREGVCVSVCVLCGVLRKADDMNHNVAGIDVHKKILAVAVGKATESALVFERRLFGTVGRSLTELAEWLKEQGVERVVMESTAQYWKPVWLALEGSFDLHLAQARSNLAPRGRKTDFRDAERMVRRLLSGDLTLSFVPGAEQRQWRLPARGKYQLRRDRVRLQNQLEGLLEEGRIKLSSVVTDLLGLSGLRILRALAAGEDDAEKLASLADTRLRVSREDLAEALRGSVTTLQRVLLRQLLTRLDLIDTQIRELDQTLAKEMERYSEAIQRLSEIPGMGPDAAAQIVAEIGPQAGAFAAPEKLASWVGVCPGRQESAGQSTSNRSPKGNRAMRRILTEVAFAAVKTKDSHFQEVFRRLAPRLGVNKAIWAIAHRLCRLIWKLLHEGVTYREQGARGQDPQAIRKRARKLIGDLRRLGYTVLIEEPTPKTA

SEQ ID NO: 44185 - protein, 406 aa, unidentified
MKQIVSVGIDVSKGKSTVCAMIHPNTIIKESFEVLHTVEEMSMLADYIGSLDGEIRIVMESTGHYHLPVAQFLYQKGFFICVENAYIIRQFSRIMLHGAKTDPLDAKKLAKYGLAYWSELKPYKFHPSCYTELSLLSKQYQTYIKLLIAAKQNVIHLMDEMLPGFKEALDTASSVQFSKVKYVDFAKEFYHVDMIKSMGKEIFRENYKQWCKEKGYRFQSEKADELFHLAEDGIPTLPTEFPSTRLCMEVATEQVSQLGYALEQILSQMQNLAKTLPEYQTIRQMGGMGEKLCVRFIADIGDVRRFHNGKALVAYAGIDAPPYQSGQYTGTKRRISKRGNSALRKTGYEVMKSLKSHPPKTDTRVYDFIIKKENEGKSKKQAKIAGLNKFLQIYYARVMEIYKNIV

SEQ ID NO: 44186 - protein, 402 aa, unidentified
MNCVGIDVSKGKSMIAVMRPFGEVVVSPFEVRHTASELSELARLLKNLDGETRVVMESTGNYHAPVAWLLHGAGFYVSVVNAMLVHDYGNNSLRRGKTDKKDAVKLANYGLDHWLTLPRYVPEEDTRLMLKTCYRQYQQYSKVQTMLKNNLISLLDTAFPDANRLFTSPPRADGSEKWVDFVATFWHCECVCGLSKKAFTAKYQKWCRKHGYNFSQDKALDIYASACGRFGVMPKTNTAKLLVEQAISQLQTTSAALAALKQEMQSLAASLPEYPVVMEMFGVGPTLGPQLIAEIGDVRRFHSKKALVAFAGIDAPPYQSGQIDVRSRSISKRGSASLRRTLFLVMGVLLQCAPMDEPVYQFMDKKRSEGKPYRVYMMASANKFLRIYYASVKAYLDSLEHD

SEQ ID NO: 44187 - protein, 415 aa, unidentified
MSTTTNTGAAREGSSFGVFCGLDVGKGDHHAVALDPAGGRLADRPLPNDERALRSLFGELQAHGEVLAVVDQVASIGALAVAVARSMGIVVAYLPGLTMRRLADLHPGEAKTDARDAFVIADAARALPHTLRRIASDEQTVAELTILAGYDDDLAAEVTRLANRLHDVLAHVHPGLERLLGKHLNRSGVLELLAASPTPIQLRALGQSGIQAALAPRSRKLAVRLPEQILSALDEQTVVIPGTETFGRVIAGLARQLLSARDERDSIAEQLTARLEAHPLVEVLTSMPGVGVRTAITVLIHVGDGTAFRSAAHLAAYAGLAPVTRRSGSSIRGESASRRGNKQLKRALFLSAFASLRDPVSRTYYDRKRAQGKTHTAALLCLARRRTDVLHAMIRTGKTYQPPALQPAEDPSVAA

SEQ ID NO: 44188 - protein, 387 aa, unidentified
MGVIIGMDPHKRSATIEVVDEHANVLAVGRYGTDKAGYGEMLKAGRRFQDRVWAIEGCNGVGKHIAHRLVADSETVMDVPAKLSAQVRVFATGNGRKTDPVDAHSVALAAVRSPNLVKVEVHPDLVALGLLADRRDELGRARTQTINRIHRLLLELLPGGAKKFLSAAQARALIATTRPRDIAGKTRRKLVAELITELEGIDRKIKACKKEIKTLVAAQGSTLLQLHGIGPSSAARLLADVGSIHRFASRDHFASWNGTAPLDASSGQQQRHRLSRAGNRRINRALHIMAVVQLRNPTEGRAYYDARKAAGKTSMEGRRCLKRRLSNIVYRQMLHDQDRTQATGPGGHSGTTLQSSVTDLTPDIGSSDKPLPGPATPQPRTAIPAAS

SEQ ID NO: 44189 - protein, 341 aa, unidentified
MEHILGIDLHSDNGYYGIIEPDGKRVFQKRIPNDLPTVLTTLEPYRETIISIVVESTYNWYWLVDGLMENGYNNRVRLANPAGFSPYKGLKHADDKTDAFFLTELERLGILPVGHIYPKEERPVRDLLRRRMMLVHQKTSHLLSFQSLITRQTGTNIPCNNIKKFEEGYVKEILDEEHLILAGETNISIIRFLTKKIHLLERAVLKRIKLKPEYEKLLTVPGIGKILGLVIMLETGDIRRRFAGAGNYTSYCRCVKSKRMSNSKKKGEGNRKNGNKYLEWAYVEAANFAKRFSPEAKKYYQRKMAKTNQIVATKALASKISKACYFIMRDQEVFKTEKIFG

SEQ ID NO: 44190 - protein, 350 aa, unidentified
MNVKHYIGFDVHKKSISYCVKLADGTIVDEGKLTAKRSTLRDWAGKRREPWHGAMEATLFSSWIYDTLQPYAAKLEMGHPARMKAIGASKKKNDKLDARTISDLVRCNLLPVCWVAPVEIRELRRMLRYRNLVVCQAVQMKTKISGLLMECGAQYNKKRLHGAKYFAELLENLEEVPESVKELLKLSRGSLDTFQATQQRLLVQLRTHPQLTERLGRLKSIRGVGDVTALTWALEIGDPQRFPSIGDAVSYCGLTSALVSSADKQKRGPISKQRNAHLQVVLIEASKLAPRWNPQLAQVHEREVRQGNRNRATLEVARKLVAYLLAVDKSGKPFEVRTALKPETEVQTAA

SEQ ID NO: 44191 - protein, 350 aa, unidentified
MIIIGADYHPGFQQIAFVDTDTGEFQERRLQHREEAEKFYRDLAAQGMQVRVGMEASGKARWFERLLSELHFELWIGDAAEIRTRRVRKQKTDRQDAQLILQLLLEDRFPKIWVPSWENRDLRQLLWHRHRMVQARTRITNQLQAVALNEGLRCKQRLWRKHGREQLEAFRLAPWASRRRRDLLELMDRLNPTIAELSQAIEQEAKKFPEARCLMTHLGVGPLTALAFVLIIGRADRFQCGKQIASYLGLVPLEDSSGNQRRLGHITKQGSSMLRFLMVEAAQVTARSIPEWRSKYFHLAMRRGRKIAKVAMARRLAIALYWMWRKGWDYERVKKFASHAGQLETGDGVQ

SEQ ID NO: 44192 - protein, 343 aa, unidentified
MLEISTIGLDIAKNVFHAHGADAKGLQVFSRRITRGKLLSFFAAQPKCLVALEACGGAHHWARELLRMGHDVRLIPPAYVKPFVKRQKNDAADAEAICEAAQRPNMRFVTVKSEEQQASALVFRTRDLLVRQRTQTINAIRGHMAEYGWVAPKGPSWVTQLGELIDDEATTSLPQAAREMLRVMLGILEEFDRRVAELDKEIARRAREDEVARRLMTIPGIGPIAATAIAALAPAAATFKRGRDFAAWLGLTPLQKSTGGKTKLGRTSKMGERTLRRLLIIGSSAVVRHASKRGADEGSWLAGMLARKPRMLVTVAQANKTARIVWALLTKQEDYRAPVAMAA

SEQ ID NO: 44193 - protein, 407 aa, unidentified
MLFVGDDWAEDHHDIELQDEQGRVLARARLPEGIAGITRFHALVGQFAGPDTEPAEVAVGIETDRGLWVTALRAAGYAVYAINPRQVARYRERHGTSGAKSDKADSHTMADMVRIDSRQLRPVAGDSPETGAIKVAARTHQTLIWERTRQVQRLRHQLREYFPAALEAFEDLDAPDALDLLAKAPDPARAARLTRAQVAAALKRARRRDIAGKADAILAALRGGQLAQPEPVVAAYAAAVSSLTVIITALNGEIAKMERQVTACFRRHPDAAIYLSQPGIGEILGARELGEFGDDPHRYASAKARKNYAATSPVTRQSGKKKIVMARFIRNDRLADALHRQAQSALRASPGARAFYEEQRDRGLDHDAALRALSNRLVGILHGCLKTRTLYDEATAWSHRVKLPGAA

SEQ ID NO: 44194 - protein, 427 aa, unidentified
MDYTQNAKIAQVTEKTLIIGVDVGSETHYARAFNWRGQEFSKKAFSFGNDLGGYLAFAKWLDAYRQSMDAEKIMVGCEPTGHYWFNFARYVKQSSMTLVLVNPYHVKQTKELDDNSPTKNDRKDPKTIAKLVSEGRYTFPYMPEGIYADLRQAVSSRNRIVKELNALTNRIQRWLQIYFPEFLKVYGKFSAESALLVLETVPYPADILALGAEGVNQIWREHKLRAVGMKRATTLVEAAQKSVGMDGGVCARLDLQLLLEDFRRKQKQLKQITEVLETETRKVPHIEKLLAIKGVGLITAAGFLAEVGDVGRFDSPKQIQKLAGLELKENSSGKHKGQSSISKRGRKNLRKILFQAVLPLIRSNDEFREVYHYYTTRRKNPLKGKQAVVAVGCKLIRVFYAILTHGVDYDANRLRTDIIRPQEQQAA

SEQ ID NO: 44195 - protein, 353 aa, unidentified
MDNGSRYVGLDVHRDTISVAVCDSRGKLLLERVIPTSAAAVLELLELLRGKLHVAFEEGTSAQWLAGLLQPRVAQVLVCDPRKNDRRGSKNDRIDARELADLLRCGRLSPVFHQDCGLTALQQLARTYLVLTKDQTRVMNRIKAIYRSWAIPCAGQSCYSPKQREAFLSQLPHAAIRGRAQIYYQQMDSLVTLRQQVRQQLLHEGRKQPALRLLRQIPYIGPLRATMLVVFIQSPHRFRTKRQLWAYCGLGIETHDSGEYRFRQGQLERKRQPTVMGLNRNHHHLLKYVLKSVAARCCSGSGPVHDFAQTLLDQGMRPEMVRLTVARKIAAIVLVLWKKGVSFDAHYLKSQAA

SEQ ID NO: 44196 - protein, 339 aa, unidentified
MDSSTTYAVDIAKQVMQVHGVDCQTGEIGRRKLSRAKFLDFFAKLQPARVVMEACGGAHHWARCLRRLGHEVELLPAHQVRPFVRGNKDDAADARGIWLASRQDDIRRVPIKSSEQQAVLSLHRMREHWKSIRTATINALRGLLYEFGVVLPRGKTDGLRALAQRRADIDATLPHTMCRMVDAELSMLAEVQQRLDQLEAEIEATSTSTAKRLRKASGIGVLGASALAATLGDGTAWRSGREFSASVGLVPAHTGTGGKTRMGHISKRGDPYLRTLLIHGARAVIAQSKNKPQWLLELLARRPPNVAAVALANKTARVAWAMVAHGRDYDANWISAKPC

SEQ ID NO: 44197 - protein, 412 aa, unidentified
MEVVHPRCAGMDISKKDAKVCVRLAGAGRRKTVETVTTWSSMTSQVLALREHLAAEQVTCVVMEATGDYWKPFYYLLEDLPGVEVMLVNARHVKTVPGRKTDVADATWLAQLGAHGLVKASFVPPEPIRQLRDLTRARTAITRERAREAQRLEKLLEDSGIKLSAVASDILGVSGRAMLDALIAGDRDPVALADLAKRRLRNKIPELIEALNGRFNEHHAFLAQVHLNLIDRHTDAIEKLTARIEVMMEPFQGFHDLICTIPGISTITADVIVAETGADMSRFPTAKHLASWAGTTPGNNESAGKVKSSRSRPGNPYLQGALGAAAMACSQNPRTYYGARYRRIASRRGPKKANVAIQRSMLIAIWHMGSTGTLYDDPGADYFTRLNPGRAKKRAIHQLEAMGYRVTLDDAS

SEQ ID NO: 44198 - protein, 477 aa, unidentified
MRFVGLDLHQKSLVLCALDRRGKVVFRETVECRREAREAFARARLKKTDRLAVEATTNTWAVADTLRPFVAAVTVGNPLPIRAIAQAQVKTGKIDAEVLAHLPRCEYRPTVRAPDARTRRLRELTTLRGNRIVDRSRPKDRVQSLLAQLLVGPPVKVLFGKAGLARLRAVEVRSALDLDLRRYDAVAAEARAVDDRLMALAYEDDRAKLRMTRPGVAHGVAVSLLAARGDVARFRDGDHAASYLGLTPSPRPSAGKRRHGRITKAGSPPARAMLVQAVRAASDHPGPIGAFVRRLRRRKTHTGAVIPTAGKLVTIAYRMLKNNEPYRSAKPELVKGKLDECRRKAGNAAPARSRPVSPAAHRRNEVYRAHGLPTSQAPPGWSAGERRGVRGPGSGVLCRRGPRPARDGREAPEGQAEGEGVATTPGRYPRTARRSAGRRGRFSLRITRGPRERFACRPAGNKKMSKSSPDGVDKVRR

SEQ ID NO: 44199 - protein, 358 aa, unidentified
MQRNKKTFKGQNIYIGIDVHKKNWQVAVITESGYTERLSTAADAKALFKFLKSHYPDGNYRAVYESGFSGFATHYALSELGVSCVVAHAADIPSSQYELTMKSDRIDAEKLARALRAGLVRGIYVRPKDNLDDRGVLRIRKTIQIQVGGYKTRIKHLLHSNGVELPERFSRSGTHWSRAFIAWLREDVRLLSDTRRSLELLLLQVETLRANLLEATRRVRALSRTDRYREDCALLMGIPGIGLTVAMTILTEVCDIGRFGNERLFASYLGLVPTSHSSGERVSHGEMTFRGNKHIGPLLVEASWVLIVRDRELGRMYTEYRWRMAGQKAIIKIARKLSNIIFAVLKTRKAYEPYRRDA

SEQ ID NO: 44200 - protein, 373 aa, unidentified
MFDGLLRPQWKEDRPTMDGSKERPHTTVGLDLGDKYSYLCLIDRESGEVMEEGRLRTGPEAFRRRFASEQPMRIAIETGTHSPWASRVLEECGHEVLVANARKLRLIYANKRKTDEIDAENLARLARLDPKLLYPLKHRGEESQAHLAIIRSRQALVSCRTQLVNHVRGAVKSFGARLPKCPARSFHKRAAEHIPEALRPALGPILEQIGSLTQRIRDYERQLETISKENYPETELLRQVEGIGPLTALTFVLTLEDPYRFEKSRSVGAYLGLVPATDQSGDRDPQKRISKEGDEMLRKLLVSSAHYILGPFGSDSDLRRHGEKIASRGGKNAKKRAAVAVARKLAVLLHSLWVSAEVYEPLRNARTSGVRAA

SEQ ID NO: 44201 - protein, 358 aa, unidentified
MTITSMAHPSAPQLTVGVDTHLDVHVAHAVDQLGRSMATVSIPTTPAGYQDLLAWARGLGEPVAWGVEGTGAYGAALARFLAANGQAVVEVNRPDRQARRRRGKSDPVDAEAAARAVQAGQVTVTPKAGTGQVEMIRSLRVARATAMRARTQATNALHALLVTAPAELREQLRGLSATRLLGAAAELQPGPVISPLAAAMLALGILARRSQALSAEITTLTTQLDRLTATTAPKLVALFGVGQDSAGALLTAAGDNPDRLRSDACFAMLCGASPIQASSGKTARHRLNRGGDRQANAALYRVVLVRLRWHQPTKDYMARRLKEGKSKKEIIRCLKRYVAREVFAALNQTSHDTLTPAA

SEQ ID NO: 44202 - protein, 385 aa, unidentified
MAPPRMPEAVIGLDVGKLSHWACVATRDGEILLSAPVANREDDLDSLFGRFPDALVVVDQSRNIGALALARAKAAGMSAAYLPGLAAHGAARLFAGDAKTDERDAMVIAKTALGIPDALLPVGDPGPTVAAARALAAQRNFLTCENTRSKNRLRSILLESCPAFEALVDLSDGPQLRLMASLGGAWSVADAGPRRAAALTRGAARGKIEALVRSTASSTRPDAAAIAAEDRAVRLLARRISENSAEIDVITAEISALLEGDDTYRCLLTVPGIGPKTASELAISIDIEDFPSHDRLASYCGLAPRNRQSGTSISSVTASRQGNKRLKNLLIFSCNCLTRTEGRWGDYYARCRERGMPHGKALKALARKRLKVIYAIMRDRVPYAA

SEQ ID NO: 44203 - protein, 405 aa, unidentified
MGVDPHKKKHAAVAMTQDFTTHSKFKFNNSRQGFEVALERARAEMMRTGSRGVIFAIETGGHYWRNLVYFLDERGIPFHFINQFTLKRRREGKDLNRMKNDYRDSEVAAQLLCTGEFTDTKLQHGVYAELHAAYNAYRRLVKERTRITNLIKGLLDGIFPEFTQVFKDPCGLTALSVLSICPVPNIIAQMTEEEFVNAIRAKHQGRLLKKRLRALHYTARTSIGIQAGAWSVSSEISFLVEKLCLIRRQIRSIDETLARLVDETEEGKYLLSIIGLNYISVAGLLAELGSFRSYRSAKQLIKMAGSNPTESESGGKRSAHTPMSKKGRPVLRYCAWTAVIPMLRFNPDFRAWAKKLRERPVHANPLSGREVVGAALNKLLRLAFALVKKQTFYQVPQPEVAQVAI

SEQ ID NO: 44204 - protein, 482 aa, unidentified
MKKKSIFPYQSQELNTLFEEAGNNAKVMCIPIDYAKKEHVVMFCNGHGNILRKPFPIKNSPEGLEYLTQQVLMSCHHRGIDPKYTFFGGEDVGSYAQNFINTLRSGGWIVAGVNAHDAKKQRANAQASTDVLDLMGIASMLLNRRANCSPAQTGIYRNLRSLTRHRKKGVDMSTEEKNRIHTIVDQVFPGFLDEKNTGISPLSNSSLYLMTDRFSPAQIRRRKRQKLIETLRSYGTVKPEATADKLQYYATHVLNTPTEYLSALQVSLAQHIKHFKCLQDSIEQLEKEMALWLAQTQGAFLTTIRGIGIVLAAGATAEIGDTTKQKPVANLVSYSGIIPRVKQTGGPEGKTRIGKVSKRCNRILKNYIVQSAHHMGLHGPEDLMADYKRRDANGQHADFGIGRRYLRMGMCLMRTSQIYIPKRLRSKEINPEERAGYFLMIWPSIRDKWAKLGASETAFAKDNPLGRWRNMVQELYEIKLKF

SEQ ID NO: 44205 - protein, 452 aa, unidentified
MERSTAKLELVYPHTAGIDIGSERHYVAVGQGKDHVRSFGCFTRDITEMASWLKSEGIVSVVMESTGCYWIPVYEILESHGFRVALVNASHVKNAPGRKSDVQDCQWLQKIYSVGLLRDSFIPTESIRRLRSYTRLKEDHIRRASSHIQHMHKAFDQMNIKFHQVLSETTGVSSMKVMKAIVAGERSASALLSLCTTRIKNQKESEILQSLEGNYRQEHIFALKQAIAGYEFYMQQVEECDREIETLLQELTATLESSSSDSRGGSSSNRSNALRPLKRIRRRDPGYNLEAQLERLTGGVNLSVLPGMTAYNSLQLLAEIGTDMSRWPTEKHFTSWLGISPGSHKSGKKKGESRTKRLGTSASTILRVAARNIGRSKTALGGFYRRISSIKDAPTAITATARKLAVQIYNLLKFKKEYHEYGSKEYEDRYNKLRFKNLEKKADKLGYKLVKV

SEQ ID NO: 44206 - protein, 341 aa, unidentified
MKNKSFIGIDISKNVIDASIFCEGTPIKDFPHDVFNNSRKGFGEMCTWLKKNHVVLSNCLFGMEFTGSYSMELEKFLYARNYQFCMLSTHVVKHYPMGSKDKSDKIDSAKIADFLYRYNGTECVKPYKMPDKTMQRLKTLMNERKFLVEQRTCFMNRRQLCSTKEDAQLYDGYIRKLGHDIENIELEEQKLLATDDSLLTTYKNLLTIPGIGFVNAINAIVITRNFTAFETARQYASYVGVAPHSHTSGTSVRWRPRPSARCDGQAKADLSMAATVAVQYDAELQSFYNRKLGGKQDSDTKRKALNAVKFKLVLRMFAIGKQNRKWEPLDSKSSNEKLAIS

SEQ ID NO: 44207 - protein, 332 aa, unidentified
MSTKKADSQHREEAEKFYRDLAARGVKVRVGMEASGQARWFERLLAELNMELWIGDAAEIRAKRVCKKKTNREDARHILRLLLEDRFPQIWVPSWENRDLRQLLWHRHRKVQMRTRIMNQLQAVALNEGLCCKKRLWRESGRKQLEGFPLAPWGSRRRRDLWELLDRLNPTIVELRQTIEQEVEKYPAAQRLMTHPGVGALTALAFVLIIGEGERFRCGKQIASYIGLVPTEESTGERQRLGHTSKQGCGLLRFFLVEAAQVTVRSDMEWRSKYFHLALRRGRKIAKVAMARRLAVRLYWMWREKRDYEQLKKFGPHAGQPGTGVGVQQNIA

SEQ ID NO: 44208 - protein, 424 aa, unidentified
MSTAMSGLSAGSAAVVRPCSSSSSSSSSSSSSSNRMYYVGLDVHARQTTLEMLNDRGQTVKRQTIRGGLDKVVEEVAKLPGPLSIAYEASCGYGYLHDRLAPLAKRVVVGHPAQMRLIFKSKRKNDRIDGGKIAKLLYLDVMPQVHVPGVDVRQWRGLIEFRAATLNRRVALKNQVRALLRGLGLAASVPRGLWSKKGIVWLKDLSGLGETEALRRDMLIDELSEVNRRIKLLEQALAKIAAAHPAVRLLMTIPGVGIRTAEAVVAYVDDVNRFGKMTQLGTYFGLVPCQDSSAAVNRLGHITKEGPATVRKLLCEAAWQARRRSRRVSGWFERITGGDTDRRKIAAVAVARKLVVVMGHMLRSGEAWREGPASTSSSTNTSMRTGCARRLRGSPPEDTVTGNDRRSSVAGAVAGPTVNGERRR

SEQ ID NO: 44209 - protein, 461 aa, unidentified
MKKQKRRAAAKVDQGSKLSVIQSDVAGIDIGSREMFVCGPADRQGRREMRVFATTTEQIQECVRWLKQQEVRSVAMESTGVYWIPVLEIMESSGLEVLLVDTRPLSRVPGRKTDAEDCQWLQTLHSHGLLRGAYRPSEQISELRTIVRQKAVLVRQQADWIRRMHQCLDQMNVRVHHAVKDTQGATGMAMLRAIVAGERDPRSLVKLRDPGCQKSAAEMVELLTGNWRSDHLFNLKQHMAMYDSAASQIAVYEEEIQRRMQEVTPAGRKDAKAPPLANMEKRKTMKRRDQEGKRQALYRAMGVDLTTIDGIGVETTEVIMSEYGTEMSKFSTEAEFVKHTGLAPHRPVSGGKVLKDKRKKQKGTRTAEALRNAASSLKHSRSALGAYYRRIARRKDSGVAVFATARKLGELVYRMLRYGQQYVDVGQAEYEKRYEQTRIRALTSTANQMGYNLVKQEAVSA

SEQ ID NO: 44210 - protein, 328 aa, unidentified
MFFIGIDVSKAKLDCSLLLDVASNKRRAKVVANSKTGIVDLLAWCTKQQVPIHELHAIMEGTGVYHEQAALALSDAGATVSIVNPAQVKDFGRSLGVRTKTDGVDSFVLARYGALLKPKSWTPPAQEARTLQALLSRREAIAQDLQRERNRLEKADAIDTPPPIRQSINDSIDFLEKQLAKLQQDIDNHINNHPNLKDDRDLLISIPAVGPQVSNHLLSVMHNHDFQSAEQLAAYLGLVPVERQSGTSVLGRPRLSKAGPARIRAVLYMAAIVATQHNPHLKALYRRLQDRGKSKMSALGAVMRKLAHLCFGVLKTRQPYQADYGIST

SEQ ID NO: 44211 - protein, 346 aa, unidentified
MEHYAGIDVSLEFSSVCVVDAQGKIVRETKVASEPEALVAFFASLGFAMKRIGLEAGPLSQWLHAGLKRAGFDILLLETRHVKAALSAMMVKTDRKDARGLAQLIRMGWFRLVHAKSMCSREVRALLVARKQLLGRLIDVELSIRGILRGFGLKVGVVTRKSFEGRIRELVTGHITLERIAGAMLSARATLKLEYEKLHKIVLAIVREDAVCRRLMTVPSVGPLVAITYKSAMDDPNRIAKSKAAGALFGLTPKKYQSGEKDVTGGITRTGDEMVRTALYEAANVLLARITRFSKLKRWGMDVAKRRGSKRAKVALARKIAVILHRIWVDGTTYRWTDARLTAPQV

SEQ ID NO: 44212 - protein, 368 aa, unidentified
MGHKSSKLYVGMDVHKESIDLAVAEEGGELRHHGQIGGDMNALWRAVRKLESSGRELVFVYEAGPCGFGIYRGLTGRGHACWVVAPSNTPRRVRDRIKTDRRDSLKLAGLARAGELTPIYVPDVRDEAMRDLVRSREDAVVMQRQARQRLAALLLRNDVRYAGKTAWTAAHRCWIADLRLPQSAQRLAFEEYVQAVEEASARVQRLSQCLEQELAHWRWRSVVAALQACRGIQLIHAVRIVAELGDLSRFSHPRRLMAYLGLIPSEDSSGEHRQQGAITKAGNSSARRALVEAAWAYQYTAKVSALIARRQADVPKVVLDIAWKAQLRLCARFRRLAARGVNRNKIVVAIARELAGFVWAIAQQVKPV

SEQ ID NO: 44213 - protein, 431 aa, unidentified
MGSEERNGCGYYVGLDWGNGEHRVCVEDGEGKVLRERGFPAVPEGVYELCGWLEKVCGVKASSICVGIETPHGPVVETLLEAGFAVYSINPRQADRFRDRFSMSGAKDDRRDAKVLADSLRTDMSCYVKLEPDNEAVIKIRELSRLVSELTRERTRYSNRLRSHLSRYYPQALGLTSDVSASWFLELLKIAPTPMAGKHVRKHRVAKILREYHVRKLDSAQVKKILRRPGYNLVAGTVEACKLHVNLIVQQLELVNSQLKATTKELDNALKVLPNLRERSEEDDDDVDSKEQRSDVEILFSLPGIGHLVLATLLGEASKLLASKKGYQILRSLSGISPVTRSSGKKRVVAMRRACNHRLRFAVYHWAFIAVQTDAYSKAHYADLRKKGHNHARALRGVADRLLRVAYVMLQNRTLYDPSKRQYPKKQKEAA

SEQ ID NO: 44214 - protein, 401 aa, unidentified
MRVGIDAHKMKCTTVMFDGDSVTGSFDFQTTRQGVYEFMEKVPEGSIAVIESSTTGKVLSRMLSGKYEVHMVAPPERKVSIKTDRRDAERIVMEDMLNYLRRCYIPSQYIENIRFVVTQQIQIGRRIARVKNQVHALLEMNMIQHELDDITDIFGVKGLKKLSKIQLPRHDMIALARYLEELKMYVSHHRQLDTEIARIAASDNDVQLLMTIPGINCFTAVAIKSRIGEVSRFATKKHLCSYAGVVPKANNSGEYISEHNHVKQGDIVLKYALTCAVRGAILANKNSSIKLFYRKISKKGVSPQKAQIAAARKMACIVWKVLSSKQPYTEQDDHMTKRKMKIMSSKAMRIMPTSVMPSKVSELVRNLVDNIDVLGKYPEDSDYIIGKDLSNRNRLKEDILR

SEQ ID NO: 44215 - protein, 316 aa, unidentified
MQSALFIGVDVAKDNVVVACSQATFAARTVPNKPTALKAFLRTLPAQSSIAMEATGSYHQSLADLAHQLGLRVYVLNPRDLHHYARGVGMRAKTDRVDAALIARFLSNEAARLRPYQPATAEQRQVDQLLRRRAKIVSLRTALQLACAEALSIRTETASLLKGFAALLKKIDRQLATLQQAMPERAQQLERLQSIPGVGPLTACWLANLFERIKFRNSDALVAFAGMDPRPCDSGQKRGKRRLSKRGPAEGRRLLFNAAMAAARCAVWKETYTRCRQQGWASTQAIMILARKILRIALAVHKTQTSFDPEFIGKRA

SEQ ID NO: 44216 - protein, 345 aa, unidentified
MSELYSGRQFVGIDLHRRRSVIVRMTADGDPLECIRISNDVEMLSTVMARAGESPEVVLEATYGWYWAVDALQDLGAQVHLAHPLGVKAFEYRRVKNDERDARDLADLLRMGRLPEAWIAPPATRELRELVRHRAKLVGIRSNCKAQIHAVLAKCGIQVSMTDLFGLAGTELLDRLELPRPYAARIASLRRIIGALDFEIDAFAGQVRGRLARDPGFLAVQAIPGVGPILGAVFVAEVGDVHRFARAEELTCWAGLTPKHHESDTHVHRGHITKQGSRLVRWAAIESVQILPKHTLVGRIRDRVGDRRGRNIGVVAAARRQLEFVFYALRDHRVRALQGTRPVAA

SEQ ID NO: 44217 - protein, 401 aa, unidentified
MRTSQKTPEAISTIGIDVGKNTFHLVGLDKRGAIVLRQKVTRHQLGRRFSNIPRCLIGMEACSGTHFIARQITALGHDVRLIPAQYVKPFLKGHKNDYRDAEAIAEAVQRPTMQFVSIKTPEQMDLLALHRVRSRLVRQRTGVANQIRGFLLERGITVRQGLMPLRKALPEILSAKSDALSPRMTSLISELIQDWRRLDERIAAVSVEIEALAKQDAGCQRLMSIPGVGPIISSAVVAAIGNGAGFKQGRDFAAWLGLIPKQESTGDRTILGKISKRGNKYVRTLFVQAAHVVLERQATHSKAGSVALDRAGLEAASAQHAGNRARQQACAHRLGGPRTRSLLSAEDHHQCLTPARSGPPRGCPPPLSATIAHHVGRASDGGSEGMASPDLSDIKIGLKTD

SEQ ID NO: 44218 - protein, 316 aa, unidentified
MEVVHARCAGLDVHKKTVVACVLRSGPGGVVERQARTFSTMLGALEVLAAWLTEAGVTHVVLEATGVYWKPVYNVLEGEGRWTVLVVNPEHVKAISGRKTDRADAERLAFLVRHDLLQGSFIPARAQRELRELTRARTALIRERARAVQRLEQVLEGANIKLAAVVSDLLGVSGQKMLAAALQGVTDPDELAGLAHPRLQPKRDLLVEALRGQLSRPLRFLVQQHLDHWRELDLRISAFDTEIAEQLRPFEELLTRLDAIPGVGQRTAEVIVTEVGTDVDTFPSARHLAAWAGVSPGNRQSAGGGGRPAPATATPG

SEQ ID NO: 44219 - protein, 335 aa, unidentified
MALLRLLERWRAEAMKGGRTIGRIALAFEAGRDGFWLARWLRARGIEVHVIHSTSVAVSREHRRAKTDRLDTAMLMRVFLGWLRGERGHCGMVAIPTLEEEDARRPSRERETLVGERTRTVNRMKSVLARLGIRGFKPELRKAPQRIESLRTPEDMPIPPNMLDEIRRDMARLTVIREQINAIEQARIVRLEQAPAAGPHAMVRLLACVIGIGVETADMLVHEVLSRRLRDRRAVARYGGLTGSPDESGSKRREKGLAKAGNARVRRGLIQLAWRFLRFQKDSALAQWYRARTEGAKGARKTKMIVALARKLLIALWRMVTTGEIPEGVVLRQAA

SEQ ID NO: 44220 - protein, 320 aa, unidentified
MKHKVGKDNTLARFIGIDVSKQWLDVATLPERETRRFSNDGAGQEQLGAWLIQLAPELIVMEATGGFETRVATALAAEGLALAVVNPRHVRDFARAFGILAKTDRIDASVLAAFAEKVHPPVRPLPDEDRRELIDLVDRRRQLVTMRAEEKTRLSQATASARQDIKEHIEWLDERLRRLDIDLTAKLRSSSLWKAKEEILISVPGVGRVTVLTLLARLPELGALNRRAIAALTGVAPFARDSGQHRGRRMIWGGRADVRSVLYMAAVTAARINPVIKSFYLRLKQAGKPAKVALTACMRKLLTILNTMLRNNQSWHAPTT

SEQ ID NO: 44221 - protein, 329 aa, unidentified
MKVQQIIGVDLSKKSIDLVYALNNNHVKIDNSMIGFTQMLDWVGQQKIDLTKTLFVMEHTGLYSYCFEDFLRQYHIAFTKVNALSIKRSMGLVRGKNDKIDASRIAAYGSEKRNKLSINEPGNPQVKRLQMLNSTRRRLVKQRAGLICAIKEYKHIGILDKDILIRSQLTMRDGFDRQIQLLEAEIKAIIEKEESIKQNFNLLQSIKGVGKVVATAAIIKTNNFTRFNNARKFSCFCGTAPFEHSSGTSIRGKTRVSHLADKEMKTLLDLAAKSAIQYDKELREYYLKRTYSGKSKMSTINIIRNKILYRMFAVIKRQTPFIENYLQVA

SEQ ID NO: 44222 - protein, 365 aa, unidentified
MAENHVQFQSFVGVDLHKCTVSLAAVDPVGEPIARLKTSTKNVQRIDAFLDALPWPVHMAVETVGFVEWFIDRFRPRVARFDLAHATELANRRGKRRKTDRHDAEDIAVRLARGDCPLAWIADEPIVQLRKLGRHWRTLSRTLSRTKHGVRSMLDAANLKGPALHGAAMHKWLLAHGALLKDAQRRNFADLLDVVLLLERMRERLKIEIVFANREPRFAAMMDVLKSTPGIDEIWAVIIASEVGDFTRFPNADALEVYAGLNPDNLESAGRTQPGHITKAGSAALRWALGHAALCLCRSDARQEAIRQRLIKRRGKPIANVAMARRLLRTLYAMMRDGAVYQRGESTDHTAKANDARRRKKGRAA

SEQ ID NO: 44223 - protein, 422 aa, unidentified
MSCLPALPGVCPHPTHVRRDTTILAESTLLIAGADTHLDTVHVAAISLIGTAVGDREFPATCAGYTAAIRFLASLGQVERIGVEGTASYGAGLTRALIAAGIEVVEVTRAVKSTRRLKGKSDPLDAYSAARTALAGEGLAIPKDETTSGLRALHIARRSAVKHRTAVINQLKAMLVSAPDAVREKYRGLTTLKMIEAVARCRPDTLADPWAQSVLVAAKLLAQRVQFLESQAEILQTQIDALVAEANPGLRAAYGVGPDTAAQLLITAGANPHRLHSEAAFAALCGVAPVPASSGKTHRHRLSRGGDRAANNALHRIALVRMSCHQPTKDYVQRQLIKGHTRMEILRKLKRAIAREIFKLLTRQIAVPDYGDLRPSRQAKNITVTAAANHFGIWPTVISRIERGLQRDDAFAATYRTWLIAA

SEQ ID NO: 44224 - protein, 404 aa, unidentified
MQVVYERCCGLDVHKDTVVACVLTPEGKSLRTFGTMTRDLMQLADWLVERGVTHVAMESTGVYWKAPYNLLESFEFTLLVVNARHMKAVPGRKTDMKDAEWIADLLKHGLLKASYIPSKEQRELRELVRYRRTLIRERSTVVNRIQKVLEGANIKLSSVVSDVLGRSGRAMIEALVAGEEDPETLAGLSKGRLRAERSTLEEALRGQVGQHQRLVLDSLLRHVDFLDKEIARMDEDVSSRLGSSEGVIGRLDEIPGIGRRTAEDILAEIGLDMSRFPTSAHLASWARVCPGNNESAGKRRDSSTGSGNTWLQQALVEAAWAASRTKKSYFSTLFHRLAGRRGAKRAIVAVAHAILVVIYHMIHKGTTYSDLGANYFDERNRQSVVNRAVRRIETLGYKVTLGVA

SEQ ID NO: 44225 - protein, 520 aa, unidentified
MPIPTTHVSSEERLGESFLHGTTAAVENLMLNEYGIGVDCHSKFYQIVVLVNKDNVHRHDYTIPAEFAAITQAKDTITNLLGTYGILVNELRYTCESTGPYHMPLLLAWGGSPSVVNPLLAGPTRRKTDVLDAYLPARQAITNMWPESYIAPHNIRILRNLEALRRYYTRRRTRLTNRILNIATQYGHCITALGSTRKGPARLALENLAAGLPEKHPALNPAGFPDAIKPLITTIYAEVDTATNGIKAATTNVRAYLANTTFPVTQGDSSTAIGGKALIALLCTVPGIGEITAWTWLAHVGDPGRFQTKRQVAAFCGMDPSLKVSAGKVTSHSRRKGNAILHRALIQAAMTLLNHASEPFGQWGKRIATKHKKGGYRKAVGAVGRRLAEACWHVHRTLSEFTYKKFAIARPLPVTELPLSECALSPRTLRLLSALSITTTRQLSAAYATTLASEAGIGPKTLEEVDLCLKHHQTQRNSPHAPGKKPTVFDWPESSPAALDEHSMNAHDTVTTSKPHEAAS

SEQ ID NO: 44226 - protein, 366 aa, unidentified
MKKTSTVQANGNMIFKGHKLTIGVDLGDRWSCYCVLDEAGKILLEQKLATTAEAMKQTFAKIPRSVIALETGTHSPWVSRLLTELGHQVIVAHAQKVQLITKSTRKDDRHDARTLARLARIDPELLGPVRHRSAQAQIHLTVIRARAELVRARTALVNTARGLVKSYGLRLPRCGTEQVSQELAAGLCTELREVLEPLLKEVESLNERIQEYDARIEKIAKESYPHVALLKQVKGVGTQIALTYVLTLEDPHRFRKSRDVGCFLGLRPGRRNSGQSEPQKHIRKEGDRYLRTMLVQGAHYILGPFGEDSDLRRWGLKLAERGGKNAKKRAVVAVGRKLAVLLHRLWVNGEVYEPLHNSHKEMRAVA

SEQ ID NO: 44227 - protein, 347 aa, unidentified
MDHMGIDLHKRESQICILTEAGELIERRIRTDPHRFAEVLGERAPARILLEASTESEWVARCLEGLGHDVVVADPNFAPMYATRTRKVKTDRRDARALAEACRLGAYRPAHRLSDAQRHVRARLTVREALVRTRTRYISVIRALLRQHGWLVPSGSAEGFPQRVLALPLPGRLRSEVAPLLAVMRHLRPPLAYSDERIAAVTATDERVRRLQSVPNIGPVTAAAFVAAIDEASRFHRAHEVEAYLGLVPRELSSGETQRRGRITKAGSTRVRWLLIQAAVSMLRLRDPRTATLREWAGRLAARRGKGIAVDALARRLAGILFALLRDGTVYEPRRRHACHVTQAVPA

SEQ ID NO: 44228 - protein, 338 aa, unidentified
MEIEMLGIDLAKNVFQLHGIDRRGRAIYKRRVFRDQLLSVVGDIPKCTVAIEACTGAFYWARQFETLGHRVTIISPQYVKPFVRRQKNDGNDAEAIVTAARQPHIPRVPKKTIEQQDIQAVHRARQRMVNHRTAVVSQIRGLLLDRGFAFAKSITRARRTIPVLLSDMTNELTAMARETIAELWDLMCDLDRRVAAIDKKIDAVFKADPTCQRIARIKGVGPKTATAMVAAVGDGAEFKNGRHLAAWLGLVPRQHSSGDKRVMMGISKRGSQHLRSLLVHGARAVVRTAPNKHDRQNQWVNDLRERRGFNRATVAVANKTARIIWAVLRTGEPYRTAA

SEQ ID NO: 44229 - protein, 334 aa, unidentified
MKKRYFMGIDVAKATLDFCLLSNNGSCLWKGQLSNNGQGIEQFLTQLQARSWKLSQIHFGLEATGVYGKGLVGALHQAGLRVSVLNPAQVKFFALSVLRRTKNDTLDAWVIARFCQERKPLGTRPLRPLEQQLKLLVHERESRVAEQTRERLRAKKDPYHIELPQLIGQQRQGRLAQLKTEIRQLEAATFGLIETDQTLSRQSKLLCSIPGIAQLTAAKLLAELAGKEFQSARQLAAYAGLTPAECRSGGTRYGQTHLCKIGNAFLRKALYLPAAVARRWCRPLKPWIIMLQRRKLHDLAIRGAIMRKLLHIAFGILRHQQPFNPTLAFVPKTV

SEQ ID NO: 44230 - protein, 353 aa, unidentified
MVGQVRALVDGVDEFIGIDHHKRRSQVMIKDRRGRVVKRGNIPTDKESLRRFLGDRDGRVRRSVFEAGARYRPMYRWLSELTDDVVLANPGRVKVISETAYKDDKIDAEKLTDLLMLGMVPEAYPCSDQAWDRRQWLRQRAALVKMQTSVKNRIHALVDQHPDAPPARPQATDLFGKQGMMWLGELEIPKADRLRLDQLLEVYGFLHRQVKRSDTAVRKAVKSDERCGWLKTVPGIGDFFALLIVAEIDDVGRFVKSKHFVSYTGLVPGRDRSDLVDHPKHIHKRGSKWLRWALVEAAIPATRSNLALKRLYDRVCRKRGPKAGPNVAKVAVARKLAEIVYRLLKERRPYEER

SEQ ID NO: 44231 - protein, 343 aa, unidentified
MQITTIGIDVAKSVFQVHGVDATGKVVISRQLRRGQLIEFFRKLPPCLVGIEACATAHHWARELMKLGHTVRLMPASYVKAYVKRSKNDAADAAAICEAVTRPSMRFVPVKTVEQQAALMLHRARDLLVRQRTQLINALRAHLAEIGLVAATGVDGIKALVAIVIDGANRQRLPEPMRQALQPLVAQLIALGEQIGGLERSIHAQHRASHESQRLESVPGIGVIGATAIAATVTDPHAFKSGRDLAAWIGLVPRQHSTGGKQRLGGISKQGDRYLRRLLIVGAMAVIRQARTHPEKHAWLTKLLAKKPAKVVAVALANKMARIAWAILVKGGTYRAPMLLAPA

SEQ ID NO: 44232 - protein, 335 aa, unidentified
MNNPFYVLGIDIGKDSFTASLYHVPTNTHQVFSGSMRSASRRILQWLLKQGVDARQTILALEATGVYGERLCYELATNGCTLYVLHPTDVRRSMRHPERKSDPDDSRHIATLIAERYRQLTVWAPKLEVVDRIKTLLAERRQIVTMMVQTKNALHAAALKQHRVAELEARDRERLAFLKTQRTAIEQQIDALATSDPQVHEANTMLRSTPQVGRLLAACLIVATNAGLGPYDSRKIASSLGIAPQPYQSGHMELRRRSSGHGDPEFRRMLHMAARSGANHNECYRAYRRKKLEEHKPPMLSYNNISNRILHTACAVLRSQKPYDPQFRHSTERDG

SEQ ID NO: 44233 - protein, 354 aa, unidentified
MNTTQVFEKRKIAVAIGIDLAKDHCDVVAYNADNKICFTKANWAYPHLMEWLANAQPAVVLMESCKGCHVRARDIADLGHDTRLVKGADVKALRNVCQKNAIRDADYIARLLYVPGTKFVFVKNQRQQSLQFLQNEYKSIQELRIQVGNQIHAGLEESGCPGPKSKKFIQSRMMAHLEKNAELIPDEVMSSFLRRREMWLNLFEQEEEAKKRMEEITKTDDDAQRIMTVPGGGAQTAVGMLVHIGGDIGRFKNSGQFAASIGLVPKQNSTGGNTTLNGITKCGPKRLRANLVQCGQVILMHADKLKGNFGDWVRKLRDSGKKRGVIVCAIAAKIARIVYRLMKDKVDYTPVPSR

SEQ ID NO: 44234 - protein, 338 aa, unidentified
MTIVMGLDQHRAQITAEWLDTSTGELSRTRIAPADRAGVRAFAARFRGEELEVALEATTGWRFVVEELQATGAGVHLAEPAETAARRGTKKRAKSDRADARHLRELLMVGRLPESWIPPEHLLELRARVRLRHTLVDQRREWQQRMQAVLYHQGVPPRSWLMSAESRAWLAGLALPAAAREQITIALAMIDAHDAQLAPLDQELRDYARRQPGCRALMRHYGIGPLTSITILAELGDARRFSSSREAVRYAGLDITVHQSDARRAPGRLSRQGPPALRWALFEAAQCARRPGSPDHHYYLEAAARLGGNRACLAVARKLLKRSYHTLRELGEEALQPA

SEQ ID NO: 44235 - protein, 348 aa, unidentified
MTLYTTSHKYYCGIDLHTKVMYVSIMDHNGTELLHKNMPSTAEHLTRAIAPFREDIVIGCECIFTWYWLSDFCSSHNIPFVLGHALAMSAIHKSKHKNDSADSRTICNLLRTKYLPIGYDYPQRMRATRDLMRRRMEIMHMRSDILSHTQTLSYIYHGERLKKKLRVQSYRESLDNHFSDPIAQLSLDVDRLLIAQYDKTLALLEDEITRQANDHDPQSIKLLRSIPGIGKILSLVILYEMNTVHRFPTVQKFISYSRLITPRHESDGKKIGNGNKKIGNRYLRWAFGELAVLTLRFNEQARHAHKRLVEKKGKQKALSMLAAHLGRTVYFILKTETPFSQERFMKTP

SEQ ID NO: 44236 - protein, 351 aa, unidentified
MKILAMDLAKSNTVICFYDSGCGRHTFGKVKTTPQQIHDLLVEHSPDRVVFEICSSAGWIYDICTALGLDAQVANPNTAAWRWKNLKNKNDRKDALKLAQLSAMEQLPTVHIPGVDVRQKRCLIQYRQTLVARVTQIKNNIRSILDKQGYTMSSGKSGWTKKSLELLNQMVSPLAECEVDNLWRGQLYVELEMLESTQKSLSEVTVKLDKLAESDCRIKLLQTAAGVGPRLSEAIVAYLDEPRRFSSGKQVGSYAGLTPRQYQSGSMNRQGKISGQGNKLLRSLLVEVSWLGLRYNRWMQQTYQRILRGSPSRKKIAITAVARKLLVRCWAMLRDGTAWRDEPAKVSNVAA

SEQ ID NO: 44237 - protein, 354 aa, unidentified
MQYIAFDSHKRYTYAVVEEKEKGRVMEKRIEHRRGEIGAFLSQCEVGSPVALETIGSWYWIVDEIEAAGMLPRLVNARKAKMMIASSKKTDRLDAKGLNTLQRTGTLPTVWIPSSELRDIRELYRTRMVLTQMVIRLKNRILSCFSKYGISFDETSDAFNIKGRASLEAALEILPTQTCFALKELLRQLDLLQEAVKEFEARMLQVQSNDPEIKLLQTIPGVGPILSYVIAYETGDIHRFPSASCFASYAGTTPSVHASGGKVRYGHTASDVNHYLHWAFIEAANVISMRHEVLRFRHTARLYERLRQAKGHDIAVGAVARHLAEATYWILTTKTAYREPNQNKQVVVVSSKEG

SEQ ID NO: 44238 - protein, 459 aa, unidentified
MRRLIDRCAGIDVGQALLVVCVRVVDGKGKLSQETRSFGATTPDLLQLRDWLAASEVTHVAMESTGVYWKAPYYMLEDEFEVLLVNATHLKHVPGRKTDVIDAQWIAEVLSYGLLRPSFVPPRPFRELRDLTRYRKSLIRARTSEINRLHKVLEDAGVKLATVATDVMGVSGREMMRALIDGVADPQVLAELAKARLRAKLPQLRKALTSRFGQHHAFLLARMLAHVEALEADIDVLSQRIAELCEPWAGHLAILDSITGVGPRAAEVILAEIGPDMTRFPTAGHLASWAGRCPGQRESAGRRGPAKPRKGSPWLADVLTECAWAAVKTKDTYLSAYYRQIMRRQGKPKAVMALTHKILVIAWHLLSNGVLYDDPGRPPCAETTTSNNAAGRSANSKRSASRSPSNRGGQTRSEEVVRHFRSKGRGRSTSFLGVELLLRVCGRAGVGVGVRDRPVGPTA

SEQ ID NO: 44239 - protein, 312 aa, unidentified
MGEVYVGIDVSKESLEVAVRPSGEQFSERNDARAVTRLVKRLLPLNCERIVIEATGGYQNVVVGALRVAELPVVVINPRRVREFARSTGALAKTDRIDAQMLARFGEQLKPPLRELPDQQTQALRALWVRREQLIEMLGMERNRLEQAPTALRRELKGHIDYLEKRIKHTDDELDRAVRNSPLWDKYQLLKSVPGVGPVTASALLADLPELGRVNRAEAAALVGAAPFNRDSGTLRGKRMIEGGRQRLRRVLFVATVASVRCNPALKAFYLRLRAHGKPPKVALVAAMRKLVTILNAMVKTNTAWSAPCPNI

SEQ ID NO: 44240 - protein, 432 aa, unidentified
MNTHPFDLVIGLDRSDRKADLYLIDPRSGKTEKRVINTSPEALRDWLAQLRQQHPNHRVAVCLEQPAANLILFLEQYSWMTLYAINPVTLQKFREAFVTSRAKDDGKDAQYLAELLLTHHDKLKPWQPDDSQTRQLQQLVLHRRAVIDERTGLTNRLQALLKQYFPQALDLCGEDLWRPLATAFLLKWPTLQRLQKAKPSFIKQFYHLHGSRSQKLIEQRLELIEKAVPLTDETAQLQSHTLRVQLLCRELDLLHKTIAEFDARIAEVFGQHPDKQIFANLPGAGPVLAPRLLASIGSERERFESARNLQRFSGIAPVTKQSGGKCYIHRRYCCPKFFKQSFHEYAKESILHSRWAAAHYWQQRQKGCGHHTAVRSLAYKWQRIIWRCWQSRTIYQEELYEAALKKSGSPLVALLDKVEIGKSPVNTMPKKS

SEQ ID NO: 44241 - protein, 343 aa, unidentified
MQTITTIGLDLAKSVFQVHGVDAGGQVIVRRQLKRRYVLTFFQKLSPCLVGIEACGSAHHWSRELQALGHTVRLMPPAYVKPYVKRQKNDATDAEAICEAVTRANMRFVPTKTSGQQSGLLLHRARHLFIRQQTSVINAIRAHLAEFGIVAPVGRHGVEELLNVVADSNDKRVPEIARACLSAFGAQLRMIKEQILGFDRLIRVWHRSNELSMRLDEAPGVGPVLATALVAAVADPTSFRSGRNFSAWIGLVPKQHSSGGKNRLGNISKQGDRYLRGLFVAGALAVIRYAKIHGTTHRPWLTALLARRPTKVAAIALANKIARMVWAMMARGERYKEPFALAR

SEQ ID NO: 44242 - protein, 364 aa, unidentified
MKILAIDLGKRKSVFCEYQTAGGEAGAIYGKIDTHRQGVEALLIRVRPDRLVIEAGSASGWVADVARELRVPVQVANVNDPRWHWKKVKNKSDRKDGLKMAQMSQLDCLPMVHVPHPRTRQWRSLIEYRAGLVSRRTAVKNSIRAIYDRRGCCLIGGDHVWTKAGLADLQKDARPAAKAAAGELWRVQVYCELRELESVQRDIDEVEEALAGEARERPEVKLLQTAPMVGPRLSETVAAVLDDPHRFANGREVGAYAGLTPRQWDSGQSVHREGQVSRQGHALLRALLVEVSWLGVRSVPWMIKVYEGVRRGSDKRKKVAIVAVARRLLVRLWAMWRDGTPWRDPQPAALADAGGSLAAAEGCS

SEQ ID NO: 44243 - protein, 465 aa, unidentified
MAAVMIGIDPHKASHTAVVISAAEEPLGELRVRACAAQAEQLLAWAAAWPERTWAVEGAAGLGHLLAQQLLSAGERVLDVQPKLGARVRLLAAGDTNKNDPNDARSVAVAALRSPGVREAVPDDHAAVLKIWSKRYRDLGRARTQVVCRLHAVLCELVPGGVAKAITAAAAARLLDSIVPAGAVDAARCELAAAFIEDLRRIDAQLLATRKTLTTAVQAAGTSLTTLFGVGPVIAAAVIGDVKDVSRFPSRDRFAAYNGTAPIEVSSGRRKVCRLSRRGNRRLNHAIHMAAVTQVRHRHSEGRAYYDKKLAEGKTPKEAMRSLKRQVSNAIYARLQADARRAAARAQGPGGQPGNDSCSSAAGLHPAGRLFGQATPGPGHHTTTTAGSPAPGSRAGHSSIAAILPPAKPRVQVERPQRSEDERPGGAARRRPQSATRKAPGQDSLARTQRPKGTSHPAKKANGNP

SEQ ID NO: 44244 - protein, 411 aa, unidentified
MDVIVERAAGLDVHQASIVACVLIGRPGQKPRKEIRHFGTMTADLEALRDWLRELGVTHVGMESTGVYWKPVHTILEGHFTLIVANAHHIKAVPGRKTDVKDAEWIADLVRHGLVRPSFVPPLEIRELRDLVRHRRTLAETLASERNRTLKLLETANIKLSSVATDVFGVSGTAMLRALAEGDMAPEAMAELAKGRLRTKLEPLVKALQGRVSEHHRFLLRLHLRRLDEIERDLAELETRIAERMRPYRRQVGLLKRIPGVDEIGAAEILAETGIDMTVFGNARRLAAWAGVCPGNHESAGRSRKTSTRKGNPHLKAALFRAATCAAKAKGTYYKEKYYRLKARLGAKRAAMAIAHKILLAVFHVLAGDTEFRELGAAHLDQQHKHRVTKGLVRRLDALGYEVILRPKLAA

SEQ ID NO: 44245 - protein, 309 aa, unidentified
MLTAEADKCKTKVVVNTAAGVQALLAWCAKHGAQPAQLHAILEPTGLYHEQAATALPQVRVSLVNPAQARDFAKALALRSKNDALDSYVLARYGQTLSPALWHPAPLHARQLRALLTRREALSKDLLRELNRKEKSQFSPSAPLGDGSIDKAIAFLREQIKQIERAIDQHIDNHPDLKQDCELLNSIPAIGPQAGNAILAVMHNRHIDSAQSLAAYLGVVPVQRQSGSSLNSCAHLSKAGPSQVRATLYMAALVGTRHNPHIRALYQRLLKAGKSKKAALGAAMRKLVHLCFGVLKNRIPYQPNYAMNG

SEQ ID NO: 44246 - protein, 343 aa, unidentified
MEHYVGLDVSLKQTSICVVNQAGSVLREGVVDSDPDAIGAFVRSNAPGVVRIGLETGPTATWLWTELKRLGLPVICIDARHAKAVLKMQINKSDRNDAAGIARIMQTGWFKEVRVKDIDSHSVRALLASRALLVKIKRDLENQIRGLLKNVGLVIGRAKFNVFAVRAEELIEDRPELIAVVRPLLEARKAIEQQVDDLDRKVLKLARHDLQVRRFMTVPGVGPITALCFKATIDDPTRFKRSRSVGAYVGLTTRRHASGEIDWTGRISKCGDAMLRTYLFEAANVLLTRVPKWSALKAWGIRLAKRNGLRKAKVAVARKLAVILHRMWIDGTEFNWSTKKAAA

SEQ ID NO: 44247 - protein, 346 aa, unidentified
MQITTIGIDLAKMVFAIHGVDKQGKTVLQKQLKRGAMERFFANLEPCLIGMEACGSAHHWARKLEALGHSVKLMAAQFVKPYVKSNKNDLADAEAICEAVRRPNMRFVARKTVEQQAILSVHRARQGFVKARTAQANQIRGLLAEFGIVLPQGVSSITRRVPEILEDGENGLPGLLRQLIERLTVNLKEMDRQVKELEQQIQQWHRENEASQRLAKIPGMGPITASAIVATVGDAREFKNGRQLAAWLGLVPRQYSSGGKSTLLGISKGGDIYLRSLLIHGARSVIRYAGPKAAPDSWLRKLLARRHRNVATVALANKNVRVIWALLTSGEEFQPDYSIATQAAVV

SEQ ID NO: 44248 - protein, 465 aa, unidentified
MKKTHKKSQRSKSKKKLVASGGRAVEVRVSGELNRINEHAAGVDIGGERHYVAVPPGSTEHPVREFGVFTKDLYAIADWLRECGVETVAMESTGVYWVPLFEVLEECGFKVKLVDARKVKNVSGRKSDVLDCQWVQQLECYGLLQAAYRPTDEIVVLRSYVRQREMLVKSAATHIQHMQKALQQMNLRLDNVVSDITGQTGMRIIKAILSGERDAQKLGMMRDYRCHATAEEIAQSLIGNYRQEHLFSLKQAVELFEYYQEKIVECEAEMEKYLERLPHVTEEEPPELPFKEKRNLMSFNVQDHAYKLLGVDLFRIRGLNSETVLRIVSEVGVDLSAFPSEKHFASWLCLSPNQRVSGGKVLSSRTNPSSNRAAAAFRQAAVSVERSQSELGAFYRRKRSQKGPASAATATAHKIARLYYSLVKNGTDYQEQGARAYEERERERIVANLKKRARSFGFELVAKGA

SEQ ID NO: 44249 - protein, 400 aa, unidentified
MRAVFGIDVSKACSEVAILVNSEKVHGYTMSNDALGFARLLGDLKTVHKPEIIFEATGVYSRRLQAFLDEHGYAYTRLNPLEAKKQLDSLRVRKTDQIDAEKLAQSQFVLNRKPTYVQEEVYQELRDLSRFYQNLTEDIVRAKNRLHKVLQVTFPEIETVLSKPTGEQYWNLVTAFPYKDFVLDLSKDELLESIRQSTSKRISDKRVAYLAEKLIALANQSYCAVKKTSPMLEEVRYYGKELLRLSEQRQTVLDQMVELAQPLPEYDILLSIPGIAETTATSIIGELGDIRRFQSANQINAFIGIDLRHYESGNFLAKEHITKRGNPYARKILFKCIHNIASASHTSPCHIADFYEKRKRQSQTTSTKPHTIASIHRLIRTMYYLITHNKLYDYTLTQNR

SEQ ID NO: 44250 - protein, 343 aa, unidentified
MEHFAGLDVSVKLTSLCIVDDAGGIIREAKIESDPDALLQVLKSGAYHFKRIGLEAGPLSQWLFSALAEAGLPVICVETRHMRAALKAQINKTDRNDARGMAQMMRAGLYRPVHVKTVRSQKLRMLLTHRKLLQSKAIAIENDLRATLRNFGLKVGMAGAVKFEARIKELVENIPDLAILVEPLLIVRRTLREQFGIVHRRLLAVVRQDEVCRRLMTVPGVGPVVALTYRSTVDVPARFRNSKAVGAVFGLTPSKYQSGEIDRTGAISRCGDEMMRVMLYEAAQSMLYSRKWSWLKAWAMQIARRRGIKKAIVALARRLAVVMHRIWVDGTEFRWTKQEAAAA

SEQ ID NO: 44251 - protein, 346 aa, unidentified
MLYAGLDLSRQRLDVHVLDEEGRTVDVLAVHPDADALRTLANRVLRHGQEVSAVIESMTGSRFVHDQLELAGWDVAIADAVKAKGIAPLAAKTDKIDAHVLAELARRNLVPEIWLPDPRVRAERERARFRLHLVRHRSALKCRIHATLMTFGHNIPVSDLFGTSGRRLLAGLELPEPWAGTLATSLAMVDELEERIDECGRDLARLGADHPYIPLLLTVPGVGPLLAYTIASEIGDIGRFASPKKLAGYTRLCPLVRQSGNRDFRGPLAKNGPKYLRWALVEAATHAARDVRYRERYERNKKRLGRQRGAKVARIDIARQLVEAIWHVLTKNEPFAPASPAILLVA

SEQ ID NO: 44252 - protein, 297 aa, unidentified
MKGAVHMQITTIGLDIAKNVFQVHGIDAAEKVVVRKQLRRGQVMAFFEALAPCLIGMEACATSHHWARELTKLGHEVRLMPAKDVKAYVKRNKNDAADAEAICEAVRRPTMRFARIKSVEQQGQLLLHRARDLLMRQRTQLINALRAHLAEFGITAAQGREGIKELLAIVAQDEGSRLPVDARISLTVLAAQLQAVQTMIGSIEKRIVAQHRSNEASKRLETIPSIGVVGATTITAVVTDPKAFRSGRDFAAWIGIVPRPDSTGGKPKLGPISKQGDQYLRRISDCRSCVYRKAYPS

SEQ ID NO: 44253 - protein, 305 aa, unidentified
MDVSSEKLDARIGHDGPSMSVECSEEGVSALGAFCKNHGVELVVMEATGGYEKLPFALLWGQGLPCAIVNPRAVRNFAKGMGFLEKTDRIDAGIIAWFGETKRLVAQEPASDAQERLRALVTRLRQLTELRTAQTNQRRLVTEAEVRVSIDELVALINRQIRSCEKAIVGLLDSDPLWRVLDKTFRSVKGVAGRTVARLMAELPEIGTIPNKAITKLAGLAPIANDSGKRKGKRPVRGGRTHVRSILFTVAEVVRRYVPEFAALHRRLNEAGKLKKVVRVALARKLLVWLNAKARDARKEFACAT

SEQ ID NO: 44254 - protein, 341 aa, unidentified
MTVIIGIDPHKATHMAVAIDSTENAIGRLEVPADRAQTQRLLAWAAPLGEERTWAIESAGGLGKLLSQDLVAAGEHVVDVPPTLAARVRLLGATKASKNDGNDALSTAIAGLRHCGLRAVRSDDHTTVLRLLVRRYDDLTSLRTQAACRLHAVLRELIAGGAARRLSADRAAKLLRGVRPDGPVGLERRRLAAELLADMRRLDRELVAIKTRIADAVTESHTTLLELHGVGPIVAGLILAHVGDPARFATPARFASYNGTAPIEASSGPRKRHRLNPRGNRNLNHAMHLIAVTQIRHETPGRVYYDRKLAEGKTKKEALRALKRRISDAVWHQLQIDIAAR

SEQ ID NO: 44255 - protein, 343 aa, unidentified
MDYFAGLDVSVKETSVCIVDDAGKIVREAKVASEPEALLQVLTNTLYRFKRVGLEAGPLSQWLYSVLAEAGLPVICVETRHMRAILKAQINKTDRNDARGLAQMMRVGLYRPVHVKTLRSQKLRVLLTHRKLLQSKAIAIENDLRATLRNFGLKVGMVGTVKFEARIRELAESLPDVAVLVEPLLVVRRVLREQVGILHRRLLAIVRDDDVCRRLMTIPGVGPVVALTYRATVDVPARFRNSKAVGAVLGLTPSRYQSGESDRIGRISRCGDEMMRMMLYEAAQSMLVRSAKWSWLKAWAMKIARHRGIKKAIVALARRLAVIMHRIWVDGTEFRWTKEVAAA

SEQ ID NO: 44256 - protein, 318 aa, unidentified
MPESIVIGIDIAKQTFDAALGVSGSIKTFANDDAGFDTLLANLAGQAVDLIVMEATGGLESNLACALQAAGFAVAVINPRQARDFAKAMGYLAKTDRIDAKALAELAQVLACSPERDRFVTVLPTPEQQALQALVARRRQLVAMQVAERQRLSVSHAAARKNIETKIRAIRTQLDEVETELAKHIETHHADLALRLSSVRGIGPTTVATLIAEVPELGQLSRREISALIGLAPFNRDSGQMRGKRAIFGGRGQVRRGLYMAALAAIRFNAVIKQFYDRLVAAGKPKKVAIVACMRKLLTILNAMVRTGKAWDDSLHTA

SEQ ID NO: 44257 - protein, 344 aa, unidentified
MKILALDLGNFKSVACDYEVETTKYEFEGVVSTKQAVRALVQQRRPDRVVIEICPLAGWVCDVVRELGIEIKVASTSEKNWRNAKRKSDRRDALKLAHKSALGELKFVHVPAPQIRQWRALINYRQQLVRRRTKIKNHLRALLVRENLAWPRGKRGWTEEALLKMEEWALPLAEVNAEELWRGELGVELEALKAMALQLRQVEKRLDLIGKANEQVQALQSVPGVGPRLSEALVAQLDDPGRLKNGKEVGPYIGLVPKQWQSGETDRLGHITRQGSGVLRSLLVEASWAGLRYNPWLREIYERVKRGSKARRKIAIIAVARRLLICCWAMLRDGTRWRPLQRAA

SEQ ID NO: 44258 - protein, 343 aa, unidentified
MKMHTLGIDIAKNTYQLHGADPSGKAVMRKRLPRHKLAAFIANLPACTIVMESCGGANYWARVFQRSGHTVKLISPQFVKPFVKTNKNDANDAEAIVEAASRPSMNYVPLKQVEQQDIQSIHRIRTRVVKNRTALINEIRGLCLEYGIVVSPGAARVKSSLCTIIADSTNEFTPSSRESMQDLYEELVEIEARLKKLDTKVRQLCRQNENCKRILKVPGVGALTATAIVAAVPNPKEFRNGRHMSAWLGLVPKQSSSGDKQILLGISKRGDRYLRTLLIHGARSVLSHCKDSDNDYGRWVTRKKATLSHNKAAVALANKNARIIWSMLNTGEEFSYGIQTAAA

SEQ ID NO: 44259 - protein, 350 aa, unidentified
MASTKISYFGKKVYIGTDVHKATYSVTCICEGVVAKKVASVPASPAEFAQSLLHWFKGADIYSAYEAGFSGFNLHRELEKAGIKNIVVNAASIPVSANDRVKTDLRDSKKIAEQLYTNQLKAIYVPSKDEEARRTLTRTREQVVEARATTSRQIKSKLHYHGLMTKDDKRSISNRYLKEIEKLELAAEVQYSFKIFIEQWRFLTSQLIDLRKALQKQADNDKKTEEVYRSVPGIGLITSRTLANELGDLSRFKSAEALYSYTGLTPSEYSSGEKVRRGHISRQGSARVRGLLVEAAWRVIDKDQALKEAFERIAKTRGKKRAIVAIARKLIGRIRACFRTGNTYAVGTYA

SEQ ID NO: 44260 - protein, 355 aa, unidentified
MSSEKYIGLDVHQATISVAVMDSQGKVVMESILETKASTILEFLAGLRGSLFVTFEEGTWAAWLYDLLKPHVTEVLVCNPRKIPLLKQGNKSDRIDARKLAERLRLHDLKPVYHGETGVRMLRELARSYLTVVKDLSRVMNRLKALYRSWAIPCAGRDVYYTRHRSQWLEKIPEAGTRRRAEQLYQQLDLLQHLRQQARRELLAEGRKHTITAKLRRIPALGAIRSVLAVALIQTPHRFRSKRQLWTYSGLGLETRDSGEYHYVHGQVRRRKKQATIRGLNKDYNHDLKGLFKGAATRASVQPGPFQDFYQRSLAKGIKPTMVRLTLARKIAAITLTLWKKGEDFDINKLNSQAA

SEQ ID NO: 44261 - protein, 455 aa, unidentified
MSHVQRAFTIKPSGLPIIHPFAAGIDIGARFHVAAVSPDLCDEPVQTFQAFTSDPERMANWLVATGTRTVVMESTGVYWVAAFEVLESHGLEVILANAREARAVPGRKSDVNDAQWLQRLHACGLLRASFRPGRDIAELRAYLRAREKHTDYAAAHIQHMQKALTFMNIQLHHVIATITGVTGIRIIRAIVAGERNPDTLAAMRDVRCKENLETIRSALVGNYQPEHVFALKQALSLYDFYQRCIDECDVEIERTVAGLNIGKTMPDAPLPKAKHRSKMPSDPKFDVRAALYQLTGTDLTQIHGVGPFLALRFIGECGTDMGRWRSAKHFTSWLTLSPGCKISGGKVLSAHTRKTSSRLTVAIRLAAVTVGRSDTALGAFYRRLAGGIGTAKAVTATARKIAVLFYNAMRYGMDYRDPGADHYEQQYRDRVVKQLHRRAAQFGFALQPQESMASG

SEQ ID NO: 44262 - protein, 415 aa, unidentified
MTEERWYAGVDWASESHLVFLTDGTGRKIGEKYFKHGGDGLAEMAAWLMAASGAACPGQIHAASEVPHGPVVETLLERGFKVHAINPKQMDRFRDRFTVAGAKDDSRDGEAMASALRTDPHCFRLLAPLDPTIIELREWSRMAEDLGTERNRLTNRLRQQLWRYFPAMLELEGDLDGGWFLELWEAMPTPARAARVRETTIGKILKRNRVRRFDAAHVLSVLRKPPMQVAAGTVEAACAHIKVLIARLRLVNGQLKEARRQLDTLTARLIPAEETGPGQAKQHDVEILASSPGVGRTVLATLLAEAWDALPRRDYAALRSLTGVAPVTKKSGKSCFVIRRQACNGRLAAAMYHWAYAAIQHDPKSRAKYDALRKRGHSHGRALRSVADRLLNVACSMLKTGTLFNPSLEAQNAAC

SEQ ID NO: 44263 - protein, 355 aa, unidentified
MGKGIAVFRGRTIGIDLGDRRSSACVLDEGAEVVRRFEVATTEAALRRALESEPASRVVIEVGTHSPWASRVLEERGHEVLVANPRRVRLIAEGHDKSDRVDAETLARLGRADPKLLHPIRHRGAQAQEDRALLTVRDGLVRARVLLVNQARGIAKSLGRRLPRCTTEGFARCLRRAGALGRFPGLEALVEAVEALNVQIRRLEADIEAVSGSRYPETRQLRQVSGVGALTALSFVLTIEDPGRFRRSRAVGPYLGLRPKRRQSGGSDPALRISKQGDAFTRRMLVQAAHYVLGPFGPDTDLRRFGERLIARGGRAAKKKAIVAVARKLAVLLHRLWVTGEIYQPLGASVLAPAA

SEQ ID NO: 44264 - protein, 320 aa, unidentified
MEQIKSIKEDCLLEAPLIFVGIDVSKAQLDVAIRPSAQSLSVTNDRAGIKSLIKHLKKLRPQLVVLEATGGLERQVLSALIAGEIPVVMANPRHIRDFAKSIGQLAKTDRIDASVIAHYAEAVRPKPRPLPDEASLELRALSARRRQVVDMIVAEKNRLATASKVVKKRITAHIAYLEQELNDADQDLDRFIEKNAAWKENQQILCSTPSIGPVSSRTLLVELPELGALDRKKISALVGVAPFPRDSATLKGRRTIWGGRASVRSALFMATVVATRFNPVIRDFYKRLKAKGKPSKVCLVACMHKLLTILNAMIKQNSLV

SEQ ID NO: 44265 - protein, 504 aa, unidentified
MQMDDRPVYYAGIDLALRAKNVVAVLDERGRRLGRPVAFGRTHDEFQAMFQAVTQRVPQGFGLVWGCEATGAAWRLITACLIREKQAVSLENPAAIAALRDVDSRFFKNDRVDARTIGELVCLRVSRGKPLCPPPSPQLQAMRTLTRRIEGMKNELSSAKTRFTAYLCDTLLPSLSPAAHEWSGPTLLRVLDKFADPRDIASKPLARFINSAIKAGGARTSRVALATLHQAATESLRSYGDTGLDYSTYALILRDTILQVNQLQARIVTLQGQLDSLLDKTRTHSQVECGLSVPGVGDDTLNVLMALCGPPGQWPAFKAIKQFAGTVPVLDESGNSRSTPRMSKLGEPILRKVIFQIGNVARRYDAEFAADYYHQMVSKGKGHTAACISAGLKALNALRAVLRDHRPYQPRDPRTGLPITKQESRQLAQANYSVPGAIRTARKKHKRGTDAPAKHTSKETAQAGHAQVKDMPKHSHRRAVNLPCAVPTVTIDHLSPARKALDDR

SEQ ID NO: 44266 - protein, 351 aa, unidentified
MRKIAYLAMDVHAKHCVLGDMDFKGNFKGTQTFPTSEQNIIKALEAVKAKNKYLTLEEGNLTYWAAQVAVPYVTEVIPCDPKENALIYRGSNKSDKVDTRKLCRLLRLGELKRVYHPETDERAIFKAAAQHYMDLRDQQIALKQKIKAMYRHWGVVDVAGEAIYSTAKRDDYFRQIKHRDIRNQVSRLYYVMDQTESMQEKALKAMKQLGRKYPEIKQFQKIPGIGEILAHFFDAFIQTPHRFANKHRLWRYCRLGVTDRTSDGKPLGFKRLDRSGIAEMKSLSYRAWMSALRGDNEVKRFYTTSLQRTFSRVHARLNTQRKIIATMYGMWKRGEPYNPKLFLDSPQSGVV

SEQ ID NO: 44267 - protein, 466 aa, unidentified
MGRMTLGIDVACRAAHQASLADEAGRFAWSGRRFRTSAADLQRLWESLPAGAELTVVMEPTRNAWVPLAAWFRRRGATVIMVPPEQSADLRDYYSKHAKSDHLDSRMLARLPLLHPDGLRAAGGLGPADALRRATKLRASLVKRRNTIVARLDCYLELLGPQWHAAFGGDLALYTPLRFLAAGYADPHALRRLGKARLARFIWRYSHGAWGDEHAHRLLAAAAETLHLWDGELSYPDLAEDIAVEARLALAISGEIRDLERKIAALLHQLDPAAIMTSAPGVGIINGAQILARLGDPARFQSLAGARSFSGLIPSLTASGASGHHGPPTKSGDAPLREALFMAANAARRTDPTLAARYHRLMVTCGKHHNSALCHISTTLLTRIIACWRAGTPYQIRDTDGTPLTAAQGRAIVAQRYRVSQELRAQRRTSHTKTGTNRRHQESPRAPTPARPHPNATTTRQTLDTA

SEQ ID NO: 44268 - protein, 345 aa, unidentified
MKIIGCDLHTRYQQVAMLEQETGELIERRLEHESGEARAFYAALSAPVRVGIEATGHTRWFERMLGELGHELWIGDAAEIRASVVRKQKTDARDAAHLLDLLLSNRFPRIWRPSLEERDLRQLVWHRQKLVWMRNAVGNQLHALAMGEGLCRKQKLFTKKGRVELESLALGPWASYRRQELLRMLDELDRSLQRLDDAVQQQAEQNPEAVRLMTHPGVGPVTSLAFVLTIGPVERFQRSKQVASYLGLNPREHSSGGRQRLGSISKQGNPMMRSLLVEAGHTAARLDAELRQDYQRIKLRRGSGVAKVAIARKLAVRMYWMLRSPANYAQLVRMQGSPRGTLVGQ

SEQ ID NO: 44269 - protein, 412 aa, unidentified
MKVVHEICSGIDVHAKMLVACLIRTNGQKETRTFSTMTDDLLRLRDWLVAARCTHVAIESTGVYWKPVFNILEDALTVILINPEHAHALRGRKTDVKDAEWLADLLRHGLLKPSFIPPLEIRELRELTRYRESLVREQTAVANRIQKVIESANIKLAQVASDALGVSGRAILWALARGETDPVKLASLAQRKLKEKRSELERALTGRLTTNQRFVLRELLKRWEELEAADGRVTKEIDGYLQDHPKLAQARDNLDTIPGLGPRAAEIILAEVGVEMEANFPSDAHMASWAGICPGNKSTGGKRLSGRTRKGNTYLRAALVQAAWGATMKRNCYLSSQYFRLVKRLGRKKALVAVAHSLLVIIYHVLKNEQSYTELGGDYFDRQHTEQQREYFIHRLQMLGLKVSVEELNQAA

SEQ ID NO: 44270 - protein, 361 aa, unidentified
MAKSTTIVAFDQHAATTVAAVLLPGQRTPALHTLTSDSPTILRFVQRLRATSVQCCYEAGPCGFELQRALTGHDIQCEVIAPALIPRRAGDRVKTDRRDASQLAVLYRAGALTAIHIPSEDEEAARDLLRCREDVRADLLRARHRLSKFLLRHGRRFTATRKAWTKRHAAWLQAQHWPIAALEQTHRAYLRAVDEAVGRLHAVDTELRDLLTIEPLRARVERLRCFRGIDDLTALTIAAELGDARRFPSAPRVMAFTGWVPSEYSSGAKQARGRITKTGNAHLRRVLVESAWHYRHHPFLGRALRLRQQGAPAVIIERAWQAQHRLHRRYRHLAARGKAKQHIVTAVARELSGFLWAALTH

SEQ ID NO: 44271 - protein, 429 aa, unidentified
MQESTSPAPAEGVAAYIGIDWADQKHDVVLRSASEPAKVEHSRIVHELDALMEWLGELQQRFAGKGKVLVALEQSRGALIYHLMGYEFLELYPINPAQLASYRETFSPSGAKDDRPDAELICELLYCHGDRLKAWKPDSEITRKLAFLNEGRRKAVDQRTQLANELKSQLKVYFPLALQVLDNNSSTALAADLLLQWPTLEGLQKQSAHKLRKFFYAHNCRNEQKLLERLELIKTAKPLTRDPAVIEPAALRVQLLAHQLKSLLPYIARYEKQIAELFDAHPDSFLFRDLPGAGTALGPRLLTAFGTDRERFDHPIELSSLIGIAPVRRASGKKTGKKASVHFRHACPKFLRQSFHEFAECSIRYCSWAQGCYQAQRERGQDHHAAVRAAAFKWIRILFACWKQRLPYDPQRYLQTLQTRGSEYANIAP

SEQ ID NO: 44272 - protein, 312 aa, unidentified
MKTKVFVGVDVSKDSLDVAIGAEKDIITFANDQKGVNALVKKLSRIDAELTVFESTGGYELLAASSLAEAGLPVVIVNPRQVRDFAKATGILAKTDAIDARVIAHFAEAVKPEVRQLKDRQTSELTALVTRRRQIIGMIVAERNRLRLANKRNKKDIKDHIRWLKKRLDKIETDISKMIQSSPIWRCKDDILQSVPGIGPVTSASLICDLPELGVLSPKKIAMLAGLAPLNCDSGKFKGRRRIWGGRASVRSGLYMATLAAIRCNPAIKGFYQRLTAAGKCHKVAATACMRKLLIIVNAMLRDQTPWQQNNT

SEQ ID NO: 44273 - protein, 405 aa, unidentified
MVTSIDKYDEVDVFVGLDVGKGEHHAVALDRSGKRLFDRALPNDERRLRVVLDQLASHGTVLLVVDQPATIGALPVAVAQAAGALVGYLPGLAMRRIADLHPGEAKTDARDAAIIAETARTMPHTLRSIQVADEQVAELSMLCGFDDDLAGQIVQVSNRIRGLLTQIHPALERVIGPRLDHPAMLNLLQRYPSPAAMKAAGEARLGNRLLKNAPRKGRVWAAEIMTALSEQTVVVTGTDAAALVLPRLAEQLQALRRQRDEIAAEVEKIVDAHPLQPVLTSMPGVGVRTAARLLTEVTTKTFATAGHLAAYAGLAPVTRRSGTSIRGEHPSRRGNKILKRAMFLSAFAALRDPESRAYYDRKIAQGKRHNQALIALARRRSDVLYAMLRDGTLYQPRPIEPDLAA

SEQ ID NO: 44274 - protein, 371 aa, unidentified
MKSIIYIGMDVHKNTYSLCGINSSTGEVIAQTKCAAEVKNILKFIKSAKERMSEENEVDILTGYEAGCLGFSLYHELAYHDIPCVILAPSTMHGSVKNKKVKNDKMDAFNIATNLMHDSYKAVHVPTDHDNEIKEYIGLREDVIQSRKRIKQQISALVLRRGLRYEGKSNWTVAHIKWLETIELPVIVRETLNEYLKVYDYLNERIEKYDERIEEFSKEEEYKEPVSKISCFKGIDTLSAMKIHVTVSDFQRFPTAKAFMANLGMLPGENSSAEKYSNTPITKMGNAMVRKTLVECTQALVRGTVGKKSKALKKRQKGQEDEIIAYADKAVERLQKRFRRMVLKGKPYNVAIMAAARELAGFIWGMETGRI

SEQ ID NO: 44275 - protein, 343 aa, unidentified
MKLSYVGVDLAKNVFQLHGVDRSGKAVWRRRLRRHQWLGALMEAADPSCVIGMEACTGAHHWARQLQARGYTVRLIPPQFVKPYVKSNKNDANDAEAICEAMTRPHMRFVAVKSVQQQDIQATHRIRAELKDQRNAKTNQIHGLVAEYGLVAPQTLLALRRAIPDWLEDAENGLTDYFRALLHGLWGDLLALDDRIKELDKQIEQLANGNEVTRRLQQLRGVGPMVATALVATVGTGEQYRKGRQMAAALGLTPRQNSSGDKHRLFGISKRGDAYLRTLLIHGARAVVSQAKHRDDRLSRWVTDIAKRSHPNVAAVALANKTARMAWAMLQHGTDYDPALAVS

SEQ ID NO: 44276 - protein, 403 aa, unidentified
MIFVGNDWAEDHHDIHVMDEKGKKLAARRLPEGVGGVSTLHAVIGDHANDPLEVSVGIETDHGLWVTSLIAAGYRVYAINPRAVARYRERHHVGGGKSDAGDAKVLADLVRTDAHNHRVVAGDTDDVQGIKVLARAQQSLVWSRTRETNRLRNALREFYPAALLAFEDLHDRDALAVLGRAPNPHLAAKLTRSQIKAALSAGGRRRNLDPTAERIQAALRTPQLHAPDAVAAAYAVVVSAQAGLITSMNTQLAELEAQLEQSFEQHPDADIILSLPGLSDVLGARVLGEFGDDPERFADAKSRRNYAGTSPITIASGKKRAVVARHARNTRLYDAIDQWAFCSLQASSGARGYYDQRRAAKDTHHQALRALGNRWVAILHGCLKHRHAYDEQTAWGHRQPAAA

SEQ ID NO: 44277 - protein, 394 aa, unidentified
MKHYVGIDNANLTHSVCIIDQSGKVIKNFEISNNDTGYKRLKLNIEKFPNPVIAFELPHGPLIDFLRKLPYKQYSLNPLKVKRFKQTFSVSGNKSDKVDSEAIAQYIKFNEKTSREMLFNSPEIETLKQFGVSHDRLVRDHTRYSNRLLFLFRQYFPLYSGLFSETAPKTLLKMVLKYPIWEKLKNETTESFESFLRSNKYSNPKYVKRLRDKIDSYAHHVMPEVEISMQYEAMAIANILLSIKDQLANIENEMWKIVEVHKDGKILSSLPGAGKVLTSKILGIIGDNRKRFTKANQVQCLFGTAPMNYQSGGYHKVIMRKACNKRAKSILFSFAFSSLRFSPWARAYYDGQRKKGKNHSLAVRALSNKWINIIFAMWKNKQEYVEKINNLVAA

SEQ ID NO: 44278 - protein, 330 aa, unidentified
MKIWNVILGVDVSKLTLDICWAEQNQHIKIENCSKGFDVLKKWCKTHHIDLKETLMVMEFTGGYEYRFIQFCESSSISYYRVSGLEIKNSLGMVRGKSDKADSYRIGRYGEKNSKEISEAKPLNKNILLLKQLLSFRKRLVREKAGLESTVKERKHMYEIKKADLVIRIAEAKIKANTKHLSEIEQAISTMIRSDQSMNQNYKIITSIKGIGKVNAWMTIAYTENFTSFPDGRTYAVFVGVIPFGYSSGTSIKKRTQVSHLAHKELKQELNQAAKTAIIHDKEIATYAERKLQTKEYPLVLNNVKFKLILRMFALVKRGEKFVENYNRVA

SEQ ID NO: 44279 - protein, 385 aa, unidentified
MSSTLIVGIDISSELNAASFIDETGNRLVKKTFFFPNDLDGAQQFLNFTISLAQQYNISSIKFGMEATSHYAWHLHTFLASSLELAPFNPLFYVINLSIIKSFKGAYIHLPKTDSIDAAVIAECVRFGQVKPTPLPDLRYAALQKLTRMRYHIVRSLVREKNRALNLISFKFSTYPSECPFSNIFGKASLAIIENFTPDDIASMPLDDLIDFIVKNGNNRLSDPTQIAKTLKAAANRAYRLHHDLAEANDLALSMTLENIRFLESQLKKLDGEISRQLKAFSQTLTSIPGIGDVLAAGIIAEIGDIKRFNNEAAVAKYAGLIWNKYQSGNFNAQDTSLVKCGDQYLRYYLVEAANCVRVYTVRFKSTTTRSIARYLNTNINVPSS

SEQ ID NO: 44280 - protein, 327 aa, unidentified
MLKVKTNFADQTIYVGLDVHKRSWNAALYLNDQFLRNVHQPPSPCALYKFLHTTYPGARYVCAYEGGKFGYWIQRQLSSKGMECLVVNPADIPSTHKNEVSKNDPRDARAIAMALQCGQLGGIYIPTLQQEADRSLVRQRKKIWRDLVRCKNRIKGFLDYSGIELPEKFSNSNWSRNFLQWLMEIPFEHSSNRTTLNYMIKQAELLRKELLSISNDIRKLMRSKAYKQLYYLLRTITGIGPLTTASLLTEIGDMKRFENFYRLNSFIGLLATEHSSGERQIKGRLTITRHRQLRSDLTECAWTAKRTDPALALYYHEQLKKRERNPN

SEQ ID NO: 44281 - protein, 343 aa, unidentified
MQVSTIGVDLAKNVFQVHGVDSAGKVVITRQLRRKQVIEFFSKIPPCLVGMEACGTAHHWAREVSKLGHTVRLMPPSYVKGYVKRSKNDAADAAAICEAVTRPSMRFVAVKSTDQQALLMLHRTRDLLIRQRTQLINALRAHLAEFGLVAETGREGVAQLAAIITDESNREALPFAMKQALQAIVDQLAALELQIGTLDRAIHAHHRANDMSCRLETVPGIGVIGATAIASTVTDPSNFKSGRDFAAWIGLVPRQHSTGGKERLGGISKQGDRYLRRLLVIGATAVVRHARQHPQKHPWIIRLLAKKPAKLVAVAVANKMARIAWAIMAKGGYYRAPELAAAT

SEQ ID NO: 44282 - protein, 390 aa, unidentified
MFYAGIDVAMDKHDCVVLDSDGNVVFEVFTFENNRDGFKTLKKVLRTCSKNPQKIKVGLEATGHYSDNLLDFLNSIGFAPVLFNPLHTNLFRKSLSLRKTKTDHVDAHIIATMLRTEDLKSYSQPSYHLAELKSLTRYRSVLVSDCSRCKASLTRLSQILFPELKNTVASLHMNSVYALLSELPSADKVATCNLAHLTALLSSASNGHYGRDKAVEIRDAARASIGVKSVVKELELQQTIELIKIYQKQIESVEDEIDKLMHAVDSPITSIPGIANRMAAVILAETNNFQGFERAEQVLAFAGLDPSVYQSGQLTSTHSKMVKRGSKYLRYAIFNATKYVCRWDPTFNAYLAKKRAEGKPYNVAVSHAAKKLTRVMFHLVKSNKVFVPQA

SEQ ID NO: 44283 - protein, 456 aa, unidentified
MRKPQVIPDEDHVVVYERVAAVDVAKASGVVCMRTPDPARPGRCQNQVWHDVTATRARITELGRELLRNKVQMVTLESTSDYWRIWYYVLESIGLAVQLVSASQAKNLKGRPKTDKLDAMWLARLTQWGMLRPSFVPPAAIRALRDFTRARLDLVRERTRCLQRLEKLLEDAMVKITSVASDGLKAKSVVAMVQALIAGERDTAKIADLAKGPLRGKRAQLAEALNGMFDSHHGVIAQALLDQVAFLDQRIARMEDGAIEALAQIPQSWGVDATGETGPQAGKTPDSPVLAAAWRLAEIPGISLMLAIAIIAEIGLDMARFPTADHLVSWIGLCRAASQSGTRQGKGKQKKGNSYARCLAGQAAIGASRTSSFPGERYARVGRRRGGAIAQVAVARSIMIIVWHLLSDPQARYRDLGADWYERRTDKDKKIRNHIRQLEALGLSVTITADPQETAA

SEQ ID NO: 44284 - protein, 399 aa, unidentified
MTRKNTLKSLPTDTEFRVVGLDLAKSDVSVAAIPVDDNTPSLVDRMTYADLLDWAGKISPTLFAMEPCNGYSLLCLQLENLGHEIKVISGSTVSMWINTHLSGQKTDLNDAIALARLAVSDAELTPIRHKSITEIRIQTVQAVRQQLMSQRSKSIVSFKALAQQWGIPCAAGHRNLKKLRESIEAKVDLITRPVANAMLFLLDAVKSLDRQIGQLNQTLQELVMSDERGRLLQSVLGVGTQISARVITVVGNIERFNSPRSLVAYVGVAPRNFITGHKNLTKKKHGNCPDLSHKGQGKISRRGDKLLRSLFIQGAACLYMQFCKDQLPECQLKRWILKQLASQKPYGKLIVSLAAKLIRIVWAVLTYGEKFNIQKAGMTRSMWSEMALETPLNKEVPAE

SEQ ID NO: 44285 - protein, 457 aa, unidentified
MMETKRRREQRSMLPVHPDAAAIDIGATVHVAAVGPARDPEPVRSFGTFTGDLHRLADWFAQCGIKTVVMESTGVYWIPIYEILEQRGFEVRVVNARDAKHVPGRKTDVSDAAWLQRLHEFGLLRGSFRPQGAIAALRAYLRQRERLLDYAAAHIQHMQKALTQMNLQIHHVISDITGATGMRIIRAIVAGERDPDTLASYREIRCHSSAETVRQALIGNYREEHLFTLAQAVELYEVYQAKVATCDEKIEGVLERLKQPGRAPAKPLRPARHKTRQPNAPAFDARGALYAVLGVDLTQIHGLGPYLALKLISECGTDLTAWPSAKHFTSWLSLAPHNKISGGKILSSRTRPSGNRAAALLRLAATTVGRTETALGAFYRRLSARIGKAKAVTATARKIAVLFYNAVRHGMDYADPGASYYEERYRRRVLTNLQRRAKAFGYVLQPTEIKVVPMAVS

SEQ ID NO: 44286 - protein, 341 aa, unidentified
MKVSTLGIDLAKNVFQLHGVDHEGHTILRKKLTRAKFVQFVIQLEPCLIGMEACSSSHYFARLFTRYGHEVKLIPPQYVKPYVKTNKTDAADAEAICEAVTRPNMRFVQIKTEEQQAVLALHTERGILIRERIACANSLRATLAEFGITIAAGQSHLTRELPAILEDGENGLSPFVRTSIYRQSKHIRELEEQVKQVEEALASWYRTQEACQRMAKIPGVGILTATYVVAAVGNARQFSTAKQFASWLGLTPKEHSSGGKQQLGGISKRGDGYFRYLLVHGARALTAWVNRNGAVEENSWLQGLLERKHYNVAVVAMAAKTARIMWSMLSHNTEYQPRQLA

SEQ ID NO: 44287 - protein, 323 aa, unidentified
MNKYNEIFGVDISKDVFDVYGSKSGHNQFKNAASGFMFFLKNLPKKSLVVMEATGYYHYSLAQFLFKQGVLVSVVNPLSVKRFIQMKLTKVKTDKSDAKAICEYGQINQVPLYSALSDVQSECLQLFRLLDSYLKKRTMTKNKLHGEDVLGIPSKHVYRSLKRNRKHLDTEIASIETKLLSLVKQDQQAQLTLLKSIPGLGVKTALFLIVITDGFTKFETAAQLCSYVGITPTIRQSGSSVRGRSSISKVGNKKLRNLLFLCSFSACKHNKSCREIYERIVNKGKSKKLALIAVSNKLLKQAFAIAKSGNPYDETFVSVLMAK

SEQ ID NO: 44288 - protein, 391 aa, unidentified
MSMYFVGIDISKYKHDCCIISAADQKIVSKFTVKNDKTGFEQLLTIFNSLSNPQDIKIGFESTAHYALNLELFLENANHSFMEINPVLIKEYKKSTSLRRTKTDSIDCESIARWLMTVEYKPHSKGFYHAYSLKSLTRLRDRLVRQRSFYLIKITNVLDHTFPEFKPFFHERLSKTALYLLENYGSAEKMARMNSVSYDKLRSISRGKFSPQQFLELKELATNTVGVNNSIFDVELNSLLTLYKSLVKEIGTLENEINKLIEEVHPHYMSVPGIGPISAAVIYSEYGDISNFSNPGQMLAFAGIEPGINDSGTESHGGRMVKRGSSQLRYVLINCCLPLIRFDITFATYYAKKRGEGKPHRVAITHVAKKLVRVIYALERQEVDYNIQKLR

SEQ ID NO: 44289 - protein, 329 aa, unidentified
MQELSTQKCDWILGIDVAKAKFDVALLLPTGKFKSKVFTNDASGFGKLDAWLGKQGVAKMHACMEATGVYWEALAEHLADARHQVSVINPARIKAFGTSQGVRTKTDKVDARLIATFCKRLSPVPWQAPPVALRALRALVLRRQALDKMRTQEYNRRPVAHPAVRDSIDTIIAGVEAQMAEVERKIRELIRHDPDLRKQFKLLESVPALGEKTIALLLSYFSEYQRFDKANQASAFVGLNVQHRQSGTSLNAKPRLSKIGHSAARRALYMPAMVAMSNTAWGKAFAARLRAAGKPPMVIIGALMRKLVHIAYGVLKSGKPFDPSLHGLT

SEQ ID NO: 44290 - protein, 387 aa, unidentified
MPQPNDLSRSLVAFDQNSTIIAVVEMSHSSWLVGGMLPGIERQPRKKLEPSPERLLALLHRWRDEAVRAGRTITRIALAFEAGRDGFWLARWLAARGIEAHVIHASSVAVSREHRRAKTDRLDTELLKRGFLGWLRGERGHCSMARVPTLAEEDAKRPNRERDCLVGERTRIVNRIKSTLVRLGIRNFKPTLRKAAEGLATVHTPEGTPLPPNTLAELQRDMARLGFVISQIREIEEGRQKRLEQQHETGAHDMVRQLARIVGVGVETADLLVHELLSRPMRDRRAVARYAGLTGSPDESGARRREQGLARAGNARVRRSMIQLAWRFLMFQKESALALWYRARTADSRSGTRKTMIVALARKLIIALWRFVTTGEPLEGVVLRPAS

SEQ ID NO: 44291 - protein, 388 aa, unidentified
MQAAVDRPEALSAIRTDLGAIFISLELSRSSWLVTSLSPGSGEKMSKYAVRGSDVAGLLERFAQLKEKARARTGRVFSFVVIQEAGLDGFWIDRVLQNEGVESHVVDPASIATSRRRRRAKTDRIDGETLVRVLLAYKRGEPRVCAMVKAPTPEEEDNRRLCRERKVLTAERVLHVNRIKGLLFCQGISGYEPLRRDRRERLEELQTGDGRPLPQHLKAQVDRELDRLELLLKQIKTVEGERDALLAAAQTAMPAPAAMLLDIKGIGSEFAAVLWSEGLFRHFDNRRQVAAYAGLAPTPWQSGAVDREQGVSKAGNPRLRTTLIQLAWLWLRNQPQSALTIWFHERVRRNAGRLRETTIAALARKLLVALWKYVTTGVVIEGATMKAA

SEQ ID NO: 44292 - protein, 341 aa, unidentified
MHLYFVGLDVHKQVIAYCVKTAAGEIVAEGKIAATRAALDEWVKTLPKPWHGGMEATMFSHWIYHHLKPHAASLKMGHAAKMKAISAGKKKSDKIDARTIADLLRCNLFPSCFVISPELGALRQQMRFRRLVVEETVMFKNKTAGLLMGAGVEYERRRLHGKRYFKELVKDNEWIGQEMRPLLAFNREQIETLQGMDERLIRMLERHPRLQARVKALQVIDGVGPVTGLTWALETGTPERFASIKAAMSYCGLTSALRESAGQQKRGPLSKQRNRHLQSVLIEAAKIAPMLNEQLKEVHRKAQEKGGHRNRATLAVARKLVAYLLAADRAFLAKQREHVAA

SEQ ID NO: 44293 - protein, 371 aa, unidentified
MKKLSTFIGMDVHKNSIQIAIAPEGRDNEIRSYGKIDGTLSALDKVVRKLVSKGNRLHFVYEAGPCGYQIHRHLTEKGLDCMVAAPSRIPKASGDRIKNDRRDAIMLARLHRAGELTAAYVPKLEDEALRDLTRGREDAKSDEKKSKQRLLAFLLRSGFRYTGKTPWSKAHMRWLSGIKMPRPAQQIVLQEYIDALNQCSARVDRLTEQIRQLVPEWRLFPVVKAFQSLRGVSLIVATTTVAELGDLKRFQNPRDLMAYLGLVPSEHSTGDQIKRGPITKAGNGHVRRVLTEAAWAYRYPARVTRALLKRQEGLPEQIREISWKAQLRLCARYRRLWAKGKAKQVIVTAIARELCGFLWAIANETPLPAAD

SEQ ID NO: 44294 - protein, 409 aa, unidentified
MNTGTITAVGIDVSKHKSTVAARRPGGEVVLLPFDVEHTAEGLKKLITKLRELDGEIRIVMEHTGMYWRPIAMTLKEAGFYVSVVNAILIHNFSDNSIRKVKTDRADAMKIANYGLTFWSDLQEYTGEDENRQLLKIQSRLYERTATTAGMLRNGLISLLDQTFPGANKLFRDDSRNSRGHVKWIDFVLRFWHKECVAALSLAAFTDTFQKWCKRTGYKFSASDAERIHAIARNAVATLPKNDSTKLLITQATNSLNAIYDSLQAIRTEMDRLASMLPEYELVMGMEGIGKVTGPQLMAEVGDVRRFSHKGALVAYAGVDASPYQSGSFDSKSRHVSKRGSPHLRRVLFVIMSMTLIRANTANPVFCFMDKKRAEGKHFYVYTVAGSAKFLRIYYAKVKEYLNALEDTA

SEQ ID NO: 44295 - protein, 351 aa, unidentified
MSQKTNAVAVRTIGIDTGKNTFHLIGLDQQGTIVLREKLARGRIGRRLANASPCLIGIEAGMATHYVARELLALGHDVRQVPPAYAKPFRQGHKNDFRDAYAIAEAVLRPSTRCVPVKTDDQLDLQALHRVRSRLVGQRTAVINQIRSFLLERGIAVRQGPRFLRQQLPEILAKRIDVLSPRMIGMIEDLAGDWRRLDERVERVTEEIEQLAHGSESCRQLMTVPGIGPLIASAMVAAIANGAAFAKGRDFAAWLGIVPKQRSTGDRTILGHISKRGNRYLRTLFIQGARVILLRPANWARHSFGPWLTAAAKRLHHNVLATALANKLARIAWTVLAQRRNYETRVVTEAA

SEQ ID NO: 44296 - protein, 367 aa, unidentified
MVKNSTAFVGIDLGDKRSNLYVLDPEGELIEETRIPTTESAFRRKFASLPPCRVAMEAGTHSRWASRLLEQLGHEVLVANPRKLRLIYGDPRKADEADAEHLARLARLDPQLLSPIRHRGPEAQAHLTVIRSRDSLVRARTLLINHVRGSVKSSGARLLACSADSFHHRVEPSIPAELQPALLPIIETIASLTAQIHAYNRQIEQLCQKQYPETQGLRAVGGVGPITSLAYVLTLDDPDRFRKSREVAPALGLVPKRDQSGDRDPQLRITKTGDSYLRRLLVGSAQYILGPFGPDCDLRRWGLKLAQRGGKNANKRAVVAVARKLAVLLHHLWVTGEVYDPFYHSHPDQTSVTQTNLLVPQPEAVCT

SEQ ID NO: 44297 - protein, 354 aa, unidentified
MYVAGIDAHATYLVVGIVSNTGDLVQPPIRIPNARTDTLLELLQRYQPIEGVVETSPAWPWLYELLTGEGIGFVLAHAKRLRAIAESNYKTDEIDAVVLARMRVAGLIPEVYPKPAAQREHALLLRHRTRLVRMRTAVAGRIHAELHSVGLRLARGRLLTQKGRRDLQREALPRLGTEQRRLLETHFALIDHLRPVMGELDARIEDVGHQLPAVQLLRTVPGIGPYRGLLIATEVMPIHRFASPAHLVSYAGLAPRTKKSGLAPVRHGSIPAGVNRWLRGAFVRGALSHVQSAPGSWLTQYYQAQKKRLGWQVARVATARKLARAVHAMLRTGEVWQPRSTTDERGELDAQHVA

SEQ ID NO: 44298 - protein, 369 aa, unidentified
MNHTTSIGLDVRARSIAAAALDPLTGEVVTKTFAYSPGEVASWALGFDSPKAVYESGVTGFHLCRELNALGLECAVGASSKMQRPPADVKRKNDLSDAQFLARLLAMHNVTEVFVPDAETEAARDLVRAHADARADLTRARQRLNLFLMRHGHVFCEKGPTGAPVGSWTKAHWAWIRQISFPDEADEEALAFYIAQVRHMEGQKRELEKFIRAHAREPRWRGRVDALRCLKGIEEITAFALVAEAGVFSRFDSARAFSTWAGLVPSEHSSGPRRRTGGITKTGNSNVRRLLVEASWHYARATAARKPAPSPDVPLRIENHAAKAVKRLVARRREMSARGKRPSVANCATARELACWCWAIGRMAEGADA

SEQ ID NO: 44299 - protein, 350 aa, unidentified
MLIIGCDYHPGFQQIAFVDTETGELQERRLQHREEAEKFYRDLAAQGMKVRVGMEASGHRRWFERLLAELNIELWMGDAAEIHRKRERKQKSDRQDAQHILRLLLKDDFPRIWVPSWENRDLRQLLWHRHRMVQARTRMMNQLQAVALNEGLRCKKKLWWEAGRKQLEAFRLAPWASRRRHDLLELLDRLNPTIAALSQAIEQEVEKCPEAQRLMTHPGVGPLTALAFVLIIERADRFQCGKQIASYLGLVPLEDSSGNRRRLGHITKQGNSLLRFLLVEAAQVTVRSLPEWRSQYVHLTMRRGRKIAKVAMARKLAVRLYWMMRKEWDYEQVKKFGSHAGQPGHRYGVK

SEQ ID NO: 44300 - protein, 355 aa, unidentified
MTFVGLDLHKRYITACAIDEDGTPGGDVRRLSVTLEVVLRFLAELPQPVGVAIEATLYWAWLHDHLVGAGYRVQVAHAFQAKLIWQARSKTDPIDARKLAELLRAKLLPSIWVPDARTRALRQLLRSRAFLVRQRTQVKNRIHGHLTSENQLFGQTDLYGRAGRAWLAQVALSPVLQSEVQRLLRLHDILTTEIQTLDAQVKSAARHHTIAQQLHTIPGVGVFGALFLVAEIGTIERFRSSHELAAYAGLVPSTRSSGGKTTHGSVGHASNRWLKWILIEIVTTLKLAPGPVGQHYRHLVRAKGKSKAATAAARKLCCYIYWMLKEGWSYEEWLQQHGQSRWSEVRPSQLLGTMA

SEQ ID NO: 44301 - protein, 325 aa, unidentified
MRNLTMYCGIDISADSFDICMLQPAGDFAWHQLPNNHKGFKQLLKLCPGQYHFVMETTGVFHLPLCFFLHEKNCAYSVVNALQIKRYIQMNLERNKTDKKDAWHICMYGIERKPVQYQMPEQQYFECRTLNSAIETITSEITAFTNKIYAQKKQKIDTSAVLRSYSQIVKTLKSELKKLKDELQNKLLLWQPNLVKQVRSVKGIGSRATATLIVATQGFKNTHSYQQLISYAGLSPKLYTSGKSIRGKVRISKKGGKQLRHVLYMCALNAKTTNPACKALFDRLVAKGKNKKLAIIAVCNKLLKQVFAVVKSGELYSDNYYKKAA

SEQ ID NO: 44302 - protein, 366 aa, unidentified
MDKRNSKKHSWFIGIDVSRNELDFAVMKAKTILFHREIPNDIQSIKDFIAELKLQVGFTIGKTIFCMENTGFYSNHLLQVLHRLKANIVVENSMHIKSSLGNIRGKNDKIDAMRIAEYTYTHRENLRFWSPRRPVIDQLAELTALRLRLRGLYVGLTTPVKEQQTFVKKKVFKENVQLCTRSVEAVKLDLSDVEEAILKVINEDEELCRLRDIIVSVDYVGPVTATEMLICTNEFKDIKDPKKFACYAGVAPFPKESGKTKVKSRVSHMANKKMKSLLHMCAVQAMRYSPELRPYYLRKVEQEGKAKMAVMNALRYKLILRIFACVNQNRKFEKTYVNSHIKMLKEIESESSASGKEEKETIIDVL

SEQ ID NO: 44303 - protein, 339 aa, unidentified
MNHSVIGLDIAKNLFHIYTIQENGAVFKKMLRRQEMLVFFANYPSSLIGIEACGSSHYWSRELIKLGHDVKLLNARHVKAFVKGNKNDFNDAEAIFDAVSRPNVRTVAVKTVEQQDIQLLHRLRQEATKRRTVLVNQIRGLLSERGIVIAQGTNHVRKRLPELLEDAENALTVLSRAAFSEQYEHLLALDKEIKRYDRQMNQLCHANALSQRLAEVPGIGPLTATIVAADLGEARHYANARHYSASLGIVPRQNSSGGKSALLGISKRGNRYIRTLLIHGARAVLRTCQNKNDKLSLWLQNLMQRRGFNVAAVALANKNARILWALAYKEERYQAAVSA

SEQ ID NO: 44304 - protein, 425 aa, unidentified
MNYKQNEKINQVKESTLVVGIDIGSTTQYARAFDWRGIELGKVLPFSNSREGFESFKAWMQHLQDKYKKLDAIVGIEPTGHYWFDLGAYLEDEGIRLVMVNPYAVKQTKELDDNSQSKNDRKDPKVIAKLVTEGRYSAPYTPDGVYADLRIMVANRKRLIREMTQIKNRFARWFAIYFPEYTDVFGDYEAQSSMLLLKKVCTPEAIVELGAEKINQIWRDARLRAVGMKRATTLCETAKRSIGLKKGSSAARYEMKLLLEDYEYKKAQLDAVMEEIEKLCRKIPESEQMLAIKGIGVITVAGFLAEVGDVRRFESPRQIQKLAGLSLRENSSGKHKGQTTISKRGRSKLRAVLFNAAIPLIAKNPEFKSLHEYYTTRANNPLKKKQSVIAISCKLIRVFYAILANGVTYDSQKLLSDIHRQPQVA

SEQ ID NO: 44305 - protein, 359 aa, unidentified
MQTQSKTLDFDGQNIYVGFDVHLKSWKVTIMTDELILKTFSQPPEPEVLHQYLRKNFPGGVYHSAYEAGFSGYWIHNKLVSLGIHSIVVNPADIPTTNKEKVQKDDKRDSRKIAKSLKNGDLVPIFVPSSKTIEDRCLIRTRGMLVKDLTRNKNRIKSFLYFHGIKFPVSFENSKTHWSKRFVDWLEGIEMKEESSKLTLSVLVSEGKKLRSAILNVTKSIKELSQTVAYQEQEKLLRSVPGIGALTAMIILTEIETITRFSNTDHFHSFVGIVPSTRSSGEDEVVGEITPRGHSTLRSAIIESSWIAARIDPALTKAYHEYCKRMEPNKAIVRIAKKLLNRISFVLKNKQSYRLSVLK

SEQ ID NO: 44306 - protein, 347 aa, unidentified
MDHIGIDLHKRESQICILAEGGELIERRIRTDPHRFAEVLGARAPACILLEASTESEWVARCLEALGHHVVVADPNFAPMYATRTRKVKTDRRDARALAEACLLGAYRPAHRLSDAQRHVRARLTVRDALVRTRTRYISLIRALLRQHGWPVPSGSAEGFPQRVMALPLPGRLRSEVAPLLAVMRHLQPSLAYSDERIAAVTATDERVRRLQSVPNVGPVTAAAFVAAIDEASRFHRGHEVEAYLGLVPRELSSGETQRRGRITKAGSSRVRWLLIQAAVSMLRLRDPRTATLREWAGRIAARRGKGIAVVALARRLAGILFALLRDGTVYEPRQYQAGNVAHVVPA

SEQ ID NO: 44307 - protein, 349 aa, unidentified
MTRVGCDLHTRKQQVAVLDTETGEMYERQLSHAGDAVEQFYRALPGPVTVGIESTGYALWFHELMQRLGHTLLVGEAAKIRAMVVRKTKTDRRDALHLLDLLKHERFPLVWIPDPATRDLRALVTHRMRLVRMRTMVKNGLHAIAMNRRLTLGPSLWSQRGLAQLRDLALSPHTTQRRDERLQRLTWLTARIEALDDRVAAAAQADPGARLLLSHPGVGPLTALTTVVVLGPVARFPDSKHVVSYTGLAPAVHASADTCRLGQITKQGSPLLRFVLGQAGLIAAHAEVDLKRHYRTLLRRRGRPKAIVAIARKLLVRLYIMLRDQIDYEEFRRRGRTPRRQEVPPPALA

SEQ ID NO: 44308 - protein, 399 aa, unidentified
MSALRRVVIGADTHLDTNHLAVLTDTGKPLADAEFPTSPAGYDDAVRWAQSLGTICIAGVEGTSSYGAGLTRVLQAAGIEVAEVSRPDRAARRRRGKSDPLDAYAAARAALAGDRLAVPKDEHTTALRALLSARRSAVKAHTAATNQLHALLVTAPAELRERYRRHHITALVAALAQCRPATQGDPTSAAVLTAAKALAQRVKFLEQQRQDLTAQLDGLVGQINPALRAAYGVGPHTAAQLLVTAGTNPHRLRSEASFAALCGAAPVPASSGTITRHRLSRGGDRAANNALYRIALVRMSSHSQTRDYVERQVTKGRTKKEILRLLKRAIAREVFRLLTRPGPVDDYRDLRAARQAKNLTLAAVARHFGVPIITVSRLERGHQRNDTLANNYRQWVTAA

SEQ ID NO: 44309 - protein, 371 aa, unidentified
MKKSSIFVGLDVHKNSIEIAIAEAGRNGEVRSYGKIDGSLGALDKVIRKLVSKGYELHFVYEAGPCGYEIYRHLAAQGFDCMVVAPAMIPKQSGNRIKNDHRDAQMLARLHRAGELSAVFVPFAEDEAMRDLTRSREDAKLAEKKAKQRILAFLLRHGHHFNGRSHWSQAHLRWIAGIKMPHPAQQIVLQEYVDAFTECTRRVERLTGQIQQLLPQWRMVSVVKAYQSLRGVSLIVAATTVAEIGDMTRFTSPVELMSYLGLVPSEHSSGEKTKRGAITKTGNGHVRRVLVEASWAYRLPARVSRELRKRQEGLSQEICDISWKAQLRLCARYKRMLAKGKPKQVIVTAIARELCAFMWAIAHEVEFPIMA

SEQ ID NO: 44310 - protein, 341 aa, unidentified
MSVIIGIDPHKLLHAAYAIDERERELGRLELRTGARQLPELLAWAAPFACRKWAIESAGGLGYLLAQQLVARGEHVVDVPATLSSRVRVLGSGNSTKNDTNDARAVAVAARRAPSLMTVRAEDHVSVLRLLAKAQLDASRARSRACCRLHALVRELVAGGIRKEVVVSQADQLLASITPTTATQRQRVELAVETLEEIRMLDAKLKPSKQRITDAVNASSTTLTDIFGVGPIIAATVIGYTGDIARFPTAGHFAAYNGTAPVEFSSGGRTVHRLSRRGNRTLNHMIHMIAVTQIRNPHSEGRGYYDRKLAEGRTRREAMRALKRKISDRVYRQLNADHRSK

SEQ ID NO: 44311 - protein, 450 aa, unidentified
MPQGQQVQVDEHEEILARVAAIDVGKASGMVCTRVPHQAKAGVRVTTVWDVAATTTAIMELADRLVCQGIQRVVVESTSVYWRPFVYLLQAHGLPVWLVNARDVKQVPGRPKTDKLDAVWLCKLNERGMLRPSFIPPEEIRRLRDLTRLRVDLTEERSRHKQRVEKLLEDALIKLGTVATDIFGVSGRAMLEALIAGECDPRRLAELARGRLRVKRAALVEALTGQFSDHHACLARILLDQIDGLTTQIDQLTTLIDEAVAAIPAAQVPADGPDPGPTSGAGAPAQRPLPAMQRLDEVPGIGPKAAQVIIAELGLDMGQFPTPGHLVSWAKIAPQTIQSGAKHRTGPTGKGNPYLRGALGEVAAAAAKTDTFLGERYRRLVRRRGKLKALVAIARSILVIVWHLLADPTARFHDLGADYHTTRIDTGRKTRSLVRQLEALGHTVSLQPAA

SEQ ID NO: 44312 - protein, 322 aa, unidentified
MSETVLGIDIAKQKFDVALLTEGKIKNKTCKNSVEGFETLSLWLEKQGVQKVRACMEATGNYGEDLAIYLHEAGHTVSMVNPTRIKGFAQSELIRTKTDKLDAGVIARFCLAMKPESWIPPAPEIRSLRALVRRVDSLIDMRNQEKNRISTAHESVILLIKEHIAYLDKEIEKIRKQIDDLIKQNPQLKQRKDLLDSIPGLGKATIPHLLAELDNLDKFTHVREMVAFIGLAPKETISGSSIKGKPRLCKIGHARLRKALYMPALVSIQCNPVMIAFYNRLKERGKNGKVIVCAIMRKLVHVIFGVLKSGKMYDPNYKPTFA

SEQ ID NO: 44313 - protein, 424 aa, unidentified
MDRLQQFRELRSTIRGNESILVVGVDIAKEKHYAFFGTASGRTLKKRLIFGNCIQGFSDLRSLASDLQVQHNLNSCVYGLEPTASYHKPLAEYLVRNDEQVVYVSNVAAKNNRALLDGRWDKNDTKDAANIADLVGQGRCQFYDLAENDVLELRSLITYRTKLKKQEHGLRMRIRNNLLAQYFPELDKRMPQGGSDALVLDIIANNFNPVQIAKLSLAEFRQQYQTQTRHIAQENRLRSIWEASQESIGCALPESAAWEGKMLVEQLRQTRTIKRELEKRLKEVGQRSPAYACLLTIPGFGPIVSAMTLAAISDADRFTSRKQILRLAGLDLSASRSGKTSNAAIPVISKQGKAGLRYALVQAAQIASYSDATIRNYFTNMLKGRELERGIKLKMRVKLAAKMLIVAWTLMKRNEPYDSDHFRT

SEQ ID NO: 44314 - protein, 328 aa, unidentified
MSQPNPLCVGIDVSKATLDIAASSDVAQFTVSNDSDGLNAIITGLRRHSVALVLMEATGGLEVAVACSLQAEGFEVAVVNPRQARDFARAMGYLAKTDRIDARVLTQMAEVINRHPERKRFIRALPDAERQALAAMVVRRRQLIAMLVAERNRLHPFHPQNKKSINTIIKALEDELVRLEKEMDSHIRNHFKEIAERLSSIKGVGTMTVSAMLAEIPELGTLSRREISALIGVAPVNRDSGTMRGRRTIFGGRAGVRSALYMAALVATRFNPVIKTFYVRLLAAGKAKKVALVACMRKLLTIRKLLTILNAMLRKNEEWDESYHHVAP

SEQ ID NO: 44315 - protein, 340 aa, unidentified
MNTTQVGVDVAKAVFEVAVSDTPGAVRERHRLSRERFRRFFAAHEHTNVLMEACGSAHYWGRELQAMGHQVSLLHPGDVARYRDGNKTDRADAKALLEAARNAAIDPVPVKSREQQAIAALHRLRQGYLQTRTARINAVRGHLREFGVVIPVGARHVVARAQSALDDEELPDFLRRALRNVLGEIEQLQAKADQLRKELEHLARAMPEATVLMSVPGIGVLTATALVSFVGDLNRFGSGRDLAAYLGLTPREHSTGQSRRLGRITKRGNSYLRMMLIHGARSALRAGSTADVPDDLRTWALAIARRRGFNVAAVALANKLARVCWRVVHDRRPFERREAA

SEQ ID NO: 44316 - protein, 376 aa, unidentified
MSKIRFIGLDVHAETIAVAVAEPDGDLRSLGEIPNRSESIRKLVKKLGPVESLRVCYEAGPTGYAVYWELTALGVTCEVVAPTLVPVKAGDRVKTDRRDALKLARSYRAGDLTAVWVPDAAHEALRDLMRAREAAKKDQLRARHRLGKFLLRHGRRPAAAMTAWTQTHLTWVKTVHFAHAAQEATLLDYLHEVEHVADRIVRLEQAIDVAVKAAPERMRAVIEALQALRGIALVSAATIASEIGELSRFAKPRQLMGYSGAVASEHSSGARTRRGGITKTGNAHLRRIVIEAAWAYRHRPAVGAALRKRQAPVSADVKAIAWKAQHRLYTRYRALTARSKCKQQVVTAIGRELLGFIWAIGVHVESQPSTAKSVAA

SEQ ID NO: 44317 - protein, 337 aa, unidentified
MAQEYVGIDLHRRRSVIYRMDQAGDKVDSVRVDNDPIQFAKEVSAAPAGSDVIVEATYGWYWAADLLKEMGYQVHLANPHGNDWGHRRVKNDERDARDLADLLRLGRLAEAWIAPPKTRELREMIRFRMKLCNLRTGLKAQVHAVMAKNGILPCRGDMWGPGGAAQFDSLELPDAYVNRIAVLRELVEIYDREIGFLDRDIHRILCDDAGYHAVQAIYGVGPVFAAIFIAEIGDVTRFESPKALCSWAGLTPLHRESDTHVHRGKITKQGSRLVRWAAIEAVARYHGGEPFRTKFESIAERRGKTKANVAIARRVLTLVYYGLRDGEIRCLVDQEAA

SEQ ID NO: 44318 - protein, 412 aa, unidentified
MEVLYPHCAGLDVHKDTVVACLRHMATGSVEREVRTFKTTTKDLLALSDWLAEHGCTHVAMEATGVYWKPVWHILSDGDFVLVLANAAHVKNVPGRKTDVNDATWLADLLAHGLIRGSFVPDEQTQEMRNLLRTRKQLVRECSRHIQRLQKTLEDANIKLDSVISDIMGLSGRAMIEALIAGESDPERLAQLAHRRIKAPPEALCEALRGRVTRHHRFLLRLHLKQIDAVNLAIDDIDQEVDAQIEPFRTAIQLLITIPGVSELSACVILAEIGHDMNRFPTAAHLISWAGLCPKNDESAGKRRSTRMRKGAPWLKTTLVQCARAAARKKASYFQAQYHRLRARRGDKKAIGAVAASILTTAYHMLKYGTLYEDLGPDYFDKRGKGKHVHRLINRLQNLGFAVQITPVEAAA

SEQ ID NO: 44319 - protein, 311 aa, unidentified
MVERFGGIDVSMDRLDVMVMPDRAGFSVENNAAGWAELIKLLSGSPVVAIGIEPSGGYERGDIRALLAASLSVRRINPNKLRQFARARGVLAKNDRLDARLIAEYVAIMPTRIVQRDAAAERLAEVVTMRRQLCDEHVTVQNQASHVEDAMLRRLNKRRLARLEADIRLLDKRMAEIVAANPALAQRYRLLISMPSVGPVLAFTLIALLPELGQMSRKQIAALVGLAPYDFDSGKLRGHRSIYGGRMPVRNVLYMAALSACRYNPALRTFHNRLAAADKRSKIIIVAVMRKMITMLNAMVRDRTPWQARLA

SEQ ID NO: 44320 - protein, 334 aa, unidentified
MDREYIGVDLHKAFFQACAVNATGHRLWEGRFARTADGLARFVARGVGAAQAIAVEATGPTWAFVDAVTPTGAHVCVVDPRKTRLKAGYAAKTDRLDARRLADALRRESVVSIYVPPPAIRELREVCRGRHQVVRLRTRLAQMIRALLLRGDAGEPPGTRLYSPRALAWLAAVQLPPDALGTLRRLDRLYRDVHREAQAADAEVRRRAATDPIAQALAGMVGIGPVMALTIRAEIGDIARFAGGPALACYAGLVPRVDRSADHAYHGRITRDGSPWLRWALVQAARHAIRQPDARARWARRLAIRKGLNKARVALARVLCDQVVTTWPTTNLSA

SEQ ID NO: 44321 - protein, 371 aa, unidentified
MNSIIYVGMDVHKENYTLCCYRFEDDDVKYKQTLAPDYKDILKYLETTRKLYGENLEFICGYEAGCLGYTLYRQLTDRGVKCIIIAPTTMGIINTGGVKTDKRDAANIAKCLAFRTYSEVNVPTQKDESVKEYIRMRDCQKKALKIVKQQILALVLREGYRFDGGKNYWTIKHVLWLKGIDMGGVLQESLSEYLITYKYLVDKIERLDSRIEELAKDDDYKEKVKKLSCLLGVKTHTALSVVVEIGDFNRFSKAEKMAAYIGLVPGENSSGGKIIRTGITKAGNSHIRRLLVESAQSYTRGTIGHKSIDLKKRQAGNAPLVIAYADKANERMRRKFYHMVLKNNVKRNVATTAIAREIACFMWGLMTNNIA

SEQ ID NO: 44322 - protein, 410 aa, unidentified
MERMLERCAGLDVHKKTVTACVRVPGTHGDRTQHVRTFDTTTAGLLVLRDWLAAHAVTHVAMESTGVYWRPVYYVLEDAFACILANAAQIAQVPGRKTDVKDCVWIAQLLEHGLLRASFVPPAPIRELRDLTRYRKVLIQERTRHANRLHKVLEDAGIKLTSVASRLLGVSGRAMLDALVAGTTDPEVLADLARGRLRQKLPALRQALVGRFRSHHAFLVSQLLAHVDYLDEAIQTVGGHIDEVMVPFTDELARLDTIRGINKRTAEVIIAGIGVDMTVFPTAKHLASWAGLCPGNNESAGKHRSGKTRPANRWLRAALIEAALAASTRAAPGAFAARYRRIMPHRGHKKAIVAVAHAMLVTIYHQLTRQTTYHDPGTDYYDRRHAERLRRRALQTLERQGYRVTLEPAA

SEQ ID NO: 44323 - protein, 341 aa, unidentified
MDQYVGLDVSTEETSVCILDKEGTVVFEGEVASRPAAIAQTLRRHGPTAIRIAFEAGALSSWLWHELKGLGFPVVCLDARHAKAALSMRINKTDRNDARGLAELVRMGWYREAKVKSMESRQMRAVLAARAKLVDVRRDIENQIRGLLKSLGIVLGKAGSRALPGKILAVLRQAPQLRPLIDPMMVAHSALASQILKYDAQVRALAETDPTVHRLMTVPGVGPVTALAYVSTIDDPNRFAHACDVGAYLGLTPRRYQSGELDRTGRISKRGDRLMRSYLFEAANVLLTVVRKGSPLKTWGLKLVKRIGAKKAKVAIARKLAVILHCIWTDGTEFQWEKANA

SEQ ID NO: 44324 - protein, 387 aa, unidentified
MEIDGHDRAVATGTTLYVAIELSRSSWLAAVLAPGEQQRPSRYKLKAGDVDRLLALIGRRRGAASRVCSCYEAGYEGFWRHRRLAAAGIESRIVDPSSLQVDRRARRKKTDAIDVETILRASVAWDRGERGLCTMIRVPDITAEDARRPSRERDRLIREQTGHVNRIRGLLMTMGIYDVDPRRPDCRTRLRTLITGDGRPLPPLLTIELEREIERLALVARQIAELERDRNPPAGRGRPPGTALAPPPDPASARARIARLQTLRGVGPTIAHVLQSEVFYRRFHNRRELTAYCGLDPTPFASGRSHREQGISKAGNRRARHAAGELAWLWLRWQPGTALARWFHTRLGAATGRLKRIMIVALARKLVIALWRFLEVGVLPVGATRTA

SEQ ID NO: 44325 - protein, 366 aa, unidentified
MKKTSTVRVNGNRIFKGHKLTIGVDLGDRWSNYCVLDEAGEVLLEQKLATTPEAMKQTFERIPRSLVALETGTHSPWLSRLLKELGHTVLVAHAQKVELITKSNRKDDRHDARTLARLARIDPELLGPVRHRSAKAQMHLTVIRARAELVSVRTALVNAARGLAKPHGERLPKCGTGQVSRELATELSAELREVLEPLLKEIESLNERIKEYDARMEKIARESYPHVALLKQVKGVGTQIALTYVLTLDDPHRFAKSREVGCFLGLKPGRRDSGESQPQMHISKEGDRYLRTMLVQGAHYILGPFGEDSDLRRWGLRLAERGGKNAKKRAVVAVARKLAVLLHRLWVSAEVYEPLRNSQKAMRAVA

SEQ ID NO: 44326 - protein, 312 aa, unidentified
MAHIICGVDIGAETLDARIGRNGAWQRFVRTNDGIDRLAAFCRTHQAGLVVMEATGGYERLPFHRLWAAEIPVAIVNPRSVRQFAEAMGTLEKTDKIDAGMIAWYGATKRIVPTPPPSDDQRALTAMVRRLRQLIELRTAQNNQRRLVDQADALDSFTTILTMINREIRSLQARIIALIDADPLWFALDRAFREVKGVADRTIACLMANLPEIGTLSGKAIAKLAGLAPIARDSGKKNGNRPVRGGREAVRSILYVVAEIVRRHDPDFKAFHQTLRAAGKTAKVVRIALARKLLVRLNAKARDVRRALAEAA

SEQ ID NO: 44327 - protein, 481 aa, unidentified
MAVQGTYRRCCGIDVHKNSVMVCVLTPVGQSQMAVKKRKFRTFTRDLKQLRAWLKNCRVTDIAMESTGQYWRPLWNLLEGEFSRLLLVNPQHIKGLNGYKTDPKDAQWIADLLEGGKLRGSWVPPRAIRELRDLTRQRVNLLEDLNRVKNRVEQWCQSGNIKVSSVATDLFGMSGRKMLKALVEGQRDAGWMADYAQGRLRSKRRELQYALEGSFTAEQRWLLDRGVRQVEWLEGQAQILEEEIERRVAEFEEPIQRLLTIPGIDRKTAWTIVAEIGADMSAFPDARHLASWAGLCPGNRESGGKRFSGRVRKANRYVKRAMCQAAWAASHTKKTYFSAFYRRMCIRKGAPKAVMALAHHMIVVVYQVISRKEAYVEFGGDYYDQQNKPKTVARLVARLAKLGYQVDLKPMDETTAHEPLPFEILPAPDIQAATGLGENKTPKRRRGRPCKCAERGIVCKHGTSSEPKSMQQQVLPAGKFS

SEQ ID NO: 44328 - protein, 368 aa, unidentified
MKQVTTYVGIDAHKKDLFLAMLVGTEAAPVSWTAPNEPKAVKRLVRKLERAAPGPVRVFYEAGPCGYALQRQVTTSRVSCEVVAPALIPRKPGERVKTNRRDARKLAELGRAGLLTAVQPPTPEDEAVRDLARARDDAREDLQRCRHRLGKLLLRRGLHFAGRNWTRAHRQWIESLTWAHAAEQVVVDDYLLAIDHTETRLVELDRQLAQIAEREPYREPVGWLRCFRGIDTLTAMLILAELHDFRRFASAPALMAYLGLVPGEDSSGEKHRRGPITRTGNALVRRLLVETAWHYQHRPGVGVTLTRRRKGQPSRVIAIADKAQQRLCRRFRKLAAEHKPAPKIAVAIARELAGFLWAALQPAPATVN

SEQ ID NO: 44329 - protein, 425 aa, unidentified
MAVFCGIDWAEGHHDIALIDGDGSLIAKRRINESLDGVAELAAMLATAGDSAETPIPLARETPRGLLVAVVRATGRPIYPINPLAVARYRERTSVSGKKSDHVDAMALANILRTDAHLHRMLPDDSPEARSISVLARAYQDGVWRRTKLVQELRARLREFYPGFLAAFAAGSGSGRGLSTTQLASGDARAVLAIAPSPAEGLTVSKARVETALRRGGRQRRISSLAASVVAALRVPQLRQDPRVEQAMRVETLALLGVLDMASASVDQLAAALIKEFAQHPDHEIITSFPGLADISGAIVLAEIGDDRSRFGDDRALRAFAGSAPVTRASGKSRIVTRRRTKNNRLTGIGHSWAFTAAARQSPARDHYLLRRERGDGHPAALRHLFNKMLGQLHHCLATGQTYDPIKAFPHATAADPDNIERVAA

SEQ ID NO: 44330 - protein, 406 aa, unidentified
MEGRSIGMDIHRDFCEVAICEQGRVRRAGRIAARRGALREFAEQLGPEDRVAMEATSNALEVARLLRPHVKDVVVANTRRLAAIANAKNKTDHRDARTLAQLLHAGLLEDSWQPDEAIRALRRRTSRHASLVKHRARCKNEALAVLHRNLKPRPPMTDAFGVAGRQWLSQLALPNDERDTINAALRQIDFLTEEIATIERDLARFTLDSTHARRLMTVPGTGMITATVFLGAVGDITRFPDPRRLVGYLGLDPRVRQSGNGPAHTGRISKEGAALVRHVLVEAAHTAVRGPGPLRAFFERVRGRRGHQIAIVATARKMAVLFWHLLTTERDYAYTMPTTTAKKLRAVELKAGAERRPPGGARQPLNREQRREAERAAAEHAQAAYERTVTDWHRQQRQRANEPART

SEQ ID NO: 44331 - protein, 340 aa, unidentified
MSLEQSSVCVVDADGQIVREAKVASEPEALISWFGSLGLQLTRIGLEAGPLSQWLYAAMRAAGLAVELLETRHVRTALQTMPVKTDRNDARGIAQLMRLGWFRPVHCKSAGAQEVRALLTARKLVQSKLFDVEMSLRGILRGFGLKVGPTTPKRFSGRIRDLVAGDARLEVIATALLAVHAVLLRELSGLEKRVRSMARADGRVRLLMSTPGVGAIVALTYASAIDDPSRFKSSKMVGAHFGLTPKKYQSGETDVTGRISKIGDSGVRAALYEAAHVILTRPIKAAGPLKSWGMKLAKRAGMKKAKVALARKLAVILHRMLVDGTVFAAETPRDFAAAAA

SEQ ID NO: 44332 - protein, 339 aa, unidentified
MNLTPVGIDIAKSVFQLHYVDAETGEIVNRPIKRSRFLEYFANRAPCLIGMEACGGAQHWARELIKMGHQIKLMPAEFAKAFNIRNKNDAADARAVWLAVQQPSKAVAIKTEAQQAVLALHRMRQQLVKFRTMQINSLRGLLTEYGEVMGRGRAALDKAIPAVLARISDRLPMVLIDTLREQWDGLTKLDEHISVIERRLRQWMLEDKAVKAITAIPGVGVLTATAAVATMGDAKSFRSGREFAAWIGLVPKQTGSGGKVTLLGISKRGDTYLRTLLIHGARSVLHHVKEPGPWVEQIRKRRPPNVVIVALANKMARTIWAILAHDRPYQKGYVSAKPA

SEQ ID NO: 44333 - protein, 437 aa, unidentified
MDEVTDEPLYRDRACGIDIGKAGMVATIRVPSDKDPARRAAETRTFGTTRREVLALADWLRSWQVPAVVMEATGDYWKGPFYRLEAEGFECVLADAKQVKHLPGRPKRDPADSRWLAACFERGAIRPCFVATPEFRVIRLHTRYRRDLTEERTREKQRAEKLLESAALKPSSVLTDLHGVTGRDVMGHLIAGERNPKVLAQLARGKARRKISELEAALEGAEFFTAEHAALLAAMLARIDRVSEEIARLTEVIERLLAPYEEELQQAESMPGWGRRAAQDTLAETGADMSRFPSGGHLASWAGRTPLDNQSGKRNGKARSKKGNRYLGAVTGETAVAAGRTQTREGARYRRLARRRGKAKAQVAVGNTQLNVYHKLLSSPGTRYEDLGPDYYDRQASTRRQLAHHVGKLAALGFEVTLCRIPDPEPGSAGPGQTQAA

SEQ ID NO: 44334 - protein, 497 aa, unidentified
MPSTDVAAKATIVDAMKRKSIFKNNSQNIDAAFIEAGLPEKVLLVPLDFAKSTHYACFCDGLGRYLRQAFTVKNTKEGLDYLVERIEATRKSRAIGNKRHVIIGGEDSASYTRNFMQRLNELGYLAVRLSSCEVHRQAESVDSSTDRTALRAIAKTMLNRDARPIDGHDVYTELRGLTRQRRRIVHLSTAVKNRIHTHADRLFPGFLAKDSVLTPFSRASLELMSKPAFGAVSISRKNEKALGQLLKRAGTARSAEIAPALKQQARDSIPADKDAARLSAYILAGELQLFRSLASNLEALDQGCARLLARTPEAFIASIKGIGITLAASICAESGSLTQITRTDGLNAYAGIVPKVKQTGGPESEAKIRGRRRSFNRVLKDYTMQAGNHLYLHGPEELMQDAVRRKLAGKAVDTAMARRFLRIARALCKNHLTYLPSHLRGQNASSRERAQHILDTWPALLVKWKRLGLHEEAFAAENPLGQWRLIMQEIHDIDLPL

SEQ ID NO: 44335 - protein, 397 aa, unidentified
MIAVGIDVSKSKSTVAILNSDGSVLVKPYTMAHTQSDMCALADYLRTFDEPLTILMEYTGHYHYPVLKKLQQEGFPVCVINPYQMKKYGDVEIHKAKTDKKDAIRIATYALEKAYKLVPYNSLEQKYEDLKFLSRQYNQRISSVSYTKVQLINLLDQTMPGITHLLPLRSRNPEQCVLLLFIKRFKSFDEIIKIGKTRFLSSYATLVKKTRDRHAPSKGLAIYELAKNSITTRGEDPYIQLAQSQCVDLLSSSQNAADEIILQMQTIAETIPEYKVLRSMAGVGDRLGPVILAEIGDIRRFHSGKALNSFAGNDAPPYQSGQFESRNRHISKRGSATLRKACFEVMQSLKLTKPQDDPVYLFMLKKEQEGKPYNVAKMAGVNKFLRIYYARAMELYK

SEQ ID NO: 44336 - protein, 295 aa, unidentified
MKKLFIGIDFSKEKLDATIILACGMNEIGSREYGCFPNNTTGYRKLCNWVKTNAWNTIAEEWLFCGEDTGSCSIGLSKWLYGKSYDIWIENAYAIKHSSGIQRVKNDKADSAIIAEYAWRQQDKVVPFEPLNESLAQLREIFLYRHKLVGQRVAMELRKEDKSQSNKSKAISFINRKSKHLIAEINKTIAECDKAIDSIIEADEELKENYAIITSIKGVARQNATCMLVYTNNFKKFGYDPRKIACYYGVAPFGKQSGTSVNTPAHTSHFANKLIKSLLGQAAHIIPKLEITIKD

SEQ ID NO: 44337 - protein, 348 aa, unidentified
MKEPLFAGIDLHSNNLMIGIVDQSGQRIKYQKLACNLQQVIQFLEPFKVRLKSLAVESTYNWYWLVDGLREQSYPVVLANPAGIDQYSGIKHADDKNDAFFLAELQRLNILPTGHIYDPQLRPVRDLLRRRLGLVRQRTTLMLSFKSLFTRTTGQPMSLKRLKSMELSETKTLYEHPANCLIAAVQKEHIEQLDRSIERMEKAVLRSARKLPSYRQLTTLPGVGRILGMTITMETGDIERFASPGDFASYCRTVGSKRVSNGRNKGDNNRKCGNKYLAWAFVEAANFAKRYDEACRKWFDRKAAKTSTVIATKALACKLAKAAWHVMSQDSGYEEKRMFPELAMKQKE

SEQ ID NO: 44338 - protein, 311 aa, unidentified
MDSYTGIDISKDSFDVHVVAPETDRHFEYTEPGIQECVQWLLSLKPPLIVMEATGGYERRLVSELMAADLPVRVANPKRIRDFARAKGKLAKTDKLDARIIAQYAAMFQPPPQAPMDEISLKIKDLVARRRQLMAMRTQEENRKEHALDKDIARSISTVIKAFNKELKKIEDTITHLIDQAPDLKKKADLLQTMPGIGRTTAMALISYLPELGRLDRRQLAALVGVAPINRDSGIFRGKRMTSGGRREIRTRLYMPTLVATQHNPVISAYYQRLLKKGKPPLVAVVACMRKMFVILNAMIAKNQPWNPNYA

SEQ ID NO: 44339 - protein, 374 aa, unidentified
MKNIRFVGLDVHAESIAVAVAEAGGEVRSLGVIPNQESAVRRLTRRLGKKEDLRVCYEAGPTGYVVYWWLLRLGVHCDVVAPTLVPVRAGDRVKTDRRDALKLARCYRAGDLTPVWVPDAAHEALRDLVRAREAAKKDQLRIRHRLQKYLLRRGARPPEGARSWGAAHRRWLLTVRFQHPAQNTVMLEYLGEVEHVEERLRRLDQAIQDTIATAPDHLRQLVAGLAAMRGIARPAAAMIAVELGPASRFAKPRQLMGYAGLVSAEHSSGDSVRRGAITKTGNGHLRRILIEAAWAYRHRPGIGIELAKRQKGISPAIREIALKAQHRLHRKYVRLASRGKPHQQVVTAVARELLGFVWAVGVQVEHELPLEKAA

SEQ ID NO: 44340 - protein, 449 aa, unidentified
MIRPQEIEDEEHEQVLERVAAVDVAKASGMVCIRVPQPGRPGRRRTLVWQVDATTNAVLELADHLVGERVEKVTLESTSDYWRIWFYLLEAAGLEVQLVRAQDVKHAPGRPKSDKLDAVWLAKLTERGMLRPSFVPPAENRQLRDYTRLRTDLTRERTRHYSRLEKLLEDALIKVSAVASKLDTLSVRDMLEALIGGERDPQVLAGLARGRMRAKHDRLVQALTGKFDDHHAELARMLLDQIDALTAQIGKLTARIEELIAAIPAAQGIDADGTTGPAAGRGEGAPVMPTVDRLDEVTGIGREAAQAIIAEVGLHMSAFPTAAHLVSWTKISPQTIQSGARSRAGRTGKGNPYLKGILGEAAAAAAKTDTFLGERYRRLVKRRGKLKALVAIARSILVIVWHLLADRAARYHDLGASYYAGRIDKNRKMRDHVRQLEALGYTVTLTQAA

SEQ ID NO: 44341 - protein, 347 aa, unidentified
MKKPRYFVGIDVASATFTSAVGSMGEKWQIVMKPVQFANEYDSFSKYLKWLQEHDVKPENCVICMEATGVYNEVLAHFLKANQYAVAIEPPLKVKRAFRPEGHKSDPVDSRQISEYACRFWDELSLWAPRQEVLEQIKTLLATREQFVVEKAGHQNSLLALKRKAIRTPLAEKMHEKAIIELKEHIHQLEEEIQRLIDHDPDYRNTVTLLISIPGVGLLLAAHMLVTIQSAPMPLSPKSLAAFIGICPYEDSSGTSIIHKPTSRHYGPPGLRKLLFLASLSISMHNLQFRTYFLRKVQEGKPKKLVINNIANKLLKIMVAVMRTNTAFIANYRSVNPGLLKMALTKS

SEQ ID NO: 44342 - protein, 353 aa, unidentified
MPIIAFDSHKHYTQVCVETDSGHMLTEGRLRHKPGVFRTFLGAYEAGSPVAVETIGNWYWIVDEIEAAGMRPQLVHARKAKLMLGCVNKTDKLDARGINRLQHAGTLPVVWIPPSELRDKRELCRARMAFSAQTTRTKNRIHSIIDKYGMQDMFEDCSDIFSQKASPAINACIRQLPEQTRYVIRHLLGELKGATGRVELMDKRIQKVYRKDRQTELLETLYGVGPVLSVIIAQEVGDVNRFADAAHFASYCGVCPRVHSSGGKTYYGKMREDVNHYLKYAFCEAANLIARHYRKHPDRLLNKVYARLRLKHGHGKAIGAVARRLAQAAWWVLKKQEPYREPCSRMMASTTAV

SEQ ID NO: 44343 - protein, 334 aa, unidentified
MHIGVDTHKVQHVLAALDDQGRRRGTHRSPNTPEGWADALAWARSLGDTRQWGIENSGSLGKGFAQALLRQGETAVCEVSPQRTAQYRRHGRSQDKTDDTDALAIARLLVAEGEQLPAVRRDDLSTELRLLSDHRDNLLVERTRLINQVHAQMLQVDPSYKEKSGPLTEARGVAYCRDLVVPDADRLMRTRLLIVHQLAAQILSLDGEIAALTSELEWRVRESRTPLLALRGVGTVVAARLIGELGTTPRIPSAGALAALSGISPVAVSSGGHGGYRLNRGGNRRLNRAIHIIALSQRRCVLRQETRGGQDGARGDALLETPPRGCALSHPVAR

SEQ ID NO: 44344 - protein, 402 aa, unidentified
MDGATPARVAGLDWASRLHMVCVLDPDGQVRARFQVPHTGKDLRGLTRRLAKLAVGRVAIERPDGPVVQALLDAGFEVVVLPSRQVKHLRGRYASAGNKDDRFDAYVLADVLRTDGHRLHPLRPDSPETAGLRAVSPARKQLVDQLANQQRANQEVAYPGAAGLFAEVDSPIALRFLAQFSSAERAAWLTQARLGGFLRRVGYCGRVPTAELYQRLVHAPAGLQGSHGDACAAVTLSLVATLRAVRAQIEELDGEILERLAAHADGHIFTSLPRSGRVRAAALLAEIGDCRQRFPDPTALECLSGAAPSTRQSGTHTTVTFRFACDKKLRQAVMDFAGDSRHANPWAAHLYNQARARGHRHPHAVRILARAWLRVIWRCWQDGTAYDPARHGAYQRLIAKEA

SEQ ID NO: 44345 - protein, 374 aa, unidentified
MGHHSEAFIGIDTSKLKNAVAIADAGRDGEVRYLGEFDTTVAATRKLVAKLAARYDKLTFCYEAGPTGYGLHRLIESLGHACPVVAPSLIPKKAGNRVKTNRRDAEGLARLSRAGELTAVWVPDERHEAMRDLSRARGAAVDDLKSKRQQISSLLLRLGLHYPGQTTWGKAHRTWLSCQKIAQRESRIVFEELMGAERQAQDRVDRLAAAIRAAIPDWSLSPVVTALQAMRGIDLIAAVVLLAEIGDLSRFASPRQLMGYLGLVPSERSTGDSVTRGGITKAGNRRARCILIEAGWSYRYPPRIGRDKQAKVEAAPEAVRAIAWQAQTRLSGRFRTLARNGKRPTIVVTAIAREMCGFIWAIDRAMRQPGAAQA

SEQ ID NO: 44346 - protein, 421 aa, unidentified
MNFINQEVLQMNAVGIDVSKGKSTVAILRPMGEVVQTPIDVPHDAVSLERLAYQILSLGENTRVVMEATGRYHEPVAMELHDRGIFVSVVNPLVIHGYCSGGTVRKVKNDQKDSLKIAKFALDHWVDLREYTPMDTVRQQLKIFSRQYNLYMKSRVALQSNLISLTDKVFPGVNEIFTSPERSDGHLKWVDFITTFWHCECISRVSENAFTEQYRKWCKRMGYKFSAAKASDIYIGSRGHIVTLPKNNNTKLLIQTAAKELTAMNELLTVVKAEMIRLAKELPEYETVQAMFGVGEPLAAQLMAEIGDIRNYPRRSSLVGFAGVDPEVNQSGKMNSESNPSTKRGSPHLRKTLFQVMTVYLRLSPADEAVYQFLDKKRSEGKPYYVYMTAGANKFLRIYYARVKECMAKIEDSAETAEENG

SEQ ID NO: 44347 - protein, 354 aa, unidentified
MKEVIRQSIGIDCAMGEHVAGFSSMDADRTVSHVSSITFKNGESAFKKLEKWIKKHTPGPNLVIVMEATGVYHEKLACYLTDRNYFVSVVLPNKAKYFAKTLDSKTVTDKISAQSLATMGLEKKLIKWEKPSELFNQLRQLTRERDQVVHERSQIKCQLHAESSGAWPNSSSIKRMNQRIKLLTKQVQEIELEVKELVKNDPDLSAKINRICTIKGVGVLTAVTVVAETNGFRSIRNKKQLVSYAGLDIKQHSSGISVSKKSRISKHGNKFLRKCLHFPVLAAIRFEKNQKELFVRLVSKHGIKMKGAVAVQRKILVLIYTLWKNETVFDPEYELKKSRNELGQSRKTALKELA

SEQ ID NO: 44348 - protein, 341 aa, unidentified
MSDYSYFGGIDLAKNHFSIHVVDSQGKVTLHKSVTRSKLLTTIANMPPMRIGLEACGGAHYWARTLNKLGHDARIMAVKYVVPHRTKGKNDLNDAVAICQAVHHPSTRFVPVKSPEQQAILSVHRMREHRVRERTALMNRIRALLSEFGLIIPVGRSSLMKHVPLMLEDAENELPQLARTVIADAYYHLEQLNQRIADTEQVFEAFSKVSENVQRIMKVRGIGPQTATAILASIGNGSQFDKSRDFSAWLGLVPKQYSTGGKPRLGRITKHGDKYLRTLLVHGARTVIANLGDKQDRHSQWCRGVLERRGMNRAIVALAAKNARIIWSLLHNQTEYENYAA

SEQ ID NO: 44349 - protein, 369 aa, unidentified
MGKYIEVFVAFDVAKKKHAVAIAEGGRTGEVRFLGDVENSPLPIERTIKRLAGRYDRLHICFEAGPTGYGLYRQIQALGHECMVVAPALIPKRSGERIKTNRRDAVTLARLHRAGELTGVWTPDAAHEAVRDLVRAREAATDDLRRKRQQLLSFLLRHSRIYSGGGHWTMAHRRWLANQKFEHAAQQIVFQEGIDAIEDAVQRLRRLEKQLALIVPEWSMAPVVEAYQAMRGASFLVAVTFAAEIGDVRRFDTPRQLMSFLGLVPAERSTGDTIRRNGLTLAGNRRARRALIEAAWTYRYPARVSETLRARLEALPKPVRDIAWKAQIRLCARYRRLSATGKKLPVVVAAIAREMAAFLWAIGREVAPA

SEQ ID NO: 44350 - protein, 400 aa, unidentified
MSKRQARVWAGIDAGKGHHWATVVDETGATLWSQKVDNDESAILTAMGEIPDLADEVRWAVDISGTSSALLLALLAAHDQQAVDVPGRTVNRMSGAYRGEAKTDARDAYVIAETARHRSDFATIDALAQLAADLALLTAHRTDLVADRVRMINRLRDVLTGVFPALERAFDYSAHKGALVLLTGYQTPAAIRRRGRARLTAWLANRSVRGSDAVAATALEAAQAQQTTLPSEDVAAQILADLAIQILDLDDRLKRIDKQIRETFRSHPQAEIIESLPGMGPILGAEFVVAAGDLSAYADAGHLASAAGLVPVPRDSGRRTGNLHRPKRYSRRLRRVFYMSAQTSIIREGPNRDFYLKKRGEGCKHVQAVIALTRRRASVLWALLRDGRVFTSAPPVTQAA

SEQ ID NO: 44351 - protein, 381 aa, unidentified
MPALVIGLDPHKASNTIAVLDAEETLVARRRFENTADGLVAMLDAVSGWSERIWAVEGENGIGRSVAQRLVAAGEMVVDVPAKLATRVRVYSTGHGTKTDDTDAVAIARAALHSRRLRMVRPDDENVALKLLSDRRHELVGSRTQSVCRLHRLLRELVPGGMPRHLTAERAEALVTGLEVSDPVSLMRVELALDHIEDMKRFDRRIDDVTLKIHAAVKASGTTVTRIYGVGAVSAGLILGEVGDISRFPTRNHFASYTGTAPVAVSSGDQNRHRLNRAGNRRLNHAIHIAAIAQIRYDTPGRAYFRRKLGEGKSRREALRCLKRRISDAVWRQLQLDRETDQHQDHSWPRWPSSRGDFPSYRSPDTLRRDGQPKKVQTMPA

SEQ ID NO: 44352 - protein, 440 aa, unidentified
MKSYQALQQKRDFIKDKNIIGVDPAKAKHQVAIIDKDGIQQGKSFYFLNNYQDYNKTLWDKTSIQIPELFPENTVFAIETSCNLWQNLSFFLFSKGYTVLLVSPLTTHQSRSLINHDFSKTDPKDALLVASNAQQGYFDFYKNYSPLINAMHTLSITYYKLNRNLRQNRARLRALIEHVFPEFLSVLQPDTDTALYLLKKYILPQDFADMNITSEAIVISRISRKQHGFNTLVQLKKLACNSIGVNKQLDEIIAIRLSLDAWLILIDTLEKQCHTVMEKLISLAKLTPYFDIISSLKGISDKSAAPFIAEIRDLSLFNHFKQIEKSAGFNLRLSQSGQSSSYKHISHIGNKRLNMIIYKMTEETSKYIPEIRIKFLKRQIKRKNHRKNVTACVPNLLKLIFKLVNDNRFYEEKNKNVQELALLEAQYQKIIKKNNPEIAA

SEQ ID NO: 44353 - protein, 326 aa, unidentified
MKKSYFIGADVSKEKIDFCFLTSVENVKPKFVSLPNDTTTIKAYFQSFIKDDIFIVFEHTNNYHVPLQSALSDLQIKHSALNPAKISHFLKHLTFQKSDITDAYGLALYCRIFKADLNPSTYNHEYNLIKSYNSTILLLSKIQTQLKNFKKSQDFVADTELSEIIKSLTVQVQKTQEKLKFIAFEILKSFVPNCEKIIKNNKGFGVDLALNLFPQLHFNRAKSEKQFISFLGLSPRIYESGSSVHKSPKINKRGSSAIRRVLFLCAISCVRFNAKFKQRYETLVNKGKKKKVALVAVMCAIVRYLKSLFPLSESYLNENLYNAHTS

SEQ ID NO: 44354 - protein, 377 aa, unidentified
MYRIIKIGMDVHSKNYTLCAMEPLIGEEDRIFANIQVTADYKNILMFIEQLKMKLGMSDEYDIQCGYEAGCLGYSLYNQLTAAGVKCVILAPTTMLTQQGKRVKTDARDALMIAQCLSYGGYHAVYIPTQEEDSVKEYLRMRDDHKEALKKIKQQINALCLRHGHHYEGPTWTIKHVTWLRKLELPSLYRETLDEYMASFDEQTAKIERFDQRIEELSSQEQYWEKVKKLCCFLGIKTHTALSLIVETGDFSRFAKGNTYAAFLGLAPGEHSSGEKTNRTGISKAGNRHLRQLLIEASRGICKGAVGHKSKELRARQNGNTAEVIAYADRGNTRLRSRYYKFIRHGKKKNVAVAATARELACFIWGMMTDNISYRMA

SEQ ID NO: 44355 - protein, 423 aa, unidentified
MPYRIAGIDVHKKRLAVVVADVEVDEEYQFERRWYGSNPEQLQKLAEWLIAQQVEEAVMESTAQYWKPVWSTLERYWKPNCQNREGTGKMSGTLHLAQALSNRGRRGGKKDFRDAERLVKRLISQELVLSFVPDSEQRLWRTLTRTKYQRTRDKVRLQNQLEALLEEAHIKLSSLVSDLLGVSARRMLQALGDGATDPAALAALADQRLRATPEQLRDALGACAGLNPVYRRVVKMALTDLQLIEQQIGQLDQEMASLLHEHQDAVQRLAEVPGLGVDSAQQIIAEVGAKAATFASPKNLVSWVGACPGDEESDQVNRSKRSPKGNRQMRRILNQAANAAVKHKGSIFEIVYRRLVLRLGHNKTIGAIAHRLCQLIWIILHKGARYEERGPAVSEKSKRLRTSRMIRTLRMLGYRVEPALIPA

SEQ ID NO: 44356 - protein, 345 aa, unidentified
MEQIIRIGMDTSKQIFQLHGVDANEKVVLRKKLRRKDMVSFFEKLAPTVIAIEACGASHHWARMLQSMGHTVKLIAPQLSKPYVKRGKNDTADAEALCEAESRPTMRFVPIKTVEQQASLMLVGVRDRLVRNRTQLSNSIRGYAAEFGLTAAKGIAQLDPLLERIQADVSMPSLARELFLTLANEFAELQVQISEIETKLIARHRADECSQRLDKIPGVGPIGATLLIMKTPEPERFRSGRQFAAWIGLTPRDHSTAGKVRLGGITRAGDEGLRCVLITGATAVIQHALRSGKASPWLAELLKRKPPKLAAVALANKIARIAWKMMRTGECYAMKSAPVSLAAAA

SEQ ID NO: 44357 - protein, 354 aa, unidentified
MLIIGADYHPSFQQIAFVDTETGELKEQRLAHREGAEEFYRALAARGQPVRVGMEASGHARWFEGLLAELKFELWVGDAAEIRRKRGRKQKTDRQDAQHILGLLLKDDFPPIWVPSWENRDLRQLLWHRHRMVQARTRIMNQLQAVALNEGLLCKKRLWRERGRQQLEAFRLAPWASRRRHDLLELLDRLNPTIAELSQAIEREVEKCPAAQRLMTHPGVGPLTALAFVLIIGDADRFPCGKQVASYLGLVPLEDSSGNRRRLGHITKQGNSMLRFLLVEAAQVTVRSLPQWRRKYAHLMMRRGRKTAKVAMARRLAIRLYWMMRQGWDYQQWSKLGSHAGQPGPGDGVRSNIE

SEQ ID NO: 44358 - protein, 445 aa, unidentified
MGEYDFTLGIDLACSAAHVATLADAAGRLVWSNHRFRTAAVDLDGLWSKVPAGARLQLVMEPTRNAWVPLAAWFRARGATVILVPPEQSADLRRYYQKHTKNDRLDSVLLARLPLLHPDGLTVCTGIGPADPLRRAVRRRAKLVSQRITSMNRLTALLELLGPGYLTVFSGSLGSKTTQMLLSRYADPPKLLRTPAARLAHVVTAASHGQHGQLLADQLRVAAREAVALYAATDIDFAELAADIEAEVRFIAAVQAEIDQLDQRIQRLYAQADPDQILRSVPGAGATLAPAIHALFGDPHRFANLDAAPALTGPVPGTNQSGIGQAATRPTKAGDPGLRTALFMAADLARQTDPTLAQRYRRLVVDRKLHHNSAICHLAAVLATRIIACLRSHNQYQIRTVDGRAINPQDARAICATLRVQPHERRPRQGKAGQTKKEVAKRLVA

SEQ ID NO: 44359 - protein, 457 aa, unidentified
MSRTRQAPKTVKPVAEVDALTLLNPNAAGIDIGLDEMWVSVRADRDAQPVRRFGMNTPDLIAVAEWLKACGVETAAMESTGVYWIPLYEILEERRFKVYLVNARHAKNLPGRKKDETDAQWLRRLHTFGLLNNSFRPEGEMCAVRAYMRHRADLIEHRAAHIQHMQKALHQMNVRLSPTVKDITGVTGMAIIRTILAGERDPLTLARLRDPRCAQPESEFVKALTGNYRDEHVFALKQAVALYDAYTQQILECDQELERKFSALKPVHDEDLPPLDTTDKRNTHSKNAPAYDGRSLLYQLLGVDLVAVDGLNEVTVQIIISEIGTDMSRWQDEKHFCSWLGLAPHNDISGGKVLRSRTLKTHNRAGQAFRLAAQAVSKTNTAYGAYFRRMRAMHGPMKAIVATAHKIARAVYFMLRDRTPFHDTSAEEYTQREREREIARLQKKATKLGFTLAPASV

SEQ ID NO: 44360 - protein, 400 aa, unidentified
MTDIEQHDSVQVFVGVDVGKGVHHAVALDRKGKRLLDSALPNDETKLRALIGKLKEHGPILLVVDQPATVGALPVAVARDEGVLVAYPPGLAMRRIADLHAGEAKTDARDAYIIAEAARSLPHTLCSLKLADSQVAELTMLCGFDEDLAGQITQVSNRIRGLLTQIHPALERVLGPRLDHPAILDLLERYPSPAQLAAVSPKQLANRLVKLAPRVGKTWAAQIAQALTEQTVVVLGTQAASIVLPRLAQQLAARIQRDEVAKEVERLVLAHPLHPVLTCMPGVGVRIAARLLIDVASRAFASAAHLAAYAGLAPVTRRSGSSIRGELPSRRGNKQLKRAMFLSAFAALRDPVSKDYYARKISHGKRHNQALIALARRRCDVLFAMLRDGTFYYPPQPKYR

SEQ ID NO: 44361 - protein, 318 aa, unidentified
MLQNRRIVGLDISKLKADGCIRSLQQQLVQPSTPDGQAEMIAWLRENEVATAVMEASGGYEQPWAKALRRAGIKVRIVDPKRVRHFAKSAGRLAKNDPIDAEMIAWFAETFDDDIGQPHDPAREELDLLVTSRTALVKLLTQITNRDEHRQPHIVAKVQAAVAKAVRAQLAKLEAAIAAKIRATQRFAEQAAIIASIPGIGDHTVAGLIAWLPELGQISNKAAAALVGVAPYDDDSGQHKGERHIKDGRRELRNLLYMATLGAATRHNPVLKAHYQQLRARGKKAKVALVACMRKLIVILNTMLTRGEPWNPIAPAAV

SEQ ID NO: 44362 - protein, 391 aa, unidentified
MSMYFVGIDISKYKHDCCIISAADQKVVSKFTFKNDKVGFEELLTVLNSLSIPEDIKIGFESTAHYALNLELFLENAHHSFMEINPVLIKEYKKSTTLRRTKTDSVDCESIARWLMTVEYKPHSKGFYHSYSLKSLTRLRDRLIRQRSFYLVKITNVLDHTFPEFKPFFNERLSKTALYLLENYGSAEKMARMNSASYDKLRCISRGKFSIQQFLRLKELAANTVGVNNSIFDIELNSLLTLYKSLVKEIDTLESEIHKLIEEVHPHYLTIPGIGPISAAVIYAEYGDISNFSNPGQMLAFAGIEPGINDSGTESHGGRMVKHGSSQLRYVLLNACLPLIRFDLTFATYYAKKRAEGKKHRVAITHVAKKLIRVIYALERQDIDFNTQKLR

SEQ ID NO: 44363 - protein, 350 aa, unidentified
MNCTQHDYTGKTIYIGIDVHKKTYCCVCVCDGEVIRRAGMPATPQGLVQYVHHFFKGATIKTAYEAGFSGFYLHRYLHRHGIDNIVVHPGSIEVSLYDRVKTDRRDACRIALQLSTCRLKAIYVPPEEQESKRCVSRFRQSTLELRRRVGNQLKSVLLLHNLIDLNDHTKISSKWIIQKLSELKEQKCPDGLMYIVEMYVEQWTSLTDQLKQVKQKLKQQSLSDRHVHELYESVPGIGLIHGCELANELGDMKQFLNIRHLFSFIGLTPGEYSSGDHIRRGSITRQGRPVLRKILIEAAWIAITKDANLKIIYERIAQNRGSKRAIVGIARRLVGRIRACLLNNTRYEIQ

SEQ ID NO: 44364 - protein, 429 aa, unidentified
MKIIYPRVCGIDVHKKFIVAVICISESVEPVYLKKRFSTFHNDLIRFRDWLIQNDCQNVCMESTGKYYIPVYNILESHISNIVVANPKWVRAVKGEKDDDKDAKWIADLFKLGIVKSSFIPQKDFRILRELTRYKYKLVNMRSSEKNRYQNALTSGNCKLDMVFTDVFGKSASNIIDLILSDNPYTDEDILSKVHKNCKASPDMILNSINGTDLTPVQKSRIELVNNHIKQLSSNIQRLDKLIDLMIEPYKDYISFLCQIPGVSRNSAITILSEIGVDMNQFTSTRRLTSWAGLTPSSNQSAGKKKSVRISRAGVYLKPCLVEVAHAAVKDTNHPYYANKFNKISKRRGKKRAYIAIARKILVAAYHMLLTGEIWNPADLSEVETPVEQRIKYVKNNLKSDIKQLLDIGLTVEELTLMIQQNANIIATQ

SEQ ID NO: 44365 - protein, 340 aa, unidentified
MDYGCDYHPRFQQIAFVNTEGGECGGTRLQHVQEAEQFYRSLQGQAVRVGMEASGHARWLERLLAELGYELWIGDPAKIRAAAPRKQKTEARDAAHLLQLLMEGQFERMRIWVPKAGERDVRQLVLHRHRRVEMRTRVKNQLRTVALNEGMGPRPGLWSRKGQERFRALALPAWSERRRADNLELLADLLLRTTPLDAAVEQEAQRRPEVVRLMTHPGVGPSTALTFVLTIGEPMRFDCGKQVASYLGLIPAEDSSGGRQRLGHITKQANALLRGLLVEAAHSAARREPELGRCYRRLAMRKNRSIAAVAVARKLAPRLWWMWRRGLNYAQFRTSGSHAG

SEQ ID NO: 44366 - protein, 391 aa, unidentified
MDKAWAGVDAGKEFHWAHVLDASGTELLSRKVENDEADLSTLIDEALSLAEDVIWAVDQPGGSAALLLALLWEQNQRVLYISGLTVDRSRNAYRGESKTDARDAHVIADQARMRPDLGELEAGEQEIAELQLLLARRRDLITDQSRTITRLRETLVSLFPALERALDLNSKGPLTLLTHYQTSAQLRRAGHKRVATHLRNRGVKGSNKVADKALAAAKAQSVTLPAQELASRIVAELAKDVLGLKERICALDEKLEKRFFARPEARILTSLPGMGPILGAEFLVAVGDIRAFSSADRLAAYAGLVPAARDSGKRVGNNKRMRGGNKVLKRVFYQSAFASLRSAPESRVFYERKRAEGKRHTQALIALARRRVNVLWAMLRDGTAFESRSAA

SEQ ID NO: 44367 - protein, 362 aa, unidentified
MDTDILTRPSIVVGVDTHKDQHVAVALTELGQRLGDCSVPANLDGYATLLEWTRELGEPRIFGVEGCGSYGNGLYRFLRRHGLSVTEISRPARKGERRLIGKSDVIDAEHAAKEVLSGRPFTTPKTASGSIESIRLVRIARKAAVKVQVTAMITLKATLVNASDGMRGALEPLTDYKLIIACAELGTDGDLADPVVAMKYTLSSLANRWLVVHKEVKTHSKHLKVLTEQTAPALVEAFGIGPDVAGELLVAAGDNTDRIRSESAFAKLCGVAPIPASSGKTSGRYRINRGGNRQANAALYRAVIVRMRWHEPTIAYVKKRTADGLSKRDIIRCLKRYLVREVYRLLPPPSVSNLVSGSHEAT

SEQ ID NO: 44368 - protein, 393 aa, unidentified
MFFVGIDIAKNSHEAAVIDGSGKIVVKPFKFPNSIGGFEKFLAAVKGVSEDLSQFEFGMEATGHYWLNLYTKLMDFNVVVHVINPVQSDALRGLYIRKTKNDAKDAFIIAELIRFSRYSETTLSDSDLLSLRELSRQRFYLVDCVSDAKRKAISFIDKIFPEYQTLFSDTFGATSVELLQTYTSPDVIAELDTELFTHFLKSVSHGRFGRSKAEEIQSVAKNTFGSFLFADSATLAIRQFIQQIKLLEEQIAEIEDFISEKFASFDCKLDTIVGVGTTLAASFLAEIGDITRFESPDKLAAFAGIDPSVKQSGEFNGTRNKMSKRGSPYLRRTFWLAAISGIRFNPALKSIYDKKCAQGKHHAVAVSAVMHKLCNIVFAMLKTNEPYKIILPE

SEQ ID NO: 44369 - protein, 347 aa, unidentified
MSRTDLSTLFAGIDVGSKENVLVVRVDGDPLPVERFANDVAGRKALAKRLRSFKRPVYICLEATGSYFWGIAIALSKEKNMRVMVANPRIIKNFARAMNRRSKTDAVDAGVIALYAEKAEFVSWEPPSEQLLELRNISRRIDSLTNMKAAEKCRLHAHRASGAKRSVVERDIVGHIKALEKKIAALRKAALLMIKSDAEILERYRLLLSIPGVGEVTAVRLIAELALMPGCLSARQWVAYAGLDPVAYESGTSIRRPGRMSKAGNARLRNALFIPALVAARCDPVVRAFADKLVSRNKKRIQALVAVMRKLLHAIWGMFRHNTVFDAAILFPDVSAQLPDISIQLDS

SEQ ID NO: 44370 - protein, 343 aa, unidentified
MQAVTTIGLDIAKSVFQVHGVDAAGNVIVRRQLKRRYVLPFFQKLPPCLVGIEACASSHHWSRELQALGHKVRLMPPAYVKPYVKRHKNDAADAEAICEAVTRANMRFVATKTPEQQSCLMLHRTRHLFIRQQTAVINAIRAHLAEFGIVAPVGRNGVEDLLNIVADCGDKRLPDVARACIAALGAQLRMLKARILEFDRLIVAWHRSNEASKRLDDIPGVGPALATALVASVADPKAFRSGRDFSAWIGLVPKQHSSGGKDKLGSISKQGDRYLRSLFTAGALAVIRYAKIHGTKHRPWLTALLARRPTKVAAIALANKIARMAWAMMARGDRYKEPVALAA

SEQ ID NO: 44371 - protein, 342 aa, unidentified
MDHFAGLDVSVKETCICIVDDTGRIVWEGKVASEPETLLKVLENPTYHFRRIGLEAGPLSQWLFSVLAEAELPVVCVETRHMQAVLKAQINKTDRNDARGIAQMIRAGLYRPVHVKTLRSQKLRMLLTHRKLLQSKAIAIENDLRGTLRNFGLKVGMVGKVRFEARIQELVENFSDLAALVEPLLIVRRALREQIVILHRRLLAIVRDDEVCRRLMTTPGVGPVVALTYRATVDVPARFRKSKAVGAVFGLTCSKYQSGEIDWSGRISRCGDEMMRVMLYEAAQSTLRSKKWSWLKAWAIQIARRRGMKKAIVALARRLAVIMHRIWVDGTEFRWTRETAAA

SEQ ID NO: 44372 - protein, 338 aa, unidentified
MTYFALDVHKSSSTVAYFDPSSGEVDTRRLYTQRPELAALLAEFPGPWIVALEATRQSPAVCAWLRELNCEIHLVDPAKLSALAKLRRAKSDAKDAELMLEALVHDYLPEAYLAPPEVAEDRELMRCYQACRRVATQFRNLLRALLARCGVELAATNLCGAGAQEALDQEQARLSPLAQLICVQYRRLLTEAEATLTLLKKHIRERAAALPLARALQAQPGQGALTSLGLLAEIGDVTRFAGYKQLISYAGLAPNSYQSGDRAQTGHLPQHCNRRLRYWAVVAAQCATRCAQPSAAKRAYRRVRYRHGPNAAKIAAAREILRDVYFTAGRLTPEALAA

SEQ ID NO: 44373 - protein, 338 aa, unidentified
MVYGAIDLHMRYSQIRIVDETGAVLRDQRVPTSREQLVKAFEGWGRMRILVETGTESEWVAQTLEAASHEVIVADPNYAPMYGELQRRVKTDRRDVAALAEANRRGWYRAAHRTSAAQRGTRQVLRARRQIVQMRTGAVTLIRSLVKQEGYRVPRCGAERVPAQLATLRLPAALQALLAPLTKMIETATSEITTLDAQLQARAAADPLVQRLQTVPGVGLIVALTFRAQIDDVRRFRHAGQVSAAIGLVPREDSSAERRHRGHITKVGPRELRSLLVQAAWACWRSKHSATLRAWAEHVAARRGRRIAVVALARRLSRLLYALWRDGTSFDVKKLAAA

SEQ ID NO: 44374 - protein, 406 aa, unidentified
MMVKLGGASAVITFKGVDFMIYLGVDIAKLNHVASASNSDGEVLFHNLCFTNDHKGFQKLLDSISSFNKDELLIGLESTAHYGENLICFLFLRHYNICIINPIQTAALRKTNIRKTKTDAVDTLLIIKALIMNKYRIFSQQDLDTMKLKNLCRFRQKLIKARTKVKIQLGTYVDLLFPELQYFFKSGIHGKAVYALLKETANPDKIANMHLTRLYNLLNKTSKGHFKRSHAVHLKELAAQSVGTKNDTLSLQIRQSIIQIELYTQQLQEVEESIHTIMDEIDSVIKTIPGIGALNGAMILGEIGDIRRFEKPCQLLAYAGLDPSIYQSGNFQAARTRMSKRGSKLLRYALINAAWQTTLVNQTFQDYFDLKMSQGRRHYNALGHVAHKLVRVIHKMMTDDVEFNLA

SEQ ID NO: 44375 - protein, 354 aa, unidentified
MNYLGLDYHKKYSFATIITEEGEIKEKERLLNRKESFKEYLYRYKEVVAVVEACWNWPVAVELLEGLVDEVKLAHPLKVKAIAEARIKTDSIDSETLAYLLRADLIPEAYLRDKSNLGRQKILRMRSFYVKLRTQVKNRVHALVDGQGEEIRETAKGYSDLFGKGGLRWLGELRLEDPDEKMLRGLLEIYELLCKQVRATDRLVKEIVSSDEDCALLKSIPGIGEFFAALIKTEIGDIERFSSSSKLCSYVGIVPSTYASGGKVWHGRLTKQGNRWLRWAVVEAVKPAIHSNGELRSYYERIKYRKGPKAAKLATGRRLLAIVYRVLKEKDAFKLYKTELKQRAESPSSDPSAA

SEQ ID NO: 44376 - protein, 371 aa, unidentified
MSELPAGTRPARLNVEVSPRPPGARKPETELGAASTIAVPHPDSRSGPSPHLQGRVMDKQRPVFVGIDVSKDRLDVHLRPSGEAFSVLRDDRGLADLVSRLQRLPVVLVVLEATGGFEAMVAAVLAGIRLPLCIVNPRQIRDYARAMGRLAKTDTLDAEVIALFAERVQPEARPLPEPERNHLVELVGRRRQLIEMIGMETNRGRQAAGKHLARRLARHVTYLQKELDAVDHDIGDAIKQSPAWREAEALVKSVPGIGDVTARTLLAELPELGTVSRHQIAALVGVAPINRDSGLMRGRRAIAGGRTSVRAVLYMAALTAIRRRSPFRAFYDQLTARGRPKKVALVAVMRKLLTILNAILRDHTPWRHANA

SEQ ID NO: 44377 - protein, 343 aa, unidentified
MEYYVGLDVSLKQTSICVVDRTGSVVREGVVDSDPEAISVYVRSKAPATVRIGLETGPTSTWLWTELKRLGLPVICIDARHAKAVLKMQVNKSDRNDAIGIARIMQTGWFKEVHVKDIDSHSVRALLASRALLVKIKRDLENHVRGLLKNLGLVIGRAKFNVFAVRAEELIEGRPELIAAIRPLLEARNAVGQQVSELDRKVMKLARHDAQVRRFMTAPGVGPITALAFKATIDDPARFARSRSVGAYVGLTSRRHASGEIDWSGRISKCGDAMLRSYLFEAAGVLLTRVPKWSAVKAWGVRLAKRNGLRKAKVAVARKLAVILHRMWIDGTEFNWSKKEIAA

SEQ ID NO: 44378 - protein, 408 aa, unidentified
MNAVGIDVSKGKSMVAALRPMGEVALLPREFLHTEVGLEQMAYAITTLGEDTRVIIEATGRYHEPVAAALHKYGIYVCVLNPLYIKQSGGGSIRKVKTDKADAMKIAKYGLDNWVDLREYTPMDTVRQQLKLCSRQYNLYMKTVVSLQNNLISLTDKTFPGVNELFSSPERADGHQKWVDFVMTFWHCDCICRVSEKAFTERYQKWCKRKGYHFSTEKALDLYAGSCGHFITLPKNDNTKLLITTAAQQLLAGKMTLAALRAEMTRLAMQLPEYNTVRAMYGVGETTAAQLMAEIGDVRRFPRRSSIVGFAGVDPGVDDSGKHSAKSVPTTKRGSPHLRKTLYQIVCTYLRKAPANELVYQFLEKKRAEGKPYFVYMTAAQNKFLRIYYARVKECLAAFDAQQDTTQS

SEQ ID NO: 44379 - protein, 350 aa, unidentified
MQINTIGIDLAKNVFQVHGVDACGQVVLARQLRRQEMIKFFGKLEPCLIGLEACGTAHHWGRELTRLGHTVRLIPPVYVKAYVKRQKNDSADAAAICEAVTRPSMRFVPIKTAEQQAILSVHRTRDLLIGQRTQLINALRAHLAELGLVADQGRDGLAKLVAMIEDERSVASLPGAMLKALHVIIAQLASLQQQIGEVDRCIQAQHRASDVSQRLESIPGIGVIGATAIAATVTDPSMFQSGRDLAAWIGLVPRQRSTGGKDRLGGITKQGDRYLRRLLVVGATAVVRQARSHPEKYPWIVRLLAKKPAKVVAVAVANKTARIAWAIMSKGGTYRGPALVVAEEGLAMGA

SEQ ID NO: 44380 - protein, 341 aa, unidentified
MTQFYAGLDVSLEMTSICVVDEGGHICLETKVASDPTSLAQSLVALEGEFVRVGLEAGPLSQWLYFGLQDAGLPAVCIETRHLKGAIGAMAASKTDRNDARAMAQVVRSGWFKAVHVKSTESQELRTLLTAREFLVNKVRDHENEMRGVLRPFGLKVGRVGPAGFEARVRELVADRPGLALCMEALLRAREGLRRELNVLHLALLRVVKNDELCRRFMTIPGVGPVTALAFKTAIDRPDRFRRSTDVGAHLGLTPRQHQSGEVDRRGRITRCGDAFTRTALFGAANVMLSRTTQWTALKAWGVRLAARSSMKKAKIAVARKLAVIMHRMWRDETPFRWTAA

SEQ ID NO: 44381 - protein, 328 aa, unidentified
MKLPALGIDIAKLKFDVCLMNTEGKLRHKVFPNTASGFSQLAIWLTRQGVSPQVHACMEATGTYGEALAYQLHRDGYTVSVVNPAAVKAFAGSRLSRTKTDKVDAELIARFCLAQEPLAWEPPAPEVRELQALVRRLAALIEMRVAEENRLEAGSVVAAVRSSVEAHVAYLAAEIKRTEDLIRNHVDKHPTLKQQSELLDSIPGVGKTTAALLLAEIVDITQYRSARQVAAYAGLVPRERRSGSSVRGRPRLSKIGNARLRKALYFPAITALRCSSFFKEWAEGLRERGKCKMSVIGAAMRKLIHLAYGVLKTGKPFDPEWARKEKTA

SEQ ID NO: 44382 - protein, 340 aa, unidentified
MGEYVGLDVSLNETTISVRRNGKRIWRGACPSHPQAISAVLSQHAPNAARVVLETGPLAVWLFHSLTAEGVPVICIDARHAKAALDMAPNKTDANDADGLAQLSEVGFFREVRVKQYDSMLTRTLVGARSQMIKIVTDLHNQIRGVMKTFGLIVPKGAGRVFDANVRLLLAANPELALIVVPLLDAWRSTRSRASELDRQLVAAARRSPSCKVLMSIPGVGAVTATSFAAAIEDPQNFKTSRSVGAWLGLTTRRYQSGEVDYDGHISRRGDKHLRALVYEAATVILTRSTAESALRSWGLKLRERVGFKRAAVALARKLAVVMHSMLKTGEIFNPGAAAA

SEQ ID NO: 44383 - protein, 344 aa, unidentified
MEYYAGLDVSLRSCALCIVDSKGTVLFERELPCEVSDIAECLAGFPHPIERVGFEAGAMSQHLFFGLTAEGFDVVCMEARQVSAALSAMRNKTDKTDARGIAQILRTGWFSPVHMKSRKSHGLSALLSTRKALLKKTMDLANEVRGLLKIFGVRLPKTMKHGSFDSVVRPMIEIDDVLAHALVPLLDARVVLYQHYLELDRRVKRAASHDDVCMKLMTIPGVGPIAALSFKSAVDDPTRFKSSRTVDAYFGLTPRRYQSGEHDNPGRISKAGDRDVRAVLYAAANALLMRTMASSQIKSWGMRLMRTKGHRRAVVAVARKLAILMHRMWIDGSEFRQDQVGGMA

SEQ ID NO: 44384 - protein, 425 aa, unidentified
MNYKQNEKINQVKESTLVVGIDIGSTTQYARAFDWRGIELGKVFTFSNSREGFEAFKAWMQHLQDKYRKSDVIVGIEPTGHYWFDLGAYLEDEGILLVMVNPYAVKQTKELDDNSQSKNDRKDPKVIAKLVTEGRYSAPYTPDGVYADLRIMVANRKRLIREMTQIKNRFARWFAIYFPEYTDVFGDYEAQSSMLLLKKVCTPEAIVELGAEKINKIWRDAKLRAVGMKRATTLCETAKRSIGLKKGSSAARYEMKLLLEDYEYKKAQLDAVMEEIEKLCRKIPESEQMLAIKGIGVITVAGFLAEVGDVRRFESPRQIQKLAGLSLRENSSGKHKGQTTISKRGRSKLRAVLFNAAIPLIAKNPEFKSLHEYYTTRANNPLKKKQSVIAISCKLIRVFYAILAKGVTYDAQKLISDIHRQPQVA

SEQ ID NO: 44385 - protein, 338 aa, unidentified
MESYAGIDLHASNNYTAVIDDHDKRLYGKKQLNRLDVVLSALDPFKTELKGVVVESTFNWYWLVDGLMENGYKVHLANPSAIKQYEGLKHTDDKWDAFWLAHMLRLNILPEGYIYPKEERPVRDLLRRRLLFVKHRTSHILSLQSMITRNLGVRMACSGIKKLMEGDAESMFDSPYLVLAAKNNIATIQFLKKRIKVIEREIRPLIKIREEFKNLLTIPGIGDILGFTIMLEVGQLSRFPKVGDYSSYCRCVKSERFSNGKKKGKNNKKNGNKYLSWAYIEAANFIRRYCPKANSFYQRKKAKAGGIVATKALSNKVARASYYVMRDQVPFDEDKLFA

SEQ ID NO: 44386 - protein, 351 aa, unidentified
MMIIGVDYHPSFQTMAFLMEETGECGEQELNHSDGQAERFYRDLKQRGIRVRIGMEATGYSRWFERLLAELGFEVWIGDPAEIKTKRVKKKKNDREDARLMRKLLLENRFPRIWVPDPENRDLRQLLWHRHRLVQMRTRIMNQLQALAMNEGYRWKKKLFSEQGRAQLEKLSLAPWASRRRQELLELLDRMNPTIAELTAAVEREARKRPVVQRLMTHPGVGPLTALAFVLIIGTWERFPRGKQIGNYVGMIPSEDSSAGKQRLGHISKQGNSLLRFLLVEAAQAAARTHPDWRRRYVHLAMRRHRSIAKVAMGRRLAVRLYWMWRNGCEYSQSLEFGSYAGQLGTGHGAK

SEQ ID NO: 44387 - protein, 320 aa, unidentified
MDEAGKIKRQTEIKNEKNKIFKFFKRYSSASVAVESTMNWMPFYENLESMGCNVVLSNPLATKAIAAARIKNDKVDSRVLADLLRTNFLPTAYIQPREIRDLKELVRQRMNYVNMRTQIKNQIHSVLFKSGVSHNFTDLYGKAGMEFLKTLELRDVYRQQLNWHLTALSNISIQIKEMSDIIEETAQADYDCRLLMTIPGIGYFNALLIKSEIGDISRFTNANKLCSYAGLIPSTYASADKVRHGRITKRGSKWLRKALVDSVTSGCRHEGRLAYVYRKLKKSKGTGKARVATARKLCHIIFAMLSDKQPFREFTPVKQR

SEQ ID NO: 44388 - protein, 362 aa, unidentified
MLQSTTIIAFDQHAASVVAAVLLPGQRTPAIQPLTADLPTIGRFVARLAADQPVRCCYEAGPCGFELQRFLVARQMPCDVIAPSLIPRRPGDRIKTDRRDAGHLAVLYRAGALTAIHIPTDQEEAARDLLRCREDIRADLLRARHRLSHFLLRHGRRFTATKRAWTKRHSEWLQAQRWDLPALEQTHRAYVRAVDDAVARLHSVDDELRDLLTIEPLKSRVERLRCFRGIDDLTALTIAAELGDPRRFPTAPSLMAFTGLIPSEHSSGAKRARGPITKTGNAHLRRVLVEAAWQYRHHAFLGPSLQQRQRGAPPIAIDIAWHAQRRLHRRYRVLAARGKPKPLIVTAVARELTGFLWAALTQ

SEQ ID NO: 44389 - protein, 338 aa, unidentified
MTILMGCDQHRAQITTEWVDTVTGEVSRARVAPADRAGVRRFLTRFRGQPLEVALEATTGWRFVVEELQRIGAVVHLAEPADTAALKGSKKRAKNDRADARHLRELLMAGRLPESWIPPAHILDLRARVRLRHTLSEDRGEWQQRIQSVLYHHGCPQRGDLINRAGLAWLAALPLPACAREQVATALAMIDALERQLAPLDKELRRYARRQSGCKALQRHYGIGPLTAVTILAELGDPGRFSSSREAVRFSGLDITVHASDQRRAPGHLSRQGPPALRWALFEAAQCARRPNSPDHPYYQQAANRLGGNRACLSVARKLLKRSYHTLRELGEEALQPA

SEQ ID NO: 44390 - protein, 349 aa, unidentified
MRSFTPPADTRFYAGVDLHARALFLIVLDHLGKVVLARNLPANSDSFLRAIAPFRDGLLVACECMHCWYWLADCCRDQNIAFVLGHAWAMKAVHGCKTKCDRKDAEAIARLLKGGNFPPAYAYPKERRGLRDLLRSRLRLVRQRAELYGHVHTARRQANLPPVSNDVKYKCKRAACTADIADPFVRRRVETHLALLEPLDTAIRRLEVEIENAARGIFPVELAVLQSTPGVGPVLSLTILLEIDTIDRFDTRQQFCSYARLCGAVQTSDNKRCGGGNAKAGNAWLKWAFSEAAVLSAQKDPRLGAYLNRLAAKLGKAKAYSALSHKLGRAFYHMLHTKEVFDVNRFVRH

SEQ ID NO: 44391 - protein, 344 aa, unidentified
MNNTLVGVDLAKWFFEVVVSNHPGSVVGRRRLTRATFLRFLAQLPTATVVMEACGSAHYWAREIQKLGHRVVLLPPQYVRPYVLRDKTDHADAKGLLEAYRNDSIRPVPIKTPQQQLLGSLHRLRAGWLSDRTARINTLRGLLREQGIFIPLGARKVVPQVWAVLEDADSAVPEALRPFLAEVLHEIRDLERRIESCEGQLELLAGQLAAVQRLLTIPGVGLLIATALVAFVGDVRRFPSSRHFASYLGLAPRERSSGAIRRLGRISKRGDVYLRMLLIHGARSALRAATTHKQPDRLRSWALKVREHHGTRKAAVALANKLARIIWKVWRGDDTTFESSPHAA

SEQ ID NO: 44392 - protein, 420 aa, unidentified
MSNPLTTLYVGIDVSKDSNVVCCLSFEGKKLFSGSFKNNNDESQNLQSKIVEIQKNNSFDSIQIVLESTGVYSFHIGLFLSSSEMLNAVNTTVFVVNPKMTKNYSKSYIDMTKSDPSDSFMLADFARCGRTKMLKPFRGKQRLALQRLTRYRKHLVDLLCQEKMYVLNNIFIKFSEFNNKSHDFKTFSDTFSTSAIEILTNYYSPEIIASTPVDKLADSLRKYSKNKFSDPEAIASKLQSAARASYRLDKIMYEPINACIASSFCLIRAYEKQIKDVEEQIGSLIKGLDNQNEYNSLISIPGIGPVYASGILSEIGSISDFNSDDALANFAGLTWKKTQSGSFDASDTPMQKNGNSYLRYYLIEATQNIISNIPSYKEYFDKKKSEVTTHAYPRARVLTARKVLRLIYSLVSQNKLYQPK

SEQ ID NO: 44393 - protein, 423 aa, unidentified
MLEETHDDQEIIARVAALDIGKAELVCCTRLPSQNGSGRRVQEVNTYSTMTRSLQVMVDRLLELGVTRVVMEATSDYWKSPFYLLEAHGLDVWLVNAKDVKHLPGRPKTDRLDAVWLAKVAERQMIRASFVPPAPIRRLRDLTRYRVALVDDASAEKNRVEKLLEDAQIKLSVVASDIFGVSGRDMMDQLIGGQRDPKVLAQLARARMRTKIPQLEEAFHGYFTDHHAFLLTNMLARIDQISAHIAALDTKIEAELAPFAEAVERLDQIPGVGLIAARVIIAEIGLDMTRFPTPAHLTSWAKFAPGVNESAGRKKGSGSTGHGNRYLASVLGEAAISASRTDTFLGERYRRIARRRGKKRALVAVGRSILVIVWHLLSDPDAQFQDLGANFYDTRLGTERAKRNHVQHLEALGYTVTLEPTAA

SEQ ID NO: 44394 - protein, 313 aa, unidentified
MSEETFVGIDVSSDHVNVHILPSDKKGSWDMDAKSIESLVKQLKKASPKLIAMEATGGHEIQLCAALLAEGLPAILANPRRARQYAEGIGILAKTDPIDAYCLARFASEIEFKKRHFPTEEERFLKELLARRRQLIDLRTQEKNRLSRPCSSLVKRSIQTIIRTLDEEIKKIDKDLDDTIKRNSEWSEKCKLLQTIPGVGKVVAITFVADVPELGELNAKEIASLVGVAPYNRESGKLKGRRMIKGGRRNPRKALYMAVVIASRYNPRLRPFYEKLRASGKAAKVALVACMRKMLIIMNAMIKAKKPFQEIFA

SEQ ID NO: 44395 - protein, 391 aa, unidentified
MSMYFAGIDISKYKHDCCIIAAADQSVVAKFTFKNNKEGFDQLLTTINSLSSPEDIRIGFESTSHYALNLELFLENASLTFMEVNPVLISEYKKSTTLRRTKTDSVDCESIARWLMTVEYKPHSKGFYHAYSLKSLTRLRDRLVRQRSLYLVKLTNVLDHTFPEFKPFFNERFSKTALYLLENYGSAENMSAMNETDYNEIRRISHGKFSPQQFLELKRLATDTVGINNSIFDVELESLLSLYKSLAKEINTLEGEIIRLINEVHPHFMTIPGIGPISAAVIYAEYGDISNFSSPAQMLAFAGIEPSVNDSGTESHGGKMVRHGSSPLRYVLLNCCLPLIRFDMTFATYYAKKRHEGKPHRVAITHVAKKLIRVIFALEKQNIDFNSKKLR

SEQ ID NO: 44396 - protein, 375 aa, unidentified
MRHRLLGPVEFAMVRSALTATIGRVRGVLACPDVAVKVGVEACGHYHQPLLNASAWPVGWEVLELNPGHVAEQRRVQGRRRVKTDAFDLDAITEMLLAGHGTPVTVRSEVLGQLTAWTAHRTRRVLTRTATKNQLLGQLDRAFPGLTLALPDVLGTKVGRLVAEQFADPARLAALGSARFVRFAAARGLQVRRPVADRLVASARDALPTDAALVARRVLAADLRLLHELEQEITATELELAILLPASSFRTLTTVPGWGVVRAANYAGALGDPDRWPGPAQIYRAAGLSPAQYESAGRRRDGSISREGSVELRRALIDLGVGLWLCDPAAKRYAAGLKSRGKRGGIIACALAHRATRIAHALVRDQRPYDPARWI

SEQ ID NO: 44397 - protein, 424 aa, unidentified
MKVTYLTCCGVDVHKSFLVATIVKTTGGIEPSYQKKRFSTFNHSILEFKQWLLENDCHDVCMESTGKYWVPAFNLLEDEINVTIANPKWVKAVKGNKDDTKDSKWIGDLFRFGLVKGSYIPCKIIRILREYTRYRYKLVSCRSSEKNRYQNALTVCNVALDSVVSDIFGKSSTSIIDYLLEQADNSINHEEIASKLLRRLKSKEDAVIESIEGYQMTDSQKYRMRLVRAHMDYITAEINDVDSMIESMISSDPDYENAIQFLMTIPGVKRDSAITIISETGIDMSQFCSSKRLCCWAGLVPGSNESGGKKKSVRIARAGVYLKPALVQCAHAAVKSEKSPYYKKKYESLMKRRGKKRAIVAVARMILTAIYQMLSTGEAWNPSDLYKIDMPEALLEKQKTKAIKQAMKLLQREGLYPPPEPIAS

SEQ ID NO: 44398 - protein, 408 aa, unidentified
MEVMYARCAGIDIGKDVLVAAIRIQNGSVQRLCRTFRTTRAQLLSMAAWFESVGITDVVMEATGSYWKAIWHVLEGRFGLTLANPAQVKNLPGRKSDVNDATWLADLHAHGLIRGSFVPTPDIAAMRELTRTRKQFVREVNRHTLRIQKILDVAGLKITGPISEILGVSGRRIVKALIAGETDSERLADLVDPHVRATRREIIEALQGQLTAQQRRLLKMHLHLIENLEADIGQIDHDIQKAVKPFRAVVERVMEIPGFSDVSAPALLAEIGVDMTRFPTAGHLISWARLCPRLDESAGKVRSRKTLKSAAWVKTLVTQAAMSAIRTRNSYYRAQYFRIRARRGTNKAIVAVAASLLATVYHVIRDHKPYRDLGADYFQRRDTDRIVRQSLARLKKAGYAVTLTREVA

SEQ ID NO: 44399 - protein, 357 aa, unidentified
MTIITSNEQGGVVVGVDTHADQHTAAVMDRDGKVLDLHQFPTTAGGYQALLVWAQQWPVTAWGVESSGSYGAGLCRVLRDHGHTPTDVALPDVLVRARQGKSDTIDAVMAADAVRSGRAQTMAKDTRSVVESIRLLLITRESAVKARSVAYNQLRDLVTTAPTALRDSLPTGKTARAAACRGLRPDSTRLVDPTQAAKAALRSVARRIDDLDTEIKALDAALNPMVAGVAPRLLARPQVGPLIAARILVTLGCDPQRVPTDAKFARLTGVAPIPASSGHTTRMRLHRGGDRQANKALHLVAVGRKKNHPPAIDYFTKRTNAGLSKRDTIRAMKRLIARELFYAAKADLTALNQLDGL

SEQ ID NO: 44400 - protein, 363 aa, unidentified
MAEPSRKEPSYEVISPRRANFVVQRVPFSAGDTIADHVVWSDRTKRRKNMKALRPHVAGVDVHKDMLAITIMIGSGDEDPVVEHLECTTMTDDLRACGLVLRERGVIDVAMESTGVYWKPVYNVWEPLGLKCIIGNATHMKNVPGRKTDMNDSHWIAQLHRFGLIRASFVPDGIYQRLRLLSRHRTNLVEDLSRVKNRVEKVLQDGNIKWSSIVSDTFGVAGVTILDLISEGVTNAQTLAASITTKIQKKEDAVKALTNCFTNQHIYVLKELMGQYRHIKKLIQNVEDELTEQMLPYAHLVEELDKIPGIDKILAMGIIAEASADMSKFPDERKFAAWAGVASGNNESGGKKKDQNAATAIRT

SEQ ID NO: 44401 - protein, 391 aa, unidentified
MIYVGIDVAKDKHDCFITNSDGEVLFKPFTITNNLDGFNELYQKIESVTEDATKVKVGLEATGHYSYNLLGYLIDKGLAAYVINPLHTNLYRKSLSLRQTKTDKVDARTIASMLMSDVNLKSYSDISYHNEELKSLTRYRFDKVKERAKLKSSVSRLVCILFPELEKLVPTLHMASVYSMLSEFPGAKHVASAHLTRLTNLLSEASKGRYSKDTAITFREAARASIGSNMPAKSLELKHTIKLIQELDSEIDEIENEIKIIMDEINSPILSIPGINYRMGAMIIAEIGDFNRFDSPDKILAYAGFSPSTYQSGQLDGAHAHMEKRGSRYLRYALYNATKYVCHWDPTFAAYLAKKRAEGKHYNVAISHAVKKLVRVIYHLEKTKQQYIKAA

SEQ ID NO: 44402 - protein, 382 aa, unidentified
MNRILKIGMDVHSTSYTLCAMEPVLGGEDRIFANIQVTSDYRNVIQFIDKLKEKLGSSDSYSIECGYEAGCLGYSLYHQLTKSGVKCTILAPTTMLTQQGKRVKTDKRDAVMIAQCLSYGGYHAVHVPADKDVSVKEYLRMRDDHKVALKKIKQQINAFCLRQGYFYAGNKWTIKHLNWLKKLVLSDLYRETLNEYLTSYEEQTAKIERFDKRIEELAEDSDYQENVKKLGCLLGIKTHTALSLIVETGDFKRFRKGNTYAAFLGLAPGESSSGEKINRTGITKAGNSHLRTLLIEAARGMCRGRIGYKSKVLRSRQDGNPTEVIAYADRGNTRMRSKYYRMIRHGKKDNVAVAAVARELACFIWGLMTNNITSKGEGTKAA

SEQ ID NO: 44403 - protein, 350 aa, unidentified
MMIIGCDLHTRYQQIAMLDTDTGELAERRLEHESGEAQAFYAGLSGKVRVGIEATGHTHWFEAMLAELGHELWMGDAAKIRASVIRKQKTDVRDAEHLLNLLREGRFPQIWRPSPAERDLRQLVWHRQKLVWMRGAVKNQLHALAMGEGVCRKKKLFTAKGRKELEGLALGPWASYRRQELLRMFDELAAATAQLDAAVEQAAKDQPLAVRLMTHPGVGPVTSLAFVLIIGPVERFEHSKQVVSYLGLNPQEHSSGGKQRLGSISKQGNPMMRSLLVEAGHTAARFDPALKRMYQRLKFRRGASVAKVAVARKLAVRMYWMLRSTADYAQLVRMQGSPWATLVENSPSLG

SEQ ID NO: 44404 - protein, 359 aa, unidentified
MTVISMPEAAQPAQPAELPAEEVILGVDTHKDVHVAAVITVLGASLSHRDFPTTAAGYRQLLSWARSFGVLRRAGVECTGSYGAALARVLRREGVQVIEVNQPDRVGRRKHGKTDAVDADAAARAVLSGRATATPKTGEGPVADMRVLRLAKESAVKARTQAMNQLKAVMLAADPELRESMARLTNSALISKCVDLPDGDDQVVFTLRLLATRVRQLTVEVKELTRRLTRSVRSCRPQLLELVGVGPDSAAALLIAAGDNPDRLADEACFAALCGVSPVEQSSGKTQRRRLNRGGDRQANAALYRIVQSRLRWDERTQAYLRRRTTQGLSRREIIRCLKRYVARELFRHIQPASAPSRT

SEQ ID NO: 44405 - protein, 316 aa, unidentified
MTEALYVGIDVAKDSFDVASDPVGPKLSLPNDPKGWQKLLDSLQTHPVALIVLEATGGYERRLAAELIQAGYNVVVANPRQVRDFARGMGELAKSDSIDADVLAQFGRLVQPKPRPQPSGQMEVLSELVTRRRQLTDLHTQETNRLPMARHATVRKSLQKIVRALEHQIADLDKLIHDKIQSDDGLRRKGDIVRSFKGVGPGTSSMLLSHLPELGSLNRQEIAALVGVAPWTCTSGKWKGKSKIWGGRMEVRNMLYMAALAAIRSNQVIRVFYQRLISNGKLFKVAITACMRKMLVILNTLVRNDTKWSPQFVKNA

SEQ ID NO: 44406 - protein, 315 aa, unidentified
MMVNAHIQVSNDNAGFKKIGSWVAKVGKDFDTFLFCMEYTGLYNQNFRLWLESKEYIYGMVDPRKMHHFEPDLDDDQRSLDRIKTDELDAFRIAIYCEQNHKKILRNPSKLPSPVYLKLKRLLVERKQNTKQSTLCKQQLHDTCAYDTDLSVERKKLLLKNMQENQKAIDKEIDSYIQEDASISKNYELLTSIPGIGRIIALETIVLTENFTAISNPRKYACYIGIAPFKKESGTSVRKKTGVSKKGFSEAKADLSIAVLSAITYNPAIRDYWIRKKKEKCGGIVLNAIKFKLVLRMFAVIKRGTPYVETDAYKN

SEQ ID NO: 44407 - protein, 445 aa, unidentified
MADLRHLALTVSHPRSRERFLALHEIAQGSCATAVAERTGRRAQTVMGWLHAYNEHGPGALTYQRTGGRPPCILPLPALKQSASLSVDGSPQPPRVREPVEKQGAPSTGSKRNPNSRQGRTASPHSQGRVMEQPATTPSFVGIDVSKDRLDVHLRPAGQAFTIARDSKALEQLVTDLRALAPALIVVEATGGFELTVAAALAGAGLPLAVVNPRQIRDFARATGRLAKTDALDAQVIALFAERIRPEPRPLADADSQTLAELVTRRRQVIEMIGMESNRLHQARDLRVQRTIKATLKTLEAQLARLDREINDTVKGSPAWRAADDLLTSVPGVGTITSFTLIADLPELGQLDRRRIAALVGVAPINRDSGQMRGRRTIAGGRTDVRNALYMAALSAIRWNPVISEHYQSLVERGRPKKVALVACMRRLLGILNAIIRTKTPWQCA

SEQ ID NO: 44408 - protein, 347 aa, unidentified
MRFYTHPHQVYCGIDLPARSMYVCLVNRDGEILVHRHLKAAPEPCLKAVAPYREGLVVAVECIFTWYWLADLCAAQGMPFVLGHALSMKAIHGGKAKNDQIDSQKMAALLRGGMLPQAYVYPAERRATRDRLRRRTPLLRTRAELLAHVQNTNSQYNLPEIGKKLAYKANRDGVAERFEEAAVHKTLAVDLGLITYDDELLKDLELSLLKTAKQHEAQTLYLLQTVPGIGKILSLVLLDESHRIARFPRVQDFASYGRLVKCSQESGGKRLGPSGKKIGHAHLQWAVSEAATLFVRNHPQGQKLLSRLEKQPDKGKALSLLAHKLGRAVYCMLKREVAFDLERFLQT

SEQ ID NO: 44409 - protein, 343 aa, unidentified
MHVNTIGVDLAKNVFQVHGVDSAGKVVITRQLRRKQVLEFFSKLPGCLVGMEACGTGHHWAREISKLGHTVRLMPPSYVKGYVKRSKNDAADAAAICEAVTRPSMRFVPIKSTDQQALLMLHRTRDLLIRQRTQLINALRAHLAEFGLVAETGREGLAQLGAIITDESNHEALPSAMKQALQAIVDQLAALELQVGALDRAIHAHHRANDMSCRLETIPGIGVIGATAIASTVADPSGFKSGRDFAAWIGLVPRQHSTGGKERLGGISKQGDRYLRRLLVIGATAVVRQARLHPQKHPWIMRLLAKKPAKLVAVAVANKMARIAWAIMAKGGHYRAPELAAAT

SEQ ID NO: 44410 - protein, 369 aa, unidentified
MADRITYVGLDVHKDSIVVAVAVGGLRGEVREYGRIANTSAALDRLLRKLGGDGMTLRFCYEAGPCGYGIQRRLSARGHECVVVAPSLIPKRAGDRVKTDRRDAASLAKLHRAGELTAVWVPDAQHEAMRDLVRARLDAVHALRRARQQLAGFLLRQGCHYGRPAWTKLHRRWLAGLKFAQAVHHLVLEDYIAAVEAAAARRDRLTGQIEAMLPDWTLAPVVAALQTMRGMALVNAATLIAELGDLSRFANPRQLMAYLGLVPSEYSSGASIKRGGLTKAGNRAARRLLIEAAWCYRFPARVSRELLLRQEEQPKPIREIAWKAQLRLCARYRRLARTGKPANIVTTAIARELAGFVWAIARQVTVTTD

SEQ ID NO: 44411 - protein, 397 aa, unidentified
MYIVGIDIAKRKHEAAVIDGEGAVIIKPFSFANNCSGYNRLLAMLTKAKLPLDEVSFAMEATGHYWLALFTRLQKEGFRVQVINPVQTNSIRSFYIRQAKTDPRDALLIAEVIRFGHFSESTLHPENIYELRELCRGRHAIVSMQADVKRKVVALLDQVFPEYETAFTNLFSDTSMAILQTCPTPKELSEMPLEELCRLIEVSSHKRFRMVKAQELQELARNSFGFAMAGDVFSTMIRLYAKHLVFLKQQVQEMDRKIAEIMDTLDTPITTITGIGPTLGAYILSEIGDISRFSSAAKLAAYAGIDPTMRQSGEYNGVRNRMSKRGSPYLRHAIWLAASSAVLHDPALKLYFQKKRDEGKPYMASVGHACRKMVSIIYAVMRDNKAYTPYIPNEISA

SEQ ID NO: 44412 - protein, 377 aa, unidentified
MREKLRFLGLDVHAETIAVAVAEPDGEVRSLGTIANREESIRRFIRRLGSPEHLRACYEAGPTGFVLYWQLTQLGVKCDVIAPSLVPKKPGDKVKTDRRDALKLARSHRSDDLTAVWVPDEASEALRDLVRAREAAKRDQLRAQHRLTKFLLRTGRRPPLGVKAWTERHAEWLQQVRYTHPAQEATLLDCLHEVQHMAERVKRLEKSIVEVIQLAPASMQEVIRGLQALRGIAHLSAVTIAVELGNITSRFERARDLMGYSGAFPDENSSGKRIRRGGITKSGNAHLRRIVVESAWSYRHRPAIGARLRRRQEGLPAEITEIAWKAQNRLHKRYMQLMARGKEQRKTMTAIARELLGFIWAIGIKAEATACKQQMAA

SEQ ID NO: 44413 - protein, 415 aa, unidentified
MPAAGCGVDWAETHHDVAVVDEHGAVIVAERIGNDAAGLARLLEILAEHDPDEGDLAVAIETSKGLLVAGLRAAGRQVFAINPLAVSRYRDRYRSSRGKSDAFDAMVLANILRTDRAAHRPLPADSVAVQALQVLTRAQQDAIWDKITLTNRIRSLLKVFFPAAIAAFERGGRHRLESAACRTILTAVCTPQAAHALSTRQLAGLLKRAGRQRGIEAEALLLRELLRVDQIRQPDPVERAMGTQLRGLIRQLDAVCQTLTGLEEQIDLAFCAHRDAEVVSSFPGLGTALGARLLAEIGDDRTRFADARGLKAFAGAAPVTRESGKSRFVHSRRAKNDRIAATGYVWALAAIRHDPACEARYRARRAAGDRHAAALRRLFNIMLGKLHHCLATGQLYDPAAAFPPPKPIGDQPTAA

SEQ ID NO: 44414 - protein, 376 aa, unidentified
MKNVRFVGLDVHAETIAVAVAELNGEVRSLGVIPNRAESVGRLMRKLGKPEQLRVCYEAGPTGYVLYWQLAQLGVHCEVVAPTLVPVKSGDRVKTDRRDAEKLARCYRAGDLTRVWVPDAAHEALRDLVRARLAAKRDQLRARHRLGKFLLRQGRRAPEGTTSWTGKYLGWVKQQHFEQAAQEATLLDYLHEVEHVAERIMRLERGIDAAVNSMPESLRTVIAGLQCLRGVAKISAVTLVSELGQISRFAHARQLMGYAGMVSREHSSGERIRRGSISKAGNAHLRRIVTEAAWSYRHRPSIGKTLATRQCGSSETVKAIAWRAQHRLHARYRALLARSKTKQKVITALGRELLGFIWAIGVELERAQHQEVRRAA

SEQ ID NO: 44415 - protein, 350 aa, unidentified
MMIIGVDYHPSFQQIAFLIEETGEYDEQRLNHEGGEAERFYRDLKRKGIRVRVGMEATGYSRWFERLLAELDFELWIGDPAEIAAKRVKKRKTDREDARLLLRLMREDRFPQIWVPSPENRDLRQLLWHRHRLVQMRTRIMNQLQALAMNEGKRWKSKLFSEKRAEFEKLALGPWASRRRSELLELLDRLNPSIEELTTAVEQEVNKRPEALRLMTHPGVGPITALAFVLIIGTPERFARGKQIGTYVGMIPIEESSGDKQRLGHISKQGSSLLRYLLVEAAQAAARYNPHWRRRYVRLAIRRHRSIAKVAMGRRMAIRLYWMWRNGCEYSPSFEFGSYAGQLEKRYGGN

SEQ ID NO: 44416 - protein, 315 aa, unidentified
MVSAVYVGIDVAKGWLDVAARPGAAPWRVDNDPAGVALLVAQLDTLAPALVVLEASGGYERPVVAALAAGGLPIAVVNPRQARAFARATGQLAKTDALDAKALAHFAEAVRPPARVQPAVEAQALTALLTRRRQLVAMRVAEQNRLETALPAVRAGIAAHLTWLREAAAAIDEELRRAVAADPAWREAEALLRSVPGVGPVLALTLMAELPELGTLTRQQAAALAGVAPLNRDTGRQRGVRTIWGGRAGVRGALYMGALTATRWNPTIGAFYRRLCDAGKPRKVALVACMRKLLTILNALLRTRTPWQPVPPAQC

SEQ ID NO: 44417 - protein, 445 aa, unidentified
MAHANRLSRGDVRRNARLDRLRRVVSRDHAVLAVDLADDTQVVVVCDHDSRVLARRTWRCRPWQLDRALRWGLAVACRRGFAGVVVACEPTGHRWRVVVEQASRLGLEAVCVQPLLVGRAREAEDFTRDKSDDKDALLIARLTTQLHCYLPERPTAAWARLRHLGNRRVEQLALATAAQQRLRDLLECGWPAALEVARHPLDSSTWRAAMTVGRCDPARIRRLGFTRFARAVARELPRWGGRRRNLGVLRALYAAAGDDRGVEAQRAGALERAALVLTDFKQALAALAEVEGRMAKVLAELGLAELVTSIRGVSVVGAAAILAETGDPTRFDDAKAVVKHAGLCPRDNASGAFAGKTTISGRGRPLLRLAAWRAVWGALPHNPVFAARYAHLTSRQHNRLSDGQARTAVAAALLRQLWVVCVNRTPWELAVAGGTIRKEVTDPAA

SEQ ID NO: 44418 - protein, 344 aa, unidentified
MKYYAGLDVSLEETSVCIVDGEGTIVAERKVASQPGAIAEALRDSGFALTRVGLEAGPLSPWLHAGLRAEGFAVICIETRQAKAALRAMRNKTDRNDARGIAQIMRTGWFRMVHVKSGESHELRFLLTNRKTLQRKALDIENEIRGALKAFGLKVGKVSRRRFEARVLELVADRAALHRMVVPMLKARAALLEEFARLHRMVLEVVRDDEVCRRLMTIPGVGAITALTFKTGVDMPGRFAKSKTVGAHFGLTPRKFSSGEIDYQGRISKCGDAMVRSALYEAANVMLTRCTRWSALKAWAARIAKKAGAKRARVALARKLAVIMHRMWIDGTDFQWGEQTKAAR

SEQ ID NO: 44419 - protein, 343 aa, unidentified
MAIIGGLDLHRGQLTYDYLDVVTGQVDRGRVVPADRGHLRSFLARFDGQGEVAFAVEGCTGWRYVVEELERVGIGAHLAEPAETAAKRGRKRRAKTDRSDARHLRELLVKGDLPCSWIPPAQVLEVRARVRLYKDLEEERTAWLQRVQATLYHQGVPVIAALTSVAGQARLAAAELSPAGRQAVEVGLRQLDRLTGELDPLRAELARFSRRQPGCRALRTTHFGIGPITSVAIWAEMGDTRRFSSSDDAVRHSGLDITVYASDTKRAGGHLARQGPATLRWALYEAAVCATRPNSPDHASFLAVKRRADGHLGVISVARKLARRVHHTLRALGDQAWEPVAAV

SEQ ID NO: 44420 - protein, 347 aa, unidentified
MKFYTKQHQYYCGIDLHARTMYLCILNQAGDIVLHRNLKTDPTLFLKLIAPYREDLVVAVECIFTWYWLADLCAREDIPFVLGHALYMKAIHGGKAKNDKIDAHKIAVLLRGGMLPQAYVYPAAMRSTRDLLRRRMHLMRKRAELLSHIQNTNHQYNLPEIGKKIAYKANREGVTERFADLAVQKSIEVDLALIDHYDKLLSDLELYIVNTAKQHDVNAFYRLRSVPGIGKILALVILYEVQDIRRFPRVQDFVSYCRLVKCAKESAGKKSGTSGKKIGNAYLKWAFSEAAVLFLRNNPEGQQYLARLEKKHSKGKALTVLAHRLARAVYHLLIRGEAFDRQKFLNR

SEQ ID NO: 44421 - protein, 456 aa, unidentified
MPNYYLGADISKGYSDFIMLDAAKRPIEDSFQLDDTFEGHHKLYRIVSKFCNDHPNARIYAAVESTGGYENNWFDALIKFQSSLPLKTARLNPCGVHNNSKAGLERNITDPISAENVAKYMIAHPEKVTYQQQNPLYSLRKQWSFIKMLLKQKTQLLNQLESNLYAANPEILAYCKSSTPKWVLSLLGRYPTAAKLAKAKRSSLTSIPYVTQSKANALISSAKKSIASATDQISAQIITATVKQIQHLTKAIEAQVKIITKNCSVPEVELLKTFAGISDISAIGLMLEIGSVERFAAAKKISSFFGLHPIYKKSGDGTWGFHMSKKGRVVPRYILYMVAMSAIQCNPLIREIYLRHTAKGMKKKAAIGVCMHKICRIIYGMLKHNMAFDPRVDRKNTKKSPQSKTKIRNDKRRRYQSFDAKAPISGRQNKKRKERKQSQSVNNAQCGIIKAPVPNS

SEQ ID NO: 44422 - protein, 330 aa, unidentified
MTTAVLGIDISKKKFHAALLRGGKFRDNSFSNNEEGFAKLEAWLQKQGVEGVHACMEATGTYGEELAYFLTSRGHQVSIVNPACIKAYGESKLTRNKTDQSDAHLIARYCESERPGAWTAPTAEVRQLQALVRHLDALVEMRVQEMNRLSSGVREQLVIDSLKSHIEYLEREIEKISRQINDHINKHPTLKENKELLTTIPGIGEDTAIKLMAEIPDVNRYSSARQLAAHAGATPRRHESGTSVKRGSVMSKIGNVRLRKALYYPAITAKRFNPIISEFCKRLEQRGKTKMAIIGAAMRKLLHQVFGVLRSGKAFDPNYGVGIVALKPTA

SEQ ID NO: 44423 - protein, 344 aa, unidentified
MTYYAALDVSLRSVSICIIDDKGNYQFEAKVISEVEDIVRCLQAFGGEIEMVGFEAGMLTQYLSYGLKASGFDAVCIEARHAQKTLSAMRNKTDKKDARGIAQLLRTGWYVPVHVKSMVSHHVRAMLSSRRTVLKKCVDLENELRGLLRIFGDKLPSKVSHSSFDAVVRPLVEKDAALGRALVPLLDTRATLYQTYLQLDAEVKTMVRKDAVCQRLMTVPGVGAITALTFKAGVDDPTRFKSSRLVAAHFGLTPRRQQSGEMDYAGHISRAGDADVRSALYVAAHALITRNSEWSSLKAWGVKLMKTKGHRKATIAVARKLAVILHRMWIDDTDFRWQSEERAA

SEQ ID NO: 44424 - protein, 377 aa, unidentified
MREKLRFLGMDVHAETIAVAVAEPDGEVRSLGTIANREDSIRKFIKKLGSPEHLRACYEAGPTGFVLYWQLTRLGVDCTVVAPSLVPKKPGDRVKTDRRDALKLAHCHRNGDLTAVWVPDEASEALRDLVRQREAAKQDQLRARHRLTKFLLRTGQRPPLGLKAWTERYMRWLAQVRYAQPAQEVTRLDCMNEFEHMSARVKRLEEAILEVIKQAPQAMQELIRGLQALRGVAHISAVTLAAELGNDISSRFETARKLMGYSGAFPSENSSGKRIRKGAITKAGNAHLRRIVVESAWCYRHLPRVGEKLRKRHEGIPAEILEIVWKAQHRLHKRYRKLTLAGKDLRKVMTAVARELLGFIWAIAIKIEQARTPQLAA

SEQ ID NO: 44425 - protein, 354 aa, unidentified
MSPWSSLVVVRSLVQTRTVAWVTPRTSKAGIYKMANFSPVVGIDLSGSWWDVAISSGTAVQGEAARFANTPEGRQACLAWVTARCHPGAVVACEASGGLERDAVALFHGAGFTARVLDPAQVQHFGRAQGRKAKTDAIDAAMIARYAATFPGRPAVPDPARKALTDMIGARDLLVAQVTASRNQATHFTDPSVRRSVELCIATMLRQIAALDRLIVRLIDATPAFAERNRIIRSMPGVGPATAARLLASLPELGTASAKQMACLVGVAPIANDSGNRRGARHISGGRHDVRKVVYMAALVATKHNPALRAFYERLCGAGKPKKLALIAVIRKLIGILNVMLQRNQMWHQTTLKA

SEQ ID NO: 44426 - protein, 346 aa, unidentified
MDHIGMDLGKKESQIAIITEAGELIEQRIRTERVRLQEVLGVRPKAKVLLEAGTESEWVARCLEELGHEVIVGDPNYAPMYSQRDRRVKTDRRDALALAEACKLGAYHRAHRTSDEKRHMRAVLAVRDAVVRTRTRFIGLVRPLLRREGFRVRNGNVETFVRRVAESALPEHLSSEIAPLLGLLGPVNEQIDALDRQLATMVRKDEVMKRLTTVPGVGPVTAVSYVSTLDQVERFRGAHKVESYLGLVPAEWSSSEIERKGHITKQGNSRTRWLLVEAAWCILGRKKQPATAPLREWADRIAARRGSRIAAVALARKLAGILFAIWRDGTAYDVSKLRSGRTKKAA

SEQ ID NO: 44427 - protein, 443 aa, unidentified
MICAAVERCAGIDVGKTFLAVCVMIGPLAAEARAQKRRFGTVVPELEALRDWLKQEGVTHVVMESTASYWKPVFNVLEKDFQVYLANPQEVKNRKGHKTDDKDGWWLAHLLRHAMIHPSFIPPRAVRELRDLTRRRKRLLSNATAEKNRIQKVLEDANVKLGSVLSDMFGVSGQLMLEALLDGKTEPAEIARLAKRRAQRRIPEMIQSLEGHQMSEHHRQIIRYSVKHLEFLDEQIGDLDRAIASKIREAGLQQQWELLQTLPGIQDLSAATILAETGGDMGQFPTPKDLSSWAGVCPGNNRSAGKNKSSRTTKGNPWLRAALTECAWGAAAKKNCFLKEKFWRITSKSGGHKAPAIVAVAHTLLLLVYQVLHTKKPFQDRTAPPLNERQKQRLIRHHIRRLGKLGIAIQATVPSNPGKPRRLGQSHPPKTHHPSCGGSHSKL

SEQ ID NO: 44428 - protein, 433 aa, unidentified
MSKFFNSPTVGIDVSADFSFVAILAPNGDVFKKPFRIKHDVSGFNHLLKEIKKVEEEFNMKTAIFMESTGVYHLSLFHFLNKNFDNTFVINPLVTKCNKNVDIRKVKNDKKDALSIAQIGKFQNIKLSQSVSMDIFQLKSLVREYYKLTDNCSTYKKKLSTDLRVIFPGYKNVFSNVTSNSSIAILNEFPTPQAILSAPKDLIINILMEKSKKGLIWSEKVYSNLINYANEATIIGLPLHGFSVKITSTIKIIKTLEAEIKNLLEQIESLINSPNFSEQIRKNIEFIDSIPGIGRLTAVTLIAEIGDINGFLRPKHLVAFFGIDSSVNESGKFKGNQNKISKRGTRIGRRALYAAALACIRTNRNGVPINKVLLHYYQINLNGKKPKVALVAIMHKIINYIFAVLRNQTPFEVRDPRIHKQMYLENKNKNTAA

SEQ ID NO: 44429 - protein, 345 aa, unidentified
MTQFKRIGIDTSKAVFTLHGIDQQDRPVLRINLRRPQLLIFFKRLPPTEIAMEACGSAHHWARELTSVGHEVRLVPPQYVKPYVKRSKNDRNDAEAICEAAGRPGMHFVPVKSVTQQAQGMVLKVRQTLVGQRTQMTNTLRGHAAEFGVIAGKGLRQIGPLLIAIEQETTIPAEAREMAALLGQEIEHLDRRIKELDVKLAAAHKANEVSQRLATIPGVGPVTALTLAIEVDPAAFESGRHLAAWAGLTPKEHSTGGKQRMGGISRAGNERLRVLLVTGATSVIKAAMRPGSALMTDWLRALLARKPRKVAAVALANKMARVAWALMTRGDVYRRPAAATAAAAA

SEQ ID NO: 44430 - protein, 374 aa, unidentified
MGTGLMDDITFVGLDVHKATVCIAVAEGGRGGDVRQLGVFENRPEILSKVVSRLSKGGRRLSFCYEAGPCGYGLHRLLTGYGHECVVVAPSLIPMKAGDRVKTDRRDALMLAKLHRAGELTAIWIPDAGHEAMRDLVRARATAVRVLVKARQHLQGFLLRHERIYRGARAWTLAYRRWLSTVHFEHPAQQIVLQDYIHAVQEAETRRDRLTQQIEELLPNWSMAPVVAALQSMRGVALIVAVTVVAEVGDFRRFANPRQLMAYLGLVPSEHSSGPSVRRGGITKAGNALARRVLIEGAWTYRMSARVSRKLYDRLEPLPAAVRDIAWKAQLRLCARYRRLAAIGKPKVVVTTAIAREMVGFIWAIARLAQPALV

SEQ ID NO: 44431 - protein, 414 aa, unidentified
MEIVHTHCAGLDVHKKTVVAAIIVPDGQGGLWKEVRSFGSMTSDLLALSDWLMACGVTHVAMESTGEYWKPVFNILENNFEVLLVNAQHIKAVPGRKTDVKDSEWIAELLRHGLLKASFVPPLGQRELRDLTRSRSTFVRTRATLVNRVHKVLEGANIKLCSVASDVMGVSGRAMLAAIVQGQSSPAEMAELARGRMREKRDLLTKALEGRVQAHHRFVLTELLTQIDSLDETIERFNEQIEVYCRPFEEAVALLDTIPGVGRETAEIIVSEIGTDMSRFPTADHLASWAGVAPGNNESAGKRRSGKTRQGNKVLGAGLNQAAHAAAGTKNTYLSAQYRRLAARRGKKKAIVALEHTILVIAYHLIQRKEPYRELGGNYFDNRRPEATANRLVKRLEQLGYAVSLQQAPALASP

SEQ ID NO: 44432 - protein, 612 aa, unidentified
MAQKRGEETTRRLWDGLAFGNHLFFGHTSLRPSSLPDHASCLVVRGFGGCAASHAKGTGPARAFGAILVGRPWVVVTVPALVLCARWLGWSRELATTSLVTGPVLIPFGRLHVFPPLPPPRLSCVCFLLPEATMTPHKDYCLDPGPPAPTPTLPESSILTEALQVCNPHAAGIDIGEAEHWVAVPPGCDPQPVRRFGTFTADLDALADWLIDCGVTTVAMESTGVYWIPLFELLEARGVQVLLIDPRQAKRAPGRPKTDRLDCKWLQRLHAYGLLAGAFRPEDQVCVLRSYLRHRQMLLTSAAHHIQHMQKALQQMNLKLTQVVSDITGVTGMAIIKAIIAGERDPQRLAKLRNPHCHHDADDIAKALQGTWRAEHLFALRQAVELYEVYHQQMAQCDQQIKRHLETFADQSAGQPLPPKARRHKKTNEPRFDARTPLYRMAGVDLTTIEGIEENTALIILSEIGTDMHRWPSVKHFCSWLGLCPQHQISGGKVLSRRVRPGAHRVTVALRLAARSLHHSQSALGAFFRRMKARLGTPKAITATAHKLARLVYSLLQHGSAYVQQGLDAYEAQYRERKVKAMARQAQALGYTLVALAVPEVQEIAAVPAPTP

SEQ ID NO: 44433 - protein, 315 aa, unidentified
MQTEGMEVFAGIDVSKKTLDLDCYPVPHRAQFPNDADGHQALAAKLQQLGPSCIIVEATGRLEMELVSVLGMAGLPVAVINPKQARDFAKAIGVLAKTDSVDAAVLARFGQAVKPALRPVKSEELRQLEEVLTRRRQLVDMLTAEQNRKQQASIRMAKEIDEHLEWLKARIKGADTDLGNAIKASPLWKAKADLLASIPGVGKVTVCTFLAAVPELGTLNRRAISALIGVCPYNRDSGNYKGKRRIWGGRGSVRKVLYMATLVAIRFNPVLKQTYQRFLDAGKLKKVAIVGCMRKLLVTMNAMLRENAKWSATDI

SEQ ID NO: 44434 - protein, 348 aa, unidentified
MTVVFLGIDLAKNVFALHGVDAAGKPCLVRPQVRRDQLTELIAKLPPCTIAMEACSGAHHWARTFSAFGHTVKLIAPRFVIPFRMGGKRGKNDQADAAAICEAMQRPAMRFVPVKSVDAQSMLALHATRQGFVQARTATINRLRGLLSEFGIVLPLKAQTIRKRAAEALEGLPGWARFACTDLLSEVGRLDERIDTYDTHIRLSAQHDATCRRLMHMPGIGPTIASALRASVGGGHDFDNGGQLASWLGLVPGQYSSGGKNRLGRITKAGDSYLRMLLILGARAVLAAAAGKKDRISRWAVSLAERRGYWKAVVAIAAKNARMAWAMLSKGEDFKPVEDALPADVAPA

SEQ ID NO: 44435 - protein, 336 aa, unidentified
MRYIGVDLHTTQITVCYLKAEDDFEIRKYGLCEMDKFVRTLELTDEIAVEATCNTRWFVEQVQAAVSRVVLVNPRQFAVVKNSVKKTDKNDALNLARFLKADLLPEVRAKREEAEGVQSLVNTRTKLVRLKTSLSNKIHALYVSNGRKLKKASLASEKGLEKVLLCEWSAIERIELEIIVEQIRSLKVSIKKLDKAIEAESEKLKGYESLVSMSGIGSLSAGILLAVIGNIKDFATADKLASYFGIVPRVSNSNETVKHGRITKQGNRTGRTTLVQCSLAAIKKSEYLKKYYEQVKARRGHGKAKIALARKYLGIIYNTLTNNWVFADFNNFELAE

SEQ ID NO: 44436 - protein, 344 aa, unidentified
MNYYAGIDVSLESSSVCIVNATGEIVKEAKVESHPDALVKFFKAFGLPLAVIGLEAGPLSQWLYAGLTTAGFVTSLMETRHVNAALSATAVKTDRRDARGISQLLRMGWFRPVHAKSAGSQELRALLVARKQLQHKLRDIELSLRGILRGFGLKVGKVTDKTFEARIRELVTGHPMLEQIAKAMLPARAMLLEQFNKLHKAVLKIARRDATCRRFMTTPSVGAIVAITYKSALDDPGRIKKSRNAGPLFGLTPKRYQSGETDITGGISRVGDEMVRTALYEAANVLLSRVTRFSALKRWGLEVAKRRGLKRAKVAVARKLAVILHRMWINGSTFQWTKTEAAHA

SEQ ID NO: 44437 - protein, 342 aa, unidentified
MNEVSIIGLDLAKNVFQAHGAEADGSVVFRRKLSRAQLLKFLGDQPPCVVAMEACASAHHWGRAIGDLGHEIRLIPPAYVRPFVKRQKNDMADAEAIAEAASRPTMRFVAVKSEAQQAAAMAYRTRDLLVRQRTQTINALRAHLAEQGIVAPIGPAHVGRLAAVVNDDDGALPTTVRDLARLLLDQITGLSEKVADLDAELRRRANTDDTARRLTTIPGIGPITAAAITTFAPPMETFTKGRDFAAWVGLTPRQHSSGGKERLGRTSKMGQRDIPRLLIVGAVAVVRWAARKGAPEGSWLARMLERKPKMLVAVALANRMARTAWALMRKGEDYRDPAMATA

SEQ ID NO: 44438 - protein, 321 aa, unidentified
MQGKAHVDAMAAVYVGIDVCKARLDVYLHPCGERFAVANDAGGRRRLRRRLDKLAVALVVIEATSKYHRAVHRHLDAAAIRVAVVNPLRARLFAEASGIFAKTDAIDARTLALMGARLDPARTPPVSRIVEALDELVRARSAAIDERVALANRRDNTATPFLRIELARRIRALDTHVRRIEARISHLVAQDPHMAARHAILRSIPGIGPVNAATLCAGLNELGRVDAKQVAALAGLAPFATDSGPKNGQRHIRGGRPHIRKALYMAALSACRFNPDLKRFHASLIANGKPPKVAITAVMRKLLVLANSLVAQNRPWIPRPA

SEQ ID NO: 44439 - protein, 345 aa, unidentified
MEQISRIGMDTSKHIFQLHGVNTGEEPVLRKKLRRKEMFAFLEKLAPTVIAIEACGASHHCARLLQSFGHSVKLIAPQLVKPYIKRGKNDAADAEALCEAMSRPTMRFVPVKTAEQQAALMLVGVRDRLIRNRTQLTNAIRGYAGEFGLTAAKGKAHLDPLLERIYADESLPTLARELFAALAKEYAQLQAQIDEVDARLLAWHRADECSQRLTKIPGVGPIGAVLLKMKTPEPQLFRSGRQFAAWIGLTPKDHSTAGKVRLGVITRAGDESLRAVLVVGATSVIQHVQRGGRPSPWLTELLKRKSPKLAAVALANKMARIAWKLMVTGENYAVKSAPAELAGAA

SEQ ID NO: 44440 - protein, 314 aa, unidentified
MITYTSFIGIDIGKYSFVVALHGNKKVDEYENTPSGIEEFIQSYKKDLIKGLCILETTGGYEMGVLLTLCSQGFAVHRANTRKVKHFIKSYGNAAKTDKLDAKNLGLYGFERGKALELFTPQSKQSGELYEMIQRRTDLKQMLVAEKNRLKAPRAACVKESIQSLIEILKVKLEAITEEINSLIAQDPVLSEKKKILKTIPGIGDIIANELLILLPELGQLSRREIASLVGVAPRCNDSGTLQGYRRTTHGRAGVKPLLFLAAMAARNSNSILKTFYEGLLARGKIKMVALVALMRKIIVIANARLKIVQPITF

SEQ ID NO: 44441 - protein, 437 aa, unidentified
MRVLYEHVAGIDVHKDMIKVAIRSPGEKPWTRKTEILEFRTFYGVLQEMARLLRRRGVTHVVMEASGVYTDPVYYALCEQDFAEVAVVNPAHARALRGHKTDAADCRRLAELFECGLLRGSYIPPAELREVRDLTRYRMKTVQARTSEIQRLGKALESAGIKLGSVASDITGKSATAMIDSLIDGERRGAVLADLAIGRMRTAGKLADLSMALTGRFTEHHALLCRLHRDRIAGLDAAVADLDDQIAGRAGRWQRELDLLKTVPGFGDVVAQTWLAEIGPAPHRHFASHEKLASWVTLCPGNNISARKRKHGRTGDAGTYIKPMLIQAAWNAIRPKGRLQARYSRLVRRFGGEKNPGAKKKAITAIAHTLLKIACQVLKSEVPYQDLGADFCTRRESPDQQRAYLERRLRKLYPGCAITITISPPEAVLTSTVSNAP

SEQ ID NO: 44442 - protein, 347 aa, unidentified
MLHAGLDLSRKKLDICLLNDDGEHLDQLAVSPDVDSLRRLARRIDQAHCQPVCAVIESMTGARIVHDTLEQCGWSVEIADAQKVKGLAPLACKTDRIDSKVLAVLSQRDLVPAIWLPDPAVREERELARFRLHLVKHKSALKNRIHSTLINFGRPCPVTDLFGVEGRELLARLEVPEPWRGNVAASLALIDDLEDQIDEVNRRLRESHAEHPYIPLLLTVPGIGSVLAFTIAAEIGEIERFASPEKLTGYTGLCPRVVQSGESDRRGPLSKHGPTYLRWALIEATMQALKHPAYAERYQRTKRRLGKQRGAKVAQIEIARRLAHAIWHMLTRNEEFAPRGAALRLAA

SEQ ID NO: 44443 - protein, 343 aa, unidentified
MTRFVGLDVSQKMTVICVVDDAGRRLWRGQCPTVPEQITVLVRRHAGDDARIGIETGAMTPWLVHELRNLGLEVVCLDARHARAALKMQINKTDQNDAEGLAQIVRTGWYRSVHVKSFESHRARALLGARIQLIGMTTRLSNHIRGVLKTFGLLPGAMRGLPFDRKVEALLLDRSDVALIVRPMLIAWRQLREQIVAFDKAIRALVKSNSACRLLMSVPGIGVLSALAYVSTVENPARFVRSRSVGAHLGLTPRQYQSGEVDRSGRISRCGDTLARTLLYEAAVVILSRVKRASSLKDWARAIAKRSGNGKARVAVARKLSVILHSVWRSGEPFRWSEHASAA

SEQ ID NO: 44444 - protein, 411 aa, unidentified
MIKENFIYVGIDLHKETHTAVMIDCYNQKLGEITFPNRPADFPKLVTKVKKCNTDAKEVVYGLENAYGYGRALAVWLIDKGYFVKDVNTAISHRQAKHRGAMYRKSDSDDAEAIALATLNMLDKLPDACPNDAYWSLGQLVHRRDNIMKQRTRLVNQLHEQLCIAYPSYKQFFNDISRPTALYFWEHYPSRKYLKGKSVEDLRAELVPVSHNKCSTKTCEKILDAVASDKVKNNAYQDARDMVTLSIVSDLQHYDSQLAEVDKMLEQMYKMLGCTLTTIPGVNVITAVKILAEIGDIKRFSNANKLAQFAGIAPLHLSSSGKGKDVATKQGNRRLQATIYFLAIQMVQVSSKGTPRNPVVRAYYEKRKAEGKTSQQALICISRRLISIIYGMLKYGTEYRMPVVENAGENR

SEQ ID NO: 44445 - protein, 351 aa, unidentified
MMIIGVDYHPSFQTIAFLMEETGECGEQELNHSDGQAEKFYRELKQRGICVRVGVEATGYSRWFERLLAELGFELWIGDPAEIKTRRVKKQKTDRKDAQLLLRLMRENNFPQIWVPGPENRDLRQLLWHRHRLVQMRTRIMNQLQALAMNEGYRWKKKLFSEQGRAQLEKLSLAPWASRRRQELLELLDRLNPTIEELTAAVEQEARKRPDVLRLMTHPGVGPLTALAYVMIIGTPERFHCGKQIGTYVGMIPSEDSSAGKQRLGHISKQGNSLLRFLLVEAAQAAARSNPEWRRRYIHLAMRRHKSIAKVAMGRKLGVRLYWMWRNGCAYSPSLEFGSYVGQLGTGHGVK

SEQ ID NO: 44446 - protein, 339 aa, unidentified
MAQKELVVCLGRMYDDWTPQLYASKTFDNTAKGFAALTLWVKKLTEESSPVRYVMEATGVYHESLAYYLEGKGFEVSIVLPNKISNYFRTLEVKTITDKTASETIARFGLERKLDTWKRPAEIFRKLKQKTRERDQLVGERTLVKNQLHAEQSEAYPGKESITRMKARINLLNKQVMQIKEEMNTLVKGDKGVKKSVELISSIPGVGTLTAVTVLAETNAFELIRNKRQLTSYAGLDVKEKLSGTSVKGKPRISKKGNRYLRKAMYMPALTAIRYDGRFKVLFTRLVSRHGIKMKAAVAVQRKLLEMIYTLYKTNTAFDKDYLKEEVMALSTQAAYGNY

SEQ ID NO: 44447 - protein, 353 aa, unidentified
MTSLTDLREVVDVVIGVDTHVHTHSAAVIDSATGGVLGETTVAATAAGYVELVDFANAYPTARAWAIEGTGSHGAGLSRHLLESSELVVELDRPKRSARRNGAKSDPLDAIRAAREAMARPRLGTPRSGGERQALSVLLAARRSAVDASTEAQLQLFSLVVAAPEPIRSRFRGQKLAAMLNTAARLRVHPTWDVETTSTVVALRTLARRAHTMLREARELQKAILGIIRSWRPDLLEEFGVGPIVAATVLCAWSHPGRVHSEAAFAMLAGVAPIPANSGQVTTRYRLNRYGDRQLNTALHTVVQIRIQYQQSTRDYVARRTAEGKTSREIKRCLARYVARDLYRLLERGAPTA

SEQ ID NO: 44448 - protein, 353 aa, unidentified
MDATTVAVDLAKSVFQLAVADAQWRIVHKARLSSVQFQHWFDNRQVGLVIMEACGSAHHWARVLQARGIQVRMLPPRYVRAYVKRNKTDAADAAALLEAARCADIIPVRVKSIEQQCLQAMHRVRSGWMATRTARINALRGLCREFGLPVALGAGAGLKQIRTLLADEQLPESLRHTLQLLLQEVRELEQRIADLERQLLHIARYSAPCQNLLSVPGIGLLSATALVAATGGSSSHFRNARGFASWFGLTPKEHSSGGTRHLGRISKRGDRYLRMLLTHGARAVLNAATVARRAGRQLDPLRAWALNIAQRSHHNKATCALANKLARICFAVLRSHEPYAAGRLAAQPAHNCA

SEQ ID NO: 44449 - protein, 398 aa, unidentified
MKTCGLDVHKDNIFCAIYDGKDYSEVKEYETTLPKIRHMGEYLRSEGVLKIAMESTSTYWVPVWDVLLEMGFELMLVNPFLIKQMPGRKSDVKDAQWISCLLHKDLLRGSMIPSPSIQQLRTYSRKYTKLQAQKTRSLQKMDRLMVMCGFRIGSCMSNLGTKSVMLVIQALIMRETNPEVLERLVYGNTANKKSGKLREALTGNLKEHYRQQLEWEKEEYDLFEKQSQKCLTEMRKICLEHYSEEVDLIKSIPGVSDISAMIIIAETGGDMSVFENSGKITGWAGLRPRNDESAGKYKSTATTKGNKYLRSVLVQVSWAASRIKNGWFKEKFNRLSMRKSRKKALIAIARKLLTVTWNVLYYKVPYNPNLVHIYDPIKVEAKINYHQREMELIQNLLN

SEQ ID NO: 44450 - protein, 330 aa, unidentified
MYKIIIGVDVSKDVLDIAYFYENGTKYLMQVPNTYDGILTFLKTIKKLTSLKTYKAWLVCFENTGIYSDLLLSTLIALGIACVEEHAMKIKAFSTLQRGKRDDWDAVRICEYAVTYQSKLTLSRKPDETIAKLKHLFNYRSTLVNKKVDLSNCIDEKAEVIKGIIIDHLKDINDNIIATISSKIKEIEKLMLDIVKSVVVLRTNYNLVTSVIGIGPIIGLAVLIKTENFEKFKDSKKFASQIGIAPFPHQSGKSYRNPRISKRGDMEIKALITNGVQAAKIHDPQITNYYVRLSAENKKPYVINNNIKNKLIHRIFAVVRRGTPYVKLVA

SEQ ID NO: 44451 - protein, 415 aa, unidentified
MKVVFPTCCGVDVHKTFLVATIITTPAGSLQPNYRKKRFSTFNSDLNRFANWLLEHDCLDVCMESTGKYWVPVFNILEKRGIRVVIANPKWVKAVKGNKDDTKDSKWIGDLFRIGLVKSSFIPDLDIRILREFTRYRYKLVSMKSSEKNRFQNAFTVCNVALDSVVSDMFGKSATAIADYLTSDESFDPDHCVSLLQRSLKKKAAQVLESIEGFSMADEQKARIKIIREHYDFAEKLIAKVDACVDEMVAKHEGAINLLCTIPGIDRSSAITIISEIGTDMSQFGSSKRLCCWAGLTPGNNQSAGKKKSVHISRAGVYLKSALVPVAHAAVKDKNSPYYALKYSRIAKRRGKKRAIIAIARMILTAIYSMLCTGEVWNPVDIFKVDMPEHLKEQQLAKAIKQASRFLEKQGLTVA

SEQ ID NO: 44452 - protein, 367 aa, unidentified
MEKHNTARKSSCGGKRTTGKLTIGLDLGDRSSRYCLLDEQGEVIEEGSLPTTRKGLDRVFGAAGRCRLAMEVGTHSPWVSRYLARLGYEVIVANARRVRLISESSRKDDKLDAKTLARLARIDPELLSPIRHRGEQAQADLMMIRARAVLVQTRTALINAARGLTKSYGERLPSCATYQMGKDQAELLSPAIRAALEPLLAEVETVTERIREYDKQLEQLCQTRYPETKLLKQVHGVGTLIALAFVLTVEDPHRFRKSRAVGCYVGLRPKRRQSGQSRPQLGISKEGDVYLRTLLVQGAHHVLGPFGKDSDLRRWGLKLAAQGGKNAKKRAVVAVARKLAVLLHKLWVSGETYEPLRLANRAQTVAA

SEQ ID NO: 44453 - protein, 430 aa, unidentified
MKSNTQNAKIEAITEKTLVLGIDVGSEMHYARAFDYRGIEYSKKPFKFSNTEAGFVTFKEWILDLKEKHEKDKVVPGMEPTGHYWFNLGKFLQDNEMKPVLVNPHHVKKSKELDDNNPTKNDRKDPKVIAGLVREGRYMIPYLPDGVYADLRTASNIRFQLQAELTRIQNRISRWFNIYFPEYKTVYGKPDAKSGMLILKAAPLPEDILTLGIDGVNQIWRDAKLRAVGKARAKTLIEAAEHSVGSKEGAVSARMEIRMLLEDYESRNIRFQEVMTLIEGLVKQIPMAEKLLEIKGVGIKTVSGFLAEVGDISRFNTPKELQKLAGLALVESSSGKHKGETTISRRGRKRLRYLLFEVAMSLVAKNPEFRELHNYYTTRRLNPLKKMQSLMAIAAKLIRVFYAMLTKGVDYDPKKMVSDIKRPAVYLQAA

SEQ ID NO: 44454 - protein, 355 aa, unidentified
MLIIGCDYHPGFQQIAFVDTETGEWKEQRLEHREPAEAFYRELASRGAKVRVGMEASGHARWFERLLAELEIELWLGDAAVIRAKRGRRKPKTDRQDAQHILHLLLKDDFPKIWVPSWENRDLRQLLWHRHRMVQARTRIMNQLQAVALNEGLRCKKRLWREKGRKQLEAIRLAPWASRRREDLLKLLDGLNPTIAELTQAIDQEVEKSAEARRLMTHPGVGPLTALAFVLIIGKAERFQCGKQIAAYLGLVPLEDSSGDRRRLGHITKQGNSLLRFLLVESAQVAARSIPQWRNQYFHLAMRRGRKIAKIAMARKLAIRLFWMMRQGWDYEQMTKFGSHAGQPGNRDGVQSNIE

SEQ ID NO: 44455 - protein, 354 aa, unidentified
MVVVGTDVHKRTHTFVAVDEVGRKLGEKVVAATTAGHHKALAWAREHFGDDLLWGIEDCRNLSARLERDLLSMGQSVVRVAPKLMAQSRACARTRGKSDPIDALAVAQAVLRNPDLPVASHDEVSRELKLLIDRREDLVTQRTSTINRLRQRVHELDPAAEPKAGSLHRAKPCQVLGAWLDTQSGVLAELAREELADVVRLTEAIDVLAVRIGERVRAVAPVLLTLPGCGELTAAKIVGETATISRFRSEAAFARHSGTAPIPVWSGNTNGRVRLNRSGNRQLNAALHRIAITQIRLTDSAGQRYYRKRRSQGSSTQEALRCLKRQLTRTVYRRLHTDEHTRRTQPKHDTLTAA

SEQ ID NO: 44456 - protein, 338 aa, unidentified
MDHFVGIDLHSNNSYIAVIDTDNNRTFKKKARNNLSEIIKLLAPFKQQIKGIVVESTYNWYWLVDGLIDNGYKLHLANPSAIKQYEGLKHSDDITDAFHLANLLRLGILPEGYIYPKHERPLRDLLRKRIHLVHYRTALILSFQNLVARNLGSKMHVSTISKMTEEDLEDLFEDDYLILSAKASISTIHFLRSRIVQLEKVIAKAAKLKSEYKLLKTVPGIWNILAQMIMLETGPIERFKKVGNYASYCRCVQSNRFSNSKSKGKGNRKNGNKYLSWAYVEAANHALWNYEYVKKYHQRKTAKTNNVVAIKAIAHKLARACYYIIRDQKEFDPGKAFA

SEQ ID NO: 44457 - protein, 400 aa, unidentified
MSTASNRVVIGMDPHKRSVTIEMMTPDEIVVGGGRFDTNEAGFAAMMRYVSTPRPGREDRVWAVEGCNGIGHHVAMRLLTVGEEVVDVPPKFSARVRMFATGQGRKTDVTDAHSVALVGTRMAGLRPVVNDEQLAVLRVLVDRRRSLGEDHTRMVSQLHAHLLELIPGGAKKDLSAAQAKTLLAKVRPRDIAGKTRRRVAAELIGDLERIYTRKKAADKELRELVAATGTSLLGLNGIGPTGAARLLVEVGDITRFPDRGHFASWNGTAPIDASSGDHVRHRLSRAGNRQINRTLHIMATVQLRNPTEGRAYYDRRKADGKSSMEAMRCLKRRLSDIVYRTMLNDSVVHAIADGKTGPGGQRGNDSDSSAAGSHPHTGSSDKSLPGPAKHDPRTRLPDAS

SEQ ID NO: 44458 - protein, 322 aa, unidentified
MSVSVLGIDIAKQKFDAALLVDGKTKHKTCKNSVEGFETLMLWLEKLGIQKVHACLEATGNYGEDLAIYLHEASHIVSIVNPARIKGFAQSELLRTKTDKIDAALIARFCLAMKPDPWIPPSPEIRSLRALVRRVDSLIDMRSQEKNRIGTAHESVILLIKEHIAYLDQEIEKIRRQIADLIGQNPNLKRRKELLDSIPGIGKATIPHILAELDNLGKFNHVREMVAFIGLAPKETLSGSSIKGKPRLCKIGHARLRKALYMPALVSIQCNPVMIAFYNRLKDKGKNGKVIVCAIMRKLVHVIFGVLKSGKKYDPNFKPISA

SEQ ID NO: 44459 - protein, 390 aa, unidentified
MAQQRQAVDVVGGVDTHRDTHTAAVLDTAGRQLGSAQFPATAAGYGQLLEWMCGFGTVVKVGVEGTGSYGANLTRYLTGAGVTVVEIDRPDRKTRRWQGKSDPVDADAAARAVLAGRRTGVPKDRDGRVEAVRALRVARRGAVSHRADVVRQMKALIVTAPEPVRAALSGLTTARLVAVCAEVEVSAAQAGDPAVAVRLALRSLACRVRHLSDEIVDLDKVIGRLVAVVAPKLLAVNGVGADCAGQLLVSAGDNPDRLRSEAAFAMLCGVAPLPASSGRTHRYRLNRGGDRQANAALYRVVLCRLRWARPPRPTPSAAPPKARPRKRSSAASNATSPGRSTRSSPPLPYRTIFLRLRDLSGNLDGGGPLLPIGGRIRSRPAPRSRGGLAS

SEQ ID NO: 44460 - protein, 409 aa, unidentified
MERVIERGAALDVHKKSVTACVRVPRADGGRRQEVQTFGTTAAALLALRDWLSAHGVTHVAMESTGVYWKPVYYVLEEMFTCLLVNAAHVSKVPGRKTDVRDCEWLAQLLEHGLLRGSFVPPVPIRELRDFTRYRQVLVQDRTREANRLHKVLTDAGIQLASVATNVLGKSGRAMLAALVEGTTDPAVLADLAQGKLRRKLPALREALAGRFRTHHALLVSQLLAHLDYLDEALDILTTQIEEALAPFAREAARLDAIPGVGPRTAEILIAELGVDMRQFPTARHVASWAGLCPCTHESAGKHRAVRTRKGNRWLRAALIEAALAAINVRDSALAARYRRLVRHCGHKKAIVAVAPKMLTTAYVLLADGRTYQEPGAGYYDAQRKDRSVRRALQTLERCGYRVSLEPAA

SEQ ID NO: 44461 - protein, 298 aa, unidentified
MESLSDANTEVGIRAIVKRLKKLAPTLIVIEATAGMEANIAAAIAAAGMAVAVVNPRQVRSFARAIGTLAKTDSIDAAVLSHFAEAVKPSVRTLPTAEARELNDFVSRRRQVVDMIVAEKSRLAGVCGVARADIQAHITWLEKRLKRLDADLQSAVKKSPIWLAKDDLLQSAPGVGPVTSLTFLAALPELGTLNSKQIANLVGVAPINRDSGTMRGKRRISGGRAQVRAVLYMATLVAVRHNPVLRTFYERLLAAGKTDKVALTACMRKLLVILNAMVKSQKPWSPQTAPPLAAAATA

SEQ ID NO: 44462 - protein, 334 aa, unidentified
MENIALIGIDLGKNSFHVHCQDRHGKAVYRKKFTSPKLIEFLATCPATTIAMEACGGSHFMARELSELGHTPKLISPQFVRPFVKTNKNDFVDAEAICEAASRPSMRFVQPKTESQQAMRALHRVRESFVQDKVKTTNQMHAFLLEFGISVPRGPTIVSRLSSILEDNNLPMYLSQLLQRLQQHYHYLLEQIKELEAQLKQKLNEDEVGQRLLTIPCVGTLTASTISTELGDGKHYASSRDFAAATGLVPRQYSTGGRTTLLGISKRGNKKIRTLLVQCARVFIQKLEHQKGKLADWVRELLCRKSNFVVTCALANKLARIVWALTTRQQTFAS

SEQ ID NO: 44463 - protein, 423 aa, unidentified
MSYRISGIDVHKKMLAVVISDVEGDGEFEFERRRYGSNPEQLHLLAGWFLEQQVEEIVMESTAQYWKPVWGALERYWKPNCQKREGAVPMSGTLHLAQAQSNRGRRGRKKDFPDAERLVKRLVANELILSFVPDTEQRLWRTITRRKYQLRREHVRLQNQLEGLLEECQIKLSSLVSDLLGASARRMLKALAEGETNPEALAAMADKNLRATQAQLCDALGACAELQPIYRRLLKMFLEELQLIDQQIRQLDQELATLLSRHQDAVEHLAEVPGLGVDSAQQIIAEVGAKAATFPSAKQLSSWVGACPGDDESAGVSKSHRSPKGNRHMRRILNQAANAAAKAKGTIFEIVYRRLTPRLGHNQTIGAIAHRLCRLIWIILHKGVRYEERGPSVSAISRRRRTNRMIRELRALGYQIEPLLTTE

SEQ ID NO: 44464 - protein, 336 aa, unidentified
MRSIGVDLHKKMFMVCYLEGENTSFKEYALDEISSFKSELLNTDRLAVEATGNTRYFVNEIKGCVSEVLVVNPSQFRVISDSVKKTDREDSETLALFLEKDMLPTITMKDEQSSQVKSMANTRDRLVKLRTVLKNKIHNILNAHGIKSGREDYSSDKGLKKVLNLNINEAAHIELEVIVEQIRYLNEGIKKLDNEIKDRGRKLKGFENITSIKGIGEKGGAILLSVIGDIDHFESDKKLHAYFGIVPRVSQSGDTVHHGKITKKGSKLGRTTLVQCTLIAIRYSPYLRSFYNRLKEKKGSGKAIIATSKKMLTIIYNTLKNDWIFEDFENFVLKQS

SEQ ID NO: 44465 - protein, 451 aa, unidentified
MGRKKKMELDVVNPNAAGVDIGSKFHYVSIGQNSEDVKEFGVYAEDLKAMSVWLKEHGIETVAMESTGNYWQNLYIELEGRGFEVILVNGRFTKNMKGKKTDVLDCMWIQKLHTLGLLSGSFLPDEATGKLRAYCRQRSKMLSLCAQSSSKMQKFLKLLNFRLDVVVKDVCGLTGMKIIADICAGNLDPYKLAAHRHYNCRKSEEEIAKALHGNNREEYLFGLKQEYETYLFFKKKVEQCEEELARFLDDYFSSQDFPVDDMPSAKPYKRRNKNGPKNMDLNVLSYQYFEGVDLMAIEGVSHATVLSLMSEVGLAGMNKFGTAKQFASWLRLAPNNKISGGKTLSNRTPKGSGRLKIALRNAANAIGNLKQGTLAKFFHRIAFRKGRQVAITATARKLAMIIWNMITKKEAYSPQEEHMFLDEKRKLGLVKRMRKKMATFGITSDDLSIST

SEQ ID NO: 44466 - protein, 454 aa, unidentified
MLYCSSWLSQRRNTDILLAAGVYSGKNSRRRITMKGLRTKRIRTVREGALMATVDIGMASNTGYCITADGRDTKPFKFSNTREGLDKFWDMITISKKRFCCNEVIVGYESTGPYAEPLLHYMMSKPVKIVQVNPMHTKRMKEVNDNSPLKTDDKDPRVIADIIRLGHALTVVVPEGDAAYLRRLNNARERHIGERTALFNQLQQLVFLIFPELKTVMKNIKVKTAIHVLKKYTTPDTLGKLSIEALGEEMRKKSYGKFGIKDAEALINHAKNTVGIKEGIAGLVLDIRHILMQLEMIDGFIAEIEAEMVAILLRIPYSARLLSIKGLGTVSVAGIIGEVGDFMKFGTQSEIMKLAGLDLYEISSGKRRGERRISKRGRSLLRKILSYASIQTIRKNGIMCEYYAHLISRGMKRMMALVAIARKLLRIIYAVVRDGSEYIADYGLLTRKVIKKAA

SEQ ID NO: 44467 - protein, 425 aa, unidentified
MREHDTQAEAGTVNIPGKGAMFEIEDVGVFLGLDVGKTAHHGHGLTPAGKKIFDKPLPNSEPKLRAVFDKLTEKFGTVLVIVDQPASIGALPLTVARDAGCRVAYLPGLAMRRIADLYPSEAKTDAKDAAVIADAARTMPHTLRCLELTDEITAELTVLTGFDQDLAAEATRTSNRVRGLLTQFHPSLERVLGPRLDHQAVTWLLERHGSPAALRKAGRRRLVELIRPKAPRMAQRLIDDVFDALDEQTVVVPGTGTLDTVVPSLAASLASVHTQRRAMEAQINTLLEAHPLSPVLTSMPGVGVRTAAVLLVTVGDGTSFPTAAHLASYAGLAPTTKSSGTSIHGEHAPRGGNRQLKRAMFLSAFACMNADPASRTYYDRQRARGKTHTQALLRLARQRISVLFAMLRDGTFYEPRTPKNVELAA

SEQ ID NO: 44468 - protein, 414 aa, unidentified
MLKIVYRICCGMDVHKSFVVACIASTNEQGVTTYKSKRFSTFTGDLRRCAAWLSENNCKDVCMESTGKYWIPVYNILEPTCNIVLAHPKYVKAIRGKKTDKRDAKWIADIFKHDLVSGSFIPPADIRQLRDLFRYRWKLTNFTTGEKNRAQNCLTVSNFKLDDVFSDVFGKAASAITAWILEHPTEKITDISAFRTKGMKATDEQVLSAVDGEMCEEQAEKLRIIRSHMGSLQLCKLNLESLILSTAEKYLPQLNLVMTAPGIQSFAAIGIISEIGVDMSVFPTSKHLCSWAGLTPQNNESAGKKKTTRISRAGAYIKPLLVQCALCAIRAKQFPEVRNRYLALKKRRGHKKAIIAIARMLLTAIYNMLKKNEPYNPELYRQTDRPPGHREVSVDEAIFILQRQGYLVTAPSTT

SEQ ID NO: 44469 - protein, 323 aa, unidentified
MTKVLQKAGFVGETIYGGIDVHMKSWNVSLYYGSQYLRSFHQSPHPDILVSFLQREFPGANYSCAYEVGFSGYWIKRALDNHGVSCIVVNPAGIPQTDKGNKSKTDRNDSKRIGSSLQAGMLCPIYIPSQETEADRQLVRTNEKLTRDLTRSKNRIKGMLYQVGIEIPERFGSENWSNIFINWLKDLPISFGTLRTALNHQIKMMENIRVEKNLALKDIRKLAVSEKYASIASRLKTVPGVGTITAITLITEIEDMNRFKCFEKLNAFVGFYPTEFSSGEHIRTGHIISRHHKRLWSLILEAAWIGIRRDPAITHYYIIQNKK

SEQ ID NO: 44470 - protein, 431 aa, unidentified
MPYRIAGIDVHKKMLAVVVSDVEIDSEYQFEQRLFDSTPSQLRSLAEWLLQQETEEVVMESTAQYWRPVWEALERHWKPLRKKREGARPRSGTLHLAQAQSNRGPRGRKKDFRDAKRLVKRLVARELTLSFVPDAEQRLWRTVTRRKYQLTRDHVRLQNQVESLLEEAHIKLSSLVSDLLGVSARRMLKALAEGETNPTALATLADERLRATPEQLCDALGACTDLKPVYRRLLKMMLEQLQFLEQQIGQLDQEMASLLSQHQGAVERLAEMPGLGVDSAQQIIAEVGPAAATFPSAKCLSSWVGACPGDDESAGVNYSHRSPQGNRHMRRVLNQAANAAARTKGSIFEIVYRRSVPRLGHNQAIGAIAHRQCRLIWLILHQGVSYEERGPSVTKQAKQRRTARMIRQLRSLGYRIEPPNPQPQPSPAQAR

SEQ ID NO: 44471 - protein, 351 aa, unidentified
MNIIGCDLHTRFQQIAMLDTETGEIVGRRLEHETGEAQRFYAALAAPARVGIEATGYARWFERMLAEQGHELWIGDASAIRAARVRQQKTDARDALLLLDLLVAGRFPKIWVSSPAERDLWQLLRHRDKLVRLRTSVRNQLHAQAMGEGVCRKKKLWSKRGRQELQALPLGEWANRRRQELLELLGRFDASVQELDQAVAQQAERHPAAVRLMQQPGVGPITGLALALAVGPIERFRNSRKLVSYLGLNPRESSSGGKQRLGAISKQGNSLVRWLLVEAAQTASRKDEGLRRVYHRLAHRRGRAVAKVAIARKLAVRLYWQLRLAGAQPSPPTRTQGSSPNPVVGATRPMP

SEQ ID NO: 44472 - protein, 316 aa, unidentified
MTKNNTRTAGIDTSKAKLDIAIHGGECWQVANVVSGWRSLAKRLAEAGVTRVGIEATGGYERGVVGCLRAAGFTVLVLQPLQIKAYARVHLRRAKNDALDAVLIAACAATIDPPRLEPDARLADLAQHLTFVEQIEEDMARLKVRLEHIEEPRLRRFVLDDLARLKARRATELARISKALRAHPDLGHRLDLVLSIPGIGERTALAIVIRMPELGRVSREEASALAGLAPFDDDSGKHKGQRHIAGGRARLRRSLFAAALPAAFRWNKALVALYARLIARGKAHNAALVACARKLIVYANTVVQRGSPWVESLAVS

SEQ ID NO: 44473 - protein, 443 aa, unidentified
MINPNAAGIDVGSRSHFVAIGQGCADVREFGVYNEDLQALSEWLLTNGVKTVAMESTGTYWQSLFAVLQNAGLQVILCNGKFTKNIKGKKTDVQDCQWIQKLHTIGLLSGSFLPDEATEQLRTYCRHRANLLDNAADTTRKMQKYLRLLNLRLDVVVKDVTGLTGLAIIEAICKGEADAQVLASLRHGNCKKSEEEIAKALQTNGRKDYLFALKHEYEMYQNLQSAIKDCDNEIEKLLREQINGNDDKREHFIDRKVHKKINKNSPKNIDINLMSYQYFEGVDLLSIEGVSHSTVLSIMSEVGLEGLKKFGTAKQFASWLRVAPNNKISGGKVLSHKVPKGSSRLKIALRNAANAIGNLKDTPLSNFFNRINYRKGRVSAISATARKLAVIIWNMVIKKQPYNNEHGYEFLDQKRKRKVQEMKKLIHKFDIKTDELGLQLNCL

SEQ ID NO: 44474 - protein, 462 aa, unidentified
MSKKKAKSIAALPVMRRDVAGVDIGSTQHWVAAPQSEPDTPNVRVFGTTTGALEELIDWLASLGVKSVAMESTSVYWIPLYELLEARGIEAVLVNARHLRNVPGRKTDMRDCQWIQTLHSCGLLMGSFRPPGQIARVRAIHRQQGNLVRERTRAVQWMQKALDQMNVQVHRAVADITGTTGMAIVRAIVAGVRDPNKLAELRDARCAKPQDVIAKHLRGTWRDEHLFNLGSALRLYDFVTSEIERYDRLLDDELVLLESEEHHDQSPPPLPNKIKEKKIIREDKAERRDRLFRVAGVDLTRIDGIGVDAASTIIDELGPDLSAFPTEHHFVSWLRLCPNQAYSAGVPLPKKRKNGMGSSRVASVLRMAATTLARSNTALGAYYRRISQRKDAAVAILATARKLACLVYRALRYGTEYTDQGAEAYERLHQERRLKSLKHAAQTLGFDLVPTAPTEALAASVA

SEQ ID NO: 44475 - protein, 299 aa, unidentified
MPDLERGELVEHFRAPADRDGLYGLTRRVAVYDEPVRGVVESMNGARFVHDELVKYGWEVLVANAQRVKGLAPLACKTDKVDARVLAELSFRDLVPAIWLPSPELPAERERSRWRLHLVKHRSILKNRVHASLIAFGHQVPMADLFGAGGRRLLADLDFPEPRLGHVPASVELIDDRDRRISEIERWLQRSGADHRYIPLLMSAPGIGWVTGFTIAAEIGDISRFSSPVKLTGYTGLCPRVNQSRGHGPPRPAVEARPQISALGADGSSDPRLRAPALQRALPAHQAAPVDMRRRSEPR

SEQ ID NO: 44476 - protein, 402 aa, unidentified
MKASKQYLRFCGIDMAKQRHVACIIDQNGQYLQRPKSIRNDADGFQQILNCLKQTGRKKSILTGMEATGHYWYSLHDFLTRQGYAVAVLNPIQTAQQAKQAIRKCKTDKNDAFHIANLLRTGQYKAAVVPGELAMTCRQITRLRYRIVKQAAMIKQLVNSRLYPAWPEYEGLFSNKFGTTSMKLLQTAPTPKELMELDPDDLGELIRKASRGRFGPAQTQKILHSAINSVGMRRGHYGISTGIKFLLEQIEALEPVRKKMDAEIVKLTAKVPQYLFTLPGATELTIVSLYGEVSPIEAFEKPSQLVAFAGLDPKVFQSGQYDAPRRRISKRGSPYLRRSLWQMAYRALCTEGDLRDFWRRKHRQNKHHLVAVAAVANKLCHIVWRIMTDRRDYIPKGHNPKS

SEQ ID NO: 44477 - protein, 417 aa, unidentified
MISFPKRERAQRAAACVGVDAGKFSHTLVVRPQHQPDSKPFSFPTTRAGFDDALAFIRRQVPHAAAETILVGIEFAGNYGFTFAHYLAQLGFSIVSVLPAHTKRWKDVAHNQPLKTDAKDAGTITDLVAQGHFVGFPFLTPAYADLRYLVTARERLSLLRRGAITQLRTLLQVVFPEFEALFPLVTKRTPTALLRGFPTPHELVAAGKAKVRRLLRAASRGHLGAETADRPLRAARATLGLPGAQARLRQEILLTLERIAVFERQIRTLEAELVAALEAVPESPYLLSIPKVAPVTAAIFLGSIGDPRAYESGQQILRVAGLSLIERSSGVLRGTKRISKRGRPLLRQAAYMFAVRSITQGSLFRAEYEALCQRNGGAKMKAVVAVMRSGLQLLYSIARDRRPFTVEPPAHRRAAAA

SEQ ID NO: 44478 - protein, 344 aa, unidentified
MVTTIGIDPHKATHTAVAIDDDETVLGEFTIRADKDQTTRLLEWAGSVNGDARVWAVEAATGLGHLLSQQLVATGETVIDVPPVLASRIRVLSSGKSNKNDPNDAHSVAIAALRRDGLAEVRREDEAAIMRMLAKRHRELTSLRTQAVCRLHAMLAVLRPGGMGHRLSAKQASRMLGGIRGLDTVGEQRRQMAKTHLVDIRRLDRDLEAIKAQIRTAVAAADTSVTDIYGVGPVVAAFLIGYTPPIDRFTTPDRYAAYNGTAPIEVSSGGKVRHRLSRRGNRTLNHAIHTAAVTQISHDTPGRIYYDKKLDQGKTNKEALRALKRRISDAIYRQLVADAQRHNN

SEQ ID NO: 44479 - protein, 316 aa, unidentified
MNTSEHFIGIDVAKAHLDIALLPSGERWAVSNDETGIDLLVQRLQALSPTCVVLEATGGLEVPVTAALASVKLPVVVVNPRQTRDFAKATGQLAKTDAIDAHTLARFGQAIRPEPRALKDAQTQELAALLGRRRQLLDMLTAEQNRLATAPKGVRQDIKAHIRWLEKRLQNVDTDLTQSIKASPAWREQDQVLRSVPGVGPVLSISLLAGLPELGTLNRRQIAALVGVAPFNCDSGTYRGKRRIWGGRADLRAVLYMSTLSAVRCNPIIRAFYERLRGAGKAFKVAMTACMRKLLTILNAMVKTGTPWQEKSACQA

SEQ ID NO: 44480 - protein, 369 aa, unidentified
MQKTTTSFVGLDVHKNSVAIAVAEAGREAPRFVSTVPPSMSTLCGTLRRVCRAERTLVVYEAGPCGYGWARHLRAHGWSCEIIAPARIARSAAEQRIKTDRRDALLLARESRAGNLVAVVMPDERDEAIRDLSRTREDACIARLRARQQLKAMLLRHGRAYQGKSSWTAAHERTLSKIHFIHPAQQVAFEEYRLAAKEAHERLERITGQLREQCALWRMNPLVKALTCLRGFEFVAAATFVAELGDLRRFAHPRELMAYLGLVPSEYSSGETRHQGPITKTGNKHARRILVEAAWNYRHSARISRVLEIRQQGQPKALRDIAWRAQLRLTKRFRHLSGRRLPQNKVCVAVARELVGFIWDIARQVPACA

SEQ ID NO: 44481 - protein, 367 aa, unidentified
MNKTIVHHEGAAALTAAGHHTKTLPATVKLGVDIHSRFFVVAAQYDHAAIKPPRRFTPEQFVPWVESLLAAGHEVHVVYEACGFGFGLYRRLSAAGAHCCVIAPQKLDERRTGVKTDPRDAIMLCQRLSRYLDGNTRELAVLRVPSEAEERARHVPRQREQLVRARKKMQAQGRGLLVNHGLPAPAHWWQEQTWKRLGRLLPEWILPHLEIYRPILLALDAQIARLSAQLEAAAPAELPRGLGALTSVVLSREVCDWSRFQNRRQIGSYTGLCPGESSSGDKRVQGSVTKHGNARLRAILVECAWRLVRFQPQYPPVKERLHVLATGARATGAARKKAIVAVARRLAVDLWRLHTGRCTAAPLGLAR

SEQ ID NO: 44482 - protein, 381 aa, unidentified
MSIVALDIASKAATFCVLGTQGIRSQGSLTFDHDGFSSFIASEQVSDASLFVMESTGGYHLPLYHFLLNHGRKVRIINPLLIKQFHDGQTLRRTKTDALDAVTIAQYAQSHMSALEEERMQLDSESKMLARRRARNAEDLAKAKTILKSDLSVAFPELLRFNVFIKTLLEFLSIYGCAKDVLAATEEQLQQALDVQKGRKSNVVTVQKIQELARISIGVSYRAAMVRDSAKAVLACQERDEELTKALVELEQTLHHRQMEILTSIPGIGEVTASHFLSEIPDITQFATYQKLIAFAGTDPGIYESGNTSKALKISKRGNPLLRKYLYLMADSCMRHNIVFHAYYHKKREEGFPHRKAMVATMNKLVRTLHALLTKDETYSI

SEQ ID NO: 44483 - protein, 338 aa, unidentified
MYYTGIDLHKFTSYLTTVDSSGTIVKQDNLKNVAHTFVQYFNSIPGEHQTTVESTMTWYWLNDLLSSMNIPLVLAHAKYVKAIAYAKVKTDKVDSHTLAQLLRMNFIPVAYKISNDKRTLRDALRARLKIVQRHTSVTNSMHLLLAKYNYDSPTQLTGIQQFQYQQLSEVEALLNEQILDLEKQLYPFLIPDDDIQRLLWIPGIGKMNAFTILLEVDDISRFPDIKNFFSYCRLVPSARNSGGKSKQRSSKDGNKYLKVAFSDAAVHAVQYYPVIRKYHNSLLRKKNKQIAKTILAKEIASIVYYVLKYKTNYNNIFKGKELEHTKSLQWPRITSPYA

SEQ ID NO: 44484 - protein, 453 aa, unidentified
MASISNAPVRHRTVGIDLAISAVQVAQIFDDGRAIGKPIRFRLTSTDLRRFVSAIKSGVSADTPITAVMEPTGMAWFPVANWLQRAGIKVIRVKGQRVKALRKYLSEHAKTDAADAHVLGAIPGFGGRGLDPVHVPGPEQHSLQRLTKQRHRYQELVCSARRRVLDLIRWACPALEPVLPDTVTQLTLAILGELFDPRKVVAMRRDVLARFLSRHASGNHPKSGPFIDSLVEKLKSAAEETIELHGDSVDFVALQFEVAQEVEHLRLWDRHVSAIEHEVEQIYQRVHPSNALRSIPGIGATLAPLLIGVLGYAKRFRNEDHIRGFCGMFPTRNSSGGLDKPGQRLTKSGSDRVKRALYIAADVARKIDPDLAAVYWRLMVNKGHHHKQAICAVATRLINRIYRVLKTGEPYVLRDREGNAITVQEGKRIVVERFTVPLEVRQSRRNQPMPEPA

SEQ ID NO: 44485 - protein, 469 aa, unidentified
MRTIGIDLSTKGEHKAVVVDERGHFVSPILHFRTDPASLVRLLEVAQDSNPDRQLQVVMEPTGMAWFPVAVFLIRQDVVVYLVNSQQVADLRKYYKKHAKSDRVDARVLAKLPIVDDEKLHRLELSGPGALACQRGCKQLDRLMKQHTACKNRLIALDRFAWPGLEDSVFSDPFSPPAFWFRQNYYDPLCVHQAGAEKIRQEWLESGLDPQDSGDWAVFLVQLAEKTLSIYGQEGTYLDYELLQAEAVREQEYLAFVDKMHHRLLLKTVRPLYRQLHPSRNLETIPGVGQDGAAVYVSFIGNPHRFASLRQLRGWSGMVPNSKQSSESQASGLKITQAGPSLIKKFAFLDAEAARQCDPQIAAIYYEQMVRRGKHHIQAVCTCSAHILDRVQVVLREDRPYELQDVDGSPISKEQARKIIAERFTVPDEVRKRNSKHRRLERVEQRAEKNQNEEKPHNLVFPGSTPQVS

SEQ ID NO: 44486 - protein, 342 aa, unidentified
MQITTIGLDIAKNVFQVHGIDAAEKVVVRKQLRRGQMLAFFKTLPPCLVGMEACATSHYWARELTKLGHQVRLMPAKDVKAYVKRNKNDAADAEAICEAVRRPTMRFVQVKAAEQQGQLMLHRTRDLLMRQRTQVINALRAHMAELGIVAAQGREGIKDLLKIIASEEDARLPVDARTSLVVLAAGLQALQTMIRSIEKRIGVQHRSSAASKRLETVPGIGVIGASAIAATVPDPKVFRSGRDLAAWIGLVPREDSTGGKQKLGPISKQGDRYLRRILVVGAHAVLKRARLQPEKYHWLTQLLARKPFRVVAVALANKMARIAWALLARGGTYRAPALTAAT

SEQ ID NO: 44487 - protein, 385 aa, unidentified
MSELNDLSRSLTSLEQDKTIIAVIEMSQSSWLVAGVVPGIERHPLKKLEPSEEELVRLLIRWRTEATKNGHTITRIAVAFEAGRDGFWLARWLRARDIETYVIHPTSVAVSREHRRAKTDRLDTGLLKRVFIGWLRGEPDHCHMAAIPTLAEEDAKRPNREREGLVRERTRIVNRMKSCLVRFGIRNFKPTLRKAPARLATLGTPEGVPLPPNTLLELGRDMARLRFVMDQIKEVEKARAERLEQAPQEKTHAMVRLIARVIGVGIETADMLVHEILSRQLRDRRAVARYAGLTGAPDESGNKRREKGLAKAGNARVRRGMIQLAWRFLVFQKDSALARWYQTRTESAGKKRKTMIVALARKLLIALWRLVTIGEVPAGVVLRAA

SEQ ID NO: 44488 - protein, 419 aa, unidentified
MSFKILKNNCCGLDVHKTWIFACIGITDSRSRTEYKQARFSSFSKGLQELCDWLAKYNCTDVCMESTGKYWIPVFNILEKNNVWVTLSHPKYTKPQKGNKTDRKDARWICDLYMCGMVKPSFIPPADIRELRDLVRYRYKLTCMITGEKNRAQNCLTVSNLKLDEVFSDVFGKSSRSITEQILQHPGEIFDVTPFVDGRCKTPIEEIQAAVDGAVSTEQAVKLKQCLNHIDELEMHKAEIDREIFRLSDKYEEALILIRTVPGFDKNPMTAIQVLSEIGGDMSVFPTAKNLVSWAGCCPHNDQSNHKIKSTRISRAGSYFKPVLVQVANALIKSKKHPEFSTRYRRIKARRGHKKAIIAICRMILTAIWHILTDLKPYTAKGFLEPRPVSKEKVLTASQALNLLKQRGYVIKDEPIFIS

SEQ ID NO: 44489 - protein, 412 aa, unidentified
MQVHHAVCCGVDVHKKKVVACLRSPGANGHRLSEVRTFGTTTRALRGLADWLVTAGCTAVAMESTGIYWRPVWQILEERPLTLLLVNAEHIKRVPGRKTDVADCQWIAELLEHGLLRGSFVPLAPLRQLRELTRSRRQLIEIHSKEANRVQKILETANIKLGDVATDVLGASGRAMLKALVAGERDPHTLAQQALGRLREKRAALEDALDGQFTEHHAFLLRSLLTHLEFLEQQIKAFDDRIAEATAPMATQVDHLDTIPGVARRSAEQILAELGDDMRQFPTAGDAAAWAGICPGNHESAGKRRHARTRKGNRWLRSTLVECARAATRKRGCYLAAQYGRLAKRRGDKKAIVAVGHSILIAAYHMLRDGVDYREVGAEHFDRVHREHLIRYYQRRLGDLGVNVMLVESDAP

SEQ ID NO: 44490 - protein, 387 aa, unidentified
MAVIIGMDPHKRSATIEVVDERGRVLATGRYGTDKAGYAEMLAAGRRYADRVWAVEGCNGIGKHIAHRLVHDGETVVDVPAKLSAQVRVFATGNGRKTDAVDAHSVAMVALRSPNLVQVQVDADLQVMGMLADRRDELGRARTQTINRLHRLLLELLPGGAKKFLSAAQARALIATVKPRDIVGKTIRRLAVELIGELEGIDKKIKAADKDLKALVIARGSTLMDLHGIGPAGAARLLADVGDISRFADRDRFASWNGTAPLDASSGDQQRHRLSRAGNRRINRTLHIMAVVQLRNRTEGRAYFDAKKAAGKTSMEAMRALKRRLSNVVYARMVADQRRRDAADPGGQSGTTLQSSVTDLTPDIRPSDKPLPGPATSQPKPSLSTVS

SEQ ID NO: 44491 - protein, 427 aa, unidentified
MRYIGLDVHREFCEVAISEEGKVRSAGRVRTRREELELFAKSLGSDDEVALETTGGAEAIAAILRAQVARVVVVNTKKLRAISEAKAKTDRLDARRLAELLAAGYLAEVWCPDERTRALRRYVARRAQLVRQRSRAKNEIAAALQRNLLDRPGVYDVAGERGRRFLEGVELPADERQTVAGCLRQIDFLDREIAEVDRALAEAAVGSPEIRRLMTVPGVNLHTAATFMARVGEIGRFKDPRKLVSYLGLDPRVRQSGEEPVRYGHISKEGAAEARHMLCEAAWIVVRYPSPLSAFSERIKARRGSRIATVAVARKLVVLFWHLLTKEEDYAFARPTLTQRKLRRLELLAGAERQRSGGRPKKGAPSLKAQDQAEIELARQAETAYRRLVTDWQQAPTKGAGATRGRASSKPSSGKQRGKASVPDPAL

SEQ ID NO: 44492 - protein, 338 aa, unidentified
MESFVGIDLHKYVSQLAVLRENKSPSQLRFANDVVTVEQVLKKLPEGSKIAVEAMGSWWWLVELAQKSGHEVFLSHPKQTKAIASARLKSDKVDALMLAKLLKADLLPTVWIPPATQRHIRELLSHRGRLVRQRTAVINELQAVYAKRNIDPEARLQRVRPMVSGAEDLGGYGPRIVEEDLKLLEFINRQIGGLDKELIKIALEDAQAQRLMTIVGVGPVSAVAISSWIGEIGRFSNAKKLASYFGLAPRVRQSGDTERHGHMSKEGNRMVRTLLIQAALVHTRRGKGPSRKHYLGVVKRRGKQIARVAVANKLIGAIFHMMKEGIDYSDFIRRSGAQ

SEQ ID NO: 44493 - protein, 313 aa, unidentified
MAKAVCEITLGIDVSKDELVICNWDTEQITWLANRPGEIKAWLGMLDGPIRIAIEPTSNYHLECVEQAHALGLTVYLINPRQLKHYRKAVNVRNKTDPADAWLLARYLAHESNSLRAFKPQCARAQRLWTLIKRRGITVSARQKLQQSFSEGKLPAKALFTEFGKVIARIDQQIQALIRALGWWDDYQRCLSIPGIGPVNAAALTAVFHRGAFPGSDAFIAFIGLDVRIRESGKFTGQRKLTKCGEAQIRRLLYCAAQPARCYQLFDDYYQRQLEKGLSKTAAKVILARKLARIAFSLLANQTSFKKQEIAYS

SEQ ID NO: 44494 - protein, 337 aa, unidentified
MTSVPSTAELIHLGMDTSVSEIVVAVLRPGQEIPVVDRIPGDEESVRRLIGRFPDRRLLSACYEAGPGGYELHRLLTSMGVACDVVAPSLIPKGSSDRVKTDKRDSVRLALTHRAGLLTPVRVPSPAEEAVRDLVRARGDLLDDRKRMQQRLNAMLLRHGRVWRGGAKWSYAHRAWVDRQVFDEPALAEAFSLYRGGLEAREAELAAAGARLASWAGREPLAGPVARLGGYRGIAQLTGLTLAAEVVDWRRFASARAFMGFAGLIPTEYSSGSRSRRGHITKAGPEGVRTALIEAAWAYRYRQRSGPPSGAGRLACRRTRWPGPGRRSSGCTPSTPR

SEQ ID NO: 44495 - protein, 339 aa, unidentified
MKAYAGIDLHSSNNFTAVIDDQDQRLYGRRLPNTMDAVVSALQPFREHLKGVVVESTFNWYWLVDGLQAHGYKLHLANPSAIKQYEGLKHTDDKWDSFWLAHMLRLNILPEGYIYPKEERPVRDLLRRRLMFVRHRTSHLLSLQSMVSRNCGTRISGNAIKRLESGDAALLFDHPQLVASAKNSIATIHFLTNRIKDIEQEVSSRVMLRNEFASLRTITGIGEILALTIMLEVGDITRFARVGNYSSYCRCVKAERLSGGKKKDKNNRKNGNKYLAWAYVEAANFAIRFSPYAQAFYQRKKAKTNGIVAIKALSNKLARASYYIMRDRVPYDPEKLFSQ

SEQ ID NO: 44496 - protein, 374 aa, unidentified
MEIKRIAIDTSKHVFTLHAVDAKERVVWRRELKRHQVDPFFARLPATEVVLEACGGSHHWGRRLTTLGHTARLIPPQYVKPFVKRGKNDRNDAEAISEAASRPGMRFVPVRSAGQQAAAMVLSVRELLVKQRTQLVNALRGHAAEFGVIAAKGMCHAEKLLVTLAAEPAVPQTARPMLALLGEEIAHLTTRIAGIDRQLAALHKAHPVSRLLAEIPGVGPIGALTLALRVDAGQFRGGRHFAAWIGLTPKEHSTGGRQRLGGISREGNERLRQLLVLGATSVVRLAGPGARPGGRPRRASANANAMTPPSQDTAADAGKARGKRRNPAVTPWLLALLERRPRKVAAVALANKMARIAWAMMTSGEAYRHQPIAA

SEQ ID NO: 44497 - protein, 404 aa, unidentified
MSETRDKGSFSGFLGIDISKGTFDGCCIDREGKVLFHVSLPMNRAGFEKLITQVCAISLPQGSILIGMESTACYHVSLFSFLMALGYSVSVINPLLISNFVKLQLRKTKTDKKDAAVIARYLSAHGACLPQTMADSHVADLRELSRQRESLLHQMTALKCDIKRVLSITFPELERTMGIFTRTTLRLLGRFPSARALAQANREELAPLLHHASRGRSTPVSVDTLLKLARSSVGTANPSREMILRQKASILVHLEEHLREMTNTLIELCQSALEQDVEILTSIRGIGDKTAATFLIEMGGEIQKFDTHNKLIAMAGLDPSVYQSGKYEGHSRITKRGNRHLRRVIWLMTIRVIQFNDLFKSYYRKRIEDGLPFKKAVLATAHKLIRIIFVLLTRRTMFCHQVTS

SEQ ID NO: 44498 - protein, 350 aa, unidentified
MEKVIKQSVGIDCSKETLDVSFSIMNDLFESQFLSTTVFSNDKAGWAKLNKWADKLRDEGLPIQFVIEATGVYHESVCMYLFMLGKKISVLLPNKVKKFAGTLKTKTVNDRVSAQTIAQMGLEKKLDDWQPPHEVFNLLRQLTRERNQLVEEKTQILCEQHAEKSGAWPNKRSIQRMKQRIRLIEKQIDEIEKELVEVVDQSPWLKQKLNDLCSIPGIGFLTAVTVSSETNGFNLIRNKKQLVSYAGLDVIEKQSGSSVKRKTKISRKGNKHIRRAMYFPALSAKRKGKMNEFYSRIEARNGIKMQAAVAVQRKLLELMYILWKKNERFDPNYKVKKLEQLNRAALIEMA

SEQ ID NO: 44499 - protein, 359 aa, unidentified
MDSIAQEAIVRDVAIGIDTHKRIHVAVALDELGGRLGELTVATDRAGVDRLERWALSQGRILAFGIEGTASYGAGLTRHLRRHGHRVIEVNRPDRRDRRMNGKSDALDAENAARAVLSGRATATPKAADGTVEMLRQIKIAKDTAVKSRSQAMVALKTLVVTAPPRLREELEGLPKVALIERCAGLRPGPITSPLAATKHALRGLARRWQRLQVEIKEHERLLATLTESVAPAMVAAFGIGPDTAAEMLIVAGDNVDRIHSEPAWAKLCGVCPVPASSGKISRYRLNRGGHRQANAALYRTVIGRMRLHQPTIDYVARRTAEGKTKAEIIRCLKRYVAREIWAYLRAAHQSASPPEPSA

SEQ ID NO: 44500 - protein, 410 aa, unidentified
MDVLYANCAGLDIHKDTVVACSRRVTAGKVMREVRTFKTTTGELLALSEWLGSLGATHIAMEATGVYWKPVWNILSDGDFELILANAAHVKNVPGRKTDVNDATWLADLLAHGLIRASFVPDAQTQEQRGLLRTRKQLTRERTSHVQRLQKTLEEANIKLDSVISDVIGASGRAMIEALIAGETNPLRLASLASSRIKASPAVLGEALRGRVRRHHRFLLRLHLQQIDALDRAIAEIDKEVEANLAPFRDLIPVLTSIPGIGELAARVLLAEIGTDMSRFPTAGHLISWAGLCPGNDESAGKRRSTRMRKGAPWLKTTLIQCAWAATRKKTSYLAAQFHRLRARRGPKKAVGAVAASILTAAYHMIANGAFYQDLGADHFERRAKPNQIKRLVAKIQSLGYNVELKPLAA

SEQ ID NO: 44501 - protein, 323 aa, unidentified
MNKGIKFFGIDISHLVFDVTDSDGNYYQFKNNVSGFRKFIKLLDSQSHCVMEATGYYHYQLAYYLLESGIKLSVENPLAVKRFIQMKLSKIKTDKSDTKLICEYAKQMELKLWQGNSKEETECLQIVRALSVYTKQSTMLKNKIHGEAVLGNPSKIVVTSLKRSLRQLTKEMKTLEEKLLALVKQSHQDLFTRLKTIPGIGPKTAIMLVVLTGGFDRFTSASELCSYAGLTPVIRQSGSSVKGRPRISKIGNQKLRNLLFMCSFIACKYNKACRDLYERIVAKGKSKKLALIAVCNKLLKQAFAIAKSGLIYDAEYKSTLVKN

SEQ ID NO: 44502 - protein, 363 aa, unidentified
MIVIGADAHKRSHMLAAVDAGTGVLVAELEITADEDGHRRALRWARALATERVWAIEDCRGLTGRLEQELLGAAERVVRVPPKLMGVSRRGERQAGKSDQIDARAIARAVLREGLERFPAAFLDERALEIRLLCDHREDLVAERTRVINRLRWHLLDLCPELEASIPSRHLDRPRTLERIARRLRALERSARVRVAAELVRRVRELTRRVDELERELAALVRIHRPVLLAETGCGPMTAAILIGHTAGAERFPSDGHFARLAGVAPVPVSSGRRHRHRLHRGGDRQLNKALHIIAITRARLDPETRAYLQRKHAEGKTTAEALRCLKRHLARRFHRLLALPPNRAPRRDPIGGSAPIPMPCLT

SEQ ID NO: 44503 - protein, 442 aa, unidentified
MARKPSKQRFTVVYPNCAAIDVGGREHFVAVDPRHDDSVQSFTSFTDDLHKLADWLESLSIKVVAMESTGVYWIPIYEILSERGFDVYLVNARATRQITGRKSDVLDCQWIWQLMTHGLLRGAFRPDDLTCCVRSMVRQRASKVKDQAQTLNRMQKALSQMNIQLANVISDISGVTGMNILRAITAGERDPVQLAELTNPRIKASKETVARSLHGNWRREHVHALTQELAAYDFLEQQIVECDEAIKTALEQLPVLESKPQPSNKALRSPHRSGAQQTALHQALWQVLGVDLTAIPTIGVDTALVLAGEIGSDLSRFPSSQHFCSWLGLAPPTRISGGHRLAGGGPKIINRAAQALKQAASNARNDKGFIGASHRARLTRMDTSCAIKATAHQLARLVYSLLTKKQAYVEKGLEEFEARSQERQVRALLRKARKLGYELMAA

SEQ ID NO: 44504 - protein, 469 aa, unidentified
MTKFIKSSKTIPAKLTQLNSKCAGIDVGAAELFVCISKNSSEQEVRSFSTFTADIRLMIDWLKENKVESVAMESTGIYWIPPYEFLEEAGFEVVLVNARFFKAVPGRKTDVQDCQWIQQLHSYGLLRGSFRPSNEIVALRSYVRQRSRLFELAGTQVQLMHKSLTQMNIQLNHVISDITGVSGMNIIRAIIKGKRDPKTLAELCVSGCRKNKDLIAKALEGNYRQEHVFSLEQANEAFEFFHKQILRCERSIQTILDSIQPQELPKELQVSFAASAQKPVKLSITTRNKRATKTASKRSPYCFNACEALKKLTGADLTTMPGIDTNTAMKIFSEIGTDMSRWCSSKAFASWLGLCPGNKISGGKILSSKTKPSDNKAAQALRMAASTLYRSNCYLGSFFRRIRARLGAPKAITAVAHKLARILYRMIVMREDYRELGGNYYEQKYQERIVANLKKRAQEMGYTLTPAEA

SEQ ID NO: 44505 - protein, 519 aa, unidentified
MHQTKYRGIITEAGSLTTPPWEPVFRLVKPPIKSVSPFGGDLCFGWLGSPRLYLYKPLGCVSALWKWIPAGKDKTMQYQKVLKMLESIPYLSVGLDVGADFTWMSIMLPNGTLAGKPFKIVHSDPQSRELAISKIKEAQEAYSLKSRCFLESTGIYHIPLLCFLRDKGFDCSVINPIITKNSTNLNVRKLHNDKFDSKKAAKVGLDASLKVSIIPDDEVIDLRNLVRDYYYFRDLQSAVVLKLTAELKVSFPAYRKVFSKVTTKTSLKLLDAYPLAEDLLAAPKETVVEMIRSTARFGEKYALAKYDALRTAAKDAAIFGRALKSNSVRIRLYIDSYQEYRKRLDTILEAIHGSVDGLKGNPVYDRIKILQSLRGIGFLSAVVLVAEMGSFDLFPSPKKLYAYFGLDPAVKQSGKFNGDKVHMSKRGSSLARRILHMVALNNLKVDKGSGMPVNPVIHSYYADKCKAKKKNVAVGAVMHKICNIIFAMLRDNKPFELITPQEHCKRYLAAHPGKAENVA

SEQ ID NO: 44506 - protein, 404 aa, unidentified
MPAISGIDWAAEWHDVRVADEHSGELLVEQRFAHDEAGVGALVELLIARRVARVAIERPEGLLVGRLLAAGIRVLAIHPNQVAAARDRFRAAAGKSDRFDAFVICELCRTDQHRFAALAPSSDETIALQALVRTREDLVAVRVQLANQLRAQLDCFWPGAKLIFADVDSPIALAFLARYPSPQAARGLGPKRLAAFLARNAYSGRRPASDLLERLHSAPVAAIGELEHDARHTTVTGLVCALAPIVTQISLLTSQIAGAIRSHPDGPIFLSFFRDPKSIICAAGLLAEIGDNRARYPTADSLAADAGQTPVAKESGKHRHATFRWACDKRLRNHFGVLADSTRHWHPWAHDTYHRAIDRGADHPHATRILGRAWTRVLWRCWQDRAPYDPTQHGNLTRLLQHQG

SEQ ID NO: 44507 - protein, 340 aa, unidentified
MQITTIGLDIAKNVFQVHGIDATEKVVVRKQLRRGQVLKFFAALPPCLVGMEACASAHYWARELTKLGHEVRLMPAKDVKAYVKRNKNDAADAEAICEAVRRPTMRFVQVKSAEQQGRLMQHRARDLLLRQQTQITNALRAHLAELGIVAAQGREGLKELLTIIADEKDARLPVDARASLIVLAAQLQALHTMIGSIEKRLSVQHRANEASKRLQSIHGIGIIGASAIAATVTDPKAFRSGRDFAAWIGLVPRQDPTGGKHKLGPISKQGDRYLRRILVVGAHSVLRRAKHNPEKYPWLTQLLARRPFKVVAIALANKMARIAWALLASGGHYRPRLAAA

SEQ ID NO: 44508 - protein, 465 aa, unidentified
MSRTRKTPTRKTRSTRPTAPHAAAVDSLTVLHPNAAGIDIGLEDLWVSVREDRDPEPVRRFGTTTPDLMALADWLKVCGAETVAMESTGVYWIPLYELLEARGFQVYLVNARQVKQVSGRKADETDCQWLRRLHAFGLLNNSFRPAAEMRALRAYMRHRADLIEHRAAHIQHMQKALHQMNVRLSPTVKDITGVTGLAIIRAILAGERDPLKLARWRDPRCAQPEAEFVKALTGNYRDEHVFALKQAVALYDAYTQQLVECDQELERKFSALKPVHDHDLPPLDRSDKRNTHSKNAPAYDARSLLYQLLGVDLVAAGGLNEVTAQIIITEIGTDMSRWQNDKHFCSWLHLAPHTDSSGGRVLRSHTLKTHNRATQAFRMAAQAVGKTDTALGAYFRRMRAKHGPKKAIVATAHKIARIVYFMLRDHKPFRDTTAEVYAQREREREIARLKKKATQLGFTLAPAAV

SEQ ID NO: 44509 - protein, 342 aa, unidentified
MDQVTIIGLDLAKRAFQVHGARGDGGVVYRQKFSRDKILTFLAQQPRCVIAMEACGSAHHWGRAIRDLGHEVRLIPPIYVKPFVKRQKNDAADAEAIAEAAVRPTMRFVAVKSEDQQARAMLFRTRDLLVRQRTQTINALRGHLAEHGIVAPQGPANVKVLGQAIEDGETSLPLLVVELARIYLDQIEGLSKKIAKLQMVTVQEAKREPLTRRLQTMPGVGPITAMAIETFAPPMELFKRGRDFAAWVGLVPRQHSTGGKQFLGRTSKMGQRDIRRLLITGAMAVVRLAGRKGVPEGTWLSRMLVRKPRMLTAIALANKMARTMWAMLTKGEDYRVPAAVTT

SEQ ID NO: 44510 - protein, 413 aa, unidentified
MNHPKMRYTYVGIDSHKDTHTAVFIDCFFDKLGEITFENLPDKFGGFLELAQKYKTENTVFLFGLEDVSSYGRTLTVFLKNKGQEVKHVNAQLVASERKNQTVVQKTDSVDAECAARVLLSKLSDLPDADTQDIYWVMRSLIARRNFLGKHKAVVKKQLHSFVTQHYPNYRGFFENIDSKTALSFFMHYPSPTTLKGTTAPELTAFLQDTGKGNYTLETAKNILDTLQDTTVRYQEFRDTVVKSTVRQIRFSMEEIEQLEESMAVFLKEFDCTLTSMSGIDTLTAARLLAYIGDIKKFTTPAKLARYAGIAPVTYASGKKDMQFCNERGNRKLNSVFYQLAVRLSYATGPSRKVGNSFFYDYYNRKISEGKTKAQALKCVQRRLVNIVWTMLTNNEEYVNPPIYDLPEEDAQH

SEQ ID NO: 44511 - protein, 314 aa, unidentified
MTIQNEKCYIGIDISKAMLDVFISSNNIYLQLENNTAGIRKLIKKLKLFPDCLVVMESTGGYEKPVAQALAKENISIAVINPRQIRDFAKALGKLAKTDRIDAKVIAIFAEKMQPKTNVPFDKNQEKLTEYNTRRRQLVDMITMEKNRLDKVSKEIKKSIQSIIKLLEKELEKMNESIKKYIQSNDLYARKDELLQTIKGVGSIVSAGIIADLPELGNFNTKEISALAGLAPLNRDSGTLRGKRVIWGGRATVRRTLYMATLVAIRFNIKIKIFYDRLCAVGKPKKVAITACMHKLLVIMNAMIKSNQPWRIEA

SEQ ID NO: 44512 - protein, 356 aa, unidentified
MSYDVKYIGMDVHKEAIVIAVLNGSGKLVMETILETKASSILQFIHGLRGELHVTWEEGTWAAWLYDLLQPQVQQVLVCNPRRNALLKEGSKSDKVDARKLAELLRTGMLRPVYHGENGLRTLRELGRSYQTISKDLTRVMNRVKAVYRGWGIPCAGTQVYVPRYREEWLSKIPQSGVRRRAELLYQQLDGLLALRREMRGEFLAESRKHKAAKLLRQIPCIGPIRAAGLIALMQTPHRFRSKRQLWTYSGLGIETHDSAQYRYVNGQLQRSKKPQQLRGLNRNHNHEMKEIFKSTATSASCGRGPFHDFYAALLDKGMEPEMARLTLARKIAAVTLTLWKKEERFDAEQLKTQAA

SEQ ID NO: 44513 - protein, 398 aa, unidentified
MKGQDIMIYVGIDVASQKHDCFLLKDTGEVFSKTSFTIKNDFEGYKKLHNSILQFVESTKDSNVRIGLESTGHYSKNILLYLIKQGYQTTLINPILTNMDRKASTVRKTKTDKIDAEAICKFLDKNRFDFKPYTLLSYHIDALKSLTRQRFSLVKQMTQQKLIFQRLVNVIFPELLSHFSNDYGESVLNILYSYPTPKKLAKAHKESITKLLHSRCKITSSEILELAKNSIGQSEEYLGFELKHTIDMILFYQSQIEIYNKQIEIELNETEYGKIITSIPVVGIITGAMIISEIGDINNFTTSDQLLAYAGLDPSVYESGKFESSHNKPSKRGSKYLRWAIHQASSVIWQHDNTFKDYYLKKIKESKHHYVAIGHIDKKLIRVIFSLLKNKSMFIPQK

SEQ ID NO: 44514 - protein, 463 aa, unidentified
MEGKARRTHRNPKGPSLLERVNHNAAGIDCGSAEHYVAVPVDRDAEPVRHFRTFTAELHRLADWLVSCRIKTVAMESTGVYWIPVYEILVARGIEVLLVNARHLKNTPGRKSDVTDCEWLRELHSVGLLRGSFRPDEEIVTLRSYLRHRDTLVQSAATAITRMQKALVQMNLQLQIVIRDIMGMTGLAIIRDIVNGQTDPRRLAKHRDAHCKASEADIAAALTGHYRPEHLFALKQNLEIFDAHQRQIEACDAQIEVCLTELAEKMAPPSAPLPPRRSRRNRRSNEPRFEVRPMLHRLANTDLSELDGIGPYTALRLISEIGTDMSRWRTDRHFTSWLTLAPNNKISGGRLLSSRTQPSASRAAAILRMAAQSLARTQTALGAFYRRLAFRIGKAKAITATARKLAVLVYHSLKGDFVYKDPGAAAYDARHRDSVIRRLRQRAAALGLSLVDGQTGEILDGVS

SEQ ID NO: 44515 - protein, 339 aa, unidentified
MNISVLGIDLAKNSFQLHGVDAAGRAVLKKRLSRDKLGDYMANLPPCSVVMESCGGANYWARVFTRYDHEVKLISPQFVKPFVKTNKNDANDAEAIVEAASRPSMKFVPIKRIEQQDIQSLHRIRSRLVKNHTALINEIRGLNLEYGISIPVGASNVRRSLCSIISDSENELTPSSRAFMQELYDELLEIETRLNNMEKKIRLVCKQSDICRRIMKIPGIGVISATAIAAAVPDASEFKNGRHLSAWLGLVPRQFSTGGKQVLLGISKRGDRYLRTLLIHGARAALSRYKNLDNAYGRWLTQKKATLSFNKAAVALANKNARIIWSLLNNGGEFTPNPK

SEQ ID NO: 44516 - protein, 371 aa, unidentified
MVKLTRTMNKCHSNTELSSLEETRCQFNGGTGAIKLGIDVHQDFYVVVEQAGGSNPKPPQRFPKAAFLHWAAKLKSQATEVYAVYEACGFGFSLQRKLSALSIKCYVVCPQKLDEQNRRVKTDGLDAKALCLKLDRFVQGNRDALAIVRVPSEEEEQARAIHRQREQLVKARKQLEAQGRSLMVNHGLEPVPNWWKPRTFTALPAPQWMKELLANSQPILVGLQQKIAALTVQLQSAASPEQPRGLGKMTSVVIDREIGDWNRFSNRRQIASYTGLCPGEYSSGNTRLQSCVTKHGNPRLRAALVELAWRLVRFQPNYHPLRKWRQILAKGALATGAARKKAIVAVARQLAVDLWRIKTGQLRSEELGLIN

SEQ ID NO: 44517 - protein, 360 aa, unidentified
MRKQSNTLNFEGQNIYVGIDVHLKSWTVSILSAHLHHKTFVQPPSPEALSSYLHAHFPNGNYLSAYEAGFSGFWAHYKLVEMGIQNIVVNPADVSTSQKERLQKTDAVDSRKIARSLRSNELTAIHVPCRETLEVRTLLRSRDALVRDLARMKQRIKAFLYYYGIDYPEEFRHSGTHWSRAFMNWLRNGIRMDTEEGSAGFSLLLDSVESQRRLLLEATRKLRALSRSDRYATDYGLLRSVPGIGMITALAFLAELEDIRRFANSDRLAGYIGLVPTSHSTGEKDNKGEMTFRGQMQLRSKLIECAWFAARLDPALNMAFSKLTRRMEPNKAIVRIARKLLNRIFYVLKYKRRYKNETVE

SEQ ID NO: 44518 - protein, 426 aa, unidentified
MKEVDSIRIKEFRQLKKEVRGSKDYLIVGIDVAKDKHNAFFGTATGKTLFKRLVFENTREGFERLLIQTDTLKAQHALTKTVFGLEPTANYHKPLGEFLIKSGHMVVLVSGVAVKRNRELLDGRWDKHDTKDSANVADLISQGKCLFYEYPSMALRDLRNLLSLKKRLKKQEHGLRVRIRNHVLAQYFPEMDSYYGQSESNSLEIVKWCLNPSVIAGLEYEQFLQLVAPQKRGIWQQNRLKAIWKKAVDSIGCDAGESLEFEAKAMVEALEHIRETIRATDAKIKEICLQFPEYSYLLTIPGFGPDISSKVLGAIGNPFRFNSGKQVLKMAGMDLSANRSGKNSDSAIPVISKKGKADLRYALYQAALIASIRDRHFIVYYTNKLRGREKEKGIKTKMRVKLAAKMLIIAWTLMKKKEVFYTPQAY

SEQ ID NO: 44519 - protein, 432 aa, unidentified
MKYKIQQKQNQRIQQITDATIIVGADIAKQTHVARAIDFRGIELGKECVFNNDDEGLTKLVTWMKELQRLHGKTDVVFGVEPTGHYWFPLGAFMQGLSVRFVLVNPHHVNKSKELEDNSPTKNDYKDAKVIANLVKDGKYTEPKLPTGIYADLRILMNLREKVVVNLGQVQMRIQNWLDRFFPEYTQVFKDWEGKTSLITLRKSPFPQDLVSLGASEIVGQWKRGGVKRAVGMKRATRLVSTAKKSIGLKEGLTAARLELMALLEQYEMFTRQRDEIMAQVEQLLNQIPGTEEMLSVPGMGVTTLAGFLAEVGDLRGYDHGQQIIRLAGLNLKENSSGKRKGKTGISKRGRSRLRALLFRAILPMVAKNAEFKALHDYYTTRTCNPLKKKQSLIALCGKLIRVLHTLGTKQVQYNAEDLLGPLRRSQLQVAA

SEQ ID NO: 44520 - protein, 333 aa, unidentified
MAGQLEVGYVAFDVGASKHAFAVRMGDRRQQGELDNAPDKVLAFLKARLGASQRLRVIMEATGVYFLDLALLAHEAGAEVMVINPKAAHHFAKALGQRNKTDAIDAAMLLECLQRMPFQPWQPPAREVLELRQYGRHLLRLTDQRTRVKNQLHALEATATSPELLREDLREAIVELDRRIDRISALAMEQVRADERLRAQFEAVDSVTGIGPSTAVTLLGELLALPQDLNSRACVCHAGLDVRVHQSGTSVALAPRLSKHGNKYLRRALYMPALTAIVHDPHAKAFRDRLLARGKKKMQAVAAVMRKLLTAVWALVRNPARYDGSKLFAVVQG

SEQ ID NO: 44521 - protein, 350 aa, unidentified
MKISAIGIDIAKNVFQLHGVDEGGAPVLRRQLRRAQLVEFFAKLAPCLVGMEACGGSHFWARKLRALGHEVRLIAPQLVKPYVRGQKNDANDARAICEALQRPDMRFVAVKSVQQQALCHLHTSRSRLMKQRIAQTNSIRAVLAEHGLVLPQGMKALRQGVPELLDDASNELLGSTRVLLQDEMALLAQLQQRIDTLDGQIKAQAQANPVCQRLQQLPGVGPQTASALVAQIDRAQQFENSRQLPAAVGVVPRQHSSGGKSVLLGITKRGNEYLRWLFIHGARSVIKAQQRKPAEQQDPWIHKMLQTKHANVVAVALAARTMRRAWALLRYDSHYHPGYRGAGRDLVAAA

SEQ ID NO: 44522 - protein, 334 aa, unidentified
MNFKNFIGIDVSKGTIDIALLRENTANSVVSAKYGNDFNGLVNLEEFVKKQGLNMDETLFCMEHTGIYCRLLSHYLVENKYHVWLEMPVQIIRSLGIQRGKNDRIDAVRIAEYACLKKDKAVLWQPPREIVLQINDMLTLRDRLIESRKSLKQPIKEFIDAGFKDTAKLIENMCCNTLKALDKEIEQIEKELDKIINKDSNLKKLFKLATSVPGIGKITAFTLLYFTNEFKLYTNANQLACYCGVAPFEHTSGTSVKVKSRVSNFANKRLKKLLHMVAMSTISCDKQLSVYYQRKVNEGKNKMLVINAIRNKVLHRLCSVIKRGTPYQVEYQIA

SEQ ID NO: 44523 - protein, 425 aa, unidentified
MNLLILKGVPMSLKIVYKICCGIDVHKTFVVACIASTNDKSITSYESHRFSTYTSGLKTLLQWLLKRNCKDVCMESTGKYWIPVYNILENDCSIVLAHPKYVKAIRGKKTDKKDAKWIADLFKHDLVAGSFMPPADIRQLRDLMRYRFKLTCFQSSEKNRLQNCLTVSNIQLGNVVSDTFGKSAQAILDKLLENPADTSFDLEPLVYKSLKKKLPQLRDAIDGYITPEQAGKLKVIKSHYENLESRKAELEELILALAAPYQQELAILQTAPGIRSDFTAIGIISEIGTNMEAFPSAKHLCSWAGLTPTNNESAGKKKSVRVSKAGCYIKPLLVQCANAVVTSKKHPEIRNRYLRLKKRRGHKKAIIAIARMLLTALYHMLKNGENYNAELYRKSYLPPVDREITVEQAIIIARNQGYKIKSATA

SEQ ID NO: 44524 - protein, 345 aa, unidentified
MPIVGGLDIHRKQLTFDYLDTVTGEVQRGQVAPADRVHLRAWLVRFAGRDDVAFALEGCTGWRYVAEELAAAGVAAHVAEPADTAFARGRKRHAKTGKTDSRHLRQLLAEGRLPECWIPPSVILECRALLETYHDLRAEHTAWVQRIHAVFFHQGAPALGEAALRTGRDLQAVRAAAACHLSPAGQLQVDTALDILAALEARLEVLRHRLLAAARHLTGAKVLAERLYGVGPATALAMTCWLGGAGRFSSSRKAVRFAGLDVTVWSSDRKGPPGRLSRQGPPVLRWAVYEAGKTHARASAPDHRYYAQVKDRQDGKRAALSEARKILRQACHILAELGDDALTAA

SEQ ID NO: 44525 - protein, 389 aa, unidentified
MKIFVGIDIAKLNHFAAAISSDGEILIEPFKFTNDADGFQLLVSKLESFDKNSLIIGLESTAHYGDNLVRYLVTELYQVCVLNPIKTCQMRKNNVRKTKTDKVDTYVIAKTLMMQDNLRFVSFFDLDMMDLKALGRFRQKTIKQRTRLKIQLTTYVDQVFPEIQYFFKSGLHQNAVYALLKEAPSPKEIASMHMTHLANLLKVNSHGHFTKEQAKELRVLAQKSVGANDSAISIQITQTIQQIELLDSQLEKIEAEMTDIMKFNDSVIMTIPGIGYINGGMILGEIGDIHRFSNPNKLLAFAGLDPSVYQSGNFQAKTTRMSKRGSRVLRYALVNAAWNVVRNNATFKAYYDAKRAEGRSHYNALGHCSGKLVRVIWKMLTDNVEFNLK

SEQ ID NO: 44526 - protein, 448 aa, unidentified
MKSKQKPSKRKPGRLPKHLEHLNTTAAGIDIGSRSHFVAVAEGVDEQPVREFSTFTDDLERLADWLITCGVTTVAMESTGIYWIPVFEILDSRGLEVKLVNARHVKNVPGRKSDVLDCQWLQQLHTYGLLRGAFRPAEQICALRAYVRQRATLVRYAGMHIQHMQKALAQMNLLLQNVVNDITGVTGMLIIMAILGGERDPLKLAALRDPRCKNSVETIARSLQGNYRPEHLFSLKQAVELYQFYQTRIADCDHQILEQLRQFDVMALDPDHPDDHPPASLAEALLRMSGVDLARIPGIDTDTALKIIAEIGIDMSRWKSEKEFASWLGLCPGSKISGGKVLSSASKKVANRVAAALRMSAFSLMRSKSALGAYIRRQKARLGAPKAITATAHKLARLVYSLLKHGTDYVDAGQDSYEVRYRSRMVQNLKRKAQELGFELVAVQGQTV

SEQ ID NO: 44527 - protein, 331 aa, unidentified
MSFSKIVGIDVSKLTLDVHVLPDHQVFNVLNDAKGIKQLIRLMEKNLKIKPSDTLFAFEFTGFYSYRLAVCLQEMNYPIVMLPGLELKRSTGITRGKSDPVDAKKIAEYTFLRRDQIVPTQLIEEEIEQIKRFLSLRDRLVKQRAGYKATLSEATRAIGRKEDPLYFQVQEKVVKELTLQIKRVEKELVQIVDANPELKKQFDLIVSIKGVGPQTALTMIAVTHAFRKFPTWRKFACYAGIAPFPYQSGTSIKGRTKVSHLANKKVKSLLGNITGSAIQHNPEMKLYYTKRIAAGKNKMSTQNIIRNKLISRIFAVIERGTPYVDTMKFAA

SEQ ID NO: 44528 - protein, 335 aa, unidentified
MKFTYFIGADVSKNELDFAVMQGKKLLFHKEVKNSTLAIKSFIKELNKLPGFNLSEAIFCLEHTGIYNNLLLAFLNKKNANICLELATQIKNSLGNIRGKNDRIDSIRIAEYAYKNRDELSLWKPKREIIQKLTYLTATRSRLLQAQKILKTPLKEFEGYVDKSIIKQNQKLNKETLGAIKNELLKTESAINEVIESDTELKRLFSLITSVNGIGSVTATQIIITTNEFKDIKDPKKFACYSGVAPFTKESGLFKGKAKVSHMANKKMKTLLHMSSLVAIKHDKDLNLYYERKVKKENKNKMSVINAVRNKLILRVFACINQNRKYENNYMRNVA

SEQ ID NO: 44529 - protein, 338 aa, unidentified
MSKITTIGLDLAKHVFHVVCCDGRGKLVSKRMLKRRQVLTFFAALPPCRIGMEACAGAHYWARQLQARGHEVILIPAQYVKAYVRGNKNDYNDALAISEAVSCPQMRCVGVKTPEQQDLQALHRLRERCVQMRTGLCNQIRGLVGEYGLVCPKGVAILRRQIPVWLEDGENGLSELFRRLLSQSYAQLQSLDAHIAFYTEELERQGRQNTVCQRLQTIPGFGPIAASVFYSQVGNGQAYRRGRDAAAAIGLVPRQHSSGAKQTLLGISKRGDRYLRSVLVHGARAVVARAGTKQDRLSRWINRIRAERGFNKAAVALANKMARIGWAVVANNTVYRAA

SEQ ID NO: 44530 - protein, 372 aa, unidentified
MPEVSSNAPADVRLWVALDVHKLSIVAATLPAAGGQPEVQQIETTRAAVRRFIDRLGGREGLAVCYEAGPGGFDLLRLLSELGVACDVVAPSLIPVRAGDRIKTDRRDAKQLVRLYRGGQLSFVAPPSPETEGLRDLMRCRDDLRCARTAARHRISKQLLRHGRVFRDGKSQWTKMHRAWTARQHLDDELAHKALAEMLVHLDGLDRQLDALDRDLEQIARGQRWAATVEILTRFKGISTRTALGLIAEIGDFARFGHPRELCAWLGIVPTEYSSGPQRHRGHITKTGNHHARRLLVEAAWSYQHRPRPPQRGPEPDARAWHAQIRLHHRYRHLTSERGKRSTVATVAVARELACFLWAAVTDQPPAPQTAT

SEQ ID NO: 44531 - protein, 358 aa, unidentified
MKKIVIGIDISKEKIDATAIDVRDSHLGVVKLDYQVYENRPMGYRRMLVWARHLIKGVGLEDVLFCCETTGGYDRCLCDYIYAKGLEIWREGALQIKRSMGVRKGKDDKADSLMIAEYAMRHIDKAVIYETPDEKVRELKALFLYRHKLVQERTEKKVRASELKATAAKSDSMRFIVRDAMRNVRALDKSIRDCEKQIKVIIDSDENLKRNYDHIVSTPGISIVNATAFIAYSNNFRSINTANKIASYWGCASFRERSGTSVDKKAYVRCYSSSLLKATLTQAAECTIKEHGIYHDYYLRLKAEGKPYGVIVNNVRNKLIHLVFSLVTNDMDYEKNHEFLRKKRKSEQGMSAQLEIIN

SEQ ID NO: 44532 - protein, 413 aa, unidentified
MQMMIKRSAGLDVHQAMVVACVLICEGRKRPHREIRSFATTSRALEDLREWLQAERVTHVGMESTGVYWLPVYAVLEGHFELIVGNARHINNVPGRKTDVKDAEWIAELVCCGLIRPSFVPAKPLRDLRELLRYRRKLVESQAAERNRLLRLPETANIKLASVLSDVLGVSGRAMLRALIDGTASAAEMAELARRRLRRKRAELALALDGRMGEEQRFLLAVQLRRVEAIEQDIEHLEQRIAERLAPYDSEVARLMQIPGVDWVVAATLIAEIGTDMSVFLSAHHLAAWAGVCPGNHETGGQRKNVRARKGNTHLRTALVGAAIAAARTKGSYLKDKFYRLKARRGAMRAALAIAHKILIAAYHMLARGVGYRELGEAYLDQIDQTRTAAHLKRRLERLGYVVSLQPKELAAA

SEQ ID NO: 44533 - protein, 489 aa, unidentified
MSKSKRKQPISFAGPRFFGIDLAKRESQLCVMDAEGNILEERRFPTTVKELEQIAAELTTRDTVTFEMTTNSFAIARLFREKCRARVIVSNPMKTKLIASARVKTDKIDARVLCELARVGFLPEVWLPDEETESLRRLVSRRTNLVRRRTAIKNDVHSILQRNLVEYERPKVFASGPSFKSLDISRLPALEKLLVDDYRDEIASVDARIEQTERVIAAFVCADQKMLHDMDLLMTIDGINIVSAAGILSAIGDISRFSSPKKLASYFGLCPSTYQSGDLRSFHGRITKQGRAEARWFLAESAEALIRTPSPLASLYQRIARKKGHNIAKIAVARKMAELIWHVLSKQTPYLYQKHRLTQEKQARLRYLAKLSGIMATSASPTKRSNDTALKGLKLPVAGRDLKTQASRIAAIRASNIYQAVTEGRLNNNIASLNKNDPKVSPGNIALADLCNTRLSGFNPFRPTQHDYEALLRDVLKDLISPHIEDRTA

SEQ ID NO: 44534 - protein, 355 aa, unidentified
MKYYTSTTEYNCGIDLHARQMYVCVMDRQGKKLVHTNVLNNDFKYFLKLVEPYKHDLTVCCECMFGWYWLADACQAAGLTFVLAHALYVHLIHGGKNKNDRVDSEKLTHLLRSNLIPPAYVYPTDKRPLRALLRQRIFYVWRRSELLARIYSHQLAHNRTPAKQTRRVRDSWEEQLLAAEDNPLRQIALKNDLAMIRHFDHQIFQLEEELQRQTKQVACREYALLQTVPGIGETLGLIILYEVGDINRFPTVKDFLSYCRLVKGTVASAGKIKGLRGAKLGNPYLRWAFSEAAVIAKRDHFRIRPLAQRLEARMGGNKIKANTVVAIKLARAVYFMLKNKTVFDPERLVAALAKK

SEQ ID NO: 44535 - protein, 340 aa, unidentified
MQITTIGLDLAKLVFQIHGVNAQGKTVLKKKLKRDQLTTFFAKLPPCLIGMEACSSAHHWGRVLRDLGHEVRLISPQFVKPYLKSNKNDAADAEAICEAVGRPSMRFVAIKTVEQQTVLSMHRAREGFVKARTAMSNQIRGVLAEFGLILPAGLVNLGSQVPALLEQAADHIPAAFGQLIDILMQHFRILDERVKHLEKMISYWHRHDPVSQRLAQIPGIGPITASALVASVGDPALFKNGRHMAAWIGLVPRQHSSGGKPTLLGISKRGDSYLRRLLLLGAHAVLRRVRRPEAAPSWAGKLLQRRHANVVAAALANKNARTAWALMATQHSYVPNHQST

SEQ ID NO: 44536 - protein, 414 aa, unidentified
MMVRVACFVGLDWSDEKHAYTVKGSEGIERRGIFKSDPETVHGWVRELREAHPEGVIRVGLEQSRGPLMYALSAYDFLELVPINPLAAKSYRDSLYLSGAKDDPADADLICDFVRTHETILRVWRADDANTRKLRLLVEGRRTLVDQRTALTQALSATLKQYFPQILSWFGEANTKLTRAFLLRWPSLDQVVRARSSAIRTLVQSHSRKKSADIDALVEKIRTTVALTTDSAIIDAMSLLATSYVTLLAAIEEPIHSYDEEIAKLWSAHPDQTIFASFPGAGPVMAPRLAVAFGTDRTRFTDATEMQCYSGIAPVIERSGKKTWTHSRWRCSQFLKQTFHEFAAASLPFCSWALAFYRQQRERGAGHHAAIRSLAFRWIRILFHCWKTNQPYDDKTYIDSLKRRNSPLVARLAA

SEQ ID NO: 44537 - protein, 395 aa, unidentified
MFIVGIDVAKRSHEVCMITSDGQTVQRPFSIRNNCTGYNLMLEKIRKHTNIKSQIVFAMESTAHYWLALFTRLRKDGYHVILLNPIQTSAMRDMFIRKIKTDAKDSFIIAELIRFGRYAENNVAQDRLLALKELCRNRFYLVDMAGDLKRKLIALIDRVFPEYEAQFDTIFCKSSVAVLKKYPTPQKLSNAHLDKLTELLWNSSNGHFGEWKARELKELARNSFGVEDCDGAYSTLILLMLDQIQSLSGKADALEKEISRLFQSFDTTVTTIPGVGPIIGAVILSEVGDISRFSSADKLAAYIGVDPSVNQSGEFQAAHAHMSKRGSPYLCRCIWMASQVAVQRDPMFRAYYEKKAAEGLKYMTIIGHVTRKMTAVVFAILRDHKVYEPILPTAA

SEQ ID NO: 44538 - protein, 365 aa, unidentified
MQGWTEAGEREVIAVRQRVFVGIDVGKVQLEVALSTGEGFAVVNDKGGIAELVRRLRTAAPKLVVVEASDYERAAWIALWEAGLAVARVNPRDSYHFAQARRRLAKTDRIDARGLCEFAARVQPAPNPPPEAANEELRGLVDRRRQLVGMLVAERNRCQQMPKSICKSIERTIRALKRELGTIDRAIELKLSESAKLGSSTTLLRAVPGIGPVACATLLARLPELGRLNRREIAALAGVAPFDRQSGAWRGSSTIFGGRAEVRATLYMATLTAVRHQPALHAFYQRLRERGKPAKVALVAAMRKLLAILNAVLKHHTPWNRSVTHPHNGGSVAHKFTGGMFPVIPEPVNPVGNASSGLTFNTVAH

SEQ ID NO: 44539 - protein, 370 aa, unidentified
MHQSSTLYLGLDVHKESIAVAYVAKEDHAEVVSLGNIGTRQCDIDQLIRKMQSKSQHRVFVYAAGPCGYWLYRYWTKKGHVCWGVAPSLIPKKPGDRVKTNRRDAIKLARLMRSGDLTPVYVPQVEDEAIRDLCRAREDAIRALKTAKVRLKAFLLRHAIRYTGQVSWNPAHLRWLSAVVCPTPAQQIVFQEYVRAITDHTERLARLDQELTEHVQFWRLAPVVDALQALRGVQFTVAVTTVAELGDLTRFDNPRQLMNYLGLTPSEYSTGERRRQGGITKTGNSHARRALVEGAWAYRYPAKVSRHLQLRLEKVSKPIQDISWKAQIRLCKRYRQLSARGKNANQVVVAIARELSAFMWAIAQEVPLTP

SEQ ID NO: 44540 - protein, 313 aa, unidentified
MTDTTIGIDISKDHLDACRWPADETCRVSNDAAGHRKLLRWIGADLAADLALVAFEATGAYHGALERALHKAAIPCAKLNPARVRRFAEAIGTRAKTDRVDARLIARMAAMVEPAPQAPKPAGHAPLHELQLARTSLVRARTAARNRARHLTLPLLRRQHADRLRCIRRDLAAIDAAIAALIAADPEIARKAAILCSIPGISKVSAAAILADLPEIGTLEPAAVASLAGVAPITRESGEWKGQAKVGGGRRDLRRALYMPALAAARFNPNLEAVYERLRARGKPGKLALTAVMRKLILLANLLVHENRLWEPR

SEQ ID NO: 44541 - protein, 352 aa, unidentified
MNKQPQNEIILGVDTHLDKHVGVVINGYGKYLGNISIETNSSGYQKLLKWLQSFGILQRAGVEGTGTYGAGLARFLSEQGVEVLEINRPDRSMRRFKGKSDPTDAESAARTVLSGRACPIPKLQSGAAEAMRIVSVARRSAIKARTQTINQLRGLLISAPEKVRSKLWKTKPAECVANCAHLRTLGETNWSITLASTLRLLAKRWLYLSSELKELDETLEHLTAQAAKRTRQQFGVGPQTAAILLAVAGDNPERLRSEAALASLCGVNPLEASSGKTVRHRLNRGGNRAANNALWTIAMVRMRSDPRTRAYVARRTIEGKSSKEIHRCLKRYIIRELYPLILADLNDSVLAA

SEQ ID NO: 44542 - protein, 377 aa, unidentified
MQKPSTIDIDPVIYLAIELSASTWLVASKIPTSEKTGLHRMTAGDSQALLALVADLRKKVATKLGVEAAVVSCFEAGRDGFWLHRLLVEHRVINHVVEPTSILVNRRARRAKTDRLDAQGLLRILAAHAKGDHDVCSVVRVPTIEEEDAKRQHREREHLVQERVRIENRIAALLTTQGIRKRPSLRSWEKDMEEMRTGDGRPIPSLLRAEVNRLRRRLVMTLEMIRELEAEREQALQTQDDMASRMIRALCRIRGIGDNFAAVLTREVFYRPFQNRRQIASYLGLTPTPFQSGGMDRDRRISRAGNARARKTLIQLAWLWLRYQPDSSLACWFRERVGNLQGRTRRIAIVAMARKLLIAIWRYATHGIVPEGAQISI

SEQ ID NO: 44543 - protein, 353 aa, unidentified
MKMYYVGMDVHQASIVIVVLNGAGKVVEESSLQTGVAAVRSYLQRLKGKVLVTFEEGTQAQWLYEVVQPLVTAVIVCDPRQNRLLAAGNKSDRIDARKLAELLRHGSLKAVDHRDHGVRVLKELVRNYECLVQDTTRVMSRLKAIYRGRAIACQGHELYRQDRKQQWLRKLTEPGAKARAGFLYEQLAAVRPLRQKAKLAMLREARRQAAYPWLLSVPRLGAVSVAQVLAIVGSPHRFRSKRQFWTYVGLAVVTRTSADQEVINGVLRRSRRPVATRGLNRNHNHLLKRVFKTAATSACHRGPFSAAYEARVKRGMDPALARLTIARQIAAITLSLWKRGELFQVERMKMLRA

SEQ ID NO: 44544 - protein, 354 aa, unidentified
MSSILAGKVEFVVGVDTHRDSHTAAIVSAATGGVVDQLTVATDALGYRELQDFAVRHAPGRRVWAIEGTGSYGSGLTTALLDHGQWVVEIDRPTRPARRDRAKSDDLDAVRAAREALGRDHLALPRARGDREALRVLTTARAGAVVAGTKAINQLKALIVNAPQPLREQLRHATSDQQLRRCARLRTQPTHSIEHRATIRAIRGTARRALALAAEAAEYETELKQLVVAICPALLERPGIGTITAAQFLISWSHPGRIRNEAAFAALAGAAPIPASSGTITRHRLNRAGDRQLNRALHTVAMTRLRIHEPTQAYTARRTAEGKTPREIRRCVKRAIAREVFRIMTHHAKDPVAA

SEQ ID NO: 44545 - protein, 410 aa, unidentified
MKSAVITAVGVDVSKSKSTVAVRRPGGEIVMHPFDVRHTNSDLKKLVSTLKKLGGDIRVVMEHTSMYWRPIALTLKKAGFFVSAVNAMLIHDFSDNSIRKLKTDRADALKIANYALTFWDTLPLLNDEEETRLLLKMQSRANERITATATVLCNGLIALADQTFAGVNLAFDPNTKNTDGHEKWVDFFLRYWHRDCVCQYFMEVFTESYRGWCKRKNYKFRTATAHKIYIMAQECVATLPKCESTKTLIGQACKSLNAVCEARHNTQLEMQRLAALLPEYEIVMQMEGAGPVTGPALMAEIGDVRRFKNKKALVAFAGIDAPPFQSGAFESKSRHVSKRGSPHLRRTIFLVSNIILTLSNPENAVFCFMGKMLRGKTLLCLYCCRKRKVLAHLLCSRERVPSLSSSSGCL

SEQ ID NO: 44546 - protein, 402 aa, unidentified
MLHDHLKHPTAIRVQFGAIFVSLELSRKTWLITSLSPGKGEKMSKHSVTAGDIAGLLARFSELQRKAAVRTGKSFHLIVIQEAGLDGFWIHRVLQQEGIESHVVDPASIAVPRRRRRAKTDKIDGEALLRALLAYKRGEPRVCSMVVAPSPEDEDRRRLCRERDTLTAERVRHVNRIKGLLFAQGIADYAPLLRNRRKRLDQLCTGDGRPLPQYVKAQISRELDRLELVLEQIKVVEKERDRILLSPAPVVLNTGPEAACDQPRGASGVRMLTALRGFAADGATKLWSEGLSRHFSNRRQIAAYAGLAPTPWQSGGIAHEQGMSKAGNPRLRTTMVQIAWLWLRHQPQSALARWYFASVGVGATKARKKVAITALARKLLVALWKYVTAGELIEGAIMKPVA

SEQ ID NO: 44547 - protein, 411 aa, unidentified
MDRLVERCAGLDVHKDSVAATVRVPGGGRERLQETRTFSATTRGLLTLADWLASYGVTLVGMESTGVYWKPVFYVLEERFECWLLNARHLRNVPGRKTDVQDSAWICQLLEHGLVRASFVPPKPIRELRDLTRYRKTQIEERSREVQRLDKVMQDAGIKLSSVASKTLGLSVRRMLEALIAGTHDPQVLAELARGRLRAKLPALREALAGRFRSEHHGLLVAQILAHVDYLDETIATLSERIEQLLAPFSRQRELLETIPGIGRTAAQVLIAELGVDMSVFPSSAHLASWAGQCPGNRESAGKRRSGRPRHGSKWLQTTLTESAKAAARTKGSYLSAQYTRLRGRRGPGKATGALRHSILVAAYQILDQNVPYHELGADYFDQRSSEQRTKRLVRQLEQLGHNVTLEPLAA

SEQ ID NO: 44548 - protein, 343 aa, unidentified
MSGAYEGKQIVGMDLHRRRSVVVRMTDTGERLETVRISNDPDYLRAVMARAGDAPEVVLEATYGWYWAADTLAQLGANVHLAHPLGVKMFGLRRVKNDERDAADLADLLRMGRLPESWIAPPATRELRGWVRHRAKLVGLRSSVKNQIYAVLAAAGVAVSMSDLFGVAGRQLLATTLLAVESRSRVDSLLRIIEALDFEIDLYARLIAGRLRTDPGYHAIQTIPGVGPLLGAVFVAEIGDISRFQRPEQLASWAGLTPKHHESDTTVHRGRITKQGSRLVRWAAVEAVQRVPAHTRLGQTRDRVGQRRGRNIGAVAAARELMTLVFYGLRDHHIRCLTSTPAA

SEQ ID NO: 44549 - protein, 424 aa, unidentified
MSKQKSSVAGLGAIYGRVCGMDVHKNSVVGCVRILNTKDGTVQSTLRRFGTMTADLVQLRQWLAEQQVTHAAMESTGVYWQPVFNLLEGHLEVWVVNAQHIKKVPGRKTDMKDAEWIAQLLQCGLLRPSFIPDRQQRELRDLTRQQTKLVQQRSAVDNRVQKVLETANIKLGSVASEVLGVSGRKMVEALIGGEKDTRVLAELAQRRLRAKIPQLQRALEGEITEHHCFMLRQLLDQYDFLEQEIARVGERLGAVAPASFHAEVKKLDEIPGVGERGAQALLAETGTDMSRFPSHKHFASWAGRCPGNHESAGKRKSGKTPAANRHLDAVLTEMAQAAVRKNDSYFKSQYHRLAGRRGKKRAIGAVKHSLLVTIYFMLRDNKSYKDLGADYFDKLNPQHQIHYHVRKLNDLGQKVELSPMADAA

SEQ ID NO: 44550 - protein, 387 aa, unidentified
MTVRTESNLPAAMHVDTARCLFAIELSKQSWVIGFITPLSAKISRRILSGGDWKGLLDLMEEVRARVSRETGRTVDVISCYEAGYDGFWLHRLLEAHGIRNYVIDPASLQVDRRARRVKTDRIDTERLLRSLMAYLRGEPKVWSVVRVPSVAEEDARRLHRERDRLVSERVQHVNRIKGLCALHGIYDYQPLRPQAMARLEQLRTAQGISLPPRLNSEIKRELQRLELVVEMIATLEAERDAIVEDEASTHVNAKKIQNLHQLKAIGPEFAAVLVGEIFHRDFNNRRQLASYVGYAPSPFQSGNVAHDQGISKAGNRKGRTTGIELAWLWLRYQPDSDLSVWFRARVGTTKGRIRRIAIVALARKLLVALWRYLETGLVPRGAVLKG

SEQ ID NO: 44551 - protein, 352 aa, unidentified
MTVTNLPRGVTGGVDTHLDVHVAAALDERGTLLGVESFATTTEGYKKLLGWLSDFGRVELVGVEGTGSYGAGLTRHLQAERVRVVEVDRPNRQRRRLKGKSDPQDAITAAHAAQSGDALGEAKTRDGNVESMRVLRVARSSARNGRTRALNQMRSLISTAPETIRTELRDLNVFRLLERASAYRPGVKRDIVSLTKFSLRMLARRAIKLEEEIIEIDAILKPLVKETAPELVATLGIGTDAASALLVAAGDNPERLRNEAAFAHLCGASPLDASSGKNQRHRLNRSGDRQANSALWHIVITRMVYDPRTTEYIDRRTKEGKTKKEAVRCLKRYVAREVYGLLPHDKLGLDSP

SEQ ID NO: 44552 - protein, 376 aa, unidentified
MEDDSTLYVGLDVHKDSITVAYSIGMSDVELLGKIGTTQIEIDRLCKRLQSKARRVRVVYEAGPCGYGLYRRLIAKGFDCMVCAPSLIPQKPGDRVKTDRRDAIKLVRSLRAGDLSAVHVPTVEDEAFRDLARAWSSARDDLKQARQRLKSFLLSHGVQYSGRANWGPAHRRWLSTLSFSSAWQQLAFNEHRRTIEDRLAQCERLEVALREAVTSWRFYPVVLALQAMRGIQFVSAVGLVSEVGDLSRFEHPRQLMAWLGVTPSEHSSGDKRRQGSITKTGNSYARKLLVESAWSYRHPARVSIDIQRRHEGIPKQIIDRAWDAQLRLCRRYRKLVARGKSPQVAIIALARELAGFIWDIGRMGMTLALPQDGQPA

SEQ ID NO: 44553 - protein, 394 aa, unidentified
MKLVGIDVGKNSHHFCVMDKETGEFNVAPSSFSNNKEGFDFLINSLKPYSKKSILFGMEDTGHYHVALLKFLLSNGYTVALINPKTTDLTRKMEGGITKNDKLDTITICDVLDTPERKKQYRITKVDRFDLYEQRQLTRHHHNLKEELNVYCNRLQKSIDLVFPEFNTLFSSKYSIVYMNLLKTFGSAEAIASTDIRTIRKCFEIKGRGNRISLTPEKLKECAKNSIGISSEVETIQIKHLVSQITLIKEQIAEIDKKIEEFSITNNSPILSIPGISHFSGTSILAELGDIGNYSKPSQIIKFAGVAPYHYESSQYNAQHTGITKKGSKYLRKTLYQIILTVINNNPVFKKYYLLKISQGKGHRCAQGHCIRKLLRIIYHLLETGQSFDPALLR

SEQ ID NO: 44554 - protein, 420 aa, unidentified
MKAYNINDFAALIGIDWADTKHDICEHPSNTQKYHYCIIKSKPEALHDWVMSLKQRYPNQQIAVACELKKGPLIYALAKYSHLTLFTINPSSVANYRKAFTPSNAKDDPSDALIQVEILSLHMDKLTVIEPESAAMRSLSQLVEYRRSLVQDSVNLSNKITATLKNYYPQALEWFKEKDTFIFCDFISKWPSLTKVKRAKKQTLLDFFNSHNSHYSQVNDARILSIKSAMPLTEDIGVIEPNQLLVEVLIAQYRVLLKGIESLDKAIKLAYKSHDDKVIFDSFPGAGPQLAPRLLVAFGSNRERYEEASELQKYAGIAPVIERSGKKMWTHWRYSCPTFLRQTFVEWAGFSIRYSFWAKAYYEQQKSKGKPHNSIIRSLAFKWIRIIFRCWKTSTPYDESKYLEALKRRGSPLLKFAINS

SEQ ID NO: 44555 - protein, 364 aa, unidentified
MKLVKDIVNRVVRYIGMDVHKDSTTAVVLDAQGNRVMQVTLRTEGTVLVDFVRGLSGRLHLTFEEGTYSAWLHALLSPWVEKLIVCNPRQNALLKQGNKSDPIDARKLAELLRLGSLSAVYHDAPGMRTLKELAASYATLVQDGTRVMNRLKSLYRGRGIRCGGTQVYSPRHRARWLEQLVEPGARQRAKLLYQELDLLLQLRPQARRALLAQSRQHPAQKILRTIPGLGPVRVALLLAWLQTPHRFRNKRKLCGYGGLGLLTRGSAQYRLEKGELVVSPKGVMVRGLNPAHNTHLKDIFKGAALAACQRPGPLREAYQRLLREGTQEHLARLTLARKIATLVLTLWKRGERFDAQRLRREQAA

SEQ ID NO: 44556 - protein, 367 aa, unidentified
MVKDSTAFVGLDLGDKRSNVFILDQEGDLIEETRIPTTEPGFRRKFASLPPCRVAMEAGTHSRWASRLLEQLGHEVLVANPRRLRLIYENSRKADAADAEHLARLARLDPQLLSPIRHRGPEAQAHLTIIRSRDSLVRARTLLINHVRGSVKGTGARLRACSADSFHHRVGPTIPPELAPALMPVLETIASLTAQIHAYNRQIEQLCQEQYPETRHLRQVSGVGPITALAYVLTLDDPNRFRKSREVAPTLGLVPKRDQSGSRDPQLRITKTGDSYLRRLLVGSAQYILGPFGPDCDLRRWGLKLAERGGKNAKKRAVVAVARKLAILLHRLWVTGEVYDPFYHSHPDQTSATQTHLLVRQPEAVCA

SEQ ID NO: 44557 - protein, 334 aa, unidentified
MRLYCGIDLHSNNVYLVIRDQDGRVVLRRRIPTDLALIRAALEPFQSELVGIAVESTFNWYWLVDGLMQAGFRVHLANPTAMQPYSGLKHADDCSDAAWLAEMLRLGVLPEGYIYPKEQRGLRDLMRRRIRLVQQRTAMLLTLQNLVQRSTGQRWKGSKLAEWDGEGLDDSNVTLALSATQRVATCLNEEVRGLEKEVRRQLRPDPLYELLKTVPGAGPILAPTIRLETGDIGRFPSPGHYVSYCRAVGSQHLTNGKRKGRGNTKNGNRYLAWAWIEVAHFAVRYHPPIRRYYERKQARSHRLVALKAVVHKLARAGFYVMRDRVPFEMEKAFG

SEQ ID NO: 44558 - protein, 340 aa, unidentified
MVEGTEGSHHKEGSTKMAKRTTICAGIDTGKRKLDIAFDGSSEQLQIDNTSEGYKVLSDWLRRHRVKRIGIEASGGYEQAVVAELRRKRFVVVVFQPAQVRAYAKFHLQRAKNDKIDAALIAACTAAVKKIHAPPDARLLPFAQHLTMIDQIGEDIARLKNRIESCRDPHIQKIWKEDIARLGRRERVEFKALVAAIREYRDLAERLDLIYSVSGAGLPTAVAILVRMPEIGQLTREQAAALAGLAPYDDDSGQHAGVRHINGGRQRLRRALYTAALPASFRWNPQLIALYKRLIAAGKGHKRALIACARKLLIFVNTVVARGTPWQNQPSPLATMTATG

SEQ ID NO: 44559 - protein, 428 aa, unidentified
MLKINPLSTLYVGIDVSSKSNYVCALDFFKNKYINSSFANNQPGAEELALKILECLKEHPDLNTVVAALESTSVYSIHIANYLSSCEELMPFKPYVFVLNPKCTANYKKSYIGLGKSDPIDAFVIADYARAGNIETEPWRGSQFLALKRLTRHRLHLVECITREKTYLVSNLYLKFSELQMLDKDDQPFCDIYGATSSSVLTEYLSPEEIIEASEEDLVSFLANKSRNRIKDISKTAELLKKAARDSYRLDKALYEPLNVSIASSFNCIETFKKEIKAIDAAIEREIKGLNPNAFIILQSINGIGPVFAGGIVAEIGDISAFTSSDALAKYAGLCWRSNQSGDFDGEDTPMIKAGNRYLRYYLGEAANSMRKHNVEYGAYYRKKFNEVPKHQHKRALALTSRKFVRLVYGLLARNQLYSGVSLDTSNE

SEQ ID NO: 44560 - protein, 326 aa, unidentified
MGKSIIDTSSVTRVGLDLAKRVLRIHAVDATGFVVIARSVNRRTLLKFFDMLPRCVVAMEACSSAHHWGRQLLERGFAVKLIPQAHVKPYVRRSKNDAADAAAICEAAGRPGQRFVPVRSVENQAALMRHRARELMVGQRTAALNALRGHLSEIGVVAAQGVQNAYALKEMADEGFDENGEIVVPDCVRLALAPLVRQIDALDEAIEAIDRELEASARTDETAKRLMTIPGVGPVTAMALLATIQDFAAFSSGREFAAFLGLTRENIRPAASRGSGGSPRWATAICASCWFRARARPLATAKGITTPCAAGLAECSSARPSSTSSS

SEQ ID NO: 44561 - protein, 345 aa, unidentified
MKKVMAGIDLHSNNLVIGIMDLDGKRVAHQKLECRLSEVVKFLRPYKKRLEQVGVESTYNWYWLVDGLQALNYPIVLANPAGMQQYSGIKHADDTNDAFFIAELMRLKILPTGHIYDEHLRPVRDLLRRRMTLVHQRTSLMLSFKSLYTRTTGQEMTLSRLKELEIKEAQELYDHPANQLIAGMQIRHIEQLNESVEKIEKGVLGSARELPYYSKLTTLPGVGRILGMTITMEVGDIKRFAGPGHFASYCRTVQAQCISNSKKKGENNSKCGNRYLAWAFVEAANFARRYDEQCRKWYDRKAAKTSPVIAIKALACKLAKAAWYLMAQGTDYDPKRMFGQPAKIK

SEQ ID NO: 44562 - protein, 351 aa, unidentified
MKKVAYLAIDVHAGHCVLGHIDIDGTFLGNRRFPTSEQHIIEALKGVKAKEKYLALEESNLAYWAAQVARPYVTEVICSDPKENALIYRSSNKRDKVDTHKLCRLLRLGELKRVYHAENDERAIFKAAVQHYIDLRDQQVVLKNKIKAMYRHWGVIDVAGQAVYGIKRRHDYLQRVKHLHIRNQLHRLYCLMDETESMQKRALKAMKQLGRKYPEIKQFKKMPGIGEIHSHTFDAFIQTPHRFANKRKLWRYCRLGITDRSSDGKPLGFKRLDRSGVSELKSLSYQAWLCAMRSDNEVSRFYSESFRRTSNRVHARLNTQRKILAVMYGMWKTGEAYRSELFLDSPQMSVV

SEQ ID NO: 44563 - protein, 357 aa, unidentified
MQRNKISFKGQNIYVGIDVHLKTWHVTTVTESGYKYSFAQHSDARELFDRLNRKFPDAHFVSAYEAGFCGFSAHYALADLGFESIVVHAADIPTTGKEKAMKTDAVDSEKIAWALKRGELTGIYVKDKQYMDDTNLVRLRQRFVADLSRQKNRTKHLLYTQGVTFPERFSKNRTHWSRNFMSWLREEVELLSGEKRSLVLLCDQVENTRRAILAVTREIRRLSTSDKYKENYGLLSSVPGFGLIMSMSMLTELDNDVTRFPNERTFVSMLGLIPTCHDSGEKKAIGEKTNRGSKQLGPLIVEASWVAIQRDKGMGAYYSNCCQSMKPHKAIIKVARKLACRAYAVLKTKAKYKYEQS

SEQ ID NO: 44564 - protein, 408 aa, unidentified
MSQVIIGMDPHKRSATIEVMTSDETVVGGGRYGTDVAGYRAMLAEARRWPERTWAIEGCQGIGRHIANRLLAAGEHVVDVPPKLSARTRVFATGQGRKTDATDAHSVALAATRMTGLRPVVDDQQLAVLRILADRRRSLGEDHTRMVSQLHQLLPGLIAGGAKKDLSAAQAKALLARVRPRNAAGKARRRVAAELISDLERIYQRKKEADKELSALLAVTGTTLTDLHGIGPSGAARLLAEVGEVTRFPDKAHFASWDGTAPIDASSGDQVRHRLSRGGNRQINRVLHIMAVVQLRNPTEGRAYYDRKVAAGKTPREAMRALKRRLSDIVYHQMITDARAKATGPGGHLGAATGSSAAGLHPSAGTSEKSLPGPATDDLTPGKPAHSPGRSRHSPSAPDRRRRQAQSA

SEQ ID NO: 44565 - protein, 349 aa, unidentified
MKKIVKQVVSTDVAQKELVASLGRRHDDLSAEVYTHRTFPNSIKGFMALISWVKKLTVETVAVRYVMEATGVYHERLAYFLDEKGYEVSIVLPNKISNYFRTLDVKTVTDKTASDAIARFGLDRELVRWKRPGQVFKQLKQLTRERDQIVSERTMVKNQLHAERAEAEPNKSTITRSEKRITVLNKQEKEIRAEISQLVTSDEGLNRSVKLICTIPGVAILTAATVLAETNGFDLIRNKSQLVSYAGLDVKEKQSGTSVNGKPRISKKGNKYLRKAMHMPALAAIRHEERYKAIFIRLVSKHGIKMKAAVAVHRKLLEMIYTIYKTKTAYDKNYLQKQKVNHGQQEIPA

SEQ ID NO: 44566 - protein, 435 aa, unidentified
MTPTNRLQVGIDFGQKKADFCLLFPDGQPLESHISFANSLSGYSLAKQLLLDALDGYDFDGVDVSGEATGYFWLPFFLQLAADPDLAPHNLDLFLLNPRWVKWFKKCFAEDHKSDQRDPFYIAERTRTRRPSATWSPPDCLPLRFYTRLRFHLVQNLAREKCYFSAFLFLKASSYRRLKPFSDVFGVTSRLVLTQYPSLDQLAELPVEDLALHLQQLSGNHLPDAFDNARKLRQVAQESFSLNDTLAVPVQRILDLTLDHIRFIEAQIEQVNGWIATELESYPVISQLATIPGIGPVFSSGIGAEIGGVQRFLQGQKWDRKRKRYRPRNLRDAEDAVAKIAGLWWPRANSGDFEAEDRRMAKSGNRYLRYYVIQGSDRMRRHIPEYAAFYARKHKEASKHHHKRALVLTARKSVGLIVGLLHRNEPYRSKEDRRT

SEQ ID NO: 44567 - protein, 345 aa, unidentified
MNKQVSAPQATVFCGIDVSAASLAVALIAPDGSLARREFSNNASGHEALSVWLKKRDSRVRVSLEATGIYSLDLALALDAEACVELMVLNPKLVNRFQQTVCRSKTDAADAMVLAEYSQRMPFCRWKRPAASHLALRTVSRYIGSLVVEQAGLKNRLRSAESTATTPRAVRVDLKRSLAAIERRVEKLRAEALKLVESEVELRERYQLLTTVPGIGAVSALTMLSELILLAPGMTVRQWVASSGLDPVHRQSGTSLNKPSRISRAGNRRLRAALYMSALSASRYDRHLAAFYRALRARHKSGLQALMAVARKMLHAIYGIFKSGTPYDGRRLFPNIQTEVESIAG

SEQ ID NO: 44568 - protein, 445 aa, unidentified
MTQGSSLSRGDKRRNERMARLRDLVPVSNAILGIDLADEKQAVVVTDHDSRVLARRRVRAKAWKLGPVLTWGREVAQQHGFADVTIGCEPTGHRWRVLDQLAAQQDMTLVCVQPLLVGRAREAEDYTRDKSDDKDAVLIARLVAQLRCYEPERADETWARLRHLGARRERLIAEATACVQQLRDLLECAWPASLTAAALPFDAKTWCAALAVVLDRCHGYPERLAGLGATRFEAAVRRELPRWGGQRARRAITAAMFTALSDPAGVTVQRRGGLERAGWVLTDWHSTKARLMQVETCMLDILDQLELTELVTSIPGVSAVGAAAILAETGNPTRFDSPRALAKHAGLCPRDNSSGTATGRSRISGRGRPRLRLAAWRAVWGALPSNPVMATRYRYLTTRADNPLSDGQARAAIAAALLRWLHVITTQRVSWDPAMAGTNELPTAA

SEQ ID NO: 44569 - protein, 343 aa, unidentified
MDVSTIGLDVAKSVFQVHGIDAAGQVVIRRQVKRRQVLRFFEKLGPCLVGIEACATAHHWGRKIAALGHEVRLMPAHYVKAYVKRGKNDVADAEAICEAVGRPTMRFVGLKSAEQQSVLMLHRTRELLVRQRTMLVNAIRGHMAEFGIVARAGLPQIKELLAVIADRDDHRLAPDARACLEGLARQFLSLHEEICAADKRLHAWHRSNPVSQRLATIPGIGPVTASALAASITDPLVFRSGREMAAWIGLVPRQNSTGGKQRLGKISKQGDQYLRWLLVAGAMAVIRHAKRRGTANQLWLDSLIARRPTKVAAVALANKMARTAWVLLRYGGTYRQPLVTASA

SEQ ID NO: 44570 - protein, 355 aa, unidentified
MTSTKYIGMDVHKESISIAVLNFTGKVVMECVIETKASTILQFIDGLHGDLRVTFEEGTWAAWLYDLLKPHVTEVVVCNPRKIALLKDGSKSDRIDARKLAEQLYMNKLQPVYHGEHGLRTLKELARSYLTITKDLTRVMNRLKALYRSWGIPCAGNEVYAPRHRSEWLSKITEAGVRRRAEHYYQQLDVLRLLRQQVRRDLLAESRKHKAWKLLRLIPGIGPIRAALLVALIQTPHRFRTKRHLWTYSGLGLETHDSAQYRVVEGQLQRSKKPATLRGLNENHNHDLKDIFKGAAMRASTAAGPLHDFYEALLAKGRKPTMARLTLARKIAAITLIIWKKEVRFDANHLKQQAA

SEQ ID NO: 44571 - protein, 350 aa, unidentified
MVILGVDAHKRTHTLVAIDDAGRKLGERTVTATTDGHLQALQWAARWPSRRYAIEDCRHVSRRLEADLLAAGEVVARVPTQLMAGARKGGRERGKSDPIDALAVAWAALREPNLPTAHLDGPARELRLLVDHREDLVTERTRMQNRLRWHLHELFPELEIQPRVVKRLHVLDALERRLADVDGTVASIARELIGRVRELSLRANSLERQIVRLVRQLAPNLLALAGCGPLSAAKLVGEVAGAARFRSKATFARWNGTAPIPVWSANDGRYRLNRGGNRKVNAALHRIAITQWRGEGPGQAYVQRRMTTGDSKTEALRLLRRRISDEVYKRLLADQTLAAGSQQGDPALAS

SEQ ID NO: 44572 - protein, 333 aa, unidentified
MEYTETMGIDISKATFDVYLHLGRKHRKFRNNLSGFEALINWANKLCELEKCLICLEHTGAYSVPISTFFTKRSQPFCIVSGLEIKRSIGLKRGKDDQIDALRIAEYAWLRRDQLKLTVIRSEKLFQLQKLLRLRARYTEHRKAFKNSQNENKAMFTKSELPDVFRMEEQSIHWLNKRIKKTEELIHKIIEGDQQLKKLFELMNSITGIGLVIATNMLVLTSGFTQFKDSRKFACYAGVAPFPHRSGTSILYKDRVSHYANKKIKALLNLAALNAVKYDPELKHYYERKQLEGKNRMTILNAVRNKLIHRIFAVVNRGTPYVQLKSYASTSMN

SEQ ID NO: 44573 - protein, 345 aa, unidentified
MEYYAGIDVSLESASLCVVDATGQIVCEAKLASEPEVLIGWFRDLGLAVTRIGLEAGPLSQWLYAGMRDAGLAVELLETRHVRNAFKAMPVKTDRKDARGIAQLMRLGWFRPVHCKSLPAQEVRALLTARKLLQMKNHDVEMSLRGVLRGFGLKVGRTTPRTFAGRIRELVTGHATLSTVAEALLSARGTLFEQCQKLEKRLRSLAREDGRARLLMTAPGVGTIVALTYAAAIDDPSRFRSSKAVGAHFGLTPKKYQSGETDVTGRISKIGDGGVRTALYEAANVILTRPVKGSTLRSWAMRVATRAGMRKAKVAVARKLAVVLHRMLADGASFLADKAAVAAAR

SEQ ID NO: 44574 - protein, 410 aa, unidentified
MYGKAGPMIYAGIDIAKNDHVVGATDEHGRDASKPMRFANSAGGFDRCVAYLEGLAESKSDLLVGMEATGHYWLPLFCRLQDAGYAVVVINPMRTDAMRRFKGSSRVKTDIVDCVLVAETLRCGGFQPSRLGDEAVIELRQLTRLHQALKESVADLKRQVIVALDQVFPEYDSVFSDTFGESSKAFLKRCPTPEECLAVRADSLAKTLERASHGKLGRSKADEIKGIAKASCGIGLATSAFSFQIKLLIDQIDFIEGQASEVEARIRAGIEKVEPLILTIPGIGYTLGAQIVSEIGDVRRFRNASSIVKYAGINPSISQSGKFSSEENHITKQGSPYLRRALYLAAMAQLKLKSPFYDYYAKKRADGKSHREALDAVARKLVHVIYAVLSKQEPYDPNAAKSPELASRSE

SEQ ID NO: 44575 - protein, 351 aa, unidentified
MQADAVHRSTPAPAIFAVMKSSVSPVIAPPADPCCTPSTEPTFIGVDVASKHLDTAIYCGPGCKRVPNSPTAISAWLDKLPPNSVIAMESTGRYHEALALAAHARGLQVYVLNPRDVRHYARGMGMRGKTDRMDAQILARYVAHEHRELRLWQPQPPAQQALDELIRRRGTLIQHQHGLRMTASDVPALKAAMAPMMKAFTKVLAHIDSEIKKAVKALSADTRDFECITSIPGIGLLSGAALLGLFRRLRTQGGDAVIAFLGLDPRPMDSGQKKGLRRLSKRGPAEWRRLLFNAAMSASRTKAWKAVYARECAKGLPRTAALNVLARKLVRVAFGLFKANTTFIPAHAAAK

SEQ ID NO: 44576 - protein, 320 aa, unidentified
MSATSVVVGIDVAKAHVDVAVLGGEFAAQRFTNEAEGHSVLAAALQSLSVTLVVMEATGGYEATLACALQAAGLPVAVINPKQARDFAKAMGRLAKTDRIDADMLAELAAVLVRRDDLARYLRPLPDAQQQTLAAVVTRRRQLLTMLGSERQRLQLAIPMVRPSIEAMIQAIRAQLDDVEAQMVGHVREHFAELDALLRSASGIGPIASATLLATLPELGRLTRREIAALVGVAPIANDSGTTRGRRRVQGGRFETRRVLYMATLTAAKYNPAIRAFYQRLVAAGKMPKVALVACMRKLLTTLNAMVRSNQPWNTSLHHA

SEQ ID NO: 44577 - protein, 394 aa, unidentified
MIYAGVDIAKTDHVIGAVDERGAEMCPPMPFKNTEAGLERAVAWLEGLAGSPSDVVVGMEATGHYWMACYSFLVARGYSVAVMNPMQVKAVRKLKGLDKVKNDRVDAGLIAEALRIGQYDETRLATDEMASLRSLSRYLQSLRGMVAELKTQCICLMDAHFPEYAGIFSDMFGAGSRAVLSKSPLPFELARRRADSLARDIAEASRRGGKSSGYAAKIKAAAKSSIGVRLGQEAASFQVKSLIRQIEFADSECAGVEARLRSLLDEVEPLVLTIPGVSYVTGAQIVSEIGDVSRFRNAPALVSYAGLNSSVSQSGQFDSGGGPITKHGSPYLRRALWLAANRARQYDPGLRAFYDRKRAEGKPHRVAVTAVARKLCHIVFAVMRDQVPYDPGRE

SEQ ID NO: 44578 - protein, 343 aa, unidentified
MHIASIGIDLGKTTFHLIALGERNKILLRKKFSRSQLLAYTAKLPASLVGLEACAGAHFLGTVLREQGHQVRLMPAQFVKPYRKTNKNDFIDAEAIAEAVTKQNMRFAQVKTQDQLDIQAMHRVRDRLVQRRTALINEIRGFLLERGLTFPARPIHLRKSLPAVMEDAEQNLSPRLRWLLDRLWQEWKQIEIDIQVITEEIERISNEDARCRQLRQIPGFGPLVSTATVAAIGNGAAFRRGRDFAAWLGIVPRQHSTGGKQKLFGISKRGNIYLRRMLIHGARAVLLRVKYDTGGFGQWVHRLAQRAPHNKVVVAIANKLARIAWAVLSSGKDYRHQPLQAAA

SEQ ID NO: 44579 - protein, 345 aa, unidentified
MQPMYYIGLDVHKRKISYCVKDSSGKIHTEGSISATRLDLDHWIKKLPQPWSAAMEATMFTGWIYDHLKPHAAALKVAHPLMLRAIAAAKKKNDRIDAGKICDCLRCDFLPESYMASTAIRERRRTLRYRNLLVRQMVQMKIKISALLMEAGVSYNKQRLHQAGYFRELLATNPDIDEGLCSLLRLCRETVVRLGKTESALVRSLERDSLLVERVERLMSIPAVGPITALTWALEVGDVQRFSSIKKAVSYCGLCGAEKSSGNTVQRTPLSKQRNKHLQTTLIEAAKMAPRYSPNLAMLYDQEKQKGNANRATLAVARKLVAYLMAVDRGQRNFQIAETRSNIAA

SEQ ID NO: 44580 - protein, 320 aa, unidentified
METNHILGIDVGKEELVIFDNSSGRTLTSANDEKALTSLIKESEWKSDICQVGIESTGDYSFLAMKIFLRAGFTVKLINPIITKQIISSTIRGKKTDKSDAEAIAKIIQLGEGHVVNEQTLDTAQKTLLRLERKLTSIKSDLKRIAGSLQMKSDNGVNLDKAKIEVDQLVKEIEERISNIWDLAKSKGTTRQEEIISSHIGCGDKLSKIISEEAGDLKRFPSAKQFKAYAGIDPKVIQSGQMDVRGKMTKRGNPVLRHALFLAAFVASRYDPDLKAYYEKKRAEGKSHIHAVCTVSRKMCERIYATVIKDRLYQPNIAKT

SEQ ID NO: 44581 - protein, 335 aa, unidentified
MQIKHFIGIDVSKDTLDLSVVVDGKNLQHYCIKNSARDIKSSVNKIMKAFGATVDDTIFCMEHTGLYNLPLVKWLQSQQGKMWLESGVHIRKTLGLVRGKNDKVDSARIAMYAYINRHQIKLWNAPRKLIERIAALLSQRSRLNKAKKQLNTANQEQRLFIDKDIMRSLNKYTQKTVVVINKQIEAIEDEILGLIREDEKLNRMYQIITSVHGIGFVTASYILVTTNEFININNPKKYACYSGVVPFEHSSGSSVRGKTRVSQMANKNIKTLLHLAALSTIQIQGDLQEYYKRKVAEGKNKMSVLNAIRNKLILRVFACVNQNREYEKLYSYKFV

SEQ ID NO: 44582 - protein, 343 aa, unidentified
MQVSTIGLDLAKNVFQAHGVSAEGKVVLTKQLRRGQVLSAFAKLPPCLVGMEACAGAHYWARELRKLGHDVRLMPARDVKAYVKRDKTDAADAAAICEAVSRPSMRFVALKTPEQQGRLMQHRVRDLLLRQRTQTINALRAHMAELGLVAATGRQGLGLLLAILADAKDERLPQDARASLKLLASQITALQAQIDSLDKRLHAQHRQCPASRRLETIPGIGVIGATALAATITDPKAFKSGRDLAAFIGLVPRNNSSGGKQRLGPISKQGDRYLRRILVVGAHSILKQARTRPDKHPWLARLMARKPGKLAAVALANKTARIAWAVLARGESYRAPTAPAAAG

SEQ ID NO: 44583 - protein, 419 aa, unidentified
MVQEDDNSLVSVVHPICCGLDVHKETLAACLLLTGADGRIQSEIKEFATFTDDLLRLREWLAVNDCPVVAMESTGVYWRPVHNVLEGQVTVILVNARHIKNVPGRKTDVADSQWLAGLLRLGLLKGSFLPPQEVRQWRELARLRKHYQESIGDFKRQVHKLLESSNIKLAAVLTDIFGATGRLILERLAHQDGIPDLSDLERGAGRPLRHETQELRRAVWGFFTAHHRFQLCLLLRSIRQLEGQLGEVLLRLEEQLTSHQELRQRLQVVPGISQVASAGIMAEVGPSLADFKSSDALSSWSGLCPGNNQSAGKRKSGRSPVRSHPLKTLMVQVAWAAVKKKGSYYKDKFHRLRYRLGPKKAIVAIAHRLLKAVYHIIKDGAAFRDLGEDYLQRRHHAGRLNYLKKQAQLLGYQLIPATA

SEQ ID NO: 44584 - protein, 357 aa, unidentified
MRFYTKQHPFYCGIDLHARTMYLCILSQDGEVMLHRNMKASPDALLKAIAPYRDNIVIAVECIFTWYWLADLCAQEGLPFVLGHALYMKAIHGGKAKNDKIDSQKIAVLLRGGMLPQAYVYPAAMRATRDLLRRRMHLMRKRAELLAHIQNTNSQYNLPEIGKKLAYKGNRAGVAERFLDPAVQKSVEVDLALIDHYDRLLSDVELTVVQTAKQHNAQALYRLQSVPGIGKILSLVLLYEIHEITRFPRVQDFVSYCRLVKCAKESAGKRYGTSGKKIGNAYLKWAFSEAAVLFLRNNPQGQKFLARLEKKHGQGKALTILAHKLARAVYYMLTRDTVFEMDRFLNGYGSRVGEPAA

SEQ ID NO: 44585 - protein, 412 aa, unidentified
MNPVVGLDVSKGESQVQAFLDKGKPYRKSFSIKHTLDGLDSLLEFLKEVEKLADGKQPSVILESTGQYHMPVIQFLEEQQYVYIIVNPLISHRARSTNLRKVKTDAIDAYHLCELYYKEELEPYKKRGIQLLNLRNLTRQQETVSSTAAQTKLQLQSILDQVFPEYRGVFGNLYSKISLQILSIFPTSKEVLSVSESELTNKIAELCTTRSERWAKEKAIKLREAALRNPFQNNLYQSHIFNLRMFINIVLQYQEHLSKLAAEIDALAKEIEEYEIIQSIPGVGEKIAATIISEIGEIERFNHPKKLVAFAGIDPSVYSSGRFTASINRITKRGSSRLRQALFMAVQCGIRDARKQKTSDEILPRNKKLREFYDKKREEGKPFRVAIIACANKLLHWIYALLKRKEAFQNAV

SEQ ID NO: 44586 - protein, 344 aa, unidentified
MDISVLGIDLGKNVCSVVGLDASGAVVMRRKVRRETLIALAEKLPPCVVGMEACCGAHHLGRVFAAHGHDVRLMSPEYVRPYIKAQKNDDRDAEGIAEAATRPTMRFVELKSQDQLDMQTLHRSRDRLVGERTALINQLRAILLERGMVAPQGKQKLEQFLAVLMDEQGGAGLSSRMIVLVADARTQWAEIDRRIAVFDVEFVRWVKENEEARRLMTIPGVGAIVASALVAAVGQAESFERGRDLAAWLGLFPVSSRTGGKPKQLGISKRGNKYLRRQLIHGARAALPYVAERDTPLGRWAKGLASRAHRNVAIVAFANKLARIAWAVLRRGERFAVTGMPVAA

SEQ ID NO: 44587 - protein, 312 aa, unidentified
MSQPNPLCVGIDVSKATLDIAASSDVAQFTVSNDSDGFNAIITGLRRHSVALVLMEATGGLEVAVACSLQAEGFEVAVVNPRQARDFARAMGYLAKTDRIDARVLTQMAEVINRHPERKRFIRALPDAERQALAAMVVRRRQLIAMLVAERNRLYPSHPQNKKSINTIIKALEDELARLEKDMNSHIRNHFKEIAERLSSIKGVGTMTVSAMLAEIPELGTLSRREISALIGVAPVNRDSGTMRGRRTIFGGRAGVRSALYMAALVATRFNPVIKTFYVRLLAAGKAKKVALVACMRKLLTILNAMLRKNEE

SEQ ID NO: 44588 - protein, 352 aa, unidentified
MVVIGVDAHKRSHTLVAIDGAGRKLAEKTVPATSDGHLAAISWAARWQERVFALEDCRHLTRRLEIDLLTSGEAAVRVPPHLMAGVRRGGRERGKSDPIDAVAIARAALREADLQVVQLDGEARELRLLVDHREDLVAERTRIQCRLRWHLHELFPGLLVPSRGLRRYRVLAELEERLSGVEGTVAAIARELVARCRELTLRARDLEREITTIVRRLAPSLLAMPGCGPLSAAKLVGETAGAGRFRSKAAYARWNGTAPIPVWSGNSTRHRLTRGGNRQINAALHRIAVTQLRGVGGLGQAYVERRMAAGDTKVEALRALRRRLSDEAFRRLLADETAIGASVASGELAAAA

SEQ ID NO: 44589 - protein, 302 aa, unidentified
MRSQITKSDYSGQNIYIGIDVHLKSWNVTVMMDSVFQKTFSQPPNPLALRKHLEANYPRATYFSAYEAGFSGYWAHYQLMELGINSIVVNAADVPTTGKEKLQKEDSRDSKKIARSLKNGELIPIHVPSLVTLDNRTLVRFRQTVSKDLARVKCRIKSFLNLNGIEIPEEFKGKKWSKKFVQWLKELELSPSCRLGLNGHLSLYHNLNLEKTNSKQQVKLLSASSIYKEDVELLLKIPGIGLITAMLILTELESMQRFRSFDNLCSFIGLGPSTYSSGEKVRMGDSTPVVYIHLMLPTNPYV

SEQ ID NO: 44590 - protein, 351 aa, unidentified
MSQTPRTSITAVGIDIGKNSFHIVGQDDRGAIVLRQKWSRSQVEARFANMPPCLIGMEACVGAHHLSRKLKVLGHDARLMPAKYVRPYSKGQKNDFRDAEAIAEAVQRPTMKFVATKTADQLDLQALHRVRERLVSQRTGTINQIRAFLLERGIAVRQGQRSLRAELPRILATPPDVLSPGMVRVIEGLAADWRWLDERIEGLSREIEELAKRDAGCERLMSIPGIGPIISSAMVAAIGTGDGFAKGRDFAAWLGLVPRQISTGDRTILGKISRRGNRYLRVLFVQAAWVVLVKVKPTRWEGHGLKHWIEAASKRLHHNVLAVALANKLARIAWSVLSRGRAFEASKLQAA

SEQ ID NO: 44591 - protein, 376 aa, unidentified
MKKIVICGADVHDNSITARIAINKEEPETRIFSYTTQGRKSMFKYLKFVGCKYGAERIVMAYEASSLGFGLCDEGWDAGIECYVLAPTKMPQSEEQRKRKTDKRDAQKILEQLRGHVLAGNDLAKVWIPDPQTRDDREVVRMRLEVAGKLTEARTQVRTLLKRNKVEKPEGVGNAWTVSDCRWLRRLAKGGNELAQGARIALASLLRQIAALEKEIKKLDEAIVALAATDRYRAAAEALVKELTGVAVLTAMVFLTELGDLRRFRNRKKVGAFLGVVPTSNESGENNDHKGHITRQGPARVRKVLCQAAWARIAFNKEEQKVHARIVEKNPKKKKIATVACMRRLAIRMWRMALEAQLKAGVYPDRELPQTRCPAA

SEQ ID NO: 44592 - protein, 393 aa, unidentified
MICVGIDVAKDKHDCFILGSEGEVLAGVFTIPNNRDGFETLLQRIRSCAFPADKIKVGLEATGHYSYNILGFLLDCGLATYVINPLHTNLYRKSLSLRKTKTDRIDARTIAAMLMSDVNLKSYTDTAYHNEELKSLTRYRFDKVRQRAKLKQSVSRLVNILFPELETIVPTLHMASVYALLSEFPGAQQIADTHLTHLKTLLDDASKGRYDREKAVEIREAARRSIGSRMPAKSLELRHTIQLIRELDKEIAEVEDSIEEIMNSIQSPITTIPGMGLRMGAMILAEVGDFANFDSPDKILAYAGLSPSTYESGKLSLAGAYSHMEKRGSRYLRYAIFNATKYVCHWDSTFAAYLAKKRAEGKHYNVAISHAAKKLVRVIYSLQKSGQAYQTAA

SEQ ID NO: 44593 - protein, 387 aa, unidentified
MTVRTVSNLPAAMHVEMARCLFAIELSKQSWVIGFITPLSAKISRRILSGCDWKGLLDLIEEVRARVSRETGRAVDVLSCYEAGYDGFWLHRLLEAHGIRNYVIDPASLQVDRRARRVKTDRIDTERLLRSLMAYLPGEPKVWSVVRVPSVAEEDARRLHRERDRLVSERVQHVNRIKGLCALHGIYDYQPLRPQAMARLEQLRTVQGISLPPRLKSEIKRELQRLELVVEMIATLEAERDAIVEDEASTHVNAKKIQNLHQLKAIGPEFAAVLVGEIFHRDFNNRRQLASYVGYAPSPFQSGNVAHDQGISKAGNRKGRTTGIELAWLWLRYQPDSDLSVWFRARVGTTKGRIRRIAIVALARKLLVALWRYLETGLVPRGAILKG

SEQ ID NO: 44594 - protein, 389 aa, unidentified
MAEVLEKLTGRGALDARAESGSARKGRRENTVGPNLDRLTVGVDLGDRWSQYCILGLKGETLAEGQLRTTQEDVREFFQALTAARVVIEVGTHSAWVQDVITEWGHEVLVANPRLMEGSKRRKRKSDRIDANKLARLGRVDPQSLYPIRHRSREVRQDLVVLRARDALVSVRTELINTTRGLVKSMGTRLPRCSSPSFAQKVKDAIPVEVREALLPLVQLVETVNDCIARYDQKIEELGQKKYGHTTLLRQVKGVGPITSLAYVLTLEDPQRFSSSREVGPYLGLVPKQEDSGDSQPQLGISKTGDRMLRRLLVGSSQYMLGAFGPDTDLRRYGLRLCERGGKNAKKRAVVAVARKLAVLLHRLWVTGDVYEPLHHTGAETRTAQATAA

SEQ ID NO: 44595 - protein, 351 aa, unidentified
MKPNFEPGKWFMQCVGIDIAKETFTACLCMYEFDMGCATEPIVFSNNKTGFNQFVKWSRKEALKGYPIRYVMEPTGVYYEQLAAHLSKLDLDICIVLPNKAREFAKYEGILTKTDNMDAYTLGMLGCLDKRLKSWTPPSPIYRELRQMTRFVADINKVRTELQNHLEALTHSEITEKSIVKHYNKLINEIDKQLASNQKAIRDKIKQQPGLSERIERIATIKGLGYMTVVTVLAETNGFALITNRKQLTRYAGLDVPAHQSGPVDPKRHISKQGNVHIRTALYFPAIVSTQYNPQMKDFYGRLCARNPQSKMIGVTATMRKLLLLIYSLWKSGEEYDSKRDKPIKKEKERG

SEQ ID NO: 44596 - protein, 319 aa, unidentified
MQTQYLGIDVAKAKLDCALLDADGKWRSKVVKNTAAGFVELHPWLTRHDAGQASTCMEATGVYWEPVAEYLSDAGFPVAVVNPAQIKAFATSRGLRTKNDAVDARLIADFCGTLQPLPWRAPSDTERRLHTKETNRLQVARAVVREGIERHLAWLEQEIAAVIKAIRTLIGDDPDLSRKRALLDTIPGLGERTIALLLAFYADPDRFASARACAAFAGLNPRQHASGSRVHGATRLSKVGHAILRKALYLPAMVTLYKTAWGKLFFDRLKDNGKKPMVIIGAMMRKLIHVAYDVLKSRGLTRITVSTENPIRYDLAFSH

SEQ ID NO: 44597 - protein, 377 aa, unidentified
MSKIRFVGLDVHAETIAVAVAEPDGEVRSVGIIPNRLESIRKLVGRLGPVQHLKVCYEAGPTGYVLYWQLTALGVACEVVAPTLVPTKAGDRVKTDRRDAEKLARCYRAGELTAVWVPDAAHEALRDLVRAREAAKKDQLRARHRLGKFLLRHGQRPTEAGKAWTKKYLEWIKTHVRFDQPALEATLAHYLQEVDHAAEQILKLEKAIDEAVAQASPEIRSVIEALQALRGVAQMTAATIVCELGSLSRFESPRQLMGYSGLVSREHSSGNRIQRGAITKTGNAHLRRVLVEAAWAYQHRPNVTGFLLRRQKSLALSDEVKQMAWKAQYRLHKRYQAFAVRGKNKNQIVTALGRELLGFVWAIAVHTEAQLKLNKAA

SEQ ID NO: 44598 - protein, 331 aa, unidentified
MKNKELIGIDVSKNVLDVFILEPGYHFTVENDPTGYAKLLEICCLKLGCKKDQLFFCFEHTGRYSWLLSIFLSESSIVYAKVPAMDIKQSRGMARGKSDKKDAQMIAQYAYRKRDELMPTELHPPEVGQLRQLLSLRNKLLRHRTAYKNSIKDLKDCFMEGETDFIRVTQERLIKNINVEIDNVECRMDTIINSMPDWEKNYRLIQTVKGIGPVVSRYIIIYTENFTRFTDPKKFACYAGIAPFEYSSGTSIKGRTRLHPCANKQLKSLLNIAAMGAVRLKGEYKTYYERRTEEGKNKMSTLNIIRNKLLFRIFAVVKRQTPYVDLTMFAA

SEQ ID NO: 44599 - protein, 354 aa, unidentified
MIVLGADAHKRSHTIAAVAATTGELVGERTVQVGARGFAALLSWARALGGERVWALEDCRHVSGSFERFLIGRGERVLRVTTRLMAASRRNVRDRGKSDNIDAIAVARAALREGLDALPAAHLDGPELDLRLLVDHRERLIRQRVALNNTLQWHLHDLWPELELPGSSLFYGRWAPRVARRLARAEQTMRVRIARDELRRIRELSQTIKALEREIAALVGEVAPQLLTEPGFGPLTAAKLVGEVAGASRFASDAKLARAAGVAPIPVSSGQTNRHRLDRGGNRQINATIHRIAVTRLRCHPETQDYIARKRSEGKSTKEAIRCLKRHLARRIWHLLHVPHPDRATPPSPSNFLT

SEQ ID NO: 44600 - protein, 431 aa, unidentified
MSKYLNSLVVGIDVASEFSFASILAPDGSQYRKPFKIFHTALGFNYLIEQIKKAEEEFSTKPVFFMESTGVYHLTLFHFLKDKKFETFIINPLVTNCNKNKEIRKVKNDRSDALSIAKLGKFQDIKVSSYSDIKIFTLKLLVRDYYKLIDTRSGFKKKLSGSLCISFSGYQKIFSNTCGLVSINILKKYPTPQEVISAPKQDIIDILLNSRKGLNWAEKKYSNLVEASENAQFVSLSSPWLSVSITTSIAIYEAIDAEIATLLKKIKCFIDSDEMSLAFRKNILLLMSIPGIGYNTAITILTEIGGIDKFITPKQLVAFFGVDPAVNESGKFKGDKVKMSKRGTRFGRRALYAVALASIRMKRNGEATNHVLLKYYKENLNGKKAKVALVAIMHKLIKYLFAVLKNQQEYQVRDPKLHQKMFLENKNTQVA

SEQ ID NO: 44601 - protein, 343 aa, unidentified
MQNSTRFGVDIAKAVFQVAAEDRPGHVCRMERLKRGQFLEFFAQQPPATIFMEACGSAHYWARRLEQLGHRVILLPPHQVRPYVKRNKTDRTDAKGILEAARNADIRPVPVKTVPQQILTSLHRMRQGWMTERTARLNALRGLLRELGVFIPVGAENVVPAVWALVEDADSDLPDALRPLFAEASQEIREIEARVKKVERQLEALASQLPAVAYLLSIPGIGLLTATALVAFIGDIRRFPSGRHLASYLGLTPREFSSGLKRYLGRISKRGDRYLRTLLIHGARSVLHHAQTRQPDRFRSWAHHLAKTHVHNKAAVAVANKLARIIWAVWSRQQPYAQLKAAA

SEQ ID NO: 44602 - protein, 373 aa, unidentified
MEHSSEAFVGFDTSKLKHAVAIADGSRTGEVRFLGEIENTAAATAKLVRKLAAKYERLTFCYEAGPTGYGLHRQIKGLGHECAMVAPSLVPKRPGDKVKTNRRDAIGLARLLRANELTAVWVPDGRHEAMRDLTRARETAMLDLRSKRQQISALLLRQGRSYPENKNTWTKAHMSWLASQKFEYPEQRLVFEEMMLAARQAQERLERLEQAIRAAVPDWSLAELVTGLMAMRGLDLISAATLLAEIGDLSRFRTPRQLMAYLGMVPSEESTGDTIKRGPITKAGNRRARRMLVECSWSYQHPPRVGSLKQHKVDAAPPAVREIAWKAQCRLYRRYRALIRRGKLKTVAITAIARELAGFIWAVSREITPAATP

SEQ ID NO: 44603 - protein, 324 aa, unidentified
MIDGILGIDVCKNTLDVSISSYTKVRTKSFTNSPDGWRHLLDWLIAQKIQRVHACLESTGRYSLGIACALYEADHVVSIINPAQIRDFVRTKLGRNKTDGVDASHIREYCELFKPSPWAPPSEAHRRLGELQTIRSGIIAGLTEWKNRKNSGIVDAEAQALADATISHFTSQLGAVDKAIALTIDNDCDLQSKRDLLLSISGVGDTLAGVVLAELPGPDVLRSSAEVVAYAGLNPRRHQSGTCIDRATRISKIGNAVLRAALYMPALSAMRYNSAIVALVTRLKSRGRLKPKQIVVAAMRKLLVLCFGVLKTGRPFDAAIAMGG

SEQ ID NO: 44604 - protein, 408 aa, unidentified
MKMLHRRCAGLDVHSDSVVACARLTVRTKASHEVRRFSTATRDLLELADWLAAQGITRVAMEATGVYWKPIWHILEGRFELVLANAAHIRNVPGRKSDVNDAVWISDLLAHGLIRASFVPPAQIQDVRDLTRTRTQLAREVAQHIQRIQKTLEDANIKLTSVISNIIGTSGRRMLKAMIAGETNPAKLAQLGSTRLKCPRDELTAALDGRLTVHHRFLIAHHLSLIEELERHIEAFDARIEKLLAPLRDAVAQLITIPGVSQVSAQVILAEIGAEMTPFPTAGHLLSWAGLVPRLDESAGKRRSTRVRKGAPWLKPVLVQCAWGAARSKGTYYQAQFFRLKARRGPKKAAIAVAASLLTAAYHMLKNGTFHQDLGADFLVKRDKARIVTKLASRIKDLGYDVSITPAA

SEQ ID NO: 44605 - protein, 327 aa, unidentified
MSQPPWTPLGGLLGTERFETNAAGYKTLLGWLGTFGDVTKVGVEGTGSYGSGLARYLRRAGVEVLEVDRPDRQKRRRSGKSDPLDAIEAARAALSGRAKGKPKSRDGAVEAIRVLVVAKRSARQARGKALVQMRHLGYSAPEQLRCRMKGLSVPALVAEGKGLRPGRSPDPVTAATKASLSSLAHRISSLDDELAELNERIEGLLVATVPELLGLFGVGPDTAAALVMAAGDNPERLHSEGAWAHLCGVSPIPKGSGKNSGRVKAHDGGDRQANSALWRIVMVRIAHDPETQLYFERRVKEGKTTHEVIRILKRYVAREVYRYLPRA

SEQ ID NO: 44606 - protein, 390 aa, unidentified
MNSITTTASTSVSILAIDLGKYKSVACLHDHASGEVRFTTVETTRAELRKLLDKERPAAVVIEACLLAGWVHDLCLELGVRCLVANTASEAWKFKHLKRKTDKDDALRLAQLYLLGQLPTVTLPPTAVRQWRSLIACRQALVGRRVAVQNRIRALFVAQGLPAPRGARAWAAAGLAGIASWAKPLGDCGPEELWRGLLELALTEYRQVGALIEQAEARLDALGKQQADVVLLQTAPGLGPRTAEVVAAYLHDPTRFRTGKQVSAFGGLVPRQHQSGEMDRRGRISKRGPALLRKLLVECAWCMVRYNAWARAFYRRLTGGGQRRKKQAIVALARKILVRAWAMLRDRKPWHDPLAGPKQPLSPSKQRRQAEARQRRQAMQQVALAPIATE

SEQ ID NO: 44607 - protein, 338 aa, unidentified
MNIVFLGIDLAKNVFQLCGLNQAGKPVYTKRTGRKELLQTLANIPACLIGIEASTGAFYWQREFEKLRHKVKVISPQYVKTFVRRQKNDGNDAQAIAVALMQPTMQFVPPKSPEQQDIQALHRARQRIVNRRTATVCQIRGLLLDRGSPIGSAVSRARRAIPLILEDAENGLSSRMRRTIAELYELFNDLGRRIHFFDKEIETVFRQSEACQRIARVKGIGPKTATAVVAAIGKGTEFKNGRHFAAWLGLVPRQHSSGDRQALMNMMKKGDKHLRTLFIHGARAVVRVATNNNDGHMNQWVNQLKERRGFNKTTVAVANKNARIIWSMLRNETEYQVV

SEQ ID NO: 44608 - protein, 367 aa, unidentified
MSRMKRLTVQQLDVSMDYLVIGLDLAKTDTAVIAITTDGELYAIDRLKYLDLLNQAKQLGPTVFAMEPCNGMTYLVHELEELGHECRVINGEAVKDYVKSHFAGQKNDLNDAQAIAFLAQDEMLKFIRTKAKSEMTMQTLQVVRQQLIKQRTCSVVCIKGICQNYGLIISKSIMSEAKIRPIIEESQKLPEEIKEPLKALLRNAARFTIDIKQIDKAIEQGLKGNDTAERLLEVPGLGPQCVSRLLTTIGDINRFEGPKNLAAYYGLVPRSHTTGHNEQMGKITKHGDRLMRSFLVQGAHAVLILHTRGRLPKSALKKWIDKKLSGGMPRSKLSIALAAKLLRIAFAVLKYKKKFDIKKAGVARCSL

SEQ ID NO: 44609 - protein, 470 aa, unidentified
MVAARKQKQKQKRMSAQVVEDEDYQLRYEIAAGIDVAKESAVVCVRMPPAAGRKHRTSHLQTVPATVPAITELAAELKAAGVQMVSMEATSDYWRIWFAVLEEAGLAVQLVSSSQARNLPGRPKTDKEDARWIARLTEMGMLRSSFVPPPEIRALRVYTRHIWDLTADRTRYWQRLEKLLEDALCKLTAVVSKLAGHQTARAIIEKMIAGERDPRVLAALGQGKMRNDKLPALAEALSGMRFGPQHAHAAASLLRAIDLLDAELRDLQERVTAHLAAIPASWGVDADGVTGPEAGRAADAAELPAADRLDEIPGLGREAAAALIAEIGLDMSRFPTPEALVSWAGLTPTARQSGPRKGRGKKGHGNTYAKRIIVLAAYAAANTDTFLGERFRRLAARPGGGGRKKAGCAVGRSILVIVWHLLNDPAARYRDLGSDWHARHTDRSRKARNARRQLEALGYDVIITLREDAA

SEQ ID NO: 44610 - protein, 409 aa, unidentified
MNHNVAGIDVHKKILAVAVGKATESALVFERRLFGTVGRSLTELAEWLKEQGVERVVMESTAQYWKPVWLALEGSFDLHLAQARSNLAPRGRKTDFRDAERMVRRLLSGDLTLSFVPGAEQRQWRLLARGKYQLRRDRVRLQNQLEGLLEEGRIKLSSVVTDLLGLSGLRILRALAAGEDDAEKLASLADTRLRVSREDLAEALRGSVTTLQRVLLSQLLTRLDLIDTQIRELDQTLAKEMERYSEAMQRLSEIPGMGPDAAAQIVAEIGPQAGAFAAPEKLASWVGVCPGRQESAGQSTSNRSPKGNRAMRRILTEVAFAAVKTKDSHFQEVFRRLAPRLGVNKAIWAIAHRLCRLIWKLLHEGVTYREQGARGQDPQAIRKRARKLIGDLRRLGYTVLIEEPTPKTA

SEQ ID NO: 44611 - protein, 346 aa, unidentified
MDQIKRIGMDTSKHVFELHGVDDSEAPVLRKRLRRQDMVTFFERLAPTEIGIEACGASHHWARLLGSLGHKVLMMPPQYAKPYVKRGKNDAADAEALCEAMSRPTMRFVPAKSADQQAGLMLMGVRDRLIRNRTQLANAIRGHAAEFGLTAAKGMAHVAPLLARIAADETLPALARELFALQAGELARLEDEIATVDARQAEMHRADECSRRLAEIPSVGPIAASLFRLKTPAPELFRSGRDFAAWIGLTPRDHSTAGKTRLGVITRAGDERLRATLIAGATALIQHVRTGRSKTASPWLEALVQRKSPKHAAVALANKTARIAWKLMVTGQRYRPAAAPPLAAAA

SEQ ID NO: 44612 - protein, 379 aa, unidentified
MRTVCGLDVHKDSVFVCILNENGILFQDKIGVLTPDLERLVVVLHEHGATEVCMESTSIYWMPVWRILEPYFSLKLVNPYFIKQLPGKKSDVKDAEWIATCLLKDLIRGSYVPEDRIQQLRQYDRRIFDLNKDIVYKLTKLDAALQRCNIRISNYVSATDGKSYQKVVEKIAEGTTDPKILAGLIHGRIMNRVGKDVITASLTGVITQTDIDVIRQIRDEVMLAQKHRKECLDKLEELCNKWFPDQMKNLQTVPGVSLRSATSVIAELGTDMSSFEDAAHLVSWSGLKPRNDESAGKIKSRKITHGNKFLRKTLIECSWAAAKTRGCFYNTFSYHQTVVRRKNKMKVQVAIARKMLAAIWFILHDNVPYRDYTPDIVAE

SEQ ID NO: 44613 - protein, 339 aa, unidentified
MIACGFDVHRAQITFDLVDHQTGELRRGRIVPATREQLRLWLSGVETARLVVAVEGTTGWRFVAEEVEAAGARAVLAEPGETRALRGPKRRAKTDRADARWLRKLLERGELPMSWIPPEHLLELRCRVRLRQTLADERRAWLQRVHAQLFHHGIPVGGELAKPAGREWLRAAELSPAGRAVVETALTTVDFLDTQLAALDDELRRFARAHPATRALGRLYGVGDLTAVAIYAAIGDARRFSSARKVIRLAGLDVTVHESDSKRRPGRISRQGPPMLRWAAYEAGLAACRASSPDHADYLALRERLGHKTACLTVSRRVLRRAYHALVAVGDAALEPLPS

SEQ ID NO: 44614 - protein, 451 aa, unidentified
MTQVKPQVIDDEEHERVYERVAAVDVAKDTGMVCTRTSHRSRPGARQSTVWTVKARMASIRALGRQLKAGGIEMVTLEATSDYWRIWFYVLEAAGLAVQLVNAAQARNLPGRPKTDKLDAMWLARLTEMGLLRPSFVPPAAIRALRDYTRARTRLAQERTRCFQRLEKLLEGALVKLSAVASKLTTESAKDMIKAMIAGERDPHTLAALARTRMKAKHDDLVEALAGMFDDHHGELAQILLDQAAFCDARITQLTARIAAAVAAMPAAWGVDADGTTGPDAGTGPDAAALPAVARLAEIPGVSPGLACSIIAETGLDMSRFPTAGHLVSWAGLCPRARQSGPRTRAGKKNQGDGWLRNSLGQAATGASRTSTFLGERYGRIARRRGKAKAQVAVARSILVIIWHLLADPAARYADLGASYYQTRTDTDRKLRNHIRQIQALGFEVTLTKAG

SEQ ID NO: 44615 - protein, 344 aa, unidentified
MSVYVGIDVHRKRSQVAVIGADGGVLANRNVPNGVEPILKVIGGLPPGTPAAFEAAFGWGWLVELLEDYGFAPHLVHPLQCKAIASARLKNDKVDAAILAQLLRADLLPEAWIAPPEVRQLRALLRHRAQLVRLRTLLRNRIHAIVADHGYDRPSGCWTRPGRAWLASLELPAVSRQVIDDDLAVIDALEPTIGRLDWQVHQRARTDPRVKILTQLPGVGPFTALVILAEIGDIGRFGSARKLAAWAGLTPTVRGSDRTIRHGHISKQGSAWVRWVLCEAAQTAKRSPQFAATYQAIAKRRGRKIATTAIARKLLTRAWHLLTAAERQADGQPAAASVPAGSRP

SEQ ID NO: 44616 - protein, 325 aa, unidentified
MDTVTQFIGIDISKDVFDVSFADGKHLQFANHPKGYIKFLALLPQQSQCVMEATGPYHLHLATWLFEKEVAVSVVNALVIKCFVQMRLRLAKTDKADARMIRLYAELEKPERWSPPADYIQQASEMNSLVELLIRQRTALKNKLHSIQVKPGNYKFIIKAIEKQLCHLDKQIKALESAMEALVRSQEEELLARLTSIPGIGNKTAMFLIVLTNGFKDFASSKQLSAFIGLAPTIRVSGKSVRGQSRISKTGNPSIHNLLFMCSFTACKSNLACKSLFDRIVAKGKSKKLALIAVANKLLKQSLAIAKSQQQYQSNYKSTLLCARN

SEQ ID NO: 44617 - protein, 342 aa, unidentified
MKQYVGLDVSQKETSVCVVNEAGRILFEGKAKSDPGALTALLRERAPHAERIGFETGAMASWLWHELRRVDLPVVCIDARHARAALSVRMNKSDQNDARGLAELVRVGWYREVKVKSEESQKVRAILVARSRLVAIRRDIENQVRSLIKEYGLLFPRAIGLQFRNQVSELLGEDHQLIGVIAPLLSIHEHICEQQSKFDDEVRRLAKSDETTRRLMTVPGVGVVTALTFRHTIDDPSRFRSASTVGTYLGLTPRRNQSGETDTNGKISRWGDRLLRSYLFEAATVLLYRTKKWSSLKAWGMKLAKRIGVKKAKVAIARKIAVILHCIWVDGTSFDWGQAKPA

SEQ ID NO: 44618 - protein, 334 aa, unidentified
MAVAGMDTHKDTLAVAVIDGQGRELDRIELENSAAGHHRLVGWLRRFQLERVGIEGSGSYGRAVALAVHGAGFEVVEVPPQLTAQARKRQRSNAKSDPIDALLIARITLREPDLPLTRPDGDVEDLRVLVRYRRELRAERNRQANRLHADLVQLRPGYQRRIGRLTTERNLDRARRLLAGDDRVRARTARQRVTRLRQLNRQMAEVTAEVQQRSATLRSGLTTIPGVAELSAAELLAEIGDVARYRTKAQFAMANGTAPLPASSGRTQRHRLNRGGNRQLNRIIHYIALTQISRHPEGRTYFDHKKAEGKTTEEAMRCLKRRISDRIFQTLRDT

SEQ ID NO: 44619 - protein, 359 aa, unidentified
MDNYSTKLTIGMDLGDKKHWIAILDESGNLTEKTTCVNTAECIQNFFRRFDTPSQITIGMESGTHSPWLSRLLEKMGFRVLIGNARKLRAIWQSDVKDDGRDSIMLARIARFDPSLMHPIYHRGEKAQADLAILRARDALVSARTSLINTCRGLVKSWGSRLPSCSADAFAKVVPGSVPEELEMAVMPLVKQIGDLTQRIKAYDRRLAEISSREYPETAILTQVTGVGPVTSLAFVLTVENPERFTKNRSIGPFLGLTPKRDQSGETDKDLPITKAGDEFVRRLLAQSAQFILGPFGPDCELRRHGERIRQKGGKASNKKAVTAVSRKLAVLLLHLWKTGDNYDPFHRQTIKNKKSNAA

SEQ ID NO: 44620 - protein, 341 aa, unidentified
MDIAVLGIDLGKNSCSVVGLDDSGKVILRRRMQRKTIMALASKLSPCVVAMEACCGAYHLGRLLSAQGHSLRLMSPEYVRPYVKAQKNDERDAEAIAEAATRPTMRFVSLKSQEQLDMQTLHRARDRMVRERTSLMNQLRAILLERGIIVPQGRAKLRLRITELLAQPCEELSLRIRVLIEDMLARWEALNDRIGAFDTEFVAEVKQSEAARRLTSIPGIGALNATALVAAVGDARTFARGRDLAAWLGLVPRQATTGGKPRLLGITKRGSKYLRKMLIQGARSALPSLSRSSTRLGQWLRGLLARAHSNAVVVALAAKLARIVWALLRHGTTFEQRAIAI

SEQ ID NO: 44621 - protein, 411 aa, unidentified
MLEVKAERCAGIDVGKKFLAVCVMIGPVDQKPTVEVRRFGTNVKELERLRTWLRETACTEAVMESTGSYWKPVFNILEGSLKIILANPEQVKALRGKKTDPKDSRWMASLLRHGLVQASFIPPQDIRELRDLTRRRRTLLSDGSAERNRVQKVLEDANVKIGDVLSDVFGASGQAMLEALLEKKLEPPEIAQLVHYRLQPKIPQIVEALEGHRMTDHHRMLIRQSLDHMRYIEAMIAELDTAIGEKLRPYSKQIELACTVPGIGPTGAASILAETGMDLSPDGPFPDCHHLASWAGICPGNNESAGKQKSGRTRKGNRWLRATLNQTAWAASAKKNSVFQVRFQKLKIRRGAKRAVTAVAHAQLIALYWTLRNGTPYQEHTRQIEQNRKEAQIRHHLSQLTKLGCELKPAS

SEQ ID NO: 44622 - protein, 405 aa, unidentified
MNRYAGVDWASEIHAVCVIDEAGEVRERLRIPHTRLGLAELVSRLARHAERPADLPVGIERGDGPLVEAMRAAGFTVIVVPPHVVKAARPRMGAARAKSDPGDARLLAELVRTDRARFRVLAPSDPETAALRRLVRTRDELVTERTRLANRLRGLLEDAWPGAAEIFARVDSPIALDFLERYPSPRAARALGEGRLAAFLVRHRYSGRRSATELLLRLRAAPLVDEPAVVDAATADAVGVLVACLRTILERLADLEGAIRAALAAHPDGAVFRSFPRAGEINAAQLLAEIGADRERFPTPDALASQGGAAPVTHASGKVHVVGFRWACDRNLRKALTTFADNSRHASPWAADIYRRAIGRGADHPHAIRILAKAWCRVIWRCWQERTPYDPSRHGGLRRLAANTV

SEQ ID NO: 44623 - protein, 355 aa, unidentified
MNSIKYVGLDVHRDTISVAVLNAEGKLVMQFVIATHASTILDFLHGLRGTLHVTFEEGTHSAWLYELLVRRVAYLVVCNPRQNALLKAGNKSDAIDARKLAELLRAGLLSPVYHGQNSTAAVKHLGRSYAALTEDTTRIMGRLKALYRSQAIACAGQKPYGSRHREEWLAQLADSGLQRRARRLYQELDLLQQLRREARRDLILECDKHSETKLLRTVPWLGPIRAALLIGRVQTPHRFRTKRQFWAYCGLALETRSSADYGFVDGQLERRKKPGFIRGLNRNHNHDLKNLFKSAATAASGSDGPFRPFYENLLKKGMRAEMARLTLARKIAAITLHVWKKGEPFDAEYLKSQAA

SEQ ID NO: 44624 - protein, 497 aa, unidentified
MPVFRRERAQNVTRERRSKWAMSCVGADEKDVLLVSFMGLVSHNNQEDVVIQGSGLSRGDKRRNDKLVRSRELVPADNAIVGIDLADEKQVVVLTDHDSRVLARRRVKAKAWELGPVLAWAREQAHRHGFTDVTVGCEPTGHRWRVLDQLAAQQDMALVCVQPLLVGRAREPEDYTRDKTDDKDAVLIARLVAQLHCYAPERADETWARLRQLGSYRDRLITQATAGVQQLRDLLECAWPAVLAAAAQPFESTNWCAAVAVVLDRCNGHPERLARLGPERFIAAVRRELPRWGGQRIWRPIITPLFAALTDPAGVAAQRPGALERASWVLSDWHATKARLAQVEARMVAILDELGLTQRVTSIPGLSAVGAAAILAETGDPCRFDSPRALVKHAGLCPRENASGTATGRSRISGRGRPRLRLAAWRAVWGALSNNPVMAARYQYLITRDHNRLTNGQARAAIAAALLRWIHVIVTRHVTWDATQAGAGAAAESPTAA

SEQ ID NO: 44625 - protein, 430 aa, unidentified
MTTHTYSTSPRAIVASLNETINQNNAEPAVSVNINSGRTITLIDGLKPMGIDLAARKYQICYQDSMGRLINREVCKSELRQFFINAEDKYLICIEACSGASYWSRFAQSYGHAVKVVSGKATRALSWLKNKDDFTDAYSLYQILFVSGIQSCQTHTEDELALSALISEKEALLKNLNEQTNKTRSFLLETGEYDDVVRGGPSAVYAIDRYLNNHQSDYSEHRYSIRCFEVLKETIVFLSKRIDEINELICEYAQHNEKAKLLMTIPGIGAETAVPIAIGAKDISRFDSARQFQAFFGFHTCHSGSGGKIVMGKMASNGDRAVKRNLYESALSVYHQGKSNNEPRSEWIAAKAEQNKAAFKKGMICIGSKILRTSYGVLKSGKPYNPAVDNSLGRMKSRLHRRSNPKYREQDQDAVLQSQYEQELSLTALD

SEQ ID NO: 44626 - protein, 416 aa, unidentified
MLRIVHPICCGLDVHKSFVFACIATTDENGVTTYQSRKFSTFTCELVKLAEWLAVNNCKDVCMESTGKYWYPVWNILEPTCNLVIAHPKYVKAIRGKKTDKKDAKWIADIFKHDLVSGSFIPPADIRQLRDLTRYYRKLVGFNTGEKNRAQNCLTISNIKLDDVFTDVFGKSASAITDHLLEHPGEHFDVAAYVHGRCKTPIPEIQAAVDGSICHEQAEKLKIIRSHMDNLELCKAELESVILGIAQKYLPQLELILTVPGIRDPFTAASIIAEIGVDMSVFPTVGQLCSWAGLVPQNNESAGKKKTTRITHAGTYIKPLLVQCAVAVSTSEKHPEIRNHYLALRKRRGHKKAVIAIARMMLTAIYSMLKKNEPYNAELYRKADNPPEHRQVSTQEAIYILQRQGYLITESQSVAE

SEQ ID NO: 44627 - protein, 467 aa, unidentified
MKRRHRRRPPGPPRRSPAALDHLNPNAAGLDCGATDHVAAVPPDRDAMPVRTFDTFTVGLHRLADWFTACRITHVALEATGVYWIPVFEILEARGFQVSLVNARHVKNVPGRKSDVSDAEWLRDLHIMGLLRGSFRPADEIVALRAYLRHRSALIEGAAAQVQRMQKALVQMNVQLPLVVSDITGVTGLRILRDIVAGQRDPRVLARHRDRRCRAAEAEIAAALTGNYRPEHVLVLAQHLALYDAYQQQLTACDAAIAAHLATLAAAAAEPAGPLGPPRGPRKPAHSNEPAFDVRTPLHRLTGADLSQIDGIGPYTALRLVAEIGTDMSCWPTAQHFTSWLTLAPRNKISGGRLLSSRTQPSANRAAAILRMAAMTLGRSATALGAFYRRLAARVGKAKAITATARKLAVLVYRTLKGELVYADPGADAYDARHRDQLTRRLRSRAAKLGFALVSLTTGEVLQPEVS

SEQ ID NO: 44628 - protein, 372 aa, unidentified
MHGLSHSTNVTRILALDLGKFTSVLCAYDPLTHDHRFVVGVQTTPQQIHDLLAAHATEDPAATLLVIETCDVAGRVHDLAVALGIPVLVANPAHEAWRWTRVKRKTDKDDALKLAKLTVLGQLPTAHMPAPQQRQRRRLVHYRRVLVDRRTQVKNQVRSIFSQQGLSLPRRGKAWTRAGVEQVAAEARALSECDSIDDLWRGRLHVELQQLEALNQQIARVDEKLDALGAADDRVQLLQSVPGVGPRLAETVVAHLDDPHRFRTAGRVASYAGLVPKQFESGTIKRSCRITRRGPALLRSMLVEVAWMVYMRNDWARAFVQRISRGVASRKNIAIVALARKLLVTLWAMLRDNTRWREPKITREASPTLAMT

SEQ ID NO: 44629 - protein, 408 aa, unidentified
MTVVGIDVSKGKSMVAAMKPGGELVAAPYEVRHSDIELSHLALDVLCMEPDTRVLMEATGRYHEPVAALLHSEGIFVSILNPLLIKQSGAGSLRKVKSDPKDALKIAKYGLDNWSTLREYTPMEAIRQQLKLCARQCDLYNKNIVMLTNNLISLSDKTFPGVNELFSSPEKADGHLKWVDFYRSFWHCDCINRMSPDAFEERYKKWCKRKGYHFSTDAADALYAASCGPYTTLPRDNNAKLLVTVAADQLIALRENQSKLEAEMLNLCKQLPEYETVMAMYGVGKSTGPHLMAELGDVRRFPHRSSIVAFAGVDPGVVGSGKMQLSSVTTSKRGSPQLRKALFQVVSTYVKCKPENEAVYQFYAKKRDEGKPFFVCTTAAANKFLRIYYARVKECLNAAESATQVEEG

SEQ ID NO: 44630 - protein, 392 aa, unidentified
MKNQDGSVAYGGMDVHYKFSNVTLRDAGGAVVTRQRLDHRDREGLRRQLAQWPRGMVMVLEASFGWPWLSDEMRGAGLEPHLSNCYKVEQMRKARGLAKTNTKDADLVSMLPAEQTRWWEVWLAPPAVRDHRDWLRHRADLVQMQTATKNRIHAIFHRQGIFYEETTDLFGGQGRRFLMALCQEGRHAGGVLPPGALEALRGQMRLLMHLRAELATVAWYLRGQLKRNPLIGLLDGIPGFGLILSHTVAAEIGEIGRVRSHRALASYACLAPRCHDTGEADPGRAPLGRHLGAQGNRTLKWAFIEAAHGAVKRGGRWRAMFDRSTDGGKRNRGRGYIKVARELVKVVFVVWSKQVAYTETPRPRPGSTQARRGRKHSRPGTGQPSHAMVRAE

SEQ ID NO: 44631 - protein, 321 aa, unidentified
MTYIGIDVSKDTFVVAYSPEKNSKTKTFKNTTRGIHEFIRTISKDEHHCVMEATGNYSTLLVYLLSEAGITTSLENPLKVKNFARAMLSTVKTDEIDARLIALYGEKMQPVPYKLHSDAILTLKQKRTVIRQLKKQLIATRNLKGSMEVLPFFDVKCKKSIEKTITFLEKQIKDLEEDLTTLARSEYKKQMDLLTSVKGIGVTLAAALIMATGGFTYFDNAKQLTRHLGLSPTYQQSGTSVNFKGHINRNGDSSLRSQLYVAAFASLRCNTECKACYDRLRSNGKPGKVAVIAVANKLIRQAFAVVTQEKPYVDGYVSSKK

SEQ ID NO: 44632 - protein, 338 aa, unidentified
MKLYGAIDLHSTNSVTVVINEQDQVVYQKRLPNDLSLIAQQLSSYRRSLQGIVVESTYNWYWLVDGLMEKGYRVHLANTAAIQQYNGLKYTDDHSDARWLAHLLRLGVLPEGYIYPKQERMVRDLLRKRGQLVHHRTANLLSIQSLISRTTGNSISATYIKALNIEHVDGVLPNPDLVLALKANLAVMNSANAQIEILEKAVQDRVKLRPQFRFLKTVPGIGPILALTIMLETGEIERFASVGNYASYCRCVGSKKISNGKRKGSGNTKNGNKYLAWAFVEAANFAIRFNSRIKSFYQKKKSKSNAIVAIKAVAHKLCRACYHIIKDQVAFDITKAFA

SEQ ID NO: 44633 - protein, 408 aa, unidentified
MEVLYPRCAGLDLGKDTLVACVRIHGHPVQQELRTFGMTTHDLLALVAWLAEHGVTHVAMEATGSYWKAVWYLLEETFTLTLVNAGHVRNVPGRKSDVKDAAWIADLLAHGLIRGRFVPPAPIQAVRDLTRTRKQLMREIAQHTQRIQKTLDTANLKITGLVSNILGVSGRAILRALIAGQTDPVQLADLAHGTLKNKRAELVEALTGRVTPYQRRLVKLHLDLIEHLEAAVADIDTQLGEALAPFREAVARVDAVPGIDIVVAQAILGEIGLDMARFPTHQQLISWACLCRRLDETAGKRKSTRTRKGACWLKTVLVQAAWAAVRTKNSYYRAQFLRLRARRGPKKAIVAVAASMLTAIYYILRDGVEYRELGGQYFESLDRTKATQRLVKRLRDLGYRVQLEEVAA

SEQ ID NO: 44634 - protein, 409 aa, unidentified
MGSVGRAIGLDVHRDFCEVAIVEGGALRSAGRIATTPERLELFASSLAPSDRVALEVTGSAWEIARILEPHVARVVVVSPADTGIRQARAKTDRLDARTLARLLAAGELDAVWSPDQWTRVLRRRLARRAQLVRARTRAKNEIHAVLVRRLVGRPPVSDLFGVKGRAWLRALELPLEEAETVAACLRHVEFLDSEIAAVEREIARQALESRELRRLITVPGVNVICAATFLAAVGEIRRFPTSRKLVGYLGLDPRVFQSGSSPAKGGRISKQGSPAARWALVEAAWSVVQQPGPLRAFYERIRGRRGGKIAVVAVARKLAALFWSLLSRGEDYAHAQPSLTAKKLRLLEIRAGAPTRKGKPTGTWATRQQMRTAERELAQQAEASYRRIVADWQAAAKKAGASVTAERA

SEQ ID NO: 44635 - protein, 369 aa, unidentified
MERMVYVGLDVHAETIAVATADDGRNGDVRFYGIIENNADSVLRLTKRLSAAGARPVFCYEAGPCGYGLYRLLTKLGFDCAVVAPAMIPRRAGDRVKTDRRDAEMLARLWRAGELTPIWTPDEEQEAMRDLIRTRKQALEALKIAKQQLLSFLLRHGLRYERPTYWTKMHWRWINELRKFRYPHQQIAFEELKRAIRQIEERIRTLDLAIEDAVKPWRFAPVVDALRALRGVNTMIAATLAAEIGDISRFSNPRQLMAWLGLVPSEHSSGSTTRRGRITRTGNALARTMMVEASWSYRHPPRERHLHLKRSQHLPHEIRDIGWKAQTRLCKRYRDLSRTGKPQPRVLTAIARELAGFIWDIARKTPLSA

SEQ ID NO: 44636 - protein, 369 aa, unidentified
MKKHKHYVGLDVHKDTIVVAIAEAGRGGEVRSYGTIANTPYSFERLIAKIGGESVELHVAYEAGPTGFVLYRWMKKRGIDCIVVAPSRTPQSAGPHQKTDRRDAIQLARLHRAGELTAIHVPDETDEAIRDLTRARLDAVADRTRARNRLKGFLLRHGYRYSGTANWSEAHMRYLRTLELPSPIHKSVLEEYLLTIDQAIERVDRLEALIEVRAPQWRFYPAVQALMCLRGFKLTAATVLVAESGDVKRFAHPRQLMGFLGLVPKENTTGRARRLGAITKSGNVQARWILIEAAHHAFHPPAVSQPLALRQSGQPEPYKALSWKAQSRLHKRGWHLLKRGLMKQKVVTALARELAGFVWALLSQVPSPA

SEQ ID NO: 44637 - protein, 377 aa, unidentified
MKYYSTLYIGMDVHRHIFTLAHYALNMKQPTGIVKTDNDYRRIVADGHRPREKYGQETRIVCGYEAGCLGYTLYHQLSKAKIECIILAPTTLPSPRGGKRVKTDGRDAANIAQCLAYGTYSPVHVPSAEDEQVKEFIRMRNDHCQMLKKLKQQILSFCLRHGYQYSGTRSNWTQAHIKWLAALQPEGLLGDTLEEYLTSFRYHQNKLERLDRRIEEISREERYREPVGRLCCLLGVKPLTALSVVSEVSDMHRFSTAEKFASYLGLVPCEHSSGNSVRRGGITKAGNVHVRALLTEAAQSYTRGKVGYKSSALKKRQSGQSETVIAYADRANERLRRRYYQMTLQLSLIHISEPTRLLSISYAVFCLKKKKLRTDNN

SEQ ID NO: 44638 - protein, 362 aa, unidentified
MTAQPIVAHCHPFVVGVDTHARNHVYAIIDSSNGALLDTQSFPVTSAGINRAINWVARRTQGAADALWAIEGAATYGAILAGTVDAHGFPVTEAPRMSKKQNRGVGKTDSLDAHRMAMASLPLPVDKLRLPRLHEGIRQGLRILVTARSSMAKDRTRSVNALNALVRSNVLGIDARKNLTGSQIAEISRWREREEELSLRIARSEAVRLAKHILDLDQQLSANEQQLDELVKASEAAPLLNEIGFRAITAAKCFVAWSHEGRVRDESAFACLAGVNPIPASSGNTTRHRLNRGGDRSLNAALHIAAVTRMAHDEETRAYVEKRQAEGKTDREIRRCIKRYLVRRIFKIFSASAMVEEVQVAA

SEQ ID NO: 44639 - protein, 338 aa, unidentified
MHVTTLGIDLAKQVFQLHGVDARGHAVLSRRVKRSQLVAAVASLPPCVIGMEACASAHHWGRAFEQLGHTVKLMSPQYVKPYVKTNKNDCRDAEAICEAVSRPTMRFVAIKTVDQADLQAVHRSRTLLIKTRTAFINQIRGLLAEYGLVIAQSPEKVRPALVRFLDDAESGLTAFARETFSELYEQLVELEQRITKVNQRLDRLFNTHPVCRKLAAVPGIGPLTATALLAAISRPHVFQNGRHLAAWLGLVPRQFSSGGHARLGGLSKRGNRYVRTLLIHGARAVVQRAAHKTDARARWMWALKCRKGTNVAAVALANKNARVIWALLAHDEVYRQSV

SEQ ID NO: 44640 - protein, 386 aa, unidentified
MNRIIKIGMDVHSTNYTLCAMEPTIGSEDRIFGEVQVDPDYKAVICFIESLKMKLGLYDDYSIECGYEAGCLGYTLYHQLTNAGLKCVILAPTTMLTQQGQRVKTDKRDARLIAQCLCYGGYHPVYIPTGEDDAVKEYLRMRDDHKLALKKLKQQINAFVLRHGHQYVGTKWTIKHVTWLNKLELDPMYRETLNEYMATYEEQEAKIERYDKRIEEIAAEERYQENAKKLGCFLGIRTHTALSLIVETGDFKRFAKGNTYAAFLGLAPGEHSSSTNVNRLGISKAGNTHLRCLLIEAAKGICKGAIGHKSKELRSRQSGQAADVIAYADKANTRLRSKYYKMIRHGKKKNVAVASVARELACFIWGMMTGNITSGAGTSAPAVSQG

SEQ ID NO: 44641 - protein, 454 aa, unidentified
MATTKRTSTPLPIIHRHAAGIDIGSTFHVVAVPPGRDEEPVRTFRSFTCDLHRLADWLGSVGITTIAMESTSIYWVPVYEILEARGFEVFLVNARDAKNVPGRKTDVNDAQWIQQLHEYGLLRGSFRPQERIAALRAYLRHRERLVEYGASHVQHMQKSLMQMNLQLHHVVSDITGATGMKIIRAIVGGERSATILAEFRDVRCKASPESIREALTGNYRPEHVFALRQAVELYDLYQAKIHDCDVEIERTLATLNEERPVPTAPLPKPRTRSHPKNEPDFEIRSALYTLVGGIDLTQIHGLGPYAVLRLVGECGTDMTRWPTAKHFTSWLTLAPGCKISGGKVLSSRTRRSANRATALLRLCAVTVGKTATALGAFFRRLAARAGKSKAVTATARKIAVLFYNALRHGASYVDPGANYYEERFRRRTLDNLRRRADALGFKLVAANPAAEGVS

SEQ ID NO: 44642 - protein, 335 aa, unidentified
MDRQYVGIDFHRRRSVIVPKNAAGEQLSSVRVANDPLVIAAAVAEAGPSPEVVIEATYGWYWIVDWLQEQGATVHLANPSGLNWGTRRVKNDERDAIDLIDMLRLGRLPEAWIAPPATRELRELVRYRAKLVALRSGLKAQVHAVMAKEGVLPAATDMFCAAGNVQLNEMQLGEAYTIRVESLRDLIEIYDREVAMLETNIRDRLRGDRGYRAIQAINGIGPTMAAILVAEIGDVTRFRSAAALCSWAGLTPKHKESDLTVHRGQLTKQGSRLVRWAVIEGTVRYHGGGKLAADYHQIAERRGKNKATVAIARKVLTLVYYGLRDGEIRCLAKTA

SEQ ID NO: 44643 - protein, 410 aa, unidentified
MTVAITEFCKNGSSISYVLEATMSCRSESGPVGQRASDHSRATLYVSLELSPSKWLVTSLVSGTDKLSKHLVPGGDCGALLQLLAALKAKAEKQSGMAVVVATIQEAGLDGFSLHRLLEANGAESWIVDPSSVAAPRRARRAKSDAIDGETLLRTLLAYRRGEPRVCSMVHPTSPHDEDRRRLTRERRTLMRERIEHTNRIKGLLMSQGISGFDPLRKNCLVRLDELTTRDGHRLPPRLRAEIGREIDRLELLARQLKQVEAERDALISQVADVADSPAAQLMRLKGIGIETATLLWLEGLFRTFANRRQLAAYAGLAPTPWLSGRIRREQGISKSGNPRLRTGMIELAWLWLRNQPGSALSRWFADRVRKEGGRKRRITIVALARKLLIALWKYVNRGEVPEGAALKSV

SEQ ID NO: 44644 - protein, 418 aa, unidentified
MDVVVERCAGLDVHRDNVVATVRVPSEDRGRWERETRTFKATLGGLAELREWLVGFAVTLVGMEATGVYWTTVFQALEDRFECWLLNAQHLRNVPGRKTDVKDSEWICDLVAHGLVRPSFVPPPEIRRLRDFTRLRKAQINERSRAIQRLEKVLQNAGIKLTSVASQAYSKSARAMLEALLSGVSDPDQLAELAKARMRSKIPQLREALANRFRIEHHGILVAQLLAHIDTLDQAIALLDEKIDALLAPHQNVVELLCTIPGVAVRTAQVLIAECGLDMSRFPTAGHLASWAGICPGHNESAGRRRSGRTRPGPKWLTEALTESAKAAARTQGTYLAAHFWQLRGRRGEPKAIGATRHDILIAYYYIVRDQVPFRELGPDWLRRRYSPEHRARRLQLQLEALGYKVTLEQTKEAEQAT

SEQ ID NO: 44645 - protein, 350 aa, unidentified
MITIGVDFHKRTSSYTVSNERGIMVTQCKLENTKANIERFLCRWQGPKQLAMEATYNGGLFYDTAQPYVNRLLLGHAYKIRSITESETKCDRHDASTLARLAMIDCFPKAHAPSREARDLRSLVRFRNFLARQRAAVKNNTHALIDRNLWPSERPQSFKNIYCKRGIAWLKTLTLPPKERFILDELITTFEQLSRQAQEVEAYIEQAACDMPDVGYLRSVPGLRASKINLYTILFEIDTISRFAKARDLARYAGLIPSGHSSGDKHRTGRLVRRCNTILRTALLETTFAAILRDPHLKAYYRTVKARNNSSAAIVACARKLCYAIYHVLKEQRPFKPFPPAAASGPSAAL

SEQ ID NO: 44646 - protein, 316 aa, unidentified
MATSSSVFAGIDISLKSLDLAFAGENTTFSFFNNSDGINKLISFLLEKQPALVVVEATGGYEKALVQALHQASIPVSIVLPKRIKDFARAQGIAAKTDKLDARNIAVFASTLRPRRTAPPSPAQIKLAALVDRRRQIVLMIKAEKTRRPKAALEVRSSFDEHLEWLIDEEKRLNAEIHSVIQNQPEMRRKAEIVLSAKGIGPVSASIFVAELPELGSLDRKKIAALVGVAPWNKDSGTKLGKRRILGGRRTVRCTFYMATLVAVHTNPVLSRFYQHLLANNKEKKVAIVACMRKFITILNAMVRDNQPFRYQASMA

SEQ ID NO: 44647 - protein, 411 aa, unidentified
MRLFVGDDWAEDHHDIEVMDEAGKVLAKRRVPEGVAGMTQLHALTGRFLPEDAEDAEVVTGIETDRGPWVAALIAAGYTVFPVNPLQASRYRERHGVSGAKSDGGDAHMLADMVRTDSHQLRPAAGDTPEAEAIKVVARTHKTLIWDRTRAAQRLRHQLREYFPAALAAFEDLDAPDVLELLGKAPDPARAAKLTRAQVAAALKRARRRDIAGKTDAILAALRSEHLGQPAALTAAYAATARSLIAVLTTLNAQVKILEEQVREHFGRHPDAEIYQSQPGLAAILGARVLGEFGDDPRRYVTAKNRKNYGGTSPITRASGKKKVVAARFIHNDRLVDALMSWAFSSLKASPGARAFYDEQRAKGHDHSDALRRLANRLVGILHGCLKTRALYDEATAWGHRENLPQSSVAA

SEQ ID NO: 44648 - protein, 425 aa, unidentified
MNYKQNEKINQVKESTLVVGIDIGSTTQYARAFDWRGIELGKVFPFSNSREGFESFKAWMQHLQDKYKKLDAIVGIEPTGHYWFDLGAYLEDEGILLVMINPYAVKQTKELDDNSQSKNDRKDPKVIAKLVTEGRYSAPYTPDGVYADLRIMVANRKRLIREMTQIKNRFARWFAIYFPEYTDVFGDYEAQSSMLLLKKVCTPEAIVELGAEKINQIWRDAKLRAVGMKRATTLCETAKRSIGLKKGSSAARYEMKLLLEDYEYKKAQLDAVMEEIEKLCRKIPESEQMLAIKGIGVITVAGFLAEVGDVRRFESPRQIQKLAGLSLRENSSGKHKGQTTISKRGRSKLRAVLFNAAIPLIAKNPEFKSLHEYYTTRANNPLKKKQSVIAISCKLIRVFYAILANGVTYDAQKMLSDIHRQPQAA

SEQ ID NO: 44649 - protein, 413 aa, unidentified
MQVVYERCCGLDVHKQTVVACVMVTDGAGRMRKETRTFATVTEDLDALAGWLAAQGVTHVAMESTGVYWKPVFNILDGRFEVLVVNAEHLKKLAGRKTDVQDAEWIADLLRHGLLRGSFIPSPLLRELRDLTRYRTKLTDERKSEINRLQKVLEDANLKLASVASDVMGVTGRAILNELVQGHTDPETLASLAKGRLRQKRALLEKALTGRLQPHHRFLLAQHLSHIDFLDEAIAQLDAQIEEQLRPFQATLDRWDSLPGINRRLAEIIVAEIGIDLKPFEDAEHLASWAGMCPGNNESGGKRKSGKTRKGSKWLRRALTEAAHGAARTKNKYYQSLYRRLAARRGKQRAAVAVGHSLLVTGYHLITRNQTYQDLGANYFDERDREGVKRRALQRLAQLGFQVQLTPVMALAA

SEQ ID NO: 44650 - protein, 360 aa, unidentified
MVESTPVVAFDQHAVSVVAAVLLPGQRTPALHALPAELPAISRFVERLRLDRVQCCYEAGPCGFELQRHLRARGIGCDVIAPALIPRRAGNRVKTDRRDAAQLAVLYRAGALTAIHVPTEAEEAVRDLLRCREDIGTDLLRAKHRLSKFLLRHGRRCPATKPWSKRFWGWLAVQRWPLAALEQTFLSYRRAIDDLIARRCAIDADLREALTIEPLAGRVARLRCFRGIDDLTALTIATELGDATRFAAARQVMAFTGLVPSEYSSGASQRRGGITKTGNAHLRRVLVEAAWHDRHRPAVGTRLRGRLHGASPIAVRCAWTAQHRLHARYRRLIARGKSPQLAATAVARELSAFVWSVLTQ

SEQ ID NO: 44651 - protein, 368 aa, unidentified
MKEVTTRYVGLDVHKATISIAVADDGVAPVLFGTIANEATAVHKAVSLLKSGGKLVAAYEAGPTGYGLHRQLTQLGVDCVVVAPALIPRRAGDRVKTDNRDAIALARLLRSGDLTPVWVPGQQDEALRDLVRSRFDAKDDLRRAMHRLAKFLLRQSIQAPPGIKPWSARHLQWLETLRLNHPTSQLVFEDYRVAVHAARERVRRLEADLERCAEQSPRLGTILALQVLRGVAFLSAVTIVAEVGDFRRFPNAPRFMSFTGLTVSEHSSGQSRRQGRITRAGNRYLRHILVQAAHNARFAPSLEGELKRRLKDVPADLVALSVTAQNRLHRRYRHLDRRIGRPKAVTAVGRELAGFVWAIGQRMEAIAA

SEQ ID NO: 44652 - protein, 320 aa, unidentified
MNTLNKNQPLVYAGLDISKAQLYLHLHKEHHIFPNDPKGRAALLKKVRASGEVQIICEATGGYEAGIVAVLHAAAQPVSVLNPARVRHFALAQGQRAKNDPIDSAVLTEYGQALRPEPTEPTEPARAELRALVQWRDQIKEQLARVRQTTEHALVPYVARQHKKLLAHLEKQLADVEKECRKALVRTPTLQQQIRQLEQLDAVGTITAVSVLSHLPELGTLNRQQAAALAGLAPWVRQSGPWEGQRHIGGGRAAVRRALYMSAVVLARMKETSLGKFYARLRAAGKPAKVALTAVMRKLLLQMNRTLQQLALSIPAPQPV

SEQ ID NO: 44653 - protein, 351 aa, unidentified
MPRKSSVCTVTAIGIDMGKTTLHMVGLDSYGAIVLREKVSRGRIASRLANLPPCLIGIEAGMATHYVARELAALGHEVKQVPPAYAKPFRQGHKNDFRDALAVAEAVQRPTTRFVPPKSNEQLDLQALHRVRSRLVSQRTAVINQIRGFLLERGIIVRQGLRFLRQLLPDILAKRTDVLSPRMVRIVSDLAGDWRQLDDRIEIVTDEIETLAKADDSCRRVMTVPGIGPIISSAMVAAIGNGSAFSKGRDYSAWLGLVPKQMSTGDRTILGRISKRGNSYLRMLFIQAARVILLRPANWPKHGFGAWLVRAIQRLHPNVLAAALANKLARIAWTVLAQERSYEARVTKAEA

SEQ ID NO: 44654 - protein, 351 aa, unidentified
MGEYIAFDSHKRYTWVDRQDHSTGQETCHRLLHAPGAVRSYLSGCAPGTGVAVEATGNWYWIIEEIEQAGLRPLLVHPRKAKLMMGLTNKTDKLDAQGLNRLQRNGTLPTVWIPPGPLRDLRELTRTRLVLVAQRTRLKNRFTATLAKYGAPPSESSDPYGKRGRVELEKNLERLPEQTRWVSGQLLAQLDFVSAQIRELEQRLDALVEVTPEMQRLMSLPGVGVILAATIALEIGDVQRFPSARHLASYAGTTPRVHASGGKVRYGALRSDVNRYLKWAFAEAGNSVAVNHARCPERHVSQLYRRLRQRKGHPKAIGAVARHLAEAAFHVLQGEEGYRDPVFGRGRTSEV

SEQ ID NO: 44655 - protein, 463 aa, unidentified
MPKRENKKKTPKQSKRKSFKIINPNAAGIDVGSEEHWIAVPEDRDEQPVRSFKCFTADLNAMSDWLKECNIQTVVMESTGVYWIPLYQILEKQGFEVKLVNARHVKNVPGRKTDVSDCQWLQRLHTYGLLSGSFRPEESICVLRSFWRHRDNLIRYAASHVQHMQKALVEMNIQLHKVISNITGLTGMCIIKAILAGERDPIKLAQMRDPRIKSSVEQIAKALEGDYRQEHLFSLRQAVELYDVYQQKIEMCDHEIEQYLSQVDSKIDLQSYPLPASTKSNKKPKGNAPRFDLRTHLYRISGVDFTQIDGLDVVSVHTIISEVGIDPTAFPSEKHFCSWLGLCPNNRITGGRIKSSKTKKVVNRASAAFRMAAQSLSHSLSALGGYYRRMRARLGAPEAITATAHKLARIFYHLWKDGGTYLDPGHLYYDEKYKTHVINNMIKKAKQLGFQISIEPIDQLQVS

SEQ ID NO: 44656 - protein, 334 aa, unidentified
MNQIQLVGMDVSAKLLVAWVDPQPGAIEKLEVPNTPEGHRRLCRRLTRQGRQARVVMEATGLYGLDVALALHRQPGIEVMVVNPRAVRDFARACLRRSKTDALDAQVLVDFARRMPFQAWQPPTRQRLELRAIARRIAALTELRTQEKNRLHAVSSSRHLGTIVRQDLERSIRHLDRSLERLQKQAQQLVATDSQLQLAWTCLTSVKGVAAKSAIQILGELCVLPHDMTARQWVAHAGLDPRHIESGTSVHKPARISRVGNRYLRAALYMPALTATRFEPHVRAFHDQLLARGKKPLQVIVAIMRKLLHSFHAMLSDGTCFKGDGFRHLEPTAP

SEQ ID NO: 44657 - protein, 416 aa, unidentified
MDTMYERCCGLDIHKKTIEACFRSGKKKTHMSFGTTSAELRKLTMWLVENDCQSVAMESTGSYWKPIFNILELSGTDMEIIVVNARHMKNVPGRKTDVNDAEWIAELLQYGLLRPSFIPDREQRELRELSRYRKSLVEERAREINRLQKMLEGGNIKLTSVVSEVTGYSSRRLLDRLLRSDEPMTEEVISELVHTSLVGKSKELEIALDGLLSELQKELLIKVLDHIDDMSRRIADLDDFCRKQMKKYEDALDKLDEIPGIARRTAETILIETGLDMSRFPTAKHFARWAGLAPGNNESAGKRSSGRTTKGNPTLKSTLIQSAKVAARKKNSFFKARYQKIAAKRGANRASVAVAHSMLIAIYHILKSGERFKDLGEDYYNQFNREKKKNYYLKKLTKLGVNLEEATLSISIQTAT

SEQ ID NO: 44658 - protein, 297 aa, unidentified
MSVDPVYKVARSGARVEEMRWRDRTVIDGILGIDVCKNTLDVSISSYTKVRTKSFTNSPDGWRHLLDWLIAQKIQRVHACLESTGRYSLGIACALYEADHVVSIINPAQIRDFVRTKLGRNKTDGVDASHIREYCELFKPSPWAPPSEAHRRLGELQTIRSGIIAGLTEWKNRKNSGIVDAEAQALADATISHFTSQLGAVDKAIALTIDNDCDLQSKRDLLLSISGVGETLAGVVLAELPGPDVLRSSAEVVAYAGLNPRQHQSGTSIDRATRISKIGNAVLRAARIHAGPIRHAV

SEQ ID NO: 44659 - protein, 389 aa, unidentified
MLNSEGSTVDQRWIEHTGDSLHELTEWLRTKASQTPNTVAVAIEVPRGAVVETLVENGFAVFSINPKQLDRFRDRYSPAGAKDDRRDALVLADSLRTDLHCFHRVKLDKPTLIRLRELSRLEDDIAQEQNRLHNQLREQFHRFFPQLLGLSPAANEPWLWDLFQAAPFPAKAAKLSAARIEGILKKHRIRRVDAVKVQAAVSTRALTLAPGAAEAASEHALLLLPRLRLLEQQREHIAKRVQTLLEELTQKADDEESLEHRDAAILLSLPGVGRKVAATMLSEASEAIAERDYHALRCYAGSAPITRQSGKKTVILMRQGCHERLRNALYHWARVSVSCDPKAKTMYAGMRARGHSHGRALRGVADRWIAVLISMLRHNALYDSKKRAA

SEQ ID NO: 44660 - protein, 315 aa, unidentified
MTNTKKRKTTVNVGVDIGKAHLDIYLYEKDIHWQEDNTEAGIKRLMKRLSHYHVERLAMEATGRYEFLLAEAAHNKGLPVCIAKPLLIRRYAGAIDQLAKTDKIDAAVIAQFAAVIKPAITPKKSKNLIMIKDLVVRRRQLINLRTQETNRKHIMGRRLEVSCKRMVHHIDAEIQRIEKRLSKHVEQQGEWTEKQTLLKSVPGVGDTLVYTLLADLPELGTLNNREIGRLVGVAPINRDSGRVRGKRRIQGGRASIRTVLYMATLSAIQCNPVIKAFYKKLVAQGKHKKVALTACMRKFITILNTMVKNKTEWAF

SEQ ID NO: 44661 - protein, 431 aa, unidentified
MPVEENKVAENRATLPPPGEYPDSAPTRFETQISQGAEGRMTMRIVALDLGAKKTSYCELSQGQVVHRTTVSELSSLQPLLGPDQPAAKVAIEACREAWFVHDLLVEWGNEVVLVDTTRSRQLGIGQHGRKTDRIDAETLARALEAGRIPVAHVLSPKRRELRRVLGVRRALVESRAQLVTTVRGLVREQGGKIPSCNTEHFVSKVRGQKLVSNIAQLIEPLLVLVHGIDTQLVNVEGQLAALCAQEPIIAALTTTPGVGAVVAATFMSVIDEAKRFQSAHQVESYLGLVPSEDSSGGKRRLGAISKKGNCYLRSLLVQAAWTIVRSSDKSDPLYLWVNQLIQRRGKRIAVVALARRLVGVLWALWRDGTVYDAPHLAHQGARGLRGAVQSLEQQTAAIAQAIKKSSIKHPATSSIATSRRSRKTLAANAA

SEQ ID NO: 44662 - protein, 361 aa, unidentified
MTGTMTWVGLDVHARSTHAAAIDSLTGELTRKRFGAGVDEPVAWLSGLAGPVRACYEAGPTGFGLYRAAVATGICMDVVAPGKTPRGPADRVKTDRKDAELLARLLLAGQLTPITVPPAGVEAARELTRLHDACRRDLMTARHRLSKMLLRHGRVYPKPTTWKRDHRMWLAGQHFPEPVSEQVYLDLLARVDVLTARKLQLREEVSQLASDPRWWPVVARLRCFRAVDTLTALSIHLELGADWHRFEKAPRVGAWLGLTPSLNQSGESKTQGQITKTGSTLARRLLIEAAWHYGPRPSIGPVLQARQADQPEHVLAIANKAQQRLHRVYRHMKARGKPHGVVTVAVARELACFLWAAATVD

SEQ ID NO: 44663 - protein, 334 aa, unidentified
MSSIAHTRQVTVTRTICGVDISSQSLDARIGHEGAFAQFPNTTEGIAALLSFCQAHQVGLIAMEATGGYEQQAFAQLSEQGLPVAILNPRAVRQFAQSMGSLEKTDRIDAGMIAWYAEVKKSPPLCLAAKSQQHLRALVTRLRQLTDIRTAQLNQQRLVTDRAVQSSFKKLLAMLARQIRDLEQRIAVLLDQDPLWRELNQAFRTIKGVADRTVARIMADMPEIGMLSNKTISKLAGVAPLANDSGQHQGRRAVRGGRATVREILFIVASVVGRHEPDFIAFQQRLRAAGKPPKVVRIALAHKLLVRLNAKAREVRQRLATLPPDRMALPAASL

SEQ ID NO: 44664 - protein, 461 aa, unidentified
MMKKRAASKRKESVQKKVDWKALEIVHPDAAGIDVGGSEHWVAISPDRDPEPVRRFGCFTADLREMARWLVEKGVRSVAMQSTGVYWMPVLEVLEQHGLEVYLVNARHTKNVPGRKSDVQECQWLLKLHAFGLLNNSFQPTDEIRVARTLWRQRGNLVADASSTIQRMQKVLIEMNVQLSNVLSDISGVSGMCMIGAILEGERDPEVLMALVQPGVKATPQDILKSLEGNWRKELLFVLRQQVELYRMYQEKIQDCDQQLREHLESFGSVVDLQARPIGPKPKGKKGSKNAPQFDLRTELYRITGIDWAQVNGIDVLTAQTVIAECGADLSAFPSEKQYTSWLGLVPTNEQSGGKILRRRTRKVVNRAAAAFRNAATTLLRSESYLGAQYRRLRTRLGAPKAITAMARKLACLFYRLIKHGQQYVDKGNEYYETKYREQQIRALAQRAQKLGLELVIPKTA

SEQ ID NO: 44665 - protein, 318 aa, unidentified
MGSMERVKSTTKVAGVDVGKHRLDVAVHGQAEQLEVTNDADGLARLVAWLKDHAVTRVGLEATGGYERAVRSALEVAGLEVVIHQPLEVRLFARLKRLRAKTDRLDAALIAAATAQVEAVRAAQDPRLVELAQRLTAYEQVSDQAAELKIFMEHVTLPDLALALREQIQSLARLKARLAAEILARIKAQSDLLDRYRLLLSLPGVGPVVAASLLVRMPELGDMSMGQPASLLGVAPFARDSGQWKGLRVIGGGRARPRRMLYIAALSAKRCDPDLKAFAQRLIAAGKPAKVAIVAVMRKLIEAANLVLKRQRPWVRHA

SEQ ID NO: 44666 - protein, 338 aa, unidentified
MYYTGIDLHKFTSYLTTVDSSGAIVKQENLKNIAHNFVQYFSAIPGEHLTTVESTMTWYWLNDLLTSINIPLVLAHAKYVKAIAYAKVKTDKVDSHTLAQLLRMDYMPVAHKISNENRTLRDALRARLKIVQRHTSVTNSMHLLLAKYNYNSPTQLTGIHEFQYEQLSEVEELLNEQMLDLEKQLYPFLIPNDDIQRLLWIPGIGKMNAFTILLEVDDINRFPDVKNFFSYCRLVPSARNSGGKAKQRSSKDGNKYLKVAFSDAAIHAVQYYSIIRKYHNSLLRKKNKNIAKTIIAKEIAEIVYHVLKNKSNFNNKFRGQQLEHKKSLQWPRVVNPYA

SEQ ID NO: 44667 - protein, 374 aa, unidentified
MADYSEVFVGIDTSKLRNAVAIAEGGRNGEVRYLGEIETTEGATSKLVKKLAAQHRRLTFCYEAGPTGYGLHRLIKTLGHECVVVAPSLIPKKPGDRVKTNRRDALNLAKLLRAGELTAVWVPDARHEAMRDLVRTREAALDDLKSKRQQVLSLLLRLGRHFMGKRTWTRAHMNWLVSQKLAHREQRIAFEEMLLAVRQADERVIRLERAIAAAVPDWSLAKVVTALMAVRGLDLISATIFLAEIGDLSRFASPRQLMAYLGLVPGEESTGDRVWRGGITKAGNHRARRILVECSWSYRHPPRVGKKKLAKVEAAPSAVQEIAWKAQARLTARYRALARRGKRPTLVVTAIARELSGFIWAVSRAVGASATPAT

SEQ ID NO: 44668 - protein, 324 aa, unidentified
MTDDTIGIDISKATLDIHRLSDGKMMSFSNCPAGFKEFTKFCAQTSVTRVVYEATGAYHSGLERALGALLPLVKVNPLQARRFAQAQGVRAKTDAVDAKMLAVMGNAFVLDPDEPATKLQHDLKELRAFRSGLIKDRTRIMSRQKTQTLSIICRQSKARLAQVDKHIAEIDVEVNRLIQSSDTMARSMKILRSIPGIGAVCASTILIDPLMICMQITAGQWMPEIGRMDRKQVASLTGVAPMTRQSGQWRGKSFIQGGRKVVRNALYMPALVAMRFNPDLKVKYQAMIKTGKPPKVALTALMRKLIELANALIKADRKWEEKRA

SEQ ID NO: 44669 - protein, 392 aa, unidentified
MEVMIETCCGIDVHQKSIVCCILDGPLDTNRPKKIQKTFGTRTDELREALQWLEDHHVTDIFMESTGQYWVPVFNIFSEGTGQLILANPQHIKNVPGRKTDMKDAEWIAQLGRCGLIQSSYIPAPVVMELRLMTRRRLSYTQKRTQAKNELHNILQRSNIKLTGYLSDIFSKTGQALLQLFINGEVLSLASVSACMHGKVKASPEDILRAMDGKLSVTDRQLLEDSLDEYRFYSEKIQQIEGHIRKYILLHFPEEYDLLLTIPGIKEQGAAVILAEIGPNTEGFKTVGHLASWAGLSPGSNESAGKKKSSRITPGNKYLKTTLISSGGIAGRSKDFAFRSVYYRISSRGSKMKAVVACGHKLLRIIYKILTDKVPYNEKRALGLRQQHLALN

SEQ ID NO: 44670 - protein, 415 aa, unidentified
MSKIEITAVGIDVSKGKSTVAVRRPGGEIVMMPFTVLHTAEGLAELTNTLRSIGGEIRVVMEHTGMYWRPIALALKEGGFFVSVVNAMLIHDFSDNSIRKVKTDRADSLKIANYALTFWQDLRDYSVEDETRQMLKIQSRLYERTLNSSIALRNGLISLLDQTFPGANKLFDEQRTKAGHIKWVDFVRRFWHKDCVAASSLSTFADTFQKWCKRTGYHYSLSDAERIHGIARNSVATLTKNDSTKLIITQAVDSLNAVYDTLQILRSEMQHLASMLPEYEVVMAMQGAGPITGPQLMAEIGDVRRFTSKGALVAFAGVDAPPFQSGTFDSKSRHVSKRGSPHLRRVLFTICSVILQHSDPENAVFQFMDRKRAEGKHFYVYTVAGGAKFLRIYYAKVKEYLRQHRTEKGTGCCQI

SEQ ID NO: 44671 - protein, 310 aa, unidentified
MGVFIGVDVAKQHLDWAAGEQGEVTRCPNTPAGVRRLVAKLGEFDLELIVVESTGGYERSLTEKLSEAGLPVVLVNPWRVRRFGEGLGILAKTDPLDARVLALYGERARPERRPLPGPQQRQMADLVRRRRQLIAIIVAEKNRLDTSSSLIRRDIKSLVDVLERRVAKLDKKIDAAIEADPEKAENRDLLLSVPSVGPGVARALIVDLPELGALSRREIASLVGLAPFSRDSGKKSGYRRIRAGRAAPRTALYLAAMNGARFNPVLRPMYQRMIEAGKPPKVAFIALARKLLTMLNAMVRDGTMWEERTT

SEQ ID NO: 44672 - protein, 337 aa, unidentified
MTRYVGVDLHRRRSVIVVLDSDGTELWTKRIDNDPLTLGMEVEKAGPEPEVVLEATWGWYWAADVISQAGGRVHLAHLLGIAGFENRRVKTDRVDARLLADLLRMGRLPESWIAPEDIRYQREVVRYRRKLSQLRAGLKAQVHAVLGKEGLMAPLTHMWGPGGSAWLDETEMADAYETRVRSLRRLIKLYDTEITKLDSRIAEVFGDDEGYRVIQQLNGVGPVIAAIFCAELGDVDRFRSAKAVCSWAGLTPRHRESDTTVHRGSITKQGSGLVRWAAVEAISKNHGDDPIKEHYRRVSERRGRNKGRVAAARKLLTLVYYGLRDGEIRSLVPPEAT

SEQ ID NO: 44673 - protein, 370 aa, unidentified
MKMSIGVDLHKSQFTVCFLPENRRTVETGLYPTKEIGYEEFLGKCGEYQEKGYEVRAAVESTGNARYFRNRMLSAGIDVTVVNTLKFKVVNESVKKTDKHDARTLAEFLEKDMLPESRLCSQTSEDIRRVLKTRAIAVKAVVGIKNQIHGLLLGYGIETKRGQLQSKKERQRILSGLVDHSVYGSAAEAIKPLFDTLDQFSAQVKKLEKVLESMVAEDKEVELLQTIPGVGLITAATLRAFIDDINRYSSPKKFASHMGLAPWVQNSNETIHHGHITKRGPKDMRTAMVQCVLGMVRNKRTTGGYRIMTRYRLMKTHKGSGKSIIATARKLSTIIYMMLKNGEPFDPLRMEYSQKYLNMHAAAFEAAKAG

SEQ ID NO: 44674 - protein, 334 aa, unidentified
MVYAAIDIHKRVFQAAVLDTDGDELTDARFPATREGLVDWAMTVRGRASAVAIEATTGWRWVWRELSALGFDVRLVDPGELKARRGHSRRAKTDRLDARWLVLLLAKEMLPESWLPPAEIQELRDKTRLRKALAEDRTRWAQRLQAFLLHEGWPCGRGKLLTAQGRRWVEGLVLAPAARAQVETLLRLIDLLEDEQREVERELRRFARADRRCQALETIYGIGPILACHILAELGEAKRFRRARSAVRAAGLDPVVAESGETKRRGHLAKHGSPELRWALVQAAQQARYPRSPDRPLYASIKARRKASQPAVLTIARKIARRSYHVLNAIEQAA

SEQ ID NO: 44675 - protein, 475 aa, unidentified
MQRRIVGLDLGVATDHTAVILDETGAQLARRRVRPTRSSLEALREVALAGADQGVAVEVVVEPTGPAWLPVAVFFAATGDVVYRVSSQKAADLRRYYRRHHKTNRIDATTLARIAILEGDALRPVELACGLAAELDREVRVTERLTEEIAARKVRIRDLARQLMPTSGQAFSANIARSDLEILRAWGDPNALRAQGIEALTEFVTTVSQGMHGHAKAAAWLAAASDAVDLYGDTDAVPFAALAGDLATEIALLEVLEAARAPHERRRERLYVRLDPDTLARTIPGIAHKGGPLATTIVGRAGRFPNADRFASSTGLVPGASETGDTDRKGQPITKAGNRKLRRLLYRAADTARKHDPQLARIYYVQMVQRGANHTKALAVVAAHLARRLWRVLERQTPYIVCDTDGRPVTPDQAKQIIAERYTVPEEIRRRRRSKKKAGKAPHHVLDGHAIKPSAQGARDTRRPSPTSILAAIST

SEQ ID NO: 44676 - protein, 412 aa, unidentified
MDVIVQRPAALDVHKEQVTACVRFPAPDGARAQDVREFKTTVGGLLVLHDWLKAHGVTQVAMEATGVYWKPVWAVLEDSFDCLLVNARHVKQVPGRKTDVKDAEWLCQLLEAGLLRRSFVPPKPIRQLRNFTRYRKAQIKERQREANRLHKALEDTGIKLDCVATDILGVSGRAMLDALCAGTTDPEVLAELAKGRLRAKLPALREALEGRFDAQHALLIGAILAHLDFLDEQIERLSDAIEEQLRPFQPAVELLRSLAGIETRTAQNILAEIGTDMSVFPSAGHCASWAGQCSGNDQSAGKRRSGRSRKGSKWLNDALKDAAMGAIRTNDSYLQAQYRRLKPRIGHGRALGAVKHSIICAIWHMLSTGELYRDLGGDYFRKRDPERQTKRLIAQLERLGHKVTLEALAEAA

SEQ ID NO: 44677 - protein, 346 aa, unidentified
MPETEVDTFAGIDVSARELSVALRRGKGEDKPVLAKFSNHPSGHKALIAHLFRGGRRVRVCLEASGNYSLDLALTLQAHRQVEISVINPRRARRFAESLGQRSKTDPVDARVLCEYAARMPWVAWQPPSSVALHLRAVARAIADLGVIHTQQNNRAHASAASQALPVLVVKEMQRHQKYLEQRMTRLRREALRLIAGDSELDRRFRLMLTTTGIAETSALQILGELAVLPNMLDARQWVAFSGLDPRLFKSGKSVEKRPRISRGGSRHLRRALYMPALVALRRDPYLRRFYQNLLARGKARLQAVVAVMRKLLHALFAMFRTNQPYDGSKLCCAVDMACNAIAARA

SEQ ID NO: 44678 - protein, 415 aa, unidentified
MKKHNNSPKKSEPTSKRAKSRGPVQRDPKEVLAELLGKLREKLDPRVVAAGAGEEDQRGELRPNFDRLTVGVDLGDQWSHYCILGLEGETLGEGQMRTTPQDVAGFFQALNGARVVLEVGTHSAWVREVICGYGHEVLVANPRLMEGSKRRKRKNDRIDANKLARLGRVDPQSLHPMQHRSAEVRQDLVMLRARDALVAARTELINATRGLVKSMGARLPRCSSPSFARKVEEAVPAEIQEALLPLVRMTAALSDSIQGYDEKIEELASEKYGHTTLLRQVKGVGPITALAYVLTLENPERFVKSRDVGPYLGLVPKQEDSGESQPQLGISKAGDTMVRRLLVGSAQYILGPFGPDTDLRRYGLRLCERGGKNAKKRAAVAVARKLAVLLHRLWVSGEVYEPLRHAMSVPIAAAA

SEQ ID NO: 44679 - protein, 354 aa, unidentified
MPRKTTSLEAVATIGIDIGKNTFHLIGLDKMGAIVLRQKLSRGQVDTRLANMPPCLIGMEACVGAHHLSRQLKALGHDARLMPARYVRPYSRGQKNDFGDAEAIAEAVLRPTMKFVAIKTVEQLDLQALHRVRERLVCQRTSVINQIRAFLLERGIAVRQGLRALRTEMPIVLAMTDKLSPRMIRMIEDLCTDWRHLDARIATVSNEIKTLSEQDDGAKRLMTVPGIGPIISTATVAAIGSGDVFSKGRDFGAWLGLVPRQMSTGGRTVLGPISKRGNRYLRMLFVQAARAVLLRPQSWEKYGLRSWIEAAARRLNRFKLAIALANKIARVAWGVLHGGRNFEVRSMRTAPQAA

SEQ ID NO: 44680 - protein, 351 aa, unidentified
MMIIGVDYHPSFQTIAFLMEETGECGEQELKHSDGQAEKFYRDLKQRGISVRVGMEATGYSRWFERLLAELGFELWIGDPAEIKAKRVKKQKYDRNDARLLRRLMLENNFPQIWVPGPENRDLRQLLWHRHRLVQMRTRIMNQLQALAMNEGYRWKKKLFREQGRAQLEKLTLAPWASRRRRELLELLDRMNPTIEELTAAVEREARKRPEVLRLMTHPGVGPLTALAFVLIIGTWERFPRGKQIGTYVGMIPSEDSSAGKQRLGHISKQGNSLLRFLLVEAAQAAARVHPDWRRRYIHLAMRRHKSIAKVAMGRRLAIRLYWMWRNGCEYSRSLEFGSYAGQLETGHGVK

SEQ ID NO: 44681 - protein, 408 aa, unidentified
MKRYYLGVDWADEFHQVWVSDPDGKKVMEKKVLENVDGLAEFGRWLDESRAKGIELWAAIEKPAGRIVDFLLDHGVVVYPVNPKALDRVRDRFRMSQSKSDSFDAYVLAEYLRTDHAHLRALEPSSEQAQELKLLTRDHHRLGRHKTRILNLLGRTLKEYYPRPLEVFGDLESKIALDFLTKYPTPQALSNLNRREWNRFAKREHHLAEARCKELWENLNKPQLKVPEHVVRAKAQLLTVLVVQLKTLIQAVESYSERVKSFFASMPAAELVQSLPGGKNGTILPMLWAELGDAKSRWESFNHLQAEAGVVPVTKSSGKSSFVQFRFSCNKLMRYAAYWFAFVSLNRCEWANKYYRDQRARGKSHHQALRALGAKWLKIIFVMWRDHKPYDENYHLANITRQKMRQAA

SEQ ID NO: 44682 - protein, 431 aa, unidentified
MSYRIAGIDVHKKMLAVVVADVEIEGEYQFEQRWFGTSPDHLRLLAEWLIEQKVEEAVMESTAQYWKPPWQALERYWKPACQKREGTGPMSGALHLAQAFSNRGRQGRKKDFRDAKRLVKRLVAQELTLSFVPDAEQRLWRTVTRKKYQLTRDHTRLQNRLESLLEETHIKLSSLVSDLLGASARRMLKALSEGETKPAALAALADKKLRATQAQLCDALGACTDLNAVYRRLLKMALEELQLLEQQIVQLDQEMASLLRPHHDAVQRLAEVPGLGVDSAQQIIAEVGAQAATFPSEKHLSSWVGACPGDQESAGVNYSHRSPKGNRHMRRILNQCANAAVKHKGSIFETMYRRLVSRLGHNQTIGAIAHRHCRLIWLILHKGVRYEERGPAVSERSRKRRTTKMIRELRLLGYRVVPGTSQPAGRLRLSW

SEQ ID NO: 44683 - protein, 375 aa, unidentified
MKEKVRFLGLDVHAETIAVAVAEHDGEVRSLGTIANREESIRKLVKKLGPVEQLRACYEAGPTGYVLYWQLTQLGVECAVVAPTLVPVKAGDRVKTDRRDAEKLARSHRSDDLTAVWVPDEGSEALRDLVRAREAAKQDQLRARHRLSKFLLRTGRRPAMGLKAWTERYLAWVQQIQFSQPAQEFTLLDYLHEVQHMDERVQRLEQAITEAVKLASSQVQEVIRGLQALRGVAHLSAVTIAAELGNISRFESARKLMGYSGAVPSEDSSGQRQRRGNITKTGNAHLRRIAIESAWSYRFRPAIGPRLRQRQEGVPEEIKEIAWKAQIRLHKRYLKLTAAGKDKKKIITAVGRELLGFVWAIGIKAETAGKLQMAA

SEQ ID NO: 44684 - protein, 387 aa, unidentified
MNVKARRTKKQVNVENWAINLLPKEELSKKIEVVEKELRSYTWRDLETNGKFAKNDKLSFITDDMLIVGCDIGSENHYIRAIDVRGRELSRGAFEFSNTSEGFENAKAWVLALAAKHDKKQIVLGLEPTGHYWFALAAWMISNGISVVQVNPYAVKQSKEIENNSQLKDDRKDPKLIANLVKYGNYGMPYLPEKVYADMRRLSMFRDQLTEDRIRNINRLHRELKIYFPEYMDAFGKIDGAFTLEILKVSAIPSDITALGAEGMKNIWHNAKLRGRGYSRANEIVSYAEKSVGLTDGTDAGREAVKWYAEQILRLDEQLAEIESALHEKCREIPYAENILAINGVGENILAGILAEMGDISRFDDVKEIQKLSGMGLVACSSGKHKG

SEQ ID NO: 44685 - protein, 347 aa, unidentified
MIESREEPYPLKIYYNYRGIMKISVGVDVSKDTLDVAFVGKNIAQRSFSNSEWGIGSLLKIISEQVETEIVVTMEATGVYHLNLAVHLLEAGLTVSVVNPLIIKRYGEMKMLRAKTDPVDARMIADYGYNQEPILFVPKPRKCQQIVGFLNVIEDYLGIKTQNTNRLESLQFQPERQIEIIDSIKRINGQIDREIKVIEKMIHEVLIENNKDAYNHVMSIPGIGKRTASAMIGYFNHFENFETAKQVSSYIGINPSPYSSGSSVRGRGSISKKGNGYLRKLLYMAALSASRSNEQCKNLYKRLLAQGKCKKVILIAIANKLLRQIFAIIKFRRDYSSNYEPVFSKVD

SEQ ID NO: 44686 - protein, 371 aa, unidentified
MKHTRFVGLDIHKERISIAVAESGRSGAVEYLGEVANDPGAISKLCDRLGRPGRPLAFCYEAGPCGYGVYRQLTSLGHRCDVVAPSLIPMKPGDRVKTNRRDATMLARLHRAGELTPVWVPDADHEAMRDLIRLRSVVRQIVTRTRQHLQGFLLRHGRKHGQGTAWRMAYRRWLSTLAFQHTAQQIAFQDYVDAVMDAERRLQRVEEQISCLLPEWNLRPVVDALQAMRGIALINAVVLVAEVGDFTRFSSPRQLMAYFGLVPGEQSSGETVRHTGITKTGNSHARRALVEGAWAYRMKPRIGRHKVDRIEALPKIVRDIGWKAQVRLCARYRRLSARGKNANVVNIAIAREMVGFIWSIACTIQSAPRTA

SEQ ID NO: 44687 - protein, 324 aa, unidentified
MTSVSNVNAPMPYLGIDVSKDKLDLAVEGQAEVVIFANDPAGITRLIERMRQLRPALIVVEATGGYERLLLNTALEAALPIARVQPGRVRHFAKAQGLLAKSDGIDAHLLAVYAHCLQPAVSEKRSKNQLELDALLVLRRQLIDTRTALTNQMQVADSSFVRATLAKLLRQIHDRIKQVEKRIARLIDSDDDLAGRRDLLLSVPGVGKTTAATLAAQLPELGKIDRCQISALVGVAPYNRDSGKWAGKRAIFAGRAAVRSVLYMATITAIRCNPVIRTFAQRLQKAGKLPKVVITACMRKLLTMLNAMARDGLRWSPKCHLQSA

SEQ ID NO: 44688 - protein, 361 aa, unidentified
MKSTTIIAFDQHAATTVAAVLLPGHRTPALHPLTSDVSTILRFVARLQRQRPVACCYEAGPCGFELQRALRTQGIACDVIAPALIPRRPGDRIKTDRRDAGQLAVLYRAQALTAIHIPTEQEEAARDLLRCREDIRTDLLRARHRLSKFLLRHGRRFTATKKAWSKRHDVWLRAQVWPLPALEQTHRAYLRAVDEVLARLRDVETELRALLDLEPLRPRVQRLRCFRGIDDLTALTIAAELGDPRRFATAPSTMAFVGLVPSEHSSGTKRAQGGITKTGNAHLRRVLVEAAWHYRHHPFVGDALRQRQRGAPATVVAQAWTAQQRLHRRYRRLAARGKPKQHVVTAIARELTGFVWAALTQ

SEQ ID NO: 44689 - protein, 320 aa, unidentified
MKAWIGIDVSKLTLDVCWFVQGEPAFLKVPNTPAGFGFLLSKLPEFAHLVMEATVAYYLRLAHYFMEKGVRLSVINPLSIKRYAQMKLARAKTDKYDAALIAQFGASQEPSAWTLPDAHLLEMQQLCALEDDLIVQKGMLLNQKEAFTQNPFASKTALKTIQGVVKRLEKEIAIVRARLNELTEANYSRTAEILRSIPGLGPKTAQALIVATKGFREEVNGRALCSYVGIAPRPFQSGTSVNGRGHISKMGSRSVRKKLFMCAISAIRNNPACKVFYERLKANGKASKVALIAVCGKLLRQAAAMIKKDQLFDEKLALGA

SEQ ID NO: 44690 - protein, 401 aa, unidentified
MNATSVICIGIDISKDKSDICIKDKLGNDLVKRFKITNTKADLGILYEIIERIKSKIPGNSDVVFGMEATGIYSLPLYSALKRDGHKVKLYNPIQTNGFRKMNIRKTKTDPIDSAIIADMLRFSQAPEVNPIKDLNLYQLRELVRIRDRLVDKQTICKVQMIRNIDTVWPGYSTVMKRDTGATSIAILKKYSGPSKVRAESFEKFYELVKMKSRSKISRIKAEEIYAHAGNILTIPELDSIISVEIKTLIKELELFDEQIRSIEKKIEAVMDLIDSKIMSIPGIGETLGPLILGEIGDANRFSTAKKLIAFAGLDPIVSQSGRFENKSGKISKRGSPLLRKGLFLAANVAIQNDENLKRFYDKKRSEGKHHFSALNAVAAKILRITYWVLKNNKDYKTQVN

SEQ ID NO: 44691 - protein, 364 aa, unidentified
MKKHSKVTTKRSVKPELTVGLDLGDKSSRYCILNRDGELMEEGKVRSTEAGLRKQFGDEPRMRIGLETGTHSPWVKRLLTELGHEVIVANARKVRAITANESKNDRNDAEILARLAACDPKLLFPIQHRGVEKQQDLNLIRTRAALVRARTMLINAVRGLVKSAGGRLRSCSSDSFADKARASVPVELRAACEPLLDQIAHMKLTIRAMDKQIEALGEKYPEIAVLRTVPGVGPLVAACYVLTMNSPDRLHTNRQAGAFLGLRPRQSQSGDSDPECRISRTGNTYLRSLLVQSAQRILGPFGPPSALRQWGLQLAGSGSKSAKRRAIVAVARKLAVMLYSMWRSGKKFETFPQGVTQTAVLVAA

SEQ ID NO: 44692 - protein, 323 aa, unidentified
MGTRMAHYAGVDVSKDWLDAHVLEEAAEQLREVAAERIPYTTQDCQALAQKLAKLQVQRIVIEASGGYERLLVGTLIAAGLPVVVVNPRQVRDFAKALGLLAKTDMLDAYVLARFAQVVKPPERKIPDEQTQNLRDLLNRRAQLIEMRTMETNRLKQATTTRVIKDLKSSLEFIEKRIKKIDDELDEHIRNTPAWQEKVDLLKTVPSIGPQTARVLVLDLPELGTCSRQKSAALVGVAPLNCDSGQFRGDRVISGGRKVVRCALYMATLSAIRCNDVIRAHYQKLRSAGKPFKVAMVACMHKLLNILNAILRTKQPWQPAITA

SEQ ID NO: 44693 - protein, 349 aa, unidentified
MVIVGIDAHKRTHTAVAIDEAGRKLGEKTTHATTTEANLELVRWAGGFDPERRFAVEDCRHLSRRLEMDLLAAGEELVRVPPKMMAHARDSARTYGKSDPIDALAVARAALREPNLPIARLDGPSRDLRLLVDHREDLVRDRTAQINRLRWHLHELDPSWDPAPRVLVRFKHLDGLAARLEGLEGTVAWVARDLVARIRELTVAANDLQRLIVKKVAGLAPALLEIAGVGALTAAKIVAEVADVRRFRSKDAFARHNGTAPLPVWSSDRVRHRLSRTGNRQLNAAIHRIAITQMRIHDDAKVYLERRIGMGNTKMEALRALKRQLSDVVYRALMADAVSTQAACFGEAA

SEQ ID NO: 44694 - protein, 385 aa, unidentified
MPAFDDLSRSLTALNQDSTLMTVIEMSKSSWLVAGMVPGIERHPMKKLDPDPVALLNLVGRWRCEAEGKERRIERVALAFEAGRDGFWLARWLRERGIEAYVIHSTSVAVTREHRRAKTDRLDTAMLMRVFLGWLRGERGHCRMVAIPTLEEEDAKRPSRERESLVGERTRIINRMKGALARMGIRGFKPELRRAPKELIALLTPEGQPLPPNLLEEMRREMTRLSLIREQIATIEQARLARLQQASPSRPNAMVVLLARVIGVGIETADMLVQEVLSRNLRDRRAVARYAGLTGSPDESGSRRREKGLAKAGNARVRRGLIQLAWRFLMFQKDSGLAQWYRARTAQGARKTTMIVALARKLLIAFWRMVTVGEVPAGVVLRPGM

SEQ ID NO: 44695 - protein, 346 aa, unidentified
MGVDTHRDAHVAAVLSVTGTVLATGEFPATAAGYRDLLKWARKLGTVRRAGVEGTGSYGASLSRSLLAQGIDVFDVNRMDRADRRRRGKSDPLDAQNAARAVLSGRARARAKAGDEPVQIARMYKLTKASAVKARTQAINQLKSVLITADPALREELAGLGNAELFRTCARFTEASSQEEGGEAGVLQATRITLGLLACRIGQLSEQIRDVDARLARLVKCHAPQLLDVVGIGPDTAVALLITVGDNPERLDSEASFAALCGVSPVERSSGRRQYRRLNRGGDRQANAALHRIVFTRLRVDPRTQDYYERRIKEGKTRREIVRCLKRYAAREVFHLVGQLQPGPRS

SEQ ID NO: 44696 - protein, 309 aa, unidentified
MKQSVVYIGIDVAKAHLDVAWAGTFRRLPNERSGHAVLVRWIKQSATPVQLICEASGGYEQGLLESLEKSEVKVTLVQAVRVRQYARAAGILAKTDQMDAKVLAAFGSAMQPPPTPPLCAEQKRLRQYEAQRRHLSRVLVAEQNRLAQLSCAELRTLSRGLISKIKKQIETIDTRIGDLIAQDQTLREKAQKLTAIRGVGVRTAALLLAQMPELGQLNRRQAAALAGVAPFNHDSGSIRGKRAIFGGRRALRSGLYMAALSAARFNPILSRFYRRLRTKGKPHKLALTAVMRKLLLALNQTLKPIPSLA

SEQ ID NO: 44697 - protein, 425 aa, unidentified
MNYTQNQKIEQVTESTLVLGVDIGSSEHYVRAFDYRGRELTRKVFRFSTDINGFNSFYDWVTQICIKHGKNEAMIGCEPTGHYWYTFYQFVKDHGMKLAFVNPASVKKAKELDDNSPKKTDLKDPKTIAKLVIDGRYSFPYVPEGIYAEIREVTSSRDRIMKELNAASNRIQRWLKIYFPEYLTVYKKFDTTTGMMILEEVPLPTMVTALGVDNIIKIWREHKVRGKGASFNRAKTLVDAAHDSVGKSGGQGAVMEIQMLLEDYKVKKQQLEMVTSVMEELIMQIPNAEKMLSVDGVGLVTVAGFISEVGDISRFKNPKQIQKYAGFELVENSSGKHKGRTTISKRGRKKLRKIIYQVVLPLIQSNKEFRSIYDYYRKRIKNPLKGRQAMIAVGCKLIRVFFAIMTKGVVYNLSLIHISEPTRPY

SEQ ID NO: 44698 - protein, 352 aa, unidentified
MREYIAFDSHKRYSLVEREDVATGKIVQQVRLTHAPGAVRRYLAQCAPGTAVALEATGNWYWIVEEIEQAGLQPRLVHPRKAKLMMGLINKTDKLDVHGLNRLQRNGTLPTVWIPPRPLRDLRELTRTRLVLVEQRTRLKNRLTATLAKYGVPPSEYSDAYGKSARAELDARIEPLPEQTRWVCKQLLAQIDFLVRQIRQLEQRLKDLVEVTPEMERLMTLPGIAEILAATIALEIGDIGRFPDAPHLASYAGTTPRVHASGGRVRYGRLRTDVNRYLKWAFVEAANSVAVNHRRCLERHVSQLYDRLRQRKGHHKAIGAVARHLAEAAFHVLRRQEAYRDPVLERGCTSEV

SEQ ID NO: 44699 - protein, 352 aa, unidentified
MPKRTRVVIGGVDAHGRAHHAAVIDQQGRLLGDREFPADSAGYRQLLGWLGRHGNPDTVGVEGTGSYGAGLTRYLLDQRVAVVEVDRPDRRTRRQRGKSDPLDAEAATRAVLAGTASAPAKRRDGVVEAIRALRAVRSGAIKARTAAINQLKGLLVSAPAPLREDLDQLPMAALVATCARLRPDEAALADPAQAIKAALRAVACRIHQLDQEIGLADQRLATLVGRAAPRLLKLHAIGVDHAGQLLTTAGDNPERLRGEAAFAHLCGTAPVPASSGKTHRHRLHRGGDRDANRALHLAVVVRMRWCPRTRAYAERRTKEGMSKPEIMRCVKRYLVREVYHALVADFEALNAT

SEQ ID NO: 44700 - protein, 338 aa, unidentified
MKLKRIGIDLAKSVFQIHGVDSHEQMKVRKQIKRRDVVDFFRQIEPCVVAMEACGSAHYWGRELAKLGHDVKLIAPQFVKPYVKSGKNDANDAEAICEAASRPTMRYVALKTAEQQAGQALHRVRSRLVRARTALVNEVRGLLAEFGIIGATKGVGACRRLLAQALEDAENGVPDTLRELLAQLSEELTEHDAHLAQLDGRIKRQCAQDERIKRLLPIDGIGPISASAMVSAVGDARHFKSGRDLAAWLGLVPNQHSSGGKERLGSISKRGDAYLRTLLIHGARAWINACTNKTDRKSEWIKALISRRNKNIATVALANKNARIIWAVLTRANTYQAA

SEQ ID NO: 44701 - protein, 330 aa, unidentified
MMLHSIDLHKRVLQLASMRADGEDVLQEARLPAREDALRKYLATWPASRHRVVVETTGTWYWVADFLRDIGAELKLAHAAKVQAITQAKVKTDGVDARTLLTMLRINMVPEAHVISPELRELRDLLRLRLRLVEKRTSALNSVARLLEKYNRSAVESLPELAQVQAACQQAQIELLAAQIRMLEKRIHRELRPNETVRRLRRIPGIGRLNAWTLYLEIDGIERFASERKFFSYCRVAPGADNSGDRTRNRRSRAGNQYLKLALSHAAIRAIQSYAEIRTAYRKKLRKKNEFLARAWVRKEMARIVYHVLKDEKEFDNTFRGVALSRVKKV

SEQ ID NO: 44702 - protein, 346 aa, unidentified
MLADELDYVIGVDPHRDTHALAVVDVRSGGVVFEATAVADGEGYASVLRLADQHAPGRRAFAVEGTGSFGAGLARFLVSHEERVLEVGRLRRERLSGKSDALDAIRAARSVLGQSRPARPRAGGEREALRALTAAREGAVTARRAGLCQVRGLLVSAPEPLRAELRSLTRAQLLRRLAAVRPEGRQDPELRGTLLALRALARRVKALTVEERELAREIETLTRKLAPQLLEQPGVGPLAAAQVLISWSHRGRITSEAAFARLAGCAPIPASSGQTVRYRLDRGGDRRLNRALHMILVTRRRSHPETIAYIERRLQEGKSRREATRCLKRYLARNLYRLLENPQMPT

SEQ ID NO: 44703 - protein, 373 aa, unidentified
MTTKMLVPAKSATLAFAGIDAGATELMLVIRKNAVSMKGQKFANTPSERLRLLKRLSKFPGVSVCVEATGVYHLDLALALADAGVRLMVLNPKAAHNFAKVLLKNSKTDTVDADTLAQYAERMPYQSWTRPATEAPMLRALARRINTLTRNKAAAKNQQHALTFSPQTPKAVLRDLKLSIAQLEKRIDHLAAEAKTLIQAYPALARPFALLLTVKGIGETSAIALLGELMLLPPSLTHQQWVKAAGLDPRHFKSGTSVDKRARISKAGNRYIRQALYLPALSAKAHDPHVKGFFEHLSPTAKPRCRGYALSCVNCCMRFMACSPITSRSIIQDSMRFPHDAKKSENSVDSEQSIYQSKKSKVLFTLYRDRSIE

SEQ ID NO: 44704 - protein, 341 aa, unidentified
MQKNSYFVGLDIAADSFVASIYQAPEKSVITKEAIENNPDGFGALVTWFKEQGIDNLNSIICMEATGVYSELIAHYLSSCNFKVCVEPPLKVKRAFDPVGHKTDPVDSRQIAEYAYRYKDELRFWQPKDEIVEKIKQLLTAREQFTKQSVAMQNAIKAYEKHVVKVPLIIKSHQETLKELKKHIANIDKELDKLVRQNPTIFKITNQLKSIPGVGLLLAAELIVTTNAFNDISNYKTLSAFLGICPYQHSSGTSVYKRARIRTFGPSYARKLLMLAARSLVSHNKVFIKYYERKLAEGKAKQLVLNNISNKIIKIACALVKNNMQYNEGYRSVNPLCFSLA

SEQ ID NO: 44705 - protein, 376 aa, unidentified
MKVSAIFLRYCVGFDISKDSVQVCLSVIDTTGKVTIKGTTKGSNKASSFGSLQNWISKNLKQTTLPICYVMESTGVYHEALAWYLFSADGAVSIILPNKAKHYLKSLGHKSKNDKIDAQGLARMGLEQQLPLWQPLSKNIYGLRMLTRQHQRLQELKNQSENQKHSIVYSQLNDKFIIKQLDKLIALYDQQMVAIKKAIEELLITDPVLQAGIDRLCAIKGLGLLSVATLIAETNGFTGFSNIRQLVSFAGYDVVENQSGQRVGKTRISKKGNSRIRRILHMPALNAVRFGEPACAALYERVYERSRIKMKAYVAVQKKLLTLCFSLWKNEAIYQPNHLPPGGPATKSKNEIMGQKIVPTSGTTQDQLAVAELSYM

SEQ ID NO: 44706 - protein, 389 aa, unidentified
MPTTEITTAAAITRSECGAIFVSLELSRSTWLVTALAAPLGGKMSRHQVRGGDIAGLLERFSDLQRAVRRRTGHVCPVIVIQEAGLDGFWIHRALAAAGVESHVVDPASIAVSRRHRRAKTDRIDGEALVRTLMAWKRGEPRVCAMVRVPTPEQEDRRRVCRELKSLIGERIRHVNRVKGVLFAQGVEGYEPRNRDRRDRLEELRTGDGRPLPRHLKALVLRELEIIELLNRQIETVKEERDALLSEVQTTGSTPTPVQMLLGLEGIGPGFAGALWSEGLFRRFDNRRQVAAYAGLAPTPWRSGTINHEQGVSKAGNPRLRAIAVEMAWLWLRHQPDSALARWFHDRVRRLGPRARKVTIVALARKLLVALWKYVTSGIVIEGAAMKTV

SEQ ID NO: 44707 - protein, 465 aa, unidentified
MTVGRKFWRNRKERKEWARRLQSEDPGLEVVHPQSAGIDVGNSAHYVAVRPNRDPEPVRRFECFTADLHRMADWLQSCGVKTVAMQSTGVYWIPLYEILEERGFEVHLVNARHTKNLPGRKSDVQESQWLLKLHTYGLLNNSFQPVSEIRVLRTYWRQRAEHVRGAATCIQRMQKALTQMNVQLANVISDISGLTGQAIVRAIVAGERDTQKLAALSHPRIQASQEEIAKSLEGNWRPELVFVLQQEVDMYDTYQKRIVECDQQLQKQLASLTSLTPPGIGQTQKAKSKPPAAKNAPRFDLSSELQRVTGVDLTRIDGIDVMVAQTLVSEVGLDMSRWKTESHFASWLGLCPDNRITGDKVVGRGTRRVVNRVATALRQAANTLIRSRSYLGAQYRRFRTKLGAPKAITAMAHRLARLVYRMLKYGQAYVDKGTEYYEERFRQQQIHSLRKRAAKLGLQLAEIHA

SEQ ID NO: 44708 - protein, 345 aa, unidentified
MPIVGGLDIHRKQITFDYLDTVTGEVNRGQIAPADREHVRAWLARFAGRGDAAFAVEGCAGWRYVSEELAAAGIAAHLGEPADTAALRGRKRHAKTDKTDARHLRTLLAEGRLPECWIPPAHILEYRALLETYHDLRTAHTAWVQRIHAVFFHQGAPPLSDGALRTEAGLAKLRAAAAAHLPAAGQQQVATAVDMIAATEARMGPLRRQLRDAAAHLTGAKVLAARLYGVGPFTALALTCWLGGADRFSSSRKAVRFTGLDITVHSSDRKGPPGRLSRQGPPVLRWAVYEAGKTHARTAAPDHACYAQVKDRKNSKRACLSEARKIVRQACHILTELGDGALTTI

SEQ ID NO: 44709 - protein, 315 aa, unidentified
MIIIGCDYHPSFQQIAFVDTETGEFQEQRLAHREEAEKFYRDLAARDGKLRVGMEASGQARWFERLLAELNVELWIGDAAEIRAKRVRKKKTDREDARHILRLLVEDRFPRIWVPSWENRDLRQLLWHRHRMVQMRTRIMNQLQAVALNEGLRCKKRLWRENGRKQLEAFPLAPWASRRRRDLLELLDRLNPTITELSQAIEREVENCPEAKRLMTHPGVGALTALAFVLVIGDAERFRCGKQIASYLGLVPAEESSGERRRLGHISKQGSAILLSSWWKQHRSRYGAIQSGGASFSIWPCDEGARSPRWRWPAD

SEQ ID NO: 44710 - protein, 346 aa, unidentified
MVIVGCDYHPSWQQVAILDPETGEIAERKLMHSEGEAERFYRSLPVPSLIGIESCGNAQWFVELLERLGHQVWVGDAAQIRASYVRKQKTDKRDAGHILKLLREGRFPRVWVPDAEIRDLRQLLIHRHRLVQIRTRVKNGLQHLALNRGVRKKHRLWTEAGQREFLALPLQGWAQYRRSDLLQLLRSMDEQIRPLDTAVEKAAWAHAQARLLMTHPGVGAITALAYALTIGDVGRFRRGKQVASYLGLIPSEHSSGGRQRLGAISKQGNSFLRMLLVEAAQTAVRLEEGMKKQYQHRCHSKPKGVAKLAAARQLAVRLYWMLRTNTAYPEIVHNESSPRCPMAGAS

SEQ ID NO: 44711 - protein, 350 aa, unidentified
MDRYIGLDAHASSCTVAVVGPSGRRLHSQVVETNAGALIRVLRGIPGTRHLCLEEGTHASWLYEVVSPHVEEIVVAGVSESRGPKSDKLDSFGLAEQLRIGAIKRKVYKKPGEFGALRHRAKAYTLLVGDSVRVQNRIKGLFRSRGVAVAGKGVFRVAEREGWLKKLPATARCLAELLMQEQDGLLELREKAEEAMLAEARKHRAWRLVKSCPGLGEIRTAQLLPIVVTPYRFKNKRSFWAYCGLGIVMRSSSDWVRTQSGAWVKAPVQQTRGLNRNANRTLKGIFKGAATTVIGQARDEPLYRHYVQLLDGGTKPNLAKLTLARQVASILLAVWRNEEVYDPVRVDQAV

SEQ ID NO: 44712 - protein, 408 aa, unidentified
MARYYLGVDWADQSHQLYVSDESGRKIRELEVQQTADGLAELGRWLEESRGQGIELWAAIEKPEGRVVDFLLDHGVVVYPVNPKALDRARDRFRMSPSKSDGFDAYVLAEFLRTDHAHLRALEPNSAEGQELKMLTRDHQRLGRQKTRLLNQIGITLKEYYPVPLEVFESLDTKIALDFLKAYPTPQALSKLTRRGWKRFAKRDHHLSEARRSELWDKLNKPQLAVPTHVVRAKAKLLAALVMQLETSVKAVDSYSQEVQSFFAAMPAAEIAKTLPGGKSGTTVASIWAELGDAPKRWNSFRHLQAEGGAVPVTKASGKSRMVQFRFACNKHLRQAMYWFSFNSLQRSEWAKKYYRNQRAKGHSKHESLRALGAKWLKIIFVMWRDHKPYDENYHLANIARQMMRQAA

SEQ ID NO: 44713 - protein, 345 aa, unidentified
MKYVGIDLHKKTISLCVVNQARQKLEQKRFHCAMPELIVEYVRKLGQFQAVVEATASYEWLVRLLEPLAERVLLAHPKKLRVIADSTRKSDKIDARVLADFLALDMIPQAYRPTPRQRQHRVLVRHRCYLQRRTTSIRNKIRHILGDYNADRADLFTEEGLAYLSAVPLSATDRFVVEQLLKEFAFQRGQLQELTKALKEFTAKAPVAEAEARALLASIPGVGPVTTEVVLSELADPKRFRSAKCAVAYAGMAPGQRESAGKKKELHIERNGSKMLRWVLVEAAWQLVRRTGRWRVTFEHLSGRIGRKKAIVAMARRLLGVMMALLKSGQPYRHAYEPAVAAGKT

SEQ ID NO: 44714 - protein, 346 aa, unidentified
MVETTTIGLDVAKRFFQVHGVSADGKVTIKRQLRRSEVLGFFGGLERCTVGLEACGGSHFWAREIRALGHDVRLIPPAYVKPYVKRGKTDAADAEAICEAVARPTMRFVPIKTADSQAALMVLKTRDLLVRQRTQAINAVRGHLAELGIVAAKGLAKVATLIAIVRDGNDQRLPPAARMALNLFADQIEMLTERVDTLGREIAAEVRRDNTMRRLATIPGIGPLTAATIQASVPDPGAFKSGRHFAAWIGLTPKMHSSGGKDHLGKISKMGNPTLRSLLVVGATAVLQHARRGATISPWLTALLARRPAKVAAIALANKMARIVWALLTKGGTFIRKNRAAEPAAA

SEQ ID NO: 44715 - protein, 347 aa, unidentified
MKFYTTLHNYYCGIDLHAKILYVCILDQQGNKLLHQKIGADPEALLRLLEPYIGNVVVGVECMHCWYWVSDFCRAHDIDFVLGHALYMKAIHGGKAKNDKIDSFKIASILKGGNFPLAYNYPKEMRATRDLLRRRTSVVRHGANLKAHVVNTDSQYNLPVRHLNLKNTCARETLRHSYEDNVVQRTIELDMVLLDCYAKELSKIECFIEKQAKEHHGAYLYIIRSFPGIGQILGLTILYEIGHITRFKSVQNFASYSRLVKCKAESAGKTYGTSGNKIGNAHLKWAFSEAAVLYLRGNDKAKNYLNKLQRRMSKGKALSALAHKIGRCVYFMLKDKTVFDESKFLKG

SEQ ID NO: 44716 - protein, 465 aa, unidentified
MRTDKTLWRNRNARKELTRRLQSENPGLEVVHPHAAGIDVGNSAHYVAVRPDRDLQPARRFECFTADLHRLANWLQNCGVKSVALQSTGVYWIPLYDILEEHGFEVYLVNARHTKNLPGRKSDVQESQWLLKLHTYGLLNNSFQPLSKIRILRTYWRQRLLHVTGAGTCVQRMQKALTQMNIQLANVISDLSGVTGQLIVRAIVAGERDPHKLAELSHPRIQASRAEIAKSLEGNWRQELIFVLQQEMEMYDTYQRRVAECDQELQKHLRSFAATVPTPVKEALPPKKKKKQNKNNPHFHLADELQRITGVDLTRIDGVDVIVAQTLVSEVGLDMSRWKTEAHFASWLGLCPDNRISGDKVLSRGTRHVLNRAANALRLGASTLLKSQTYLGAQYRRLRNKLGAPKAITAMAHRLARLVYRMLKYGQHYVDKGAEYYEQRNRQQQIEFLRKKAAQLGLQVTAPHA

SEQ ID NO: 44717 - protein, 316 aa, unidentified
MDISILGIDVASRKLDLAWSDESGFQHATVDYTTEALDAFLASHPSCTAAATTVGLESTGDYHLAASQYFIAAGFAVRLLNPILTKHYTRLTIRGAKTDVRDAELICRLVADGHGTSLSWHDVTNRPKELLRLSQHLTRVGAQLKQRLGSTWRKQIPDTKRIEAKLERLIGRVKKLSDELVAEATKNQSVEERLITSIPGFGTKLAALVHHELGEISRFRNVRALLAYAGLEPRMRQSGARLNTTGRISKRGSAELRHALFIAANVACRWEPELKAYYQMKRAQGRTHVEALCIVSRKLLRRINAVLRERRPYLSR

SEQ ID NO: 44718 - protein, 341 aa, unidentified
MQHFVGLDVSVKETAICVVDEQGRVVARATVESEPAAIVSWLLARGIRYGRVGLEAGPMSPWLYAGLVEAGLPAVCVETRHMHAALSARINKTDRNDAHGIAQMMRVGLFKPVHVKTPASQRRRLLLTSRKLLQRKVQDLENDLRGSLRNFGLKVGVVGAAGFDRRVRELAAGEPFVAAVVGPLLEARAMLRLQLAKLHKMLLDLVRDDPVCRRLMTAPGVGPVVALTYRACVDNPGRFDRSKCVGAHYGLTPRLYQSGETARVGRISRCGDAMLRASLFEAGLVLLTNPRIRWSPLKAWGMAVAKRRGMQKAVVAVARKLAIVLHRMWRDEADFRWSKAA

SEQ ID NO: 44719 - protein, 391 aa, unidentified
MSMYFVGIDISKYKHDCCIISAVDQQIVSKFTITNDKDGFEQLLISLNSLSNPEDIKIGVESTAHYALNLELFLENANHSFMEVNPVLIKEYKKSTTLRRTKTDSVDCESIARWLMTVEYKPHSKGFYHAYSLKSLTRLRDRLIRQRSFYLVKITNVLDHTFPEFKPFFNERLSKTAIYLLENYGSAEKMAHMNSASYDKLRCISRGKFSIQQFLHLKELAANTVGVNNSIFDIELNSLLTLYNSLCKEIKNLEAEITRLIEEVHPHYMSIPGIGPISAAVIYAEYGDISNFSNPSQMLAFAGIEPGINDSGTESHGGRMVKHGSSQLRYVLLNACLPLIRFDLTFATYYAKKRAEGKKHRVAITHVAKKLIRVIYALERQDVDFNAQKIR

SEQ ID NO: 44720 - protein, 418 aa, unidentified
MPANHSTAATVLVAIDISKHRHEVLIEVPGKKRRRRMTIMNTLEDFQRLSASLASYGLPVRVGFEATGNYHRPLAHHLGQAGFDLKLIPSVGLARTREALHNSWDKNDPKDAQVILHMLEIGAVQFFHDPLVVGTADIQELSKTHEIVSRSKTELWHRILTHYLPLYFPEAERFHRSSRTDWFLAFLEKYPTPTMITAMSQETFIADAWQVVGRKVAKERLLSDIYATAVNSVGLPVEPDSDAVRMFRLVLSEGRSLVRQRNEIEARAVALLSDLPDYQLLTTIPGIGPINAMTILAEAGDLRRFRHHRQFLKFCGMDLATVQSGMFRGQSRISKYGNARLRRTLWMAGQTAVQTKTNSFRDKFERYISKDRHNAHLRRKAYTAIAAKMARTVHAVVNHGEPYRPFFEGVSPGGRTSL

SEQ ID NO: 44721 - protein, 363 aa, unidentified
MLYFGCDLHKKSTTFTVKDESGKKLSQEKVVNIPHEIKQYVNRFPGEKTATVEATFNWFWFVDLMEDLTEKTILAHPGKTKAILQARAKTDKIDSSGLAELTRVNLIPRVHIPPKEIRDIRELLRYRTGLVRYRTSVKNKTHSILHKNGILNTFSDLFSEKGKQWLCEIPLRPCYKYILSAYIDLIQFINNLISQVEKEIYSKPLKHDKEIMLLRELPGIGELFAFHIKYEIVTIDRFYGDKHFVSYAGLAPSTKQSAELTRHGGLIPQCNHWLKWVLIEAAQHARRHPWFRPTYERVLLRHGKNIAKIAVARKLARVIYFMLSRKEKFRGHKETSTKRVSPRGHGPQRPNSLNESTVTRANR

SEQ ID NO: 44722 - protein, 347 aa, unidentified
MALHGQIVLGIDTHKHTHVGVILDGLGRVSGALQFPATEAGTQRLLAWNQENGGAKIAGVEGTGSYGYPLTRALQLAGVTVLEVNRPDRANRRRRGKNDTVDAEAAARAVLSGQANAVPKDREGAVDALRALTMTRNSAVKATTQASNQIKALLVGSPERLRQQLTVKSLLQLATRCAELDPCSGMHTALRSLGRRWLLLRAEIVELDTQIRALVRDTIPTLVARPGIGIHSAAQLLITAGGNPTRLHSDAAFAALCGASPVQASSGQRQRHRLNRGGDRAANNALWAIANNRLIHDPATRAFAAKRRAQGDSRNEILRILKRYIARETFNLIISSLRPLVALAAAC

SEQ ID NO: 44723 - protein, 342 aa, unidentified
MKQYVGLDVSQRETSVCVLNETGHILFEGKAKSDPGALTALLRKRAPHAERIGFESGAMASWLWHELRRLDLPVVCIDARHAHAALSVRMNKSDQNDARGLAELVRVGWYREVKVKSEESQKVRAILVARSRLVAIRRDIENQVRSLIKEYGLLFPRAIGKQFRNQVSELLGHDHQLLGVIAPLLSIHEHICEQQSKFDDEVRRLAKSDETTRRLMTVPGVGVVTALTFRHTIDDPSRFRSASTVGAYLGLTPRRNQSGETDTNGKISRWGDRLLRSYLFEAATVLLYRTKKWSSLKAWGMKLAKRIGVKKAKVAIARKIAVILHCIWVDGTSFDWGQAKPA

SEQ ID NO: 44724 - protein, 346 aa, unidentified
MKKIFIGIDFSKEKFDATVIKAEGVEERAERQHEVFDNKVSGFRRLLRWVKSVADEPDAGLWLFCGENTGGYSRALCNYLYGSGYDMWLENALSIKRSYALQRVKSDKADAGVIAEYAMRNYDQMRLYKPLGNNLERLREVFLYRHNLVKTKASMTTRRGEKKLTQEKSDISRFMAQSSRHLISEFNKKIAECDRRIQEIIAGDEDLRRNFEIITSVPGVGTQNAVCLMVYTDNFGRFDYNSRKIACYYGVAPFGRQSGTSVNTPPHVSPFANKLIKALLTQAALASVNFCPQMAVYYRRLVDAGKKKPVAVNNVKNKLLHIITAMIKKGERYNPDHDYYAALKVA

SEQ ID NO: 44725 - protein, 368 aa, unidentified
MNQRTRFLGLDVHKATIAVAICETAGAAQSYGTIPNQPAAVHKLTDRLGGVGVRLKAAYEAGPTGFATQRQLSALGVECVVVAPSLMPRRPGDRVKTDRRDALQLARLLRSGDLTQVWIPDEAHEALRNLVRARADARIDLMRARNRLGKYLLRQGLTPPLGIRAWSLKHAAWLRRLSFRHTADQVVFQDYWQVVTAAGDRVRRLELELHRAAEQSPQLPLIAALQAIRGIAFLTAVTIVAEVGDLRRFQQARQFMAYTGLVPSEHSSGGSTYRGRITRTGNALLRHVLGEAAHHARHQPRLSTLLRERQAGLPPALTDLAWRAQHRLNYRYRHLAARLGRPRALTAVARELAGFVWAIGQRSVIAPS

SEQ ID NO: 44726 - protein, 419 aa, unidentified
MDLLHARCAGLDVHKDLIVGCIRVQEGRQATTTLMRFGATTRELLKLSEWLHAAGCTHVAMEATGVYWKPVWHILEDSFALVLANAGHIKGVPGRKSDVNDAAWIADLLAHGLIRGSMVPPQPVQEIRELTRERLGFVREVTRHTQRVQKVLEDCNVKLSSVLSDTMGLTGRKILRAIVKGQKDPERLADLAHGGVKASREELVESLRGRYTPHNRFLLEQHLKAIEDSEKIISVIERRIGKAIEPFRDAIERLSTIPGVSKTAAASIVGEIGVDMGRFETDDHLVSWACLCPRMEESAGKRRSTRIRKGANYLKPLLLQGAWAAIRTKGSYLRAKYYRLKSRRGSKKAAIAIAASILRAVYIVLRDGVNYRELGADYFIPKDRLKVAKRLAARIQELGFTNQCRLLMTKPWRRDTLAA

SEQ ID NO: 44727 - protein, 438 aa, unidentified
MPTLAYLGLDVSQESARVCFLLADGEEPRPRWTIPNTQPGAEALSCELARLCFLYQVDQLRIGLEATGLLWWHLACALKDAEALAPFRPQIYALNPQLVETFRKNFGALPKSDHADAFLIAERIRYGRKLPSPFQLDTRYAPLQRLTRFRCHLVENLVREKNYFLSFLFLTFSSYGQVAPFSDPFGATSCAVLEEFSTEDLAQHSLDDLATYLQDKGHGRFAEVQDVAASLQRAARDSYRLDKVLQEPLRLVLATTMASIRSLQQQLKTLDKTIAQELATIPQTLSSVPGLGPVWTAGLIAELGDIRRFDDQGAIAQYAGLTWPSAQSGEFAAEDTEMSKRGNSYLRYYLVEAANSVRTHCPEYTRYYAAKYAETPRHAHKRALVLTARKLVRLIDVLLREGRIYQPPQQRAPAPPATQPHNKRPGPQRRSKPLRAGT

SEQ ID NO: 44728 - protein, 273 aa, unidentified
MKNTFLGIDISKDKFDICLLVGDSKLIGKFDNNKSGFHKLLNWLQKKKIDLISIQACMEATGKYGEDLAYFLSSKNIKLSIVNPASVHYFGESSLKRNKTDKIDAELIAKFCEVNKPAIWNPPTEEERELKEITRLIESLEDERQRHKNRLESKLVSETAIEATNNSIKSLTEQIKLLEKRKKNLAKEDKKTAEKVQLLESIPGIANKTAIRFTAEIPNIEEYESAKSLAAMFGITPSIKQSGSSVNSTKISKKGNRRLRKAFYMPAIDVDPI

SEQ ID NO: 44729 - protein, 424 aa, unidentified
MNLTQNDRLKQVTFDTLIVGVDVGSKTYFCRAFDWRGFELSHSVFKFSNTGMGFLTFLRWTEELMNKTEMKKVIVGCEPTGCYWLTFQKFLQDHDIQLVTVNPFTVNRSMELDDNSPEKSDLKDPKTIAHLVKDGRYSTSYLPSGVYAEIREASVCRDQIMKQHIRLSNQIQGWLQKFFPEYLECYADWDSTSGLMLLKEAPLPEDILKIGAGGINQIWRDAKVRAAGIKRAQILIEAAQNSVGLEAGEAARLEIWVLVNDYILKAEQLKRLDEYLEEKVREVPNVEKLLAIKGVGMSTVIGFIAEVGDIGRFTDPKQIQKLAGLEIVKKSSGKKKGQPRISKRGRRKLRRTMYESARALMNWNPAFQDVFLYYRNRTRNPLGGMQAKIAVACKAIRVFYVVLQTGCDFDEEKFRKDIIRPEAS

SEQ ID NO: 44730 - protein, 487 aa, unidentified
MACGRLSTPSNTVVPCEAVYRAGRRMSLYGPLTVAALTSTRIRFVVPVAISAGDHSHVVRVKEESMLAESHDEEQIIARVAALDIAKAELVCCVRVPSPAGGKRRLQEVTTHSTMTQALTELANRLVEMGVQRVVMEATSSYWKPVFYLLEAHGLDPWLVNARDVKHLPGRPKTDVLDAVWLCKVAERQMLRPSFVPPWPIRRLRDLTRYRTDLVAARTAEKNRVEKLLEDACIKLSVVASDIFGVSGRAMLAALVAGERDPKVLAQLARARMRGKIDRLEQAFDGHFADHHRFLLSRMLSRIEGLDADIAAIDAQIEAQLAPFAEAAAHLDEIPGIGSVAAAAIIAEIGVDMSRFPTAGHLCSWAKFAPGINSSAGKTKRSASSGHGNPYLARVLGEAAVGTTKTNTFLAARYRRIARRRGQPRAVVAVGRSILVIIWHLLHDPDARYQDLGADHYNRHVDPSAKKRSHIRQLEALGYTVTLTPAA

SEQ ID NO: 44731 - protein, 324 aa, unidentified
MFYLGIDVAKAKIDCCLILENSASKKKTKTFSNTPKGFEQLQTWLKQHAATSTQTIILMEATSIYHELLAKYLFDADYQVCVTNPARARYFAQSMSKLNKIDKLDSEVLARFAMTADLHFWQPLPQPIQFLNALLDRRAVLCEDLQREKNRLEKAESTFTMEPVLQSIHKSIRQLNKHIQGIDQQIDAHIDQNPDLRNDKELLSSIPAIADRTSLLMLSFLRSHTFESASQAAAFVGLVPIQKQSGSSIHGRSRLSKAGSSKIRASLYMAAIVATRHNPHIRGMNERLLANGKTKMMAIGAAMRKLVHLCYGVLKHQQPYQADY

SEQ ID NO: 44732 - protein, 400 aa, unidentified
MISVGIDVSKGKSTVCILKPYGEIVCSPFEVLHVEKELDALDNLLNKLEGEIRIVMEATGIYHLPILTFFHEKGYFVSVINPFAMKKYAKDNSIRGAKTDKLDSIMIANYGIEKWFKLQRYEGDEETYAELKLLGRRYRYYMELHVKALQELTHILDYAMPGIKKMFNSWNEANGKDKLSDFVERFWHYDLITSMSLEKFTEEYLVWAEEKKYHRSRSKALTVYELASSGIPTLSSSTPSTKMLVQEAVSVLRTVDCSLSLILTRMQVLAKSLPEYTTVREMGGVGDVLAVKLIAEIGDVRRLHSAKALIAWAGIDPPPYESGQFVGSKRKITKRGSSTLRKVGYEVMRVLKSHPAPKDDAVYNYILKKESEGKSKKHAKIAGLNKFLRIYYARVIAVYQ

SEQ ID NO: 44733 - protein, 509 aa, unidentified
MALIPLGRLQTSPIPLLARGTFLTTRIRQLEASMAVPNEDSKKPAKSKKPTNPNRARERSLAVPVPASAAPLTVVNPDAAGIDVHSNMHMVCVPADRDANPVRQFGAYTADLHEIVTWLHKCGVKTVALESTGVYWIPLFELLESEGFEVNLAEPGQLSRCGARPKTDVLDAQWIQRLHSYGLLRGSFRPPESVLALRAYFRQRQMLVRYAASHVQHMQKALEQMNVKLPEVVTDITGLTGMSIIRAILDGERNPVKLAKLRDARCHHSEEQIALALQGTWRPEHLFELRQAYELYQFHHRQISQCDQQLETELGRFPNRAGEKTRTVKPRGRGRKSNDVRFEAKGPLFQALGVDLTMIEGIDVGTVLAIAAEIGPDVSRFPSEKHFASWLRLSPPQNQSNKTNKRRGHRKSTSRVTIALRLAARSVGKTKTPLGMFYRRIRSRIGGLGAVKATAHKLACLVYRMLKYGQEYVTQSMEEYKAKMETSVLNALKRKAAAMGYQLNPLPAK

SEQ ID NO: 44734 - protein, 361 aa, unidentified
MAQVRSWAGLDVHARSVVAVTLDALSGETRSRRLSGTTSEVVTFLGSLPGPTRAAYEAGPTGYGLARALHAVDIGCVVAAPGKIERPAQDKVKTDQRDAERVLRLLMIDGLHAVRVPSVEEEALRDLVRAREDLRGDLMRARQRLGKLLLRHDIRYDETPSTWSAHHRAWLGRIDLGGGAQLTLLDYLGAVDALVIRRRVLENSIDEIVPTSPWAQTVARLRCLRGIDTLSAVGLCCEVGDFERFERPGRLMSYLGLVPSEDSSGPRRRQGAITKTGSRHARRLLVEAAWQYRKRPARGKALERRQDGQPPAVIAISWQAQQRLYRVWRRLEGERGKRRTIVAVAVARELAGFCWAIAKAD

SEQ ID NO: 44735 - protein, 344 aa, unidentified
MSTIKVLGIDLGKSSFHVIGRDYSDNQIIRKKFSRSALIHYLHQLTPCTIAFEACGGAHWLGRQCELMGHTVKLIPPQYVKPFVKSNKNDFIDAEAICEASIRPKMRFVSVKSEEAQVISAIHKARHGYVKDRTACMSRIGSLLLEFGIALPTGHSVMKQLFNWLSQQRQVLPGLLMEELMELHEYYLLLNRNIERQDKKLKQLVDTNPIGQLLKTIPGIGDMTASLCIANISSATDFKNGRNMAAWLGLVPAQYSTGGKPKLLGISKRGNKELRTLFIHAARAVMSKPDKTGKIYGEWLINLRATKPFNVVTVALANKLARIAWAVMKTKKAFNSKALAPGLQ

SEQ ID NO: 44736 - protein, 353 aa, unidentified
MKYVGIDWAYQKAQWCVLAPGGEIAGEGRITADRDGLARLVLELGDEVKACLEMMSGALWVRDQLVACGWQVEVADARKVKTVAPLAAKTDKVDARLLAELSRRELVPALWLPALDERALRERLRRRMHLVRLRTSAKGRIFGLQTQWGVRVSLARLRRGDGLALLEQAGMPAVWRRSVSECLALVDFLDARIAPLDAELRPFAKADPRAVLLDTIPGVAELLALTIAVEIGEISRFAGPEKLVSYGRLAPRVHQSGQARPRSGPLSKSGSRLLGWAAVEAAQQAWRETNPWHELYLDVSGRSRNHNSAKAAVARKILIAAWHLLSRNQPFTPAPRRTGGTSVPASSRLALAA

SEQ ID NO: 44737 - protein, 346 aa, unidentified
MDYFVGLDVSLETANVCIVDQDGSLRLEQKVDAEPQEIVELLKRFGRPLKRIGLEAGPTSSWLLSELRAAGYPVFCLECRHVKAGLSAMRNKTDRNDARGIAHLVRLGWFRPVHVKSEEAQEIRMLLVNRNLLLCKLQDIENSVRGSLKVFGLRLGKVTKRSFETRTLELVEGHPKLAAITLPLVRVRRVLLEEFCRLDRLALKIARSDAVCRRLMTVPGVGVIVALTYRTGVDVPERFTRSRDVGAHFGLTPRRYSSGQVDYDGHISRCGDEMVRTALYQAAHVLMHHGRWSGLRGWAMRIAKRSGAKLAKVALARKLAVVLHRMWIDGTEFRWTNRELTPTAAL

SEQ ID NO: 44738 - protein, 408 aa, unidentified
MQRYYLGVDWADKSHQLYVADASGAKIKETKIQETAEGLADFGRWLDESRGAVIEVWAAIEKPHGRIVDFLLDHGVVVYPVNPKALDRARDKFRMSQSKSDSFDAFVLADFLRTEHSHLRALEPDSAPAQELKMLTRDHQRLLRHKTRLLNQMKITLKEYYPRALEIFDDLETKIARDFLRAYPTPQGLSKMTRRQWKRFAKSDHHLSEARWQELWDKINKPQLTIPEHVVRAKAKLLLALVVQLEVAVKAVNGYSQEIEHFFADMPAARIAQTLPGGKSGTTMPMLWAELGDVKSRWNSFRHLQAEAGTVPVTKSSGKSRVVQFRYACKKHFRYAIYWFAFNSRKRCEWANRYYRDQRAKGHSTHQALRALGAKWLKVIFVMWRDHKPYDENYHLANIARQAMRQAA

SEQ ID NO: 44739 - protein, 504 aa, unidentified
MKITPTPKSTASIYRNQNALLRALFERASDPRKVLCVALDYAKRKHVALCCDGNGDILRKPFAVDNTIEGVAFFIEQISATARRRKIPKCDIFLGGEDEPSYVANFTQALRDRQYLVLRVNAAEAAENRENLIASTDLLDLLGIAKTLLSRRARATGPVGSAGAKGKKAAAEDIYFDIRELTRCRRNLVRQQTAASNRVHAIVDQLFPGFLEHAKSGLTPFCEASMALMKERFSATEIAHRRPRTLAAFLARHGVRAPDEIAFKLIALASGALPPAPHRLAALQRTIASTVDLRECLARNANELRQQAALLLASTPYAMLTSIPGIGFTLAAGMAGELGDPVRLSPVDSLCAFAGIVPHTFQSGGPDQPACQGHTPARCNHILKDWTVQSAQKIHLYGPPELKDRISRWNANGQHGIFAGARRYLRLLRSLVLNRVPYLDPRSRSSSASEQERADAALHAWLVLIRKWRTIPDGLALISKETTPLGFWRRVVMESRSVHLPLRP

SEQ ID NO: 44740 - protein, 334 aa, unidentified
MNDVTTVGIDLAKSVFSLHGVDACGAVVLRKSVSRAKLSELVAQLPPCLIGMEACSGAHEWARRFRQFGHTVKLMAAKFVAAYRKGGKNDGNDAEAICEAVSRPSMRFVPVKSREQQAQLCLHRVRSGFVEERTANLNRLRGLLAQFGHVLPLGAHALRAQVSPLLEDLPATAADAARDLLEHVRGLEARILGYEQQIQAHVRSSELARRAQTQRGVGPLTASAIVASVGDAHEFKNGRQFAAWLGLVPRQHSTGGKTRLGQITRSGDGYLRTLLVLGARAVLRRAPHERDPLSRWALALRERRGYHRACVAIAAKNARHVWAALAGRTPVPCA

SEQ ID NO: 44741 - protein, 330 aa, unidentified
METYNVVLGVDVSKKTLDISCAERLLHIKIDYQGKGFAQFTSWCKTNGIDLSKTLVIMESTGGYEHRFRQFCESVGLAYKVVSGLEIKNAVGIKRGKNDKDDSFRIGQYGEDRIKRIKPSNPLNYIYLKVKHLLAFRKRLIREAAGYQASVGERKHMYDPDKQDVIIDISTKKMSGNEAYIKQVETELIALLKADGSIWFNYQILLSIKGIGRVNAWMTIAYTENFTLFSDPRKYGVYAGVIPFGNRSGTSLKGKDRVSHIANKEIKSELNQAAKTAIQWDKEIKEYAERKLKNKNYVLVLNNVKFKLILRMFSLVKRGEMYVENYKRSA

SEQ ID NO: 44742 - protein, 422 aa, unidentified
MLTTTQDNEEIIERVAALDIGKAELMCCVRVPDGDHPGRRLQEVQACPAMTRAVLGLADHLGRLGVTRVVMEATADYWKPVFYLLEAAGLETWLVNAKDVKHLPGRPKTDKLDAVWLCKVAERQMLRPSFVPPPPIRQLRDLTRYRADLVAARTAEKQRVEKLLEDACIKLSAVVADIFGVSGRDMLAALVAGERDPKVLAQLARRSMRAKIAVLEEAFTGHFTTHHAFLLRTMPGRVDAISADIAALDDRIAAQAAPLAGAVARLDEIPGISLASAHVILAEIGTDMTRFPTAAHLASWARLAPGISESAGKKKGKGATGHGNAYLASVLGNAAAGAAKTDTFLGEKYRRIARRRGSKRAIVALGRSILVIAWHLLSDPEGRFYDLGPGYHAARIDPERRKRTHIRELEALGYTVTRKPAA

SEQ ID NO: 44743 - protein, 495 aa, unidentified
MGQQGTHTRVWAERGTRPRAPRDTRYKSAYIFGAVCPARAETAALVMPHANTEAMNAHLTEISRAVAPGAHAIIVLDGACRASDGMTVCEEAGTSGGSPPRCATWKRGLRHIAGPHAQGRRTMTDYNAFVGLDVHKDTIAVAVADAGRAGEVRFWGEIANTPDAVASMLRKLGGRHSRIHFVYEAGPCGYGIHRQIMATQHHCEVVSPAQTPRKPGDRIKTDRRDAIILARLSRAGELTSVWVPDETHEAMRDLIRLRQAMVKDLRAARQRVKSFLLRHGRVFKGTSWKRSHRIWLGNQSFEHPAQQIAFQSYLNAVDQAQARRDEVDVQIRQFAAEWSMAPVVEALQALRGVAFTTAVTVVCEVGDIRRFAKPRQLMAFLGLVPGERSSGETRRQGGITKAGNVLARAVLIEAAWAYRTPAKIGAQMMLRQEGIPQAAKDIGWKAQVRLCGRYRRLMARGKKSPLATTAVARELVGFIWAIAHTTEPSGAKGAA

SEQ ID NO: 44744 - protein, 368 aa, unidentified
MNSDTIWAGLDLGLRETHVCLTDETGATIHEETCETSAPAIAAAVSLVGKERIGLIAAEAGSETYVIRKLKEDGLPMAIFEARKASKFLALRRNKTDASDARGLADLARLGRQTVSRVHLKSLQCERLRTQLVMRHKLVRIRVSTENAIRGRLAFYGLSLKRQSSADLLRERVTSELARLRTSEDIDLEDDLTPLLDVCEILRKYVRALDRRLEKAAKSHPVCRRLMDVPGVGPICSLSFYSAIEDPDRFKRASDVAAYLGLVPRRYQSGGVSYTRGITKTGSTMTRAHLVNSATVFSSRGPKSALKEWSATLRERIGPRRAKVAVARNLAIVLLAMWKTGGEFEPYPAVRKPGDLRPLSPPLGREVP

SEQ ID NO: 44745 - protein, 389 aa, unidentified
MLLDHPADGPTAIRTHIGAIFVSLELSRSNWLVTSLSPGKGEKMSKHSVTAGRVAELLTLFAELKRKAMVRTGQSYPIITIQEAGLDGFWLHRVLQQEGIESHVVDPASIAMPRRRRRAKTDKLDGEALLRALLAYKRGEPRVCAMVVAPSPDEEDRRRLCRERATLIEERIRHVNRIKGLLFSQGICDYAPLRRDRRARLAALRTGDGRELPSHLRAQIGRELDRIELLLGQIKAVEAERDALLAAARKPASKGAMPDPVTTLLALKGLGANFTAALWSEAFYRQFANRRQVAAYAGLAATPWQSGGVRHEQGVSKAGNPRLRTTMIQLAWLWIRHQPQSALTRWFKERSPQGRKRAIVALARKLLVALWKYVAHGVVIEGAVMKPAA

SEQ ID NO: 44746 - protein, 379 aa, unidentified
MDYITVYVGMDVHKETFSICCYTNEKEIPEYEQKVTAHYSKILNYIDAMRKHYGDDAKFICGYEAGCLGFTLYHDLIKHNVDCVILAPSTMPKVAGKKNIKTDKRDAALIARCLAHRDYSAVHIPTAQDEQVKEFIRMRDDHKLMLKKTKQQILSFCLRHNFRYEATKNHWTQAHLKWLRALKPDELYKEILDEYLITFSNLVDKINRLDQRIEELASKPEYNENVNKLCCFLGIKTITALSVIVETGDFRRFESAEKYASYLGLVPGENSSGDSQCRLGITKAGNSHLRRLLVEAAQSYSRGQVGYKSKLLSARQQGNAPAVIAYADKANERLRRKYYRLVLACNKRANVAKTALARELACFIWGMMTNNFEGGTVSA

SEQ ID NO: 44747 - protein, 363 aa, unidentified
MFESTAVTIGLDVHASSIRLAAIRGDELLDERTLPYDLEAVERSLRRWPEVRCCYEAGPTGFDLYRHLVERGIACEVVAPGLVPQRPGDRVKTDGRDARKLARLHAGGLLEPIYVPTPELEAARDLVRAREDARLDRMRDRHRLSKFCLRHGRRLPGVSWSVVRRKWLGEQRFGFAAEQQTFDCYLHTVDLVDRRIEALERSIRATAEQGPWRELVGRLRCLRGIDTLTALALATEIGDFGRFQRAEELMAFVGLVPSEHSSGEQRRQGSITKVGNSHVRRLLVEAAWHARRRPKVGYDVARRQRGQDALVVERAWRCQQRLHSRWQRMAARGKPPQKIVVACARELTGFVWAIATEQLLRNS

SEQ ID NO: 44748 - protein, 363 aa, unidentified
MAGIRTAGVDWASEAHEVCVSEDGRVAARFSVTHDERGIERLVGRLAAHRVDRVAIERPDGILVERLLAAGLEVLAIHPNQMKAARPRYAVAHGKSDRFDAFVLAELARTDAHRFRALVPDSDETKALRALTRAREDMVEARVALANQLRAQLEAFWPGALIFGRVDSRISLAFIARYPTPADARGLGTKRMAGFLERHGYSGRTDPAVLVERMQAAPAGTAGAAESEARRSVILGLVAGLGSLLAEIGDCRGRYPTEAALAADAGMSPVALESGKLRVATFRRACDKRLRKAVTVLADSTRHWHPWAKDVYQRARDRGQDHPHATRTLGRAWIRVLWRCWQDGVPYDPAQHGSLGSLRTTGG

SEQ ID NO: 44749 - protein, 343 aa, unidentified
MGIVGITGGVDTHADNHVAAVIDHNGGLLGVESFPADRAGYEELLGWLVGFGEVEQVGVEGTGSWGVGLARFLGDQEVVVVEVDRPNRQQRRKVGKSDPTDAVSAARAALSGEASVIPKTRNGPVEQMRVLMVARRSARQQRIQSLNQLRHLVFTAPEEIRVRFKDRYKTGLVTEAANMRPRKGSDPIIYTTNLMIRNLAKRVKRLNTEMADIDRMLTGLLEQTVPGLFELHGLGTDNAASLLVAAGDNPDRLSSEGSWAHLCGVTPLPASSGKVTRHRLNRGGDRQANAALYRIVLTRMSSDPQTRRYVIRRRDEGLNTAEIMRCLKRYVARQTYKHLTQTT

SEQ ID NO: 44750 - protein, 338 aa, unidentified
MRYVGLDVHWRQSTFCVLDSRGKKLSIQTIHGSWSKVLEVLGKTRKPFSVCFEASLGYGFLFERLATVARHVVVAHPGQLRLIFRSTRKNDRVDAEKLAKLLFLDEVPPVHVPSCEVRSWRSMIQHRRKLVGEQTRAKNGIRSLLRSQGIQAPRGLWTRRGLAWLASVQLATELDELQRDIMRERLESVASMIKRVEQVLNRKTEAHPGVQLLRTIPGVGPRTGEAVVAYIDEPGRFHSNKAIGCYFGLIPKQDASGRSNRLGHITREGPSVVRSLLVEAAWQGIRRCPRIRKVYERIMRGDKERKKIALVATAHYLIRAMLAMLQTGEVWRESAEAA

SEQ ID NO: 44751 - protein, 356 aa, unidentified
MLYLGIDQHARQITISLRDAAGDVVQAQQVSTQPEKITAFFQQLTRERLRKDESFVAVLEVCGFNDWLIRLLHDYRCHKVILIQPDDRKRCKTDRRDAASLSELLWVNRDRLLEGKPVRGVRQVDIASGSDQENRRLTTLRKEAGGARTRLVNKIKHLLRRHNLQWAMPTKTFPTGAAIAWLKGLVLPEIDRLEMDHLLTDLDQVEKRLKELERVIARRAGANKEVAILASMPGVGSGFTAISLACRIGRIERFPRACSLANYWGLTPGCRNSGENNQRLGSITKAGSSTARWLLAQVVYKVLRRDAQLREWFKRIKRRRGSTIARVAVMRKLATIIWHMLSQKMTYAECRARVAA

SEQ ID NO: 44752 - protein, 344 aa, unidentified
MQTMYYIGLDVHKRTISYCVKDASGHVYAEGSLPATRFDLDRWMKALPQPWTAAMEATVFTGWIYDHLQPHAAALKVAHPLMLRAIAAAKKKNDRIDASKICDCLRCDFLPECYMASTAIRERRRTLRYRNLLVRQMVQMKNKISGLLMEAGVSYNKRRLHRAGYFRELLATNSGIDEGLCSLLRLCRETVVRLQKTESAMVLSLERDSLLMDRVERLMTIPAVGPITALTWALEVGDAQRFSSIKKAISYCGLCGAEKSSANTVQRTPLSKQRNKHLQTTLIEAAKMAPRYSPNLAMLYDKEKQKGNANRATLAVARKLVAYLMAIDRGQRNFQAVETNCIAA

SEQ ID NO: 44753 - protein, 341 aa, unidentified
MSIITVGIDLAKNVFAVHGVDDNGKAVLVKPKVSRDKLLELVVQLPPCVIGMEACSGAHHWARQFRQYGHTVKLMAPKFVTPYRMSGKRGKNDAADAAAICEAVTRPNMRFVPIKEEHQQIILCLHRTRQGFVEERTATYNRLRGLISEFGIVLPQKVTCLRRDIGAHLEDLPGYANQCIGDLLAHADALDARIAEYDRIIAKAARDDARSKRLMERPGIGPVSASALLASIGGGHDFKNGRQVAAWMGLTPGQYSSGGKARLGRITKAGDPYLRSLLVMGARAVLAGLGDKQDGFSRWARSLQERRGYWKAVIAIAAKNARLAWAVLKYGEEFRLNPNAA

SEQ ID NO: 44754 - protein, 339 aa, unidentified
MTMIGIDPHKATHTAVAIDDDEGVIDLVTLSACPGQADRLVAWADGFTDRVWAIEAANGLGRLVARQLVARGETVVDVPPVLASRVRLMGSGRSQKNDPNDARSVAVAALRSDHLARVTADDAVTVMRVLVKRHRDLAQSKAKAANRLHALLIELVPGGIVGKINVRNASSLLDDITRLDEPTRIRVLVAREIIADISRLDEASKASKRRIAEAVAVAGTTLTDIGGIGPIGAATIIGYTADITRFPTKGHYATYNGTAPIEASSGARTRHRLNPRGNRIINHAIHIAAVTQLRHDTNGRTYYQRKLAEGKTSKEAIRALKRRISDAVYRQLTIDATNS

SEQ ID NO: 44755 - protein, 468 aa, unidentified
MKKLDPQHSNSNRQAQQTTLDEDTEGLPVIRPLVAGIDLGSEQHWVCAPRRDGAGREATVFGATTPELEKMALWLKERKVESVAMEGTGVYWIAPHEVLERNGLEVALVNTRELARVPGRQKTDRVDARWIQRLHSCGLLRGSFRPVEQVCILRTYVRDRSILVAETADWMRRMQKSLDQMNVRVHRAVSDLDGMTGMAILRAIVGGERDAMKLAQLRDRRCRKSEEEIAEQLTGHWREDHLFSLEQALKVYDGLRERIADYDRKILEKVGEMTREERRGLQAPELKNKEKARCIQRRGEEPLRQALYRMSGVDLTAIDAIGVGAVEVVLSEYGPDLSRFPTEDEFVSHVNLAPRKPVTGGKPMKKKKRGSASTRTAGALRMAAVSMRNSKTALGAYYRQVARRIGGDVAVFATARKLAQLIYRLLRWGQPYVDEGAESFEKRYTEQRLQRLKASANNLGYELTPKTA

SEQ ID NO: 44756 - protein, 349 aa, unidentified
MRYIGVDQHKRFSYIAVMDERGRVVKEGKVVNEREALKKFLSSCKDGKAEGVLEAGPNWTYMYDWLEGEIEGVKLAHPLKVKAIADAKIKTDKIDAKVLAHLLRADLIPEAYVPKGETRKVKNILRQRMFFIRMQTMVKNKIQAALDRHPEVSSEFLGTDLFGKQGMEYLAHIKLPYPDRYIISDSIKFLLVLREHIRRTDRIVEKLSKGDRRVKRLETVPGIGKFFSVLIATEIDDIGRFSDARKLCSYAGLVPSIYSSGNKVFHGGITRSGNKFLRWAMIEAVWPAIKKDSSLRYYYHKIKEKKGANVAKVAVARRLLTIIYYVLKEDRDYRINYPAAPYVPIVKAV

SEQ ID NO: 44757 - protein, 341 aa, unidentified
MKQFIRIGVDLAKNYFQVHALAHEGGSAVTRKLKRSKMHEFFAQIEPCLIGMEACGSAHYWARELKTMGHEVLLMPPAYTKPYVKRGKNDAVDAEAICEAVSRPGMRFVPIKDAEQQATLMLHKTRELLIKQQTMSVNALRGHLSEFGIVVAKGIGRVDELLELAESDTTLPEAAKAAVAVLAQHLEGLDKSIDDLEKQIGRAHARSEMSRLLDKVPGVGKILASVIAASVPDPSVFKSGRDFAAWLGLTPRQNSSGGKQTLGGITKQGNRYIRKQLVLGATSLLNVVNKRKGALRDWIVALLAKKPARVVTVALANKLARILWAMMKTGEFFRAEMFAKA

SEQ ID NO: 44758 - protein, 354 aa, unidentified
MNKIKQLSFEGKVIYCGLDVHKTNWKINARMEGIEMAAFSQNPDPLLLKNYVDKNYPGAELKVVYEAGFCGFEIQRSLKSLGIECIVVNPADVPSSDKDRKRKDDKRDARKLSIELAKGNLKGIYIPDKQMQDARSLVRQRHRLVQDQTRCANRIKHLLLSNGITTGEKSERWSLRFIKKLQQLDCGSISLKASLQFAIEQYLQTRRIVKEITLAIRDLAKQEPFKKVQAILGSIDGIGLINGMVIQTEIGDIHRFKRLDSLCDYAGFVPDIYSTNDRMVIRGISKRGNEFLRETIIESSWVLIRKDPAMLMKYNEYRSRMSANKAIVRIAKHLLSRIRFLWKNEQTYVRGIIG

SEQ ID NO: 44759 - protein, 333 aa, unidentified
MNKQFYVGVDVSQETLDVAARTASAEPRTAQFANTSGGHRHLIKWLTKGGRCARVVLESTGVYSLDLAMALDAAKRIEVMVVNPRAARKFADACLQRSSTDTTMAVALQEYAARMEFVAWTPPPAAVRELRAIARRIAALTLEKTRELNRRHAAGASADTPAVVINDVAVNVGHLERRIAELERHAVALITADSHLQPVYQHLLSVCGIGETTAIQLLGELLVLPADMTARQWAAHSGLDVRHVNSGTSVHKVPRISKQGNAHLRRILYMPALVAIRHEPHVRAFYDQLLAAGKKPLQAVVAVMRKLLHAIWGMLHSNTDFDGSKFRKLPEAA

SEQ ID NO: 44760 - protein, 421 aa, unidentified
MPNIEIGVDFMVKENFIYVGIDLHKETHTAVMIDCYNQKLGEITFPNRPADFPKLVTKVKKCNTDAKEVVYGLENAYGYGRPLAVWLIDKGYFVKDVNTAISHRQAKHRGAMYRKSDSDDAGAIALATLNMLDKLPDACPNDAYWSLGQLVHRRDNIMKQRTRLVNQLHEQLCIAYPSYKQFFNDISRPTALYFWEHYPSRKYLKGKSVEDLRAELVPVSHNKCSTRTCEKILDAIAGDKVKNNAYQDARDMVTLSIVSDLQHYDKQLAEVDKMLEQMYKMLGCTLTTIPGVNVITAVKILAEIGDIKRFSNANKLAQFAGIAPLHLSSSGKGKDVATKQGNRRLQATIYFLAIQMVQLSSKGTPRNLVVRAYYEKRKVEGKTSQQALICISRRLISIIYGMLKNGTEYRMPVVENAGENR

SEQ ID NO: 44761 - protein, 416 aa, unidentified
MEIYPNTRAIQRYIALDIHREYVLAGGMNASQEWVLSPHKIEMGKFREWARKNLSGTDAVVIETTTNVWDIYDIVQPLVGHAVVAHAGAVRQIAEARVKTDREDVKRLIRLLIAGIVPEVWVPPQHVRELRGLVAYRQQLVKTGSMIRNRLHSLLHRHNLCLPEEGLADREWWTQQEKISALEKLQIRQELSMLQQIETHKAEVDHELGRQSLGETWGKAAVRLMQLPGMGIVVAMTVLSAIGDTHRFESADKLVGYSGLGAGVHDSGKEHIEKRITKSGRKELRWAMVEAAWRAVRMSPYWKEQYEKFLKRMRRPNQAIVVVARKLLVAVWHVLSKDETDEHATEEDLAYKMLLWSWSLSEEARQGLTHKQFAKYALMRLGVQTDLTRFVRGKVPRRIASREEVLVRMAELGLNG

SEQ ID NO: 44762 - protein, 323 aa, unidentified
MGTISTIGLDLAKNVFQVHGIDSLGNILVRRRLRRGEVLRFFETLPPCLVGMEACGTSHYWARSIAAFGHTVRMMPPVYVKPYVKRGKTDAADAEAICEAVTRPTMRFVPVKSPAQQAALLQHKTRDLLVRQRTMQVNALRGHLAEFGIISAAGVAGLNQMMTLLHAEQEMLPEPARKLFQEIVAHLRALEQRIDDIEKQIVAEHRASSVSRRLAGIPGIGPITASAIVAAVPDASTFRSGRQFAAWLGLTPKSHSSGGKERQVGISKQGDSYLRRLLVLGATAVIRLARKENASRQWAAKLLEKKAARVVSVALANKTARIV

SEQ ID NO: 44763 - protein, 347 aa, unidentified
MRFYNRQHRHYCGIDLHVKTMYVCILDSAGQVLVHRNVPSTPAALLETVAPYRDDLVVAAECMFTWYWLADLCAAEGIAFVLGHALAMKAIHGGKAKSDKLVSHKSAVLLRGGLLPQAYVYPATMRSTRDLLRRRLHLVRKRGQLLAHIQNTRHQYQLPAFERRIAYPANRDGLSERFPDPSVRKSIEVDVALLDQYDALISDLELTLVRDAKRHNADAFHRLRSVPGIGKILALTILYEIHDITRFDRVQEFASYARLVKGQKQSGGKMLGTSGAKMGNVHLKWAFSEAAVLFLCRNAEGKRLLAQIQKKHGKGKALSILAHKIGRAVYYMLARGTVFSMEKFLHA

SEQ ID NO: 44764 - protein, 293 aa, unidentified
MRNAVGLDISKLTFDATAIVGNAEYSAKFDNDSKGLNQFSDRLKSLGCQNLHICMEATGNYYEEVADYFAQYYSVYVVNPLKISKYAESRFKRTKTDKQDAKLIAQYCRSAQESELVKRQKPTDEQYRLSRMIAAYAQIKSECAAMKNRHHAAKDEEAAKAYAEIIKAMNEQLEVLKEKIKEQTEKPNCKEGVKRLETIPAIGRMTAAVLFHHLTSSKFETSNKFAAFAGLSPQQKESGTSVRGKGKLTKFGNRKLRAVLFMPAMVAYRIRAFPDFIKRLEEKKKPKKSSSQH

SEQ ID NO: 44765 - protein, 353 aa, unidentified
MDNRKYIGMDVHQASISIAVSDAAGKVLMECIIETKAATVLEFIQGLRGSLWVTFEEGTSAAWLYDLLKPHVTKVVVCDPRKNALLKAGNKNDRVDARKLGELLRAELLTPVYHGESGVRTLRELSRGYLAVSKDLTRVMNRLKAIYRSWAIPCAGQQVYSPRHRAAWLEKLREAGVRRRAEQTYQQLDFLMEIRKETRKELLAESRKHPARKLLEQIPRLGPIRVALLIALLQTPHRFRTKRQLWNYCGLGLRTRSSGEYRYTGGQLQHARKPPALRGLNVNHNHDLKHLFKSAATQAGNDPLGAFYQNLLAGGMEPPMARLTLARKIAAIALKVWKKGERFDPAKLKQQAA

SEQ ID NO: 44766 - protein, 410 aa, unidentified
MEVLHPRCCGLDVHKATVVACVRRVIDGEAVKETRTFATTTAGLLALSDWLTETKCTHVVMEATGVYWKPVWHILSDGDLELVLANAAHIKNVPGRKSDAKDADWASDLLAHGLIRPSFVPDGPTQEMRTLLRTRKQIVREKSSHILRIQKTLEDANIKLDSVITDIMGVSGRKMIEALIAGEKDPARLARLADPRVKASQETLREALLGRVTKSHRFLLRLHLGQIDAIDAAVAEIDQEVEASIAPFRTAVEQVSTVPGVKSLAAQTILSEIGIDMSRFPSSGHLISWACICPRSDESAGKRRSTRIRKGSPWLKTTLVQCAWAATRTKGSYLQAQFYRIRARRGPKKAIVAVAASILTAIYHMLKDGTFYQDLGPNHFDPRTKERQKNRLIKRLADLGYAVELVPQAS

SEQ ID NO: 44767 - protein, 342 aa, unidentified
MQITTIGLDIAKNVFQVHGIDAKEKVVARKQLRRSQMIRFFKALPPCLIGMEACATAHYWARELTKLGHEVRLMPAKDVKAYVKRHKNDAADAEAICEAVRRPTMRFVRIKSAEQQGQLMQHRTRDVLIRQRTQIINALRAHLAELGLVAAQGNAGVNELRAIVTDEQDTRLPIDARASVIVLAAQLEALESVIGAIEKRIKMQHRSSEASQRVEAIPGIGVIGATAIVATVTDPTIFRSGRDFAAWIGLVPRQDSTGGKQKLGPISKQGDRYLRRILVVGAIAVLRRAQENPGKYPWLTQLLVRRPFKVVAVALANKMARMAWALLAHGGTYRAPELAETA

SEQ ID NO: 44768 - protein, 416 aa, unidentified
MNPSPQAIPFERYLAIDAHKRYVMVGGLNAQQEPILLARKIGVDDYPKWAKANLKPGDAVVIEATTNTWNLYDATAPLVGKVVVAHPFEVKQIANARVKTDKLDVYRLARLLAADLVPEVWVPPIEVRELRTLIAHRRKLVKLRTMTKNRLHSLVHRNNLVPPEGGPFADKNRSWWEGLSLSSVEKLRIRQDLALLDHLEPQISEVDQELARLSTLSPWEAYTPYLLQLPGFGLINTMTTLSAIGDITRFPHAKKLVGYAGLGSSVHDSGQTHRSGHITKQGRRELRWALVEAAWVAVDTHPHWKEQFQKLTRRMKSNKAIVAIARKLLVVIWHVMTERVADRKADPDMVAFKLMTWSWKLNDFQRGGLTARQFVRYCLMQLQLGENLTHVRRAGQRPIASVEEVLALRPNLRSSV

SEQ ID NO: 44769 - protein, 452 aa, unidentified
MRLLNNKQGLRRSQFAKELKGADLEKVLLVPIDVSKTLQKSMILNYFGEVIEFPFSFMVNRTGMKLLIEKIENARNTLQADRVFVGIEATGHYYEDIVRILIDAGYSVHIINPVSTHEERKQHLTYTKTDDIDLYLIAEALIGGKATNAKLSKGVYKQLQNLTRARRSEINKRSRIKVEIRTIHDQIWREYQGFSILENNKVKTRKIFSDFWGKASLYLLNHFPHASQILELGELGLHRLSKEHNLKIRKSTIDKLLYAASESVSKPIEQLSSELFLLKQKLKDYERHTQTIKSYELEIERIFVETDGLLLLTAPGIGLITAAEIYCEMGDLSQFTSASQLIKKAGTNPVIKQSGPEEGYYGRISKQGNANLRRAIYNAGRTLSVHNEVLKPFYTRLKEKGKSAGKIYIAMGNKFIKIAFAMLKNQKPFECNDPSFNYKQEISKKLTLPLSA

SEQ ID NO: 44770 - protein, 351 aa, unidentified
MVVVGADVHKRTHTFVAVDPVGKQIGQLTVPATTKGHGKALGWARVEFGDELTWAIEDCRHLSARLERDLLTAGQSVVRVPPKMMAMTRASARTRGKSDPIDALSVARAFLREPGLPVASHDEVSRELKLLVDRRETLVGQRTATSNSLLWRIHELDPERAPKPRSLHLAKHQETLREWLRTQTGIVAELALDELADIVTLTRRANELARRIDSLVDVVAPTLLAMPGCGPLTAAKLVGESAGVTRFADDAKFARHAGVAPIPVWSGNTAGRVRMTRSGNRQLNAALHRIAVTQIRLQGSLGKTYYEKKKAEGMSTPEALRCLKRRIARTVFHRLTTDHQARAGTCLPAAA

SEQ ID NO: 44771 - protein, 345 aa, unidentified
MLRHQATTSASVREESGRVIARSVLPTDGGAITEFVRGMRGAVHVALEEGTQAQWLRDLLAPLVDRVVVCDRRGAPRQGNKADQVDADQLSEQLRRGGLRAVYHGSADRATLKELTRTYRNLVEDATRVMLRLKALFRARGIPAAGKRVYHPRARAQWLAQLQDPGARLRAETLYAELDVLRHLRPRAKAAMVTEARRDPAWPVLRAIPFFGSVRVALLLATMQTPWRFRTKRNLWAYAGLAVVTRSSADYAVVAGETVRRRRPPMTRGLNRNHNRVLKDVFKGAATAATARPGPLQDFYHSVIARGTREELARLTLTRKLAALTLRLWKKGERYDPTKLTTPAR

SEQ ID NO: 44772 - protein, 457 aa, unidentified
MSQRSQKKKSRKFQVTQLPAQLQHINLNAAGIDIGSERHLVAVPAGRDDVSVREFGTFTADLEALADWLKKCGVTSVAMESTGVYWIPVFEVLERRGFEVKLVDARHVKNVSGRKSDVLDCQWLQQLHTYGLLAGAFRPPDEVCVLRSYLRQKEMLTQAASMHIQHMQKALQQMNLLLHNVVSDITGVTGMKIIKAILAGERDPKVLARNRHGLCKNSPSTIAKSLIGNYREEHLFALRQAVELYEMYQAKIADCEQAIIKQLEKQPNVSDDEPPAADKETQARSRMRAHVDVQELLYKKTGIDLFAIPGLAADTLLTLASEVGFDMSPWKTEKHFASWLGLCPGTRRSGGKVLNSKTKRNPNRATQAFRMAASSLSRSKTALGAFFRRLKMRTGGPQAITATAHKIARIYYAMLTKRTSYIELGQQAYEQRYQQRRINSLKNQAKLLGFQLVPYTT

SEQ ID NO: 44773 - protein, 387 aa, unidentified
MESIDCTYRSQTSIPTEATTVFVSLELSRARWLVTSLSPNTSKISRHFVPGGDTAKLLRLLSELRAKAERHVNAAVKITCIQEIGFDGFWIHRVLAANGIESHVVEAASIAVPRRHRRAKTDTIDGELLLRTLTAFKRGEPRVCAMVVVPTPEEEDRRRLSRERKTMVKERIEHINRIKGLMACQGIVGFEPRRAKARERLDELRTGDGRPIPGRMKAEIRRELERLELLRKQIAEIEAERDALLSPVEAAKPSPGAQLLKLRGIGPEFASVLWQEGLYRRFANRRELAAYAGLAPSPWRSGDLSKEQGISKSGNARLRTTMIEAAWLWLRHQPKSALSLWFKNRVKADRGRHRRVAIVALARKLLIAFWRFATDGEIPEGAELKIA

SEQ ID NO: 44774 - protein, 337 aa, unidentified
MNLKRIGLDTSKAVFTVHGVGQDERTALRCNLKRGGLEDFFAKLPPTVVALEACGGSHHWGRRLTALGHEVRLIPPQYVKPFVKRGKNDRNDAEAISEAAARPEMTVVAVKSAEQQAGAMILSVRELLVGQRTQLVNAIRGQAAEFGVVAAKGVSNIGRLLEKIAGDTEIPQAARDMLALLGARVTELDSQINQVELQMMQQHKANPVSRMLDAVPSIGPIVALTCALTVDASQYKSARHFAASLGVTPKERSTAGRQRLGSISKQGNERLRRLLVTGAMAVIKYARPGSKTASPWLLKLLERKPRKVAAVALANKTARIIWAIMSSGEAYRRQPAG

SEQ ID NO: 44775 - protein, 355 aa, unidentified
MTSTKYIGMDVHKESISIAVMNAAGKIVMECVIETKANSILQCIDGLRGDLHVTFEEGTSAAWLYDLLKPHVTELIVCDPRKNKSMREGSQNDKIDARRLAELLRVDHLTPVYHGEHGLRTLKELVRSYLTITKDLARVKSRVKAIYRSWAIPCTGKQVYARCHRGEWLGKINEPGVRRRAEFYYQQLDALRVLRQEARRDLLAESKKQKAWKRLCEIPSIGPIRSAVLLGILQTPHRFRSKRPLWNYGGLAIETHSSADHRRVDEQLQRSRKNVLVRGLNRNCNHDLKNLFKGAAAVASSKPGPFQEFYTALVAKGMRPEMARLTLARKIATIVLIVWKKGVCFDANHLKPQTA

SEQ ID NO: 44776 - protein, 388 aa, unidentified
MIYLGIDVAKLNHFASAISSDGEILIEPFKFTNDLDGFQLLSSKLYHLDRDSLIIGLESTAHYGDNLIRYLVTENYKVCVLNPIKTSSMRKNNIRKTKTDKVDTYIICKTLMMQDTLRFISFFDLDLMELKDLGRFRQKTIKQRTRLKIQLTAYLDKVFPELQYFFKSGLHQKSVYALLKEAPTPQAIASMHMTHLAHLLKVSSHGHFDKNDAQQLRVLAQKSVGVSDSALSIQVTHSIAQIELLDSQLDRVEAKMTDIMKFNDSVIMSIPGIGFVNGGMILGEIGDIHRFSNPSKLLAYAGLDPSVYQSGNFQAKRTRMSKRGSKTLRYALVNAAHNVVKNNATFKAYYDAKMAEGRSHYNALGHCAGKLVRIIFKMLTDNVEFNLD

SEQ ID NO: 44777 - protein, 362 aa, unidentified
MVRVPSIGIRRTAMEHYAGIDVSLELSSVCVVDAKGKIVKEAKVASDPEALVLFFTGLGFIVERIGIEAGPLSQWLHAGLAKTGFETVLLETRHVKAALSAMTVKTDRKDARGIAQLIRMGWFRPVHCKSTGSQEVRALLVARKLLLGKLLDVEFSIRGILRGFGLKMGVVTRNGFDARVRELCAGQAMLEQIARSMLAARCALQTEYTKLHKAMLSIVRGDAICRRLMTTPGVGPVVAITFKTALDDPTRIAKSKAVGALFGLTPKKYQSGETDVTGGITRVGDESVRAALYEAANVLLSRVTRFSALKRRGMDVAKWRGMKRAKVALARKLGVILHRMWIDGTSFRWTKVAGGDEQLARA

SEQ ID NO: 44778 - protein, 343 aa, unidentified
MQTITTIGLDIAKSVFQVHGVDAEGNVVFRRQLKRRYVLPFFQKLPPCLVGIEACATSHYWSRELQALGHKVRLMPPAYVKPYVKRHKNDATDAEAICEAVGRPNMRFVETKTPEQQGCLTLHRTRHLFIRQQTSVINAIRAHLAEFGIVAPVGRRGVDQLLAVVADTRDKRMPEVTRSCVAALSAQLQMLKAQILEFDRMIRAWHRSSETSKRLDAIPGVGPALATALVASVADPKAFRSGRDFSAWIGLVPKQSSSGGKDKLGSISKQGDRYLRSLFTAGALAVIRYAKIHGTRHRPWLTALLARRPTKVAAIALANKLARMAWAMMARGEQYREPAALAA

SEQ ID NO: 44779 - protein, 347 aa, unidentified
MAHIGVDLHQNSFTVCRLAADGSETFETWQLCAADLDRFCLSLDADDEIAVEATGNSAWFRDQVISCVGRVVTVNPRQFQVIRKSVKKTDHNDSRALAFFLSKDMLPETRPKTQAESELASITHTRDLLVKQRTRLLNKIHALHNRHGIKLKKESLSSKRRLMALDIGRFSTLERIELTVVRDQALSLSGSIAELDREIERAAGAMDGYDSLVSIKGIGPRSAAVFLAGIGDVNDFESADKLAAYLGIVPRVNRSNETDNPGRITKRGNKLVRTTLVQCTLIAIRYSGYLNAYYRRVKERRGAGKAIIATARKLLSIIYETLKNRWIFEDFTTFTRQRGPVPAGQPS

SEQ ID NO: 44780 - protein, 320 aa, unidentified
MTILTSPTVIGVDVAKAEIVVYREDLEITQVINNDRTSVGRWLKTLPAQSSIALEATNLYHLDTAELAHGMGHRVYVVDPYRVSHYRESIGQRAKTDPCDARLLARYLTSEQHRLRVWSPPPRHYTVLKSLLNKRAQLMKARVSIMLSWSNEPLLEDLLAHGLEHFKQLDQAIQELLRKVSQEAGISENIRRCKAIEGIGELTATGLATTYMRGEFASADAFIAFLGLDLKAKDSGKKHSPRHLSKKGDGELRRLAHNAAMAACRSPVWKPFYESYLARGLARTQALVILARKLCRVAFALMKNQSEYQPNLRLQGSPAT

SEQ ID NO: 44781 - protein, 322 aa, unidentified
MRLFVGLDVSLAKTAICVISEHGKITKDAQVASEPEELVRWIGDQEGVIAAIGLEAGPLSQWLHRGLAAAGREVVLMETRQVKGALKAMPIKTDRRDAEGIARLLHLGWFRPVHCKSVSAQEVRAVLGARKAVQQSMIALELSLRGLLRNFGLKVGAISRGRFEPRIRKLAFGNPMLEAATEPMLRARACLRQELAGLERRVRQLAQEDPVCRRLMSMPGVGAVVALTFRSAVDDPTRFTSSKKVGPWVGLTPSRNQSGERDVSGGITKAGDVTLRRALCQAATVMMHRGRSTWLRTWAAQVARRRGAKRAMVALARRIAVI

SEQ ID NO: 44782 - protein, 409 aa, unidentified
MRYYVGVDWADQAHAVWVVDEIGTKVTGRTVPHTAEGLNEWGRELDQWRAQGIALWAAIECPDGRVVDCLLDHDVVVYPVNPKALDRARDRFRQSGAKSDPFDARVLADFLRTDHAHLRALQPSSDAARELKLLTEDCQRQIRQQTRLLNQLTTTLKAYYPRALQVAEVSTALARAFLQTYPTPAATAVLTERQWTRWARTHRVSAARTRELWDILQQPQLPVPAHVVRAKARLMLTLVAQLTPVIVAVDDYREAIEHFFASIPAAQWVRTLPIGKHGIMAPTLWARLGDAPSRWESFRHLQAQAGAVPVTKRSGTQRVVHFRFACDKSLRYVVDHVAFLSLHSSEWARAYYDQQRTRGHSHRQALRALGAKWLKIIFVMWHRQIPYDEQYHLATMTRQQLRQRQRQTA

SEQ ID NO: 44783 - protein, 333 aa, unidentified
MEQYIGVDLHKQFFQACSITSTGARAWEMRFPRTEGGLALFCARCGPQTAVAVEACGPTWAFVDAIAPTGTTVCVVDPRKTRLKAGFAAKTDRLDARRLADALRRDSVVSVYVPPPAIRELREVCRGRHQVIRLRTRLAQMIRALLLRSGGPDVPVRRVFSPRGLAWLEEVQLPPDAAASLTRLRHVLTAIHAEAAAAESVVAARAAADPIARALDTMVGIGPVLALTLRAEIGDGLRFPRGAALASYAGLVPRVDASADRYWSGRITREGSPWLRWALVEVAMHAIRRQDPVGRWARQLAIRKGGYKARVALARRLCDDIVQVWRQAGSQDA

SEQ ID NO: 44784 - protein, 414 aa, unidentified
MSVLINKACGLDLHKRFLIATILSRSDEMAQKRFERNDQGILDLKSWIIEKQCDVVACESTSDFWVPIYDTLISHVTVIVGNARDMKAYSHKKTDKIDSEFIAQLALNNMVKPSRVFPKHHREFRSYVRLRHNLVRKRTDIKNQAHAILSSEMFHLSDVLTDIFGKNGKMVLSGICSGKKFDEIVDKLSPNVRKKSEQIKEILEREMSQSAAVRLRTCLNLIQDIDEQISIMETQMFNYVYKHHKHDMDILMSCPGIGELSAATLIAEIGDFNDFSSGDKLASWLGIVPNVYQSADKYYNGRITKRGSKVARWILTQIAQAASRKKASKLKEFFNRKKKTIGYQKAIIALARKIVTIIWHLITNNEMYEDETGYQKGEIQKRKIVETAEISIDERISILSEIFAIVNKKNTDVT

SEQ ID NO: 44785 - protein, 347 aa, unidentified
MEIVGGLDLHRSQITFEVVDLRTGEVRAGKVHGPDRQRWRKWLETSFAAGDDVELVVEGCTGWRFVVEEIQRAGFTARVAEPAQAQAARGNKRRAKTDRSDARLLCRLAMEGRVPDSWIPPTVILEWRERIRSYRTLLDQRTAWAQRLHAELYQHGVAVPEAHIAADDTRALLRSDRVELTAAARERIALAYRMIDATNNELLPLAGRIRAFGRCHPATRALVAAHYGIGPLIAVAVWAELGDCRRFASSDAAVRHSGLDITVHATGNYRSGGHLARQGPSVLRWALYEAAHHASRATSPDHAYYCDVRSRIDAKRAALSVARKLARRCYHTMRQLNDEQLFAEIRT

SEQ ID NO: 44786 - protein, 346 aa, unidentified
MMIIGCDYHPSWQQICWVDTLTGETEEKKLEHASGEAERFYRALPGPAVIGMESTGNCQWFVEMATTAGHEVWIGDAAKIRASEVRQQKHDRRDAALILKLLLEGRFPRIWTPSGEEKDLRQLLIHRHKLVRIRAQVKNELQHLAMNQGVTRKRKLWSKAGEKVLRELPLKPWASRRREDLCKVREMLNGQVELLDRAVVEVAEKNEKARLLMTQPGVGPITSMAFVLTMGDVKRFQRGKQVASYLGLIPREYSSGGHQRLGSISKQGNGFMRMLLVEAAQVAVRCDPQMRSEYLHRCHRKAKGVAKVAAARKLAIRLYWMLRTNRRYPEVVHVESSSRVPLVSVS

SEQ ID NO: 44787 - protein, 376 aa, unidentified
MTRLARIGVDTSKSVFQLHGVDENENVLLRHKLRRTQFLAYFAKLPPTVVGLEACGASHHWARELRKLGHTVMLITPKDVKAYVRRNKNDKVDAEAICEAMSRPRVRERQVPVKSIEQSSTQMLMGVRESLIQRRTQVINSLRGHAAEFGLVAAKGPSKIGDLLARIAQTDEIPQLAKELFGVLSRELDHVGRQIAEIEKKMMSFHRGNELTRRLVEVPTIGPVGACMLAIKIVNPHGFSSGRMCSAWAGLTPKDHSTAGKQRLGGITRAGDEGLRSVLVNGATAYIQQVRRGRIKASPWLSELLKRKPPKLAAVALANKTVRIAWKLMVSGEHYDPGHEQRRRAQEAAGPTAAGVGFAGMQEASMMPAEASHAAR

SEQ ID NO: 44788 - protein, 321 aa, unidentified
MKLVCGIDVSKDTLDVYYNDDKGRTHYTKLSNTASGHRELLEKCGERVYVLETSGPYYLALAFTLKEAGGDVRVENPMVVKRFIQMNLERNKSDKKDARWLFRYGVEREASVWRVPSQAQLKCSQIGALINMYVRQKTMLQNQLHALTYMPFADKEVTKSLKASIARIERELKKLEAQMDAELKQWSGNQMKNLRSVPGLGKRAVATLIVATDGFTKVSNYRQLIALAGLAPREHTSGTSIKGKRGICKMGNGYLRSVLFMCALTAKKYNAACKDLYDRLVAKGKLPYVALIAVCNKLLKQAFAIATKGTVYQADFKSALA

SEQ ID NO: 44789 - protein, 416 aa, unidentified
MQVVHAHCCGLDVHKKSVVACVLLTEPDGSVRRQVRTFGTMTTDLLALDDWLTSHGVTQIAMESTGVYWRPVFNILEDEERTVTLVNAQHLKAVPGHKTDVKDSEWLADLLRHGLVKASFIPPAPIRELRELTRARKTLVQQRADAVNRVHKLLEGANIKLASVASNILGKSGRAMLDALLAGETDLDALADLAQGQLRKKRTALRQALDGRLAAHQGLLLAQLLTQIDFLSEQILQLADAIADRLVPMQAAVDLLKTIPGVSATAAAAILAEIGTDMSRFPSAKHLASWAGVCPGNKQSGGKRLKEQTTSGNVWLKGVLSECAWAARTKETYLAAQFKRLARRRGIYKALIAVAHSLLVIIYHMLQRGEAYRELGGDYFAQIDSRRAEGYHIKRLTALGYQVTLTPLSDAEPIPA

SEQ ID NO: 44790 - protein, 393 aa, unidentified
MRFVGIDIGAETHVVAVVDEAGTVLVPATRFAEDTAGYQRLLDQLGSSGETLVAMEATGHYWKNLFVHLAAHGFDVALLNPLRTARFAGEDLQRTKTDAIDAVGIARFAAQKRPAPSRLPDTATEELRELVRLRDRLRQDFGDRVRQLHRLVDLGFPEFTRYVHDLGSMRATTIMANYPTARAFRSVHPKSLAKLCYDGRHKVGDELARQILEAARHSVGQHHAPAYRIQVRYACEDLDLLRRRLQDLESDIEATLAEHEVGSLLTSIDGIGPQTAARLVAELGDPAQFKSAKALAAYVGVVPGLKHSGKRTPARAGLSPIGHARLRRALWMPTLTAVRKNPWLKAYYDHLRSRGKIPKVALVAAMRKLLIAVYWVAENRQPFVPRPETYATP

SEQ ID NO: 44791 - protein, 341 aa, unidentified
MSIVGGFDVHRRQLTFEYLDTESGELRNGRVAPADRAHLRAWLHRFDGRDDVAFALEGCTGWRYVVEELIRAGVAAHLAEPADTAALRGRKRHAKTDKADARHLRVHLMAGDLPESWIPPEHVLEARAVVRLYKDLLDERGAWHQRIAATLFHLGVPVMASMATAEGRAAIGRVELSPAGRQAVEVGLRQIDRLTVELDELRRQLERFSRHQPGCRALRTGQFGVGPVTSVAIWAELGDVRRFPNSTTVVRHTGLDVTVHSSDTHRAAGHLSRQGPQLLRWALYEAAKCAARATAPDHDYYRASRDRRTAGLATISVARKLARRCYHTLHDLGEEALAPAA

SEQ ID NO: 44792 - protein, 342 aa, unidentified
MQITTIGLDIAKNVFQVHGVDAAEKVVVRKQVRRGQVLAFFEALPPCLIGMEACATAHYWARELTRLGHRVRLMPAKDVKAYVKRNKNDAADAEAICEAVRRPTMRFVQIKSVEQQGRLMLHRARDLLVRQRTQVINALRAHLAELGIVAVQGREGIKELLKIIAHEEDARLPVDAQASLIVLAAELQAMQTMIGSIDKRIMAQHRSSEASRRLESIPGIGVTGAAAITATVPDPKVFRSGRDFAAWIGLVPRQDSTGGKQKLGPISKRGDRYLRRILVVGACAVLRYARQQPQKYPWLTQLLARKPFKVVAVALANKMARIAWALLARGGTYRMPALAAAV

SEQ ID NO: 44793 - protein, 461 aa, unidentified
MKKNTKSSSTIPAPLSLLNPKCAGIDIGASELFVCIAKNSSEQEVRSFSTFTADLKQMIDWLKNNSVKSVSMESTGVYWIVPYEMLEEAGFEVLLVNARFFKSVPGRKTDVQDCQWIQQLHSYGLLRGSFRPSQEIVHLRAYVRQRSRLFELAGTQVQLMHKALTQMNIQLNRAISDITGVSGMNIIRAILRGERDPKTLANLSVNGCRKNIDRIAKALEGNFSKEHMFALQQAHEAYEFFHKQIHQCECAIESALSFMQVESSLHPSNDNGQEAISCYSKKRARKTQAARSPYYFNAPDAIKRITVADLTTIPGIDANTAMKILSEIGTDTSRWASAKAFASWLGLCPGNKISGGKVLSSRTKPSNNRVAQALRLAAASLYRSKTAIGAFFRRMRARLGAPKAITAAAHKLARTLYRMLETGKNYQEAGENYYEQQYQARVIASLTKRAEELGYILMPAK

SEQ ID NO: 44794 - protein, 346 aa, unidentified
MEQVIRIGMDTSKNFFQLHGVDTAERAVLRRKLRRNEVLTFFAEQPPTVIGMEACGAGHYWARELGKLGHEVKLIAPQHVKAYVKRNKNDGRDAEGLCEAMSRPTMQFVAVKSEEQQAALMLIGVRQQLMTRRTQLSNAIRGYAAEFGVITVKGLVKVEPLLAQIARDESLPALAREMFALQGRDYARLQVELKAVEARLMAWHRANTDSCRLAKIPSIGLIGATALVMKAPDPRLFPSGRHFAAWIGLTPKDHSTAGKTRIGKITRAGDEMLRSVLVAGATSVIQQAKKGRGRPSPWLVALLARKPPKLAAVALANKTARIAWKLLTTGESYDGARMPVASKLAA

SEQ ID NO: 44795 - protein, 400 aa, unidentified
MPMLSIGIDVSKGKSTVCGMKPGGEIVYTPFEVQHTREGMSELVSLLRGSGEEVRVVLESTGSYHCPVVAALLENGIFVSVVNSLRMKRFCSQSIRRVKTDQIDAMQIALYGLAYWQELQPTRLPENTYRELQLLARQYYQMTSMLIKAKVDFNALCDQVLPGMQELMSDHAGRHKLSDFVLRYRHTTHILEMGETRFRKDYCKWAEKKGYRNRERMAALIFATAQNGIPVLPNAPSTQIVITEAIRVLHTVEASRDAILTQMQALAKTLPEYSLVREMPCIGDTLAPRLIAEIGDVRRFHSKRALIAYAGIDAPPYQSGKFSANNRHISKRGNRYLRKTGYEVMQSYVMHKPANDPIFTFIEKKRSEGKSGKLAMVAGLNKFLRVYYGKVTELYRSLPQ

SEQ ID NO: 44796 - protein, 428 aa, unidentified
MSERDYNRQAARRQRISRSTLIVGVDIGNAFNAVGFMNRDGNVLGSCSKLYNSREGFEQFVKMIEVLKAKHRLRDVLVGMEPTGHYWRKLAYFAKEHGYEVRFVRTTALKHHRELDESSSAKSDQRDALTLANITREGKYIDTVIEDGVLRQLRTLSKARERLLRYSVSAKNSLHAALDDYFPEVHKIFWSMGSRSLWVILEKCPFPEDVALMKTSILQELIARTSRKRAGSAGKVKALCEAARTSVGIKQIGAADRYRVRMCLEEVKRTVLTLKDMDRQLKCMVKDIPSAPYLMSIPGIGHLSAAVFLGELGDPAHFHNARQIVKYAGYDPQESDSGSWIGRKFISKKGRWLLRKYLFFMSMRVTVLSKYFHEYYHRKLETKNRLGQQPRRKEIICAVAIKLIKVIFALLRDKRSFDDTASAAAATA

SEQ ID NO: 44797 - protein, 316 aa, unidentified
MHTIGVDVSKNELVAAQMTQRGVVEGRWTIPNEPEAIGAWLDALSPRVELGAEATAEYHNELARQCMERAIPFKLLNPIVTKQFTRATVRRRKTDRSDAEVIARCLVNGEGYACTRESFSPSKRLLRTAEKLRRIEVTLRRMEGQMRAFVHGADTKPLLWLARKTKDAAQAIQEQGLLRTDKKQEALLVSIPGIGKTLSATIASEIGSCERFRSGRALVAYAGLDPRVRQSGATLSRNTRITKRGSPYLRRAFFLAAMIGERSDPELKAYYEKKRSEGKRFTEATVANARHIAHRVYAVLMRQTPYVRRELSTAAA

SEQ ID NO: 44798 - protein, 430 aa, unidentified
MKKIRKNCAGIDIGAKKVFTSVEGEQVVSHLTFTEDFYKLRDFLIQHEVESVAMEATGVYWIILYEILEEAGIDVWLVDGRQTKQVPGRKTDVKDCQWICELHSFGLLNRCLVVDSEIKELRTYVRIREGHIESASKHVNQMQKALVMMNIRLKEVLSQIHGVSGMAIIEAILKGERNREKLVNLCHGKILSTKKDLVYKALEGKYTEAGLFALRQAYDAYYFYQNQISECDKKISEVVNRIGNSGSGQEKRKRKPIRHNKPNVDKLDSNLLNLFDNKDATTISGITDYTWLQLTSEVGTDLTRWPTEKHYTSWLGLSPGQHNSGKKNRNARKKGKPRAGQIFKVIAQSLINSKDIAIGAFGRRLRGRKGPAIAIKAMARKLAVIYWRMMVKGIDYVEQGVKMYEKQIAANKLKTFIRLANELKMEVAAH

SEQ ID NO: 44799 - protein, 417 aa, unidentified
MNAEKEIVCGADIHRDFLVATMISRSGLKLQEQFGMDQDGLLAFRSWILDHRCLRVAVESTGNYWYPIFCILEGHVEFILANAFQIRNIECKKTDRLDSERIAIYCLNNLIKPSRIYPKDYRDLRSITRSREALVNARSKLKNQIHQSLAVCCIKLSSVISDSFGKSGRYIIEQLLEGKTIEQIISKIPSKRVSKKADELRKAIRNGLDPVQVLLIKTNLDAIDYLSEKIKLLDAEIAIKVKPFEEDLNIILSMPGIGLTSAATILAEMGDYRDFQNADKLAMYFGIVPSVYQSAGKLRTGKITKRGSKHMRRILVQVAKAISKTKKSSRLKRFFMRVFTRSGKKNVAAIALARKVLCIIYHLLMKREDYQEPEVKKNKPNIPSCVSPLSMMDIDEMIKTISQAGYLVMKGLKEGCG

SEQ ID NO: 44800 - protein, 338 aa, unidentified
MRHYVGLDLHSTNTYIGIIDEEGRRIYKGKRLNYTALILNELEPFQEKVAGVVVESTYNWYWLVDKLIETGYNAHLANPSAIKQYEGLKNSNDYDDAFHLANLLRLGILKEGYIYPKEGRAVRDLLRKRAMLVRHRTAHILSFKSLYNRQTGFTLAAEDIKRIKDSELDELSPLEHVRRSGQVNISVMRFLSAEIEEIEKTVLSSMRLKEQFQKLKTVTGIGDILALTIALETGEINRFAKVGNFTSYCRLVASQRLSNEKKKGEGNRKNGNKYLCWAFIEAAHHAKRYCPYAKKFFQRKSAKSKKVVAFKALAHKLARASYFVMRDRVDYDPQKAFG

SEQ ID NO: 44801 - protein, 360 aa, unidentified
MSMKTKQYRTIIGVDLGDKKHHVCVTDKNGNVLSETTIRNQRESLIKLATQHRGALFAIEVGTHSPWISRLIEDHGCTCLVANSRKLRAIYQNVRKCDELDARMLAKLARVDPDLLSPIRHGCEEAQVNRLTLTCRDGLVRQRANIIGSIRFSLKSLGLRLPNCSTASFAKRCRSEMEGSALLEVVAPSLRVLEELDKQIKEFDRKIAATAKEYYPQTKLLEQIPGVGPLTSLCYVLAIGEPERFKDNRDVAAYLGLVPRRDQSGQSDKQLSISKAGNGDARRLLVQCAQYILGRFGPDCDLRRQGLALAQRGGKAAKNKAIVAIARKLAVLMLVLWKSGNPYKPLLNAKLDTEPQLAGS

SEQ ID NO: 44802 - protein, 366 aa, unidentified
MKFLGIDLHSNCFTCCIIYEDGKRYRHSFSFEQESLNKFYQHLDEDTHVIIEASTNTFKFVELIKDMVKDIYVANTHKVKAVPMEKKKTDKVDAERLAMYLKMQVLGRETLAKPVYVPENTIQNLRSLFSTYKLIGKQIVSTKNRIHALLKQNLFPFTKIYIFGKAHREAIQNLEMDEAMSFQIRLLFKALQQLEGNKEELKKKILTVGSEYINEIDILTSMRGISVFTAIALMADIATVERFPNSKHFTSYLRSAPGVESSNETTRITNTNKSGRKLSVTLISQSLNHFRDSNLKLSRWYDKKAEYINRKGKIRMALCRRVFAELYQMLKKQQYHYFRDEKNHLKKMNEYCKFLEKNNIIIQEVA

SEQ ID NO: 44803 - protein, 337 aa, unidentified
MNTANAIVGIDVSKKTLDVALLVDGKVKRSKTLDNTAPGHRQLLDWLDKAKLAKDALHVCMEATGVYYEAVALALHEAGVRVSVVNPGCVKGFGQGENLRNKNDGVDAALIARYGAAMSPAPWSPPPLEQRQLRAWSSRVQALKDIRQQEQNRLEAHGVTGMKDVANNVTEHIVWLDNEIKRLESGINDHIDRHPDLKRDAALLTSIPGVAAATTAKILGQVGDIRRFDSAKTFAAYLGVTPKQRSSGTSLKGRTMISRVGSTSLRAALYMPSVVALHHNPIVMRFAARLLANGMPKKAVVCAVMHKLAHIIYGVIHTGKPFDPNYLAKGLAIQDGI

SEQ ID NO: 44804 - protein, 340 aa, unidentified
MYYAGLDVSMKRTAVCIVDAAGKRVHEAAVNSTPQAVAAAIKTAGVQIERVGLEAGVSSAWLARGLLSMGLPVIVIDATHAAAALKTGFRNKTDRNDARGIADLMRVNKFRSVWVKSPAAQRARSLLTVREQLRRQSLDARNTIWSILQSEGFQPPKIASPAFEALLGEMLDDPDLGGLLQPLATVAAQIDRQVAELDRIIAARARASVTCRRLMTVPGVGPLVALTFVSGVDQPERFRNARTVGAHFGLTPRRHQSGELDWSGRISRAGDAAVRRALYQAANVLLHHSKRWCALKSWAVRLAKRRGLAKAKVALARKLAVVLHKLWTANEDYRLKAAVA

SEQ ID NO: 44805 - protein, 338 aa, unidentified
MRYVGVDLHKHSITVCVMILVGRKRKIIERRRFRCDQEEEMAEYFASLGEYQLVVEATASYEWFVRLVEPTADRVVLAHPGHLRVIAKSKRKTDKLDAQTLAEFLALDQIPEAWRPTPRVREHRVLVRHRQYLVGRTTSVKNKLRRVLSHYNADLKGLFTQQGRKYLAKIELSESDRFVTNLLCEELDQHSERLKQVNKQLKAFAKQASVAEREARAVLESIPCVGPVTIDVVLAEAGDIRRFGSQRKATAYAGLAPGIRESAGKSKQLHITKEGSHLLRTILVETAWRLVIKTRRWANVYEKLKARCGAKKAIVAVARRVWCVMVSILQSGQKYQPT

SEQ ID NO: 44806 - protein, 391 aa, unidentified
MIYVGIDVAKDKHDCFITNSDGEVLFKAFTITNNLDGFNDLYQKIESVMDDVTKVKVGLEATGHYSYNLLGYLIDKGLPTYVINPLHTNLYRKSLSLRQTKTDKVDARTIASMLMSDVNLKSYSDTSYHNEELKSLTRYRFDKVKERAKLKTSVSRLVCILFPELEKLVPTLHMASVYALLSEFPSAKHVATAHLTRLTNLLSEASKGRYGKDTAITFRDAARASIGSNMPAKSLELKHTIKLIQELDSEIDEIEKEIKIIMDEINSPILSIPGINYRMGAMIIAEIGDFNRFDSPDKILAYAGFSPSTYQSGQLDGAYAHMEKRGSRYLRYALYNATKYVCHWDPTFAAYLAKKRAEGKHYNVAISHAVKKLVRVIYHLEKTKQQYIKAA

SEQ ID NO: 44807 - protein, 438 aa, unidentified
MKQEPEEIPDAEHELVSERVCAIDVAKDSGKVCVRVSSRAGRRVSKVWDVPARSGAVGELAEQLVDEAIEKVTVESTSDYWRIWFYLLEAAGLSVQLVNARDVKNVPGRPKSDKLDAVWLAKLTEKGLLRPSFVPPAPVRELRDYTRLRIDLTRERSRHWQRLEKLLEDALIKVSAVASTLDTLSVRDMLEALIAGERDPRRLAGLARGRMRVKHGALVEALTGRFDDHHAELARMLLDQIDALATQIAILTTRIDELLTAMEPQTRAKEPDTPGGAGTIERLDEIPGIGPGAAQIILAEIGLDMSRFPTAAHLVSWAKLCPRTIQSGAIQRGGKTGKGNPYLKGALGEAAAAAAKTDTFLGERYRRIVKRRGKLKALVAVARSILVIIWNLLNDPTARFHDLGADYHATRINTQRRTRNYVTQLMAMGYRVTLEPAA

SEQ ID NO: 44808 - protein, 407 aa, unidentified
MLFVGDDWAGDHHDVCLQDAQGRVLAARRLPEGVAGITRLHELVAGHLDGDDPSQVVVAIETDRGPWVRALVAAGYRVYAVNPKQAARHREVVAVSGKKDGTFDAATLADMGRTRRHQLREVAAGSDEAEAVKVAARAHQKLVWERTRHALRMRSALREYFPAALEAYGPLTLTGTDTLELLAKAPEPAAAARLTIAQISAALKRARRRDVAGKARQIRAALREQHLGQPEIVTEACAAGVRASAAVIAVLNEQVKVMEARVESFFRRHPDAGVYLSQPGIGVITGARMLGEFGDAPGRYAGAKARRNYAGTSPLTIASGKKKTVHARFIHNDHLVAAMHDQAFGAISASPGARAYYDELRAREIDHTDALRRVANRQAGILHGCLKTGTAYDEHTAWGHRSQPAAA

SEQ ID NO: 44809 - protein, 351 aa, unidentified
MKPEQTAQSKLYIGIDMHKRSWKIHCATDLFSGRSFAMPPKPEVLKTYVDTHFQDYEVSTAYEAGCCGYYAHRSFESFGWRSLVVNPADVHRKGKERFTKTDKIDAQLIARELKDGRLDSIHVPKVEREQLRSLFRRRNDLVKDFRRVKSHIKMQLLYFGLSVPEEFDNDHWSHAFRVWVDTIVFDHPTARETLDSRMRSFRFIDKELRDVSTKLRAYCGKHYKKDYYLLRSIPGIGGIVACGIICELGDLRRFNSIKHLAGYVGLAPGVHQSGDNQRATGITMRAHRLMRSYFIEASWQAIRTDPVMQAYYRKHLGKNVKNIIVKVARKLLSRALAVIKTETPYTIGVIE

SEQ ID NO: 44810 - protein, 487 aa, unidentified
MPFLPTAAQALRERFIGLDLAKRETQLSVLNTAGEEIAVKRFLTRREQFEQLADELNANDTVALEVTTNAFAVVRLLERSGARIILSNPIKTRVIAEAKIKTDKIDARVLAELARVNYLPSVWLPDSDTEALRHFCSDRRSLVDRRTELKNTVHSVLHRNLIPVSHSDLFGTGGQKWLQSVLADKDDEAAVNIPLDPIDRLRVRALLLELERLEQSLKEIEGCIAAFIAARPTLRAQLDHLLSIPGVSLVVGAGLLAAIGNVQRFHSPKRLAAYFGLVPATYQSGDPRRKHGPITKRGRAQARWLAVEAAEHLRKAPGPMRALYTRIYRKRGHNVAVTAVARKLTELVWYLLIRESDYIYQLPRLADEKRARVRFLARRRVGLRTPSAARKIGGRTALYGSGIAGRSFKTKIVRHAAKQAEDLYAAIVGNTRQPKAAKSTEPDSSSFDPTRPRTVDWELLLRQAASDLLDDHSNSSPRKEKQIIKVS

SEQ ID NO: 44811 - protein, 327 aa, unidentified
MSFATLGIDISKDTLDVALYQDDSYRLATFTNEKDGYRRLAKWLKKHKARECRVCIEATGRYGETVAMYLYERDYSVSVVNPARIKAYGASMLKRNKTDREDAKVIAHFCATQNPGVWAPPPPEIQELQALTRRLEALKADRTRELNRKQSGVQSKTVLADIDAHIDFLKNQIAIIEQRIRDLLDQHPDLREQHDLLTSTPGIGDITAARLIAEIPDVNDFQSANQLAAYAGLTPRNHNSGSSVHRRGRLVKTGNKRFRTALFLPALAAMRFNPIVQALVERMQTNGKNRMTIVGAVMRKLVHLAYGVLKHRKPFDPDYLVNVQVSA

SEQ ID NO: 44812 - protein, 417 aa, unidentified
MKLLFIGDDWAEGHHDVVAQDDAGKTLARRRLPEGADGIARFHEMVGSCLGEDAEPDPARVIVVIETDRGPWVKALAAAGYRVYPANPRQAARHKETVANSGKKDDFFDAGCLADMGRTRRHQMRELAADSDVAEAVKIAARAHQKLVWERTRHLLRMRSALREYFPAALEAYADLTLAGKDALELLAKAPNPESAARLTVTQVTAALKRAGRRGDLAQRARDIQAALRAPHLAQPDVIAEAYAASVQAAAAVITALNEQVKIMEAKVSGLFRRHPDAGLYLSQPGIGDITGARILGEFGDAPGRYATAKARKNYAGTSPLTIQSGKKKTVHARYIRNRHLIDALHAQALTALSVSPGARGYYDDLRARETGHDDAMRRVASRLTGILHGCLKTGREYDEATAWSHRAGNPEATEAA

SEQ ID NO: 44813 - protein, 482 aa, unidentified
MATKIKAPPKLTALPLLPQENLYVGVDIGKFRHVAGFLSRTLLVRHERFEGCPTCVFDQSREGFRSFVDRLGEYVPLEQVTVLLEHTGHYHRLLEQYLLDLDITVYRVHVQKRAEGMLKTDKRDALSLANMLYTQLELGAQVADKMQFVRRIEPPTKAAAQLQGVMRHRYELSHMSTQYRNKLTAICDQLFPELVQVFHDPNLPTALAFRLAFPTPHAIALASLNDLRAVRQGHFPSDAQLLELQRLADKTIGVTDLDRQRGLVLEQGLLIKELRLIQQHLEELQTTITDIVQNCREGQILLSIPPIGPVQAATIIAAVGNIANFGKACELKSYFGWAPRKKQTGVTMDRSNLSTRGVRPVKQMLFLVAARAVTLDCEWARIYQRLLPRLCTYDERTRQYRGKKKVLGRIAGQIASMIYALLKTDQETLSQVPAGEAPPPPMLYDRETHRKHQQGSYRSLKPKTLPRKILQLPSSSFSSSSR

SEQ ID NO: 44814 - protein, 409 aa, unidentified
MRYYLGVDWADQTHAVWVVDEHGTKVTTRMVPHTAEGLSEWGRELDEWRAQGAELWAAIERPEGRIVDFLLDHGVVVYPVNPKALDRARDRFRQSAAKSDPFDARVLADFLRTDHRQLHALQPSSDAAQELKLLTDDYQRQVRQQTRLVNQLTTTLKAYYPRGLEVAELTTALARAFLHAYPTPEALTALTERQWQRWARAHRLHEARTRELWAVLQRPQLPVPPHVVRAKARLMQSLVAQLTLAVEVVGAYREAIEDFFAHIPAAQWIRTLPIGDHGITAPTLWARLGDAPGRWESFRHLQAQAGTVPVTIRSGKQQVVRFRFACDKSLRYVIDHVAFLSLRWSEWARAYYAEQRARGHSYHQALRALSAKWLKIIFVMWERQVPYDEQYHLATMTRQQLRQRQKQIA

SEQ ID NO: 44815 - protein, 374 aa, unidentified
MSTMKHVGLDVHVKSIWVAVADDRGVRNVGRIAHDMNVLRRRLERIGEFERLHVVYEAGPTGYGLYRKLSEWGIKCSVVAPSLIPRQSGGLVKTDRIDANKLAHMSYAGLLTEVIVPSEEQEAIRDLVRARSAAKSDHTQIRQELNQFLVRHHITRPKGVGRWTQAAKVWLRSIHLEQPAAQRTLEDYIMEEDRRGDRVSRLEDDLHELSSQLSPQMQYVLRALQGLKGVNFLTAITIVSELGDITRFASAPKLMSYAGVVPREYSSGDRVKKGSITKAGNAHLRRVAVEASWCYARGHLAAGAVVKKRRKGLSKEVLRIVQKADARLRKRFMYLERKGKSRNKVVVAIGRELLGFIWAVAQVAQAEAMQLTPA

SEQ ID NO: 44816 - protein, 354 aa, unidentified
MIIIGCDYHPGFQQIAFVDTETGECGERRLEHREDAEKFYRDLAAQEVKVRVGMEASGHARWFERLLAELQVELWIGDAAEIRTKRVRKQKTDRQDAQLILRLLLENRFPQVWVPNWENRDLRQLLWHRHRMVQARTRIMNQLQAVALNEGLRCKKRLWRDAGREQLEAFRLAPWASRRRHDLLELLDRLTPTIAELTQAIEQEAEKCPAAQRLQTHPGVGALTALAFVLILGRADRFQGGKQIASYLGLVPSEESSGQRRRLGHITKQGNSLLRFLLVEAAQVTVRSDQEWRGRYFHLAMRRGRKIAKVAMARRLAVRLYWMWRKRWDYEQLKKFGSHAGEPGNPDGVQSSTE

SEQ ID NO: 44817 - protein, 446 aa, unidentified
MSRRAYRATRVNDVDWEQVAHGKEDLGVILGVDVGKLDVLVVCRWDDGRFERPWRVKNPEEIATLARLAKRVQTNRKLVVAMESSGTYGDALRQALGDNKIEVQRIGGKAAHDFAEIFDGVPSQHDGKDAAVLAELAALGKGRPWPYEAPDSWEEELTYWVEEMVIQRQIVTLWQGRLEAVVARHWPEAFQVLKLSSGTLLRILKRYGSPQALAADTGAPKQLARWGGALLSAAKIDELLAGARSSVGVRVGPWQQRQIQEYAERALAARQQSNRAQRRLRQLAARHPVLQAQGKVVGVPTACVLWVCTGDPRKFDSAAAYRKAMGLNLVERSSGTYQGRLRISKRGSARTRQWLYFAAMRLVQQCGVRPWYEAKKARDEGDARRVLVAVMRKLSVALYHVGVRNEEFQPRRLFGRIRNRRGRPALRVIKVTEQSRSDGQNEPKPV

SEQ ID NO: 44818 - protein, 400 aa, unidentified
MHKKVVVACVRILDPKDGTVQSTLRQFGTMTADLIELRQWLAEAKVTHVAMESTGVYWQPVFNLLEGHFQTWVVNAQHIKKVPGRKTDMKDAEWIAQLMQCGLLRPSFIPDRQQRELRDLTRQQAKLVQQRNAVDNRIQKVLETANIKLGSVASDVVGVSGRKMIEALIAGEKDVTVLAELAQKKLRGKIPQLQRALEGELTEHHCFLLQQLLGQYDFVEKEITRVSERLGAVAPCSFRGAVEQLDAVAGIGERGARALLAETGTDMSRFPSHQHFASWAGQCPGNHESAGKRRSGKTPAANRHLDAVLTEMAHAAVRTKNSYFKSQYHRLAGRRGKKRAIGALKHSLLVTVYYMLRDNKPYNDLGVDYFDKLNPQQRIRYHVRKLQDLGQEVELSPMAA

SEQ ID NO: 44819 - protein, 323 aa, unidentified
MTRIICGVDISSASLEARIGRGGAAGSFANTAEGIAQLATFCRTHEVELVAMEATGGYEQQPLALLSEQGLPVAILNPRAVRRFADSMGQMEKTDALDAGMIAWFAETKRSQPVCLSSPSQLQLRALVTRLRQLTQIRTAQLNQARLVTDPAVMALIEQLLALVARQIGELESSIAALISQDPLWHQLDQVFRSIKGVADRTVARLMAEMPEIGTLSNKTISKLAGVAPLAKDSGKHQGKRAVRGGRTSIREILFIVASVVGRYEPDFIAFQQRLSAAGKPRKVIRIALAHKLLVRLNAKAREVRHQPDLSALAPLLPLPGKS

SEQ ID NO: 44820 - protein, 415 aa, unidentified
MIPAVLECCAGIDVGKKFVVVCVLKGPANGDAQAQIRRFDATNANLEGLREWLVSCGCTHVVMESTGEYWRPVFNVLEEAAKLQIVLANSQQVKGLRGHKTDPDDAHWLAHLLRHGMIRPSYIPPPAIRQLRDLTRRRRQMVRTGAQERNRVQKVLEGANIKLGNVLTDVFGVSGQLMLEALLEGKATPEQIAQLAQKSAKKKIPQIRAAIDGHRMTAMHRKLIGFSLDHMAFLEEQIMEMDQEIGTHLRASELQRQHQNLQTIPGVKQEAASSLLAEFGPDMKVFGSGAKCSAWAGVAPGNNESAGKKKRAPALRGNPWVRSTLVECAWSASRKEGSEFRYQYERLKPRLGHKRSIVAVAHALTLVIFEVLSTGEPYTKPGANPMPETKAAHLIRHHTRRLKTLRKRLTTRTKP

SEQ ID NO: 44821 - protein, 403 aa, unidentified
MCTLIGIDWSKNEHHICIVNEAGAQILRFSIPHSTSGFSDFEAQVTKLGVPLTDCLIGLETAHNLLIDFLWSRGFRIYVIPPSVVSSNRDRHRSSRAHNDDSDAFLIADLLRTDRHRFAPWKPDGQLVRRMKAKLSLIDSLTKTITAYSNRLQAVLLRYYPQALGLFSQVKTQICLRFLIAYPTPEAALSLTYSDFAGFCRSHGYTQPHLLPDSYAQLCQPAPEPDPVVTLAHKEETVFLAKLLLEMVCQKAREIREVQKLFARHPDQAIFDSLPGAGDLLAPKLLVMLGDHRERYPTPQTIRALAGTCPVTIESGQKRRVRFRRACNRDDRQTAQQFAKASVREAEWAAAYLSLCLARGHSKSHAYRCLANRWLGIIWKLWQSRELYDETYHLQQIRRHRRR

SEQ ID NO: 44822 - protein, 342 aa, unidentified
MGIEVLGIDLGKAVCSLAGLDATGAVVYRKRLQRHRLLDFLEGLDPCIVAMEAFGGAHHIGRFCLQHGHEPRLMSPLYVRPYVKVHKNDDRDAEAIAEAATRPTMSFVAIKSEEQLDLQALHRARERLVTERTRLINQGRGFLMERGIRVGAGRHVFQKELVRLVATGTANLSHRILSMLSDMMAELATINDRVEAIDTEIKALAKADADMQRLMEIPGVGPTIASALVAAVGTGSSFAKGRDLAAWLGLVPRQITTGGKAKLIGISKHGNRYLRKLFIHGARTVLHLVRDRTSPITQWADGLKERAHVNVAAVAMANKMARIAWAVLTKGERYRPAALVGA

SEQ ID NO: 44823 - protein, 310 aa, unidentified
MDAIYVGIDVSKDRLDVHVRPAGETFAVARDGKGLNELLERLRSIAPRLTAIEATGGYETIAAAAIAGAHLPLAVVNPAQVRHFAQAIGKRAKTDPIDAGVIARFAEAVKPEPRELPDEAARLLAELVARRVQLIEMIVAERQREKRADAVRVRKSIARHIASLEKELPIIDGDIDTMVRGSPVWREKEDLMVTFPGVGRGIARTMLADVPELGRLTRREIASLVGYAPFTRQSGQWKGKSMIAGGRPAARSAIFMAAMCAIRCNPVLRVFYQRLIARGKAKMVALVGVARKIIVMLNAMLRDKKQWQPA

SEQ ID NO: 44824 - protein, 366 aa, unidentified
MTKDTLYVGLDTDKRHIDVAVAEELPHGETRYWGQVANDAAAVDRLVKRLQQGRRLVMCYEAGPCGYGLYRQLSGKPEVTCAVVAPSMTPRRAGVRVKTNRRDALTLAKLLRAQELTAIWVPDAAHEAMRDLVRARANAVEDVTRSRQRIGGFVLRQGLRYIGKPWTKKHRAWMAGLNFEAAAHRLMFRELLEALAFAEACRDRLTDHIGELVGSWSLSWLVEAVQALRGYKLVNAATVVAEIGDPRRFANPRQAMGHVGLGVSEYSTGDRIVRGGITKTGNKRARKALIEASWTYARPAKGPPAAAAHQSAAVRAIADKARHRLSRRYRWLIAHGKPSSVAVTAVAREAVGFIWAIAHAAAPRQS

SEQ ID NO: 44825 - protein, 455 aa, unidentified
MRLGRVPWRGVAQEGFALLEVALPVLADRYNTSEVVQVAGKVVIGVDPHKLSVTFEARDSREILRATGRFGTDARGYRLLVAYARQWPERVWAVEGANGIGRPLAQRLLASGERVLDVPAKLAARARVFDTGQGRKTDPADAHAIVMVALRDKGLRELTADPDLTVLRLLCDRRDELSRARAQALNRMHRLFLELVPGGAPVKKSAARYQALLATVRPRDLAGKTRRRMAADELADIARLDTKLKAMKAELKAAVAATGSHLMEIHGIGPAGAARILADVGDVVRFPDRGHFASWTGTAPIDASSGQHIRHRLSRAGNRRMNHVLYMAGIVQLRHDTPGRAYYRRRVVEGKTPMEAMRCLRRRLSDVVYRQLTADAQAQAAEQAGPGGHSGATLLSSAAGLPPGTGTSDQPLPGPAPKRYPRHHQPRQPPLPPQAPHPAGAPEVSTWSALLDERR

SEQ ID NO: 44826 - protein, 388 aa, unidentified
MSKRKGSKIASLPLVEPNAAGADIGATQIFVAVPPDRDAEPVRCFDTFTADLERLADWLEQCKIRTLAMESTGVYWIPLFQILEQRKIEACLVNAQHLKNVPGRKTDVEDCQWIQHLHSVGLLRGSFRPDQEICAIRSLWRHRDNLIQLATVHLQHMQKALDQMNLQIHHVISDLAGTTGLAIVDAIVAGERDLAKLAKLRDWRIRASEETIMKSLVGDYREEHLFALWQSLMSYRHYQKLIQDVDAQVKQMMHRLPAKIDIGERPLPKEKNPRKTPWRNEPPQLREDLYRTFGVDLTQIPGINTLTAQMLLTEVGPDLSRFPTVAAFCSWLRLCPEPKISGGKVLSSKTRPTKNRAALALRMAAQGLHRSQTFLGDYIVVPRFQTRQ

SEQ ID NO: 44827 - protein, 367 aa, unidentified
MKKISTVAAKPSRNISQQKLTIGLDLGDRNSWYCVLDEAGQIQLEQRVRTSAKTLYEVFGAMPRSRIALEIGTHSPWISRLLRELGHEVIVANARKVRLIGESRKKDDRLDAQTLARLARIDPELLCPVKHRSAQAQADLMMIRARAGLVRARTGLVNTARGLAKSYGERLRGCNVRNLNPEKAEGLSPELQRALEPLLSAIAELSQRISEYNDRIEGLAQASYPQVALLQQIKGVGTLIALTFLLTLEDPHRFGKSRDVGCYLGLQPGRRNSGQSEPQMHISKEGDPYLRTLLVQGAQHILGPFGVDCDLRRWGLKLAERGGKNGKKRAIVATARKLAVLLHHLWVSGEVYEPLHNSSRMTVAAAA

SEQ ID NO: 44828 - protein, 350 aa, unidentified
MNAVGIDVSKGKSTVTIRRPGDVVIMPPCDIPHTQSAINCLIEQLQSLDGETKVCMEHTGRYYEPVATWLSDAGIFVSAVNPILIRDFGDDSLRTPKTDKADSKKIARYTLDRWAKLKQYGSMDKTRNQLKTMNRQFGFYMAQKTAMKNNLIALLDQTYPGANDFFDSPARNDGSQKWVDFIHTYWHVDCVRSKSLNAFIEHYQNWCKRKGYNFSADKATKIYQLSSDLIAVFPKDDITKMLIRQAVELLNTASKTVEILRLKMNELAATLPEYPIVMDMNGVGSTLGPQLIAEIGDVTRFTHREALTAFAGVDPGKNDSGQHVQKSVRTSKKGSPYPVSYTHLTLPTIA

SEQ ID NO: 44829 - protein, 357 aa, unidentified
MLSSNVKYIGLDVHKEAIAIVVLNGAGKLVMESIVETKASALLDFLHGLRGELHVTLEEGTWAAWLYDVLQPHVQEIVVCNPRRNALLKEGSKSDKIDARKLAELLRSGMLRAVYHGENGLRTLRELARSYQVVSKDLKRVMNRVKALYRSWGIACTGTQVYTRRYRELWLNKIAQAGVRRRAELFYQQLDGLQVLRRMVRGELLAESRKHQPLKLLRQIPCIGPLRAALLLALMQTPHRFRTKRQLWTYSGLGVETHDSAQYRYVDGQLQRSRKPQQIRGLNHNHNHAMKEIFKSTAMSASHRAGPFQDFYAGLLAKGMKPEMAQLTLARKIATIALTLLKKGGCFDAKYLKPQAA

SEQ ID NO: 44830 - protein, 366 aa, unidentified
MKFLGIDLHSNCFTCCIINEDEKRFRHSFSIDQESLNKFYQHLDEDTHVIIEASTNAFKFVELIKEMVKDIYVANTHKVKAVPMEKKKTDKVDAERLAMYLKMQVLGRETMAKPVYVPKNTIQNLRSLFSTYQLIGKQIVSTKNRIHALLKQNLFPFTKTYIFGKAHREAIQNLEMDEAMSFQIRLLFKALQQLEANKKELKKKILTVGSEYINEIDIVTSMRGISVFLAIALMADIATVERFPNSKHFTSYLRSTPGVASSNETTRITGTNKSGRKLAVTLITQSLNHFRNSNLKLSRWYDKKAEHITRKGKIRMALCRRVIAELYQMLKKQKYHYFRDEKNHQMKMNEYYKFLERNNIAIQKSA

SEQ ID NO: 44831 - protein, 319 aa, unidentified
MHCIGVDVSKQELVTFDGKRERIFPNIRGFPEFQKFVKRTVDAFIVFEPTSTYSRRLEAFCRTKQVACCQLNPRVVPHLRQVGRGRSKTDSSDAELLYRYGIERGHSEATELKHDPLAESVQARLACYRVVQKARVAYQGLREALNHDPATSRDLLDELEAEIAELKNKEQLYLVAGQCLVVEDEQAAQQLATLLSIPGIGPITALTLLALFRKYPGAARNQIVALAGLDPIRFQLGTSVHGKTRISKRGNREIRKRLYQATLSAARYNPSVHALHRRLREQGKPDKVARIAAARKLLLIAHAIYKSGEMFHDPNQKEA

SEQ ID NO: 44832 - protein, 323 aa, unidentified
MNKYNETFGIDISKDVFDCYGSVQGHLQFKNEATGFKKFLEILSKDSLVVMEATGYYHYRFAQFLYKQNVIVSVVNPLSVKRFIQMKLVKVKTDKSDAKAICNYGMIHEVPLYNALTDVQSECLQLFRLLDSFIKKRTATKNKLHGEEVLGTPSKWVYRSLNRNKKHLDKEILGIEQKLLSLIKQDQQNQLTLLQSIPRIGLKTALFLIIVTDGFKKFETASQLCSYVGITPTIRESGSSVKGHSRISKVGNRKLRNLVFLCSFNACKHNKACKAIYERIVNKGKSKKLALIAVSNKLFKQSFAIAKSGNPYDETFVSVLGSN

SEQ ID NO: 44833 - protein, 339 aa, unidentified
MTWWTVAIGVDTHKQAHVAVALDRLGRLIDSLTVPATMVGYRQLLVWAHGLGQPTFGIEGCGSYGAGLARFLTDHDETVFECERPRRHERHGDKNDLIDATLAARHVISGDGLSLPRGSGQREQLRVLLLERRGAVRARTAALNQLDAAIMTAPAELRQRLDGVPKRRLVMTVARLRPRPDGVTQVLRRIARRIQLLSSEITEIDQTLDHLVAATAPDLLTECGVGPVCAAQLLVSSGDPARMTTEASFAALAGTNPLEASSGKQRRHRLNRGGDRQLNWALHVIALQRVHHHDQTKAYYQRLLADGKTTKEAKRCIKRALARHFYHRLRELHPPTLTT

SEQ ID NO: 44834 - protein, 391 aa, unidentified
MIYVGIDVSKDKHDCYIVNSDGVVLADVFSVENNLDGFDLLLQRLKSVAPDLLNVKVGLEATGHYSYNILGFLLDKGLATFVLNPLHTNLFRKSTSLRRTKTDRVDARTIAAMMSSGIVLKSYTAISYHNEELKSLSRYRFDKVRQRAKLKQAVSRLVTILFPELEKLVPSLHIASVYALLAELPGAKQVASCHLTHLTNLLSAASKGHYDRSKAVVLRNAARRSIGSTMPAKSLELQHTIRLIRELDAEINEIEAAIKQFMDQIASPILTIPGISYRMGAMILAEIGDFSRFDSPDKILAYAGLSPSTYQSGKLDNAYAHMEKRGSRYLRYALYNAAKYVCHWDASFCAYLAKKRAEGKHYNVALSHAAKKLVRLIFALQRSGQPYCPTA

SEQ ID NO: 44835 - protein, 342 aa, unidentified
MSKVSEAAVRAAAFAGVDVSAATLAAAVQQEGRDGFRQKEFANSLSGHRQLIGWLRRCGGRVRVSLEATGTYSLDVALALDEAEGIEVAVLNPKMVNRFAQTLRRSKTDAADAVALAEYSRRMEFVPWQRPGRSRLELRALSRHIATLTEDHTRWGNRLHAAAASKTTPRCVLDDLKRARAAIAKRILRLRKQALAMVGEDKDLARKFEQLKGIKGIGETSAVQLLGELAGLSPEMTVRQWVAHSGLDPVHQVSGSSVRKQTRISRHGNSHLRRALYIPALVGARHDPHMRAFYELLQSRHKTKLQALVAVARKLLHAIFGIFKTGSSYCGAKLFPQLIPPS

SEQ ID NO: 44836 - protein, 318 aa, unidentified
MGDEKLFVGIDVGKYNVDIALSDEGEVGRFKNDDEGIDGVLGLLKGRNVGLVVLEATGGYERQILASMLGAGIPAVAVNPRQVRDFAKALGKLEKTDAIDAHVLSKFAAYVRPPVPPRVSAELEEVQGWLTRRRQLIEMLVAEKNRTQHAKHGVLKDIRAHIDWLKKRIRDSEKDLREILSHAPEWDAEVEVVDSIKGIGRIAALTVMAGVPELGTLNRKKIAKLVGVAPLARDSGTLRGKRTCWGGRADVRACLYMAALVAARFNDTIRSFYRRLLAAGKPKKLALVACMRKLLTILNARIRDHRAAAIAVRAPGLA

SEQ ID NO: 44837 - protein, 322 aa, unidentified
MLPTLGIDISKDSFHVELSINHKLRHRRFTNRKEGFAELCAWLSKHKATPVHACLEATGPYSEALALYLHEQRHTVSVVNPAQIKAFGQSELLRNKDDRPDAALIRRFCEKQCPIAWTPPPAHFRELQALTRHLENLLETRQQQLNRLETTTTKNVVKSLRQLVTHLDAEIKRTEQQIENHVDRHPDLKQQCQLLESIPGIGKRTATRLLAEIENISQYKSARQVAAYAGLTPRNNRSGTMRGQSRLSKTGNARVRKALFLPALVAKQHNPVVRNFCQRLARHGKNKMQLVGAAMRKLIHIAFGVLKSGKLFDPNHELLLNS

SEQ ID NO: 44838 - protein, 369 aa, unidentified
MADRITYVGLDVHKDSIVVAVAAGGLRGEVREYGRIANTPTALDRLLRKLGGDGMTLRFCYEAGPCGYGIQRRLSTQGHECVVVAPSLIPKRAGDRVKTDRRDAASLAKLHRAGELTAVWVPDARHEAMRDLVRARLDAVHSLRRARQQLSGFLLRQGCHYGRPAWTRLHRRWLAGLKFEQAVHHIVLEDYIAAVEAAEARRNRLTAQIAAMLPDWTLAPVVAALQTMRGMALVNAVTLIAELGDLSRFANPRQLMAYLGLVPSEHSSGASVKRGGITKAGNAAARRLLIEAAWSYRFPARLSRELLLRQESQPRLIRDIAWKGQLRLCARYRRLARTGKPANIVTTAIARELSGFVWAIARQVTVTTD

SEQ ID NO: 44839 - protein, 416 aa, unidentified
MNAAGIDVSSRKSTVAVLRPLGEVVRLPFDVAHNTEGLASLAEQLKALDGETRVVLEHTGRYYEPVAKALHEAGLYVSAVNPLLIKEYGANSLRRVKTDKADALKIARYALDNWTDLRDYTPMDTIRYDLKTLNRQFQLASKQRTACSNNLIALLEQSFPGIRRCFDSPVRSDGTQKWVDFAHSFWHVDCVRKQPFPAFCERYRKWCKRHGYFFKQNNAEEVYALAKNAVVLVPKSKVTKVLVQEAANQLTSTSRSVETYRTEMERLASMLPEYPVVMKMYGVGKSFGPQLMAEIGDVRRFERKQALVAFAGIDPMPNQSGDKNIRSNRSSKRGSPYLRKTLFNVMGIYLKCAPLDEPVFQFLDRKRSEGKPFYVYMTAASNKFLRRYYAQVRDYLAALDDLPPVDMDSTGLKTSD

SEQ ID NO: 44840 - protein, 343 aa, unidentified
MEYYVGLDVSLKQTSICVVDRAGLVVREGVIDSDPEAISGYVRSKAPNAVRIGLETGPTSTWLWTELKRLGLPVICIDARHAKAVLKMQINKSDRNDAIGIARIMQTGWFKEVHVKDIDSQSIRALLASRALLVKMKRDLENHVRGLLKNLGLVIGRAKFNVFAVRAEELIEGRPELIAAIRPLLEARNAVEQQVSKLDRKVMKLARRDAQVRRFMTAPGVGPITALAFKATIDDPARFARSRSVGAYVGLTSRRHASGEVDWTGRISKCGDAMLRSYLFEAAGVLLTRVPKWSAVKAWGVRLAKRSGLRKAKVAVARKLAVILHRMWIDGTEFSWSKKEIAA

SEQ ID NO: 44841 - protein, 321 aa, unidentified
MAMLSFCGIDVSKDRLDVMVLPGRQSFAVRNDAAGWAELIARLRGLTIAAIGLEASGGYERGAIRTLLAAGLPACQVNPFKLRQFARASGVLAKNDPLDTRMIASFVAIMPTRPAQPRPPAIERLIEMLAVRRQLNAEKVAAENASRLLEDAMLQRLSRRRIARLAADIDRLDRRLVEITASDAALAHRYRLLASMPGVGLVLACTLIALLPELGTMSRKQVAALVGVAPYAFESGKFKGRRCIWGGRAPVREVLYMAAMSASNWNPVFKAFHKRLKAAGKLPKVAIVAVMRKIITTLNAMVRDDVVWADHLHGRHIVPAA

SEQ ID NO: 44842 - protein, 316 aa, unidentified
MPYVGIDVAKNKHDVTALNVSGKTVLKPLTFSNNKAGFELLDLSLRQLNQDYLIALEDTGHYAFNLLNFLHEQGYKVYTYNPLLIKKFAKSLLLRKTKTDKKDAHGIALKLLSDPNREQFQHDNRQVELKILTKHIHRLKKKQSDWKVQYTRCLDIIFPELDKIVGKHSEYTYQLLTCYPNPQKRLEAGFDKLIEIKRLTASKIQDILSVAPRSIGTTSPAREFEIIENIKHYKRLIDKAETCVNDLMAEFNSVITTVTGIGNRLGAVILAEIQNIHAFDNPAQLQAFAGLDSSIYQSGQIDLAGRMVKRGSPHLR

SEQ ID NO: 44843 - protein, 339 aa, unidentified
MEGQPLAQTQTFGTTTGELLRLSDWLVEGGCSHVGLESTGEYWKPIYNLLEGTLTVWLLNAQHIKAVPGRKTDVKDAQWIAELLRHGLVRPSFIPPPPQRELRDLTRYRTTFVRERATLVNRVQKVLESTNLKLASVVSDVMGVSSRAILAALLAGEADPFVLAGLAQGQLRKKRPQLEQALQGRLRPHQSFVLTELLAQIDSLEETIARFDAQIRDACAARDDAAQVVALLDTIPGIAEGTAQLLVAEIGTDMSRFPSAAALAAWAGLAPGNNESAGRQRSGRTRKGNVWLRTALVQAAQAAAHMKHTALAARYRRMAARRGAKKAVIALAHSLLVIA

SEQ ID NO: 44844 - protein, 360 aa, unidentified
MRERNEGKRIAVRGKDVFVGIDVHKESWQVTVRAEGEEVFHGRIPGQYPVLRKVLDRFRGGRMKVAYEAGPCGFGLHDQLREDGIEVIVVPPSLIPMESGNRVKTDKRDSRKLARLLEGDLLKKVFVLTEEEREHRELLRTRQQLVSHRGDVARQIKSKLLFHGISSPFPSKYGWTQKYVQWLRGLSFSSPYLKESLEILVDLYEYLTRQLMKIHRKVVELSRTSKYSGRAKLLRTAPGVGLLTGMEVLVELQDMGRFRSSEEVASYLGLTPSEYSTGEYTRQGRITRCGNWRVRTALVESSWILITKDPGMRSVYLRLKRLKGSKKAIVAIARRLIIRLRSMLLKNMPYRMVTPAVPQG

SEQ ID NO: 44845 - protein, 367 aa, unidentified
MDEVSTIGIDIAKHVFQLHGVDGAGEVVLCRRLRRGQVMRFFAALPPCIVGIEACGTAYFWAREIASCGHDVRLMPPSYVKPYVKRNKHDAADAEAVCEAVRRPSMRFVPIRTAEQQAALVAHTVRDLLVRQRTMLVNALRGHLAEFGIVAPRGLHKADELAAVVADENDGRIPASARKALRILVAEFAALDLRITRLETEIVAQAKTDAVARRLATIPGIGPIIASRLSAMVPDPAIFRSGRDFAAWIGLVPRQSSTGGKPRLGGISKRGNGSLRRLLVGGAMAAMFRAKALQNDPWLCQLRARKPVMVAAVALANKIARTIWAVMRRNAVWRPAALRSSSRPHSGAVLLAAVKTMPPAAVAFGQS

SEQ ID NO: 44846 - protein, 345 aa, unidentified
MEPMYYIGLDVHKRMISYCVKESSGKIHSEGSIPATRLDLDGWLKTLPQPWSAAMEATLFTSWIYDHLKPHAAALKVAHPLMLRAIAAAKKKNDRIDAHKICDCLRCDFLPECYMASTEIRERRRTLRYRNLLVRQVVRMKNKIAVLLMEAGVTYNKQKLHKAGYFRELLATNQDIDDGLRSLLRLCREMVVRLAKTESALVRSLERDALLRERIERLMTIPAVGPITALTWALEVGDVKRFSSIKKAISYCGLCGAEKRSADTIQRTPLSKQRNKHLQTILIEAAKLAPRNSAALAMLYDREKQKENANRATLAVARKIVAYLVAVDRREKDFLIVENETRTAA

SEQ ID NO: 44847 - protein, 514 aa, unidentified
MFTTRVPFWLRCKKPLVRNHQRLVLKSVVLPQRKARSEYLQLKDTSPLVFIHQSKKIIMKKKTSMEIIHPYAAGIDVGSRSHFVAIGRSKEEVQEFGVYNEDLMSLTQWLLDNDITHVAMESTGTYWQSLFSILQEAGLVVTLCNGKFTKNIKGRKTDVIDCQWIQKLHTLGLLSGSFLPDAITEQLRTYCRHRLNLVDAAADSTRKMQKYLRLLNIRLDIVVRDITGLTGLSIIESICKGETNAEKLAALRNGNCKKSEAEIAKALQSNKRPDYLFALQQELHLYKQYQQQITACDIEIEKAIRQSINQDEDKKHLKTTDKPHKRINKNAPKNFDLNQLAYQYFNGIDLMAIEGVSHSTVIALMSEIGYEGIKKFETAKQFSNWLRLSPNTKKTGGKVISSHLPKGSNRLKIALRNAANSIGNLKDTHLSDFFRRISFRRGRGAAVSATARKLAVIIWNMIVKNIPYKPPTDYLFLDQRRKLKLVARIRKSITKFELKPDDFGFANASLTTNS

SEQ ID NO: 44848 - protein, 337 aa, unidentified
MAEIIRVGLDTSKSVFQLHGVDAAERPVLLRKLRRGDLERFFAGLPRTMIGLEACGGSHHWARVLERLGHEVRLLPPQYVKPYVKRGKNDAADAEAICEAMSRPSMRFVPVKTAENQAALMLHGARDLLLKQRTMLLNAIRGHAAEFGVVGAKGVGRVAELLERIAACETVPELARTIFAGLANQIEALGKQLKALDKQLMAWHRKDERSRRLATIPCVGPIAATALAMKVPDPTVFRSGRHFAAWLGLTPKDHSTAGKRRLGGITRAGDVTLRRLLVSGAMAVIRAAKPGRTPRWLLDLLARKPRKLAAVALANKTARIAWALMMQGQAYRRPTVA

SEQ ID NO: 44849 - protein, 409 aa, unidentified
MRVFCGIDWAETHHDVAVVDAEGRLLARRRIRDDAAGYQQLLQLLAEAGDTATEPIPVAIETSRGLLVAFLRATSRRVYAINPLAVSRYRDRHGVAGAKSDHADAVVLAGILRTDAAAHRPLPADSELVQAIAVLARAQQDAVWSRQQLAMKLRSLLREFFPAALAAFHRKHVGLTAPEARAVLAAAPTPTQAASLTTAQLRRLLRCAGRQRNLDAWTKRLRASFHADQPRQLPLVEQAMGQQVLALLAQLQAACQAADDLAEATVAQFRRHPDYQIITSFPGLGELTGARVLAELGDDRSRFADARGVKAYAGAAPVTRASGKRLQVLARKVKNQRLAAVGYVWAFAALTASPGARAHYDRRKHAGDRHAAAQRNLFNRLLGMLHHCLATRQTYSEAKAFPAPEALAA

SEQ ID NO: 44850 - protein, 344 aa, unidentified
MVTTIGIDPRKATHTAVAIDGSENVLGEITIRADKDQTRKLVDWAGSVDGDGRLWAVEAATGLGYLLSQQLMAQGETVVDVPPVLASRIRVLSSGKSQKNDENDARSVAIAALRRDGLAEVHREDEAAVLRMLAKRHRELTALRTQAVCRLHAMLAVLRPGGMGHRLSAKQASRMLGGIRGLDAVGEQRRLMAKTHLVDIRRLDRDLDANKARIRQAVAAAETSVTDIYGVGPVVAAFLIGYTPPIERFTTPDRYAAYNGTAPIEVSSGGKVRHRLSRRGNRILNHAIHTAAVTQISHHTPGKVYYDRKIDEGKTNKEALRALKRRISDAVYRQLRQDAERRDG

SEQ ID NO: 44851 - protein, 411 aa, unidentified
MRLFVGDDWAEDHHDVELMDQAGRVLAKRRLPEGVAGMARLHELIGQQLGEDADYAEVLIGIESDRGPWVAALAAAGYTVFAVNPLQASRYRERHGVSGAKSDGADAHMLTDMVRTDSHQLRAVAGDSADAAGIKVLARTHKTLIWERTRQVQRLRHQLREYFPAALEAFEDLDASDTLELLAKAPDPARAARLTRAQVSAALKRARRRNIADKATAIMAALRGPQLGQPPAITAAYAVTVRSLIAVITVLNEQVKALQGQVEADFGQHPDAEIYRSQPGMGAILGARVLAEFGDDPQRYADGKARRNYAATSPITRASGKKKVVAARFIHNDRLVDALNAQAFASLKASPGARALYDELRARGIEHNDALRRLANRLVGILHGCLKTRTLYDEATAWSHRENLPQSSVAA

SEQ ID NO: 44852 - protein, 321 aa, unidentified
MSMIQKARGSEGFVGIDVSKATLDICFGKQHYQILNTKAEIKKFIAAHMQDAESIALCVLESTGGYERGVLQALHKAQIATHRAHPSRVHAFAKACNHFAKTDKLDALLLQKYASFVSATERGDREESAHQQELKSFRQLLRSIEEQLHGAQCRIKQYPEQCYAVLAEQIRMYRKQIEKINKQMQSIVQGDARLQQQVKLMQSMPGIGLKSATLLLAELPELGRLGKKQIAALLGVAPKTSESGRTVRRARIFGGRFYARKVMYMCALVASRYEPRMRELYQRLIAMGKAKKVALVAIMRKMIVCLNAMLKNNIAFYPLSA

SEQ ID NO: 44853 - protein, 335 aa, unidentified
MEFEFFIGIDVSKNELDFSVQQGKCFLFHKEIINDPEAINTLLKQMGKLQGFSINHAIFCMEHTGIYSNHLLSCLYRKKANICLESATQIKKSLGNLRGKNDKVDSMRIATYAYKNRDELRLWSPRREEILQLAHLSSTRSRLIKAKKILKTPLKEYGSFVKKKTVKQNTDVCNKALNGIEASLENVEKAIIIIINADPELKRLFTLVTSVVGIGKVTAIQLIVTTNEFKDINNAKSYACYAGLVPYLEESGVFKGKGRISHMANKKVKTLLHMAALVAIQYNDELRLYYERKVNVEKKNKMSVINAVRNKLVQRIFSCVRQNRKYEKNYLKLVA

SEQ ID NO: 44854 - protein, 346 aa, unidentified
MEACGGSNYWARRFQAMGHQVELINASLVKPFVKGNKNDRNDAEAICEAASRPTMRFVPIKTAQQQDIQAVHRVRSLLMKERIAISNQIRGLLAEYGIVAPKLPTSVRKHMPRILEESGDDLSSLARSVFTDLYQRLVEVDAAIARYDQRVQQIFSSCSIFRKIEQVRGVGPLIATAIVAAAGDGKEFKRGRQFAAWLGLVPRQQSSGGKSRFVHKESISIAYAKGLGDVELSGKIGTTQTEIDRLCKRLQAKAMHIYVVYEAGPCGYGLYRHLVAKGLACMVCAPSLIPRKPGDRVKTDRRDAIKLVRSLRAGDLSAVHLPNIEDESFRDLARAWSAMCIRALSS

SEQ ID NO: 44855 - protein, 317 aa, unidentified
MDLQMKRACGLDVHQATVVACLLIVFANGKVKKQIRTLGTTPRELVSLREWLESEGCTHVAMESTGVYWKPVYAILEGAFELIVANAQQIKNVPERKTDVKDAEWIADLLLHGLLRASFVPPKPIRELRTLTRYRRKLVESRNAERCRLLKLLEEANIKLASVASDVFGVSGMRMLHALLEGQATPAEMADLAKGRLREKIPQREPALEGRMEEHHRDVLKLQLRRMRSLDQDLAELEAQIQEKLKPYRPQLELLTEIPGVDGTLAAVISAELGVDMKGFQTASPLASWTGVCPGNNESAGWRKSGRVTKGRALTSP

SEQ ID NO: 44856 - protein, 343 aa, unidentified
MEAITTIGLDIAKSVFQVHGIDAEGNVILRRQLKRRYVLTFFQKLPPCLVGIEACASSHHWSRELQALGHTVRLMPPAYVKPYVKRHKNDATDAEAICEAVTRPNMRFVATKTPEQQSCLTLHRTRHLFIRQQTSVINAIRAHLADFGIVAPVGRQGVEQLLGVAADTNDKRLPEVARACVAALGAQLRMLKAQILQFDRMIRAWHRSNEESRRLDDIPGVGPALATALVASVADPKAFRSGRDFSAWIGLVPKQNSSGGKDKLGNISKRGDRYLRSLFTTGALAVIRYAKIHGTKHRPWLTALLTRRPTKVAAIALANKIARIAWAMMAKGERYKEPAALAA

SEQ ID NO: 44857 - protein, 419 aa, unidentified
MNKLYVGMDVSQEDVKVYILDHDGNEATKRFAVDNNPLGAETISTNILECCRRLSINKVFAGLESTSVYGWHLQFYLADHLGLKPYDPMIISFNAKIVEAFKKSLGNLPKNDWIDAFTIAERLRFGRLPKSCPVDFRYLALQRLTRHRFHIVDSIVREKNYFLSNLFLKFSGLCQNKVFSSNFSATATQLFDEFLTLDDIAARPLDELVDFMVENGKALFSDPKATAIALKDAVRKSYRMNASVDNSLNFVIKSCLDNIQSLEKQKKAAEKAIVQEIAGFNNQYLCLTSVKGIGPTIAAGLISEIGGISRFENDNALAKFSGIYWSEYQSADFIAEDTYLKRTGNEYLRYYFIQAADQLRKYVPEFSQYYARKFKEAKTHKHKRALVLTARKAVRLVFALLREEKLYKPPAPKGGINEK

SEQ ID NO: 44858 - protein, 414 aa, unidentified
MRIIYDNVTGMDVHKRTVVATTSVKQANGSWQEDRRTFGTMTGELLGLSDWLLGKGVTHVAMESTGEYWKPIFNILEENFEVVLVNAQHLSRVPGRKTDQSDADWICELMQYGLLKASFIPPPGQRELRDLVRYRTSFVRERATLVNRVQKLLEGANIKLASVVTDIMGASGRAMLEALVGGIASNEEMAELAKGSLRGKREELAKALEGRVKDHHRFVLTELLCQIDSLDETIARFDLEIEAYCRPFEEAVVLLDTIPGVARQTAEIIISEIGIDMSRFPTADHLASWAGVAPGNNESGGKRRSGKTRKGNQHLRTALSQAANAAARTKGTYLQAQYHRLAGRRGRKRAIMAVAHSILIIAYHLIVRKEPYRELGGDYFDNIHPERTAKRLIKRLEQLGFQVSVQEFAVPTVA

SEQ ID NO: 44859 - protein, 341 aa, unidentified
MNKVITIGVDLAKSVFQIHGVDAEGGVIFRRQLRRGQVLPFFGKQPSCLVGIEACATSHHWAREIEALGHQVRLMPPRYVKPYVKRNKNDMADAEAICEAVTRPSMRFVEIKTPAQQSVLMLHRTRHLFVRQRTMLINALRAHLAEFGIVAGVGRNGLERLLTIIEDGEDDRVPSTARDCLLALRDQLELVKHQVLDADRHILAWHRMSEVSQRLDDIPGVGPLIATALVASVPDPHAFKSGRDLAAWIGLTPRQNSTGGKERLGHISKAGNRYLRMLLVVGALSVIRRAKQAGYSRRPWLTKLLERRSTKIAAIALANKIARTAWAMMAHGTIYEEPQAV

SEQ ID NO: 44860 - protein, 357 aa, unidentified
MTAVRIAQRTERVVVGVDTHADLHVAAALDPLGRMLGRLEVGTSTRGYAQLLKWAHAFSPTTTFGVEGTGAYGAGLARYLIDSGCEVIEINRPDRRARRGHGKSDPIDAEAAARSVLAGGPLCIAKRDHDRVGMIRTLRVARRSALKMRTQVGNQMHALVVTAPDSLRHQLRHLSLDKLVAVTAAARPGTVTTPTAASKLALRSLAIRHQGLTAELVVLDRELGRLTIETAPALCDLTGVGPDVAGALLVAAGDNPERLRSDAAFASLCGVSPVPASSGKTNRHRLNRGGDRIANNALWRIVMVRLTCDQRTKTYVARRTAEGMAKRDIVRCLKRYVAREVFHTLLATAPALTRISA

SEQ ID NO: 44861 - protein, 402 aa, unidentified
MNAVGIDVSKGKSMVAIMRPFGEIVSAPFEIKHTASDINSLVELINSVEGESRIVMEHTGRYYEVLAHQLSAANLFVSAINPKLIKDFDNDSLRKVKSDKADAVKIARYALDKWQNLKQYSVMDELRNHLKTMNRQFGFYMKHKTAMKNNLIGILDQTYPGVNTYFDSPARSDGSQKWVDFASTYWHVDCIRKMSLNAFIDHYQNWCKRKKYNFSQSKAEEIYGKAKVLVPVLPKDAITKLIIKQAVDQLNSASTTVESLRTLMNETASKLPEYPVIMAMKGVGTSLGPQLMAEIGDVSRFTHKSAITAFAGVDPGVNESGTYEQKSVPTSKRGSADLRKTLFQVMDVLIKTHPEDDPVYQFLDKKRAQGKPYYVYMTAGANKFLRIYYGRVKEYLSSLPES

SEQ ID NO: 44862 - protein, 337 aa, unidentified
MEQVQQYVGIDLHRRRSVIVRRTESGETLDTVRIDNDPVTLAAELAKAGEHPEVIVEATYGWYWAADVIQECGGNVHLAHPLGNNWGNRRVKNDERDATDLVDLFRMGRLAEGWVAPPALRELRELIRYRAKLVHLRSNLKAQVHAVLAKEGVVVPMTDLFGVGGQRLLDEVKLGRAYRIRVESLRDLIKLCDREIAILEKETAPFFAGDLGYHAVQAIPGVGPVLAAVFVAEIGDVSRFTSARHLTSWAGLTPTHHESDKKVRRGHITKQGSRLVRWAAVEAVSRQRGDTPIRAHHQQVGERRGAQIGRVAAARKLLILVYYGLRDGEIRCLAKAG

SEQ ID NO: 44863 - protein, 355 aa, unidentified
MRILSLDLSKYKTVACDYEAETGRHQFATVLTTPKGLHDLIVDRDPDRVVIEICSIAGWVCDLVRSLGIEMQVASTNDERWQWRKVKTKNDRRDGLKLAQLSARNELDLVHVPRSEMRQWRALIAYRHHLVQRRTKIKNHIRELLLREGQLLPRHRSAWTQDGLAALEAMVKPLREVSMDELWRGELEVELAQFKAVQAQLTEVVAKLDALGAANHNVRLLQTASGVGPRLAEAVVTMFDDPGRFHRGASVSAYIGMVPKQWDSGETARLGKITRHGNRLVRSLLVEVAWCALRHNPWARETYQRISGGKKSRKKIAIVAVGRKLLVRCWAMLRDQTAWHWEGQSAVVTPPAPTA

SEQ ID NO: 44864 - protein, 403 aa, unidentified
MNSVGIDVSKGKSMVAALREMGEVTITPHEIPHTAIELENLGYSIISLGEDTRVVMEATGRYHEPVAAALHEMGIYVCILNPIVIKQSGAGSVRKVKSDKKDALKIAKYGLDNWTKLREHTPMDAVRQQLKLFSRQYNLYMKTAVSLQNNLISLLDKTFPGVNELFDSPVRADGHQKWVDFVTDFWHCDCITRTSQKAFTQRYQKWCKRKGYNFSAYKAEDVYASSAGHFTTLPKNDNTKLLITSAAAELTATRRVLMTVKAEVIRLAKLLPEYDTVQAMYGVGEITGAQLMAELGDVRNFANRGSIVAFAGIDPEVNQSGSYQRESNPASKRGSPHLRKTLFLVVEKYLMRSPADEPVYQFLDKKRAEGKPYYVYMTAAANKFLRIYYAKVKEALNAMEPGE

SEQ ID NO: 44865 - protein, 428 aa, unidentified
MHQKQKYVYVGIDTHKLTHTAVIINCWGDKLGEITIENKPSKFNDLLLEVKKHAKRKPAVYGLEDCGGVGRALAVFLLGEKKLVKEVDSSLANVERKALPIYHKNDSFDALCVARVLLSRLDELRNANPQDLYWTVNQLVQRREALVRSSSALKSQLHVQLAHNYPSYNKFFFEIDGKTALAFWEKYPSPSKLKTATLEELTQLLVTNSHNYYTVKKAVQIIETAENDNVREVPEYQYIRDFLVESMVKEIKFKDDELTRIEVEIKLIVDKMGYKLHTMTGIDLVTAAKLIGEIGDIERFPTPAKLAKYAGVAPITYSSGQKDKQLKNQQGNRILYGIFHLLAVHQILLERNTKNPRNPVFREYYEKKMSEGKTSGQAIVCIARRLVNIIWGMMKNKSEYKIPEFEFKPTLTNCKKGSKTNLSQQITK

SEQ ID NO: 44866 - protein, 354 aa, unidentified
MKRARKELQAGDTVFVGIDLHRLKWHVTVRTVDFELFSGSIPGCWEALQRILDRYQGHRIHTVYEAGYFGFWLHDNLVEYGAECIVTPPSLIPQEYGNKVKTDRRDSRKLAHFLAKGMLKRVWVPSEKERYHRQVIRRRRQLIGDRIRTQSRIKAELQLHGLNLSAPHGKWTKTYLRNLSRIRFNNRWMQESFKRLLEQYHFLDEQINKQTNLLKKLSETELYKERVEILITTPGVGMIAAMELLLELQDVTRFQRADQLAAYVGLTPSQYSSADKIRMGRITCVGKNSLRAMLIQASWALIRKDGVMREKYDRLKSRSGGKRAIVAVARTLLIRMRRMLLDNNPYVVGLLGTN

SEQ ID NO: 44867 - protein, 664 aa, unidentified
MSRSCQNRRRAAARTATNQDAGGAVHAAAMPTEGPVPSTTDPKTSRSRAAPGDTPAATPVAIGVGIDTSRYGHHAIFLDADLQPAAPELKFVESAQGYQQLQSRLAALRHKHGPVHFHFRLDVAGSYADNLLAFLHGLPEPRTISCGDPQRNKNYRAAIFGHKKSDATEANATARYALTEKPKPMPVVAPAVQQLCQIASRLESQARHCTRVVNQLHNLLGRTFPELALLVKDLSAGWVLTLLDRYPTAAKLAAARSSSLEKIPYLPHEHIASLLEQARTSIAALTGPVTEELVRELVGQLQDAHVRHKALEKLLVSAYRQLPEPNHLDSIIGFGEVTAAILTAKMVTTGRFVEPAKLTGYFGIYPVEASSGIDRDGQSRLPLRMVMSRRGNDLVRRYLWMAALSAAQHNPAVRPLYQRVRAKHPDQPGIAIGHAMRKLLHLALAVWQTGKPFDPEHYPWDQAAHLPGSQKPATAEPVAPSPTHERTGPHAQAAGHKNPVTTPVRSVVTAACVPTSVTEAASAGNDSARSVASEHPEATACDMPMSQDAQAEATALAWIDFAHLKTQLPLQRVLEHLNLLTDLRGRSRQRKGPCPVHAASGKSRTFSVNLDKNLFQCFDPHCGSKGDVIDLWAALHKLSLRDAAADLLQTFNLEPASRTEKRHG

SEQ ID NO: 44868 - protein, 454 aa, unidentified
MGKPRVIPDEDHEVVYERVAAVDVAKASGVVCLRTPDPQRPGRFVNRIWDNVPATRARIGELGKELLGHRVQMVTLESTSDYWRIWYYVLESIGLAVQLVSASQAKNLKGRPKTDKLDAMWLARLTQWGMLRPSFVPPAAIRAVRDFTRARQDLVRERTRCLQRVEKLLEDAMIKITSVAADGMKSKSLVAMVQALIAGERDPRTLADLAKGSLRGKRDQLAEALDGMFDSHHGVIAKSLLDQAAFLDRQVTVMEEQAIAALAQVKESWGVDASGEAGPQAGTSPDAPVLAAAHRLAEIPGISLWLAIVIIAEVGLNMTAFPAPAHLVSWVGLCRSATQSGTRHGKGRQKKGNSYARAAAGQAAIGAARTATFLGERYTRIARRRGRAIAQVAVARSIMIIVWHLLSDPRARYRDLGPDFYASCIDRDKKIRNHLRGLQALGLTVTITPDEQAA

SEQ ID NO: 44869 - protein, 404 aa, unidentified
MIFVGIDWAETHHDVCVIDSEGEVLATRRIPEGLEGVGRLHAMVGEHADDPTKVIVGIETDRGLLVTALLAAGYTVHAVNPLAASRYRERHTTSRAKSDRADARMLADLVRTDRHRHRVVAPDSELHGAIKVLARSHQNLVWTRQRQTNALRSALREYYPGALFAFEELHHPDATAVLTVAPDPERGRRLTEARIVSLLRRAGRQRNLERRAREIRSALQVPQLAAPPLVAEAQAANTVALVAVITTLGEQIARLEAELTDAFGRHPDAEILRSLPGLGDILGARVLAEFGDAPDRYVDARARHDYAGTAPVTRASGTSHVVVARLARNKRLFDAAYQWAFCALTVSPGARAYYDDHDPGPHTSKVARRKLANRLVGILHGCLAHRTLYGEERAWHRAAAELAA

SEQ ID NO: 44870 - protein, 383 aa, unidentified
MKAVCGLDVHKDSVYLCILSEFGELIEKVFGVLTFQLEEMRDLMLHHHVVEVSMESTSVYWIPIWRVLSPHFKLNLANPYFIKQLPGRKSDVKDAQWIAECTMKELIRGSFVPPETIQQLRQYDRRIFDLNEEIVRKLSKLDAVLQRCNIRLSNYVSNVDSKSYKAVVRAISQGITDPEELVKLIHGRIIKHHGMDVITASLKGVVSLAEIDMISQLRDELDMAEAHKEKCQARMLEICEREFPEELKRLQTIPGIKERAATSLIAEIGTDMNKFETANHLASWSGLKPRNDESNKKIKSRSITHGNVYLRKTIIECAWAASRTKDCFFSRFSFHQTQVRKKNKMKVLVAVARKMLIAVWHVLHDNTIYIDFTTDRKTSRTKG

SEQ ID NO: 44871 - protein, 315 aa, unidentified
MSEMAVEKFVGIDVSKGTLDLCTEPAGETLHVDYDDKGIGQIIKRLVALAPVLIVMEATGGLEMRLAGELAAQRLPVAIINPPQARDFAKATGQLAKTDLVDAAILAAFARAIRPAVRSIKDADTRDLDDLVTRRRQLVDMRVQETLRMGTASKIQKKSLAAHITWLDKRITDLDDDLTKRLRASDVWRTKDDLLRGIPGVGAVTSLTMLAKCPELGQLNRREIAALTGVAPLAKDSGKHRGKRFVWGGRADVRAVLYMATVSAIRFNSRIKVFAERLKQAGKPGKVVIIACMRKLLTIMNTMIKNNSPWNPKNA

SEQ ID NO: 44872 - protein, 345 aa, unidentified
MYYIGLDIHKKIIAYCVKHVGGEVHSQGVVNATRAALDGWLKALPQPWTAAMEATLFTGWIYDHLLPHAASLKVAHPLMLRAIAASKKKNDRVDAAKIADLLRCDLLPECYMAPVELRERRRTLRYRNLLVRQSVQMKNKIAGLLMETGVSYNKEKLHQKRYFAQLLKESAELPDALKPLLKVGRDTVERASASERALLGALERDSVLATRVERLGTIPGVGPVTALSWALEIGEVSRFPSLKHAVSYCGLCSAENSSAGIQKRSPISKQRNKHLQTVLIEAAKLAPRWNSDLALLYEKEKQRGNRNRATLAVARKLVAYLLAVDRREKPFQGGKKKAKPLKAAA

SEQ ID NO: 44873 - protein, 328 aa, unidentified
MRYIGIDISKSTFTVAYSSDRGSAVRDFRNTSADIRKFIRTLPAECHCVMEATGPYSTLLLYLLSKAGITVSMENPLKIKNFAKAMLTVTKTDRADARLIALYGERMQPEPYKIPSETLMLLKQKRTVLRQFKKQLAATKNLAHSLDVLPVVDKSAKRAVSSVITSLEKQISNLEKELADVTEKEFDRQLKLLTSVKGIGITLATALIIATAGFSNFDNSRQLSRYLGLAPTYEQSGTSVNYRGHINRNGDSSLRGLLYVAAWPASRYNAACKETYTRLRERGKPGKLAMVAVANKLLRQAFAVVKSGKPYEDGFVSEKPAENRQPMA

SEQ ID NO: 44874 - protein, 394 aa, unidentified
MKLVGIDVGKNSHHFCVMDKETGELNVTPSSFSNNKEGFDFLINSLKPYSKKSILLGMEDTGHYHVALLKFLLSNGYTVALINPKTTDLTRKMEGGITKNDKLDTITICDVLDTPERKKQYRITKVDRFDLYEQRQLTRHHHNLKEELNVYCNRLQKSIDLVFPEFNTLFGSKYGVVYMNLLKTFGSAEAIASTDIRTIRKFFEIKGKGNRISLTPEKLKECAKNSIGISSEVETIQIKHLVSQITLIKEQIAEIDKKIEEFSIPNNSPILSIPGISHFSGTSILAELGDIGNYSKPSQIIKFAGVAPYHYESSQYNAQHTAITKKGSKYLRKTLYQIILPVINNNPVFKKYYLLKISQGKGHRCAQGHCIRKLLRIIYHLLETGQSFDPALLR

SEQ ID NO: 44875 - protein, 475 aa, unidentified
MANRDIAHSASGAGVRALYHACFRAPQLSVHAKTRGTMTARERRGANGRHARSSRDCTRRREKVSRSCFSRRESRQERISRVTCIDVFTTRAGGSLDEMKRQPPVRRGTRNRVHRLFSAVSAARTGRPAVEYIGIDVHKNESQICLLTDDGEIIERRVATRRDRLAEALGSRSRARIVIESSTESEWVARCLENLGHEVVVADPNYAPMYATRSRRVKTDRRDAQALMDACRLGAYRAAHRTSDEQRRVRALLITRDTLVRSRTRIIQVLRSLLRREGIRVRTGEAVYFARRLAEVELTPWLSSLASPLVAVLESVNHELGSIERVLKGIVESDANVRRLCSVPGIGPVTAAAFVSTLDRVERFRSAHEVEAYLGLVPREYSSGERRQLGALTKAGNSRVRWLLVEASWIILRTKGDNTLALREWAGRVALRRGRSIAVVALARRLAGILYAMWRDKQEFAPLSARKQSQQTAAA

SEQ ID NO: 44876 - protein, 366 aa, unidentified
MDTIYIGVDFHARQQTVCYLKTETGELVTCELKHQDKEVVRAFYAQFPGQVIVGLEASGYSPWFERLLEELGCEVWLGHATEIRRRARWRQKNDRRDAELILDLMLHDEFPRLHRPAVQSREVLRMLRYRQKLIKMRTMSKNSLQAIALQAGLAKRSSLFTKDGQLQLARAEMSPVLHWQREHWLQLMEPLNQQLLETMVWFKAESKGDVCITRLRTHPGIGLLTSLCIVHTLQPVSRFRNTRKVAAYAGFDPVERSSAERKCFLGISKAGSRLLRYLLVEAAHTAVRKDEDLKRFYQRLAERRGRPKAKIAAARKLLIRTYIMLRDEIDYAEFRHRAVAARLARRGQGPSNVPEVLIGQPASPEQ

SEQ ID NO: 44877 - protein, 340 aa, unidentified
MYEVSIVGVDLAKQVFQIHGTTSDGRAVFRKKLSRPQFAKFMAALPPCIVAMEACGTAHYWGRELARLGHDIRLIPPVYVKPFVKRQKNDAADAEAIAEAAQRPNMRTVAVKSAAQQARAMLFRTRDLLVGQRTQLVNALRGHLAEHGIVLGKGIGNVQRLALRLEEDDLPDLVRALGRLYLDQIARLGAEIEKLDSRIVTAAKENGVARRLQTMPGIGPVCAMAITAFAPDMREFRRGRDFAAWLGLVPRQHSSGGKQKLGRTSKMGQRDIRRLLIVGAMSIVHWRGRDGGRPGSWLARMLARKPRMLVAIALANKMARMLWAMLVREEDYRDPTGAVC

SEQ ID NO: 44878 - protein, 345 aa, unidentified
MHIVGIDISKAKLDCCWLREAEKNKVKTKVFRNTLMDHDALVHWLLHQTGTSAEGIQIVMEATGVYHEPLAYALHERGFLVCVVNPARVREFANSLGNTHKTDAKDSQILALYGHRMQPEQWQPEAPEVRELKALISRLEALEADLQRESNRHEKAEFNRSSERVIASLELMMTQLRQEKQRLEEDIDDHIDRYPHLKKDRVLLLSIPGIGPVMSRLMLSVIRSRSFEQAGQLAAYLGLVPRIQESGQWKGRSRLSKQGPARVRAKLYMAAVTSIRSNPDIRRQYERLTQNGKSKLRALGAAVRKLVQICFGVVTHRNEYCPEVACSDLRPVRRDGICGGFGARM

SEQ ID NO: 44879 - protein, 339 aa, unidentified
MQLYAGLDLHSRNTYIGIMDKEFKRVFNKRVANKLPLILATLKPFQNQLKGIVVESTFNWYWLIDGLMDAGYHCMHLANPAAMKQYEGIKHTDDQHDAFFLAQMLILGILPQGYIYPKEDRPVRDLARKRLFLVRHKTSHILSLQSLIARCSGQRVSANEIRKFTVEDLQQLLEQEYIVLSAQANLDTIVFLKQQILQLEKAIKNKVKLSKAFQQLLTVPGIGLILAMTIMLEVGDIGRFHQVGNFASYSRCVSSQRLSDGKSKGHGNRKNGNRYLSWAFTEAAHLSRRYNERFRSYYNRKVAQANTSLATKALSNKLARICYYIMRDQVPFRENLLSQ

SEQ ID NO: 44880 - protein, 422 aa, unidentified
MHEERRWFVGIDWASQEHVVTLCDAQGKKIGEREFAHGGTGLTDMIAWLLKASGGGAGEMHVAIETPHGPIVEALLERGFNVYSINPKQLDRFRDRFTVSGAKDDSLDAYVLADSLRTDMHLFRTLMVSEPLIVELREWSRIDEELKVERVRLANRLRDQLWRYYPQMLELADDLSADWVLDLWEAAPTPEKTARMREATVARILKSHRIRRFDATHVISELRKPALSVAQGTTEAATAHIRLVVAQLRLLNRQLADAGLQLDRLCKKLAEPVTGGDGENVSGQRQEHRDVTILDSLPGVGRTVLVTMLAEAPDALQRRDYHALRNLCGSAPVTRRSGKSCLVMRRRACNRRLRNAAFYWAQTATQCDPTSRAKYAALRARGHGHARALRSVVDRLLYVACAMLENRTLFDPSLAEKKAAAA

SEQ ID NO: 44881 - protein, 407 aa, unidentified
MLFVGDDWAEAHHDVEIQDETGRALARRRLPEGIGGIAALHALLADQLPGDAEPDQVVVGIETDRGPWVQALLAAGYQVYAINPLSASRYRERHVTSRAKSDPGDAKVLADLVRTDRRHHRPIAGDSELAEAVKALARTHQNLIWTRQRQTNALRSTLREFYPAALVAFDDLASRDALAVLAKAPTPTAGAALRVTQVEAVLRAAGRQRNLHARAEEISAALRTEQLSAPPLVAEAFGAAVAALVAVTAELVGQTAAVEAKLAAAFEQHPSAEILRSLPGLGPVLGARVLAEFGDDPHRYADAKARKNYAGTAPITRASGKSRVVLARVARNRRLADALYQWAFSALSSSPGARAYYDAHRVRGATHHAALRALGNRLVGILHGCLRRHQPYDEARGWQHAAVPRAA

SEQ ID NO: 44882 - protein, 522 aa, unidentified
MNNTTHTHVGIDLARRAKHKAVVLREPTSAGKAASPKSFAFAHDREGFVALRQYMLKRIDGASLDGVVVNMEPTSGVWEVVAGFLRAHGADVYFTRTDVVSQLRKVHSKFAKTDRIDAHTLATMPRSFPERLVPVADLEPRIRTLRQLSAQRHRLVEDATRWKNRLVAKLEFVWTPLLGRLKSEERFSQLLRAFFRHFTRPRDVAHLGHDRFLAWCRTHAHGNTDPDRFETLWQGALQSAQLWELLDGCQAITIDWDCLHELIVQDLRLLENLETEIATVEERIGQARADVPECNVVEQLPGVGPVVGATLASTLLPIARFASAKKCGAFTGFTSRRKSSANRDIEGLRITKSGNRRLKRDLALAADVAMKHDAELAAFAIRLLGAGKHYNKVRVAVGRKLAVRAYSLLKRYAAGQTDVTYLWRDPDDRPIDKRQSKALAHALWTTFNSQQKQNGSSPSATASWQSEDSTQRTPDELPGGDHDQLPIPNANPKRTFNTWGTSRGKPVRNGAPHSRKKHLLSP

SEQ ID NO: 44883 - protein, 318 aa, unidentified
MMDLERFIGIDVSKELLEIAILPEKETWSSRNDEAGVEALVKRLKGLSPSLIVLEATGGLETLVLASLAAAGLSVCVINPRQVRSFAKATGRLAKTDRIDANILAQFGQKLRPEPRALKDHELQQLGALTVRRHQLVTMLTAEKNRLGAAPKSVRRNIQAHITWLEQCLKEINKDLEQSIKATPLWCEKDALLRSVPGVGPVLSATLLTGLPELGTLNRKQIAALVGVAPLNRDSGQLRGKRGIWGGRALIRTTLYMATVVAVRCNPVIKVFYTRLIAAGKGVKVALTACMRKLLTILNAIIKNHKPWQQSFAATVDN

SEQ ID NO: 44884 - protein, 456 aa, unidentified
MKIPQSTIRLLTGRLVKILLYREVSTMKSNTQNAKIEAITEKTLVLGIDVGSETHYARAFDYRGIEYSKKPFKFSNTEAGFATFKEWILDLKERHEKDKVVPGMEPTGHYWFNLGKFLQDNEMKPVLVNPHHVKKSKELDDNNPTKNDRKDPKVIAGLIREGRYMIPYLPDGVYADLRTASNIRFQLQAELTRIQNRISRWFNIYFPEYKTVYGKPDAKSGMLILKAAPLPEDILTLGIDGVNQIWRDAKLRAVGKARAKTLIEAAEHSIGSKEGTMSARMEIRMLLEDYESKNMRLQEVMVLIEELVKEIPMAEKLLEIKGVGIRTVSGFLAEVGDISRFNNPKELQKLAGLALVENSSGKHKGKTTISRRGRKRLRYLLFEVAMSLVAKNPEFRELHNYYTTRRLNPLKKMQSLMAIAAKLIRVFYAMLTKGVDYDPKKMISDIKRPTVYLQAA

SEQ ID NO: 44885 - protein, 381 aa, unidentified
MKKDSIAKLQVTKSQIRRMAAKQRLTVGLDLGDRSSRYCILNEAGGIASEDQLPTTKAGLDSIFAKMAPCRMALEVGTHSPWVSRHLAAMGHEVIVANPRKVRLITQSVKKNDRMDAEQLARLARVDPKLLAPIRHRGPEAQADLAVIRARAELVDCRTALINTARGLAKPMGERLKSCDADYVKESLADGLSEATQNAIRPLLKSVEEITKQIGVYDKKIQEIEKRYPETKVLKQVNGVGTLIALTFVLTLEDAERFAHSRDVGPYLGLTRKLRDSGESQPELGISKAGDTLLRRLLVQAAHCILRDGAPDSDLKVWGLTKVQAGAGKKGGKRRKKKAAVAVARKLAVLLHRLWVTGEVYDPQYNRKAVEAAKGKGKAAA

SEQ ID NO: 44886 - protein, 345 aa, unidentified
MPIVGGLDIHRKQITFDYLDTATGEVRRGQIAPADRKHVRAWLARFAGRGGVAFAFEGCTGWRYLAEELAAAGLRAHLGEPADTAALRGRKRHAKTDKTDARHLRALLAEGRLPECWIPPPHILEYRALLETYHDLRAAHTAWVQRIHAVFFRQGAPPLSDDALRTEQGLARLQAAAATHLSPAGQLQVATALDMLAATEARLGPLRQQLRETARHLTGARVLAERLYGVGPIAALALTCWLGGAGRFSSSAKAVRFTGLDITVWSSDRKGPPGRLSRQGPPVLRWAVYEAGKTHGRAAAPGHGYYATVKDRKNGKQAALSEARKIVRQACHILAELGDDALTAA

SEQ ID NO: 44887 - protein, 407 aa, unidentified
MIYVGVDWAEVHHDVCIMDADGHVLERKRISDSLTGLSELHALVADHLGENDEPGDVIVGIEKDRGLIVMSLLAANYQIFAINPIAAARYRERHVTSGAKSDPGDAKVLADLVRTDRHNHRAVAGDSTLSEAIKLLSRVHQNTIWNRQRQVNSLRSALKDYYPGALEAFGTDLSGQDAVAILAIAPTPSLGRTLSRAKITSALRKVGRRRHLEERTKRIYQALRQEQLRQPAVLETAYGVATETAIANIVQLNASLVKLEASLSEHFEQHPSAKVILSLPGMGTVLGARVLGEFGDDPNRYSDAKSRRNYAGTSPITRASGRSRVVLARHSRNKRLAGALDQWAFSSLLPSPGAHRYYNELKARDKHHRKAIRQLANKWVGILHACLESGTPYDENIAWSRRQERAA

SEQ ID NO: 44888 - protein, 311 aa, unidentified
MSALITFLGVDVSKQNLDVQAPTGAFRVPNAPAGIRCLLQRIHKISEPVHVICEPTGGYERLLVAALHKHQVLVSVVNPRQVRDFARAQGRLAKTDALDAKALADYGAACHPRATPPLSPQHLHLAELVRRQRQLQAMFVTEQNRLEHVQDPILRRSTRTHLRQIRAHLDHLDRLIGEIVAQHPDLQHRVQTLCRIQGVGRATAVRVLADLPELGSLDRKQAAALAGLAPFNRDSGTYRGQRHVTAGRSGARIALYMAALVAARHNPVLRTFYQRLRAAGKPPKVALTALMRKLVTLFNTLLKNPDYALVS

SEQ ID NO: 44889 - protein, 391 aa, unidentified
MSMYFIGIDISKYKHDCCIISAADQKVVSKVTVKNNKAGFDELLTIINSLSNPDDIRIGFESTAHYALNLELFLESSLLTFMEVNPVLISEYKKSKTLRRTKTDSVDCESIARWLMTVEYKPHSKGFYHAYSLKSLTRLRDKLIRQRSFYLVKITNVLDHTFPEFKPFFNERFSKTALYLLENYGSAEKMACMNSASYEKLRSLSRGKFSPQQFLKLKALAANTVGVNNSIFDVELNSLLSLYKSLAKEIDTIEKEINKLIEEVHPHYMSIPGIGSLSAAVIYSEYGDISNFSNPGQMLAFAGIEPGVNDSGTESHGGRMVKRGSSQLRYTLINCCLPLIRFDMTFATYYSKKRGEGKPHRVAITHVAKKLIRVIYALERLDIDFNTQKLH

SEQ ID NO: 44890 - protein, 360 aa, unidentified
MIVQGTSVGLDVHALSVVAHAVDEETGKVARARLCPDHGEVLSWLQQLRAPVRVAYEAGPTGFGLARAITEIGMECLVAAPSKLQRPTGDRVKTDARDAAHLARLLRLGEITAVRVPEREIEAVRDLVRAREDARADLMRVRHRLSKLLLRQGFVYSGGTPWTCAHEEWLRRHRFDDVHLKAAFDHGFDAVLAATAARERLDEQIMVVAASPRFADPVNRLGCLRGISALTGLALTVEIGDWSRFTGSSIGAYVGLVPSEYSSGNSRVQGSITKAGNTHVRRLLIESAWHHRKSYSTSGPTLRARWAKVDPALRARGHAGNRRLNKRWRGFTERGKNPLVANVAVARELAGWCWSLATMQ

SEQ ID NO: 44891 - protein, 342 aa, unidentified
MQITTIGLDIAKNVFAVHGIDEAEKVVVRKQLRRGPVLAFFKALPPCLVGMEACATAHYWAREFTKLGHEVRLMPAKDVKAYVKRNKNDAADAEAICEAVRRPTMRFVRIKSAEQQGQLMQHRTRDLLMRQRTQVINALRAHLAELGIVAAQGDKGVKELLALVTDKEDTRLPIDARASVIVLAAQLEATQTVIGAIEKRIKMQHRSNEASQRVETIPGIGVIGATAIAATVADPTVFRSGRDFAAWIGLVPRQDSTGGKQKLGPISKQGDRYLRRILVIGAHSVLRRAMQNPEKYPWLTRLLARRPFKVVAVALANKMARMAWALLAHGGTYRAPALVAAA

SEQ ID NO: 44892 - protein, 389 aa, unidentified
MAQVNDLSRSLTVFDSISTLVVVVEMSKASWLVSGVVPGVERQPLKKLEPDATALLRLIERWRNEAVRADRPISRITLAYEAGRDGFWLARWLIARGIEAHVIHSASVAVSRERKRAKTDRLDAAMLMRVFLGWLRGERGHCGMVAIPTMEEEDARRPSRERESLVDERSRITNRMKSALARLGIRGFKPHLRKAPERLASLRMRTAEGTGLPANTIEEFRRDMARLALVREQISSIEKTRAERLERAPDTGPHAMVRLLARVIGIGIETADMLVREILSRKLRDRRAVARYAGLTGSPDESGLKRREKGLAKAGNARVRRGLIQLAWRFLMFQKGSALAQWYRTRTEGPSGARKTTMIVALARKLLIALWRLVTTGEVPDGVELRPAA

SEQ ID NO: 44893 - protein, 404 aa, unidentified
MTAVMIGVDPHKGSHTAVVIGPAEEPLGEIRVRASAGQAEKLAEWAAAWPERTWAVEGAAGLGRLLAQQLVAAGERVLDVQPKLASRVRLLQAGDTNKNDPNDALSVAIAALRSRTCRQVAAEDHPAVLKVWSKRHRDLARLRNQVACRLHAVLCDLVPGGTSKQISAAQAARILGQITPSGAAGLARAELAAEFLQDMRHLDAQLRGTRKKLAAAVKVSGTTLTEVFGVGPVIAGTIIGDIADVSRFPGRDHFAAYNGTAPVEVSSGNHKIHRLSLRGNRRVNHAIHMAAITQIRHKHSEGRTYYEKKLAEGKTHKEALRSLKRKISDAIFARLQADARQAAAARAKGPGGHPGNDSASSAAGSHPARQLFGQATPGPGTSLRPGTTTGTPPKPVSKKTRPTT

SEQ ID NO: 44894 - protein, 332 aa, unidentified
MNMHLQGRVANCDRRPNAGIDVCKQHLDVCLCTLELRVANDATGWDVLTVKFKEANVDLVVLEATGGYECGLVCALQGTGITVARLNPRQARDFAKSMGVLAKTDQVDARTLRDFGDVLARHKDRAKFITPLVDEQRQVLAELMTRRRQLVDMRVAENNRLEHAGKHSMRSIKSVLKTLDRQLGAIDHEVDDHLDRHFKDQRTLLDSVKGVGPVTILTLTAALPELGSLGRRQIAKLVGVAPLANDSGLHKGKRRIWGGRTDVRAVVYMAALAAIKHNPTIKVFHSRLIAAGKPKKVAIVACMRKLLTILNAMLRDQSMWNAAKHLQSTKTA

SEQ ID NO: 44895 - protein, 424 aa, unidentified
MQYALTQVLPDVPAGGVCAGIDWATADHVACVVDMTGRVTDRFSAAHDRAGIAAMITWLRRNKVTEVAIERGDGPLVDALLAAGLTVVVITSRQVKNLRSRFGAAGAKDDRFDAFVLADTLRTDRARLRPLVPDAPATISLRMAVRARRDLVRHRVAVCNQLRAHLAVAFPAGIMLFHDLDSPISLAFLARFGSQDAAAELDEQAIGAWLATIAVRGRPAPASVLHARLHAAPPGATGADGAAQAGVTAALTATLTAVSAQIKALETQIAGQLAAHPDAHIFTSLPRPGTVRAARLLAEIGDCRSRFPDPESLAGLAGVAPVTRRSGTRIAHGFRWSVNRQLRDAVCDFAADSRHASPWAAAIYDDARARGKDHPLAVRITARAWTYIIWRCWHDGTAYDPAKHNALQHILARQAAGSATQHDQ

SEQ ID NO: 44896 - protein, 357 aa, unidentified
MQYHAALDTSATTTAICVVKAKDGEIALETSVTTDPEAIWQALEPYANRLLLVGHEATSWSAWLHRELEKHGIPMVLLETHHAARMLDAQRNKTDKNDARGLAQLVRSGWFKQVHAKSERANRMKLLLAHRRTLKRKLLDIENEVRQSLKMFGLMVGPRVQRSTFCNRVRELVAGDPLLQVLSESMLTCWQVLWDQYRELHKMLVQLVGQEELCRRWCEIPGVGPVTAMTFMAAVDDPHRFAKSKTLGAHFGLTPKREQSGTSVDRDGHISRRGDGEVRTALYEAASGMLTRSKQHSTLKAWGMKIATKRGHKRAVVAVARKLAVIMHRMWIDGSRFRFSAANDQPESSGNAVAVQA

SEQ ID NO: 44897 - protein, 361 aa, unidentified
MHDSITWIGMDVHKENIVVAAVNGAGGTAARWEAPNTVKGKERLANRLSEFGMIRCAYEAGPCGYDLRRFLEAKGIPCDVIAPSLIPKKPGDRVKTDKKDAEKIARMHRMGELTAIRVPTPAQEALRDLLRAREDANEDLVRRRHRLQKFLLRQGRRYEGKNGTRDHWRWIRAQTFEDQNSESVLCEYIAAVDQEIERIGRLDAQIEQESKSPEIAPVIARLKALRGVHTLTAMTILSELIDLNRFDSPRRLMDFVGLVPGEYSSGGKQWRGSITKSGNAHVRRVLVEAAWHYRHSPRSTGAAIKKRRERQPPEVIETARKAELRLYKKFTRMVMRGKKTTVAATAVARELTGFVWAIGRI

SEQ ID NO: 44898 - protein, 454 aa, unidentified
MSKNKKQNQSKVIEIDALAQINLNAAGLDIGDEEIVAAVPKGRDDKSVRSFPTFTADLHRLADWLKDCEIDTVAMESTGSYWIPIYEILESRGFDVYLVNSRHVKNVSGRKTDVIDSQWIQQLHTYGLLAPSFRPPEDICAIRSLVRHREMLIRYRSSHIQHMQKALNLMNLKLTNVLSDITGVTGMKIIRAIVAGEHNPEILASFRNRQCKHTETQIAKSLEGHYKREHLFELKQALELYDIYDQKLAACDHELQELYNAFDPPDEPGTEPPKPKKQKRRKNQPHFDLSQSLYRMTGVDLTQIDGLDALTVQDILSEIGTDMSAWPTVKHFASWLRLSPNNKVTGGKVIRRGTQPTQNRASTAFRLAAQSLARSDSAIGAFYRRIRARHGAPKAITATAHKLARIVYFMLKNRHPYNDPGASYYEEQYRKRVIRNLHRKAASLGMRLEPVGVS

SEQ ID NO: 44899 - protein, 342 aa, unidentified
MKFYCGIDLSARDCHVCVIDEQLKIVVQQKLRNELPRICQLLGPYKANLKIVVESTFNWYWLIDGLQAAGFDVVLAHTLGLYLITGAKVKTDRRDAYALAKLLLVGAVPAAYIYPVETRPVRDLLRRRLHLVQVRAGEYGSLRRLLLRQGILSSKQQEIKTATETELEQWFEHPLVRLHASQELQRIELYSQQIAELEKTILLLAKTEQSYELLLQLPGVGQTIALTILYEVGELTRFANVKDFSSYCRVVPGIAQSGNVSRRGRASKQGNHYLKAAFSQAAVHAVRCYPKVRRYYERQLKRHQGRGRQMICYNIIAHKLAQAAFHVLKEQTEYREELLFGR

SEQ ID NO: 44900 - protein, 319 aa, unidentified
MNQAPLSVYVGVDVSKAQLDVAIGQAGAFWSAGNDAIGIRRIVQRLQELQPALIVIESTGGLEVPLMVELASAQLPFALVHPGRVRDFARSMGLLAKTDKLDAHLLAQFGEAIRPPLTQLPSPEVQELNGLMVRRRQVLDLIVDEQNHLASTRLSLRPRIEQHLDWLQEELHDLDRKIEDLIGSIPTLREKEAILRSAKGVGPVLSAKLLSGLPELGQLNRKKIAALVGVAPFNDDSGYRRGKRRIKGGRADIRQVLYMATVAAVRFNPAIRFFYQHLLSQGKLKKVAIVACMRKFLTILNAMIRDMRPFACTSAPVNS

SEQ ID NO: 44901 - protein, 346 aa, unidentified
MKTYLGIDLHKRSSTWVLIDENKKVLDERTVPCTPLLVRQAIHQLPLRGYSQTKVAVEPVCGWRWFSNELESHGMDVHIANPLKVRLIADSKLKTDRVDAKTLALLLKADFLPESYKASDDTAVLRNMVRHRGYLVRQRTSIKNRIHSICTREGSHLTSLTPLTKIGIQTLKGGDNEELKDLVVLMDEVSVHIVVIEKQMKLISKTPILELLMTMPGVGLVSAIAIHGEVGDWSRFDTPEKLASYSGLVPSQRSSGASVRMGHITKMGSHILRYTMVEAAMKVRNQESHEVLYSFYERLVPIRGAKSARVALARKMLTILWYMVTQNTPYENRKATSTQSEMISCA

SEQ ID NO: 44902 - protein, 428 aa, unidentified
MKYNTQNAKIKSITEKTLIVGIDVGSETHFARAFDWRNYEYSKKQLEFSNTEAGFMTLKAWMADFAEKYGKNVVIPGMEPTGHYWFNLGAYLQDNGMKPVHVNPHHVKKSKELDDNNPNKNDRKDPKTIAALVNEGRFSYPYIPTGIYAEIRSLSNLRLQTQEEITRIKNRIARWFSIYFPEIKDVYRNPDSVSGLMILKEAPLPQDIVKLGVDGINKIWRDAKLRAAGLKRAKTLVTAAEHSIGSQEAPDSARIELKNLLNDYEIYKNREEDLMSLTEEKLSEIPHIDKLLEIKGVGLKTVSGFVAEVGDITRFDNPKQLQKLAGYAIVECSSGKHKGESHISYRGRKRLRYVLYEAAISLIARNEEFKEVHRYYRTRKENPLKKMQSVIAVACKVLRIFYTILTKGVTYDGAKMMQDIKRPQMLAA

SEQ ID NO: 44903 - protein, 476 aa, unidentified
MPRQTTSPAEPGSFPLLAQETLYVGVDIGKRAHVAGFLSVTLLTRHQRFEHCPALSFDNSREGFRSFLDRIQTFVPLTQVQVVLEVTGHYHRALMQYLQNLDIPVYIIHVQKRREGLLKSDKRDALGLANQLYNQLEKGVQVDDPLQAVRQLAPPTAAAAQLHGMVHHHAELVAESTQRKNKLTSICDELFPEFTRLLRNPNLPTALALRSHFPTPAQLAQASFAELREARGRTCSVSDAKLLELQRLAAQSIGAKDPARVNGLVFEQKQLIAELQLLGEHLEQLETEIVQVVEHSREGKILISVPGIGPQAAAALIATIGTIANFERPAQLKSYFGWVPKVAQSGSSLDWSHLTPRGVRQMRQTMYLIVWRAIQWDSDWKEMYERLIARKCHVDERTRRLVGREKVIGRLAGQMTSVIYALLKKDQELLLHLAPGATPPEPELYDPALHRKHRMGQYQSFRSEERPRKELQLPAN

SEQ ID NO: 44904 - protein, 344 aa, unidentified
MEITTIGLDLAKSVFQVHGVDATGQVVVRRSLRRAQMLPFFARLPSCLVGMEACGTSHYWARELIKLGHQVRLMPPAYVKPYVKRGKTDAADAEAVCEAVARPTMRFVPVKSPEQQAALSMHRTRDLLVKQRTQLVNMMRGLLAEFGIDIPKGLERALLMARRIVDGEAPDVPMEAARIVSTLSRQALDIHIQLRQIDRDLLVWQRGNDVSRRLMTIPGVGPIGATALAASITDPHQFRSGRQFAAWLGLTPLQKSSGGKERLGRITKMGDKYLRKLLIVGMTSLVRRAKYNPKAVDPRLADLLARKPVRVATVAMANKTARIVWAVMARGETYRAGHQPALAT

SEQ ID NO: 44905 - protein, 398 aa, unidentified
MPFYGGLDWGGIAHAVCVVDGAGQVVARIEVRHDDAGLVDMLARLRKIAPPTELPIAIERPSGLVVDALIKAGHPVIPIHPNVVKACRPRYRAAGGKSDPGDAYMLADVLRTDGHRFRPLSPMTDEIKALRALVRGRDDLVAQRVALANQLRSLLEGFWPGAGAIFAAIDSPIALAFVARYPTPNSASRLGEKRLASFLARHAYSGRRSCAELLARLHAAPKGLTGAEADAKGELVRVLAAVLERLVHEIAKLSSRIEHAVAELPDGQIVMSFPRAGRICAAQILSELGNVRERFQTEDQLAAEAGVAPVTHASGKSRGVVFRWACNKNLRVAITCFADNSRHASGWAAGVYTRARDRGCKHAHAVRILARAWVRVLWRAWQDGEAYDPAKHKAAIHV

SEQ ID NO: 44906 - protein, 365 aa, unidentified
MFKNSMLFIGLDLGDRHSHLVILDQDGELVEEARLPTTQASLERKFSGIPACRVAIEVGAHSRWVSALLARLGHEVLVADARKLRLIYNNPRKHDRADAEYLARLARLDPGLLSPIHHRSPQAQAHLAVIRARDSLVRARTQLINHARGLVKTTGARLPSCSAASFHTKTASAVPQELLPALSPILATIGSLTQSIQAYDRQIQQLAQDHYPETRLLRNVPGVGPVTSLAYILTLEDPHRFRKSRELGACLGLVPRTDQSGAQDPQLHITKTGDSYLRRLLVQSAQYILGPFGPDCDLRRWGLKLAERGGKSAKKRAIVAVARKLAVLLHHLWKNGEVYDPFYQSAQPPAELPQPSAKETAIAPA

SEQ ID NO: 44907 - protein, 335 aa, unidentified
MQIYGIDLAKEKFDVSFFDLTSKKVSNQPSHKVVTNNLKGIGKFFKGLPSDAVLVAEHTGVYGDTLLKCCMDCNVKIAFVGGYVIHRYRATPDRAKTDVLDSALLRDFGERYPDKLKYKTFPEEALYELRQLARHREMLVEQRKQLITADKNEDCRPIRSLAVKRSMDRIKEMLDTEIAETEKEMLKVINGHESIHHNYELVKSVDGVGLITAVELLVKTENFTKITTARQYAAYAGTAPYEKSSGKMDKGAHISKIGNRRSKTLLYICAESARLHNKEIKLYYERRTLIDKKPHHYVLNAIANKLLRIIFTLVEKGEYYDANFIRQDPRVVKYN

SEQ ID NO: 44908 - protein, 355 aa, unidentified
MNDAKYIGLDVHQATISVAVLDSAGKLAMEAILETKAETILQFIHGLRGSLHVTFEEGTCAAWLHDLLKPHVAQVLVCDPRKNALIKAGNKSDRIDARKLADLLYLNKLNPVFHGETGIRSLKEVARSYLALTRDTTRVMNRLKALYRSWAIPCAGQRVYAPRYRSEWLAKITEAGVRRRAEIYYQQLDALRSLREQVRRDLLAEGRKHSAMKLLRQIPSIGPIRAVLLIALIQTPHRFRTKRQLWAYCGLALKTSTSGEYRIVEGRLKRSKKFLAIRGLNANHNHDLKNIFKGAATRAAAVPGPFQEFHAGLVARGMKPTMARLTLARKIAAITLIVWKKGARFDAEHLKQQAA

SEQ ID NO: 44909 - protein, 413 aa, unidentified
MQKNYIEFEQVIERGCGMDVHKAVIVVTVRGKGIKTVTKSFSSFTSSLIKLKEWLKKQGVTHIAMESTGVYWKPVFNVLGDDFKILLVNARHVKNVPGHKTDKKDSKWLAKLLLSGLLRGSYIPCREIRELRDLVRYKTKLTNQVSAEKNRFQKVLEDANIKLSVVLSDVFGVTGKKMIAEILKGDYKPEQLLYHVHGRVKASREDIKEALTGYVSDHHRFMLKTIMGNIPKIEPTILEPDTQINMKTDVYQGILELLETIPGVGYDGAVAIIAEIGVDMDAFSTHKHLASWAGMSPGSNESAGKNKSGRITYGNKFLRAFLVQMGWAASRTKNTYLSSKYKSLVGRRGKKRAVIAIGHKILIAAYFIIKEKVEYNELGEDYLNNFRKDKLIEYYKKQLGKLEPNFNFGNEVA

SEQ ID NO: 44910 - protein, 427 aa, unidentified
MPYRIAGIDVHKAMLAVVVADVEVAEDWQFERRRFGASPSQLRLLCEWLVEREVEEVVMESTAQYWRPVWGALEGDWQPTRRTRVDAGPTAGALHLAQAQSNGGRRGRKRDFPDAERLVKRLVAHELTLSFVPDVTQRLWRTATRRKYQLTRNRVQLQNRLESLLEEAHIKVSSLVSDLLGASSRRMLRALANGETNPAAVAALGSPRLHATPEQLCDALGASTDLHPLYRRLLAMTLAELEVIETHMRQLDEELAVLLRVHQDAVQRLAAVPGLGVDSAQQIIAEVGSKASTFPTAKRLASWVGACPGHEESAGINHSHRSPNGNRQMRRLLNQAAQAAVKTKGSIFELLYRRFVVRLGHAHAIGAIAHRLCRLIWKILHDGITYEERGPAVTKARAHRRAAKMIRELRSLGYRVELTPAPSHTAC

SEQ ID NO: 44911 - protein, 410 aa, unidentified
MELLHRRCCGLDVHKETVVACLRLVSDGKVTTEVRTFQTTTADLLHLSEWLAANGCTHVAMEATGVYWKPVWHILDDGEFGLVLANAAHVKNVPGRKTDVNDAMWLAELLAHGLIRASFVPDTQTQEMRNLLRTRKQLVREQSSHVLRVQKTLEDANIKLDSVLTDLMGKSGRAMIEALIAGETNPVKLAALADRRAKASHEEFREALRGRVTKHHRFLLRLHLNQIDALDAAMATLDAQVEANLGPFRTAVELIMSTPGIKNLGAQVIVSEIGIDMSRFPSHAHLISWAGICPRNDESAGKRRSNRLRKGAPWLKTTLVQCAWAAVKKKDSYLQAQFYRIKARRGPKKAIMAVAASILTAIYHMLKDGTMYKDLGRDHFDRRSTDKQKQRLVKRLAELGYVVEIKSLAA

SEQ ID NO: 44912 - protein, 393 aa, unidentified
MYVGWDWAGKAHDVTVLDEQGRVVEHFEVGHHEADFEHALKRLCHHGRPEALPVAIERPSGLVVERLVEAGHPVIPIHPNAFNAARSRWGASHAKSDPGDSYRLADYLRTDGRRLRRLRPMDAVTRQLQALVRMRDDHIKARIAAANQLEALLNAHWPGALSIFADLASDIALNFLERYPTPHATAGLGATRLAAFLKRHSYCGRRSPAQLLERLRRAPTAPDRLDSEVLAELVRHQVCLLRTLLHTGKELEHAITAVLPDHAKARLLAGLPRIGDGVNLAQVLSEVGPILDASLDVDHAAAQCGASPVTKASGQSRGVHFRWAANPHARQALQIFADNSRHASPWAARLSARHVAAGKRHPHAVRILMRAWLRVIWSCWHSNIPYYPARHRS

SEQ ID NO: 44913 - protein, 338 aa, unidentified
MFYSGIDQHKATSVITTLTATGEQVAQVTLPNHRPVLRQYFQRFPGPHQAVVEATGRWYWLRDLLVPAGIELQLAHAKLLKAIAYAKVKTDAVDSVTLAQLLRGGLIPPAHMISDALRGPRDVLRTRLQLVERRLRCDHTHGSLLEKFNVERVEQLPPLYQLQAQLHMAQAELLQAQIHELEHAVQSDLLDTPAIQRLLWIPGIGRLMAFTIYLEVDDIHRFPSVRHFWSYCRLVPGAADSGGKHHHRPSKDGNRYLKLAFSHAAIRAVQYFPEVRQWFLRWKRKKPVRVARALVAKELAKSVYMVLKEDVDFNQQFKGTPLSKRKQASWPRRASPSA

SEQ ID NO: 44914 - protein, 417 aa, unidentified
MNHLDQYAAIIGIDWADKKHDLCLKLPGSDDLVFSTLTHSAEAIDDWANALRKRFGGKRVAVCIESRKVPLIHALLKYEFIVLFPVNPQSLARYRRTWHPSHAKDDPSDANLLVDLVQRHPERFHPWTPERPEVRALAALVEMRRRLVADKVRITNRLTAALKNYYPQVLEWFADRDTILFCNFVERWPTLQAAQRARAATLRTFFHENNARYPKVIERRLEAIRHAIPLTEDPGVIAPNQLLVDALIHQLALVMGQVRRFDQEISNRFAALDDAPLFDALPGAGPQLAPRLLIAFGEDRTRFPTGDTLSRYAGIAPVTERSGNKSWVHWRYSCPKFLRQTFIEWTNETVRFSFWARAFYQLQREKGKTHQMAIRALAFKWIRILHRCWMDRKPYDEAKYLMALKAKGSPLVAAFAK

SEQ ID NO: 44915 - protein, 351 aa, unidentified
MLQKTDAVVASTIGIDTGKNTLHLIGLDDQGTIVLREKLSRSRIVSRLANVPRCLIGIEAGMGTHYVARELIALGHDVRQVPPVYARPFRQTHKNDFRDAYAIAEAVRRPSTRCVPVKTDDQLDLQALHRVRSRLISERTAVINQIRGFLLERGIPVRQGLRFLRQQLPEILAKRIDVLSPRMIRIIEDLSGDWRHLDQRIEHVTEEIEVLAHGTESCRQLMTVPGIGPIIASAMVAAIGNGVAFAKGRDFAAWLGLVPKQMSTGDRTILGRISKRGNRYLRMLFMQGARVILLRPANWAKHSFGSWLTAAAKRLHHNVLATALANKLARIAWTILTERRSYEARVIADAA

SEQ ID NO: 44916 - protein, 334 aa, unidentified
MDKVTTVGIDLAKRVFALHGVDASGRVVLRKTIRREQFVETVAKLAPCLIGMEASSGSHEWARRFQGFGHTVRLMAPVFVAPYRKSGKNDGNDAEAICEAVSRPNMRFVPVKSAEQQALLALHRVRQGFVEERTALINRLRAVLTEFGVVLPNRTQWVRRDAVAVAEPLPVLARQAVEDLRAHLVQLDERIGAYDRQLEQQARQSEAAKRLMQIRGIGPLTAVAIVATVGSARDFASGRQFAAWLGLVPRQNSSGGKSRLGHISRRGDAYLRMLLVQGARSVLNTAARHTDRLSLWALSLQARRGMHKALVGIAAKNARIAWALLSKDQTLRTA

SEQ ID NO: 44917 - protein, 402 aa, unidentified
MNAVGIDVSKGKSMVAIMRPFGEIVSAPFEIKHTASDIHSLVELINSVEGESRIVMEHTGRYYEVLAHQLSETNLFVSAINPKLIKDFDNDSLRKVKSDKADAVKIARYALDKWQNLKQYSVMDELRNQLKTMNRQFGFYMKHKTAMKNNLIGILDQTYPGVNTYFDSPARSDGSQKWVDFASTYWHVDCVRKMSLNAFIDHYQNWCKRKKYNFSKSKAEEIYGKAKELVPVLPKDDITKLIIKQAVDQLNSASITVESLRTLMNETASKLPEYPVVMAMKGVGTSLGPQLMAEIGDVSRFTHKGAITAFAGVDPGVNESGSYEQKSVPTSKRGSSDLRKTLFQVMDVLIKTHPQDDPVYQFLDKKRAQKKPYYVYMTAGANKFLRIYYGRVKEYLASLPES

SEQ ID NO: 44918 - protein, 338 aa, unidentified
MELYAAIDLHSNNSVLVVLDSEDRTIFAKRLRNDLGEIVSCLRSCPGDVKAVAVESTFNWYWLVDGLNDAGFHVRLVNTAAVRQYDGLKHSGDFSDARHLAHLLRLGILPVGYICPKELRAVRDLMRKRSQLVRQRTAQILSIQNQVARSLASSLSGNDIKRFEEADIDALPLLDEHKIALKANLAVMQCLDDRVHELERVILGRARLQPQYRVLKTVSGIGDVLALTIALETGEISRFASAGHFASYARMVESRRESNGKSKGVGNARCGNKHLSWAFVEAAHFAVRYDPLVRRFYQRKCSKTLAVVAIKAVAHKLARACYHVMRDGVAFDAARAFA

SEQ ID NO: 44919 - protein, 365 aa, unidentified
MKKISTIEKIRKGSLKDRKLTIGLDLGDRSSSYCVLDESGEVLREHQLGTTPKAMKDAFGKMPRSRIALETGTHSPWLSRLLTQLGHEVIVAHARNVRLISESSRKDDRLDARTLARLARIDPELLGPVQHRSAKAQIHLTVIRARAGLVSARTALVNTARGLAKSYGERLRGCGTAQVSRELAAGLSVELRDALNPLLGEIESLNERIKEYDARIEQMTKESYPEVSLLKQVKGVGNLIALTFVLTIEDPHRFRKSRDVGCFLGLRPGRRNSGQSQPQLHISKEGDRYLRTMIVQGAHYILGPFGEDSDLRRWGLRLAERGGKNAKKRAIVAVARKLAVLLHKLWVSGEVYEPLRNSHKVQVAA

SEQ ID NO: 44920 - protein, 423 aa, unidentified
MMKLKYSICCGLDVHKNVIVATIVTTNKDGISEYLQKSFSTINSDIQRFHNWLIENNCYHVCMESTGKYWIPIFNYLENDIDVCLTHPKYVKAIKGKKTDKKDSKWIADLYKFDLVRCSFIPPKDFRQLRELSRYRFKLVCMKSSEKNRIQNCMTISNVGIASVLSDPFGKTATEIISYLLEHTADSMDEKAVRKLIKKGAKSKSDEIIEAIKGYTIETDQAKKLELARGHLEYLDDMITQTEVELYVRIKPYYEFVEFVSTMPGMTELSSTIVLAETGVDMDIFDDAKHLCSWCGLSPANNESAGKKKSVRIAKAGDYLKPMMVQCALAAIKSKKQPYFAIKYGRIKKRRGHKKAIIAIARMMMVCIYHMVSEKKPFTPTDYEELMDPQNHVESVVLNENNVFAYLESLGYDSSKLVKRYDN

SEQ ID NO: 44921 - protein, 315 aa, unidentified
MSTDSYVGIDVAKAHLDVALRPAGSTAQFAHSEAGIAALVVHLQTAAPALIVLEATGGLEVPVVAALAAAQLAVVVVNPRQVRDFAKATGKLAKTDRLDAQVLAHFAEAVRPEVRPLPDAESQRLAALLARRRQVVEMLTAERNRLHTAAAVVRPGLEAHITWLGQELSDLDQQTEQAIRQSPLWREKEQLLRTAKGVGPVVARTLLIDLPELGTLNRKQISALVGVAPLNRESGNWRGHRAVWGGRAQVRAALYMATLTAVRYNPVIRQFYERLRQAGKVPKVALTACMRKLLTILNAMLKHNQPWRAIPDPAS

SEQ ID NO: 44922 - protein, 400 aa, unidentified
MKRLSGGIDVGSVAHHVTILDEEDHVLYNRKISHTLDEFTESIKQFKKIEKKEKGEISFALEGKNGYSRPFDRILLDQGFALYNIDNLKLKRFREAFAGEWKDDERDALMLSKMLKLKEHINGKKEKVFIKIEKPSLITESLKLLSRHQQTLIDEKVRLTNRLSKKLLEVCPEILRLGKAKSKKLIAILTKYPDFSKYKSMTLKSLLKIKGIGEIQAPFLLKRLNHITYVGLTDIYKTIISSYAKRILELQEEIKAIDQKLDEIGGKNQSVKHLKTIPGVATKLASRFIGEIGNINRFPSEKQLAIYCGIACVNNNSGKVTKAKAVYKANKICKQTLITMAGCSIRIIPQCKCYYLKKRAEGKGHNHSLRCLARQLIKIIYKMLTENRDYIIKKELKKVA

SEQ ID NO: 44923 - protein, 331 aa, unidentified
MFPVGIDVSKKNLDLCMLYDGIKGRIKTRNIQNNRHSVENILRWLRLQHCSPEDVHVVMEATGVYHERLATELHDAGFRVSLANPHRSREFARGMGIMTKTDKVDAYMLACYAFLKKPHRWEPPAPEIRYLGALLRRRDVLLGDALREENRLEKYLSTDTPADIISSCRRMAQLLREEVSNIERQIKAHIKASPALRRDYTLLTSIKSVGPQLGMHMLVVLRSHNFVSAEQAAAFLGVVPIEKRSGTSVRRRPRMSKIGPPQLRAKLYMSALCGKIYNKRMRNIYDEMCLRGKPKMVAIGALMRKLVHWCYGVLKTGTVFNDEDLKPALST

SEQ ID NO: 44924 - protein, 334 aa, unidentified
MQNVTLIGIDLGKHSFHIHCQDKFGKTMLRKKFTRPKLMEFLAGCTSTTVVMEACAGAHFLARRIADLGHDAKLISPQFVRPFVKSNKNDFVDAEAICEAASRPSMRFVQPRTETQQAMRALHRVRESLIKDKVKTTNQMHAFLLEFGISLPKGEAVIKRLSLVLAEHDVPDYLSRLLMKLHAHYLYLVEQITTLELELKQSIKADDATQRMMTIPGVGPITASLLSSQLGDGKQFSCSRDFAASMGLVPRQYSTGGKPTLLGISKRGNKNLRRLLVQCARAFMMRLEHQHGRLAEWVQAQLSKKHSNVVACALANKLARIAWAITTRQNEYQA

SEQ ID NO: 44925 - protein, 316 aa, unidentified
MNKTVVQNINVGVDTGKDFLDIHIRPLNEYFKVSNNKKGIGEAIKRLRKLDIERVVIESTGRYEAEFVAACAKTDIPFSVVNPVHVKRFAGAIGRRAKTDKLDAALIAQFGEVIQPKLSTLKSENMQKMADIVRRRNQLIEMQTKEKNRLQIMPKSVQSSIKAIIVILKKHIEKMNDELAELIESCPDYSAKSELVQSMPGIGKVSAAALISYLPELGLMNSKQVAALVGVAPMSKESGKYKGKQVTQGGRHQVRTVLFMAMMSAMQCNLKFKTFYERLVEAGKPKKVAIIACVRKMVVILNSMVRDGVMWEEKAV

SEQ ID NO: 44926 - protein, 353 aa, unidentified
MNMLTDQIDHVIGVDPDRDRITAAIVAVGTGGELQRREFPATRAGYRAAIGWANGLTESVSRVWSIEGAGSYGAGLAMTLQAEGEQVVEFDRPATKATRDGAKTDGLDAVRAARELLGRTKWAQPRARGEREAMRVLLVARNSAQVSRVAAINELKALVVTAPVDLRESFRGLSTAKLVERCAHLRPNGDEEHAATKLALRLLARRVEQHRSELEVIDAELARLTESTVPHLLAEFGVGPICAAQVYVAWSHPGRCRNEQAFARLAGVCPIPATSGQNQTRHRLNRGGDRQLNRAVHTIVTVRQRHDPATREYIDRAVSQGKTPREARRCLKRYVARRLWRVLENPPTPLDDL

SEQ ID NO: 44927 - protein, 409 aa, unidentified
MDRLIERCAGLDVHRDTVAVCVRGPGPDRRRRHEIRTFGTTTADLLTLRDWLAAHAVTHVAMESTGVYWKPVYYILEEGFECLLVNAAHLKHVPGRKTDVQDCAWIAQVLEHGLLRASFVPPPPLRDLRDLTRYRTSLTEERSRLANRLHKVLQDAGIKLASVASDILGVSGRAMLTALAHGTTDADMLADLARGRLRTKLPALRAALAGRFRDHHAFLVGQLLAHLDYLEEAIVSLSARVEELLVPFAEKVTLVDTIPGISRHTAEVLVAEIGLDMRVFPTPGHLASWAGLCPGQHESAGKRRAVKTRKGNRWLRGMLVQAAHAAITVKGCALAARYRRIMRHRGHKKAIIAVAHAQLVIAYHVIKHDVPYRELGADYYDRQFAERTRRRAVASLERLGYRVALEHVA

SEQ ID NO: 44928 - protein, 340 aa, unidentified
MPLYGAFDLHAKTNHLGIIDGSGKRVLMKKLPNEGSVILEALKPLKRRIVGIVVESTYNWYWLVDLLMESGYKVHLANPSAIQKYSGLKHADDVHDAFWLAEQLRLGVLPVGYIYPKEERPIRDLLRKRGHLVKLRTSLITSLQNVITRNLGFQVDVNEVKRLREDRISPLLGMNEDLALVGSASKETIDFLTRQIKRIEKVVETRAQLKESYRYLLTLPGVGRILGLTIMLETGAISRFPGVGNYASYCRKVNSKWISNGKAKGKGNKKNGNKYLAWAFSEAAELARRYDEQAKAYYNRKARKSNFMLAHSALAHKLARAAYYVMRDQVPFMPEKLFAV

SEQ ID NO: 44929 - protein, 341 aa, unidentified
MSNANTYIGVDLHKKSCYVTVMDVLGKIRKQTEISTNTDKVRKFFNRYQTARVAVESTMNWIPFYENLESLGCSVVLSNPLMTKAIAAARIKNDKVDSKVLADLLRTNLLPTAYIQPREIRDLKELVRQRVSYVQLRTIIKNKIHSVLFKNNLKHDFTNLYGKAGRTWLESLETRDIYRAELDRYLTTLDLLDGQIEELSQNIIATAKTDYDCKLLMTIPGISYFSALVIKSEIGDISRFPNAGKLCAYAGLIPSTYASADKVRFGRITKRGSKWLRKSLIDAITSGSRHPSRLCFFYRKLKKNKGTGKAKVATARKLCSIIFAILTDKQPFREFAPVKQR

SEQ ID NO: 44930 - protein, 370 aa, unidentified
MSIKRILVNTIDTDLEYEVIGIDLAKNCVSAILLTTDGEIFGIDRLDYQELEKSAQELSPTIFAMEPCTEMNYMVQKLEDWGHHCIVISGKNVKDYVESHFSNQKTDLNDAQALAFLTKDTQLRTVKAKDPEQLKYASLTTLREQYVKQYRQTMVSLKGICQVWGLSISKGISGKARLKDMIENHADFPAELRTALVGMVAHAQAVQKDLKSVTKILEELAKKDKACQLIQTVPGLGTICSCRLRATVGDIKRFKHPKDFPAYYGLVPRSMATGHNEKKGKITHRGDKTMRSLMVQGAGIVINQATKGNLHSKQLTKWILKKQKEKMPWGKLVCAVAAKLLRIVRAILISGKPYNPKIAGVAKCSLPKAS

SEQ ID NO: 44931 - protein, 348 aa, unidentified
MAVTIVEADRAVIGGVDTHLDVHVAAALDPVGGVLGVESFAASRSGYGALLEWLGSFGTVAKVGVEGTGAYGAGLCRFLVDAGVEVIEVDRPNRQVRRQKGKSDPADAVEAARGVLSGRSTGRPKSRDGKVEAIRVLLVAKRSARQGRLRAIHQMRQLSYTAPDQLRARLKGLSTTDLVAEAAGLRPRAGGDTVIYATKVALASLGRRCLELDEEIEHVDALLAGLVEEAAPALLGLYGVGVDTAATLLVTAGDNAERLHSEAAFARLCGVAPIEASSGKVTRYRLNRGGDRDANAALWRIVMTRLSFDPRTRAYMERRTKEGRSKREVIRILKRYVAREVFRVLPRA

SEQ ID NO: 44932 - protein, 391 aa, unidentified
MTKPKTKTVNDFSRCLDPLDMDATLIAVIEMSQSSWLVAGIVPGVEREPLKKLAIDEHALLSLLNRWRAEAEKQGHRITRIAVAFEAGHDGFWLARWLAAQGVEAHVIHASSVAVTREHRRAKTDRLDTELLKRAFLGWLRGERGHCKMVAVPTLAQEDAKRPSRERETLVGEASRIITRVKAAFVRLGIRGFNPKLKAAATRLETLRTPEDEPIPPNTLAALKRDLERHQIVKKQIREIEQTRLDVLKQAPEKGPHAMVLLLARVIGVGVETADMLVQEVLSRTMRDRRAVGRYAGLTGSPDKSGAKRRDKGLARSGNARVRHGMIQLAWRFLLFQKDSALAQWYRQRTADAPSTRKTLIVALARKLLIALWRLAREGVVPEGVRMRPAA

SEQ ID NO: 44933 - protein, 362 aa, unidentified
MEKHIMVGCDLHDKSMLIKIAVGREKPTVETWNTDGESVLLMIRHLRSWAARLGGARILFAYEACGFGFRLHDELSDAGIECHVLAPSKMHKSPKHRKRKTDERDAQLILDSLKAYVLAGVEMPSVWIPDPQTRDDRELVRRRLAIAEDAASAMVRIRWLLKGHGIKLAPANAWTDAYWQWLEQLASGTLPSGTGAALGSLMRQVQWLWSERDILDEQVFALAKADRYAPVVAALCQHKGVGTLTAMVYLTEMGDLSRFANRQQVGSFLGLVPSSYETGETADRKGHITRQGPGRVRKVLCQAVWSRLRCDEHERDAYDAIVSRNPKHKKKAVVARMRTLAVVLWHTGLEAQTALRAEALVG

SEQ ID NO: 44934 - protein, 312 aa, unidentified
MITQPEVFIGIDVSKKTLDVCGYPDKYKAQFSNDAAGHQQLLEAMRKVQPTLIVMEATGGLEFEATALLVTSELPVAVINPRNARDFAKAVGLLAKTDQVDAWALARFASAVRPEQREIKSEALRGLEEVLTRRRQLVDMVTAESNRKGQASAKMAKEIEEHISWLKQRIKNADLDLGNAVKASPAWKAKADVLISVPGIGSVATFTLLAELPELGTLDRREICALVGVCPFNRDSGTLRGKRSIWGGRTSVRAVLYMAALVATRYNPVIKQFYQKLLDAGKIKKVALVACMRKLLVILNSMVRNNTLWASC

SEQ ID NO: 44935 - protein, 356 aa, unidentified
MKILSILLRRHCVNDLGKFNCVSCLLDTESNATEFDTFKTYRREFKEILHRTHPHLVVMETCSITGWVHDLCVEQDYRVLVADPSQDAWRWKNVKRQTDKDDALKLAKLAALEQINPVYVPAPKTRQYRHWVKYRKVVVGRINRVQNAIRALFDQQGVKIPSGHRAWTVQGIDELSQHRRVLAECDEYNLWRGELDLELTMLDQLWEHQATIERKLELLAKQEARIQLLQTIPGFGRKTAEVIVICLDDPKRFENSRQVSAYAGLIPQQHQSGQTNRLGKITKRGSRLLRTALVEVAWIMLRYNEWAAATYARISGGQKTRKKTAIVAVARKLLVRCWAMLLHNQPWNPELAQPTI

SEQ ID NO: 44936 - protein, 378 aa, unidentified
MSDRTATTSAPERESSTMTSMSTTTTTTILAIDLGKFKSVACRYDPASGQHTFETIATTPASVHDLLVDAAPSLLVIEACGICGWICDLAESLAIPVRVANTLGEAWKWKRVKRKTDREDAHKLAKLAATDQLPRVHVPQLTVRQHRSLIKHRHALIDRRTGIKNTIRSLLDAQGLSLPGRSRGWTVESINQLKTLSRPLTECSMTELWRGQLDLELRLLQAVSALIKEADKKLDQLASQDARVERLRTIPQVGARLAELVVSTLDDATRFKTARQVSAYAGLVPRQYQSGQMNRLGRITGQGPGLLRRVLVQVAWGLQRRTDTRGHAVFERLCHGQRTRRKQAAVALARKILIWCWAILRDGSVWDPTRERRRLAVT

SEQ ID NO: 44937 - protein, 363 aa, unidentified
MLIIGIDYHPSFQQIAFLDQETGEYDERRLNHSDGEAERFYRELKQRRVSVRVGMEATGYSRWFERLLAELGFEVWIGDAAEISRQRVRKQKTDREDARLLLRLLRENRFPRIWVPSPENRDLRQLLWHRHRLVQMRTRIMNQLQAVAMNEGYRWKKKLFSEQGRTQLEKLSLAPWASRRRKELLELLDQLDPKIAELTTAVEQEAQQRPEVLRLMTHPGVGSITGLVYVLVIGTPDRFPCGKQIGSYTGLIPSEDSSAGRQRLGHLSKQGNALLRYLLGEAAQAAARCNPHWRRRYVYLAMRRHQNIAKAAMARKLAVRLYWMWRNGWNYSQFVEFGSHAGKLATGHGLKKSVVHLIGHPAP

SEQ ID NO: 44938 - protein, 342 aa, unidentified
MDHYAGIDVSLEYSSVCVVNANGKIVREGKVLSEPDALIGWFRSLGLELSRVGLEAGPLSQWLYAAMKQAGLVVELLETRHVRDAFKAMPVKSDRNDARGIAQLMRLGWFRPVHCKSIGAQETRAVLTSRKLVQSKLLDVENHLRGIVRGFGLKVGKTTNVSFARRIRELVANHASLEMIAEALLSVHAVLLREFKAFEKQVRSMARQDAKARLLMSTPAVGPIVALTYASAIDDPGRFKSSKLVGAHFGLTPKKYQSGQTDYTGRISKIGDASVRTALYEAAHIMLTKPLKGCSQLKSWAMRIARRAGMSKAKVALARRLAVIMHRMLSDGTAFNAAAAAA

SEQ ID NO: 44939 - protein, 386 aa, unidentified
MKGMSKREDRQKKEAPPFERIQIESAPKIKDRRPIKGAIKKEEPMNYLGVDCHKRKSFLTAMDSGGAVMGRWSIRNDGKELDRIFDKLGNNFKAVLEASSTWPVMYDLLDERVNEVILAHPLKVKAIAEAKIKNDKIDSEVLAHLLRADLIPEAYAPSKEIRYKKCYLRYRSSLVQMQTMVKNRVHAVLMRNHVSIEEQDAISDLFGTKGREYLAGVQLGGSDNEMLMGYLDLLDFLANKIKLADKRIKEIIKEDELIRLLLTMPGIGPVFAPLIRYEVDRIDRFRNCGKFLCYCALVPGLFSSADISRTTGIIKQGNKYLKWAFLEAVTPATRTSVPLRAFYGRIYNKHGHHAARVATARKLAKIAYHILKDRKPFKEELIKEQN

SEQ ID NO: 44940 - protein, 410 aa, unidentified
MAGLWCGIDWAEGHHDVSVVDDAGRIVCKERIGDDVAGFGRLVEMITELRPDGLRGLPIAIETAQGLLVSALRAAEAQVFTINPLAVSRYRDRYSPSRAKSDAGDAIVLANILRTDGDNHRRLPDDSDGAHAVRVLARAHQDAIWDRQQIVNKTRSLLRQYFPAFLKTFADLTTMGARTVLGLAATPAAAATLRPSTVAAALRRGGRRRGVDAEAHRIVAGLRAPHLRHPEVVEAAMGQQAHTYAKSLATVAENVATLEASLTAAFAHHPDAPILVSFPGLGAVLGARLLGEIGDDRTRFATARGLKAYAGTAPVTRASGTKTYIGLRRVRNKRLNQAAYMWALPLILHSTEARAHYDRRRRRGDSHTAASRHLANRYIGMLHHCLQTRQTYDPDKAFTPALAPANDVAC

SEQ ID NO: 44941 - protein, 347 aa, unidentified
MVYVGIDLHRSRSQIAVLDQQGGELLSRRIANDREIFLELLHGLGDDVQVALEATYGWEWLADLLEDAGVELHLAHPLRTKAIAAARVKTDAVDARTLAHLLRTDLLPEAYIAPRELRDLRDLLRHRVALTRIRSALKQRVGAILAKQGIARPYSNLFGPGGSRFLTELELRQGPRRRLDSLLALIAAFDREIDNTTKEIEQRASEDPYVDVLCQIRGVGRYIAMLVIAEVGDITRFPSARHLCAWAGLTPTVRSSNGKARLGHISGQGSPALRWALVEAAQHAPTGGGPLRTAYERIAKRRGKQVAKVAVARKILTLCYYGLRDGEIRCLAPRAKARTNRTTVVTR

SEQ ID NO: 44942 - protein, 325 aa, unidentified
MDKVVLGIDIAKETFVVVLVRDEQRSQGEFSNDPAGYEQLGRWLNKRKAKTVHACLEATGRYGDALAVWLHESGHGVSVINPARLKAYAQSRLSRTKTDGVDAGLLADFCLTQSPEAWTPPDPAWPELQAMVRQLDALQATRQQELNRLAAHPPSAVVRQTIEAHIAFLDAQIKTLKTQIRDHIDRHPDLKSQHDLLTSIPGIGDTTANLILAEIRDLRAFDDAGQVVAYAGLNPRHRQSGKSVHGHSTLSKCGNARLRRGLYMPALVAKRFNPFIQAFCARLAQNGKPHMVVLAAAMRKLLVLAYGVVKSGQPVDPTRFTSIQP

SEQ ID NO: 44943 - protein, 364 aa, unidentified
MDVHLRSTTVCALDAETGEAVTRRFRGNPWGEVAEWMSGFPGPSLAAYESGYLGFAPQRELSGLGVDCVVAAVSRVPRSAADFSSKNDRNDAARMAKAILSHDVTPVWVPSPEIEGLRDLAGAHDAATARLAAAKQRLLAFLARRGYVYGGTTPAGNPRKYWTYGFLRWLDGIHPADDGGIRALAALRNEVEAADETREALLAEYRAAVAAGPLSAEVEALQSIKGCGFALAAAFASEVGDFSRFRSGRQVTSYFGLAPKQRSSADSVRLGGISGAGNALVRRLAVEGSWSYVQASHQPKLMPKGSGVPLEVRMHGRKGSERLLRRREEMLARGMPQAKANAATAAELVRWLWALGAMCREATE

SEQ ID NO: 44944 - protein, 403 aa, unidentified
MEGPLISLDVSKGKSNYRFFENGTDRKGKKGVIRHDIQGFDSIRDEAEKMEERLRIKPSVIFESTGVYSDVVEKYFTDKGFDVYVISPLLSASMRKEGVRPAKNDSLDTLSIAKVFYSKDDLRKCSENDKKAERLREMSYELDMMNRRIRPMKCQFLRLLDKVWPCLDEVSDYSSRFMLDFIIAFGHPENIKTVKGVLSVIRKSETGTAGRKDKIAQDLFDYCHTHLSAVSKDSSYVELLKRMAIELKAMAKKKSELIDRMAEEARNKDEFARLLTIPAVAKTTALKIMARVGDISRFRNAEALVAYCGLDPRVYQSGKMTGEHRTITKKGDCILRSTLFLAVKLMVMLYPDTKVARFVAAKAKNGLSYKQAVVAGSAKLARVIYSMLTHHENYVEFNADIVA

SEQ ID NO: 44945 - protein, 355 aa, unidentified
MTSTKYIGMDVHKESISIAVMNAAGKIVMECVIETKASTILQFINGLRGDLRVTFEEGTWAAWLYDLLKPHVTEVLVCNPRKAALLKDGSKGDRIDARKLAELLYMNKLATVYHGEHGLRTMKELARSYLTITKDLTRVMNRLKALYRSWGIPCAGNEVYDPRHRAEWLGKISEAGVRRRAEHYYQQLDVLRLLRQEVRRDLLVEAKKHKPWKLLRQIPGIGPIRAALLIALLQTPHRFRTKRQLWTYSGLGLETHDSAQYRAVEGQLQRSKKPVTLRGLNKNHNHDLKAIFKGAALRASSAAGPLRDYYEALLAKGRKPTMAHLTLARKIAAITLIVWKKEVRFDANYLKQQAA

SEQ ID NO: 44946 - protein, 343 aa, unidentified
MDHFAGLDISVKETSVCIVDDTGKIVREVKVASEPEALLAVLKDCAYRFKRIGLEAGPLSQWLYSGLAEAELPVVCVETRHMQAVLKARINKTDRNDARGIAQMMRAGLYRPVHVKTLRSQKLRMLLTHRQLLLSKAIAIENELRGTLRNFGLKVGMVGTVKFETRIRELVENLPDLAVLVEPLLVVRRVLRQQIGLLHRHLLTIARDDDVCRRLMTVPGVGPVVALTYRATVDVPARFKNSKAVAASFGLTPCKYQSGEIDRDGRISRCGDEMMRVMLYEAAQVMLTRTNKWSWLKAWAMQIARHRGMKKAIVALARRLAVILHRIWVDGTVFRWTREVVTA

SEQ ID NO: 44947 - protein, 482 aa, unidentified
MSSRSVLKRPTPYSGSKKSVPVDDSIFETLSTMHPDAAGIDIGSETHYVSVPPDRDEQPVRTFGCFTPDIEAMAKWLKKCGIRHIVMESTGVYWMPSYQILTAAGFDVKLVDARHTKNVPGRKTDVWDAKWLRKLHTFGLLQGCFLPPVEMNEMRAYWRHRANLVDSAAQQLQRMQKSMEMMNVQLHKVVSHIDGVTGMAIMRAIVAGERDPDNLVRHLQRGLKHSPETFKKALTGNYQPEHVFALRQAIASYDFIANQIDECESQLKVCMAKITDRGPIICSKSAPVAITADTTSDGSRPRTRKKEPNFELHAELIRIAGVDLAKIDSISTLTFQTVISELGPDLQSRFPTEDHFSSWLGVVPNNQITGGKVRSRRTRRVANRVTNALRMAAQSLHHSKSALGAFYRRLRSKLGAPKAIVATAHKLARLIWRMLTYGQDYVDIGQERYEKLTAERQLKALKRAAEALGCTILNKDTGEVYA

SEQ ID NO: 44948 - protein, 337 aa, unidentified
MIVIGVDVHKQSLTAIAVDEAGRALAESTAPTACELLAWASSLPGERSWAVEDCRQLTRALERALLEAGESLVRVPPKLMAPQRRAGRARGKSDPIDALAVARAALREPRLDHPRPGEQRLRELKLLVDHRDDLIDERRRGQQRLRWHLHELELEPAVPLGALDRGVWLDRLGRRLAGLEQSAQVRIARELVGRCRGLTRTILALDRELQTAAAQTAPALLALPGCGAVSAAKLLGEIGPIERFETDAQLARHAGVAPLEASSGKHRRHRLDRGGNRQLNCALHRIAITQARVHAPARAYLERKQGEGKSRREALRCLKRQLARTVYTTLKSEALLT

SEQ ID NO: 44949 - protein, 318 aa, unidentified
MSAAENSKVSVGIDVSKNKLDIAVHESGAVWSCNNDSRDCPALAIKLKQLQATSIVLEATGGCETLVTAILAAAGLPVIVVNPRQVRDFAKATGQLAKTDRLDCCVLAHFAAVINPPVRPVKTEETQHLEALLGRRRQIVEMLTAEKNRLASNRDRAVSKDLQAHIAWLEQRLKSSDDELQRVLKNSPAWRERDQLLRSVPGVGPVLALTLLAQLPELGQLNRREIAKLVGVAPFNWDSGLWRGSRHIWGGRAEVRSTLFMATLSAIRFNPTIKPFYQRLIRAGKAPKVAIVACMRKLLTILNVMLKTQTSWRTVHSS

SEQ ID NO: 44950 - protein, 332 aa, unidentified
MNHYIGIDVSKATLQIYIPIKDENISIENTKKSLTSLYSKLKKYYKNNIAELVFIFEPTGSYSSLLKHFCNQKKIKAFVVNPRQSSNFAKVLDNRSKSDIIDAKMLHKFHVMAKDTDITIPVINEAQESLGSMLSYYKLLQKQRNAFSNHLEALEAKEGKNFIEKKLKKEIKNIQNQEKDMILEMKKLILSDAKLAKSFECIISFKGVGDISAIVLLHLFISYPKANRQEITALSGLDIRETSSGTSLHRRSRISKRGNSLYRGVLFMPVLSTVCNNKYMKAFYDRLKEKGKHSTSAQIAIMRKVILITHSLYKHQNTFSDSIYEKRIGWNK

SEQ ID NO: 44951 - protein, 414 aa, unidentified
MNCYCGIDWAEGHHDVAIVGDDGKLVAKRHIGDDPGGFTELTGMLAEAGDTPEDPIPIAIETPRGLMVAVLRASGRPVFAINPMAVARYRERSSVARAKSDHADAMTLANILRVDAHVHRTLPADSELAQGIAVLARAQQNAVWRRSKAINELRSALREYYPAFLNTFAGKSATNLANAHARAVLAIAPTPADAAKLTKARVSAALRRAGRKRGIDGLAANIVERLRVPQLRQPGIVEKAMGRQALALLAMLDAACAGADELEQVASEEFRKHPDHAIITSFPGLADLTGARVLAEIGDDRARFADQRALKAYAGSAPVTRASGKVTSITYRRIKNDRLAAVGWVWATYAAINPGPARGHYRRRRDHGDRHSAALRHLFNKMLGQLYYCLQTSQTFDPIKAFGQPYLAPEPAAA

SEQ ID NO: 44952 - protein, 422 aa, unidentified
MTYLTDNAFTAYVAIDWADAKHDICVQAAGGQQREFDCISHQVDQIEQWAQSLHKRFGGTIAIALELTKGPIVYALQKYDFFVVFPVNPSTLAKYRETFTPSGAKDDPTDSELILDLLVRHPERFAPLNPQSVEMRTLACLVEQRRNLVDDKTRITNRLRSTLKQYYPQMLEWFKHVDTVMVCDFITRWPTLKQLKRARKNTLEKFFHEHNMRFSHILDARLESIKAAKPLTLDAAVVIPYSLQALVLTDQLRVSLQAIRRYDDEIAELAPKHPDYDLFSALPGAGPSMAPRLLVAFGEQRNRFDSAAALQKYAGIAPVTERSGKKHWVHWRWQCSTFLRQTFVEWAAQTINKSFWAGAYYRQQRDKGCGHQAAIRALAFKWIRILYRCWQTRTLYNESVYLSALKRRGSPLLNSSTTVTMT

SEQ ID NO: 44953 - protein, 346 aa, unidentified
MNCVGIDLHRKRSQVAVIDADGTQLLSRRIDNDPATFLALLGEIDGESKVALEATYGWEWLAELLEEAGYELHLAHPLRTRAIAAARVKTDAVDARTLAQLLRADLLPEAYVAPRELRDLRDLLRHRVALTQLRSALKNRVHALLAKHGVQHGHADLFGKRGSRFLAALELREPPRRRLESSLSLIADFDREIELATAEIDALAKHDDRVEVLCQLRGIGRYTAMLVIAEVGDVARFSSARKLCAWAGLTPTVRSSDGKARLGHITKQGSRPLRWALVEAAQHAGRGGGPLRDSFERIAKRRGRKIAKVAIARKLLTLCYYGLRDGQIRCLARRCRPSATKVMAAS

SEQ ID NO: 44954 - protein, 345 aa, unidentified
MEVLIGVDPHKATNAVAAVNERGELLEHADFAANRAGLRALKRWAKRFPECRWAVEGASGLGHSVAQHLVACAKKVVDVPAKLSARIRVLSVGNERKNDRLDALYIALAAWRGERLREVKEEEHATVLKMLSERREDLVEERTRALNRLHRLLRDLVPGGAPNKLSADEAARALRRVRPRSVPERTRRGLAWELVRDVRRLDRLISELGRRIYEAIKESGTSLTEIFGVGPLLAAKIIGRVGTIARFPTKGHFASYTGTAPIEASSGDIVRHRLSRVGDRQLNAALHIIAICQVRHGAEGRDYYQRKLEEGKTRREALRCLKRRLSDVVFKRLSADSDSTIFAAA

SEQ ID NO: 44955 - protein, 335 aa, unidentified
MQIYGIDLAKEKFDVSFFDLTSKKVSNQPSHKVVTNNLKGIGKFFKGLPSDAVLVAEHTGVYGDTLLKCCMDSNVKIAFVGGYVIHRYRTTPDRAKTDVLDCALLRDFGERYPDKLKYKTFPEEALYELRQLARHREMLVEQRKQLITADRSEDCRPIRSLAVKRSMDRIKEMLDTEIAETEKEMLKVINGHESIHHNYELVKSVDGVGLITAVELLVKTENFTKITTARQYAAYAGTAPYEKSSGKMDKGAHISKIGNRRSKTLLYICAESARLHNKEIKLYYERRTLIDKKPRHYVLNAIANKLLRIIFTLVEKGEYYDANFIRQDPRVVKHN

SEQ ID NO: 44956 - protein, 426 aa, unidentified
MNYKQNEKILQVTEKTLVVGIDIAKEVHYARAFNYRRIELDKVIPFTNNQEGFKSFRNWVLEVMKKNDLDNIIIGFEPTGHYWYNFAEFCRKNDFKYVMVNPYHVKISKEMDDNSQTKNDRKDPKTIAKLVIDGRYFETYVATGVYAELRNIVKMYEHVIGCKSVVENKIIQWLDNYFPEFTTVFGNWECKSGMITLKQFPLPSMIVELGETKVLETWKKEIKQGVGMKRAQSLLAAASRSVGCTEGLRMGRKELEYLMKEYEMYLEQLEEIKAEMEILLVQVPGAKEILKIKGIGLVTATAIIAEIGDISRFEDARQIQKYAGLNLIENSSGKHKGQTTISKRGRKRLRGFLFKVIMPLVGKNTEFKKLHEYYTTRKDNPLKKKQSLILLCCKLIRVLFAMLKKGISYDGKRLMEDIRRPSVVAA

SEQ ID NO: 44957 - protein, 452 aa, unidentified
MKEKNVSMKVINSHAAGIDVGSRSHFVAIGQGEDDVREFGVYSEDLKALAQWLIDNDVKTVAMESTGTYWQNLYTILQGAGLEVILCNGKFTKNIKGKKTDVQDCQWIQKLHTLGLLSGSFLPDEACEQLRTYCRHRTNLLEIAASTTHKMQKYLQLLNLRLDIVVKDITGLTGLSIINAICSGETSPEKLASLRNGNCKKSEKEIAKALQCNGRKDYLFALTQEYRLYLNLQDKIKECDQEIEKMLNEQINADDEKKQHLIEKKVHKRVNKNTPKNIDINLLSYQYFEGVDLLAIEGVSHATVLTLMSEVGNGIHKFPTAKQFASWLRLSPNTKISGGRVLSSRTPKGSNRLKIALRNAANAIGNLKDTALSNFFKRISFRKGRISAISAARKLAVIIWNMLVKKVPYKPETDYEFLDQKRKRKVLEMKRLIHKFDITPDDLGLQLNINNL

SEQ ID NO: 44958 - protein, 347 aa, unidentified
MLIIGCDFHPGFQQVAIFDNLTGEIQEKRLQHRVEAEQFYGSLAGQEVLVGMEACGHYPWFERLLEELGFELWFGDAARVRASVVRKQKTDRRDAEHLLDLLRRDHFPRIWVPSLEVRDVRQLLVHRHKQVQARTRTKNQLQSMALSCGVQKKYKLWTKAGRAELEQLALLPYAGERRKRLLEALDGLEAEIVELDRRVAEEAGQRPEAVRLMTHPGVGPVTALAMVLTLGPAERFGSGKQVGSYFGLIPSEESSGGKQRLGKISKQGSSFLRFLLVEAGQTAARLDPQLKRFYRRLAVRKSRGVAKVAVARKLATRLYLMLREDWTYAQLCQAVMQVSPSHSVAGE

SEQ ID NO: 44959 - protein, 485 aa, unidentified
MGVAKQQKQRKQRRTERQSEPGGWHLMNRQQRREVMRKIQAQDLSLEVVHPDAAGIDIGNESHYVAVPSTRDNAPVRRFGCTTAELRQLAGWLKQCGIRTVALQSTGVYWIAVYDILEEAGLEVYLVNARETKNLPGRKSDVQESQWLMKLHTYGLLRNSFRPSGEIRQMRTYWRQRNDLVQAAGRHIQRMQKALTQMNIQLANVLSDISGKSGQAIIHAILKGERDPYELAAMCDVRVKASEEEVARALEGNWQEDLLFMLQQELDGYEFCQKQIAKCDERLYKYLQHRPDRSAGATLPKEHRKGRREKNKKNKPQFDLRKQLFCMTGTDLTRIDGIDVLTAMTVISEAGWDMSKWPTEDHFVGWLRLCPDNRVSGDRVIGKGRLPTNNRVNVALRMAANSLRETNTYLGAQFRRLRRRLEAPVAIKAMAAKLARLIYRMLRFGMQFVDQGAEVYEAAHHQREIHNLKRRAAHLGFQIVEATPA

SEQ ID NO: 44960 - protein, 380 aa, unidentified
MPKFDDLSRSLVALDQDSTLIVVIEMSQSQWLVGGIVPGLEREPQKKLTPDAPALLALLHRWREEAAKAGRGVKRVCVAYEAGRDGFWLARWLHEQGIECHVIHPTSIAVSREHRRAKSDRLDLELLKRAFLGWLRGEKKHCSMAAIPSLAEEDARRLNRERQSLTGEASRIVNRMKASLARLGIRDVNVKLPGAAVRLDELRTGEGAALPPLTRAELRRELARLALIRAQLKEIEAARQQQRQQAPAAYRRKVGALSQVHGLGAATADMLTVEVFSRALRDRRAVARYAGLTGAPDESGKKRREKGLARAGNARVRHGMIQLAWRVPQVPAGQRPGAVVSRADRQRPQRHPQDDDRRARPQAADRVVAAGDDGRGAARH

SEQ ID NO: 44961 - protein, 348 aa, unidentified
MSQSHYIGLDVSTRTVNLCVIDHDGRVVHERKISSDPDEIAQHILSLPFPIARVGLEAGMLSQYIYGRLAEDAVPVVCVETRHMKAALSAQLNKTDRHDARGIAQMMRVGLFKPVDVKSPTSQRLRTILTARQLLRNKLQDVENETRGLIRNFGYHLGKVTARDFESRVRELVTDTDLHVVADALLLARRSLREQFNRLDDLLVRLARQDDVTRRFMTVPGVGPLVALTFRATVDVPSRFARSHTVGAHFGLTPRKQQSGEVDRSGRISRWGDDMMRSLLYEAAQVLLTRVKRWSALKAWAAQVSGRRGHKKAIIALARKIAVILHCMWVDGTEFDWGKRPEATSPSA

SEQ ID NO: 44962 - protein, 353 aa, unidentified
MKRDKYMGLDVHQAMTVAVVMDAEGKVVLETMVATEAAAVLRLVKSLSGPLRVTFEESTQAEWVYELLRSHVSEVVVCDPRRNKLLSEGSKADKVDARKLADLLRSGMLRSVYHGHQATRKLKELVRAYETFSLDTQRTMNRIKAIYRGRGIATPGRGVYQARTRDQWLAKLAESGLRQRAAWLYQQLDQLKPLRKQAKQVMLAESRAHRAVSLLRTIPQLGPIRAAFIVATVDTPHRFRTKRQFWSYVGLAVVTHMSAEYEMKAGKVVRRRKPVATRGLNRDCNRRLKEVFISAATGGSRDESYKLYLDRLIDNGMRTEMARITLARKIAAVALIIWKKGKEFDQKQVNRTT

SEQ ID NO: 44963 - protein, 358 aa, unidentified
MSEITRVGVDLAKNLIQVHAVDNAGKVVTNRQLPRNKFIEWCAQLPAGCIVALEASAGSHQWARKLISLGFDARIMAAHLVSPYRMQGKNGKNDANDAAAICEAASRPNMRFVTVKTTSQQGVLCVHRLREGLKEERTACINRIRGLLAEFGLVVPQGSKVLEERLSELLDDATNDMSGLARLTIERAQMQWREIDAHLEWCDQRIAAHIKEDSQVQAAMQIMGIGPVTASAIVATVGDFKQFRNGAQFGAWLGLTPRQNSSGGKNKLGGITKRGDQYLRSLLVQGAKSVVFRGIANNPVTSWAQALRDRSGWQKAVVALANKNARTLWAVLTRGHEFNVHHVSVKPIGLATHAVCAG

SEQ ID NO: 44964 - protein, 392 aa, unidentified
MNRIVYIGMDVHTSNYTLCSLDPGYGVEKDNYFAEVQFTNDFIKNVVNYVTNLKKKLKDCEFVCGYEAGCLGYSTYKDLTKVGIKCVIMAPSTMAVQKGGKKVKNDRRDARVIAQCLAYQTYKEVYVLSEHDEAVRGYLRMRDSHNKALKRIKQQIIAFCTGHGLFSPTKSNWTVAHLKWLKDLKFNDPVEQEILNEYLSSLTFLSDKIKAMDVRIEELASEKQYCENVKKLRCIKGIETNVALTLLAEIGDFNRFSKPTDFAAYLGLIPGEQSSGDKVRGTGITKAGNSTLRRKLTESAKGYWRGRIGIKSATFKKLEKELPKEVTEYALKANTRLQRKFFNMTHVKGKNMNVAASACAREMACFVWGLITNHYEKAPAVPKTDEELLDLN

SEQ ID NO: 44965 - protein, 299 aa, unidentified
MTRMHQAATEPAPPSAVSTSRVVFGGIDTHKELHVAAVVDSGEVVLGTASFSTTRAGYRALIRWLRSFGDVRRVGVEGTGSYGAGLTRHLTEAGVEVLEVDRPDRSDRRRKGKDDDLDAISAARAALHQRRTSIPKSKDGAVEALRVLRVTRQTAIRARRNALQLLRMSIVSAPEELRDQVRNLTRMRLIRTCAAWRPDVTDAADPVSATRIALKSLARRILELGDEIAMLDELIEPIVTALAPQLLARVGIGVEVAGQLLVTAGDNRARMRSEAGFAMLCGVAPLPASSGMTQRHRLM

SEQ ID NO: 44966 - protein, 341 aa, unidentified
MYYVGCDQHKHYSVVTAKDKDGAVMAETKKLYHNERQKFVEYFSSLPKDSVVLLEANGYEPWLCDLIQETGLNVKLAHPLKTRAIAEEKIMTDKLSSSVLADLLRANLVSEAYIASPKIRQERYHMRYRQGLVHLRTAAKNKIHNLLGRLGLNLPDITDLFGKSGRAYLKQLRLEHPYQRALNGYLHLIDEFNRLIRQVDADIRKQLKNNRCIQLLLTIPGIGMILANHIMAEIGDINRFLSSSKLAGYIGIVPSLHQSGKVNYSGSITKQGNRYLLWAFVEAAHAAIRRDPYLASVYQKIRNKKGSHVAIVAVAHKLVIYTYQVLKNNTPYVYKTVSGRA

SEQ ID NO: 44967 - protein, 369 aa, unidentified
MTTEASTVVGGVDTHKHTHYAAAVDQHGRLLGHQEFPATDRGYHRLLAWMRGHGQISAIGVESTGSFGATLTRALTKAGERVVEVNRPNRQARRMDGKSDRLDAEQIARAVLGQTSTAIPKAKSGTVEVIRTLRVTRASAVKARTQAFNTLWGVMIGAPSPLRDQLVALTKRTLVNHCLRLRPETDNLLMLSADPDRLLMAGVKTALRDLARRWKNLDEEIKTLNRQIEALVRTAAPELIELHGVGVELAGQFLVTAGDNTNRIHTEAAFAKLCGVAPQPASSGRTAGRHRLSRSGDRAANSALYIVAIVRMRHHQPTRDYVQRRTAEGLSKREIIRCLIGEVSVMRPGIGLDRGFSVVSGDGLVAEPL

SEQ ID NO: 44968 - protein, 315 aa, unidentified
MTPAPLCVGIDVSKAQLDIALRPDGQFVVPNDETGIAHVVERLRALPIALIVLEATGGLELPLIGALVSAGLPVVVANPRQVRDFAKATGKLAKTDALDAQILAHFADVIRPLPRPVPDEQTHALAALLARRRQLIEMLTAEKNRLSSARHAVRKSVTAHIRWLEQQLAQIDRDLAHTIRESPVWREKDDLLRTVPGVGPGLARTLIVELPELGTLGRRQIAALVGVAPLNRDSGTLRGKRSVWGGRAHVRAALYMAALVASRCNPVIRAFYQRLCAAGKAKKVALTACMRKLLTILNAMVKHRTPWNRNEMVCP

SEQ ID NO: 44969 - protein, 402 aa, unidentified
MNAVGIDVSKGKSMVAIMRPFGEIVSTPFEIKHTASDIHSLVELINSVEGESRIVMEHTGRYYEVLAHQLLEANLFVSAINPKLIKDFDNDSLRKVKSDKADAVKIARYALDKWQNLKQYNVMDELRNQLKTMNRQFGFYMKHKTAMKNNLIGILDQTYPGVNTYFDSPARSDGSQKWVDFASTYWHVDCVRKMSLNAFIDHYQNWCKRKKYNFSQSKAEEIYGKAKELVPVLPKDAITKLIIKQAVDQLNSASTTVESLRTLMNETASKLPEYPVVMAMKGVGTSLGPQLMAEIGDVSRFTHKSAITAFAGVDPGVNESGSYEQKSVPTSKRGSSDLRKTLFQVMDVLIKTHPQDDPVYQFLDKKRAQGKPYYVYMTAGANKFLRIYYGRVKEYLSSLPES

SEQ ID NO: 44970 - protein, 351 aa, unidentified
MSQQLRTTIAVIGVDIGKNSFHIVGLDQRGAIVLRQKWSRGQVQARFANMPPCLIGMEACVGAHHLSRQLRGLGHDARLMPAKYVRPYSKGQKNDFRDAEAIAEAVQRPTMTFVATKTADQLDLQALHRVRERLVSQRTGIINQIRAFLLERGVAVRQGQRFLRAELPRILATPPDVLSPRMVHLIEDLAGDWRRLDERIEGLSGEIEAIARRDAGCERLMSVPGIGPIISSAMVAAIGNGDAFAKGRDFAAWLGLVPKQISTGDRTILGKISKRGNRYLRVLFVQAAWVVLIKPKSWERHGLKPWLEAAKKRLHHNVLAIALANKLARIAWSVLAHGRNFEARKIAAAAQ

SEQ ID NO: 44971 - protein, 356 aa, unidentified
MEIHKVQNFVVKGKEVFVGLEDSKKTWKIAVRCDKMLIHRVSMPAQHQILIRYLRNKFPECTINLIYEAGFRGFNLFDRLTEEGIECIVIPPHLVTEPKVNRVKTDKRDANRLAIMLENQDFKDPCFVPDRERREDRQISRTLWGIQKDIIRTRNRIRKFLDFNGIEVPFPDRWGKEEFQALKELPLGDSLKRSLMTLITLLEQLWVHKDSLQEALRHLCLKERYKKAFEISMSLPGIGWATAIRFVVELGEDLSRFTSGKKIASFVGLTCREHSTGEAERKGRITGMGSGFIRATLVENSWMAIRRDPALLAKFTRIWKGRGSKKKAIVAVARMLIVRLRACLISGTPYAIGTVK

SEQ ID NO: 44972 - protein, 343 aa, unidentified
MKYVGIDLHKQTISACVVIKECERRQVAARKRLECKDELAIAAWFRELGPFEVVVEATSSYEWFVKLVEPLAHRVLLAHPKKLRVIAESKRKSDKLDAQVLAEFLASDEIPLAYRPSPRVREHRTLVRYREYIQRRITSVKNKLRHILAKYNADVPHLFTEAGQEHLARVGLSPCDRLVADALSVELSQHGLRLTKINRELRRFAARAPLPEREARAVLDSIPNVGPVTADIVLAELGDWRRFRSQADVVSYAGLAPGYRESAGKAKQLGITKEGSRVLRWAMVELAWRMVRTSRRWSRQFTRLEVRIGAKKAIVAIARRLVGVIFALLRDGKQYSLALDSSP

SEQ ID NO: 44973 - protein, 421 aa, unidentified
MHVLYQRCAAVDIGKDVIAVAVRLPGDGPEHRQTIKRTFKTFYGVLKHAAGWLTAQQVTHVAMEATGIYSMPVYHALIEHGGFEKLLVCNAGHVRNVPGRKTDLSDAEWLVHLLECGLLRGSFIPPAQIKAARDVIRYRTKLTESRTSELQRLGNMLQDAGIKVDSVAWTITTRSVRAMVEALIDGERRPVLLAELAKGRMRARIPDLQRALEGRFDDHHALMCRLHLDHLDHLDEMIARLDTQIEDMMQPFRSQRELLTSIPGIGPFAAAAVISEAGADIAETFPSAGHFASWIGVCPGNHESAGKRHSGKPRKGNQHLQHVLVECAWAASRTPGYLQSLYRWHVRKFGGSRNPTAKNKAIVAVAHKLAIIIWHVLATGKPYADLGADYFDRRIDPAAETRRLIARLQALGHTVTIEPAA

SEQ ID NO: 44974 - protein, 263 aa, unidentified
MEHYAGIDVSLECSSVCVVDASGKIIREGKVASEPEALIAWFGSLGFGLVRIGLEAGPLSQWLYAAMQQAGLAVELLETRHVRDAFKAMPVKSDRNDARGIAQLIRLGWFRPVHCKSLVAQEVRAFLTARKLVQSKLFDLMSTPGVGAIVALTYVSAIDDPTRFKSSKGVCAHFGLTPKKYQSGEKDITGRISKLGDGLVRAALYQAAHIILTRPVKGHHLKSWAAKLAKRAGMKKAKVALARKLAVILHRMWTNNTPFAATA

SEQ ID NO: 44975 - protein, 376 aa, unidentified
MREKLRFLGLDVHAETIAAAIAEPDGEMRSLGTIANREDSIRRFIKKLGSPEQLRACYEAGPTGFVLYWQLAQLGVECAVVAPSLVPKKPGDRVKTDRRDALKLAHCHRNGDLTAVWVPDEASEALRDLVRQREAAKQDQLRARHRLTKFLLRTGQRPPLGLKAWTERYMRWLTQVRYAQPAQEVTRLDCMNEVEHMSARVKRLEEAILEVVKQAPLATQEVIRGLQALRGIAHISAVTIAAELGNISSRLESARKLMGYSGSFPDEKSSGKRIGKGGITKAGNAHLRRIVVESAWCYRHLPRVGEKLRKRQQGIPAEIIEIAWKAQNRLHKRYRKLTMAGKDQRKVITAVGRELLGFIWAIGVKTEQACQQPIAA

SEQ ID NO: 44976 - protein, 342 aa, unidentified
MKDMMIGVDLAKNVFQLHAASMAGHLKFRKKLTRAQFPKFMSEQLPSVVVMEACASASYWARELAKLGHEVKLIAPQYVRPFVKRQKNDAADAEAIVIAAQRPEMRFVSPKSEEQQARAALFRARERLVHQRTELVNALRGLLYEFGHVVPQGIRHLTGIEAIIEDPAASLPDLVRDECRDILLQVSEKTARIEARTKAARKLAETTDTARRLQTMPGVGPMTALAVEAFAPDMAEFRRGRDFAAWLGLVPRQHSSGGKERLGRVSKSGQADIRKLLIIGAMARLTIRGRKSVPTGSWLARMLAKKPKMLVAIALANRMARQLWAMMMKGEDFRDPASAGAA

SEQ ID NO: 44977 - protein, 465 aa, unidentified
MSKLRKRNRARSSQGETRPFEGMRQVHPHAAGVDIGAHEIVACVPDGDDQQIVRTFGTDTVDLQTLADWFVDRGIQTVAMASTGVSWIPLCEEREARGLPCCLISAQSIKRVPGRKSDVLDCQWIQTLHSYGLRAASCRPAADLVALRTLLRHRAQLLEHRAPHVLHMQQALLQMHSQLSHALRDITGATGQRLIRAMVAGARAPQHWAALRNDRCKKDAHEIAMALTGTWREEHLFVLTQALALFDFSTTQLSACDAQVEHAFAVITPHFESTAEASVPARAAVPPRRKPHSPSKNAPEGNTRAHILRITGVDLVAVHGMSDSLAPTIVAEIGTDMSQWPDDTHFCSWLGLAPNNDISGGKVLKSRTMKHRNRAAQAFRMAAQSVIRSHCAFGAFSRRLTGRLGPAQALVATAHKIARTVYHMLKHRVPYYDIGAAEYNKRFREREMHSLQKQAAKLGYKLSPG

SEQ ID NO: 44978 - protein, 350 aa, unidentified
MKSITTIGLDIAKNVFQLHGVNENGHVILRKSLRRGQMLAFFSELPPCLIGMEACATSHHWARTLMALGHEVRLIPPAYVKPYLRRQKNDAADAAAICEAVTRPSMRFVPVKSEEQQATLMLHSARELLVSQRTALINALRGHFAEFGIVVAQGARNVRLLVAIIHDESDADLPADARAALRPLASTLIDIEVQIADLSKEILVAHRSNDVSIRLATIPGIGPIVASSLTASIADASVFRSGREFAAYLGLVPRQHSTGGKPRLGRITKMGNRRLRKLLVIGAHAALYSIKSGKTNTPLADWARSLLANKPFKLVAVALANKMARIAWAVMTRKTIYQPAFGGAASQAAS

SEQ ID NO: 44979 - protein, 323 aa, unidentified
MQGKVSPERSACDRDYVGVDVCKEWLDVYLHPVGLSLRVANTPTGLKRLKRELARHAIACVAVEATGKFHRLTQRHLHAAGIPVAVVNPLRSRLFCEASGQLAKTDAIDARLLAVMAESLNLRVTPPTPEIVEDLQELVRARAAAVADRTALINQRAAARLGAVKAELGRRIRALEGSIARLEQEIEATIARDLALARRFEILLSIPGVGPVAAAGLLADLAEMGTRSGKEIASLSGLAPVACDSGEAKGQRHIRGGRAHVRTAIYFAALSAARYNPHLARVYRRLLAAGKKPKVALTAVMRKLVVLANALLRDNRIWQANPA

SEQ ID NO: 44980 - protein, 359 aa, unidentified
MPILADTVDGVIGVDTHRDTLAAAALSPVGGILAQTATRADATGYQELLEFADTQTLRDPARRCWAVEGTGSYGAGLTAFLHTHGERVVEVARPKRPARRTGAKTDAIDAVRAARETLGHQHQTLPRRRGDREALRVLLTTRRHATSSRVAAINQLKALIVGAPEELRAELRGVATKGQIDRCVGLRDRPARPLEHRMTVCALRTTAGRIRALQAEIDDLTAALDPLVASIAPWLVELPGVGPITAAQILVSWSYAGRLGSEAAFAALAGTNPIPASSGQVTRHRLNRSGDRQLNAALHTIALTRLRYDPETRAYAARRTTQGKTRRDVKRCLKRSIARQLFKLLERYDQPGVEIIRAA

SEQ ID NO: 44981 - protein, 457 aa, unidentified
MNRKRTKSKVDRTMPMVHPNAAAIDVGATIHMAAVSADRTPEPVRSFGTFTTDLHRLVNWFKECGVETVVMESTSVYWIPIFELLDARGFTVFLVNARDAKHVPGRKTDVSDAQWLQRLHSYGLLRASFRPKGQIAELRAYVRQRERLLEFAASHIQHMQKALTEMNLQLHHVVADITGTTGLRIIRAILAGERDPKALAHLRDYRCHASAETIEKALTGSYRAEHLFALDQALALFDAYHEKVSACDVRIEAVLKELSISRSRGSGSLPSSRRRTDQTNAMAFDVRAALFALLGKDVTQINGLGPYLSLKLIAECGDDLSAWPSAKHFTSWLCLAPSNKISGGKVLSSRTRRSGSRASALLRLAAVTVGRTDTALGAFYRRLSARIGKAKAVTATARKIAVLFYNAVRHGMEYVDPGASFYETRYRKRVVENLHRRAKAFGFVLHPAEPTPSVAVS

SEQ ID NO: 44982 - protein, 320 aa, unidentified
METEKVYVGIDVSKETLDMAVHASEQQWRFANTDRGITEALTCLERLSPALVVLEATGGFEYPLAAALAVVGVPMVVVNPRQVRDFARATGRLAKTDAIDARVLAHFAAAVHPPSRLLPDTQGQELKAILTRRRQLIEMLTAERNRLHSAHSRSVKTHIQAHISWLEEEMAHIDHDLGHSIRQSPVWQEKDELLKSVPGVGPVLSTTLLADLPELGLLNRREIAALVGVAPFNRDSGHLRGQRAVWGGRAVVRSALYMATLVATRYNPIIRDFYQHLLSAGKPKKLALTACMRKLLTILNAMLKHKTPWHYPITGTPTTS

SEQ ID NO: 44983 - protein, 343 aa, unidentified
MQTITTIGLDIAKSVFQVHGVDADGNVVLRRQLKRRYVLAFFQKLPPCLVGIEACASSHHWSRELQALGHTVRLMPPAYVKPYVKRQKNDTADAEAICEAVTRPNMRFVPTKTAEQQRCLTLHRTRHLFIRQQTAIINSIRAHLAEFGIVAPVGRRGVDRLLEIVADPNDNRLPEVARACVAALGSQLLALKAQILAFDRRIMAWHRSNETSRRLDAIPGVGPALATALVASIADPKVFRSGRDFSAWIGLVPKQNSSGGKDRLGSISKQGDRYLRSLFTTGALAVIRYAKLHGTKHRPWLAALLARRPTKVAAVALANKIARMVWAMMTRGERYKEPVALAA

SEQ ID NO: 44984 - protein, 355 aa, unidentified
MNEITRVGVDLAKRVIQVCAVNSAGVRVTSRALARDKFLPWCAQLPAGCLVAMEASSSAHHWARKLLALGLQARIIPAHLVVPYRLQGRGGKNDANDAAAICEAASRPQMHFVPIKSVEQQSMLCIHRLREGFKEERVACINRIRGLLAEFGLVFPQKPEVLRQALPDAMEDASNELGSLARLALQRAYAQWQELDEHMRWCDQRIAAHGKASEQVRQAEQLMGVGPVTASAVVATVGDFKQFKNGAQFGAWLGLTPRQNSSGGKNNLGHITKRGDMYVRMLLIQGAKSIVLTAHKRDDPISRWAHALREKSGWQKAVVALANKNARILWAVFVRGRPFDARHVSTKPAGCVVAA

SEQ ID NO: 44985 - protein, 347 aa, unidentified
MKITTVGLDLAKNVFQMHGVDEHGKAVLKKQLRRHQVAEFFAQLPSCLIGMEACGSAHYWARRLQGLGHTVRLISPQFVKPYVKTNKNDAADAEAICEAVGRPNMRFVPVKNVAQQGVLALHRVRQGFVKARTAQANQIRGLLGEFGVVIPQGIVQLFAKMPEVLEDATNELPDSVRALMLRVLEHLKELARQAKEIEAQIAAWHRDNELSSKLAAIPGIGLLSASALAATVGDAKNFSSGRQLAAWLGLVPRQCSSGGKSVRLSMSKRGDAYLRTLLIHGARAVIHRTRQNPDGSTWLHKLIRRRNVNVAAVALANKNARIAWALLARDRQYRTDYRAPGMIALAK

SEQ ID NO: 44986 - protein, 349 aa, unidentified
MTRKNTLKSLPTDTEFRVVGLDLAKSDVSVAAIPVDDNTPSLVDRMTYADLLDWAGKISPTLFAMEPCNGYSLLCLQLENLGHEIKVISGSTVSMWINTHLSGQKTDLNDAIALARLAVSDAELTPIRHKSITEIRIQTVQAVRQQLMSQRSKSIVSFKALAQQWGIPCAAGHRNLKKLRESIEAKVDLITRPVANAMLFLLDAVKSLDRQIGQLNQTLQELVMSDERGRLLQSVLGVGTQISARVITVVGNVERFNSPRSLVAYVRVAPRNFITGHKNLTKKKHGNCPDLSHKGQGKISRRGDKLLRSLFIQGAACLTRSANHQWFSVRTFLPGCQIFKRRTLHRIFP

SEQ ID NO: 44987 - protein, 400 aa, unidentified
MTSVGIDIGKRQHVAAVCRDGERVAQKAVLRFGADRAGFLELAHWLGRQAPIERVVMESSGHYWMALAAALHRAAVPVAIVNPVSAKHFSKRRLQRTKSDPADARTLAALGMADQPATREPLTGAELREAARFAMRLVEEQSRLDNRIHRLIDLGFPELARAYDDPTCISALAVLRVAPTAAAVARKRPETLARAARPGGGRPIGARKAAELIALAKDTIAPPELERQVAFEMELLIAQHDLLERQIAEAEARVASLLDGELARRLQTIPGVGPATAATLIAEIGDIARFSQFDKLVAYVGVHPAEKSSGQSGGPETSWQMAKTGNAYLRAALYRMAVVGLQHNPVLRDHYARKRAEGKTKMNALGHCMKKALSLVWGIWRGEHDFTPDPPRHLTTGYGT

SEQ ID NO: 44988 - protein, 372 aa, unidentified
MNYNTVYVGMDVHKESFSLCAYTIEAEKASHYQRTEADYKKVLNYLEFLRTIYGDDANFICGYEAGCFGYTLYHQLTANNVKCIILAPTTMLEQRSKKRIKTDRRDAEIIAKCLAQHNYSPVHIPTAKDEETKEFLRMRDDHKLALKKVKQQILAFCLRHNYRYDGKSHWTAAHLKWLKALTPEALYKEILDEYLLTYQTLSDKIERLDKRIEELATQDEYKEAVKKLCCFIGVKTHTALSVLVEVGDFKRFASAQHFASYLGLVPGEDSSGDDQNRLGITKAGNRHVRLLLTEASQCYARGQVGFKSKELKSRQSGNTPAVIAYADKANERLRRRYYKMVLNKYKKHNVAKTAIARKLACFMWGMMTDNIV

SEQ ID NO: 44989 - protein, 352 aa, unidentified
MLIIGCDYHPSFQQIAFVDLETGECGERRLGHSGGEAEGFYRELKQKGVKVRIGMEATGHARWFERLLAELGFELWIGDPARIRAKRVRKQKTDRQDAQLLLKLLLEEDGFPRIWVPTPENRDLRQMLWHRHRLVQMRTRIMNQLQAIAMNEGLRRKKALWSQSGRKQLESFALAPWATRRRQDLLELIDRLNPTIQQLTTAVEKEAEKMPEVQRLMTHPGVGPLTALAFVLIIGTPQRFQRGKQIGSYLGLIPCEDSSGGHQRLGHISKQGNSLLRFLLVEAAQATVRLDSEWRRRFLYLATRRERRIAKVAMARRLGVRLFWMWRKQWDYQQLLKFGSHAGQLGTGHGVK

SEQ ID NO: 44990 - protein, 397 aa, unidentified
MYIVGIDIAKRKHEAAVIDGEGTVIIKPFSFTNNCSGYNRLLAMLTKAKLPLDEVSFAMEATGHYWLALFTRLQKEGFRVQVINPVQTNSIRSFYIRQAKTDPRDALLIAEVIRFGHFSESTLHPENIYELRELCRGRHAIVSMQADVKRKVVALLDQVFPEYETAFTNLFGDTSMAILQTCPTPKELSEMPFEELCHLIEVSSHKRFRMAKAQELQELARNSFGFAMAGDVFSMMIRLYAKHLDFLKQQVREMDRKIAEIMDTLDTPITTITGIGPTLGAYILSEIGDISRFSSAAKLAAYAGIDPTMRQSGEYNGVRNRMSKRGSPYLRHAIWLAASSAVLHDPALKLYFQKKRDEGKPYMASVGHACRKMVSIIYAVMRDNKAYVPCIPSEISA

SEQ ID NO: 44991 - protein, 392 aa, unidentified
MYIVGIDIGKNHHEASIVSPEGKQIGRSLRFATTHKGADSLMSFIFKNIGNSPCVFGMEATGHYWYPIYSFLKAKGYTIYVINPIQSDSLRKMYIRQTKNDSIDSFLIAEVIRFGQFGTTSMADENILAMRQLCRYRDSVISSRTEIKLRIGTIMEQIFPEYEKQFSSLWVSTSMGILEKYLTPENIENAPIDELFEIIKDKSHNRLTKAKAISIKEAAADTFGIKIAQDAFSFQLKQLIDRMNFHDKQIEALDIEIMKYYEQFDCYLHTIPGIGMIATATILAEIGDIHRFKSSSALVAFAGIDPTVRQSGEFNSTHNHMSKRGSPYLRHAIFLAATTCSFHNSPLNAYYKKKRDQGKHHLTATGAVARKLTTVIYAVLRDSKPYEPKKFC

SEQ ID NO: 44992 - protein, 351 aa, unidentified
MPRTTTIHAVTTIGIDMGKNTLHMVGLDLRGAIVLREKVSRGRITSRLANLPSCLIGIEAGMATHYVARELAALGQDVKQVPPAYAKPFRQGQKNDFRDAHAVAEAVQRPTTRFVPAKTDEQLDLQALHRVRSRLVSERTAVINQIRGFLLERGIIVRQGLRFLRQALPDIMAKRTDVLSPRMVRIIADLASDWRQLDERIEPVTDEIETLAKSDDGCQRVMTVPGIGPIISSAMVAAIGNGAAFARGRDFSAWIGLVPKQMSTGDRTILGRITKRGNGYLRTLFVQAARVILLRPASWPKHSFGVWLARAAQRLHRNVLAAALANKLARIAWTVLAQERSYEARVTKATA

SEQ ID NO: 44993 - protein, 341 aa, unidentified
MSPSVTHVVGIDIAKDTLAVRLVTTDPSVEPVGAVQTFSNDPVGFRKVIRWLRDQNDQEVEPATTAIVMEATGVYWEGCALFFHEKGFTVRVVNPAQTHAFAKTTLQRGKTDAQDADLIARFGATVPTRVWTPPDALAEELKQIMRQRDDYVQMRVQEQNRLHALQHRARSSAPLMRMAQKHIRFLQQQIDLLETTFKEQASESPSWQKSLAVLNTLPGFGLIVAGGLLTETHGLEAFLTAKQLIAYAGLAPVPYESGSSVQRPRRISKVGNPKLRRIAYIAAVSSIRTDTVFREFYMRLRQRGKPAKVALVAVARKLLTVAFALVRSQTAFDPAYVPKRA

SEQ ID NO: 44994 - protein, 378 aa, unidentified
MGDHSEAFVAFDTSKLRNAVAIADGGRGGEVRFLGEIENTEAAIAKLVKKLAGKYQRLRFCYEAGPTGYGVYRQITSLGHECSVVAPTLIPKKPGDRVKTNRRDAVSLAKLLRAGELPAVWVPDRHHEAMRDLTRARETAKQDLQRKRQQISAFLLRQGLHYPESKSTWTKRHMNWLASQKFELAEHRIVFEEMMEAMRQAQGRVARLEAAIGAAVPDWSLAEVVTALMAMRGLDLVSAATLLAEIGDLSRFQSPCELMAYLGLVPSENSTGDKVKRGPITKAGNRRARRILVECSWSYQHPPRLSKKKQVKVDAVPPAVREIAWKAQCRLNRRYRALVKRGKLKTVAITAVAREFAGFIWAVARAAMTPTTAGTGAR

SEQ ID NO: 44995 - protein, 344 aa, unidentified
MEHYAAIDVSLEWSSVGVVDAGGQIVREAKVRSEREALAAFFTESGLAFARIGLEAGPLSQWLHAGLVEAGLPAILIETRHVKAALKAMTVKTDRNDARGMAQLMRMGWFCPVHAKAPMVQEIRALLTARKLLVAKLRDVESSIRGILRGFGLKVGAVSKGKFEARIRELVTGQVMLERVAEPLLRARAALRTEYTTLHRDLLRTVREDAVCGRLMTVPGVGAVVAMTFRSAIDQPERFAKSKAVGAHFGLTPKKYQSGEIDRTGRISKVGDAMVRTALFEAANVMLTRAVRFSTLKAWALRVAGRHGMKKAKVALARKLAVVMHRMWVDGTSFCWGEASVSAA

SEQ ID NO: 44996 - protein, 417 aa, unidentified
MIEDVGWFVGIDWATRSHSVCLLDAVGRQVAQHEFDHGGAGLTELRDWLLEQTKAAPGQIAVAIEMPHGPVVEMLLEHGFAVFAINPKQLDRFRDRFTVAGAKDDRRDAHVLGASLRTDHAAFRRLVADDAAMIELREWSRLADELQQERTRLANRLRQQLWRYYPQATKLTDDVADEWFLALWEKAPTPAKAVKASEKAIAGVLKDYRIRRLNAATVLGTLREAPLFVAPGTTEAACAHIRSLAARLHLVNRQIKEAHQNLDRLCAELEGEENPSGPSSEQCDVTILRSWPGIGRINLATLLAEATEPLRRRDYHALRALAGAAPVTRQSGKQRFVIRRLACNRRLQSALHHWSRVAIQHDAASRRRYDALRRKGHGHARALRSVGDRLLFALCTTLKRQTPYDADHNGTKNSANG

SEQ ID NO: 44997 - protein, 394 aa, unidentified
MKLVGIDVGKNSHHFCVMDKETGEFNVAPSSFSNNKEGFDFLINSLKPYSKKSILIGMEDTGHYHVALLKFLLSNGYTVALINPKTTDLTRKMEGGITKNDKLDTITICDVLDTPERKKQYRITKVDRFDLYEQRQLTRHHHNLKEELNVYCNRLQKSIDLVFPEFNTLFSSKYSIVYMNLLKTFGSAEAIASTDIRTIRKCFEIKGRGNRISLTPEKLKECAKNSIGISSEVETIQIKHLVSQITLIKEQIAEIDKKIEEFSITNNSPILSIPRISHFSGTSILAELGDIGNYSKPSQIIKFAGVAPYHYESSQYNAQHTGITKKGSKYLRKTLYQIILTVINNNPVFKKYYRLKISQGKGHRCAQGHCIRKLLRIIYHLLETGQSFDPALLR

SEQ ID NO: 44998 - protein, 335 aa, unidentified
MCSLSVFVGLDYHQDAVQVCVLNAEGEELTNATRGNDWRQIAETVPRGARVFAAIEACCGAADMAEELISEAGWSVHLAHPGYVARIKQSPDKTDFSDARLLADLERVGYLPKVWLAPEPIRELRRLVRYRGQLANERRNVKLRVRALLRDHRVTVPENQRPWTKAWLSWLQTSDQFGKTTRWILDQHLERLQTLRQELVVVEKRLQEETSDDPVTQKLLSQEGVGLITAVTLRAEIGRFDRFRTGKQLARFCSITPRNASSGQRQADAGLIRAGNPELRRVLVETANRLKWRSDVWSSFSDRMRARGKPPCVVTAAIANRWIRGLYYEMKTVAI

SEQ ID NO: 44999 - protein, 491 aa, unidentified
MEGSFAGVDWASEKHDVVVQNAAGEELLAASFAHDEAGLRSLCRQLVRLKVELVAIERPDGVLVERLLDAGLGVLALHPNQVTAARPRFRVSGGKSDGFDAFVLCELARTDHRRFRVLEPDSDQTKALRALCRGREDLVRTRTALSNQLRAELERFWPGAVKIFRSLDSPIALAFLEKYPSPIEARALGEQRLAAFLRHQHYSGGKTPAELLRKLRSAPEGRAGEVEIHTRRQLVLALVALLRPLVAQVKQLERQIAQALAEHPDGELFRPLFRDPKSAITAAELVSEIGDCRARYPSGDALAGDAGQAAVAIESGKRKVARYRWACNKRLRDAVCTLADSTRHWHPWAADHYARAIARGHDHPRAIRGLGRAWCRVLWRCWQDRTPYDPARHRALQQHCTVTVPTPSGPRPDTAATQRMLGAAVTPQGRAEGTSAKRLTASRHPLPRREVDTRRLTPRPAVSTRRRATNPFRSTPKTIAPGACGTSPTTS

SEQ ID NO: 45000 - protein, 441 aa, unidentified
MTNAVPVAKSEPEWAAYVAIDWADQKHYWKLVPAGSQQQEQGELQNTPEAVETWAAGLQQRFGGRPIAVCLEQARGALVYMLAKYAHLVLFPVHPTTAARYRETFCTSGAKDDPNDTAFLLDLLLRHRERLRQLQPDTVETRLLQFLVEERRRTVNERTRQSNRLTNCLKQYFPQILLWFDGVDSPLVGALLERWPSLDTLRRAHPGTLRQFFQKHNCRSAERNQERIDAIYAAVPATHDAAVLEAGALTARGLVALLRTLRDHIAELDRRIEQLVMAHPDGALFASLPGAGAVLVPRLIVALGTHRERYDSAFEVQCYSGIAPVKESSGKTSWVHFRRTCPTFLRQTFHEFALHSIRQSEWAKAYYQHLREDKNKTHQTAVRSLAYKWIRIIFRCWKDGKPYEEEVYLQSLRRRGSLIVGAFGLPTGAGWQTVAGFQKLS

SEQ ID NO: 45001 - protein, 349 aa, unidentified
MRYFQPPADTRFYAGVDLHARSLFLSVLDRDGHGRFARNLPAAPDPFLKAVEPFREGLVVGCECLHCWYWLADACREHDIAFVLGHAWGMKAVHGSKTKCDRHDAEAIARLLRGGNFPLAYAYPKERRGLRDLLRARLRLVRQRAELYGHVHTARRQANLPPVSSDVKYKCKRAAITADIADPFVRRRVETHLALLEPLDATIRRLEAEIEGAAQEHYATELAVLQSTPGVGLVLSLTILLEIDTVGRFGTRQQSCSYARLCGAVQESAGRRTGEGNRKAGNAWLKWAFSEAAVLSAQKDERIGRLLERLAARLGKAKALSALAHKLGRAFYHMLHTKEVFDVQRFVRH

SEQ ID NO: 45002 - protein, 448 aa, unidentified
MQIVHTHCAGLDVHKKTVVVWCRIVSPDGTSTTHIRTFSTMTAGLLALVDWLLSLGITHVAMESTGEFWKPLYNLLEGNFTVLVVNAQHIKHVAGRKTDVKDAEWIAELLAHGLLRASFVPPAPQRALRDLTRQRTHLVQERAQVVNQMQKVLEWANLKLSSVVTDVTGVSARKMLEALVGGQTDVRLLAELAQGRLRAKRAELEQALRGTLQPHHAFMIAQHLAHLDFLEEQIAAFDAQIESMIQASGLPPSDPGAGECAASQAPAAPDTPPAAPAQSTSTWLAARAICDAVPGIGQKVAETILAELGTDMSRFPSAAHAASWAGLAPSQHESAGKRRAVRIGKGNRYLTGALIQASWAAIKGKDSFLAAFYRRLAARRGKKKAIVAVAHKILVIVYTLLKSGEEYQERGAAALDERQKDRLLEQMQRRIERLGYKVSLEPITAAAA

SEQ ID NO: 45003 - protein, 422 aa, unidentified
MLQETHDTEELIERIAALDIGKAELTCCVRVPSSTGTGKRSQEVRTYKTMTRSLLVLADRLAELGVTRVVMEATSAYWKSPFYLLEAAGFEVWLVNARDVKHLPGRPKTDRLDAVWLCKVAERQMLRPSFVPPRQIRQLRDLTRYRVDLIGVRTAEKNRVEKLLEDAQIKLSVVASDIFGVSGRAMLAALVAGERDPKALAQLARQRLRAKLSLLEEAFHGQFNDHHGFLLQTMLDRIDQTSAAIARVEAKIDEQIVPFQAAVDQLDEITGVGRAAAQVLIAEIGIDMGRFPTPGHLVSWARFAPGVKESAGKKKGNASTGRGNPYLARALGEAAVAAGRTNTFLGERYRRIARRRGAKRAVVAVGRSILIIVWHLLSDPTVRFHDLGPGFYDTRIDGDRKKRNHIRQLEALGYKVTLQPAA

SEQ ID NO: 45004 - protein, 351 aa, unidentified
MKIKALTFENQVFYIGIDTHLKSWTVTIRTSDNEIKTFRMDPVPEQLVAYLNKNFPSGIYKSVYEAGFCGFWIHHRLTKLGVNNIVTHAADVPTTQKEKQQKSDPRDSRKLAREHECNNLKPIYVFSLEDQTLKSLCRLRESQGRDLTVVKNRICSYIHLFGQRIPEESRWTGAFIKKLYIISERLPNGETLKHLANSLVSKKKEILATTRNLRKAILRSEKGNILRLLLKIPGIGFITAATLITEICNIHRFRNFNTLASFTGFIPSIESSDEKIIVKGLTKRRNKHIQEMLIEASWVAIKKDLVLLNDFTKFSKRMKKQEAIIKIAKKLLNRVKAVWLNNIEYKTCLVD

SEQ ID NO: 45005 - protein, 352 aa, unidentified
MIVIGADVHKSTHALAAVDANTGQLLGEREIPAREQGHLEALRWAQALGQETVWAIEDCRDLSHHFEQALIVAGERVLRVAPKLMGVSRRGEREPGKSDQIDARAIARAVLRDGLERFPTAYLDEDAVEIRLLCDHRDVLVNERTRLINRLRINLVILDPELEAKIPSRKLDYPGQLQRVTRRLRAMPQTARVRIAREQALRIGALTREAEQLKRELRDLIRVQRPELLAETGCGPLTAAILIGQTAGAERFKSDAHFARLAGVAPIPVSSGRHDRHRLDRGGNRQLNRALHVIAITRGRIDPETRAYLERKEAEGKTRMEAMRCLKRHLARHYHRLLVQPPQPLCNPSFDA

SEQ ID NO: 45006 - protein, 343 aa, unidentified
MQTITTIGLDIAKSVFQVHGVDAGGQVVIRHRLKRRYVQAFFQKVPPCLVGIEACASSHHWSRELRALGHTVRLIPPAYVKPYVKRQKNDAADAEAICEAVTRANMRFVPTKTPEQQSGMVLHRTRHLCMRQQISVINAIRAHFAEFGIVAAVGRKGVEELLDIVADPDDKRLPEIARACLAILGTQLRRLKEQILEFDRMIRAWHRSTEMSMRLDEAPGVGPVLATALVATVADPNAFRSGRNFSAWIGLVPKQHSSGGKNRLGSISKQGDRYLRGLFVIGALAVIRYAKIHGTKHRPWLTALLARKPAKVAAIALANKIARIVWAMMARGERYKEPVALAA

SEQ ID NO: 45007 - protein, 338 aa, unidentified
MTYIGFDHHKKWTQAAAIDEKGKIIREMRVLNDSSSLKGFLKGMPKPLKGVVEAGPTWGWIYDTLTELGVKMIVANPSAVRAIAEAKIKTDKIDARMLASLLRVGLIPEVYVPTEEVRSQKMLWRERIWLVRMHVRLKNRIHRLLNHYHIEVPEFSDLFGAAGRRFLEELKLPEPGNRILKAQLKLLQSYRLQIQEVQRWAVKASQGHPNRVYLESLPGFGKVFAPIVALEIDDPKRFANPGKLASYCGLVPSLYSSGGKSWQGGIGKEGNHWLKWAFIEAAWAAIRSSAYFRVVYQRLRQRKTAQVSIIACARRLCEIAYHLLKERRCYEERPFQFA

SEQ ID NO: 45008 - protein, 338 aa, unidentified
MELKRIAIDTSKWVFTLHGVDAEERPVLRRDMRRGQLVAFFTKLAPTEVVLEACGGSHHWARTLSRLGHRVGLIPPQYVKPFVKRGKTDRNDAEAISEAASRPAMRRVAIKSAAQQADAVTLSARELLVAQRTQTINALRGHAGEFGVVVAGGANRVAELLAAVAQEADMPPTARRLLAFLGQQVAHFDREIAKLDTALMRQHKANPVSQLLAEIPGIGPIGALTLAVRIEPAQFQSGRHLAAWIGLTPREHSSGGKRRMGGISRAGDERLRQLLVLGATAIIRYAKPGRSSAWLLSLLERRPRKLAAVALANKMARIALAMMTTGEAYRRTPFAATA

SEQ ID NO: 45009 - protein, 400 aa, unidentified
MLSIGIDVSKGKSTVCGMKPGGEIVYTPFEVQHTREGMSELVSLLRSSGEEVRAVLESTGSYHCPVVAALLENGIFVSVVNSLRMKRFCSQSIRKVKTDRIDAMQIALYGLAYWQELQPTKLPEDTYRELQLLARQYYQMTSLLIKAKVDFNAICDQVLPGMQELMNDHAGRHKLSDFVLRYYHTTHILEMGETRFRKDYCKWAEKKGYRNCERMAALIFATAQNGIPVLPNAPSTQIVITEAIRVLHTVEASRDAILTQMQALAKTLPEYSLVREMPCIGDTLAPRLIAEIGDVRRFHSKRALIAYAGIDAPPYQSGKFCANNRHISKRGNRYLRKTGYEVMQSYVMHKPANDPIFTFIEKKRGEGKSGKLAMVAGLNKFLRVYYGKVTELYRSLPAIE

SEQ ID NO: 45010 - protein, 375 aa, unidentified
MTSMTTAAPTRQRRVRTRPNRVVFAGVDTHKELHVAAVIDSGETVLGTRSFSTTRAGYRALLAWIIEFGQLARIGVEGTGSYGAGLTRHLAQAGITVLEVDRPDRSDRRRKGKDDDLDAINAARAALHQRRTVAPKSKDGAVEALRVLRVARAHAVRERRNTLQLLRMTIVAAPDELRDQVRNLTRMQLIRILAAWRPDVSNAADPVTANRVALKSMGRRYLELSDEITDLDELINPLVEALAPQLLARVGIGIEVAGQLLVTAGGNPDRMRSEAAFAMLCGAAPLPASSGMTQRHRLNRGGDRQANRALHLVAISRIRLDPNTRAYVARKTAEGHSKLEIIRCLKRYLAREIFFLLNPGQPTIPRRPYRRHRAA

SEQ ID NO: 45011 - protein, 323 aa, unidentified
MTTEPAEIQSVLGLDVSRDTVTLYDGRNHRTQTIANDAEALRTALQPYQATATLAVCEATGGHEDILLCVLLELAIPAHRADPAKVKAYIKSFGKHAKSDPIDARWLFRYGHDRTAALPRWQPAEPCQQKLELLVARRLDLVAMRVQEQNRLKAPRSRLIADNIQAHLAELERHIEALNAEINTLITESRDLALRVEPLRSVPGIGPVLVPLLLAVMPELGSLNRRQIASLAGVAPHPKDSGKASWHRSTTGGRRQIRPALFIAALAACRGDNPLAVAYKALLKAAKPKRVALTAIMRKIITIANARVRDALRQQNEIAPIPA

SEQ ID NO: 45012 - protein, 416 aa, unidentified
MKIVRPICCGMDVHKNIIVATIGITNKKTRITEYIQETFSTLNHDLLNLKQWLINHKCFDACMESTGKYWIPIFNILEDEINIYLTHPKYVKAIKGKKTDKKDSKWICDLFKHDLIKFSFIPPKEIRALREISRYRYKLVGMRSSERNRYQNCMTVSNIGIGSVFSDPFGKSAQAIMKEVLESDIIEDEKILKCIHGSCKNKDKILDSIKHCNIETDQRFKMNESMTHMEELQVHIDNCEIEMMKRAAPMFDQFMHITQLPGISTLSAILIISEIGVDMKQFESDKQLTCWAGLAPANNESANKKKSVRISKAGQYLKPLLVQCALGAIKDKEDYFGIKYSRIKKRRGHKKAIIAIARMMLVSIYHMILTGETFNPSDYESFRNPKPPIKQQVLTEESAIEFLKKSGFDVSKLTKP

SEQ ID NO: 45013 - protein, 345 aa, unidentified
MPIVGGLDIHRKQITFDYLDTVTGEVKRGQIAPADRAHLRGWLARFAGCGDVAFAVEGCAGWRYVAEELAAAGIAAHLGEPADTAALRGRKRHAKTDKTDARHLRSLLAEGRLPECWIPPAQILEYRALLETYHDLRREHTAWVQRIHAVFFHQGAPPLGEGALRTEPGLEGLRAAAAAHLSAAGQLQVATALDMLAATEAQLGPLRHQLREAARHLTGAKVLAARLYGVGPVTALALTCWLAGKGRFSSSRKAVRFTGLDITVHSSDRKGPPGRLSRQGPPVLRWAVYEAGKTHARAAAPDHAYYAAVADRKNTKRAALSEARKIVRQACHILTELGDDALTAA

SEQ ID NO: 45014 - protein, 405 aa, unidentified
MEVLYKRCCGIDIHKNMMVACVFTSVRKKEIRQFSTMTEDILQLVSWLKETDCEMAAMESTGSYWKPVYNIFEEECIPIMVVNAQHIKGVPGRKTDVKDAEWIADLVRHGLVKASYIPGREQRELREITRYRQEIIEERARELNRIQAVLEGCNVKLSSVITDISGKSGMAILKAIISGESDPVILSELAKGKARNKIGEMQKALQGRILEHQRKMLRHQLIHIESLTSLIMDLDADIKKKTESIDWAVEALDAMPGIGRQSAERILAETGIEMEHFQNESRFSSWAGLVPECKESAGKKMSTRIRKGNKYLKATLVECARVAIRNKQSYLYSRYQRIAARRGGKRALIAVAHTMLIAIYHILKEKVPYHDLGADYYSVVNQEKIIKRNIRSLEKLGVNVIIQPE

SEQ ID NO: 45015 - protein, 338 aa, unidentified
MFVAGLDVHLKYVTVAVLDSNGTPQLEVEVSTRTPEVLVTHLTRFRPLHVVVETCPFWPWLYDLLVPAGITFHLAHAKALRAIATAPQKTDRVDARLRARLYLSGVLPEAYPRSADQRELLRLLRHRTTLVRFRPRLAGRIHSQLHQQRLQLPREQLLRQHTRALLAEEWPQVLTPEQLAIVTQHFALIDALTPQLQALERRIDHAAQTHPVAPLLATVPGIGPYRSLLLATELAPLTRFPTAAHLVSYAGLAPMTRSSGGHTWHGGIPRGANRWVRGALVSAIPSHVRCAPASPVTTAYAQWKSRRGWRVARVAAARKLARILYTMWRRQEPWRAAA

SEQ ID NO: 45016 - protein, 340 aa, unidentified
MNIVYLGIDLAKNVFQLCGLNQAGKPLYTKRVDRKILLQTVANIPACLIGIEASTGAFFWQREFEKLGHKVKVISPQYVKPFVRGQKNDGNDALAIAIALMQPTMKFVPPKSPEQQDIQALHRARQRIVNHRTATVCQIRGLLLDRGIPMGITVTRARRAIPLILEDAENGLSARMRRTIAELYDLFLDLERRIGFFDKEIDTVFKQSEACQRIAKVKGIGPKTATAVIAAIGKGTEFKNGRHFAAWLGLVPRQHSSGDRQVLMNMTKKGDKHLRTLLIHGARAVVRVATNNNDGYLNQWVNQLKERRGFNKTTVAVANKNARIIWSILHNETEYRPAVI

SEQ ID NO: 45017 - protein, 360 aa, unidentified
MMKYMIKTQTPCLTAFKTIVSVNFETPIAIGIDVAKNSLMICYRYADNHILTKNIGNNDSDIKKLIKELKLLNFSGKIVSESTGRFHMLSAVMLSEKNFLMYVINPLMSKKYNSASIRKVKSDKRDAEILAEIAIKEEKLPDVFTADRKKLMIKKKISLVATMDKQIQAMQATVKEYQETAKTLKIKLTKAEKGILGVVKNLKEEKEKLEKEIENIFNEQSSVDAINIRRQEIFSSIPGVSNYAATLTTVFFLEDHCQNPKQWIAYSGLDISVKQSGQWVGKGKLTKRGNGYLRKRLFSAAWGTIMHDAKFKEYYNYLREKKHSYVESLLMIARKIIRIMFYLSKNNCMYNPNKIVFTTN

SEQ ID NO: 45018 - protein, 308 aa, unidentified
MIVQNYVGCDISKQWLDFFDEANGRFRRIDNQADAIAAYVAGLHPGRDFVVMEATGVHDRLLRHALAKAGIAFSRHNPAHTHHYAKSTRRRAKTDRLDARMLSDYGRRYQPEAEPAPRQEGERLQSLARHRDQLVEMRARLKTLLGEAFDDSVVADLEDMIAGFDTRIEALESLIAKTIREAEDTARDYTLMISVPGVSKVGALSLLAHLPELGQRSPKSIAALAGLAPFDNKSGKLNRRSQIQGGRSRVRRALYMAALTAIRVCDRFKAFYTDLAARSGSKKLAIIAVARKLLVVLNAIIRDKTAFA

SEQ ID NO: 45019 - protein, 331 aa, unidentified
MNYSHFVGLDVGKKTFDASLMSADEKELSHKSFDNAPTGIQSLLDWIAGYHLSLSKLLFCAENMGSYVTELSVSSVSMGFSLALVCPLTIKKSIGLQRGKNDRIDAKRIANYAVLHYRKLELYKLPDKDLVRLRGWIIIRDNLVKQKVSSIKLLETFSRMAKLADVTESISFLEEQLKSIKERILEVEEDMEQLIAASTSLYTNYLLLRSIKGIGIINAIVLLCVTDNFQRFDNPRKFACYCGVAPFEHTSGISIRGKTQTSSLANKEVKVYLTRAAITAISWDPQMKAYYKRKIAEGKHKAAVINAVRAKIIARSFAVIRRQTPFVTLAV

SEQ ID NO: 45020 - protein, 403 aa, unidentified
MNAVGIDISKGKSMVAIMRPFGEIVAKPFEVRHTASELGKLAHFLKSLNGETRVILEYTGKYYQPIARFLSDSGLFISVVHAKLIHDYGNNSIRKVKTDKADAIKIANYGLSNWVLLKPYTPEENTRLLLKTYNRQYNQYMKLKVALKNNLISILDQTFAGCNTLFTSPVRPDGHEKWIDFAAKFWHCDCVRKHSLSRFTELYNNWCSKAGYYKNNQKASEIYELAISQVPTLPYDDFTKQLVKQSVEQLNTIALTLASIQQEMQHLASTLPEYPVVLAMHGVGKILGPQLMAEIGDVRRFPRKESLVAFSGVDAPPFQSGSFEAKDRSISKRGSPLLRKTLFQIMGCLLQNQIMKDEVYQFLDRKRAEGKHYYVYMVAGCNKFLRIYYARVKEYLDSLETAA

SEQ ID NO: 45021 - protein, 439 aa, unidentified
MSNEKVQPARPFAAFVCLDWADEKHAWALCQPDAEGIEQGELENTPEAIQRWAAGLAQRFPGQAVAVAVESNRKVLFGLLKYGHLVLFPIHPATLAWYRAAWCPCGAKDDPSDTLLGLELLRHHRDRLQVWQRDTVETRTLQFLVEDRRGLVDDTTKYSNRLTDRLKLYFPQILEWFDDVTTPMVGDLLRRWPTLEQLQKASPRTLRQFFHQHHSRSNQLIEKRLQQIRRAVPATSDPAVLATSVTYVRSLLEIIATIRNAIAEIERHIAQAFDQHPDAPLFRSLPGAGPALEPRLLVALGSQRERFASAHQLHCYSGIAPVLQRSGKSQLVRFRRGCNSFLRQTFHEWAACTIRCSPWARGYYQHLRAKGKGHQAAVRALAYKWIRILFRCWKDRTPYEEARYLQSLRRRQAPKPDLRAFRWDQTAGLHRFAGLGVSS

SEQ ID NO: 45022 - protein, 412 aa, unidentified
MIAIDQFAAHVGLDWADKKHDVCVQFKNGERIFHVVEHTPEALDIWLNELHQKVKGRIAIALELKKGPVVHALQKYPFVTVFPVHALSLARYRQAFSPSGAKDDPQDAELALELMLRYPQKIKAIEPDNADIRLLQQLVEQRRLLVEDKRRFVNRLINTLKQYYPQPLEWFSHRDSSLFCELIIRWPSLQQLKRARSDTIRHFMNAKGGPAVAYTEQRIASIAIAIPLTTDKSVIEANALMATGLASQIKLVGDLIRTYDERIESLFDTLPDADLFKSLPGMGPCMGPRMLAALGDNRNRFNSAEEIQNYAGIAPVTERSGQKSWVHWRWQCAKFVRQTFVEWAAKTVNSSYWAKLYYQGLREKGKSHQSAIRALAFKWIRIIYRCWKTRTQYDEAKYLLALEARHSPLLKS

SEQ ID NO: 45023 - protein, 373 aa, unidentified
MRLKGGAMDAIYIGVDFHSKQQTICYLKIDTGELVIAELQHQDKEQVRAFYQQFQGHVIIGLEASGYSLWFEAMLEQLGCEVWLGDATEIRRRARWRQKSDRRDAELIRDLMVHHEFPRLHQPLPASREVLRMLRYRQKLIKLRTMSKNSLQAIALQAGLAKGKQLFTAAGQQQFQAVSLSPVLQWQRDHWLELLKPLNQQLLETMVWFKAQSKDDVSIQRLRTHPGIGLLSSLCLLHTLQPVTRFRNQRKVVAYAGLDPVVRSSAERAIYLGISKGGSRMLRYLLVEAVHTAVRYDEDLKRFYQRVAERRGRPKAKVATARKLLIRAYIMMRDEIDYAEFRRRASAARLARRGQGPTKVPVVLIGQSASPGA

SEQ ID NO: 45024 - protein, 456 aa, unidentified
MTPRKTKNLRMPAQPAEPLRVVNPDAAAIDVHSEVHWVCVPADRDPQPVQKFGAFTVNLEALADFLTRCRITTVVMESTGVYWIPLYELLERRGFQVLLIDPRKARRLEGRPKSDRLDCQWLQRLHAYGLLAGAFRPPDQIVELRSYIRQRQLLLTYAATHIQHMQKSLEQMNLKLTEVVSDITGATGQRIIRAILDGARDAVVLAKLRDCRCKNDEDTIAKALQGNWRDDHLFTLQQAVELYDFYHRQIDVCEKKIEGFLGTFTDRSGGKPMPKKAGRCRTANAPGFDVRTLLYRLSGVDLTVIEGIEGTTALIILSEIGYDLSRFPSVKHFTSWLGLCPNRRVSAGKVKSSHVRPGANRVTTALRLAARSLHSSKSALGAFLRRLKARMGKAQAITATAHKLARLVYAVLKNGTEYVRQGLEDYESKYRERLIRNVERKARELGFGLVPATAPA

SEQ ID NO: 45025 - protein, 366 aa, unidentified
MLIIGCDYHPSVQQIAWVDTETGECDERRLMHSDGEAERFYRELKRKGVQVRLGIEATGHSRWFERLLAELGFELWVGNAAEIRAARVRKQRNDRRDAKHILKLLMEDRFPKIWRASPKNRDVRQLLLHRHRLVGMRTRVMNQLQAIAMNEGLRRKGGLWSKKGRARLESLSLAPWTSRRRQELLELLDRLHPMIDELSKAIEQEAARWAEVQLLMTHPGVGPITALAFVLIIGTPERFHCGRQIASYLGLIPCEESSADHWRLGHITKQGNALMRFLLVEAAQTVARCEPEWRQHYFHLVLRRGRAIAKVALARKLAVRLFWMWRKGQNYQQVKKFGSDTGQLEVPNGVKSITVEVIERPAPSIA

SEQ ID NO: 45026 - protein, 347 aa, unidentified
MRFYTKQHKAYCGIDLHARSMYVCILSQDGEILLHRNMKTSPESFLKAIAPYREDLVVAVECIFTWYWLADLCAREQIPFVLGHALYMKAIHGGKAKNDKIDAHKIAVLLRGGMLPQAYVYPAEMRATRDLLRRRMYLTRKRAELLTHVQNTNHQYNLPEIGKKIAYKANRDGVAERFPEPAVQKSIEVDLALIGSYDNLLRDLELHLVTAAKQDSANALYLLRTVPGIGKILSLVLLYEIHDIRRFPRVQDFVSYCRLVKCAKESAGKRYGVSGTKIGNAYLKWAFSEAAVLFLRNNPVGQKLLARLTKKHGKGKALTVLAHKLARAVYYMLKRETAFDLDKFLHD

SEQ ID NO: 45027 - protein, 439 aa, unidentified
MEKIRERAAGIDIGAKKVFVSVEGQEVSWFLTFTEDLEKLRNYLLEHSIETVAMEATGVYWNILYDMLEEAGIDVWLVDGRQTKQVPGRKTDVKDCQWIQQLHSYGLLNRCFVAESDIKELRIYQRLREDHIRSASMHINQMQKALTEMNIRLTEVLNQIHGSSGLAIIEAILSGERDKEKLLKLCHIKIIKNKKDEILKSLNGRYTKSGLFALKQAYDSYCFYQHQIEQCDKMLDEVLKRISNKKPEQRINAPRKPIRHHKPSIENLGTAMMKIFDGKDATTLSGITDYSWLQLLSETGTDLSRWPSEKHFTSWLGLAPGQHNSGKVKKNKRKSGRPKAGQIFRQIAQSLLTSKRIALGAFGRRLSARKGSPVAIKSVARKLAAMYWRIMVKGVEFVEKGIKNYEEQLLAQKQRSLIRLAKELKMQVSYNELSTNCCH

SEQ ID NO: 45028 - protein, 409 aa, unidentified
METVVERPAALDVHKDSVTECVRVPGAGGRREQHLHAFKTTVAGLLTLRDWLRAHGATQVAMEATGVYWKPVWAILEDDFDCLLVNARHVKQVPGRKTDVQDAAWLCQLLEAGLLRRSFVPPKPIRTLRNLTRYRKAQLRERQREANRLHKILEDTGIKLDCVASDILGVSGRAMLEALAAGTTDPAVLAELARGRLRKKLPALREALEGRFTDEHALVVSSILAHLDFLDEQIERLSEAIEQAIAPFANAVELLCTIPGVQRRTAEVIVAEIGVDMSQFASAGHLVSWAGLCPGQDESAGKRRNAHTRKGSKWLRSALLEASLAATRTTDTYLAAQYRRLKPRRGHGRASIAVCHSILAACWHMLTTGELYREPGGDYFQRRDPERTTRRLVRQLEALGHTVILEAAA

SEQ ID NO: 45029 - protein, 318 aa, unidentified
MLIHYIDIAKRNFVIAVSSLSKTKTETNNPKGIAHTIEYLKKHKVALVVTESTGGLEIPAAKAIRRAGIAVIIANPRQTHQFAQSQPLTKTDAKDAKMPAFFAQMTAQKEDSQTMPYQPPTEAEEVLEALVNRRNQPADMRTAEKNRLHQVHETQVGSVKQLIAHFDRLIDELDKQIDNHTHTHFDGKDQVAEQIKGIGSITTATLMAMLPELGRLSHKRIVGLAGIAPHPRESGETKFKSRCFGGRSAVRKALYMATVAATRFEPLIRDFYQRLPSEGKPYKVAVTACMRKLLTISNARMRDYFAENDTAENGIRTA

SEQ ID NO: 45030 - protein, 373 aa, unidentified
MNPVVGLDVAKGESQIQMFLDKKMPYKNSVKVEHTVEGLKELHSYLQDLERQTGIKPPVVLESTGHYHAPVVQFLEAREYIVIIVNPLVSYRAKSSSLRKTKTDAIDAYHLGELYYKEDLEPQKKRGVQLLNLRHLTRQHENMTGIMVQTKLQFQAVLDQVFPEYKGVFGDLYAEVSLKTLQTFPTSEAVLKAGVEEMAQFIDRHCKARSFNWALEKAGGLIAAAERNPFQSTLYQSLLVSLNMYIDLLQAYHQQLSTLEREIDQLAVQLEEYELLQTIPGVGEKIAATIISEIGEIDRFSHPKKLVAFAGLDPSVFESGRFKGTKNHITKRGSARLRHMLFTAVRCSIRDSRKKKTTDETIARNKRLRAFTI

SEQ ID NO: 45031 - protein, 369 aa, unidentified
MTGRAGRWGSVVGVDPHRHTLSATVVDERGGIVATGHYNVSGDGHRALEAWALSFGPVVRWGIEGASGLGRHTSVYLCRQGHDVRDVCPTRTAERAHGRYQGKSDALDSERIARETLAHPDLPLAFKRAGDDTGPDETAELIALWHKERRSLLRTRQHLLNEADALLSDLPDELRGHLPQTKAVRPRLTALRRPRRAWPAATAVRLRLLDRHRAAIFELDRRDREITQELAKLIAGTGSTLDQLCGLDTRSVAELLVEVGDPRRFTEGGFGRFSGTAPLPASSGEGAGEPIRHRLNRGGNRRVNAVLHRMAVTQLRCDERAQRIRDEARRRGHTKREAIRIVRRHLAAVVYRRMIRDLRARPAASALAA

SEQ ID NO: 45032 - protein, 335 aa, unidentified
MSKINLIGIDTAKHVFHLVGIDERGHYVYRRKLSRQKLLPTLAQREPCTVVMEACAVSHHWARSIGRLGHLARLIAPQHVKPYRRGQKNDYRDAEAIVAAALAPGTHFVGIKSIEQQAEQALHRVRSRLLSQRNAAANGLRGLLAEYGQAFPRGLKALRSGALAFVERGEAATLGLVELVGDVLAEIEQLQRRLAVYEQQIEQRVRQDPVSSRLREELSGVGHLNASALRVKAADARDFANGRNFAAYLGLCPGHRGTGGKVTVGGLRPGHDPYLRQLLIHGARAVLLHLGDKQDAQSRWLRGIVERRGFNIACVALAHKNARQAWAILARAEAA

SEQ ID NO: 45033 - protein, 430 aa, unidentified
MGLIVPTTIHPEREDQPLPYDWFVGIDWGSQQHQVYVLDRDRRRVGERVVDHDGASLARLADWLWTLSAGQPQRVAVAIEVPRGAIVEGLLERGFHLFALNPKQLDRFRDRHRVAGAKDDRRDAFVLANSVRTDQPSFRRVHLDAPQLLLLRELSRAEETLLEEFRRSANRLREQLHRFYPQMLQLCSAADEPWLWDLIDLVPTPAHAALLSEEQVQRVLKAHRIRRVTGTDVLTCLQMQALPVAPGAAEAAQAHCQLLLPCLRVLAEQLQACSQQVSALLSTLAEELGEGESPSDVAIVLSLPGVGRKTTAWLFAEAAQPLAERDYQMLRTHSGVAPVTKQSGKRRLVVMRRGCNPRLRHALYHMARVAMQRDAHFNSVYTTLRAKGQRHGQALRHIGDRLLRILVAMLRHRTCYDASRIRREPVVQMG

SEQ ID NO: 45034 - protein, 407 aa, unidentified
MEVVYRCCCGIDVHKKMIVACLDDGGKRELREFGTTTSAIKELANWLTVSGCEMIAMESTGVFWKPLYNLFELMDLDAIIVNAAHMKALPGRKTDVKDAEWIADLLRHGLLKASYIPSREQRELRELTRYRKSLIEERCRETNRLQKILEGANIKLDSVVKDINGKSSRKLLEKIIANEMPDSDEVSRMIHSRMRPKLDQLMEAIDGITTPLQRRLLAQIIDHIDDLNRRVAVLDEMVKGYMAEYEAAIAAIDEIPGIARRSAEVILAEIGTDMSRFPSAAHLCSWAGVCPGNHQSAGKRKQGKTTKGSKTLKSILTQCAKSAKTSKSSYFSAQYQRISARRGKNRATIAVAHSMLIAIYHVLKNNVPFHDLGSNYYDTFNREHKIKSYLKRLQALGWQPDAGGLSA

SEQ ID NO: 45035 - protein, 349 aa, unidentified
MTHYAGLDISMKSTSVAIVDEKGKICFETMCETDPGIIAKVLSDSGFVCEKIGIESGCISFWLVEELKKLALPAICIESRQMATIIAIKVNKTDRNGARLIADAMRCNLYKEVFHKTKESIEIGIQMGARRVLVNTRTKLKNSIRGFLKAYGIRLGAVSHQKFSETVRDALLGIDEAVKEAIEGLLRSYEEVDRNIEKSGKALEKLSAKDPVVALFEEIPGVGTITALTYKAVIDDPHRFVNPRNVGAYLGLTPNQYSSGEMVKQGRISKCGCSELRTLLIECGIVLLTRTKKWSKLKAWGMKIMKRSGINKAAAAVARKLAIIMLRMWQERKQFIWGEKKQKKNEIAA

SEQ ID NO: 45036 - protein, 445 aa, unidentified
MTQRTIGVDLAIRGEHVAQIFEDGRAIGRPLRFRHDPASLDSFVSRATAGLGDGDVVQAVMEPTGMSWFPVAHRLADAGVDVARVKGKRVRALRRYLSEHAKTDLADAHVLAAIPGFGGPRLDRVHIPVPRSHALQRLTKQRGRMQDAVASAKRRLLDLVRWASPTLERVLPDFRTRLALALLQRWVDPDAALAARRSVLVRFIASNASGNHPHCGPFVDTLVDGLRQAARDARALHRHHVDFIELQAEIAIEVDVVLAHIKALAELERRIDALYAELQPDDVLRTIPGVGQHLAPVLLGVLHTAERFHSERHLRGFCGLFPRRADSGGAERPGQTITQGGNDRIKRALMLAADTARKIDPDLAEVYWRLMTTRGHHHKQALCAVANRLANRIYSVMRSGKPYVLRDDKGREISVAEAKALVAERYTVPEGIRASRRANRLAAPA

SEQ ID NO: 45037 - protein, 403 aa, unidentified
MDTCFAGLDWASQTHAVCVIDAHGSVCERFEVAHDATGLADLCRRLRHWHSPAIAIERPSGMVVDTLVESGFTVVPIHPNAVKATRPRYRSHGAKSDASDAYLLADLLRTDGHRFKPLAAQSDEIRALRALVRGRDDLVATRVQLANQLRSLLESFWPGASAVFADIDTPIALAFIERYPTPETASRLGPKRMAAFCAQHAYSGRRSPEELLARLHEAPNAVCAELEMEAKGELARCLARTLTRLVEQIRLMSSRIEHHIASLEDGRILMSFPRAGRICAAQILAELGCVRERFDSVERLAAEAGVTPVTYASGKSKSVTFRWACNHRLRAAITCLADNSRHANPWAADIYTRARARGCDHPHATRILARAWLRVIWRAWKDRKPYDPSSHTGAQLLIKPAGG

SEQ ID NO: 45038 - protein, 417 aa, unidentified
MFATNDLLVGVDVHRRSNVMQVMNGVGEMLIKPQRVANNRPGTAAFIQQVADLAQEGGFDHIHIAAEATGNYWLSFFCELEQSPDLADWPVALYPFNPKVIHKFRHSLGDWDKTDHLDALVIAERLRLGRQLPYPFHMEERYLPLRTLTRYRYHLVGELVRVKSHALSLVYLQASDYTVDPAFGDIFGKTSQAVLKEFPSLETVAAMPFDDLVEWLDVKGKRRFADPEDNARRLQRIAQDSYQLPDEWLTAVNTALSLSLRHLTVLQQLLTRLDSAIADLMAQIPNSLTTIPGIGPVFAAGIIAEIGDLARFDYRHEKVASFAGLKWSKYQSADFTAEETHLKRTGSAYLRYYLCQAAQLVRMHDAEYGAFYQKKYDEVRHHQHKRAIVLTARKLVRLVVRLLTTNEPFRARKVPGE

SEQ ID NO: 45039 - protein, 404 aa, unidentified
MYYVGVDIAKRSHYAAAHDESGAVVVSPFPFDNTSQGFAKLLLALGQAGIDHDDCRIGMEATGHYWIALYDFLVSHGFDAVVINPIHTDAFRKVDTVRLTKTDPIDANLIAELLRVKRFTSSYLTDEPTDSLKQLTRYRLGLVGQCTMLKNKTTAVLDRVFPEYAELFSDPFGPTSRAVLKRCATPAQVKHVGVTRLARLIDGASLGRCGRPKAEAVMEAARDSVGVSFSAEALALEVRMMVEQMEFIDAQVKYLDAEIAELLEGSQGRWLLSIPGIGPTLAAQMTAEIGDAHRFSSAKKLIAYAGLDATKCQSGERDDNGHMSKRGSSQLRYALIQGADGARRLDAYFGEYFAMKQAQGSPYYRSLTCVARKLAGVVLSLMKEERPYEPAPPEHHLPGHRGVA

SEQ ID NO: 45040 - protein, 351 aa, unidentified
MSQKTNAVAVRTIGIDTGKNTFHLIGLDEQGTIVLREKLARGRIGKRLANASPCLIGIEAGLATHYVARELLALGHDVRQVPPAYAKAFRQGHKNDFRDAYAIAEAVLRPSTRCVPVKTDDQLDLQALHRVRSRLVGQRTAVINQIRSFLLERGIAVRQGPRFLRQQLPEILAKRIDVLSPRMIGMIEDLAGDWRRLDERIECITEEIEQLAHGSESCRQLMTVPGIGPLIASAMVAAIANGAAFAKGRDFAAWLGLVPKQMSTGDRTILGHISKRGNRYLRTLFIQGARVILLRPANWARHSFGPWLTAAAKRLHHNVLATALANKLARIAWTVLAQRRNYETRVVTEAA

SEQ ID NO: 45041 - protein, 339 aa, unidentified
MNEVTLIGIDLGKHSFHLHAQDAAGRMVFRKKLSRQQLLRTLANVPCCRVVMEACAGSHWLARQLAGMGHEPRLISPQFVRPFVAGNKNDFGDAQAICEAACRPSMRFVSPRNEAQQTVSAMHRLRERLVRERTATVNQIHGFLLEFGISLPRGAALMSRLPTVLDHETLPPRLVGLVVRLRAQVHYLEEQLRQVEQDLKASLREDDKSRRLLEIPGIGPITASALAVELGDARQFANARQFAASIGLVPRQYSTGGKPTLLGISKRGDRNLRRLLVQCARAVMQHTASRTDALSLWVKTLSTRRHSNVVACALANKLARIAWAVLARGTHYQARALTT

SEQ ID NO: 45042 - protein, 373 aa, unidentified
MRKSSSFQQSPKRAAKVRSARSTTIGVDLGDKHSCYCVLDSQGQVIQDDKVSTSKIAMAKVFGSIERCRIAIEVGTHSPWVSRLLHTFGHEVIVANARQVKLISESSRKDDRLDAQTLARLARVDPQLLRPIQHRSEKAQGDLMVIRVRSALVEARTGLINTARGLVQSRGERLPICDSDQMGIEQTESLPTELRQVLEPLLTQVVSLTEKIKEMDRRVEQIAREDYPETRLLQQVKGVGPLIALTFVLTLEDKARFQKSRDVGCYVGLRPRRNESGESQPQLRITKEGDSYLRKMLVQGAHYILGYRGPDTDLRRWGLKLAARGGKRAKKAAVVAVARKLGVLLHRLWVTGEVYEPLRNATLLKRRRRAAAA

SEQ ID NO: 45043 - protein, 343 aa, unidentified
MQIHSVGIDLGKTTFHLVALGSAGRVLVRKKFSRKQLLAYTANMPASLVGMEACAGAHFLGRALRTQGHDVRLIAAKFVKPFVKSNKNDFVDAEAIAEAVERKNMRFVPIKTDDQLDLQGIHRVRDRLISRRTAVINQIRAFLLERGMVFAQRPANLKAVMADILENAEADLTAQMRNLVDMLWDEWKLVEQQIEKLNLELERISAADAGCTRIREIPGIGPIVATAIVAAIGNGAAFRKGRDFAAWLGIVPRQYSTGGKTKLLGISKRGNVYLRKVLIHGARAAVLRIKRDRAPIGAWLDALDARAPKNVVVVAMANKLARIAWAVLSSGQDYRPTANAIAA

SEQ ID NO: 45044 - protein, 312 aa, unidentified
MEKKYVGIDVSKHTFDAKVSSGVLQFDNSEKGYLEFIEHLCGATHCVMEATGSYYMKLACFLFKKGISVSVINPLVIKRFSQMRLIRAKTDKADADLITRYAELESPELWNPPVWFINELQQETMVLEGLIKQRTALQNQKEALNQMPHVSEKALSTLDYMLEQLDEQIKDLEESIAKKAKDHFSDVLRVLMSIPGIGRKTAIQLIIITQGFSRFKNSKQLAAYVGISPRIYQSGLMKGKAKICKMGMGRIRALLYLCSWSAINHNKTCKDLYHRLVAKGKAKKLALIAVANKLLKQAFAIGTSLEYYTEAK

SEQ ID NO: 45045 - protein, 317 aa, unidentified
MTTPSEAYVGIDVGKTWLDVAQWGSDSVWRVTNDEAGVAEIVDRVTALNPQLIAIEATGGYEQLLAQTLLLGSLPVAVVNPTRVRALSRATGKLAKTDVIDARLIAEYAFKIQPEAMAPKEAAEIRFKALVTRREQLVEMRSAEQNRLGTAHNSMKAAIREHIEWLGAQIKATETEIEQLLEQLPQWQAQAKLLDGIPGVGPVTAVTVLAEMPELGQLDRQKVAALAGLAPFNRDSGQKRGKRHIFGGRKGIRRVLYMACMSAIRCNPLIRSMFLRLKEKGKVFKVAITACMRKMLTIMNAMIRDQVAWKAPEPKPN

SEQ ID NO: 45046 - protein, 342 aa, unidentified
MQISTIGLDLAKTVFQVHGIDANEKVVVRKQLRRSQVMAFFQDLPPCLVGMEACATAHHWARELRKLGHEVRLMPAKDVKAYVKRNKNDAADAEAICEAVRRPTMRFVTVKTVEQQGRLMQHRVRDQLMRQRTQLINALRSHMAELGIIAAQGREGLKDLLAIVAAANDSRLPVDAKASLMVLAAQLQACQTLIGTLEKRIMTQHKSSEASRRLETIPGIGVVGATTIAAIVTDPKAFRSGRDFAAWIGLVPRQDSTGGKQRLGHISKQGDRYLRRILVVGAHAVLRRARQHPEKYPWLTALLARRPFKVVAVALANKMARIAWALLAKGGTYRAPQLAAAV

SEQ ID NO: 45047 - protein, 357 aa, unidentified
MTTEQRQQTLFVGVDVHKDTHTAVGVSPFGEKLFEITIGNYKKDFEALTDKVAEMKGLLSPYFGLEDCHGYGERLSTYLYESGHQILAVPSIMVDRARQKATHPEKSDSLDAFGVAKVMMQNIDSLPAYTISQESKKAKQIKELSMDREYLIEERTRLKNHLHSLLHRIWNTEYKDMYKDPFSLKALRYWSKSKPKCDLFLFRSMKRKVKRLIDIREEVIELEKEMEMLLDESYTVQTAAGCGITIAGMIVGEIGDISRFHSPGALAKYAGCAPRECSSGKTHRHRKTRSGNRRLNCAFHRMALSQISRSGNEKAKSYFKRKVSEGKSKSQALVCLRRQMVNIIWCMMKNKTVYKIA

SEQ ID NO: 45048 - protein, 350 aa, unidentified
MTETVYCGVDFHARMQTVAYCDSADGEIQLAQLDHRKDDVRGFYSQFTGQVIVGLEAGGYSSWFETMLEELGHTVWTGHATEIRRRANWRQKNDRRDAELILEIMLKGDFPRVHRHNRESVEVLRMLRYRARLVKVRTMISNNLQAIAMNCGLSERSRMLSRAGQQRLKSARMTPAIKHQSEDLITLLVPINERIARAERWLKQQASTDDRVKLLMTHPGVGVLTALGVVHTLEPFNRFTRQRAVVAYIGLEPMERSSAERKRYIGISKAGSRLLRFLLGEAGHTAVRFDSELKQFYERVGKRRGKPKATVAVARKLLIRCWIMLRDNIDYAEFRSRVASDPKKEHGGRK

SEQ ID NO: 45049 - protein, 332 aa, unidentified
MDHCAIDLGGRKSQICVRGADGSLLFEGPYETSSLPEFLRELPRSRVIVETTAEAFRLADAAKDAGHEVRVVPATLVRSLGVGARKTKTDRRDARVLSEVSCRIDLPSVHIPSSRAREWRAICGMHDALVTARTKLINNLRGWNRGQGVRIKSGQAETFAKRMSCIESLPAHVTTQIEALADLNEKVLTSEKRIALLAQGDELCQRLMTVPGVGPSTAVRFVAAIDDVSRFASAHKVAAYFGLVPGENSSSERQQRLSITKAGPASVRWVLGQAAWAVLVRCRSSSARPLQLWAAEIARKHGRRVATIALARKLAGILYALWRDGTIYQPRS

SEQ ID NO: 45050 - protein, 331 aa, unidentified
MQIKKFIGIDVSKDTLDFSVVVDGKLLDYKRIENTTKAINKCISQLTDKHKAITDSVFCMEYTGVYSLPLMEYLSSIHALIWMESGVRIRKSMGLVRGKNDKIDSQRIAMYAYDNKHKMKLWEKPRKEIQQLANLLALRSRLVKAHKQLLTPLKELATYISKQEDKILRASSNASIKGIEKDIGKTETAIKKIIMDDESLQIKFKQITSVDGVGMMTAAYLLVTTNEFKNISDAKKYACYAGVAPFEHSSGTAIRGKTRVSNMANKKVKTILHMAAIAAVRMKGELQDYYHRKIAEGKHVMAVLNAVRNKIILRIFACVNNNKLYQKNYTI

SEQ ID NO: 45051 - protein, 369 aa, unidentified
MEKCITYVGLDVHKNSIDVALADEGRDKEVRYYGTIDGSLDALDKVLRKLVSRGTELRFVYEAGPCGYDIYRHLTRKGFDCIVVAPSLIPKKSGSRIKNDRRDAEMLARLHRAGELTPVYVPRIEDEAMRDLCRARIDAKNAERKARQQLNAFLLRSGFRYSGKTLWSLAHWRWISDIHMTHSAQQITLQEYVDAVRSNTERVDRITEQICLLAAEWRLGPVVEALQALRGVSLVVASTTVAELGDLSRFDNPRHLMAYLGLVPSEHSSGESTQRGGITKTGNGHARRMLVEAAWSYRLPARVSRRLRDRQQNLPQAVWEIAWKAQLRLCARYKRLVTKGKQAQVVITAIARELSAFMWAIAQAVPVAS

SEQ ID NO: 45052 - protein, 357 aa, unidentified
MSKSIIDTSSVTRVGLDLAKRVLRIHAVDATGFVVIARSVNRRTLLKFFDMLPRCVVAMEACSSAHHWGRQLLERGFAVKLIPPAHVKPYVRRSKNDAADAAAICEAAGRPGQRFVPVRSVENQAALMRHRARELMVGQRTAALNALRGHLSEIGVVAAQGVQNAYALKEMADEGFDENGEIVVPDCVRLALAPLVRQIDAFDEAIGAIDRELEASARTDETAKRLMTIPGVGPVTAMALLATIQDFAAFSSGREFAAFLGLTPREHSTGGKPRLGRITKMGDRYLRKLLVQGACSALGHRKGHNDALRRWASGMLERKTVKYKFKLTAVALANKLARIVYALATKGGHYDDRPVAA

SEQ ID NO: 45053 - protein, 343 aa, unidentified
MYYIGLDIHKKIIAYCVKHGGGEVHSQGVVNATRAALDAWMKALPQPLTAAMEATLFTGRVYDHLLPHASALKVAHPLMLRAIAASKKKNDRVDAAKITDLLRCDLLPECYMAPVEMRERRRTLRYRNLLVRQAVQMKNKMAGLLMETGVTYNKEKLHQKKYFTQLVKESAELPQALKPLLKVGRETVERATASEKALLRALEHDPLLVARVERLATIPGVGLITALSWALEIGEVARFASVKHAVSYCGLCSAERSSAGIQKRSPISKQRNKHLQTVLIEAAKLAPRWNSDLALLYDKEKQRGNRNRATVAVARKLVAYLLAVDRREKPFQGGKKPRLKAAA

SEQ ID NO: 45054 - protein, 326 aa, unidentified
MEKFDVNFIDANGKEKSLKVKNSLASISRFLSFVSEDSILCAEHTGVYGDILVYLCNQMNISIALVPGYTIKHSLGLLKGKSDPLDSKRIREYGERFPDKLEYAEYPEENLTELKQLYTLRHQLVKQRKSLRTLDKGEEHHPMQSISVHKHMHTALDGLDKEIVDIEEDIEMLIRKDQEMNESFELVTGIIGIGPVIATDLIIKTGNFKTIDTHRRAASYAGVCPFPNSSGKMLGKSKTSPFADKKLKSLLYMGARAAVKHNKEYKLYYQKKELEGKPYFLIMNNVSNKLLRTVYSIVKNKTPYVRDYVCLDPRERNINSSIKKVA

SEQ ID NO: 45055 - protein, 406 aa, unidentified
MLFVGDDWAEDHHDVEIQDETGRRLAKARLPEGISGIAKLHGLVGKHLADDGVAAQVKIGIETDRGPWVAALVASGYQVFAINPLQSARAREGHGVSGAKSDAGDAHVLADLVRTHAHQLRPVAGDSEQASAVKVLTRMHQTLIWDRTRQVLRLRSSLREFFPAALEAYDDLASPDVLELLSKAPEPNSAARLTRVQITAALTRARRRDRDAKTTAIMNALRAEHLTQPPQISAAYGATVRALAALITTSNEQITGLEGSVEAYFGQHPDAEIYLSQPGLGAVLGARVLAEFGDDPTRYDGARARKNYAGTSPITRASGKKKVVLARYVRNNRLADAVHQQAFSALSGSPGARAYYDALRDSDISYNAALRQLGNRLVGILHGCLKTHTPYDEATAWNQHTQRAAA

SEQ ID NO: 45056 - protein, 302 aa, unidentified
MSLAKTAICVVDRDGRVPWQGKVPSEPEPLVKRLAEWSGVIDLAGIEACPLWEWLHRGLREAGIPVVCVETRHAQHFLSSRPVKTDKNDARGIAEMMRLGHYRPVHVKSPAAQSMRTTLAARMQLVASQLQIEGTIRGLLKVYGLKIGAIHRNRFAARVLELLEMGALPDLSAAIEPLLRVRGGMRAERKVVDRRLAALSRRDDVSRRLMTILGVGPVTSLAFVATVDDPGRFGSSKALGAHLGLTPRVYQSGEIDRSGQISKCGDRMLRHLLYEAASALMTRTRKWSRLRAWASRSPSAGA

SEQ ID NO: 45057 - protein, 391 aa, unidentified
MARVMIGIDPHKASHTAVVISGTEEPLGELRVRACAAQAERLLEWAAAWPERTWAVEGAGGLGHLLAQQLLSAGERVLDVQPKLGARVRLLATGNVNKNDPNDARSVAVAALRSPGVREARPDDHAAVLKVWSKRRRDLASSRTQVVCRLHAVLCELVPGGVPKKIIAAHAGRLLISITPPDAVAAARWELAAALLEDLRRIDGQLRETRKKLDAAVRASGTSLTSLFGVGPVIAATVIGEVRDVSRFKNRDRFAAYNGTAPIEVASGKRKVNRLSRRGNRRVNHAIHMAAVTQVRQPHSEGRAYFEKKLAEGKTHREALRSLKRQISDAVFTRLRADARRAAGQVRDPGGQQGNDSSTSAAGPHPSNRLFGQATPGPWPQPTTPAPGTAP

SEQ ID NO: 45058 - protein, 431 aa, unidentified
MNAIHNSQSGNLRDKTLDHDSTQYAALIGIDWGDKEHAFHLKSNDGTFESGTLRHSSETLFQWLSKLEERFDSRPVAFAIEAQSPPLLAAIRQFSWAVVFQIHPITSKRLRTAFTPSGAKDDLPDAKVLLDLLISHRDKLRPLPEPVSPKTRILDGICRERRELVDQRTKWCLQTRAALKAYFPQAFELFSDELFRPIVSKFLARWPDLISLKTEKTSTIKRFYTSNGYRNVALIDQRLEIIKTSIAIEIDPSRISEYTRKVKHILERIELANRQIKELDLQMSTVFKEHENWQFFRELPGAGPSLAPRLLCAINMAPENNAQGMQKYFGTAPVKEKSGSRVWTHRRWNAPRFFHQTWVEWAGLSVQHSRWAKEFYEQAKARGKGRYTALRALAFKWMRVIARCIETKTDYNEELYIQSLKKRRSPLAQRL

SEQ ID NO: 45059 - protein, 356 aa, unidentified
METAYDGRQVVGMDLHRRRSVLVRMTEDGRRLGMARITNSPAELRTQIARAGKCPRVALEATYGWYWAADTLAAAGAEVHLAHPLGVKAFTYRRVKNDERDCADLADLLRMGRLPEAWIAPAEVRELRELTRYRHKLVSLRTSCKDQVHAVLAKLGIPVTCTDIFGRAGSAWLDGLGLPQPYAGKVTSLRQLTGELTTEIAMLGDVIADLLAADRGYQVIQQLPGIGPVLAAVITAEIGDVTRFRNAGQLCSWAGLTPRHRESDTKVARGHVTKQGSRLLRWALIEAIQRIPRDCLIGAAKDAIIARRGKEAKNIAKVAAARRLLTLVYYGMRDGQIRCLSKSPGELPVTPAERAA

SEQ ID NO: 45060 - protein, 372 aa, unidentified
MSKIIMIGCDLHEDSMTLKIAQGRQAPETRTVKNTAAGRAAMIADLRRRAKAAGSVPVIFAYEASGQGFGLYDQLTAADIECHVLAPTKIARSPRGRKEKTDEKDALDLLELLRGRVLAGNRLPEVWIPDAQTRDDRELVRMRLDVREKITSLKAQMQSLLKRYQLRRGPGLGKGWTKAFRGWLQRELAEPTVACRSRLGTGGQAALASLLRQLHSLEEEEERLDEQVAALASSPRYEARIRELSKLCGVGMLTALVFLSELGDLSRFANRRQIAAYLGLVPSSNESGQRDDRKGHITRQGSARVRKALCQAAWARLRHNQEEKAIYERIKSKNPKKKKIAVVASMRRLAVRMWHLGKAEVPSAAGRLVSSG

SEQ ID NO: 45061 - protein, 355 aa, unidentified
MKYYCTTTEFNCGIDLHARQMYVCVMDRQGRKLVHCNVRNNDFAFFLKLIQPYRHSLTVCCECMFGWYWLADACADAGLSFVLAHALYLKAIHGGKNKNDRIDSEKIAHLLRSNLIPPAYVYPAERRPLRALLRQRLVYVWRRAELLARISSHQLAHNRTPARQTRRIRDPWEEELLAAEDDPLRRLALQNDLAMIRHYDAQIKLLEGKLVSLAKKQSGRDFALLQSVPGIGLSLGLTILHEIGPIERFPTVKDFLSYCRLVKGTVASAGKIKGLRGAKLGNPYLRWAFGEAAIIAKRDHAIIGPLAQRLEARFQGNKFKANTVVAIKLARAVYFMLKDKTVFDPERLIRTMTKT

SEQ ID NO: 45062 - protein, 388 aa, unidentified
MRQTDDLSKSLTPFVQGNTLIAVIELSLSSWLVAGVVPGITRQPLKKLEPDEAELLRLLQRWRDEAVKSGCTIERVVVAYEAGRDGFWLARWLRAHEIEVHVIHSSSVAVSREHRRAKTDRLDTAMLLRVFMGWLRGERGHCGMVAVPTIEQEDAKRPHRERENLVGEKTRIINRMKAAMIRLGIRGFKPELRRAPGKLDGLRTPDGLPIPPNTLDEIRRDMTRLAMVREQIELIEQARLERITQAPNTGPNAMVRLVASIVGVGVETADMLVQEVLSRDLRDRRAVARYAGLTGSPDESGSKRREKGLAKAGNARVRRGLIQLAWRFLMFQKDSALAQWYRARTDGVKGVRKTIMIVALARKLLIALWRMVTTGEVPEGVRLRPVEA

SEQ ID NO: 45063 - protein, 350 aa, unidentified
MMIIGVDYHPSFQTIAFFVEETGECGEQELNHSDGQAERFYRDLKQRGICVRVGMEATGYSRWFERLLAELGFEVWMGDPAEIKAKRVKKQKFDREDARLLRRLMLENNFPQIWVPGPENRDLRQLLWHRHRLVQMRTRIMNQLQALAMNEGYRWKKKLFSEQGRAQLEKLTLAPWASRRRQELLELLDRMNPTIEELTAAVEREARKRPEALRLMTHPGVGPLTALAYVLIIGTPTRFQRGKQIGTYVGMIPCEASSARKQRLGHISKQGNSLLRFLLVEAAQAAARIQPDWRRRYLHLAMRRHKSIAKVAMGRKLGVRLYWMWRNGCEYSPSLEFGSYVGQLGTGHGV

SEQ ID NO: 45064 - protein, 385 aa, unidentified
MAPPTRPRIVIGLDVGKSAHWACVVTREGELLASGPIPNREDAIDGLYAQYPGALVVVDQVRNIGSLALSRAKLAGMPRAYLPGLAAHGASKLFAGDAKTDERDAMVIAKTALGIPDALLAVADRPPEIEAARSLAAQRDFLTCENTRSKNRLRSILLESCPEFEAQADLSDPATLKLMAAVGGPWSISEASPQAVGALTRGCRRAKVAALVESVESSSRPHPAAVACEDRAVRLLARRISENAAEIESLTSEISALLSADETYRCLLTVPGIGPRTASELVISIDIADFAGHDRLASYCGLAPRNRRSGTSISSVSASRQGNKRLKNLLIFSCNCLARSRNRWGEYYARCRDRGMPHGKALKAVARKRLKVIYAIMRDKVPYAA

SEQ ID NO: 45065 - protein, 316 aa, unidentified
MSKANTRTAAIGIDVSKDHCDVCFLDEKENSNHQGQYPEEKYKALVKKIAGAKPRIVILEATGGYERGLAALLLASEVPYRVVNPLRARQFAQAIGLLGKTDSIDARMLGLYALRNKIEPAVVPNGKIQEIRALLERRRQLVSLRASEKTRQHLEANKTAAKSIESHLFFLTKEIETLDSALDELVKGDEEFRHKEEILTSVPGVGEQTARTLIGAMPELGSLNRGEAAALAGLAPFAHDSGKLRGKRMIRGGRANVRQSLYMAAVSAIRYNPRIKVIYQRLVSAGKAKKLALTACMRKLLLLLNTLLKKDEVFAA

SEQ ID NO: 45066 - protein, 313 aa, unidentified
MLPLLVYVGMDIAKATLDLHALSLPHPQTSQFANSVAGHRRVVRWLDRLGAAHVVCEASGGYERPVVTALQQAGVAVSVLNPRQARDFARAQGRLAKTDRLDAQVLAQFGRCLQPAATAAPSLAQRQLAELVARRQQVQQLRMAEHNRLEHTTHPAVRRQLQRHLLGLDRQLEQLQTWITELIGTEPTLAHKVARLCAVAGVGRITAAVLLATMPELGTLNRRQAAALAGVAPFNRDSGPRRGHRLIGGGRAVARRALYMAALVAAFKNPRFHRFYQRLITAGKAPKVALVAVMRKLIILLNQLLKNPQLQPS

SEQ ID NO: 45067 - protein, 375 aa, unidentified
MSNHSEAFVAFDSSKLRNAVAIADSGRMGEIRFLGEIENSTTATAKLVRKLASKYERLTFCYEAGPTGYELYRQIKSLGQECIVVAPSLIPKKPGDRVKTNRRDAVSLAKLLRAGELTAVWVPDRHHEAMRDLTRARDTAVDDLRSKRQQISAFLLRKGLHYCAGKKTWSQAHLNWLMSQRFEYPEHRLVFEEMMMAMRQAQERLERLEQAIRAAVPDWSLADLVTALMAMRGIDLISAATFLAEIGDLSRFQSPCELMAYLGLVPSEDSTGDRIKRGPITKAGNRRARRTLVECSWSYQHPPRVGKDKQAKVAAAPQAVREIAWKAQSRLNRRYRALVRRGKLKTVAITAVAREFAGFIWAVAREATAARAAAK

SEQ ID NO: 45068 - protein, 344 aa, unidentified
MNSMHYIGFDIHKKVISFCEKQVDGTVVHRGVIRAIRQDLNKWAIERKVPWIGAMEATLFTGWIYDFLLPYSQELKVAHPEMLKAITAAKKKNDAADAEKIADLLRCNLLPECYMAPTEHRNLRRILRYRNLLVREAAKMKTKTATLLMEVGAEYSKRRLHGRRYFQDLLSDLEYVPESALNLLQMSHDSVDFFSKMQKTLIHALRNEPQISKRVQLSMSIRGVGEVTALTWVLEIGDINRFSSIGQMVSYCGLCSAQKESAGKEIRGPISKKRNKHLQTVLVEAAKLAPQWNPQLAEIHERELKKGNRNRATLAVARKLVAYLQAVDKTKKIFVPKEVLKEAA

SEQ ID NO: 45069 - protein, 359 aa, unidentified
MQTQSNKIDFTGQNIYIGFDVHLKSWTVTVMTEKLTHKTFSQPPKPEVLYHYLAKNFPGATYYSAYEAGFCGYWIHNKLVELGVNSIVVNAADIPTTGKEKVMKTDPRDSIKIARSLRNGDLKPIHVPSIKTLEERGLIRMRSTLVKDLTRYKNRIKSFLYFHGIEYPEVFNRPKTHWSNRFNQWLEAIEFNDLISKATLDMLLGQSNSLRGSVLQITRQVRELAKTDRYKMQEKLLRSIPGIGILTAMIILTEIETINRFSNIDQLCGYIGLIPSTCSSGDKEVIGDLTPRGHSILRTAIIESSWVAARLDPALNKSYHDYCKRMEPNKAIIRIARKVSSRIRFVLKNNQPYVFSVVK

SEQ ID NO: 45070 - protein, 444 aa, unidentified
MARKSKKQPLRIVHPRCAGIDIGSREHWVAVDPDSEEQPVRSFSSFSDDLYAMAHWLKSLDIEVVAMEATGVYWIPLYEVLDAEGFQVNLVNSRATRQVSGRKSDVLDCQWIWQLMTYGLLKGAFRPAGEVCALRAVVRQRDAKVKEQARCTQHMQKALTQMNIQLDSVVSNLTGKTGLSILRHIVAGERDPQKLATLRDRRLRATQETVARSLHGNWRQEHLFALSQALAHYDFLAEQIAECDQAISEALGCLPTLAEQTSVPVKLLRSPHRSVAQQTQLHQALNEVLGVDLTTVPTLGIDTVLVLAGEIGPDLSRFPSSQHFCSWLGLAPSTHISGGKHLSGPKRKVFNRAGQALRQAAANARRSNTFIGASHRARLARMDTAKAIKATAHQLARLIYAMLTKGQDYVEQGMEAFEARSKDRQLRSLQRKARQFGLAIVEVA

SEQ ID NO: 45071 - protein, 343 aa, unidentified
MKVTTIGLDLAKNVIQVHGTDERGKAVLKKQLKRERVALFFAKLPPCLVGMEACGGAHYWARKLEKLGHQVKLMAPQFVRPYVKTNKHDAADAEAVCEAVSRPNMRFVPIKNGEQQAVLALHRARGGFVKARTAQANQIRGLLGEYGIVLPRGIGHITQRLPAILEDGENELPGVFRQLLARLADHLRHLDRQVDELEQQIQLWHGENDASRRLAQIPGIGALTASALVATIGDAKQFKNARQLAAWLGLVPRQHSSGGKPMLLGISKRGDAYLRTLLIHGARSVVRVTERKSGEAQRWLTQLIGRRPPNVATVALANKNARIVWALLVKGQDYQFDYTPSAA

SEQ ID NO: 45072 - protein, 341 aa, unidentified
MWIIGCDYHPSFQRIAMMNTEGGEYRRLRLEHVGEAEQFYRGLAGEAVRVGMEASGHSRWFEALLAELGMELWIGHPSAIRAAAPRKQKTDARDAAHLLRLLESGQFEGMRIRVPTAEEWDVRQLVLHRHRLVEIRTRVKNQLRSMAVNQGMGRKPGLWSRKGQEQFRELRLPPWTSRRRQDNLELLEQLRERTAPLDQAVMEEAARRPEVARLQTHPGVGPITALAFVLTLGEAQRFAGGKQVASYLGLIPAEHSSGGRQRLGHITKQGNALVRGLLVEAAHSAVLRDAELGRCYHRLAMRKNRSIAMVAVARKLAVRLWWMWKRGLNYGEWRASGSHAG

SEQ ID NO: 45073 - protein, 349 aa, unidentified
MILVGCDLHTRKQQVALLNTDTGELWEQELSHVGDDVERFYAALPSPVTVGIESTGYSLWFHALLQRLGHTLLVGEAAKIRAMVVRKTKTDRRDARHLRDLLEDDRFPLVWIPDPTTRDLRALIKHRLRLVRIRTMVKNGLHAIALNQRLALGPSLWSRQGLAQLQALVLLPHTRRRRDDSLDLLHWLNRHIDELDLQVATAAAADPDARRLMTHPGVGPVTALATVLVLGPVGRFPGSKHVVSYIGLAPTVNASADKCRLGHISKQGSALLRWVLGQAAPLATRGDAGLKRVYFAVLRRRGRPKAKVALARRLLVRLYVMLRDQIDYDEFCRRGRARHGGLELARTPV

SEQ ID NO: 45074 - protein, 388 aa, unidentified
MIYVGIDIAKLNHFASAISSDGEELIKPFKFTNDNDGFHLLISKLDPLDKDSLIIGLESTAHYGDNLVRYLVAKNYKVCVLNPIKTSTMRMNNIRKTKTDKVDTFIICKTLMMQESLRFVTFYDLDLMDLKALGRFRQKTIKQRTRLKIQLTSYVDEIFPELQYFFKSGLHQKSVYALLKEAPTPEAVASMHMTHLAHLLKVNSHGRFNKEMAQQLRVLAQKSVGANDSSLSIQVTHTIQQIELLDSQLERVEAEMTEIMKFNDSVIMTIPGIGYINGGMILGEIGDIHRFSCPNKLLAYAGLDPSVYQSGNFQAKKTRMSKRGSKVLRYALVNAAHNVVKNNATFKAYYEAKMVEGRTHYNALGHCAGKLVRIIWKMMTDNVEFNLD

SEQ ID NO: 45075 - protein, 398 aa, unidentified
MTESSDYESVQVFIGVDVGKDTHHAVAINRSGKRLFDKALPNDENKLRSLISDLKQHGQILLVVDQPATIGALPVAVARSEGVLVGYLPGLAMRRIADLHAGEAKTDARDAAIIAEAARTLPHALRTLKLADEQIAELSMLCGFNDDLAAQTTQASNRIRGLLTQIHPALERVLGPRLEHPAVLDLLQRYPSPEKLASLGEKKLAAQLCKLAPRLGKRLAADIAQALAEQTVVVPGTNAAAVVLPRLALQLITLRKQRDEVALEVEQRVLAHPLYPVLTSMPGVGVRTAARLPTEVACRAFASAAHLAAYAGLAPVTRRSGSSIRGEHPSRRGNKALKRALFLSAFAALRDPLSRAYYTRKMSQGKRHNQALIALARRRCDVLFAMMRDGTFYTPQGS

SEQ ID NO: 45076 - protein, 444 aa, unidentified
MVCSGMILIREVADAPVIMGISKPAGLKSPCGEVKIVNPLFVGIDVSSRSNVAYLMKPDGSKHSSVSVQNNLGGAKMLSERIVSALSSMRLSDVVIGLEATSIYGNNLVYALREDGSLSRFQRKIHVLNPKQVKKFKEAYPDLPKNDFVDAFVIADHLRFGRIAKEVYMDDYRYQALRTLTRARFDVIQNLTREKQRFANYLFLKCSGIAQEKDIQNTSATTIALMEHFETVDDLANTDLDELTDFIAQAGRGRFVDPDATARAVRAAAKGSYRLPKTVNDTVNQAMSVSIASMRALKEQVKVLDKAIEQQFEIIPNTLTSIPGIGKVYSAGIIAEIGDIHRFDSQASVAKFAGLVWTQHQSGEFEAEHSRMIKSGNRYLRYYLLEAANSVRRCDSEFRRYYDLKFKEVNKYQHKRALALTARKLVRLVFRLLKDNRLYIPSEG

SEQ ID NO: 45077 - protein, 423 aa, unidentified
MDVVGIDWAWDFHICYSIEKNKIYRIKDNEAGYRELLNEVSKEAVFVIEESFNRISDFLLSEGREVYLLPPKRSKEARGYHSNGIKTDSLDARSIALTYSEHPEYCIRARNNEEGRSFREQLRVYRYYKDEASRLKNKLHNELHDHFPEFVEVMGNWKKNKGKILLLSITDELKSLSIEEIHNYFKENQIAFTNSLRKKAKELKKREWHITKYTLMMVANAARHLLEVERGKQEMKNEMERNLKESKYRVILSLPGVGVVTGVALVAAFLNHEFGNYRNFQKYCGTVPIIIQSGNFRKCVMRKHCDRNLKGTLHMMALSAVNKGSWMKGYYARKIKEGKSFGHALRALANTLVKIAFAMLKSLKPYDEELFLSSRGNKSPQSNYTTKTSTLETEKKTNEKLSLPVSVAQTNCHLGTDSGRLSP

SEQ ID NO: 45078 - protein, 349 aa, unidentified
MSHTLNTAIAVVGIDIGKNSFHVIGLDGRGAIVLRQRWSRSQVEARFANMPPCLVGMEACVGAHHLSRKLHGLGHDARLMPVKYVRPYSKGQKNDFRDAEAIAEAVQRPTMKFVATKTADQLDLQALHRVRERLVSQRTGIINQIRAFLLERGIAVRQGQRFLRAELPRILASPTNVLSPRMMRIIGDLTGDWRRLDERIEDLSGEIEAIARQDSGCERLMSVPGVGPIISSAMVAAIGAGDAFSKGRDFAAWLGLVPRQMSTGDRTILGKISKRGNRYLRVLFVQAAWVVLIKPKSWERHGLKSWLEAAKKRLHHNVLAIALANKLARIAWSVLARGRDFEASKLRVA

SEQ ID NO: 45079 - protein, 413 aa, unidentified
MRVHHTVCCGIDVHKKSVTACLMWGPADQEPQWEIRRFGTMTSELKTLAEWLKQTQCEVAAMESTGAYWKPVWNVLEGQIPLILANAKHVRALPGEKTDNKDGKRLASFTRHGLIRSSFVPGRDIRELRDLTRHRKKLLANGAAERNRIQKVLEDANIKLGSVLSDVFGVSGQRMLHALVDRPSVNVEEVTALAHWRLQPKIEELKKALEGRLTAHHRFMIDLSLGHMQYIEQQILRLDQEIARHLEPYQKQFELLQTIPGIAQNASACVLAEIGPDMSPFDDDGRLSSWSGICPGNNESAGKKFKTNTRKGNPHLVSTLVESAWASTHVKNSHYKARYHRIKSRRGSQRAIVAVAHSLLRTIYVVLKTGQPYQEPTRPLLTEKQRTRKAQRLTRELQQLGFEVTLNTKTLNG

SEQ ID NO: 45080 - protein, 370 aa, unidentified
MDSITYVGLDVHKATISVALAESGRGGEIRQIGVFENRPEVLAKLAARLAKGGGRLSFCYEAGPCGYGLHRLLTGLGHDCVVVAPSLIPIKAGDRVKTDRRDALMLAKLHRAGELTPIWIPDAAHEAMRDLVRARATAGRVLSKARQHLQSFLLRHERIYRGGRAWTLAYRRWLTTVRFAHPAQQIVLQDYIDAVQDAEARLDRLMRQIEELLPSWSMAPVVAALQAMRGVALVVAVTVVAEVGDFRRFANARQLMAYLGLVPSEHSSGATIRRGGITKAGNALARRVLIEGAWTYRMQARVSRKLHDRNEKLSPAVRDIAWKGQIRLCARYRRLAAAGRPKVVVTTAIAREMVGFIWAIARIAQPALQG

SEQ ID NO: 45081 - protein, 389 aa, unidentified
MLLDHPSDGPAAIRTQFGAIFVSLELSRSNWLVTSLSPGKGEKMSKYSVTAGDVAGLMKLFADLKRKAEVRTGQSYPIITIQEAGLDGFWLHRVLQQEGIESHVVDPASIATPRRRRRAKTDRLDGETLLRALLAYKRGEPRVCAMVIAPSPAEEDRRRLCRERRTLIEERIEHVNRIKGLLFAQGISDYAPLRRDRRTRLEALRTGDGRVLPSHLKVQIGRELDRLELLLEHIKAVEAEQDALLGAANNPAGEKAAPQPVAMLLALKGLGANFAAVLWTEAFYRQFANRRQVAAYAGLAATPWRSGGVEREQGVSKAGNPRLRTTMIQLAWLWVRHQPQSALTRWFKAHSQRGRKSAIVALARKLLVALWKYVTQGVVIEGAVMKTAA

SEQ ID NO: 45082 - protein, 387 aa, unidentified
MIFVGIDIAKNTHWASAMNSDGEILLEPFSFQNNNEGFQKFISKLSSFDKQKMLIGLESTAHYGENIISYLFNLDYKIGIINPIQTSNLRKSNIRKTKNDKVDTFIIIKSLTLNNYNLVTTRDINNIKLKGLSRSRHNLIVMRSRSKIQLASFIDQLFPELNKFFKGNLHLNVSYQLLKDYSSPKDISSLHLTKLYNILHDNSHGRYNKEDAIRLRELAKNSVGIDNPTLSLQIKQAILQIELYSEQIEEVEKLSKQILDEMKSKLLTIPGMSYNQATAIHGFIGDIRRFNKSCQLLAYAGLDPSIYQSGNFEARSTRMSKRGNSLLRYHLVYAAHNLVLHNITFKKYYDLKRSQGKTHYCALGHCAHKLVRIIFKMLKSNVDFNLD

SEQ ID NO: 45083 - protein, 464 aa, unidentified
MSRKAQNQQERRSARPKVDWKALEVVHPDAAGIDIGGSEHWVAISPDRDEHPVRCFDCFTADLEQMADWLKARGVRSVAMQSTGVYWIPVFEILQQRGMEVYLVNARHTKNLPGRKSDIAECQWLLKLHTFGLLQNSFQPSDEIRAVRTLWRYRSGLVAQASSTIQRMQKALIEMNIQLTNVLSDLSGVSGMAIVQAVLDGKRNPEELASLADPQVKASKEVIAKSLRGNWRPELLFVLGQEMDSYRTYRKRIVDCDREVQQHLQRMESKVDLSTQPIGPRPKGKRARGNAPQIFDLRSELYRLTGVDWSQVDGIDVQVAQTVIAEVGADLKAFPSEKHFANWLGLCPTNETSGGRVLKRRTPKVVNRAKAAFRQAASTLIRSNSYLGAQYRRLRTRLGAPKAITAMARKLSCLFYRLLTKGQKYVDRGAQYYESRYREQQIRSLIKRAQRLGLQVLSPEVKPA

SEQ ID NO: 45084 - protein, 352 aa, unidentified
MVVAVQYRSPSLNKNVMVQIYGIDLGMSSFDVSFLSESGSVRHLSGVKNTVHGISKFLLSLPSSAVLCAEHTGVYGDLLLRLCTLNRTCLCFVPGYQIKHSLGLQRGKSDPLDACRIREYAERFYDLLRPCFYPGEEMSELQELYRTRSLLVESRKRLDTLNIGDNCKSSVSLAADHARRAVLAELNTQISGLDHEIEALIQNSSEFSRNYQILTSIVGVGPVTSCELIIKTENFRKLDTAKKCAAYAGIAPYPKESGKMKCGHKISPMGDKQLKTLLFLCARSAKEHNKEIRLYFLKKHKVEKKHFFVAMNNIANKLLRLIYSLIHKQQTYDRDYIQRDPRCVVISDTHKC

SEQ ID NO: 45085 - protein, 441 aa, unidentified
MSYRIAGIDVHKKMLAVVVSDVEIESEYQFERRMFSSNPEQLRSLAAWLVEQKAEEIVMESTAQYWKPVWETLERYWKPLCEKREGTRRRSGTLHLAQALSNRGRRGRKRDFVDAERLVKRLVARELTLSFVPDAEQRLWRTVTRKKYQLRRDVVRLHNQLEALLEEAHIKLSSLVSDLLGVSARRMLKALADGETNPAALAALAHERLRATPEQLCDALGACTELKPVYRRLLKMTLEQLQILEQQIGQLDHELATLLHPHQDAVERLAEVPGFAVDSAQQIIAEVGPTAATFPSEKCLSSWVGACPGEEESAGVNYSHRSPKGNRHMRRLLNQAANAAIKVKGSIFEVVYRRCVPRLGHNQTIGVIAHRLCRLIWLILHQGTRYEERGPAVTMRSRYQRTWRMIRQLRQLAIGSNHQVLNPARHMRSYFRLWETSKPVT

SEQ ID NO: 45086 - protein, 384 aa, unidentified
MSGIGRPYALATTGTDTAAVIVSLELSRSKWLVTSLLPGSEKMSKHFVSAGDAAALLELLERRRRQALELSSGGVRVITIQEAGLDGFWLHRLLEKNGIESHVVDAASVAVPRKKRRAKSDGIDGETLLRTLSAWRRGEPRVCSMVRPPSPEDEDRRRLVREREGLIQERTRITNRIRGLLASQGITDYQPLRRDSRQRLEALVTGDGRALPPQLKRELTRALDQLDLLQQQIKTVEKERAASQAAAAAGSPAELLLRLRAIGPEFAAVLSLEAFYRRFDNRRQIASFGGLAPSPWQSGEVARDQGISKAGNPHLRKTLIELAWLWRRYQPASALSQWFRERARDKDRRARKRLIVALARKLFVALWRYVSIGVIPEGAVFKTA

SEQ ID NO: 45087 - protein, 422 aa, unidentified
MKKRIYRRMPVNDFQPETISHADLGGKLVFAIDVAKVDMVAAFAGADGRVLQTICWKAPEENPTVLSILRSFRAAGVTVETVMEPSGTYGDVLRYQLEQDEFPMFMVSGKRTHDAMEIFDGVPSLHDAKAAAIIARLHADGLSTRLAVEVPERRQLKAALAIMDLHQERYLQLAHRLESWLARHWPELPTLLDLTSSSLMALLARIGGPADVAAAPGQVTKLLLGISHRLIADDDVAAIIASAKTSVGVPMVGLERDALMAIADDAYRAHRAFTTAKTKVDQLAATTPAATLAPVIGHTTAAAVFAEVGDARSFPCARAFLKAMGLNLKEKSSGTVHGQIKITKRGPSRVRQLLWLAIFRWIQKDPIANAWYQRKKQRDGGRASRAAVALMRKLAKGLYHVGRGGTFDSSRLFDTRRLQVVT

SEQ ID NO: 45088 - protein, 263 aa, unidentified
MKKNQEIRLFSESVGIDVSKLTIDVFLYNKKSHRQFGNTAKGFILMQKWIKSEVNDFNDLIYCFEHTGWYCILLSHFLHEESLFYCCINPLELKRSMGFKRGKTDKTDSYEIARFAWLRKEELNASVPMPLKLIELQRLMSIREQFVKQSTALKNLEKGLLVTIEKLTNDIGLKVIRQSILQLEQQVTKVEKAMEELIKLEPEMTTNYKLSKSVKGVGKILAIQMLLHTHNFTRFNEWRQFSAYCGLVPYPFQSGTSINGNAF

SEQ ID NO: 45089 - protein, 377 aa, unidentified
MSKVRFVGLDVHAETIAVAVAEADGEVRGLGVIPNKLESIRKLVHKLGPVQHLRVCYEAGPTGYVVYWQLAQMGVACQVIAPGLVPTKPGDRVKTDRRDAEKLARCYRAGELTAVWVPDAAHEALRDLVRAREAAKKDQLKARHRLGKFLLRRGRRPEGMKSWTKKYLEWIGSHVHFDEPALEATLLDYLDEVQHVAQRIQKLEKAMDEAVRQAPPEIRAVIEALQALRGVAQTTAATIVSELGSLSRFESPRQLMGYSGLVASEHSSGNRIQRGSITKTGNAHLRRVVVEAAWSYQHRPNVAGFLLRRQKSLALSEEVKQIAWKAQHRLNKRYKAMSARGKNKNQVMTAVGRELLGFIWAIGKHVEGQQHTAAATA

SEQ ID NO: 45090 - protein, 354 aa, unidentified
MMIIGCDYHPAFQQIAFVDTDTGELQEQRLQHREEAEMFYRNLAAQGMKVRVGMEASGHARWFERLLAELNFELWIGDAAEIRTKRVRKQKTDRQDAQLILKLMLKDDFPRIWVPSWENRDLRQLLWHRHRMVQARTRIMNQLQAGALNEGVRSKKRLWREAGREQLEAFPLAPWASRRRRDLLELLDRFTPAIAELTQAIEQEAEKCPTAQRLRTHPGVGPLTALAFVLIIGTAERFQCSKQIASYLGLVPLEESSGNRRRLGHITKQGNALLRFLLVEAAQVSVRSIPEWRSKYFHLAMRRGRKIAKVAMARRLAVQMFWMWRKGWDYEQVRKLGSHAGKPGTGDGVQSNTE

SEQ ID NO: 45091 - protein, 340 aa, unidentified
MNALYAGCDLHGNNNLIGIIDEEGKRVFKKRLSNDLELVRDTLKPFQEKLVGIAVESTYNWYWMVDGLVEKGYEVHLANPSAIQQYSGLKHSDDKHDAFWLAEMLRLGILPEGYIYPKEERPVRDLLRKRGHLVRLRTSLIISLQNILSRNLGRRVNVNDVKALKEDRISPLLEMNEDLALAGRVSKEAIDHLTGQIRKIEGVVEKKVKLREEYRYLLTLHGVGKILSLTIMLETGPISRFETVGDYVSYCRKVPSQWTSNGKRKGSGNSKNGNKYLAWAYSEASEYARQLYPEPRAYYNRKMQKTNAAVAHSALANKLSRAGYYVMRDQVPFQPEKLFG

SEQ ID NO: 45092 - protein, 349 aa, unidentified
MPKSNTAVVTIGIDPGKNTLHLVGLDARGGIVLREKVARAKIVSRLANVPPCLIGIEVGMGTHYVTRELLALGHDVRQVPPVYAKPFRQTHKNDFRDALAIAEAVQRPTTRCVPPKTDEQLDLQALHRVRYRLVGQRTAIINQIRCFLLEHGLTVRQRLHWLRHALPDILAQRTDVLSPRMVRILEDLAQDWRRLDDRIEAVSGEIEALSKTTEPCRHLMTIPGIGPIISSAVVAAIGNGTAFTRGRDFAAWLGLVPKQISTGDRTILGRITKRGNRYLRMLFMQAARVVLLRPRNWMKNGYGPWLAAAAQRLHHNVLATALANKLARIAWSVLVQHRVYEARLSPAAV

SEQ ID NO: 45093 - protein, 409 aa, unidentified
MEVVITRCAGLDVHKATVVATVRAPGDDGRRRIVTETFGTMTPDLIALREWLQAFGVTHVALESTGVYWKPVYYVLEDAFELLLINMQELKRVPGRKTDVKDSEWLAQLLECGLLRSSFVPPPPIRELRDITRYRVQQTRDRSQEVNRLQKVLEDAGVKVTSVLSDVMGASGRAMVEALVAGTTDPQVLADLARGKLRQKLPALQRALVGRFRPVHAFLLEQILAKIDYLDEALERLTAEIDRRVAPFAPMLTALDTIPGINRIGAISLLAETGGDMQHFPSAAHLCSWAGMCPGHDESAGKRRTGKTRKANRYLRTTLVQAGVAASHKKDSALQALYARVKGRRGHKKAVVAVGHQILEIAYYVMRDGVTYHELGPDYFQRRDRERTARRHVKQLEALGYIVTVQPAA

SEQ ID NO: 45094 - protein, 369 aa, unidentified
MNKIVKYVGLDVHKDSITIAIADEGRDGNVRVYGKIRNDLDQIDKVMRKLISQNSQLHCVYEAGPCGYTIYRHLSSKGIDCAVVAPALIPRKAGERVKNDRRDATKLATLHRSGELTPVYVPDQTDEALRDLVRTRKDIQTARRKVKQQINAFLLRQGISYPGKSKWSKAHLTWLTGLKMPHPAQQIALTEYLDAMENHQARVKRLDKAIVASCQTWRLLPVVEALQALRGISLLSAITLIAELGDLTRFETPKQLMAYLGLVPSEHSSGETTKRGSITKTGNTHARKALIESAQAYRLPARKSTAIRKRQAGLPEAVVDIAWNAQLRLCNRYRRLIAKGKNHNVAVTAIARELAGFIWAIACAVPIAA

SEQ ID NO: 45095 - protein, 309 aa, unidentified
MNTQTTASVPKLFIGMDVHKKSWTCHFKTDLFDHKTVTMPADTSCLQEYVQKHFSAHEVTCCYEAGCCGYWIARHLQQSNWKVLVVNPADVPRTHKQDWQKTDKIDCRNLCQQLQQNNLHGIHVPDEQQEQLRSLFRRRIHLVRQLRTIKNHLKSQLLYYGIKLPEQYDNPNWSHEMKIWLAGITWKFSPAAETMKSRLKQLDFLWYEELDISTTLRAYCRKHYKKDYYLLKSVPGIGGITATGILAELGDLRRFKRLDELAAIVGLVPGIYQSSDNNICLGLSKRSNRYLRSLVGSRKRRYGTAGLLP

SEQ ID NO: 45096 - protein, 469 aa, unidentified
MSNKYYLGIDVSKGYADFIILDNNKKIVEDGFQLDDTFEGHNQLYKILSGFIAKHPEANIFAAVESTGGYENNWLKLLSKYQSKLNLSIARVNPFGVNYNSKATLKRIITDKESSKNVAEYMISHPEKVSYNNEDYYSSARKQWTFIKMLTKQKVQLLNQLGSLLYIANPEVLRYCRSKINQWTLKMLRQYPTARHLSKAELSKLSKIPYIKEELAIALIENAKKSVASSVDDTTAEIIKAIVEQILRLEKLIAWQTKQLENNCKLPEVELLKTFQGIGTYSAVGLMIEILSVERFPTVKHLASYFGVHPVFKQSGDGLYGYRMSKRGRKQPREILFNVARFAIAHNPYIKEIYAMHLKKGMPKMAALGAVMYKILRIIYGMLKHNKAFDPEVDRANREKHSATNIQNNPDRSRRFQPIDFYAPVSRRQIKKRKEQEMSHFSKPLNAESPKEIFTGSNSRSFPEVSNET

SEQ ID NO: 45097 - protein, 369 aa, unidentified
MGECRCEGFAIANPSRGGRRPWSLRQLAVAERWDRRRSHARPNSRQTSIARTRQVTVAKIICGVDVSSLSLEACIGSTGPNRSFPNTAEGIAELLAFCRQHHVELVAMEASGGYEKRSFALLWANGLPVALLNARAVRRFAEGMGLLEKTDRIDAWVIAWFAAVKGSAPTAPACAEQERLKALVTRMRQLTELRAAQRNQRLLVSDPTVLSSFHELLTVVAAQIRILETAIAALIAADPLWQKLDQAFRSIKGVADRTVARLMAEVPEIGAASNKAVSKLVGLAPLARDSGKHQGKRSVRGGRRNVRAILYVVAGVVRRHDADFAAFHQRLSAAGKPKKVIRIALAHKLLVRLNAKAHQVRNEFAALTP

SEQ ID NO: 45098 - protein, 313 aa, unidentified
MVVVGFDVGKTTLFGTRVNKQGIVKERYELTNTKSAIKKLLAELKAQHPKLLVVSEATSEYHRPLALICLDLGIAFRLLNPITTKQFTRATVRKKKTDVTDAEIIARLGLRGEGTAVTAQTFSQIKSVTRTAVKLAQLKQSLVLVDHHLEAVALNPALRAEVAACGQRLNEAMQTLRSWATQQSDPSLLKLLMSIPGIGEVTAPVLLAEVGDITRFQGPKSLVAYAGLDSRVKQSGYTLVRNTHLTKRGSPYLRRALYIAAARAERCDEELKATYDRKRAEGKRYSEATIIVARKLLNRVYAVWTRGTPYNSG

SEQ ID NO: 45099 - protein, 406 aa, unidentified
MTYRVFVGIDWGSQEHAVAVLTRDGTGAQERKVAHTGMAIAALVDALITLADGAPESVAVALEVPRGSLVEACLERGFHVYALNPKQLDRFRDRYTVAGAKDDRRDARVLASALITDVGAFRRLDPEDARLVQLRELTRLEEDLDTERRRLSNRLREQLYRVAPGLLTLCPGADEPWLWTLLTRASTPAGAAHLPRAAVARVLHQHRIRRLTPDDLLAVLRAPRVPAAPGVLRAVEDHLAVLLPRLRLAAEQQQTCATRLEQLLDELGQTQEHRDVAILRSLPGVGRKISATMLAEASRPLAARDYHALRTQAGSAPVTKQSGQRRRVTMRRGCNPRLRNAVHYWAQVSAGHDAVSAALYARLRARGCSHGRALRGVADRLLAVLVAMLRHQTLYDPERRRISAAA

SEQ ID NO: 45100 - protein, 326 aa, unidentified
MARVTWIGVDLAKASFVAARRQQGKCITEEFSNDPAGLALFGAWLPRRSRVCVVFEPTGPYGRRLEAWLGPRWPRMSYVLANPRRVRNFARAAACASKTDVIDARRLLEFAEAFQPPARQRPTPITLELRALWRHQLELRKLLDGLRDRRQKAQVDPYIPAALVEGLGELADRLAAELAKIQTQAFALARTERSLRPRFELLVSIPGVGSLTALALLAEYGDQLAHASPRQLTRYAGLDPVLRQSGSSVRGKTRISKQGSSRLRKALYMAALVGVRWNPVLRSFYERRLRKGLTPKPALIAAMRKLLHICYGVLKNDQPFVAVATP

SEQ ID NO: 45101 - protein, 350 aa, unidentified
MTSVAHHFIGVDLHKKALQFCVLDDRGNLLHEQAVKIAPDAAGELVFANFQPWQGTCRVAVEAVGMNRWFVNGLQARGYDVVVADPIKLNLKVLGKKTDKRDAREIARRLWLGDIDRDAKTWYPDDAVYGDRKLVRTRRQLMKHRLGLNNEIRAQLRAYNISPPARTLHSAKGVAGLLALEMPNPALTICLHALTRALADLEVSIATLTEQIDKRVASDERLQALQRQLPSMGALTTLTLVSELGDVHRFRNAKAIASSGGVVPRVYQSADTAHHGRMTKRGSRSLRAVLGQWAVRLMAHNDQVSAWAAPKKQRLHKNKVRMMLARKLLVGVAVSLRRGEPFDLQRCLGR

SEQ ID NO: 45102 - protein, 395 aa, unidentified
MFIVGIDVAKRSHEVCMITSDGQTVQRPFSIRNNCTGYNLMLEKIRKHTNIKSQIVFAMESTAHYWLALFTRLRKDGYHVILLNPIQTSAMRDMFIRKIKTDAKDSFIIAELIRFGRYAESNVAQDRLLALKELCRNRFYLVDMAGDLKRKLIALIDRVFPEYEAQFDTIFCKSSVALLKKYPTPQKLSNAHLDKLTELLWNSSNGHFGEWKARELKELARNSFGVEDCDGAYSTLILLMLDQIQSLSGKADALEKEISRLFQSFDTTVTTIPGVGPIIGAVILSEVGDISRFSSADKLAAYIGVDPSVNQSGEFQAAHAHMSKRGSPYLRRCIWMASQVAVQRDPMFRAYYEKKVAEGLKYMTIIGHVTRKMTAVVFAILRDHKVYEPVLPTAA

SEQ ID NO: 45103 - protein, 428 aa, unidentified
MSISQNRKIRSITDSTLVIGADIAKKVHIARASNARGIELGKSLSFDNTRHGMDKLLMWMRSIMADHACDNIIFGVEPTGHYWMNLAQFLRQHGIKVVLVNPLHVKKSKELDDNNPTKNDHKDARVISQLVKDGRYSVPNIPEDVYAELRVGMNQRERLVEDLKRVQGRVHNWVDRYFPEFTEVFCDWEGKAALTCLRQCPCPQDVSVKTAEEIVHMWRSAKILRGVGIKRAQALVDISLQSIGLTQGLGMAHEELACLLKQYDLLQQELGQLLTKIEQLLESIPGAAQMLTVPGIGVVTVAGFIAEVGDVSSYEHWRQIQKLAGFNLRENSSGTHKGKSRITKRGRPRLRALLYRATLVLAAKNPQFQALHKYFTRRVDNPLKPMQSLIALCCKLIRVLFTLGTKEVDYAPEKVLGPIRSTELQQAA

SEQ ID NO: 45104 - protein, 398 aa, unidentified
MTESSDYESVQVFIGVDVGKDTHHAVAVNRSGNRLFDKALPNDENKLRSLISGLKQHGQILLVVDQPATIGALPVAVARSEGILVGYLPGLAMRRIADLHAGEAKTDARDAAIIAEAARTLPHALRTLKLADEQIAELSMLCGFDDDLAAQTTQASNRIRGLLTQILPALERVLGPRLDHPAVLDLFQQYPSPEKLASLGEKKLATQLCKLAPRLEKRLAADITQALTEQTVVVPGTNAAVVVLPRLALQLITLRKQRDEVTLEVEQRVLAHPLYPVLTSMPGVGVRTAARLLTEVACRAFASAAHLAAYAGLAPVTRRSGSSIRGEHPSRRGNKTLKRALFLSAFAALRDPISRAYYTRKMSQGKQHNQALIALARRRCDVLFAMMRDGTFYTPTAS

SEQ ID NO: 45105 - protein, 424 aa, unidentified
MSTTSEQKPISAFVGIDWADQKHDIALRAVSREAKLERRTIESQPEALSDWVLELRERFGSEAKILICLEQSRGALIHFLMGYDCFELYPINPKQLDNYRKAFRPSGAKDDPLDAELLCQFVSLHYQQLHPWRPDDEQTRKLALLCEKRRQAVDSRSALSNQLKSELKAYFPLALAVLDNDLTTVLAADFLLKWPSFESLKKASTPQLRRFFYGHQCRSEQKIQARIQRIKTAQALTQDRAIIEAGTLTTLMLAQQLKALAPYIGLYEKEIAQLFAQHPDRALFNNLPGAGEALGPRLLCAFGSDRGRFPHSVEATTFFGIAPITEQSGKSSWVHFRWACSKFVRQSFHEFAGHSVGFCDWARAFYDQQKARGKGHHAAVRALAYKWIRILFRCWKTRQPYDPQLYLLALARRGSPLATVKNSS

SEQ ID NO: 45106 - protein, 440 aa, unidentified
MAKVVTFEQIHSNGAGIDIGSREIFVSVDGEQVVAFKTFTEDYHKCCNYLKAEGIRSVAMEATGVYWMSLYDILESSGIKVCLVHPREVQQVKGRKSDVKDSRWIQKLYVAGLLQESIVAEGKLKELRILVRDRMDLIAMGSTYVNKMQKYLELMNIKLRNVISQIHGASGLRIIRAILAGERDTEKLLSLCHESIKKGKAEDLKKSLCGNYSEHYLLLLKESLRLWEEHQKSITQIEQAIEVLLKEMCVDKEDIEVTSPSKPARHHNPDIKNLHQYMVRLFGKVNLNSIAGINDVTVLRLLGETGSDMSRFPTKKHFVSWLGLSPKNKQSGKMKKRVSSRSNYAGQIFRQSAQSLLNSKHKAIGSFIRRLKGRKGAQIAIKAGARKIAEAYYDALTKGINYVEQGAIKYAELLREKELSLLKKLAQKHNIKLYHYEEIG

SEQ ID NO: 45107 - protein, 388 aa, unidentified
MIYVGIDIAKLNHFAAVISSDSEILIEPFKFTNDYDGFYLLLSKLAPLDQNSIIIGLESTAHYGDNLVRFLISKDFKVCVLNPIQTSSMRKNNVRKTKTDKVDTFVIAKTLMMQDSLRFMTLDDLDYIELKELGRFRQKLVKQRTRLKIQLTSYVDQVFPELQYFFKSGLHQNSVYALLKEAPTPTAIASMHMTHLAHLLEVASHGHFGKEKARELRVLAQKSVGVNDSSLSIQITHTIEQIELLDSQLFHTELEMANLVTCLHSVIMTIPGIGTTNGGMILGEIGDIHRFPTPGKLLAFAGLDPSVYQSGNFQAKKTRMSKRGSRVLRYALVNAAHNVVKNNATFKAYYDAKRAEGRTHYNALGHCAGKLVRVIWKMLTDEVEFNLE

SEQ ID NO: 45108 - protein, 450 aa, unidentified
MVWRSGIQPLAFHPFYKKGGDTVKNRIQIDHLSTLCVGLDIGSRKNYLTALDFDSNMLIKMKPVPNAASGVTEMESMILAVLSDNPHLKNLLIAMESTSFYGVHVANYLSTSDQLKPYNTKVFCLNPKEVANYKKSFTGLGKNDGIDSYIVADFVRMGRVDIAPWRGAQYLALQRLTRQRRHISEAIAREKNYVLNNIFLKFSEFAILTGDESPVSNRFSATSEAILTKYKTTEDIVNAPLEEIVDFVSSTGKGRFADPEQVAQLLQKAARDSYRLDKSLYEPITSSIACSFNCIRAFEHEKKTLDKAIAKTVAGLNPTEYQILKSIPGIGPVYAAGILAEMGSISCFKNNNTLAKYSGITWRDNQSGEFDSEETPMQKTGNTYLRYYLIQAAGSVATYCPEYTAYYNKKYAEVSKHQHKRALALTARKLIRLIFGLLDNNQLYSAAKSR

SEQ ID NO: 45109 - protein, 344 aa, unidentified
MEHYAGLDVSLELTSVCIVDAGGEIVCEAKVASEPEALIGFLAARELPIVRVGLEAGPLSQWLHSGLARAGFDAVLLETRHVKAALSAMTVKTDRRDARGIAQLLRLGWYRSVHAKSASAQEVRALLTARKLIQAKLLDVESGVRGVLRGFGLKVGPISRGRFEMRILELVDGNAILEAVIGSMLAVRAALQTEFARLHRALLVVVRADPICRQLMSVPGVGAIVAITFKSGVDDPTRFRRSRDIGPHFGLTPRKYQSGELDVTGSITKVGDRMVRTALYEAASVMLTRTVRISPLKSWALGVAKRRGTKKARVALARKLGVILHRMWVDGTDFRWSNEETAIA

SEQ ID NO: 45110 - protein, 339 aa, unidentified
MKYIPVGVDIAKHLMQVHFVDEHTGEIIDKQVKREKFLEYFSNREPCLIGMEACGGSHHWARELQKLGHKVRLLKGRFVKAFVMGNKNDVMDARAIWLAVQQPVKSVAVKSEEQQATLGLHRMRQQLVKFRTAQINALHGLLLEFGETTHKGRAALAKEVPEALERLKERLPLYLINMLDEQYQRITELDEHLDHIEKQLQAVARQNETCQRLLNIPGVGPLIATAAVATMGDASAFKSGREFAAFIGLVPRQTGSGGKIRLLGISKRGDKYLRTLFIHGARAAALLTKEPGPWITELKKRRPASVAIVAMANKLARTVWAIAAHGRKYDKNHVSIRPD

SEQ ID NO: 45111 - protein, 373 aa, unidentified
MKELIRIGLDTSKSVFQLHGVDAGEQPVLRKKLRRSRLLDFLRKLPRTRIGIEACGAAHHWGREFAALGHDVLLLPPQLVKPYVARNKNDAADAEAICEAMSRPRMRFVPVKSVEQQAALMLVGMRDQLIARRTQLSNMIRGHAAEFGVVAAKGHEKIKPLLTRIAAHEGVPELAKQLFATLGEDYAGVTARLGSIEAKLVTWQRGNEMSRRLAEIPGIGPIGATLLVMKVIDPKAFRCGRDFSAWIGLTPKDHSTAGKKRLGVITCAGDEALRSTLVVGATAVVQQINKGRGHASPWLIALAKRKPAKLAAVALANKSARIAWKLMVSGERYNPARASTESEGRGAALRDGSAPRPSLTSPGRSRKTVAMNA

SEQ ID NO: 45112 - protein, 445 aa, unidentified
MRTVPSARSRASVADWLKIKEVRVLSVGIDWAEEFHVVAIGRPTEGIIEVLRVEHEAEAVSRLVARIRDLEPESDQVRVVIETRHGLLVEAMLDAGFVVVPVNPDLIARRRGPARKKDDAEDARIACLIGLDRHAHLRPLIPHGELANELRSIARDDVRAAQDQRRLLNRLRIDLINTFPAALRIVGEDLGQPTMLRLLERWPTQQELAGVAREELIEFARGCHHGWPERFASQVSQALAGDGFTARQSLVRAKAASIRLAAGQLLLIDSQRRLWERRMGEILLGGRRRGHDRRARSDELEEKFPDGEIYLSFPGLGDRLAARVAGEIGEHPSQFGSPSSLQCYAGKAPVTRRSGKSELVVIHRQACNRQLASAVQQWSFCSLSYSSWAREFYQAKMAQGKGHNGALIALGNRWLEVLWHCLRRHLHYDEAIHVANRNRAHGRAA

SEQ ID NO: 45113 - protein, 343 aa, unidentified
MQITTVGLDLAKNVFQVHGVDAIGQVVLRKSLRRSQMLPFFAKLPPCLVGIEACGTSHHWARELINLGHEVRLMPPAYVKPYVKRGKTDAADAEAVCEAVTRPTMRFVPVKSPEQQAALSMHRTRDLLVKQRTQLINMIRGLLAEFGVDIPKGLERALLMARQIIDGKGPAVPIEAAKMVTTLSQQALDIDVRLREIDRDLAVCLRGNDVARRLMTIPGIGPVGATALAASVTDPHQFRSGRQFAAWLGLTPLQKSSGGKERLGRISKMGDKYLRKLLIIGMTSLVRRAYNPGKTDPRLADLLARKPTRVATVAMANKTARVIWAIMVRGETYRAGHRPALAA

SEQ ID NO: 45114 - protein, 370 aa, unidentified
MSKLIIGIDISMNDFYACIKVRTEDNSIKIKGTRSFENTDQGFENFLSWSLKQKKDDEWSVRFVMEATGVYYENLAYYLHSQNQKVSVVLANKIKNYIKSLNVKTKTDKVDAKTIASFGIERELENWEPMSPMYKTLRDLCRELLSLKKEKQRAQSQLHALEKAHQKLHTVIKLKREQIAFLEKAIDVIRKDIKATVKKDPILENRIKKLETIPGLGYETVVILVCETNGFTLFKNIRQVVSYAGIDITHNESGMFKGKTRISKRGNSRIRQALYMPSLSACRANEPIKELYERIHDRNPDTKRKGIVAGMRKLLTLSYVLWKKDEEYNSHYQWSNSATHNLSQRKAEPESSALDRHKPINRFIPSLVQS

SEQ ID NO: 45115 - protein, 397 aa, unidentified
MYLNIGIDIAKTVHEACLVNENGEQIGKFFRLKNSKKSIEKFTQHIESVSKELNAKPRIGMEATGIYWYSLFSELSKKYKIHIYNPSQISGFASVNIRDSKTDKIDAKTIANMLRFGESPKTNYSDTQRLELREYGRFYFKLTSIKINLKKRLRRNLHLIFPGYDEIFKNLYTATSKEIITNITTPEKVLEMGEKKLLELMKEKSKNHIDPGKAKILIEKAEDTIPSEIIKESSLFEFQMMIEMIEYYEKQIAEIENKMMSIWNKVREKHYIQTITGVSELRAAMIWAEMGNVDDFTHPDQIVAFAGYDPKVRKSGNKEVIGGPNKRGSKILRWVLGWAVQEAKCSNPVIGQYFDKKIEQGKHYNNARCAAAKKLVRIIWSVEKNKKPFQIPVNLLS

SEQ ID NO: 45116 - protein, 354 aa, unidentified
MSNKSTATVATMGIDIGKNSFHVVGLDERGSIVLRQKWSRSQIEARVANMPPCLIGMEACVGAHHLSRKLQSQGHDARLMPAKYVRPYSKGQKNDFRDAEAIAEAVQRPTMKFVATKTAEQLDLQALHRVRERLVGQRTGIINQIRAFLLERGVAVRQGLRFLRTELPIILAQRTDVLSSRMMRNIEDLAGDWRRLDERIEGLSAEITALARQDAACARLMTVPGIGPIISSAMVAAIGNGGAFSKGRDFGAWLGLVPKQISTGDRTILGKISKQGNRYLRVLFVQAAWVVLVKITDWDRYGLKAWIEAAKKRLHHNVLAIALANKLARIAWAVLNKERNFECVRTATTSSRPA

SEQ ID NO: 45117 - protein, 359 aa, unidentified
MTVTMTYVGLDVHARSIHAAAVDVASGELRRARFGGGSEEVIGWLQALPSPLRGCYEAGPTGFALYRAAEAAGVALEVIAPSKTPRASGDRIKSDRKDAELLARLLLAGQLKSVAVPPPAVEAARHLARAREQVRGDLMRCRHRVSKLLLLHGRVYDGSAWTKRHRGWLEQQCFDQAATELAYLDTLAAVDGLVARKAALDERLSRLAREGEWWQTVARLRCFRGIDTLTAFVLALEIGDFARFPRPAQLASWLGLVPSLDQSGESRRQGAITKTGSGYARRLLVEAAWHYLRQPGAGIAIAERRAGQPDHVLQIALRAQRRLHRLHKRLRERGKPANVTTVAVARELACFLWAAAVAD

SEQ ID NO: 45118 - protein, 372 aa, unidentified
MILIREVADAPVIMGISKPAGLKSPCGEVKIVNPLFVGIDVSSRSNVAYLMNPDGSKYSSFSVQNNLGGAKLLSERIVSALSSMRLSDVVIGLEATSIYGDSLVYALREDGSLGRFQRKIHVLNPKQVRKFKEAYPDLPKNDFVDAFVIADHLRFGRIAKEVYMDDYRYQALRTLTRARFDVIQNLTREKQRFANYLFLKCSGMAQDKDIQNTSATTIALMERFETVDDLANADLDELTAFIAETGRGRFADPNAVAKVIQTAAKGSYRLPKTVNDTVNQAMSVSIASMRALKEQVKVLDKAIEQQFEIIPNTLTSIPGIGKVYSAGIIAEIGDIHRFSSQASVAKFAGLVWHKSQSCARFLYPYKRRNEFE

SEQ ID NO: 45119 - protein, 409 aa, unidentified
MDGVYKVAGIDVHKKMLAVVIANVAELGEYRFERRKFGTGDLESKALGDWLTAEGVAEVVMESTAQYWKPVWQMLEGSFKLQLAQAQSNRAPKGRKSDFADAERLVRRLVAGELILSFIPDPEQRLWRMMTRSRYQLARDRARLRNQLEGFLEDCRIKLSSHLSNVLGVSGRKMLRALADGETHPATIAALANGGVRASQHALADSLAAASRLDVPRRQMLNLFLERLDLLSAQMDALAKMAAASLSEHRDAVKRLSNVPGLGADSAQQIIAEVGPKVATFPSPERLASWVGCCPGREESAEISKSDASPKGNATMRRLLSQSANAAIKAKGSVFEETYRRLAPRIGHGKAVWAVAHKLCRIVWKSCMTGSTTENSDSNPTRKVPSVASASSCDNSARSAIKFRYSQLR

SEQ ID NO: 45120 - protein, 412 aa, unidentified
MEVAHPRCCGLDVHKKTVAACVAIHQQGRQHKYRKRFGTTWRELQRLAEWLKEHAVTHVAMESTGVYWKPVWNVLEGQFELVLANAQLVKALEGEKTDTKDSAWIADLLQHGLLRGSFVPGEQQRDCRDLTRLRQELVQDSNRVANRIQKVLEDANIKLSSVASDTLGRSGRDMLQAMIEGETGAEKLADLARGVLRKKLQQLQAALEGRIREHHRVMLKHLLEQWEFLEGKIGEVEEEIRTQMLPFQEAIAHLDSIPGVNETVAWTLVAELGVDMRRFGSAARAAAWAGLCPGNHESAGKRLSGRTRRGNRYLRRVLVQSAWTANRGQGTYLQAQFRRFIARLGKKRTAVAVAHTILTIAYHILDRNEDYRELGGDYFERQDPQRTTRRLVRRLERLGHHVILQPATEALH

SEQ ID NO: 45121 - protein, 336 aa, unidentified
MRELLFVYIGVDVSKETLCVDAGDAFRGVVPNTPDGIRKMLAVVKRKLGRGRASHVCLEAAGPYGEALLAVCRGGGFPCSVLNPAKVRHYAKAMSESAKTDPIDARVIREFAEAKHPAADRVPGSAETLLRQLMTAREALTKSAVQLEGVLDSMTCASARKAVTQAVGCIRRKIRALEDGMATALKADRRLEGLAAELAGIDGVGALSAAKIVALVPEPGSLGRRDAASIAGLAPFRRDSGKFSGKAFISGGRASVRRALYMPALVAVKHNPTLKAFYQRLVGQGKPFKVAITAVMRKLFIHMDGVAHKWLAAHGGTGEGNAPQPFPLLPSFPRTP

SEQ ID NO: 45122 - protein, 397 aa, unidentified
MYIVGIDIAKRKHEAAVIDGEGTVIIKPFSFTNNCSGYNRLLAMLARAKLPLDEVSFAMEATGHYWLALFTRLQKEGFRVQVINPVQTNSIRSFYIRQAKTDPRDALLIAEVIRFGHFSESTLHPENIYELRELCRGRHAIVSMQADVKRKVVALLDQVFPEYETAFTNLFGDTSMAILQTCPTPKELSEMPLEELCHLIEVSSHKRFRMAKAQELQALARNSFGFAMAGDVFSTMIRLYAKHLDFLKQQVREMDRKIAEIMDTLDTPITTITGIGPTLGAYILSEIGDISRFSSAAKLAAYAGIDPTMRQSGEYNGVRNRMSKRGSPYLRHAIWLAASSAVLHDPALKLYFQKKRDEGKPYMASVGHACRKMVSIIYAVMRDNKAYTPCIPNEISA

SEQ ID NO: 45123 - protein, 314 aa, unidentified
MTHYIGMDVSKDRLDIAVHESGERFDCRNDAQAFAELVERLRGLAPRLIVLEASGGYEQAVLFALLAAGLPAALVNPRQTHNFAKAMGYLAKTDRLDAKVLAHFAKAVQPKLAEARSAPALALGELVNRRQALIEMLTAEKNRLRLTRTAPARGHIERHIQWLTRQLDGMDRELRGLIACSETWRELDRLIESVPGVGIIAAASLLAMLPELGRLNRREIAALVGVAPFNYDSGTKRGARRIFGGRASVRTTLYMCAVAGLRCNPALQAFYGRLKAQGKPSKVALTACIRKLLIILNAIVRDRQPWDGARCAMA

SEQ ID NO: 45124 - protein, 434 aa, unidentified
MLNLNQSFLSVGIDVGADISYMSIALPNQLIAGKPFKITHSNLSSLEYCVKAIKEAEEVYSLESRIFLESTGIYHYPLFCYLRDKGFNVSIINPIITKNSTSINIRKVHNDKFDSKKIALIGLKPDLKVSVIPSDLVLDLRNLVREYYYLSNSRSAYINKLQGQLRMVLPQYIKIFSKITGATSLALLDKYCSPRAFLDADKTEIISIIKQTARFGATYAESKYNAIIEAAKAALAFGHSVPSNETLIRLYISFIRRYDEETGKILAAMNELVAANEDELFAKQIRLIQTIKGAGFLTAATLMCEIGDFSVFRKPKQLFAYFGLDPDVKQSGNFIGTQHKMSKRGSAIARRAIHTIALISIGRSKAGVAHNHVLYAYYQMKCKSKPKMVALGAVMHKVCNIVFAILRDHKAFAIITPDEHNRNHQAKSSVAIAS

SEQ ID NO: 45125 - protein, 411 aa, unidentified
MEVLHPKCAGLDVHRDTVVACARNATDGTIAHEVRTFGATTKELMALAEWLTEHGVTHVAMEATGVYWQPVWHVLDGNFELVLANAMHIKNVPGRKTDVNDATWIADLLAHGLIRGSFVPPAPVQDLRMLTRTRKQLVRERASHVQRVDKILQDANLKLGSVLTDIMGQSGRAILDAIVHGEADPNKLVLLVDKRVKTSRDKIADALHGKVTTNHRFLLKLHLGQADALQAAINEIDREVGERLDPFRVSAQRLTQIPGISDIAAAAIVSELGVDMSRFQTSAHLISWAGLCPRNDESAGKRRSTRLRKGAPWLKTLLVQSAWCATRAKNTYLQGQFLRLRARRGPKKAIMAVAASILTAAYHMLKNGVDYHDLGPDHLRGADKTKSVNRLLRKIENLGFEVTGIRERQAA

SEQ ID NO: 45126 - protein, 414 aa, unidentified
MDVLLERCAGLDVGKHEVVACVRTPGPGRSGRRTELRTFATFTGDLEALADWLSAEGVTAVVMEATGQYWKPVWYVLEDRQFDLKLVNAKHVKMVPGRKTDLADAAWLAELLEHGLLRGSFVPPAEIRELRDLTRYRKRLIQTHTAECQRIQKVLEDAGIKLDSVASDVLGVSGRAMLRALINGERDPQRLAELAKGVLRKKIPQLRKALRGRFGTHHATMLRIILDHVEQLETSIATLDVEIDRVIAPFAAARDHLDTITGIGKRAAEAIIAEIGADMTQFPSAAHLASWAGMCPANNITGGKRRPAGSLHGNRWLGEILNQCAVAASHTRDTYLAAQYWRLTRRIGRRKAAVAVGHSILVICWHLLTNDTDYDDLGGDYFTRHTDRGKRRDQLIRQLHDLGYGVNLTDYAAA

SEQ ID NO: 45127 - protein, 398 aa, unidentified
MALSQQTAGLALEGARIIKGRPFRVGCGCSVRSRQPKLDERNTLMNSVRYVGMDVHRDTISVAVLDESGRLMMQSVLATRAGAILDFIHGVRGTVQVTFEEGTHSAWLYDVLVRRVAKLVVCNPRKNALLKSGSKSDAIDARKLAELLRAGMLSPVYHGETSALEVQQMARSYSQLTEDTTRVMARLKAVFRGQAVSCVGKRLYGKRHRDEYLEQLSGGLLRRAQHLYQELDALQPLRHGVRRELIVECRKHAAAQWLQSVPFLGPIRVALLLGRVQTPHRFRSKRQFWTYCGLGLETRDSGEYSVVNGRVERRRKPALIRGLNWNHNHEMKNLFKSTATAASVRQGVWREFYLGLLAKGMRPEMARLTLARKIAAITLKIWKKGERFDAEHLKLQAA

SEQ ID NO: 45128 - protein, 391 aa, unidentified
MIYVGIDVAKDKHDCFITKSDGEVLFKAFTITNNLDGFNELHQKIASVMDDVTKVKVGLEATGHYSYNLLGYLIDKGLPTYVINPLHTNLYRKSLSLRQTKTDKVDARTIASMLMSDVNLKSYSDISYHNEELKSLTRYRFDKVKERAKLKTSVSRLVCILFPELEKLVPTLHITSVYALLSEFPGAKHIATAHLTRLTNLLSEASKGRYGKDTAITFRDAARVSIGSNMPAKSLELKHTIKLIQELDSEIDEIENEIKIIMDEINSPILSIPGINYRMGAMIIAEIGDFNRFDSPDKILAYAGFSPSTYQSGQLDGAYAHMEKRGSRYLRYALYNATKYVCHWDPTFAAYLAKKRAEGKHYNVAISHAVKKLVRVIYHLEKTKQQYIKAA

SEQ ID NO: 45129 - protein, 319 aa, unidentified
MDAHGKIVLKKRLVRHKVLAFVAGLAPCLLGLEASGSAHHWARELTKLGHTVQLISPQFVKPYVKGNKNDPNDAEAICEAVGRPPMRFVPIKAVDQQDRQALHRIRERQIKARTALVNQIRGLLAEYGVVMPKGVAQVRQKLPFILEDAENGLTMLAREWLQALAAELPALDQRIQETNTRIQRVFENHEACQRLAQLEGVGPLTATALVAAVGEATTFKNGREFAAWLGVVPRQHSTGGKPLLLGISKRGDRYLRKLLIHGARSVVRTVEGKQDGRSRWLQGLIVRRGKNRAGVAQANKTARVAWVLLAKGERYRPAA

SEQ ID NO: 45130 - protein, 363 aa, unidentified
MFQHTTGTHVGMDVSKASISIALLRPDGHLDEERIANTPEAVRSLVHRWAEPSSVRACYEAGPTGYDLYRQLTVLGVDTTVIAPSLTPRRPGDRIKTDRRDARKLAGLFRAGELTSVRVPTSEEEAVRDLLRARQDQREDILRARHRLSKFLLRHGRIYGEGKAWTLRHDAWLSSQRFDEAAAQRTLEHYRAELDMRLAALGLLDDEIHRIAVREPFARQVARLSALRGIAELGALTIAVEVGDFTRFESAPAFMAFVGLVPSERSSGERRSQGSITKAGNAHLRRVLVEAAWHARRRPNIGPALAKRLAGQPPEVLAISTRAQARLHKRYWRLVGRHKPSNVAVVAVARELSGFCWALGRAA

SEQ ID NO: 45131 - protein, 344 aa, unidentified
MNKSTTIAIDLAKSSFQVCKLVGNHVATEKPFSKAKLKSWLLKQPPCTVVMESCATSHFWGRFCQSIGHEVILIAPKNVSPFRTNQKTDKNDAMAIAVAAKQPNVHFIAVKSVRAQSLQSVDKMRQHLVDTITATSNMIRALIAEFGIDIPRGTSAFGKQIPLVLEDAENGLPDIVREQISTMYWLYQDLIEKKEKITKQLNNEIQQQPECRALTAIEGVGNVNALALYLAIGENGGNFKNGREASACIGLTPKQYSTGGKTVLLGIGKKFACKRIRANLIQGALAFVRAVDRREPKTTKEAWVKGLIERAGLRRAAVALANKTVRTAWSMLNHHQPYRLPETV

SEQ ID NO: 45132 - protein, 345 aa, unidentified
MLDTTTGEVVEKTLTHKDNNVREFYSTLSEPVRVGIEATGSMQWFLNLMEELGIECQVGHPAKIRAAEPRKQKHDRRDADLILKLLVENRFPSIWLPSKELRDLRALLLHRHQWVRMRTRVQNALQAIALANGLRRGPSLWSQVGQHTMASLPLPPHAAHRRSELQALYVKFEAEIERLNQRVEEQACERPGARLLMTHPGVGPVTALATDVFLGDPTRFANGKALVSYAGMIPSEYSSGGRQRLGGLSKQGNPLLRFLWCEAGMHAARREPELQRFYRRKLIQKGLGKARVAVARKLGIRLWIMLRDRIDYNEFCRRGQMRQKNGGACAGMPQTGYGAKPSPTE

SEQ ID NO: 45133 - protein, 320 aa, unidentified
MSASSVVVGIDVAKTHVDVAVLGAQLEAQRFDNQAEAHSALTAALKPLSVALVVMEATGGYETELACALQAAGLPVAVVNPRQARDFAKSMGRLAKTDAVDARMLAEFAAVLLRRDDLARFLRPLADPQQQWLAALVTRRRQLLAMLLAERQRLQITPKGLHPSIEAIIAAIQAQLDDIEAQMVGHVREHFGELDRLLQSASGIGPVASATLIAELPELGHLNRREIAALVGIAPMANDSGSSKGRRRIQGGRFDVRRVLYMAALTASRRNPVVKAFYERLIAAGKCPKVALVACMRKLLTTLNAMVRTNKTWDNSLHRA

SEQ ID NO: 45134 - protein, 421 aa, unidentified
MKGLRAKKADIIKEGTLIVAVDIGMASNHGCCVAADGRSTKTFRFDNTREGLDTLWSMVLASKTRFQCNEVIIGYESTGPYGEPLIHYLKQKPVTIVQVNPLHTKRMREINDNSPLKTDRKDPRVIADVIRIGHALSVVVPEGDAAYLRRINNARERHVRERTALLNQLQQFMFLIFPEFTRVIKTIFCKTAFHILKKYTTPAKIGSAKIEKLGEEMRKCSMGKFGVKHAAALINCAKTTIGIQEGLEGLVIDIKHALVQLEMVDNLMAELEHEMETTLQLIPYSRKLLSIKGLGIVTVAGLIGEIGDFTKFTTQSEIAKLAGLDLYEVSSGKRRGQRRISKRGRSLLRKILYYAAMQTIRKNGIMHDYYQRLIGRGMKSMMALVAVSRKLLRIIFAIVRDDTEFILNHEFQRKEEMRRAA

SEQ ID NO: 45135 - protein, 477 aa, unidentified
MEQEEQPPSRRLVGIDLGIASRHSVRVLEADGRLVCRTSCVPATESLTLTEQAALAGAPVGTRLAVVFEPTGPAWLPIAVFFARRGHDVYRVSSAKAADLRRFLRRHAKSNGIDAETLARMPLADPGGLQQLELPGADAAALDRRVRACARLTSAASKHKVRIKDLVRQLMPMTPLTGDIGKADLAVLERYADPRILLAAGAAELIRLITSASGYQQGKERALQWRAAASAALDLYGDHPAVPFAELAAEVATEIRLLRALQAELAVHAAAREQHYRQADPSQLARSLPGFAEIGAPVLVAVMGRPGRFRSGARFKSFAGLAPRASETGETDRKGTPMSKAGPSLLRSVLFQAADTARRQDPQLARIYYQQMTERGATHLKACCVVAGHLAERAWTVMHRGMPYAICDNNGNPVTAAEAKRIIADRWTVPEEVRKRRRSRKIAGRAPQAATTGPDRRGDPPRPRSSRPRPKAVNPTT

SEQ ID NO: 45136 - protein, 469 aa, unidentified
MKVKHRRCCGIDVHKNSVTVCVLPPAGQPHLEVKRRKFRTFTRDLRQMRAWLKNCQVTDVAMESTGQYWRPLWNVLEGEFAQLILVNPQHIKGLNGYKTDPKDALWIAGLLEGGKLRNSWVPPRSIRELRDLTRQRVNVLEDLNRAKNRIEQLCQTGNIKVSSVATDLFGVSGRRMLMAIVEAKRDAGWMADYARGALRGKRRDLERALEGTFTDDQRWLLDKGLRQVEWLEAQVVTLEQEIERRVIPFEEQIQRLVTIPGVERRTAWTIVAEIGVDMSVFPDARHLASWAGLCPGNRESAGKRMSGRTRKANRYVKRAMCQAAWAASHTKDTFLSAFYRRLCVRKGSPKAVMALAHHLITVVYRMLSRANVYIELGGDYYDRRNKPKVVARLLHRLSRLGYYAQLSPIGPPPKAEDPPAPEANEPSQSTPISARKRGRPCKCAERGIICKHMTSVNTNSLIQQPSSGT

SEQ ID NO: 45137 - protein, 346 aa, unidentified
MDKTICGIDVSKDRLDVAVRPSGERFVVARTGAGLDELVARLKVLKPNLVVLEATGGFETVVVAALAGAGLPVAVANPAQVRAFAKAIGQRAKTDPIDAEVIAHFGEATGVAPRPLPDQATQQLADLVARRRQIVDMIGAEGQREKRANSRIRKSIGRLLKALERELSSVDSEIDDAVRGSPAWREKEDLLSSVPSIGPVISRTLIAELPELGSLGRKQIAALVGLAPFTRQSGQWRGKSLIGGGRTSVRKALFMGAMVARRHNPVLKAFFERLVAAGKPKKVAIIAVARKLLTILNAIVRDGIPWKGALGAGLVAILSEPQLGRPSNEVGATETGAVRMAAPSSW

SEQ ID NO: 45138 - protein, 297 aa, unidentified
MSQSSTLFIGMDVHKDSIAVADVAQDHGAEVMYLGAIGPRQCDSDQLIRKMPSNAKHLIFVYEAGPWGYWLSRYLSKTGYDCGVVAPSLIPQKPGARVKTDRRDAVQLARLARSGDLTAVYVPKVEDEAIRDRPRAREDAISDLKDAKCRLKALLLRQDSRSVGRATWGPAHLRWLSEVGCPPPAQPIVCQEDVRAVHEQTERLQRLEQERQEHVKAWRLNPAVEALQAVRGVQCTVAVTLVSESGDLTRVDHPRELMNFLGLIPAEYSSGEQRRQGAITNAGTTHARRALVEGAWA

SEQ ID NO: 45139 - protein, 347 aa, unidentified
MNFYTQHHKHYCGIDLHARAMYVCILDPHGTKLVHKNLPTTPEALLRVIAPYREDLVVGVECMFTWYWLADLCQKEGLAFVLGHALYMKAIHGGKAKNDKIDAHKIAVLLRGGMFPQAYVYPAEMRATRDLLRRRCHLARKRAELLAHIHNTNSQYNLPEIGKRLANKANREDVADHFPDPSVRKAIEVDVALIDHYDQLLGEVELYLTRSAKAHDVQTFARLQSVPGIGQILALVLLYEIHDISRFPRVQDFVSYCRLVKCAKESNGKRLGTAGKKIGNVHLRWAFAEAAVLFLRQSQPGKAYFATLEHKHGKAKALTVLAHKLARAVYYMLTREQAFDLQRFVTA

SEQ ID NO: 45140 - protein, 420 aa, unidentified
MELAEEPGGLVERVAALDIGKATVMACVRVPHEDQRRRCQEVREYGTTTGALLTLAGHLHRHGVTLVVMEATSDYWKPVFYLLEAEGFTCWLLNARHVKNVPGRPKTDKLDAVWLAKVAERGMCRPSLVHPRPIRELRDLTRYRRSLIRERTAEKQRVEKLLEDAQIKLSSVASNIFGVSGRQMLAAMLAGQRDPQILAGMAHGRMRRKIPQLQEALTGQFTGHHAFLCQMMVDRIDDLTARIGQVTARIEEQIAPYARAVEQLDEITGVGEISAQELIAELGPDMTRFPTAGHLASWARFAPVSRSSAGKAKGASAGKGNPWLAATLGEIVTAASRTDTFLGERYHRIARRRGKRRAMVATGNSVLVIIWNVLSDPDARYHDLGPGFYHSRTTSQHRERDLIRKLERLTGKTVTLQPAA

SEQ ID NO: 45141 - protein, 331 aa, unidentified
MQAGEGIIGIDISKDSFDAVLRSTRSEQHRVFTNDQKGFTALLGWAEKQPDRVVHVCMEATGSYWEGLAEYLYQGEYTVSVVNPYQIKRYGDHLLNRNKTDKADASLIAEFCEKDRERLRAWKPFSPEIKALRSMGRRLDELQDMKQQEQNRLKSGVTDLVVIESLEEHIKQLKDQIKALWKKIKEHVKQHPDLREQQRLLTSIPGIGKLTAIKLIAEIGDIRDFSSASQLAAYAGLAPKQFRSGSSVHKQTRISKQGRTELRRCLYMPAVVASEHNPIIMDLKRRMLASGHVMMEVIVAAMKKLLHLVYGVLKSGKPFDPDYDKQFCFDS

SEQ ID NO: 45142 - protein, 417 aa, unidentified
MAEQDAVRKRFIGLDIHKHYLVAVGVDADLKPTLSPQRVEFLNLEPWMTRTLRPDDAVVIEMTTNTWQIYEDLLPHVGSVTVVHPPHVALITRAQVMNDKIAASILARLLAKGLLVGIWIPPKEVQQLRALIAQRSKMTRLTTQSKNRLHAILHRRHILPPAGDIFHIDRRDWWLELELDSAEKTNLLCNLETLEFADQQIRRIETTLKVLAAHDERATRLVHLPGISMINALSILAAVGTIERFPTAKNLVGYSGLGGRVHDSGMTSRKGSITKSGRRDLRTAMVEAAQTATNSHPHWKAELARLMPRLGRNKAIVAIARKLLVAVWNVLSKDEPDRFAEPQIVARKFMQYAYLLGKANRPAGQTAGQYTRLQLDSLGLGTELTEVPWGTKKPAVPLPPSKLLSETQGPELAEGKG

SEQ ID NO: 45143 - protein, 343 aa, unidentified
MIYVGVDLHLRFCYMTVLDAKGKVLRQGRVQNTDSQLQQFFADVKNSLSENEGIVVAVEACGFWCAFVDCVEPLVERVVLVHPAKVKAIAHAKLKNDRVDSATLAQLLRANLLPEAWKADRTTRDLREVLRMRVALGQDRTRYKNQIHAVLHLHGQQTAVSDLFGRQGRAWLKALVVRPAARQAIDTSLRMIDQLNGELRVLDRQLQKSAQQDADARCLLSIPGIGAFSAMVLKAEIGDIRRFRDKKSLYNYAGLVPVIRQSADHLRRGGITRSGSPLLRWVMSEAAVTATRHCPAARAWFTRLAQRKHPHVARTALARKLLGAVWALWTQGVCFDERIFAAM

SEQ ID NO: 45144 - protein, 320 aa, unidentified
MNATQQGGVRVGIDVSKRTLDVCLLPDGEPFVLPNDQEGVEELLSRLEDSPPELVVLEATGRYERLAATSIAAAGIPVAVVNPRQARDFAKAIGRLAKTDRIDAFVLARFAHAVDPSASVIPDEEASALQAILARRRQILSMLVAENNRFQMAPKPLQKRIRAHVEWLGKELSRTDGDLDEAIEASTTCIKENEALLKSVPGVGPILARTLLAELPELGEITHKRLCALVGVAPFNRDSGQSRGKREVWGGRAPVRAALYMGALLATRHNPILKEFYERLLAAGKPKKVALVACMRKLLSILNAMMRDRVPWHLAHLRTP

SEQ ID NO: 45145 - protein, 455 aa, unidentified
MTRTPKEKARQDLEPVNPGAAALDIGSTMHMAAVNPDASDMPVRAFGTFTQDLHDMAVWFRSCGVTSVAMESTGVYWIPAFEILEQHGFEVILVNARYARNVPGRKTDVSDAGWLRQLHSYGLLRGSFRPEAEIATLRAYMRQRERLVEYAAAHIQHMQKALMEMNLQLHHVVSDITGATGMRIIRAIVAGERDPAVLASFRDVRCRSSIETIEAALVGNDRAEHIFALTQSLQIYDHYQDRIAECDRALEAAVTALTIRAGGDLPPLPKARVKKGKQGNAVSFDVRAALYGVLGTDLTQIHGIGPSLALKLVAECGTDLRAWPTAKHFTSWLCLAPGNKISGGKLLSSRTRRSSNRAAALLRLAATTIGRTETALGAFYRRLSARVGKQKAVTATARKIAVLFYNAVRFGMTYQDPGAAYYEERHRQRVLSNLQRRAKSFGYALAPMPEGAAVS

SEQ ID NO: 45146 - protein, 485 aa, unidentified
MKTKTIFRNESQKLDAAFIEAGLPERVLLVPLDFAKITHYACFCDGRGTYLRKAFTVKNNQEGLDYLVDQIERTRKARSIKSKRHVIVGGEDSASYTRNFMDRLFELGYLTIRLDSKEVHRQAESVDSSTDKTALRAIAKTMLNRDARQTGGFDLYGQLRGITRQRRRIVHLSTAVKNRIHTHADCLFPGFLSKDSAVAAFGQASLELMAHNFSATALARKSEKALARKLARQGVRDACEVAAKLKEQARNAICADDCAVRLSAQLIEGELCLFQTLQSNLTELDIEAARILLRLPEAFAVSIKGIGITLASSIFAEIGSLGQVQCCDQINAYAGIAPKVKQTGGPETPARIGGKRRQFNRILKDYTLQAGNHLYLHGPSELLEDAARRKHAGKAVDTAMARRFLRIARALAKSHCIYLPTPLRTGQTHTDADREQRAQYIIKTWPDLLLKWKRLGLQQEAFAPETPLGNWRIIVQEIYDIELPL

SEQ ID NO: 45147 - protein, 467 aa, unidentified
MSSSATTSNNYRCGSSYQAQLTVTKSTYTYTWISDSFVKGKSSQGIGASLLLRKEFPPMLKIVYPNCCGIDVHKTFVVAVIAIANNQGITEYHRKHFSTFTNGLTQLRDWLEYYSCFDVCMESTGKYWIPVFNILEEQTNVCLAHPKYVKAIRGKKTDKKDAQWIADLFKHDLVASSFIPPLKIRQLRDLFRYRMKLTQLQVGEKNRYQNCLTWSNLQIASVVSDVFGKSAQAIIKSILDNPQDKPNIEQLVHKRMKNKVQDLEIAMEGALTPEQAEKIRVIKAHYDALAICKEDLEQMIRELGQDYQHQVKLIQTVPGFKEDLSALRIISEIGCDMTVFDSAAKLCSWAGLVPANNESAGKKFSTRISKGGKYLRPFLVQVANAVVKSDKHPELRNKYLKLKKRRGHRKAISAICRRLLVSVYQVLRKQEDYNPVLQGLTEIRNPDKTMSVQDAVRFAQQHGFNVA

SEQ ID NO: 45148 - protein, 418 aa, unidentified
MEVMFKNCAGLDVHKRMIMACVLVCNAQGGSDRQLRRFGTTLAELQGLAEWLTGLGVTHVAMESTGVYWKPVFNVLAPRLAVWVVNAQHLKTVPGRKTDVKDAEWIAQLMALGLLKRSLIPEVEQRDLRDLTRYRTRLLGERAAAANRLQKILEDANIKLASVASSVQGVSARAMLEAMIRGETDAEVLANLARGQLRKKLPELEAALTGQVRAHHRFMWQELLAQLDGLNERLAALETEIRRLTLPYEPIIQRLAAVPGIERRTAEVILAEIGPNVTPFPTAQHLASWACLCPGNNITGGKRRTGRTRRGQNWLRAALVEAAWSAAHTKATYFSAQFHRLRTRRGEKRAAVAVAHSILIVVYHLLAKPEAVYTELGGDYFVKRNPEQEQRRAVRKLEQLGFTVTLNPSPAAILSAPG

SEQ ID NO: 45149 - protein, 447 aa, unidentified
MSNGNGLSRGDRNRNARLARLRELVPLSHAIVGIDLADNTQAAVVSDHDSRVIARRRVSVRAWELGELLDWAVDRAAAAGFASVTVACEPTGHRWRVLDQLAAGRGLALVCVQPLLVYRAREGEDLTRDKSDPKDAVLIARLAGELRCYEPERADAVWARLRHLGARRSQLTTGATAAVNQIRDLLECAWPAVLAASGSPFRSVSWCASLAVVLDRCAGDPGRVRRLGLARFTAAVRRELPRWGGRRPCLRIIRAVSAALADPAGVAAHRPGALERAHLALGDWRDTRARLADTETRMRAVLEDLGLTELVTTIAGLTVTGAAAILAETGDPARFATARALVKHAGLCPRDNASGAAQGKTSISGRGRPALRLAAWRAVWAAMPNNPVMAARFEYLTTRQDNRLARQQARTACAAALLRWIHVVVTRHVAWDPAIAAGAAQAAHRAG

SEQ ID NO: 45150 - protein, 345 aa, unidentified
MDIMYYIGLDVHKKTISFCVKDASGQVHQEGKIGATRRELDRWIETLPQPRIIAMEATIFTGWIYDHLRPHAQQVKVAHPLMLRAIAAAKKKNDRIDANKIADGLRCDFLPECHMASTEIRDRRRTLRYRQLLVRQMVQMKNRVSGLLMETGVSYNKQRLHRVGYFRELLSSHEEVHESIRPLLKLSRETIVRLQKTEYGLVSSLERDPLLADRIRRLRTVPGVGPITALTWALEVGDVSRFRSIRQAISYCGLCGAEKSSADKMMRTPLSKQRNKHIQHVLVEAAKLAPRQDHDLALVYETEKQKGNANRATLAVARKMVAYLLAVDRGKRDFVPAEDHRSAAA

SEQ ID NO: 45151 - protein, 452 aa, unidentified
MERSKSGALSMVNPRAAAIDIGSTMHMAAINPNADDNPVRAFGTFTGDLHDMARWFKAYGVTTVAMESTGVYWIPAYEVLEGHGFEVILVNARYAKNVPGRKTDVSDAAWLQRLHSYGLLRGSFRPEAGVATMRAYLRQRERLIEYAASHIQHMQKALMEMNVQLHHVVSDITGVTGMRIIRAIVSGERSPNTLAQMRDVRCHATIETISAALSGNWRDEHIFALGQSLALFDFYQTKVLECDRKLEVALKALEIDEGYDVRHLPKVRTKRRQVNTPDFEVRSALYRVLGVDLTQIHGIGPSLALKLVGECGTDLAAWPSSKHFTSWLCLAPGNKISGGKLLSSKTRRSSSRAAALLRLAATTIGRSDTALGAFYRRLSARAGKAKAVTATARKIAVLFYNSLRHGMTYHDPGASQYEERYRSRVIGNLQRRAKAFGFILHEMPAEPNMAVS

SEQ ID NO: 45152 - protein, 417 aa, unidentified
MNSPPETTVIDRYIGVDIHKHYVMVGGQNRHQEWILRPRQVQVSRFRDWAEKNFRKSDAVVIEATGSVWDIYDIIAPHVGEILVANARSIRQIAEAKVKTDKKDIERMLTQLISGTVPEVWVPPVHVRELRSLISFRWRLNKQITMSKNRLQSVVQRFNLDPPEGGLLTEKNSGWWEEQEFSDLTGFEVKHDLEIVETLEAQKEALDQKLAELSNSEPWASDMVFLMQIPGMGLILSMVVLSAIGDITRFSHAKELVGYAGLSAGVHISGETNRSKPITKEGRKELRWAMAEAAWRAKESDPYWKAQFKRLEKRMPKNKAIVSIARRMLVSIWHILTKRETYRHFDEEDIAYKMLIWAWAMDKRSRKGMTPQQFAKYGLLRLGIGQDMQRIVRGGAPRRIAPTEEILALKPELAPPR

SEQ ID NO: 45153 - protein, 474 aa, unidentified
MAKQHVETAACAELASLAVQHPKAAGIDVGDATHWVCVDADGGAAAVREFPAHTPGLRELVAWLRQCGVTTVALEATGAYGHVLFLTLLESGFHVVTTSPTFTRQIKGRPKTDRRDCQWIQRLHRHGLLPSIFQPDEATQTLRDLVRQRANHVRLSGQHIQRMQKALELMNLKLTKVLGDVTGVTGLKIIRAIVAGERDPQRLAKLRDRRCKHSLEEIATALDGRYRVEHVTELKLCLQMWEQYQVVIAELDSAIAAQLRAMAKQTTRPPLPPKPRVRGKKPHDPRFNVRTALYYLVGIDLTAIEGIDEIHALTLISELGTDFTKWPTVKHFTSWLGLCPNWKQTGGKVKSSKTRKGKNRAASALRLAAWSLMRSHSYLGAYLRRQRARLGAPKAITATAHKLARILYNLMRHGIAYMKKEEAAYAEQVRQRLEKQLQRRAKELGYELKRILETVTLPDGEVVTVTPEGEIVAR

SEQ ID NO: 45154 - protein, 350 aa, unidentified
MLIIGCDYHPGFQQIAYVDTETGEIAERRLTHREEAEQFYGTLKERSLRVRVGMEASGHAGWFERLLRELQFELWIGDAAEVRSKRVRKQKTDRQDAQLLLRLMVEDRFPRIWVADAENRDLRQLLWHRHRLVQMRTRVMNQLHVVALNEGLRRKKALWRPAGRNELESLVLAPWASRRRQDLLDLFDQLTPKIQELTQALEEEVEKRPVTRRLMTHPGVGPLTALAFELVIGNPERFHGGKQIASYVGLVPSEESSGDRRRLGHISKQGNALLRYLLVEAAQVTVRSQPQWRSKFFHLAMRRGRKIAKVAMARKLAVHLYWMWRQGCDYGQMHKLGSHAGEPGNRYGVE

SEQ ID NO: 45155 - protein, 476 aa, unidentified
MKNQNIYRNNNYALKETLSNYKPEQLLYIPIEVGKFNHKASIVNFFGDIVVKLFEFPNKKHGLDFFVKKLNFATTSSNAQKIFLGCESCGHYHLNLVHHLKQLNFPIEIINPRDTRKENPNKNSKTDNIDLGAIARVLISNKGGRQIVPEGVYYNLQRAARTRRKFVQRKTSSKNIITGLLDRIFPGLWDKDAPIFSDRWGKASMLLLERYPHPHRIIRLGEERLARFLRKNNTKLGIDSAHKIIDAAKDSLTKPLSELHMDIFALKSHIKCLNLYNETIAQLEQEIACLLVQTPGIYLLSIDGISVIFAGEFTAEVGDINRFAYANQIISFAGSCSKVFESAEYQAQGLHISGRGSKFLRSTLNQVALALNAWCEPFHLYYTNKALQKPDKPGIARIATGNKFVKLAFALMKYEQLYKPRGLLLDEKNYYSNLWSKIIRKLSGFNLTNISQENNYLLKIKKYLEEKYALTLSTKL

SEQ ID NO: 45156 - protein, 316 aa, unidentified
MTDNSMICAGIDVGKSHLDIAIHPGDARLRVAYDAAGLKRLDAFLQEHDVTRVGFEASGGYEWRLMVHLRGKKRPAARLQPAQLRYFARSRLQRAKNDRLDAMLIAVFTASLETLPVLPDARFDRLSAELTYLEQIEQQIALVKTFAETAVPDIVKRRHAREIARLDTCRNAHMLQLEKLVRGDPDLARRLDLLVSIKGIGMRSALCLVIRMPELGHAGRNQIAALAGVAPYDDDSGKHRGRRRIQGGRERLRKSLFMCAFTASRHNPDLAAFYKRLRGNGKEHLCAVIAVARKLVILANTILSRQTEWTPKYVKG

SEQ ID NO: 45157 - protein, 314 aa, unidentified
MEAIIERCAGIDVHERTVVVCALKGDLKKKPEKEIETFNTTTTDLLKLLYWIEERGCTQVAMESTGVYWKPVWNVLESGDFEMILANARHIKNLPGRKTDVKDAEWIAQLLRSGLINKSFVPDAHIRDLRDITRYRKKILYELNREKNRVHKILEDCNIKISSYISDIFGDTGRKILNKIINQEEIRMTDLIEISNGRGKASIRKKLGEIKEAVNGKVRKHHLTMIKYTYNHIRFLEEQVVQIEKEISEYIEPYFEEVEIIDTIPGINKNAASVIIAEIGTDMGYFPTDKHITSWAGLSPGNCESAGKKKEVKQ

SEQ ID NO: 45158 - protein, 352 aa, unidentified
MQCIAFDAHKQYTWALVEDEKGKVVREERVAHKKGALLEFLAGCEPGSPVAVETIGNWYWIADEIEAAGMVPRLVHASKAKGMSGSINKTDKLDVRGINRLQRSGTLPTVWIPPKELRDARELPRTRMVLVGQRTKIKNRIHANLAKYGVGVDGASDLFGVRGRLLLKKRLGDLPPETRYATEKLMEELDHLDAQIQGFEGRMAELFQPTRELELIETLPGVGFILGVVVLTEVGDVERFPSSSHLASYAGMTPRVHASGGRVRYGSTRSDVNRYLKWAYAEAANAVMIHRRKHPERHVSRLYERVRRRSGHQKAIGAVGRHLAEATYWVLRKKEPYQAPVLDREGVSKREA

SEQ ID NO: 45159 - protein, 415 aa, unidentified
MSDQKRCYAGVDWGSRSHCVFLTDDAGRKVGEKLFKHSGEGLSEMAAWLIASSGPTEPSQIYVAIEVPHGPVVETLIERGFNVHAINPKQMDRFRDRFTMAGAKDDSRDAEVMASALRTDPRCFRLLALVDPVIVELREWSRIAEDLGVERNRLANRLREQFWRYFPALLELEDDFGAEWLLELWETAPTPQKAIRLREATIVKLLKRHRIRRFDAATILKTLRKPPVQVAAGTVEAASAHIAALVPRLRLLNRQIKDAHRRIEALTARLIPSEETEPGQKKQHDAEILASLPGVGRTVLATLLAEAWDALRRRDYAALRSLTGVAPVTKQSGKSRVVLRRKACHARLANAVYHWARVAAQHDPRCRSKYAELRRRGHSHGRALRSVADRLLNVACAMLKSGTTFKPDLAAEKNT

SEQ ID NO: 45160 - protein, 314 aa, unidentified
MSQPVFVGIDVAKDSVEVCCSDASTHSFENTEAGHAKLQRWLRRKTVALVILEATGGYERACAVALAGAGLPVSVINPRQARDFARAMGRLAKTDRLDARALAEFAAVLHAQGHQPRPLASEEQRELVALVTRRRQLVAMLVSERQRLAVAHERARTSIEAMIEALLSQLADIDNDVQHVLQERYADLSALLQSVKGVGPTTASTLIAELPELGHLTRKQITSLAGLAPINRDSGTLRGQRHIFGGRASVRRVLYVAALVATRFNPLIRACYLRLVAAGKPKKVALVACMRKLLITLNAIARTGQRWQSDFNCA

SEQ ID NO: 45161 - protein, 345 aa, unidentified
MAHVGIDLHKAQSQICVLHEDGRVWERRVMTRADRLRKALQEHRGCPVLIEASTESQWAAECLEADGHTVIVADPNFAPMYGMRQRRSKTDLRDARALAEACRTGTYRRSHRASEGSRAIRIELRVRAMLVRQRAAQISLVRTLARSEGARIPNATSRSFVTQVRHTALSERLTEQLQPLLTMIGTLCDQIAILDTRLAERARDHPAARLLCTAPAVGVVTALAFVAALDDAERFADAEEVASFLGLVPREWSSGERHRAGHIHKAGPSQVRWLLVEGAWRILLLRDPASEPLRHWAQRIAVRRGRWIAIVALARRLGCVLYAMWRSGQPYSAARLTSRRAVAVA

SEQ ID NO: 45162 - protein, 368 aa, unidentified
MGKSSKLFVGMDVHKESIDVATGDEAGGEVRHYGAIGGELAAVARLCRKLESTRKVLVFVYEAGPCGFGIYRLLRARGHECWVVSPGLTPRSNADRVKTDRRDCLKLARLARAGELTAIHVPDAADEAMRDLVRAREDAVIAQRQVRQRLGALLLRNDIRYSRKTAWTAAHRRWIAELKLPHGAQHIAFEEYVQAVEEAGTRIERLAAAIREELSRWRWAPVVEALQALRGIRAIHAVRLVAELGDLARFASARHLMGYLGLVPSENSTGARRRQGAITKTGNSSARRALVEAAWAYRYGARVSVGIARRQSGLPKSVTDLAWRAQLRLCARFRRLSARGLHRNKIVVAVARELSGFVWALGQQVKPA

SEQ ID NO: 45163 - protein, 484 aa, unidentified
MVMRVLPFVGRSARRFAFEKSYSDLICAIFSRSGAPNRNQTDGVAAQRVDNYEYMASASSAGGHESLLALSVWINAMHRKRVHKHAFCVRKRHAVLTQIPRRLGRIKFKVHWLVTVCMLCIRVKASLLERLTNVRDFPDVARHWSAKIEVCVHVQSQPRRGSLVSNVTTVGIDLAKNVFSLHGVDARGVVVLRKTVSRARLASFVAQLPASVIGMEACSGAHEWARRFAQHGHTVKLMAPKFVVPYRKSGKNDGNDAAAICEAVSRPSMRFVPVKSVEQQTMLTLHRVRLGFVEERTATINRIRGLLAEFGVVLPQRAMEVRRGAAASLEQLPAAAARALSDLLAHVRVLDERVNEYECELEQHARRDERAQRIQSLSGVGPISASAIVASVADAHEFKNGRQFAAWLGLTPKQYSTGGKTRLGHITAHGDPYLRTLLIMGARSMLQTALRRTDRLAGWALGVRSRRGYHRACIAVAEKHAPII

SEQ ID NO: 45164 - protein, 345 aa, unidentified
MKKLVAGVDLHSNNAVIGVMDLDGKRVAHQKVACELKAVVKFLGPYQKRLEQVAVESTYNWYWLVDGLRALKYPVVLANPAGMQQYNGIKHADDTNDAFFLAELLRLKILPTGYIYDPELRPVRDLLRRRMTLVHHRTALMLSFKSLYTRTTGQEMALSKLKGLEIQAAQELYDHPANQLIAGMQVKHIEQLTESIEKIEKAVLASARELPYYAKLATVPGVGRILGMMITMEVGDIKRFHDAGHFASYCRTVEAKRISNSKKKGENNSKCGNKYLAWAWVEAANFARRYDEQCRKWYDRKAAKTSKVIATKALACKLAKAAWHVMSQGTDYDAKRVFGQPSATP

SEQ ID NO: 45165 - protein, 430 aa, unidentified
MTTVHPTVSTDEPAWFVGFDWGSEKHRVALFDRTGNLIARRDVAHSATAYAELGDWLLRTTQASPAEIAVAIETTHGPVVDALIDRGFRVYAINPKQLDRFRDRYSVAGAKDDTRDADTLGRSLRTDPEAFRALSPDNPLIVRLREASRTAAELTRDLGRLTNQLRDLLWRYYPQMLALDDNLAAPWLLELWQHAPTPAKGARLHKETIARLLKTHRIRRLDADQVRTVLREPPLPSAPGVTEAATGHIRLLLPRIRLLNSQIKAVHTEIDALCQQLAGPQAIEPGESVPGQSIEQRDVAILHSVPGVGRIVGATLLAEASEPLRRRDYHAIRTLAGQAPVTKRSGKSCFVQRRLACNKRLANAMYHWARVAVMCDPRSKQRYAALRARGCSHGRTLRSVADRLLKLLCTLLQRQVSFDPNHNAKQAAAG

SEQ ID NO: 45166 - protein, 333 aa, unidentified
MLYVGVDHHTKTSHVTVCDEKGNIVTKKGITSSREGINEILGAYDSPIKAVLEAGFNWGQMYDWLDEVAEEVILAHPLKLRAIAEARIKTDSIDSATLAHLLRADLIPEAYACPADIRANRRALRQRMFMVKVQTMLKNRIGAILHQHSIQRPHVSDLFGAQGMNWLTELVLPEPDWSILREDLLLLEMVRDRIASSERLLEALAKDDRAIDILRSIPGIGKFFSVLIRYEVGDISRFPSAGKFASYTGLIPSTYASGNRVYHGRLTKQGNKCLRWAFIEAVTPAVRVSPEIRVYYERIKNRKGTKDARVATARRIAEITWKVWSEDRFYETR

SEQ ID NO: 45167 - protein, 406 aa, unidentified
MGGDEGMAPSSFSSREMERPMPQNDLSKSLVAFEQHSTLVAVVELSLKSWLIAGLVPGLERQPLKKMDADAQALLMLLQRWRGEALASGQKIERMVVAMEAGRDGFWLPRFLQAHGIEAYVIHPTSIPVSREHRRAKTDRLDTALLMRAFLGWLRGEDKHCSMVAVPSLPEEDAKRVSREHEKLGAERGRIVNQLKAAMVRLGIRNFNVKLRKSADRLGELRTPEGQPIPAHTLAELRRQFARLGLVKEQIKEIECERQRSLKQAPTLGSHPMILLLAKLKGIGLETADMLTNELFYRELRDRRAVARYGGLTGAPDESGKRRREKGLARAGNARVRKGMLQLAWRWIMFQKESALTQWYQQRTTAAKGNVRKTMIIALARKLLIALWRYVTIGELPAGVVLNPAI

SEQ ID NO: 45168 - protein, 422 aa, unidentified
MPNVQSTQSPVVLVAIDIAKLRHDVLIEAPGWKRRKRLVLLNTAVEFRRLADYLHSLHMPVHIVFEATGNYHRPLAHFLLSQGFQLDLIPSLAVARTREAMHNSWDKNDPKDAQVLLHLLRTGVTQRYHDPLVNHTHDFQELSLTYAQVSMEKTRMQHRLLTHYLPLYFPEIERHYHASRSLWLLDFLQAFPTPATITALDRDQFVQSAWPIIGRKVAKRRLLEDIYHRAQSSIGLPVEAESEAVAMFRVLLKEMSRLCKLRQELEQRADGYLGDNDDFRRLKQIPGIGPILALTILAEAGDLRRFRHHRQFLKFCGLDLATQQSGQFRGATKLSKYGNGRLRCALWMAATIAVKQRENSFREKFERYIRKDPLSADRKRMAYVAVAGKMARVVYGIIKSGTEYRCFHEVAAPSGRAVSVGP

SEQ ID NO: 45169 - protein, 353 aa, unidentified
MTVYCGVDFHARQQTISYCDSADGEIHECELLHQDNQVREFYAQFQGEVIVGLEASGYSTWFEELLEGMHHTVWLGNPAEIRRKAPRRQKNDRRDADLILGLMLKGDFPRLHRFSAESRSVLRQLRYRHKLVKVRTIAKNSLQAISLSAGLPLKRGLLTQRGQERLRALELPPVLGQQREEWLQLVVQLDQRIATIEAALEKVAASDQQIALLRTHPGIGLLTGLGVRHTLTPVTRFSTTRKVVAYAGFDPVEDSSGERRRLGSISKEGSRLLRFLLNEAGQTACRQDPDLKRFYQRLVHRRNRPKAKVAVARKLLVRSFIMLRDQINYAEFVRRGVAARSARKAHRLSMPVL

SEQ ID NO: 45170 - protein, 478 aa, unidentified
MKNQRRAPTPHQAANTKRRALSPALVKRIQPDAAGIDCGATSHYVAVPDDRDPQPVREFGTFTADLHRLADWLVKCGIKTVAMESTGVYWIPIHEVLEERGLEVVLVNAHDVHNVRGRKSDVKDCRWLQELHSVGLLHASFRPTAEIVALRSYVRHRQTLIEAAATCIHRMQKALTQMNLQLHHVLSDLTGVTGLAIVRDILAGVRDPRALAAHRDGRCKASQQEIAAALTGNYRAEHLFVLRQNFEAFEFHQRQIAQCDKAIEAQLTSLAETRQPTSSEPPAARARCKPSKNEPRVELRTPLHRITGGADLSQLDGIGPYGALQLIAEIGTDMSRWPTEKHFTSWLTLAPNNKISGGRLLSSKTQPSANRAAAVLRRAAMSLTRSATALGAYYRRIAYRLGQPKAITATARKLALLVYRVLRGDIVYRDPGATAYVQLHRARLINSLRRRAKEFGLSLVNLETGEVLDHAVLPPTVS

SEQ ID NO: 45171 - protein, 379 aa, unidentified
MFENITYVALDDHKRKHQVAVLLPGVKRDDAVTWIVENTPAGIRKMVRKVLKMAPGDVRFCYEAGPNGYVLQRQISKYDRVTCVVMAPSKTPRRPGERVKTDRRDARKLVGLFRAGELQSIVPPMEEEEAIRDLVRCRRIAQKKATASRHQLDKFLTRNGYIYHDGKNWTRRYWDWLRSLKFDDWRRERTFEAYVFGIEQDEDRVKRLDLEIVRAAEEEPYRTLIGFVRCFLGLDTLSAMILTTELYAVGRFTTAPSLMGFVGMVPSEDTTSWDPHRGPITKAGNGHVRRILVEAAKHYRHPARVSKALAQRRKGQPDWVIAIADKAQTRLNQKYWKMVLGNGKHPNVATIAVARELVGFIWAVLIQAATTQRIDELVA

SEQ ID NO: 45172 - protein, 345 aa, unidentified
MGYFAGLDVSLEETAICVVDAAGQIVREARVASEPEALVAFFEACGMAMERIGLEACSLSAWLHAGLTQAGLPAICIEARQAKAAMGAMPNKTDRNDARGIAQIMRTGWYRAVHVKSPSCRSWRALLTARRLVLNKRRDVENGVRALLREAGLKLGTPNRKDFSARVRELAGDDPVLAALSESLLSVIEIMTQEVDRLTKRVLDEVKVEPTCRHLMTVPGVGPLTALAFRATIDQPGRFRKSRDVGAHLGLTPRRYQSGETDVQGRISRCGDELARTALYEAAHSLLIRSNKWSALRAWGMNVAKRRGMARARVAVARKLAVILHRMWADGSEFRWGKQATTAAA

SEQ ID NO: 45173 - protein, 441 aa, unidentified
MQFKNLQMKRHYISGKTIVGIDPSKEKSDTAVLDQNGLLLGKTFTFKNNQEGFQKQLWNCLNERIYDLSKENTIFAIEAACNLWQKLADYLSVKGFNVVIVNPLSTYKARSLINHSFSKTDAKDALVIANLTREGYFDFYRIHSDSTKALHDMSVTYDKLKRTLSQSRLRLRALVEFTFPEFPKIVRMNTNTALYLLEHYITPQEFLNADIFQTVQGMNRVSRKQKGIHTFKQIQEAAEKSIGLTLDEEQIKAAHMARDAWVAMLKLTLVQIDRVLSQIIARARTMPYFDILTSIKGISDISASLFIAEIRDLHNFRHYKQIEAFAGLGLRIADSGTYRGYRHINHIGNSRLRTILYGMTVETKNHIPEIRIRFLKRQMKHDRYRRNIIACTSNLLKLIMNLVQENRFYEFREDKVKELNDLEKQIEKNPQNTVRKYKIAS

SEQ ID NO: 45174 - protein, 352 aa, unidentified
MKIIGCDFHPSFQQISLLDLESKERVRRKLMHATGEAERFYRSLQGEGVRVGIEASGNTRWFQRLLEELGHELLIGDAGRIRAAELRRQKTDRRDADHLLELLESGKFPAIWVPSAEQRDLRQLLLHRHKLVQMRTRIKNQLQHVAMNEGLQKKRQLWTERGQRWLKELSLPPWTERRRQDLLLLLQGLEPAIQELSQAVEQQAEQDERVRLLMTHPGVGPITGLAFVLVIGDVQRFSRSREWASYLGLIPCEDSSGTRRRLGAISKQGNTLLRTLLVEAGQSAARLDPELRRAYQRLCHKKQHSGIGKVMVARKLAVRLYWMLKTQQPYAPARTQSSPSHPVSTREGSSSL

SEQ ID NO: 45175 - protein, 321 aa, unidentified
MLYAGIDVAKDTLQVCLLGQTKQQKEFANSRNGHQQLVRWLKKQGGKAVFVGMEATGSYGEAVCDYLYEQQITVSVINPARIKAYAKSQLKRHKTDAIDAELIADFCRTQQPEAWSPPPVEAKELRALVRHLDDLKAQCQAEKNRLAAQPSSKTVVRDLQAHIRFLDAQIQRLEQAIREHIDQYPQLRQQHDLLNSIPGIGDTTSFHILAELGDLTRFQNVRQVVALAGLNPQLRRSGSSVDYTAGISRMGRYSLRAALYMPAMVAMRHNPILKAFAERLAQNGLKPKQVITAVMRKLLHLAYGVLKSKAPFNPHYLALCS

SEQ ID NO: 45176 - protein, 361 aa, unidentified
MKIVGCDLHARQQSIAMLDMATGEFTEKIIRHEGKAVREFYAALEGPVVVGIEATGSMQWFLELLEELGIKYRVGHPAKIRAAETRKQKHDRRDARLILDLLVMEDRFPEIWMPSTEQRDLRTLLRDRHQWVKMRTRLQHTLQAIALNHGLRQGHVLWSAAGQGALHALPLAPYTRQRRSALMSLYAQLQKRIQELDKAVEAQAQQRPQAHRLLTHPGVGPVTALATEVFLGDPTRFSKGNQVASYIGMIPCEHSSGKRQRLGKLTKEGNALLRYLWTEATMHAVGKDPELKRFYRRKLIQKGMGKARIAAARKLGIRLWIMMRDQIDYEEFCRRGKLRQKGEAHAGMPAFDSGPAQAVTG

SEQ ID NO: 45177 - protein, 414 aa, unidentified
MACARHKGDGNVSTQVKTFKTTTEPLISLSNWLSSAGCTHIAMKATGVYWEPVWLILFDSEFELILANAGVPSDRSSSLGWNAAHVKNVPGRNTDANDAVWLADLLAQGLIRPSVACPERSRRVPDEPTQQMSDLLRTRKQPARVRASHIQHIQKALEDANIKLDSVVTDLLGMSGRRILEALIAGQTMLQVLATLAHRRIHASTDELEAALRGGVTPHECFLLKLHLDQIDAIDAAIAHIDQEVSANVEPFRAAIEQLTAIPGISPLAAQVLVAEIGIDMSRLKTAGHLISWAGLCPKNDESAGNRRSNRMKKGAPWLKTTLVQSAWAASRATESYFQAQYHRLRSRRGSKKAVCAVAASLLTAAYPLLKSGAPYRDLGPNHFDLPDKQKHAIRLLKRLQNLGYTVQIQPIAA

SEQ ID NO: 45178 - protein, 334 aa, unidentified
MFFLLFNYLPTDSAIEPQKCVLTKRITSRAKLIEFISRLKTCEIYMEACGSSNYWARTFQGYGHTVKLISPQYVKPYIQRNKNDYRDAQGIMEASFWAGTPYVTPKTVEQQDIQSLLRIRSNYIEIRTTVSNQLRGLMKEYGVFLAAGYQKLKQELPGIFDRNTENGLTPQMKELIEGQYDMLLIFDEKIDKLDIQIEQISKQNEVCQRLQKIEGIGPITALAIIALVGNGQGFKNGRHFSAYLGLVPRQHSSGQKEKLLGISKRGDVYLRELLIHGGRSVVMHCSKKSDARSVWVNKIKDTGGMNKAAVAVANKNARIVMAMLLSGENYQKAA

SEQ ID NO: 45179 - protein, 406 aa, unidentified
MTITCGVDWAENHHDAAVMDEHGTVLGRTRIDTGPAGFAQLQTLIAEHGGSAEDTAVAIETDKNLLVVALTAAGYTVHAINPRAVARYRERWGQAGGKSDAADAAILADILRTDRHVHRPLPRLSEQALAVRALARQHQEAIWARDQTISRLRSVLLDFYPSALQAFPKLKHRAAMTILTAAPTPTAGRKLTDSQIQRLLKKAGRRNDPTLVAAIRTALHSPTLAQPAAVEEALGRVVGGLTAIISAMLDTVATLESTLSQALAEHPDAEVLRSVPGVGKVIGARLLAEIGDDPERFESASAIRSFAGTAPVTIASGRSRYVKARRVRNKRLADAAHWWAFAALTWSSGAREFYDGRRARGENHNAALRTLANKLIGRLWWCLKQHQPWDETTAWPEHRRPTAKAA

SEQ ID NO: 45180 - protein, 346 aa, unidentified
MELYIGLDVSLASTAICAVSGRGKIMMEATAASEPEELVAALKAMPGGVVAVGLEAGPLSQWLYRYLTDAGFAAVLMETRQVKGALKAMPIKTDRRDAEGIARLLQMGWYRPVHCKSVSAQEMRALLSARKAIQRAAINLELSIRGVLRNFGLKMGRVAKGRFEARVQELTEGNPMLEAAANPILATRRTLRQELAGLEKALRDHVKEDPACRTLMTMPGVGPVVALTVKAAIDDPARFRSSKDIGPWVGLTPRREQSGERDIVGQISRAGDVGLRTALYQAATTMMHRGRKNWLTAWAMNVAKRRGKKRATVALARRIGVVLHRMWTDGTDFRFTRKDAAAAAAA

SEQ ID NO: 45181 - protein, 336 aa, unidentified
MSRPEYFVGIDVASQSFTSTVLSSPREVVRVTETPNSPEGFAQFVSKLQARQITAYNSVAIMEATGVYGEKLCYFLHSKGYRVAVEPPNEVKKAFKSKRKNDTVDSRQIAEYGYRFFDGLRFWEPKPDLLQQIGTLLTTREQFTKQLTADKNSLRALSRKAVQTPMANRLFEKNIRRLKKDIEAIDKAIQQLIDQDPSLKQKAGLVEGIPGVGLLLTANLMVITSGFNNLDAKSLAAYLGICPYEHESGSSVRKRPRSDRYGTGKARKLLHLAARSTATHKHNFRAYYLRKLAEGKPKRLALNNIANRLLRIICAVVRDGSPYCETHRSVHPALVA

SEQ ID NO: 45182 - protein, 328 aa, unidentified
MKLQHIIGADLSKESIDLASHQLQTHLKIANTVNGFGQMLKWLRQQKINCSDVMIVMEHTGLYSYHMEKFLYQHQISFAKVSALAIKRSLGLVRGKNDKIDAQRIARYGFEKKDVLVPAKKPHEAIKRLQMLHSTRNRLVRQRASLKCAVKEYKSVTKQSDLIIESQLILIKSFSQQIKKIETQITELITKQQEVNQNFQLLTSIKGVGEVVATAAIIKTGNFTRFMNGRKFACYCGTAPFEHSSGKSIRRKTRVSHLADKQMKTLLDQSAKTAIQYDKELKSFYERRLEMGKSKKSTINIVRNKILYRMFAVIKRQTPFVENYLQTT

SEQ ID NO: 45183 - protein, 424 aa, unidentified
MSLRLAETVGVAARLAACRNAGPNHEGICPMASRWRAPVAIIRGPGWPPSCRRLTGLCGRCRSLDDPPAFYPTAVTTEGRSVMTVIGIDAHKRSHTCVAVNDAGAKVAEKTVASTSAGHAQALRWALTRFGTDLSWGVEDLRSMTGLLERELLAAGQKVVRVPPHLMARNRGSARAWGKSDSVDALAVARAVLREPNLPAAFHDPISWELRLLVDRCEDLVGQRVAVTNRLIGRLHQLSPDRPTPAHLERTKSQLAMGEYLREQHGLLAELARQELADIGHFSRGISALTEDVVGRVRELDSTLLQLQGCAELTAAKLISETANMDRFRNEAAFARYVGVAPVPQSSGTEVGRVRASRSGNRQCNTAIHRIAIVQLRLKGPGREYYLRRRDEGDTAYTAIRCLKRRLCRIVYNRLRADYQHRNL

SEQ ID NO: 45184 - protein, 388 aa, unidentified
MFFLGIDIGKNTHVASLLDEKAKIIFKAYSFANTLDAAEALLAKLEPYKDSLEIGMEATGHYWLSLYSFLAEHKFIVHVLNPIQTDGWRKGIEIRKRKTDVIDSVLIADLIRYGDFLETSLADEDILSLRNLSRFRVYLVNSVSDLKRKAIAVLDQIFPEYASVFSNVFGQTSKELLKSLSLPSDYENLSAAKIEEVLSNITQKKKASKTISTLSDKASRSFGISFCKDSFAFQLKLIIEQICFIEEQIASVELEIEQLMSKLGTNIKTIPGVGSVIGAVILGEIGDIERFDNPSKLVAYAGLDASVSQSGEYEASSGKLSKRGSPYLRKALYMAAQRAEFCDPIFHAYYEKKRNEGKHHLVATNAVARKLCHTIYAILKKDIPYEVQ

SEQ ID NO: 45185 - protein, 348 aa, unidentified
MPNYNQPHQFYAGVDLHARSMFVHVLSAKGKTVFERDLTAEPDAFLDAVKPFRKNLVVGCECMFAWYWLADLCEDQRIPFVLGHALAMKHIHGGKAKSDKIDASKLANMLRGGMFPLAYVYPRAKRQTRDLLRRRSFFVRQRAQLITHIVNTNSQFNLPPFSKKLSYAANRSAEIADRFADPSTRLMIHTDLNLIDAYDSQIAELERHLLKSAKVDDPVTFGFLRTIPGIGPILGLILLYEIDRIERFPEAGNFLSYSRLVRCAHASAGKVKGFGGKKIGNAHLKWAFSEAACLMLRTCIPVKAWMQRQESKRGKRKALSVLEAKIGRTVFHLWRKQQAFDVKKFLHV

SEQ ID NO: 45186 - protein, 451 aa, unidentified
MAKTKKRKHRKLDRSLPAMRPNAGGIDIGATEIFVAVPADRDTESVRSFPTFTEDLHALADWLQQCRVDTVAMESTGVYWIPLFQILEARNIEVHLVNAQHVHHVPGRKSDVLDCQWLQYLHSVGLLRASFRPEQAVCEIRSLMRHRENLVQMACVHVQHMHKSLDQMNLQIHHVISDITGVTGLAIVDAIVAGITDPKELAKLRDHRIKASIATVKKSLVGDYRPEHIFTLKQSVTAYRQSQQLIADCDREIQQRVQTFETKDDHPSPANDSSSATTPPPSSFDLRNHLKRIFGVDLTLIPGFDSLRVETIFSETGADLSSKFPNDDRFCSWVNLCPKDGTSAGRRIRGPKMKTENRVNQEFRMAAQCLHNNKSYLGDYYRSQRARYGALKAIKNTAHKLARIFYHVVTTRQPYDETVFAKLEARNQKRRLHNLQTRARQMGYTLVEAHA

SEQ ID NO: 45187 - protein, 342 aa, unidentified
MIYVGMDISSKDFMIHAIDERKKVKFKGPISPTKRSLRELIDTLGMEKKVFVFEAGNQMKWIADFFKKELQDIHVVHPNEVKWITQSSGKKTDKVDAKKLAELARADMLPRRVHVAEGSARDLRELVGARQTVLSKRVGLMNTIRGYLKQEGVRLPAKFFTSNEWQVELMDLKLRSSTEIIVANLMYAVEQLQECEKGLNAEIQKINNEKIELIETIPGIGKLSSRILFAAIIDESRFDNSKCLANYGALTPTIYQSGGMENLGNINRDGRGEIRRAMLQCAHAVARTKTAGVKPLKDFFERIEKKRGKKRAIVALARKLLTTVYGVLKSGEAYNPAKLKAA

SEQ ID NO: 45188 - protein, 403 aa, unidentified
MRTVFAGLDWASRSHSICLIDEQGSVQAQFDVAHSAEGLAELVRRLRAAVVYAVAIERPSGLIVDTLVEAGLAVVPIHPNVVKATRPRYRSHGGKSDASDAYLLADLLRTDGHRFTPLTAQSDDIRALRALVRGRDDLVATRVQLANQLSSLLQSFWPGAAEIFAAIDSPIALEFIQRYPTPESARHLGPKRMAAFCAQHGYCGRRSAEDLLARLRQTPRLTLGEMEVESKGEMALALARTLSGLVEQIRRVTSRIEHQVASSDDGRILMSFPRAGRICAAQILAEIGSVRERFDSDEHLAAEAGVAPVTYASGKSRVVAFRWACNHRLRAALTCLADNSRHANAWAATTYARARGRGCDHPHAIRILARAWLRIIWRAWTDRRPYDPAQHRASQLLLVASKG

SEQ ID NO: 45189 - protein, 343 aa, unidentified
MQDVATVGLDIAKQVFQAHGADASGETLFNTKIKRENVLEFFSKLKPCLIGMESCATSYYWARQLLEFGHDVRLIHTSYVKPFVKRGKTDANDAEAINVALTQKTMRFVPVKTLNQQAAITIFRTRSLFVSQRTQLVNALRGHLAEAGLVAAKGIQNYSKLLKLMESAADTVLPTVMKQALTDICDQIHRLNDLVTKLDKEIERRVQHDENACRLLTIPGVGPKTAMCVIATIPDIHRFPSGRHFSSWLGLTPRTHSSGGRSVLRRITKMGNSELRTMLYLGGTVIMMRDKKTPIGRWAARLRARRPYKVAAIAVANRLARIIWALLTNGGVYDLTHGREASA

SEQ ID NO: 45190 - protein, 344 aa, unidentified
MHYVNNTELSSHEETRCQFNGGTGAIKLGIDVHQDFYVVVMQEGGTNPKPPQRFQKQAFLHWAAKLKSQGTEVHAVYEACGFGFSLQRQLSALGVHCHVICPQKLDEQNRRVKTDGLDAKALCLKLDRFVEGNRSALALVRVPSEEEEQKRAIHRQREQLVKARKQLEAHGRSLLVNHGLEPVQNWWKPRTFAVLPAPQWMKELLQNSQPILFALQEKIAALTLQLQNAAAPKQPRGLGKMTSVIIDREIGDWRRFNNRRQIASYTGLCPGEYSSGNTRLQNCVTKHGNPRLRAALVELAWRLIRFQPNYKPIIKWKEVLRRGAPRHRSRAQESHRGGGPPTGC

SEQ ID NO: 45191 - protein, 371 aa, unidentified
MEHDSTLYVGLDVHKDSITVAYALGAGEVEVLGKIGVTKADIDRLCKRLQSKARHIRFVYEAGPCGYGLYRQLVQKGFDCMVCAPSLIPRKPGERVKTDRRDAVRLVRSLRAGDLSAVYVPSVEDEAFRDLARAWVSSKDDLKRARQRLKAFLLSHDVRYTGRADWGPAHRRWISQYSFDSAWQHLAFEELRRTIEDRLAQCERLEAALREAVVNWRFYPAVLALQTMRGVQFTTAVGMLAELGDLSRFAHPRQLMAWLGVTPSEHSSGEKRSQGSITKNGNSYARKLLVEAAWSYQHPARVSPNIQRRHEGIPKPIVDRAWDAQVRLCRRYRKLVARGKQKNIAVVAVARELSGFIWDISRLAMSLAVRP

SEQ ID NO: 45192 - protein, 360 aa, unidentified
MNATTVAVDLAKSVFQLAVADASWRVVETHRLTRTQFERWFVNRDVSLVIMEACGSALHWARWLNGLGIEVRLLPAQYVRAYVKRNKTDAADAAALLEAARASDIRPVRIKSVEQQALQGMHRIRSLWMGTRTSRINALRGFCREFGIAIPVGARTGIEAISRVLADPHTAVPDLIRGTAKLLIEEIRLLEARIAQLERELASLARLCPACTTLLSIPGIGLLTATAMVAATSGDVSHFKDARHFSSWFGLTPKEYSSGNSRYLGRISKKGDRYLRMLLTHGARSVLRAAKVAEGSGKEVCGVRRWALDVQTRGNHNKAACALANKLARICYATLRDKEPFDEGQRLNKKINRESFVMPA

SEQ ID NO: 45193 - protein, 407 aa, unidentified
MSATKKICCGLDVHKETIFAAINANGKAGEVKEYSTLTCQVSALSEWLKVNGVTDVAMESTGIYWIPVWNILEAAGFRLILVNPYFIKQMPGRKSDVKDSQWVAQLLAKDMLKSSLIPCHQIRTLRAYSREYVKRQQSITRIVVGMERVLETANIRITSMVSKIESKTVLNIIELIIKGDTDIDKLLEKVHGRTKNRKGELVRQSLEGFVLPEHRFLLSQQMEEYRLYYKQADELQKQMLAICKEHYAKEMELLKTMPGTDDQSVMQLIAETGADMGAFETSNRLSNWAGLCPRNDESAGKIKSKATTKGNKYLRRIIVQIAWAASRTKNSSYYNKYNQLAIRKGRKKALVAMARKQLTVVWNILKYGQPYDINKQPVITPEQLLAKRKYHEKELGKLSILAIAANQ

SEQ ID NO: 45194 - protein, 568 aa, unidentified
MHTCTINSDRNVLPSESGDKGTKLQGVNTRDLISSKSSNSSSNAFVHNSSIGVDVHESLMVCVYQKADPLTGQVYEEKFETGTTKKNLNDLIDWIKSLNPEIILMESTGVYWFSFYDLLEDNGLSDITVVVNPREVKAIKGKKTDQIDAARLAVVARVASFSKSFIPNRKVRTTKLLSRQLTQLVHDRQRTTNRMHKVLVTAGAHLKQVFSKLTGVSAQKVLGAILSGMNGTELYDFIEENCKKIKKSTDEIFEAVQIVNNDPNIMSAIRRLGNIGKFLDQQIADTEEQLEVLLAPHRDLMYRLETIPGVSHVIARTVVSELGSDWSSFESPRRLAAWIGLAPGNMTSAGKNRLSRTTKGNKYLRTQLIQAGNAISRMKTGGFFEKFQALKERCGHNKAVVATGHRIIRIMFAMVRDKTEFADSGVGSLAKQRVARALKATRSLSEVGFNTEFKLSNSNTGDTILLTKSTAKPINPPKLAVKADPANGLHATQITSDGESFCIDPNLSLFKVFVDGAKKISSKCILSHVESQIASAAPLQKKSDAKDSQSTVLLSEFDELSTDSHPDL

SEQ ID NO: 45195 - protein, 342 aa, unidentified
MESAVTIGLDLGKSVFQVHGVDAGGSVVVQRRLTRGKLLAFFAKQPACLVGMEACAAAHHWGRELRKLGHTVRLMPPRYVKPYVKRQKNDAADAEAICEAVTRPSMRFVEIKTCEQQGTLVLHRVRLMLMRQRVQLSNAIRGHMAEYGLVAPVGRNGLQRLITILSNADDDRIPAVARASLAPLVCQFDLINGQVLENDRRVRASARSTEVGCRLMEVPGVGPVLASAIVATVPDPTAFKSGRDLAAWIGLVPRQNSSGGKEKLGGITKQGDRYLRQLLVVGALAVIRYAQRHGTKRPWLVHLLARRTPMIAAVALANKMARMIWAMMMTGERYREPTVAAA

SEQ ID NO: 45196 - protein, 419 aa, unidentified
MDDVVHERCAGIDISKGDVKVCVRLPGAGRRRKSEVRTFSTMTRDLLVMRDWLLAERVTVVGMEATGSYWKPVFYLLEHDLECWLLNARHMKSVPGRKTDVLDSEWICRLVEHGLVRPSFVPPEPIRQLRDLTRYRTEIVRERTREAQRLEKLLEDAGVKLSLVVSDLLGVSARAMLEALIAGERDGQVLAELALGSMRRKRTILADALSGNFNEHHAFIARTMLDRIDACRATEARLDAQIDEQVRPFRRQLDLIETVPGASRRTAQVILAEIGADPARFPSAAALASWAGMCPGNNQSGATARNGPTRHGDPWLKAALGQVAVSAGRTKGTYLAARYRRIAARRGKKRALVAVGHSVLISVWHMLTTDLPYQDLGPDHFINRLDDRGKARTARRLVDQLGQLGYHVTLQPAPVPAPG

SEQ ID NO: 45197 - protein, 338 aa, unidentified
MTIETLAIDIAKNVFQLHGVNRAGRVVLKRRVMRDQLFSTIAQVERCTIVLEACTGAFYWQRKFEALGHEVKIISPQYVKPFVRRQKNDGNDAEAICTAARQPHIPFVPKKSVEQQDIQALHRARQRMVNHRTAVVSQIRGLLLDRGIAMAKSITCARRLIPGILANLSNELTPMARGAIAELYDLFRDLDRRIAVFDRKIDEVFRNSEPCQRIAKIKGVGPKTATAIVAAVGDGSEFKNGRHLAAWIGLVPRQFSSGDRTILMGISKRGSQHLRSLLVHGARAVVRTAPSKTDARNEWVNQLRERRGFNRATVAVANKNARIIWAVLRTGEPYRAVF

SEQ ID NO: 45198 - protein, 339 aa, unidentified
MRVYAGFDLHANNNYLGVVDANGKRLFRKKLPNDPEMILGALDPVRGRLAGAVVESTFNWYWLVDLLMEAGYQVHLANPTAIQKYSGLKYSDDTNDAFWLAEMLRLGILPTGHIYPKEQRAVRDLLRKRGHLVRIRTSLILSLQSTIARNCGKRIKNNDIKRLREDMIAPILEYNEDLALVGEVSKEMIDYLTRKIRDIELFIERKVERKETYRYIRTLPGVGRVLGLTISLETGDISRFEKVGNYSSYCRKVPSEWTSNGKRKGKGNKKNGNKYLAWAFSEASECARRDNDTVRAYYDRKLNKTNRMIAHTALAHKLARAAYYIMRDQVPFDPEKLFA

SEQ ID NO: 45199 - protein, 370 aa, unidentified
MLDTTTFVGLDVHARSIKAVSLDVMTGEVRCATFGYDAGAVAEWVRSVDPKARCVYESGVTGFDLQKSLSGLGVGCAVGAVSKMIKPSADRRRKNDRNDAEFLARMLSVGNVVEVWVPDDECEAARDLTRALEDARDDLSRSKQRLSKFLLRHGLAFDERTPTGRRKGNWTRAHWSWIESIRFAEGADNDVLAYYVDAVRRAAEEKARLEGLVEAEARKPRWRRRVDSLRCLKGVDTATAADLVFEAGEFSRFRNARSFAAWVGLTPSEHSSGESDRRGAITKAGNKHLRKALVEAAWHYLTCSGRPKDLAKGQAPDRVARRHAAKGVRRLAERREALLARGVHNNKANVATARELACWVWAVGLMAEEA

SEQ ID NO: 45200 - protein, 343 aa, unidentified
MQTVTTIGLDIAKSVFQVHGVDENGKPVIRRQLRRSRVLEFFKKLPPCLIGIEACASSHYWARELQALGHTVRLMPPAYVKPYLKRQKNDAADAEAICEAVQRPNMRFVPVKTPDQQACLMLHRTRHLFIRQQTAVINSIRAHLAEFGIVAPVGRGGVKELLAAVADPEDGRIPEIARECVAALGQQLQRLQAQILEFDRRINAWHRSNETSRRLDELPGVGPALATALVASVADPKAFRSGRDFSAWIGLVPKQNSSGGKEKLGSITKQGDRYLRSLFTAGALAVIRYAKIHGTRHRPWLSKLLERRSTKVAAIALANKIARMAWAMMAKGERYREPAALAR

SEQ ID NO: 45201 - protein, 424 aa, unidentified
MNLTQNDRLKQVTSDTLIVGVDVGSQTHFCRAFDWRGFELSRRVFKFSNTGMGFLTFLRWTEELMNKTEMKKVIVGCEPTGCYWLTFQKFLQDHAIQLVTVNPFTVNRSMELDDNSPEKSDLKDPKTIALLVKDGRYSTSYLPSGVYAEIREASVCRDQIMKQHVRLSNQIQGWLQKFFPEYFECYAEWDSTSGLMLLKEAPLPQDILKIGAGGINQIWRDAKVRAAGIKRAQTLVEAAQNSVGLEAGEAARLEIWVLVNDYILKAEQLKRLDEYLEEKVKEVPNVEKLLAIKGVGMSTVIGFIAEVGDIGRFTDPKQIQKLAGLEIVKKSSGKKKGQPRISKRGRRKLRRTMYESARALMTWNPAFQDVFLYYRNRTHKPLGSMQAKIAVACKAIRVFYVVLQTGCDFDEEKFRRDIIRPEAA

SEQ ID NO: 45202 - protein, 343 aa, unidentified
MKYMGIDYHKQHFVATTVDERGRIVSKEKVSTDRCSIREYLSRANRGRDVKAVMEACYGWEYFYDEAAPCVEELIMAHPLKTRLIAEARIKTDSIDSESLAQLLRADLIPEAYAPSVDTRDKKALLRYRSTLTGVKVMLKNIVHSVLARNHIEDPAFRRLSDKFGKKGKAYLRSVRLRGNDTEILNHYLDLLEDVEAKMRLVEGRIRAEVRSDEICDLLKTLPGVGDIISMLIRYEVDNIERFVSSAKLCSYAGLVPRTYSSGHRTYQGRITKQGNKWLRWAMVEAAQRAIVNDPGIKAFYTRIAEKKGSKLARVAVARRLLQIAYWVWKERRPYRAAALFCV

SEQ ID NO: 45203 - protein, 394 aa, unidentified
MKLIGIDIGKNKHFFCVMDQQTGEIISQPVSFSNDKEGFDFLVQKIKSYPKDSILIGMEDTGHYHFALLKYLLDLQYTVALINPKTTDFNRKMQGGITKNDKLDTINICDVLDTPERKKQYRITKVNSFDLYEQKQLTRHHHNLKEEENVYKNRLQKCIDIVFPEFNKLFNSKYGIVYMNILKMFGSAENIANTDIRTIRKCFEIEGRGNRISLTPERLKECARSSIGISSSAEVIQIKHLTAQIELIEEQLTEIDKKIEEFSIQNNSPILSIPGISHFSGTSILAELGDISNYSKPSQIIKFAGVAPLHYESSQFNAQHTAITKKGSKYLRKTLYQIILPLIRHNPVFNKYYQLKISQGKGHRCAQGHCVRKLLRIIYHLLKTNQQFDPQLLR

SEQ ID NO: 45204 - protein, 342 aa, unidentified
MPNRPFILKIEYHHSRANRLNHKENAMNVIGFDISKDTIDVTLLRNSGQIDYIKIANACEGFEKLNDWIRSKRIRKISISMEATGIYYEEAADYFSEIYQVFVINPLKIKEYSKSQFSHTKTDKADSRLIAEYTKRHLDKLTPFKPSENPTLYKLISLLQQLKQQQNESQNRLHAAKDAFIRATHEAIILLLAKQIDQTAKRIDLMIQQQDSLNMHYKNLQTIPGIGKDTAAILLHHLTDKQFKTANQFVSFAGLSPRIEQSGTSVNKKGRLSRYGHRRLKRALFMPALVAYRIKAFPKLVQNLSQKPKMIVIVALMRKLAKIAYYIHKTQKPFEKMRYQIA

SEQ ID NO: 45205 - protein, 364 aa, unidentified
MESYTGGLDVHSRESVFVLQTADGTVQAEGRIPTTEAGLQAWQTRYAVPAGTRVFLETGTVIFYVAHQLAALGLTPVVIDAHEVRRRAQRPTQKSDRGDAFELCDGGRRGLYRAVVHIPAPATQALRQAVARRRHFVRAATREILAARHLLRAAGRGPQRGTLTSAAAWERMLARVADAPSLALPLRAHFSLWQAARAQVTVLDAELAHVPAPLVPDLTRLQTIPGVGAIVAATIVGSLADIRRFPSAKHVGSYAGLVPTTHQSGPRDHHGHITKRGARELRAMLCEAAQHAARPTHPLYPFYAPLCMRHGRKRAIIALAHRLARIAYAMLRDHRDFDPDRLGCELDPAQPVRTRRYRRRRRAA

SEQ ID NO: 45206 - protein, 463 aa, unidentified
MQTRPLEAVAGFASVSGSSAHLWVERRDEVPTRPAMPQGSGMQGATLAHVTTSTIDPTLTEAAATEVFAGIDWGGSFHQICLIDEDGKVLRQQRVPHDAAGFDELDRLLTCHRARLRVAIERAEGLLVEHLHLLGVEIFCVSPKISARARERYRMAAAKSDAFDAFVLADTLRHEHRHWRALTPPSPVLAELRAISRDRDRIVIAQQATENRLRAVLEAYHPAPLHLFSTLDRDITLDFITDYPTPEQAGRVGTARMDGFCRRHGYSGRTQPEVLVERLRPHLLSAGEGTVAGKAFSASLFTEQLRMLNTHLRAYDKRLDELLERHPDTPIFTSFPGVGPVVAATLISEMGDDRHRFPAPGALLAEAGLSPVTRASGRTRQVRFRYASNRRMRHMIDWWMFTAIREDDWTRQAYDHARARGQGKYRALRGLGSRWTRILWRCWTDHTRYDPAIHHRNPEPTTA

SEQ ID NO: 45207 - protein, 418 aa, unidentified
MAMKIVRFNCCGMDVHKNLVVATIGITDRKTNVTEYFQRSFSTLNSDLYRLKDWLQSHHCSDVCMESTGKYWIPIFNILEDEINVHLTHPKYVKAIKGKKTDKKDSKWICDLFKHDLIKFSFIPPKEIRELREIARYRYKLVCMRSSERNRYQNCMTVSNVGLASVVSDPFGKTASNIMKEVMKSNVIDDDKILKLVHKNCKNKDKILDSLHGYRIESDQRFKMEKSLDHMEYLDQLIDSCEVELIKRAYPFRRSFQHITQIKGISALSAILIISEIGIDMSQFGSDKQLVSWAGLSPANNESAGKKKSVRISKAGQYLKPLLVQCALSAIKDKTSYFGRKYSNIKKRRGHKKAIIAIARMMLVSIYHMILTGEEFQPCDYESFMDPKPNANPSLTVEKALNFLKQSGIDISSIPINL

SEQ ID NO: 45208 - protein, 346 aa, unidentified
MLYAGLDLSRKRLDFHLLDGEGATVERGATPPDADGLHRLSERVARHGAPVRAAIESMNGARFVHDRLELAGWQVEIADAQKVKGLAPLACKTDRIDAWVLAELARRDLVPAIWLPDPLVRAERERARWRLHLVRHRSSLKQRVHAVLLTHGKPCPVSDLFGVRGRQLLARLGLPEPWQGTIEASLRLIDELDREISDCERELRRLGAEHRYVPLLLTVPGISWVLAYTIAAELGDINRFPTPRKLAGYTGLCPRVYQSGERDLRGPLAKQGPRYLRWALVEAATHACTHPIYRQRYTQTKARIGKQRGAKVAQIDLARRLSEAIWHMLSRNQPFAPKGATDPLAA

SEQ ID NO: 45209 - protein, 412 aa, unidentified
METTYNVAGIDVHKRMLAVVIANARDTELEFECRRFGTTVSELRALSEWLKEHGVQEIAMESTARYWKPVWLALEGQCRLHLAQARSNRGPRGRKTDFRDAKRIVSRLLSGDLILSFVPEAEQRGWRTLTRTKYQLTRDRVRLQSQLESLLEECQIKLSSVVSDLLGASGQRILRALAQGETDPVRLVQLGDRRLRASDAELKDAMSGQPQPMHRQLLSLYLARFDLIESQMASLDKMIAGEMKAHQDAVLRLAELPGLGIDSAQQIIAEIGPHAAAFPTAAQLASWVGVCPGRQESAEVSSSDRSAKGNRSMRRLLNQLAHAAVRKEDSHLQIVFRRLFPRLGYGKAVWAIAHRLCRLIWKVLHEGVHYVERGPAPSPITLKRRRQRLVIQLKKLGYQVQLIPLTPEASGV

SEQ ID NO: 45210 - protein, 366 aa, unidentified
MFYLGIDQHARQITVSLRDEGGDVLQARQVSTQPEKVNAFFQQLTRERLPNGESFVAVLEVCGFNDWLIRMLHEYHCHKVILIQPDERKKCKTDRRDAAALSELLWVNRDRLLQGKPVRGLRQIDIASSTDQENRRLTTLRKEAGQARTRLVNKVRHILRRHNLQWQMPTKRFPTKAASAWLKQLVLPTIDRLEMNHLLTDVEQIQQRVKELEQVIAQRCGVSAEAVLIASMPGVSYFTATSLACRVGRVGRFPRAQSLANYWGLTPGCRNSGENTQRLGNITKAGSGMARWLLAQVTHKVLRKDARLREWFKRIKRRRGATIARVAVMRKLATIIWHMLSKRKTYAACRILAEAGIKQRDKQECL

SEQ ID NO: 45211 - protein, 404 aa, unidentified
MIFVGDDWAEAYHDVCVLDEQGERLAKRRLSEGLAGIGQLHALLAEHASEPGEVVVGIETDRGLWVAALLEAGYAVYAINPLAASRYRDRHAVSGAKSDPGDALMLADLVRTDRHQHRPVAADSTLAEAVKVLARAHQSLIWTRQRQVNQLRSTLREFYPQALRAFAGELGERDALAVLARAPSPAEGRLLSLSALRSTLRRAGRERNLDPKAQQIQTALRTEQLAASAQITSAFASSVRATVAVTQELSRQIDQLERELAAAFMSHPDAEILRSLPGLGIVLGARVLAEFGDSPNRYQDAKARRCYAGTAPITRASGTRSVVLARVARNRRLADACYLWAFAALTCSPGARALYDRQRERGATHHQALRALANRLVGILDGCVRHHTPYDESIAWQHTLTAAA

SEQ ID NO: 45212 - protein, 351 aa, unidentified
MMIIGVDYHPSFQAIAFFVEETGECGEQELNHSDGQAEKFYRDLKQRGICVRVGMEATGYSRWFERLLAELGFELWIGHPAEIKAKRVKKQKYDREDARLLLRLMRENNFPQVWVPSPENRDLRQLLWHRHRLVQMRTRIMNQLQALAMNEGYRWKKKLFSEQGRAQLEKLALAPWASRRRRELVELLDRMNPTIEELTAAVEREARKRPEVLRLMTHPGVGPLTALAYVLIIGTPARFQRGKQIGTYVGMIPSEDSSGGKQRLGHISKQGNSLLRFLLVEAAQAAARINPDWRRRYMHLAMRRHKSIAKVAMGRRLAIRLYWMWRNGCEYSQSLEFGSYAGQLGTGHGVK

SEQ ID NO: 45213 - protein, 343 aa, unidentified
MVGPMRSLSLFSFYTTGLLMSSSSCFAGIDVSKDSLHVALAHSLHHHDGPFRSFPGDSDGLAHLIAWLRQHHVQLVVCEASGGYERPLLDVLLEHDIPCARLQATDARDFARGLGVLAKTDKLDAHMLARMASVRRPHLEVKRSTTQRELVKLVDYRLQLMEDRTRLKTQLGKQEQGWILARQEARLTQLNEELIALDQHIETMLKSDESLQLKLEKMNQIKGVSRVTSWHLLAYLPELGELNKREIASLVGLAPMARESGTYKGRRSCGRGRLKVKAALWMASLSVIQHEEPFGEFYKRLKEKGKEPSVARVAVCRKLLTNLNAMIRDGKDYDVEKVRAKRG

SEQ ID NO: 45214 - protein, 342 aa, unidentified
MIDGESGELRSRRLSGTTSEVVELCCSLRGPTRAAYEAGPTGYGLARALHTAGVGCVVAAPGKIERPAADKVKTDQRDAERVLRLLMIDALRPVRVPSGEEEALRDVVRAREAIRGDLMRARQRLSKLLLRHDVRYEDTASVWTVSHRGWLTEIDLGERGAQVTLLGYLGAIDAIVIRRDALEKTIAELIPGSPWEQTVARLRCLRGVDTLSAVGLCAEVGEFQRFAKAGQLMSYVGLTPSEDTSGEKRRLGSITKTGSRHARRLLVEAAWHYRRAPAKGQSLRRRQDGQPAHIIEISWQAQRRLHNVWQRLDTRRGKRRTIVAVAVARELAGFCWALANAD

SEQ ID NO: 45215 - protein, 442 aa, unidentified
MRKPKKQKKPLNDLSRSLTPFDPNRTLITVVELSKESWLVGGIIPGVERGPLKKLKPDENELLKLLERWRKEAEKAGHKIDRIAVTFEAGRDGFWLARWLRAHGIEAHVIHAASVAVSREHRRPKSDRLDTKGLKRVFLGWLRGEREPCKMCAIPTAAEEDAKRPHRERETLVGEQTTIINRIKATLARLGIRSFNPKLKKAPERLEHLRTPEGEPIPPNTLAELQRDMARKQFVAEQIRQIEKVRLEQLKEAPKTGPNLMVLVLMRVIGIGIETADMLVNEILSRNMRDRRAVARYGGLTGSPHESGSKSREKGLARSGNARVRRGMIQLAWRFLDYQKDSALAKWFEARTKNGSRKKMIVALARKLLIALWHFVRDGVVPEGVRLAQHHLTVSAPVRTTCDGSPMTVRGGGVPHVRMASMPWYRMGPPPRTPHVFASTFF

SEQ ID NO: 45216 - protein, 368 aa, unidentified
MPVVVTRISDDRVVVAVDPHKASWTAAAVDGSLQPLATVRVPVSRDGYRALRRFAHRWPNARWAIEGAAGVGAPLTTLLRSDGIEVIDVPAKLAARVRVLSSGHGRKNDDADALSVGIAALTSPALRTAEIDAATTALRAVVEHRDDLVKTRTQTVNRLHVVLTRLVLAGAKRHLSADHAAELLRGVRPRDAAAKTLRALAMDLLSEVRQLDRRIAKAANDIQMAVSASGTTLTELHGLGALTAGKILGRVGDVSRFRSAAAFASYTGTAPIEVSSGEVVRHRLSRAGDRQLNFCLHVMAIAQVRHDAPGRAYYLRKRSEGKSHNEAMRCLKRRLSDIVYRQLIGDAVKQKAGPGGHSGAALSSRAAS

SEQ ID NO: 45217 - protein, 430 aa, unidentified
MKSNTQNAKIEAITEKTLVLGIDVGSETHYARAFDYRGIEYSKKPFKFSNTEAGFVTFKEWILDLKERHEKDKVVPGMEPTGHYWFNLGKFLQDNEMKPVLVNPHHVKKSKELDDNNPTKNDRKDPKVIAGLVREGRYMIPYLPDGVYADLRTASNIRFQLQAELTRIQNRISRWFNIYFPEYKTVYGKPDAKSGILILKAAPLPEDILTLGIDGVNQIWRDAKLRAVGKARAKTLIEAAEHSVGSKEGAVAARMEIRMLLEDYESRSIRLQEVMTLIEGLVKQIPMAEKLLEIKGVGIRTVSGFLAEVGDISRFNNPKELQKLAGLALVENSSGKHKGETTISRRGRKRLRYLLFEVAMSLVAKNPEFRELHNYYTTRKLNPLKKMQSLMAVAAKLIRDFYAMLTKGVAYDPQKLASDIRRPAAYLQVA

SEQ ID NO: 45218 - protein, 333 aa, unidentified
MQPFKTVVGIDVAQDSLAVSIYNGKSHEVLEFDYTQTAIRKNLLNRFKKEKESVVFVMEATGIYHTQLAYMLCENTFKVSVLNPFVIKKYAEMNLMRVKTDSVDAKLIAQYGYEYQHKLLFYKLKNDARVHVDNIIKAIDDLLQQKTMSKNQHHALKKQAHHSKDILSSYDRHIKFIGKEIIKLEKLLEGLLNESFAEEYKLLRSIPGIGLKTSSMIIAIFDSFKAFENPKQACSFAGIAPNPYQSGTSVKGRGRISKRGNPLARKILYMGALSATIHNPMIRSQYKRLIENGKPKMVAMIAAANKLLRQAFGVLKSGIPFDTEYMKVCKIMV

SEQ ID NO: 45219 - protein, 339 aa, unidentified
MQLYAGLDLHSRNTYIGIMDKEFKRVFGKRVSNNLPLILKTLDPFQDQLKGIVVESTFNWYWLIDGLMDAGYDCLHLANPAAMKQYEGIKHTDDQHDAFFLAQMLILGILPQGYIYPKEDRPVRDLARKRLFLVRQKTSHILSLQSLIARCSGQRVSANEIRKFTVEDLQQLLEQEYIVLSARANLDTIVFLKQQILLLEKAIQKKVKLSKSFQQLMTVPGIGLILAMTIMLEVGDIGRFPQVGNFASYSRCVSSQRLSDGKSKGHGNRKNGNRYLSWAFTEAAHLSRRYNERFRSYYNRKVAQANTSLATKALSNKLARICYYIMRDQVPFQDNLLSQ

SEQ ID NO: 45220 - protein, 326 aa, unidentified
MTLSHLTDNTFVGIDVGGASLDVAWHRGDSAHYANRPDAIAMLVERLRTGPEVTRIVVEPTGGYEKALVKALRQAQLPVEIIHTTRFNAYRALVGVKAKSDTSDARLLAAYAAAPDEIRGRKAGHVELPEDAIREALSELASRRDQLKHMIHAETCRLGTVRMNELRQAIMTHLEALRAEDKQVHRMMLELVRQRADLRRDQRLLKTIKGIGEKSALALLALVPELGRIDNKAAAALIGVAPFVRKSGTMTAPARIHGGRAPVRSILYMASVTASMHNPVLSPFYERLIAKGKPPKVALIAVLRRLVVFANAVLKSGQPWRGATTA

SEQ ID NO: 45221 - protein, 398 aa, unidentified
MKKNSKPQTDKNQTDKHQTKKADSAQAKTRPLTQLEQQLEQQRIQMQKDDEISAVAGVDIGDKRCFVRLTDLDGESLEECQVPTRPEALDHWFRRWPRLRIVIETGTHSNWIRRRLAALAHDVLVADARQLRLISQSDSKNDRNDAYWLAELGRTNPALLNPVAPRELETEQQRTLLRAREAVLECRTKLKGSLRGMAKSHGIRLGRCAQTQWVERVREACPEVLHAALLGVAMQIESLGATIREYDKQIIELGKRYAAVKRLRTIGGVGPLTALTFVLALDNDPGRVKRSRQVGALVGLRPKQRQSGERSPRLGVTKSGDPLLRRTLIQCAHWVLGPFGTDSTLRRWGLGLAARGGGHQKKRAVVAVARKLAVLMHVLWVKQENYDPLHGLVETVSP

SEQ ID NO: 45222 - protein, 366 aa, unidentified
MKKTSTVQALKNEIFKGRKLTIGLDLGDRWSFYCVMDEAGQIILEQTLPTTPEAMKQTFGKIPRCLMALETGTHSPWVSRLLSELGQEVIVAHAQKVQWITKSSRKDDRHDARTLARLARVDPELLGPVRHRSAQAQLHLTVIRARAELVSARTALVNAARGLVKSYGQRLPKCGTYQVSEKLAEGLSAELREVLVPLFKEIESLNEHIKEYDERMEKLAKEMYPEVALLQQVKGVGTQIALTYVLTIEDPHRFAKSREVGCFLGLRPGRRNSGQSEPQKGISKEGDRYLRTMLVQGAHYILGPFGEDSDLRRWGHKLAERGGKNAKKRAVVAVARKLAVLLHRLWVGGEVYEPLRNSQKAMREVA

SEQ ID NO: 45223 - protein, 305 aa, unidentified
MEVVIGIDPHKASHHAFAVDEREVELAQLSIRATRTQTQRLLAWAKPFERRTWAIEGADGLGYLLSQQLVAAGERVVNVPATLAARTRVLGSTKSNKTDPNDARSVALTALRHDDLREVQAVGHSEVLRLLAKRNIDIGDRRTQVVCRMHALLVEFAPGGIAKEINASDVDGFLARLSPTSPVEQIRFDLAVELLAEIRSLDAQLKVSHKRIEVAVRASGTTVTDLFGVGPIIAAMLIGFTGDVRRFANRDHYAAYNGTAPVEFSSGGRTVHRLSQRGNRNLNHALHMAAICQLRQPHSEGPSLS

SEQ ID NO: 45224 - protein, 407 aa, unidentified
MEILHQRCCGLDVHKKSVVACLLTPGSRGEPGKETRTFSTMTADLLAMAQWLEGEGCTHVAMESTGSYWKPIYNLLEDRFELLLVNARHLKAVPGRKTDVKDAEWIAQLLRHGLVRGSFVPNRRERELRELLRYRTSLIRERSSEVNRVQKVLEGANIKLASVAANVVGVSGRAMLEAMIVGVDDPAALASLAMGRMRSKKTTLESALEGRMSAHQRFILAEQLRHIDDLDATIARLSAEIEERQRPFVEAAGRLMTIPGIGLRTAQLILAEIGPDMSAFPSAGHLASWAGLCPGQDESAGKRRSGRTRKGNPWLRSALVEAAQTAGRTKTYLAEQYHRIAGRRGKRRAAIAVAHSIIVIIYHLLAKGSTYEDLGYRYFDERDQQRTTRRLVQRLSALGYTVTPRPA

SEQ ID NO: 45225 - protein, 427 aa, unidentified
MNEPKYKPTLCVGADVHLDEIVLCAVDKANGHQVTDRFRVTNNLPGAQAAATTIAQLATDLGYTRIEIGWEATGMLWIPFHSHLSTEPLLHPFELELICFNPKLVAKFKDGLVLRSPKNDERDAFDVAARLRFGELPVSYVPSDFWQGLRRLTRYRYRLSKALSQEKMRFQSYAFLKASDWKRVKPFSNVLGATSAALLTEFTVAELQDMTHDQLVDLITRRGRGRFTDPTATARDVRQTLRTSYPIDPRMDEMVTATLAAGWDHIRYLKRLMKRLDQHIARYIDLIPNPIITVKGLGAVITAGILAEIVDVLRFPEEKFLAQYMGLTWRKSSSGGFVSQNTRLTKVGNVYLRYYFILGADQLRKHNLEYKAYYWRKYQEVSKYQHKRALVLTARKLVRLVHALLTKNVPYVRPRTTDPGQEDNGLQ

SEQ ID NO: 45226 - protein, 359 aa, unidentified
MDKKVVLNQSLGVDIAKDSFSYCFCFLNADLSKDFEFGEDLQNNKQGFNTLLRKIKKSGMSKEDLTIVMEATGVYHEAIAYYLHDKGYKVCIMQSGRVKKYAQSLDQRSKTDALDSKMLSMLGCERKLTAWEPPSATMEELRFLSRERATIIKERSIEKNRNHAMTAGRFEHKKAIRRFDKRMKLLNIQIEEIEKELHELVSKNVVLKQKLAYLMSIPGVSFVSSITVIAETFGFSLISNSKQLVSYCGYDVVLRESGNYQGKTRISKKGNKHIRAILHMPSMTAVRVNPTLKPFYERLKPKKAKPIVALVAVQRKMLILMYSLWKSNSYYDGKFEIKKAARKQILTAQDSHKNELVTS

SEQ ID NO: 45227 - protein, 355 aa, unidentified
MTDKHQKIIIGIDTHKDFHHAAVISALGESLTDRKFDATPDGYTALIAWVTGQGDVLRAGVEGTGSYGAGLTTRLREAGITVIDVLAPDKQERRLRGKTDQIDAYSAARAVLARRATTVPKIRDGEVEAMRILRTTRRMAVKQRTETMNQLHSLLVSAPEQLRAKLAGFKAKDLAKACARLRELAADDVVTAATKDAARSLGRRHVELTVEADRLEERIRTLVTGYAPELLAVYGVGPDVAATLLTVAGENVDRIGTESALAHLAGTAPIPASSGKTNRHRLNRGGNRQGNAAFHRIVLVRMVRHPETRAYVEKTLARGKTKRDTMRLLKRYLAREIFPILIAIQQRHTATQIAA

SEQ ID NO: 45228 - protein, 290 aa, unidentified
MGDDVLISVDPHKASNTLAVMDPVTKTVIARQRFMNTAVGYRRLREFAGGWTHRRWAVEGCHGAGRSLAQRLAGDGEIVLDVPAKLAARVRVYSQGHGRKSDADDAISIGLAALNSTRVSVVRRAETLVSLRLLCDRRDELGGLRTQAVCRLHRLLCELTPGGTHRGLRASRAEQLLAKLRPVDPVDVVRCQLAHQHLDDIRALDAKMTAVRAQIAALVDGTGTRLTELYGIGPVIAGRILAEVETIDRFPSKDHFASYNGTAPIDASSGEQVRHRLSRAGTGDSTTRCT

SEQ ID NO: 45229 - protein, 352 aa, unidentified
MSQTSKIAIVGIDIGKNSFHVVGHDERGAIVLRQKWSRGQVEARFANLPPCLVGMEACVGAHHLSRKLNSLGHDARLMPAKYVRPYSKGQKNDFRDAEAIAEAVQRPTMKFVATKTADQLDLQALHRVRERLVSQRTGIINQIRAFLLERGIAVRQGLRFLRAELPHILTTPPDVLSPRMVRIIEDLAGDWRRLDERVEGLSNEIEAIARQDAGCERLMSVPGIGPIISSAMVAAIGAGDVFTKGRDFAAWLGLVPKQISTGDRTILGKISKRGNRYLRVLFVQAAWVVLIKPKIWERHGLKSWIEAARKRLHRNVLAIALANKLARIAWSVLAHGRSFEASKLAAAVIQPA

SEQ ID NO: 45230 - protein, 351 aa, unidentified
MAKKIWAGLDVGVETTSVCIIDDQGEVLHEAVCPTVLKSVHAEIRPLRRRRFARVALEAGTGVNLARGLRTLGYSVDIYESRQLSKFLRVRCNKTDAGDASGIAEAGRVGASAVSKVYLKNLDCQALQSRLAIRRHLIRERVAAVNLLCRQLEVYGGRVQGSSRARRLRETVEAELKQLFGKESSPLVAELRLLVDRCEEMVFHQRALDDELERLALDNEVCRRFMAIPGIGPICALTFYAAVGEPGRFARSANIGAYFGLAPTIHQSGLTNRRGRISRMGSAAMRSLLVQAGMTFMRLSSADSDLRAWASGIEAGRGAARARVALARKLAIIMLSMWKTGETYRPRRATA

SEQ ID NO: 45231 - protein, 334 aa, unidentified
MEKVTTVGIDLAKRVFALHGVDSTGRVVLRRTVRREQLMEAVAALSPCLIGMETGGGAHDWARRFQQLGHTVRLMAAKFVSPYRRNGKNDGNDAEAICEAVSRPGMRFVPVKSAEQQAILTLHRVRQGFIVERTATINRIRGLLIEFGVALPLRSIVVRRQAREAAEVLPTLARRAIDDLCAHLRDLDARIAAYDRELDQQARCSEAAQRLMKIRGVGPMSALAIVATVGNARDFRSGRQFAAWLGLTPHQHSSGGKARLGTITKRGDAYLRTLLILGARSVIHTAARHTDRMSRWVANIESRRGYQRTLVAIANKNARIAWALLSKNEELRLA

SEQ ID NO: 45232 - protein, 411 aa, unidentified
MSVFCGIDWAEQHHDVALVDPNGTLIAKARITDDAAGYQQLLGLLAEHGDTESEPIPVAIETSRGLLVAILRTGKRQVFAINPLAASRYRDRHGVSRKKSDPGDALVLANILRTDMHAHRPLPADSELAQSIAVLARAQQDAVWHRQQAANQLRSLLREFYPTALNAFITGRKGGLAHPEARAILAIAPTPTAAAKLTKPQIRAALKRGGRQRYTEAETKRLQEAFRAEHAHQPPLVEEAMGKQMLVLLQQLDAAAQGADSLAEAVESSFREHPDAQLITSFPGLGCLLGARILAEIGDDRDRFADARALKAYAGSAPVTRASGKKRYVGRRFVKNNRLTHAGYLWSFAAITVSPGANAHYRRRRDRGDWHAAAQRNLFNRMLGMLHHCLQHQIPYDEHRAFAPLLEATPA

SEQ ID NO: 45233 - protein, 344 aa, unidentified
MKHYAGLDVSVKETSVCIIDEAGKAIREVKVATEPAAILAVLVDDAFTIERIGLEAGPLSQWLYSGLAETGLPVICVETRHMKAALSAQLNKSDRNDARGIAHMMRVGLYRPVHVKTLASQKRRMLLTSRQLLQAKAIDIENDLRGTLRNFGLKVGIVGTAKFEARIRELVADEADLAAITEPLLIARRVLREQLGILHRRLLAVVREDEVCRRLMTVPGVGPVVALTFRATVDVPARFKNSKAVGAVFGLTPRRHQSGEIDRMGGISRCGDAMMRTMLFGAAQVMLTRTIRWSWLKAWGMKIARHRGMKRAIVAVARRMAVIMHRMWADGTEFRWTNFNAAAA

SEQ ID NO: 45234 - protein, 418 aa, unidentified
MRGCVMLKIVYPICCGMDIHKSFLVACIATTNSQGVTSYTSKRFSTFTGDLRRCAEWLSAHNCKDVCMESTGKYWIPIYNILEQTCNIVLAHPKYVKAIRGKKTDKKDAQWIADIFKHDLVSGSFIPPADIRQLRDMVRYRYKLTNFIVGEKNRAQNCLTVSNIKLDDVFSDVFGKAASAITTHLLENPTEKITDVSGFRTRGMKSTDEEILAAVDGELCVEQAEKLRIIRSHMDSLELCKANLESLILSLAENYLPQLELVMSVPGIQSYAAIGIISEIGVDMSVFPSSKHLCSWAGLTPQNNESAGKKKTTRIGKAGAYIKPLLVQCALCAIRKKSNPEIRKRYENLKKRRGHKKAIIAIARMLLTAIYNILKKNEPYNPELYAQINTPPRQRTVSVEEAIFILQRQGYLVAPSVT

SEQ ID NO: 45235 - protein, 400 aa, unidentified
MAVVIGIDPHKGSHTAVAVGAAEEPLGKLRVRACPDQAGKLVAWAQAWPERTRAVEGARGLGRLLAQQLVAAGERVLDVQPKLAARVRLLEAGDTNKTDPNDARSVAVAALRSKSRQEVTADGHAVVLKVWAKRHRDLSRTRNQVVCRLHAVLCELIPGGVPDEITAGQAARILEQVAPAGAVAQARCELAAELLADIRHLDAQRREVKKKLAAAVTASGTSLTEVSGVGPVIAATVIGDVITVARFPSRDHFAACNGTAPVEVSSGPRKIYRLSLRGNRRLNHAVHMAAINWIRHKHSDGRAYYQRKLAEGKTHKEALRCLKRRISDAIYARLRADARKAGPGGQPGNDTGSSVTGSHPGHRLFGQATSGPEPSLRAPATFTQATPAPEPSAKKIQRAT

SEQ ID NO: 45236 - protein, 343 aa, unidentified
MEYYAGIDVSLKESSVCIVDAKGKIVREVKVASEPEALVRYFNDLELPVCRIGLEAGPLSHWLHAGLVAAGRDVVLLETRHVKAALSAMTVKTDRKDARGIAQLLRMGWYRPVHAKSVASQDTRAVLVGRKLLQSKLLDVELSIRGILRGYGLKVGEVSRGRFEARIEELIVGHATLKTVIGAMLAARGTLWGEFTRLHREMLKIARADKICHRLMSTPGVGALVALTYRSAIDDPTRFGKSSTVGAYFGLTPKKYQSGETDRDGGVSKVGDAMVRTALFEAAHIMLTRATRFSSLKRWALEVAKRRGMKRAKVALARKLGVVLHRMWMDATDFRWGATAMAA

SEQ ID NO: 45237 - protein, 359 aa, unidentified
MQTQRTELNFEGQSVFVGLDVHLKSWNVSIFTETLHHKTFSQPPRAEILLEYLKRNFPNANYLSTYEAGFCGLWVHYKLKELGIENIVVNPADVPTTQKEKMRKSDAIDSNKLGRSLRNNELGNIYIPRQETLEDRSLIRVRSTLVKDMVRIKQRIKAMLYFYGIEYPVEFQNSSTHWSKRFINWLKSIELQYPAGTAALGLLINEAELQRTLLLNATRQIKALSVSEVYAKNMEYITSAPGVGLITGMLFLTEIEDVSRFENCDKLAGLVGIVPNCSSSGETENVGDITPRGHSFLRKGLIESAWIAVRIDPALSLAYHNYCKRMEPNKAIIRIARKLLNRIYFVLKNKKVYEKGIVK

SEQ ID NO: 45238 - protein, 341 aa, unidentified
MKNLFIGVDFSKEKVDVAIIFADGLTETAARVFNEFKTTVSGYKQLVKWVEQNSYGIDSSLWLFCGENTGDYSKGLCNFLYGKGYDMWLENAKSIKDASGLRRLKSDRADASMIAEYAMRNYDKAIMYEPLSESLAQLRELFLYRQMVIRHRCSFQVRRGEKKLTMEKSPVKTMISQSGRHIVSELNKEVEKIDKRIAELIKSDEELTEIFTIVTSVPGIGTQNAVCLMVYTDNFSRFNYDSRKIACYYGIAPFGKDSGTSVHSDPRVHYMANRQIKSMLTQAALAAVNFNPVIARYYMRLVERGKKKQVALNNVKNKLVHLVTAMVRNRQLYTPEYKISA

SEQ ID NO: 45239 - protein, 324 aa, unidentified
MTPAPPPSADSVAGIDVGKYGLDVFVDPSQLERRFANTPDGRRTLCDWLRELGARRVAVEPTGRYHRELHQCLCDDGVKVVLANPQRMRNFARSLGEQAKSDRIDAAMLARYARLDGIEGTAPKPEAQRALADLLALRRKLVEQRDGLRKHAAETGDAAASLLADLLEAFDAKVQTADDAIEAGIQADPAMRRRSEIIRSVPGCGPLTAASLCAELPELGSATPAEAAALAGLAPYVCDSGRHHGRRRIRGGRQHPRKLLYMAATSAIRWNPALRTVYTRLTARGKPHKVALVAVMRKLLVLLGALLRDDRLWLPAGPPARLPA

SEQ ID NO: 45240 - protein, 339 aa, unidentified
MKRFLFIGIDFSKSKFDVSVIENADQKSCLQATFENEEKGFGEFLKWTGRQSKIKREDWRFCGEHTGLYSRGLSNFLAKKGLFIWLENPLQIKQCSGIKRSKNDLFDSLIIAQYACRYIDKAMAYKPAEKEIETLQLLVGYRSRLVKSKVSLEVSANEMRRVIKRDATARFIYESSMRDIERIKKQINGIEQKMHDTIMNSSLKENYLLINSIKGVGMQTAIMIIIHTNNFAGFENARQIASYCGCAPFPNQSGTVDKGNHISRLANKELKVLLSQCAISAIQHNKEIAAYAQRKRAEGKSKRVIINNVRNKLIQRIFAVVTSKIPYREDYLNPFAQCA

SEQ ID NO: 45241 - protein, 411 aa, unidentified
MLVPPKVHVSVDIGCHRHSVAIGLSSGELLEEFDIAHRPEGFTDFFNRIERHHRRFRGGVVVGMEGYNGHARPLDTLIGERGWQLLNVNNLKLARFKEVFPAAAKTDRLDARRALELMQLGEYLPQARRALQEVHAPTPENAMLKRLTRRRRALVEEKSRLLARMQGDLRAVCPGLLEITGDAENLWFLRLLTHVDELPKLARLREKTLLSIPGIGAKYAARIRQWQPHAHFSHEAPYAGPMILEDARRILQLRDSINALEAHCAPLLAASEIARLIDTLPGFALVCSSELAGEIGTLDRFAGEASLAVYLGMANLDNSSGTRQGARAPGQVNKRAKAAMMTGVDRHRKQVPESQRYYEKKRAEGKTHNQAIRALGRHLCRVLYRMLKHGEAYRIRESDAPAADAGQPLAA

SEQ ID NO: 45242 - protein, 354 aa, unidentified
MANSTRIELQAFSSIGIDIGKDVFHLVGFDSSGKVVLRRKIKRLALVSTFENLSPCIVGMEACLSAHFVSRTLRKPGFEPRIIPAKYSKPFVKGQKNDYNDAEAIAEAALRPNLNLVAEKTQAQLDLQALHRVRSRLVSRRTATINQIRAFLIEQGITVRSGAHALRNSLFAILKNREDEISPRMGDIIISLYHDWLWLDERIESTTNDIEAISQCEGNCQRLMSVPGIGPVISTAVVAAIGAGEAFERGRDFGAWLGLVPRQYSTGGRPILGRISKRGSKYLRTLFVQAAQIILMRPHNWEKFSFGPWLKEASKRMHKNKLAAALANKLARIAWSILRHGKDFDTHRIEVTAI

SEQ ID NO: 45243 - protein, 351 aa, unidentified
MEKHSVGIDVSKDYLDCCLGSTDSEQNHIIGKNKRFTNNESGFEELLKWVGSLNITNEIFFVMEATGVYYENLIYFLNDNDCKACVLLPNMVKYYAKSINVKTKTDGKDSEVLCSLGLERKLRLWHVPSSIIRDLKFLCREYREIKYKLTQAKNQLHARSHSYRCPENIEKRLKIQIELLNEQSLEIESEIRLLVQADSMFNERIKKIITIPGVSFMTVVCIVAETNAFSLITNSKQLVSYTGLDIQQNQSGQKQGKSKISKKGNSFIRQSLYMPALCASRYNPPMKEFYDKLKDRKPAKKIAVTAVARKLLILIYQLWKNNEEFDSNYEQNKKQTGLRLSEQDEHIILLK

SEQ ID NO: 45244 - protein, 312 aa, unidentified
MNEIICGVDVSKDWLDAHVEPGGAAQRFRNDAAGIAALGAFCRAEGAGLVVMEASGGYERLAFLLLWQAGQPCGLVNARNVRRFAEAMGALEKTDRIDAAMIARFGQARRAAPTPPPSPAQQHLRALVTRLSQVTDDLVANRQRKGAAADPEAVESLEEVIALLLAQRRHLEGEIASLIDDDPLWACLDRAFRQIKGVAERSVARLLAEVPEIGSFSNRAVSKLVGLAPLADDSGQRSGRRSIRGGRAGPRSILFIVARIVAQHDPHFAAFQHRLQTAGKAKMVIRIALARKLLVTLNAKTRDARTEFANAT

SEQ ID NO: 45245 - protein, 445 aa, unidentified
MKKEISMQIIHSHAAGIDVGSRSHFVAVGQNSGDVSEFGVYTEDHQELIKWLSGYGITTIAMESTGSYWQTLFSALQQAGFEVLLVNGRQIKNVKGKTDVKDCQWIQRLHSLGLLTGSFLPTDQVEQLRTYQRHRSWLVEQSAKMTNKMQKALRLMNLRLDVVLSDIMGKSGQSIIRAILQGSRSGEELSLLADGRVRKSKQEIAKALEGHWREEFLFELRDCYELYQIYESRIAGCDLRMESLLSEFTKYLSTQQGQNEAIRSKRKRGFKNQPKFDISSLSFDLLGVDLFAIDGVSHNTVMTFISEVGTDIYKFPTAKQFASWMRLAPNNKISGGKMISSRTPKGKNRLALALRNAANSIGSMKKGALKNFFGRIAYKKGRAAAITATARKLAVIIWNMIIKKQPFQNPDETFYIEKVKASVIFNIKAKMKRLNLSAFDLNLTC

SEQ ID NO: 45246 - protein, 339 aa, unidentified
MTVKTIGLDLAKEVFQVHGISENGRVIFNKAIKRAKLLAFFEALPPCTVGMEACGSSHHWGRTLRLLGHDVRLMPANYVKPYVKRGKTDAADAEAICEAVRRPTMRFVEIKTEEQQAILSIHRTRDLAVRQRTQMANMIRSLLREFGHILPIGIEAVTAFAKRHLDGDQPDMPDIANGMLGMQCYQFIGLSERIAGYSKMIEQHALLSTDARRLMRMPGIGPITASAIIATIGDAKQFRTGRDLAAWLGLTPLNKSSGGKERLGKITKKGDRYIRKLLVVGMTSRAVMARRSPEKVDLWTAKIIANKPFRLATTAMANKAARTIWAMLTKKQEYRQPAF

SEQ ID NO: 45247 - protein, 352 aa, unidentified
MSKITTIGLDLAKKVFHVHGVDVAGNVVVARRLKRKEVLAFFAKLPPCLVGVEACGSAHHWGREIAKLGHTVRLMPPRYVKPYVKRGKTDPIDAAAICEAVTRPTMSFVPIKGVEQQGLSMLHSARSLLIGQRTQLINAARGHLSELGIVAARGLLGFAELAAIVRDERDQRLPATARAALMVLVRQIEAISAEIASLDSILMKENKASELGSRLDTIPSVGPVIASAFRARVTDAKLFENGRHLSAWIGLVPENDSTGGRLKQKGLSKKGDRYLRSLLVNGAMAVVRQAQKRPDKHPWVTKLLGRMSAKQAAIAIANKTARIAWAIMVHGGVYETGHRAPPYRAQACAAAG

SEQ ID NO: 45248 - protein, 459 aa, unidentified
MSRARKNPTPTTQSVAQVDVLTIINANAAGIDIGLAESWVSVPADRDPQPLRKFGMNTPDLIAIADWLKACGVTTVAMESTGVYWIPLYEILEARGFKVYLVNARHAKNLPGRKKDETDAQWLRRLHAFGLLNNSFRPDGEMCAVRAYLRHRAALIEHRAAHIQHMQKALQQMNVRLSPTVTDITGVTGMAIIRAILAGERDPHVLAEWRQPGCAQPEAEFVKALTGNYRDEHVFALKQAVALYDCYTEQIRECDQEVERRFSALKPVHDDDDLPPLDTTDKRNTHSKNAPAYDGRRLLYQLLGIDLVAVHGLNEVTAQVILSEIGTDMSRWADEKHFCSWLGLAPHNDISGGKVLRSRTLKTHNRAGQAFRLAAQAVSRTETAYGAFFRRMRAMHGPKKAIVATAHKIARAVYFMLRDHKPFDAQSADAYLKRDREHEIARLQKKATKLGYTLAPVLA

SEQ ID NO: 45249 - protein, 429 aa, unidentified
MEEVDEVELVVQRVAALDLGKATLEACMRVPHPSKPGRRMQEIRGYATTTATLLEMAIWLRQWGIERVVMESTSDYWKGVYYLLEAEGFDCWLVNAREVKNVPGRAKTDRADAVWLAKVAERGMCRPSLVHPPPIRRLRDLTRYRRALVADRSREMQRVEKLLEDAQIKISSVLSDIHGVSGRAMMEALIAGQRDPRSLARLAKGLARKKTDRLEEALRGFFTDHHATILQMMLDNIDRIGAQIAALDARIAEAIGPFSRQAARLADIPGVNTVAAAELIAEIGVDMTRFPSAAHLVSWAKFCPQIHQSAGKSRSKARGKGNPWLAGTVGRIVFSASHTDTFLGARYRRLARRRGKPKAIVAVGNSVLTVVYHLLSDADLDFCELGPAHYESRINKHRRARDLATQLQALTGQHIVIRDGKAIITDNAA

SEQ ID NO: 45250 - protein, 352 aa, unidentified
MKKIFIGIDFAKEKFDAAIIEACGLKEFGDRQHGTFPNDKKGYRQFIKWVKSTSGNAVEEEWLFCGEDTGSCSIGLSKWLYGKGLDIWIENAYSIRHSSGIQRVKTDKADASMIAEYAWRHQDKAMLYEPLSESLAQLREVFLYRHKLVQQRVAIEVRQKDKEASQDGSKALSFIKRKSKRLMDEIDKVIKECDDMIDQIIAEDPELAENYAIVTSIKGVARQNGACLLIYTNNFKRFDMDARKIACYYGVAPFGKESGSSVHSPAHTSHFANKLIKALLGQAAQIARIYNPEIKEYYERLRTKGKKHSVAINNVKNKLLRIIVALVKKRTFYDPESYKFYRDRLNAQFVPS

SEQ ID NO: 45251 - protein, 320 aa, unidentified
MMAQNDHIVVGIDVAKDKVDACIRSLSQRHTFPNTAQGYRKMIAWLHKHKVNKAVMEASGGYERDWARVLRLAGIEVRIVDPKRVRSFALSAGRLAKNDTIDAEMIAWFAGTFSAAPGQPHDAAREELRALVKARKHLLDLQTRLKSQNEHDAPEAVQKAHARILKSLATEIARLEAAISAKVKGTPDFAERAEIIESVPGFAETTSASLIAGMPELGQVSDEIAAALIGLAPYDDDSGKRRGERHIKGGRRWVRNAIYMPCLGAATLNNPVLKAFYRRLVAKGKEPKVALVACMRKLIVILNTLIARRQKWDPSRYALS

SEQ ID NO: 45252 - protein, 346 aa, unidentified
MESMYYIGLDVHKKTISYCVKDAAGHVHRAGKIGSTRCELDAWLKTLPQPRMMAMEATIFTGWIYDHLLPHAEKVKVAHPLMLRAIAAAKKKNDRIDARKIADLLRCDLLPECHMASTEIRDRRRTLRYRGLVLRQTVQMKNRVSGLLMESGVSYDKQRLHKMGYFSELFSTNEEISDSIRPLLRLGREHILRGQRLDRALTSSLERDPLLSERLRRLRTIPGVGPITALTWALEIGDYTRFPSVKEAISYCGLCSAEKSSADKVMRMPISKQRNKHIQHVLVEAAKMAPRYSHELALVRDKEMQRGNRNRATLAVARKLVAYMLAVDRRKQDFVPAEALAAKAVA

SEQ ID NO: 45253 - protein, 410 aa, unidentified
MQVVFTHCAGLDVHKKTVVVTVLLTASNGVVTKETRTFSTMTAELLRLEAWLTDLQVDHLALESTGVYWYPIYNLLEEGHTVLLVNPQHIKAVPGRKTDVRDSEWLADLLRHGHLSPSFIPPKPIRELREMTRYRKQLVYERTQYANRLQKVLESANIKLGAVASDILGVSGRAMLDALIAGEQDAAQMAEDARGRMRQRIPDLRQALEGRVSPHHRFLLRQILNHIDGVDRELLEVEQQISVYLQPYEEASRLLQTIPGIGAPAAAALLSEIGVDMGRFPSAKHLASWAGVCPGNNQSGGKRLSAGTTGGNRWIRAILGEVVWVISRTKGTYLAAQFQRLMRRRGKYKAVMAVAHTLLVIIYHLLRDHVPYADLGPEYFDRLDQARVQRHHVRRLEQLGYTVTLSPAVT

SEQ ID NO: 45254 - protein, 408 aa, unidentified
MELFVGVDWAEEHHDVCVMDSDGRVRAKGRVSNDLAGIAKIHDLIGGALPDGIDDEVVVAVGIETDRGLLVRALVAAEYRVLAVNPLAVDRYRDRHRVSGAKSDPGDARVLADMVRTDAHQHRPVAVDSDLAEAIKLVARSHQSAIWSRRRLANQVRSALREYYPAAVAAFDDLTSGDAVEVLAIAATPEQGRSLSRSKIASALRRGGRQLNIDTRAVKIQTALRSDQLAQPATVTDAYGAIVASLTQVIAAHNRQIAELESVLDEHFGRHPDAAILLSLPGLGVVTGARVLGEFGDDPNRYADAKARRNYAGTSPLTVASGTRRIVRARHIRNRRLADALHWWAFNAITRSPGARALYDRRRAAGDTHSGALRVVANRLVAILHGCLRTRTLYDENTAWAHRHDIAA

SEQ ID NO: 45255 - protein, 424 aa, unidentified
MKVTYQTCCGVDVHKSFLVATIVKTNGGIEPSYQKKRFSTFNNSILEFKQWLLDNDCHDVCMESTGKYWVPAFNLLEDEINVVIANPKWVKAVKGNKDDTKDSKWIGDLFRLGLVKGSYIPCKKVRILREYTRYRYKLVSCRSSEKNRYQNALTVCNVALDSVVSDIFGKSSSSIIDYLLEQSGTSINHEEIASKLLRSLKSKEDAVIESIEGYQMTDAQKYRMRLVRAHMDYITAEINDVDKMIEKMISSNPDFENAVQFLCTIPGVKRDSAITIISEIGTDMSQFSSSKRLCCWAGLTPGSNESAGKKKSVRITRAGVYLKPALVQCAHAAVKSDKSPYYKKKYESLVKRRGKKRAIIAIARMILTAIYQMLSTGEQWNPSDLYKIDMPVALVEKQKAKAIRQAKKLLQREGTLPPDKPLAS

SEQ ID NO: 45256 - protein, 424 aa, unidentified
MKRECSTGNEFSIYVGLDWGTEFHRACVLDVSGKVVSECRVDHNGYAITELLRSITDIANGKPDRVAVAIEVPRGPVVEAFLEGGCAVFSINPKQLDRFRDRYTVAGAKDDSRDAYVAADSLRTDQHCFRRVAAHHPDIVRLRELSRTEESVSGDFRRVVNQLYQTLLRYYPQLLQLKSTPDEPWLWALLEAAPVPQRSARLTVARLRQLLSKHRIHRWTAEKVRQVLGTQPLPLAAGSADAISEHALLLLPQLRLLHKQRQEIRDRIEALLNHMTALGRDHPEFREHRDVGILLSLPGVGCLIAANLFTEGADPLAQRDYAALRAHSGIAPVTRQSGKSRQVIMRRGCSERLRNAMYHWARCSVQHDPLSKAHYARLRQAGHNHGRALRGVADRLLAILIAMLKSAQPYDANRRHHAVRPEAA

SEQ ID NO: 45257 - protein, 322 aa, unidentified
MVTLGIDISKRDFHAALLIGDQTRKKSFPNNAKGFEQLAAWLRNRKVDNVVACMEATGSYWYALAKFLFNGGHSVAVVNPRRIKSFAESELLRIKTDAVDAALIARFASTQQLQLWKPLAPEIEELQGLYRHLEFLKGSHTQHVTRAQTPDLPERVRQSAQTIISQLDIQIDELERAIRDHIDQHPGLKGKHDLLTSIPGIGDTSATAILSEMPAIEEFRNAQAVAAYAGLSPLIRQSGTSVRGKRRLCKTGNARLRKALYFPAIVGERYNPILQAFGRRLRAAGKVPMVVVGAVMRKLLVIAYGVLKSGKPFDPAFLGSRA

SEQ ID NO: 45258 - protein, 352 aa, unidentified
MIIIGVDFHPEFQQIAAVDTDSGEFQEKRLVHREEAEKFYRALTSQEVRVGMEASGHARWFERLVSELRFELNIGDAAAIRSKRVRKQKTDRQDARLILQLLMEDRFPRIWVPSWENRDLRQLLWHRHRMVQARTRIMNQLQAVALNEGLRCKKRLWRDAGREQLESFRLAPWASRRRRDLLELLDRLTPTIAELTEAIEGEVEKCPEARRLQTHPGVGALTALAFVLIIGKAERFQCGKQIASYLGLVPLEESSGNRRRLGHITKQGNSLLRFLLVEAAQVTVRSDQEWRNQYFHLALRRGRKIAKVAMARRLAVRMYWMWRKGWDYEQVRKFGSHAGQPGNRDGVQSNAE

SEQ ID NO: 45259 - protein, 391 aa, unidentified
MFYVGIDIAKNNHEASIIDSNGKLVTSSFSFSNSVKGLEKFKRIISSFLLSSNNCIIGMEATGHYWVSLYSFLVDLGFTCIAINPIQSDAFRKMYIRKTKNDSVDSFIIAQILRFGEFSVSNFSDEDTFALRNLSRYRFALVDEVTDWKRKLVAILDQVFPEYSSLFSNIYGVTSKELLSKYPLPEDMLSISANELAELLSRCSKGRFGIDKAKEIQDKASNSFGIKFALKSFSFQIKQIINQISFLEDQISDIEEEISSMLNSLCPVITTITGIGDILGAVIFSEIGDISRFEKASQLVAYAGLDVAVKQSGNFNATDTKISKRGSPYLRRAIWLAANVAAFKDPALSLYYQKLRQRGKAHGTAIGAVARKLTNIIFAVLRDNKAYVPNI

SEQ ID NO: 45260 - protein, 446 aa, unidentified
MNVKGTKKKNQAVTANIFEQQELLKKAEVIRESLTASTWHELETNGKFDKNKKLSFISDDMLILGCDVGSEIHYMRAIDTRGRELSKSAFPFNNDSEGFQSAKEWAVKIAAEQNKSQIVLGLEPTGHYWFCLATWMISNGISVVQVNPYAVKQTKEVEDNSQLKDDTKDPKLIANLVKDGNFGMPYLPEKLYAELRRLSMFRDQLNEDRIRTVNRMHREMKIYFPEYKEALGKVDGAFSLELLKQAPFPDDLVTLGEDGIRQIWHDAKLRGRGYSRAREILQYAKASVGIKDGAVAGRSAVKWFVQKILELDAELAVVEEQINQKCQEIPHASNILEISGIGENTLSGILAEMGDISRFDDVKEIQKLGGLGLVACSSGKHKGETKISHRGRKRLRYWLFQAAKSAVAHAEEFKELHIYYTTRADNPLKKMQSLIVIACRLLRIIY

SEQ ID NO: 45261 - protein, 350 aa, unidentified
MLIIGCDYHPAFQQIAFVDTATGDCGERRLEHREEAEKFYRELAARGMKVRVGMEASGQGRWFERLLAELNFELWIGDATVIHAKRVRKQKTDRQDAQLILGLLLEDRFPQIWVPSWENRDLRQLLWHRHRMVQARTRIMNQLQAVAINEGLRCKKRLWGESGREQLEAFRLAPWASRRREDLLKLLDGLNPTIAELTQAIEQEVEKCPEAQRLRTHPGVGPLTALAFVLIIGRADRFQCGKQIASYLGLVPLEDSSGNRRRLGHITKQGSSMLRFLMVEAAQVTVRNLPEWRSQYLHLTIRRGRKIAKVAMARKLAVRLYWMMRKEWDFGKLTKFGSHAGQPGTGDGVK

SEQ ID NO: 45262 - protein, 343 aa, unidentified
MKLSRVGVDLAKNVYQLHGVDRCGKTVWKRRLRHRQWMQAVLDKTEPGCEIGMEACTGAHHWARELQSRGYTVRLIAPQFVKPYVKSNKNDANDAEAICEAMSRPHMRFVTVKGVEQQDIQATHRVRTTIKDHRNAKANQIRGLVAEYGLVAPQTLLALRRAIPEWLEDADNGLTDYFRSLLHGLWGDLLTLEERLKELDKAIEKLARSNEVAKRLQQLRGVGPIVATALVATVGDGGQYNKGRQMAAALGLTPRQNSSGDKHRLFGISKRGDVYLRTQMIHGARAVVSQAKHRDDPLSRWVTDIAKRRHPNVAAVALANKTARMAWAMLRNDTDYDPGLGTC

SEQ ID NO: 45263 - protein, 312 aa, unidentified
MVNVGIDVSKARLDVSVRPSSESFSVDNTEAGHRELRKRLAKLKPERIVLEPTGGYEARVVQALVDAKLPVVVVNARQVRDFARATGRLAKTDTIDAAVLARFGEAIRPEIRAFPDAATRELEALVNRRRQLVDMRSVEVKRKQTAPLLVHPKIDQLIVFLNEQIDDIDKNLQTLIRSSPVWREADELLQSVPGVGPVLSSTLTALVPELGKLNRKEIASLIGVAPFNNDSGRGERKRMTWGGRAPVRAVLYMATSAARQWNPTIRAMYDRLVEKGKPAQVALIACMRKLLTILNAIARDRHGWNLQLAVAK

SEQ ID NO: 45264 - protein, 353 aa, unidentified
MDSTKYIGMDVHKESISIAVRNDAGKVVMECVIETKANVILDFLHGLRGELQVTFEEGTWATWLYDLMKPHVEKLVVCNPRKNNRQGDKNDRIDARELSDLLYMNKLSSVYHGGAGVRTLRELARSYLTISKDLARVMSRVKAIYRSWGIPCSGKQVYGLRHRAEWLAKITEVGVLRRAEFYYQQLDALRPLRHQVRRELLAESKKHKATKLLCQIPSIGPIRAEMLIALIQTPHRFRTKRPLWKYSGFAIEMHSSADYRSVKGELQRSKKQVSVRGLNRDCNHDLKNLFKSAATIASVKPGPFQEFYAALLAKGMRPEMARLTLARKIATIVLIVWKRGVRFYAKYLKSQTA

SEQ ID NO: 45265 - protein, 408 aa, unidentified
MKLFVGIDISSLKLDVCFKDSEEQILHEATLPNDINGATEIKEIILKLNENINYQTIKVGMESTSVYSFHPATFLAENIELKKLDVKVIVQNPKVIARFKGLFEEDKTDTIDARRIADFLRLNLNGNTIIKEEKYVALQRLTRSRLQLVEQMTECKQHFLENLYYKCNTLTRDVETSIFGATMMDLLTDSLSFGEIAEMEIIDLAAILQEKGRGRFGDPNKLANAINKAIRDSYRLGKVLEDSVDVVLGTYAMMIKTLKQQIKGLDKAIEALLVIIPESQCLQSIPGIGPVFTAGILAEIGQVERFEDQAKLAKYAGLYWKKKQSGSRESERTSLTRTGNHYLRYYLVEAANSIKNREPVYKEYYYKKYDEVPKHKHKRALVLTARKLVRLVDVLLRNHQLYMPERSA

SEQ ID NO: 45266 - protein, 323 aa, unidentified
MTRTICGVDISSSSLAARIGRDGAAATFANTQPGIAELAQFCRSRQVDLVAMEATGGYEQRAFAQLSEHGLPVAVLNPRAVRQFAQSMGALEKTDAIDAGMIAWYAETKKSQALCLAPQTQLELRARVTRLRQLTDLRTAQLNQQRLVTNPAVQKGFREILLFLAQQIEELEQGIAALIDADPLWRAFNLAFRAIKGVADRTVARIMAEMPEIGTLSNKTISKLAGLAPLANDSGNRQGKRQVRGGRAAVRDILFLVGSVVARYEPDFTAFQQRLRKAGKPPKVVRIAVAHKLLVRLNAKAREVRQQMKATNPGPTVFATVVL

SEQ ID NO: 45267 - protein, 351 aa, unidentified
MNIIGCDLHTRFQQIAMLDTETGEIVERRLEHESGEMQRFYAALAAPARVGIEATGYARWFERLLAEQGHELWIGDAGAIRAARVRQQKTDARDALLLLDLLVAGRFPKIWVSSPAERDLWQLLRHRDKLVRLRTSVRNQLHALAMGEGLCRKKKLWSQRGRQELEALTLGEWASRRRQELLELLDRLSGSVQELDQTVTQQAETHPAAVRLMQQPGVGPITGLALALAVGPIERFRNSRKLVSYLGLNPRESSSGGKQRLGAISKQGNSLVRWLLVEAAQTASRKDEGLRRVYQRLVHRRGRAVAKVAIARKLAVRLYWQLRLAGAQPSPPTRTQGSSPSPVVGATRPMP

SEQ ID NO: 45268 - protein, 400 aa, unidentified
MNEFKPEASRIDTVAARLELPGQECYSAYVGLDVHKETIAVAVAEPGRQEPRSEGEIANRPKSLEKLVRRLSERFGGGVLQFVYEAGPCGYGLYHQLAGTGHICEVVAPSRIPKAPAERIKTDRRDALKLARLARSGDLTPVWVPGPEQEAMRDLTRARGDMKAQERKARQQLSAFVLRHGHAWPAGKKRWTQAHYTWLESLRFAHDWQQVVLQEYVNAVKAATQRVADLRAQMERALAQWSLAPVVEALVALRGIDTLAAMVLLAELGDISRFDSPRQLMAFLGLVPSEHSSGGRRRQGGITLTGNGHARRMLVESAWSYRFPARQTKHLKRKAAPASEAAKGIAWQAQKRLCGRYRDLIQAGKNSKLVCVAIARELAGFIWAIVREEMPKVRGAANAG

SEQ ID NO: 45269 - protein, 326 aa, unidentified
MTDSTSQSVTPVFVGIDVAKDKLDLARSDSAEILTLVNDPGGIARLVDSLRSTHPTLIVVEATGGLERALLDALLDADLPVALVNPGHVRHFAKGVGILAKTDSIDARVLVEFAKLTSPRLAEKRSANQSELDALVTCRRQLTRVRTEQSNRRQSTSSKSARKAIDAVLKALNKQIEDLDRQIKKLIESDDDFNSIDKLLQSVPGVGAVLSSTILAELNELGKTDRRHIGSLVGIAPFNRDSGRMKGKRSIRGGRSSVRAVLYMATIAAIRFNPVISRFAERLQKAGKLSKVTITACMRKLLTLLNAMVRDNLAWDQLNVVKNLDI

SEQ ID NO: 45270 - protein, 354 aa, unidentified
MRIIGCDLHARQQTISMLDTESGEVIEKTLAHEGETVREFYAALPKPVLVGLEATGSMFWFLRLLEELGIEYRVGHPAAIRKAETRKQKHDRRDAALIRRLLEEKRFPQIWLPTPEQRDLRTLLRHRQQLVRMRVMTQNGLQGLALSQGLRRGAKLWSQAGQRELNSVADGRLQPHAARAVAGTASGTEPALAATGSSSERAGRAASRGAAVVEPPGRGTDHGAGHGSLLGRRPAISQRQAVASYVGMIPSEHSSGGQQRNGSLSKQGNPLLRQLWVEAARAAARKDARLKQFYRRKLVQKGLGKAVRRMYKLLSNGLIGAPCGVPFPSSRLPVLRCLFPLARRSLPPQLPATS

SEQ ID NO: 45271 - protein, 341 aa, unidentified
MNEIKVLGIDLGKDVCSIVGIDEAGKVLLRRRMRRDSVLKLTARMPACVMAMEACCGAHHLGHMLRKQGHEVRLMSPEYVQPYVKAQKNDDRDAEAIAEAATRPTMRFVDLKSDEQLDIQSLHRARDRLVGKRTTLINQLRAFFLERGIVIAKGRRKLELRLEQLLAGEMTISRRIRALIEDMQAEWRALDARIDAFDAEFAELARTDASMKLLSTIPGIGPLNATAFVASIGKAETFGRGRDLAAWLGLVPRQMTTGGKPRLLGITKRGNGYLRRMLIHGARAALPALAKGKTPLGEWLRDLLSRAHTNKVVVALAAKMARIIWAVLSSGRPFEMSPSAG

SEQ ID NO: 45272 - protein, 330 aa, unidentified
MNYSHFVGLDVGKKSFDASLVSLDQELSHHTFPNTPEGIEELLHWIKQHGVEVETALFCAENTGSHVIDLCLSSYQYHFPLALECPLTIKKSIGLQRGKNDRIDARRIAQYASLHYRKLRLYELPDKDLVRLRNWLVIRDNLVKQKVSSLKLLELTRETSRLADLMVPMTFLENQICQIKEKISYVEEEMEKIITENITLSTNYQLLTSIKGIGPVNAIVLLCVTDNFQRFSDPRKFACYSGVAPFEYSSGTSIRGKTKTSHLANREVKVYLTRAAITAIAWDPQIKAYYKRKIAEGKHKASVINAVRAKIIARCFAVIKRKTPFVTLSA

SEQ ID NO: 45273 - protein, 418 aa, unidentified
MDIRPPFSYQATVGVDWADQKHDVFVRFTNGNSYRRKINSRPEAIQEWLLELRSACAEGKIAIALEQRRGALFYQLCTHLNWIDLYPINPHSLSSFRLTFFSSRAKDDPIDGQLLEELVRTHHDRLRPYQPEATTERKLYLYCRQRRSLLDIATKAELKLVSTLKQYFPVTVSLFAAIGMKSDIALDFLSRWPTLHHLRRAKVHTIRSFFYAHNSRSQSLIEKRLQQIAEAHEVTDDPALIEPLVLTAKCLVAQLRQFNEIINEFDRKIRELFKSHPDHFLFETLPGAGEKLAPRLLSVFGSDRSRWTDATDLQKYSGIAPVIERSGKSLWVHRRLSRPIFVCQTFHEFAQQSTRFSSWADQFYKRQREKGKSHHSAIRSLAFKWIRIIFACWKANKPYDESLYINALAKRNSSLSST

SEQ ID NO: 45274 - protein, 447 aa, unidentified
MSTSKPRAARGGRSKLEVMHPDAAGIDVGGSMHCVAVPNHAADETVRQFGCYTVELNALADWLAQCGVKIVAMESTGVYWIPLYELLERRGFEVMLVDARHVKGVHGRKSDVLDCQWLQQLLSYGLLRAAFRPHDQFCALRELNRIRSRTLRDQGRSVQHMQKAMTLMNIQLGQAISDVAGVTGQKIVRAIVAGERDPQELAAYRDRRIKASEEEIAASLEGTWRAEHLFALKQALATFDFCAGQLQDCEGEIEQVMQQLHKYSGEPTKGKRRGRAKNAPKFDVREHLFKMCGVDVTRVDGIDVSTALSIISETGTDLSRFASDKHFASWLCLCPGTRISGGKVLGSGTRHSVNRATQAFKQAAAALRTSQSALGAYFRRLCARMDKAKAVTAAAHKLARLFYALLTKGQEYVDQGQLYYEERYRQRVIYNLQRKASKLGMSLVPSA

SEQ ID NO: 45275 - protein, 451 aa, unidentified
MEPLLECCAGLDVHRDTVVATVRTPDGAGGRRVVTETFAVTTPTLLALRDWLQAQRVTHVALESTGVYWKPIYYVLEDAFTLILVNMQHLRHVPGRKSDVRDSEWLAQLLECGLLRGSFIPPSPIRDLRDLTRYRRAQLEDRTREVNRLHKLLIDAGLKLSSVLTDIMGMSGRAIVRALVEGTTDPALLADLARGKLRAKLPALRTALQGRFRSHHAFLASQILNKIAVIEDTIRDCTTEIDRLLVPFAAVLERLATIPGIQRRTAEIIVAETGADMTPFKTAGQLCSWAGICPGQDESAGKRRSGKTRRGNRYLRAALVEAGLAATRAKRTAIQARYARLKRKHGHKKAVVATGHHLLKIAFYLMRNWATASRSNRRLDREYFRSSYWDIPETYATLLHNRRPANTGPRTRCNPGQSAVPIHAIVVGSRDRRRHGDLRLSVTQQCRQEES

SEQ ID NO: 45276 - protein, 422 aa, unidentified
MMDKEPRLFVGIDWGSEEHVVSVCDDVGKKIGQRKFSHGGIGLTDMIAWLLKASGGKPGEIHVAIETPHGPIVEALLERGFNVYSINPKQLDRFRDRFTVAGAKDDSRDADVLADSLRTDTRAFRELSIAEPVIVELREWSRIDEELKVEHGRLANRLRHQLWRYYPQMLELADDIGANWFLDLFEAVPTPEKAASVREKTIARILKSHRIRRFDAAHVLSELRKPALTVAAGTIEATTARIRGLIERIRIINGQLADAQRQLDRLCKKLSEPVADEDGETAPGQKNEPRDATILDSLPGVARTVLATLLAEASDTVQRRDYHALRALCGSAPVTRRSGKSCMVVRRYACNQRLRNATYHWAQNAIQHDATSRAKYDALRAKGHGHARALRSVIDRLLKVACAMLSRGTLFDPEFASKRATG

SEQ ID NO: 45277 - protein, 355 aa, unidentified
MRILSLDLSKYKTVACDYEAETGRHQFATVLTTQKALHDLIVDREPDRVVIEICSIAGWVCDLVRSLGIEMQVASTNDERWQWRKVKRKNDRRDGLKLAQLSARNELDLVHVPQSEMRQWRALIAYRHHLVQRRTKIKNHIRELLLREGQLLPRHRSAWTQAGIEALEELAKPLGEVSMDELWRGELEVELAQFKAVQKQLTEVVAKLDALGAANHNVRLLQTASGVGPRLAEAVVTMFDDPRRFRRSGSVSAYIGMVPKQWDSGETERLGHITRHGNRLVRSLLVEVAWCALRHNPWARETYQRISGGKKSRKKIAIVAVGRKLLVRCWAMLRDQTAWHWEGQSAVVTPQAPTA

SEQ ID NO: 45278 - protein, 344 aa, unidentified
MKITTIGIDLAKNVFQVHGIDEHGKAVLKKQLRRDQMAAFFVNLPSCLIGMEACGSAHHWGRKLASMGHTVRLMAPQFVKPYVKTNKNDAADAEAICEAVGRPNMRFVPVKSVEQQAVLALHRVRQGFVRARTAQANQIRGLLGEFGLIVPQGIGYIATRVPELIEDGANELPGTFRLLIQRLLDHLKELDRQVEELESKIHAWHRSSDLSRKLAMVPGIGPITASALVASIGDAKNFDGGRQVAAWLGLVPRQHSSGGKSNLLGMSKRGDTYLRTLLIHGARSVIYRESQRADACSWISGVVNRRNKNVAAVALANKNARIAWALLAHDRQFDAGYVRSAAAA

SEQ ID NO: 45279 - protein, 427 aa, unidentified
MSEVRAIQPEPEFAAFIGIDWADQKHIWCLQTAGSEQRESGELEHTPEAVESWVAHLYQRFAQRPIAVALEQSRGALVFMLSKYEPFHLFPVPAQMSASMRQALYPSGAKDDPRDADLLLDLLLQHRNKLRRLSPDSEATRRVQNLVEERRKLVDEKTAQINRLTDHLKVYLPQMLEWFERLDSELVCALLERWPALEELQKASPASLRAFLRKHRCRDRERMEQRMEAIRRAIPAIRDRAVIEAKSAAVKVIVQLVRILVEGIEDLDGQIEEAAAAHPDFFIFNSLPGAGPVMAPRLLAAFGSQRERYHSAREIQSFSGIAPVTESSGKRKWVHFRWACPKFLRQTFHEWAGHSIVYSDWARAYYRQQRSKGNTHHAAVRALAFKWIRIVFRCWQDGVAYDENRYLAALGNRGSRLGAAVVIGKIL

SEQ ID NO: 45280 - protein, 347 aa, unidentified
MKQFIRIGVDLGKRYFQVHALLNEDGRAVTRKLRRDGFLAFFAEAAPCLIGMEACGSAHYWGRELRAMGHEVRLIPPIYVKPYVKRGKNDAVDAAAVCEAVSRPDMRFVPIKSAENQASLMLHKTRELLVKQRTMCVNALRGHLAEFGVVGAKGVGHAGELLEKAKNDATLPEIAKAAVKIFVQQLAAISAAIVALDKEIANVHAQSEISKLLAGVPGVGKIVATAIVASVPDPSVFKSARDFAAWLGLTPRQNSSGGKEKLGAITKQGNRYLRKLLTLGATSLLRVSGKRNGVLRDWFVALLARKPARLATVALANKLARIIWAMMTTGEAFRTQIMARATEPSMA

SEQ ID NO: 45281 - protein, 346 aa, unidentified
MSKRTVPCCAVLHCGIDVGKATLAVAVQPEGGHGFEQCEFANSSSGHKKLLAWLGKWKAPVRVSLEATGPYSLDVALALDAAEGIAVAVLNPHRFHRFAETLRRSKTDAADAVALAEYNRRMEFVAWVRPSESVLELRAISRHIATLTEDHARLKNRLHAARSSAATPRCVLDDLRRSMAGLQKRLVRLRREAMAAIGKDAGLQRKFEHLTGITGIGEVSAVQLLGELAGLDPEMTVRQWVAFSGLDPVHQVSGTSVHKPSRISRRGNRHLRRALYMPALSASRFDPHMKAFYNQLLTRHKTKMQAITAIARKLLHAIFGIFKNGTPYNGAKLFPEINIVPTSTPC

SEQ ID NO: 45282 - protein, 354 aa, unidentified
MITIGVDAHKRMHVALAVDEAGREVGDWQGPNSESGWQHLAAWASALGESRQWGIEGAWSNGRGLAQHLVGGGEIVYEINARWTAMRRRSAHKPGKTDELDASAIALFVRQETQALPRVLLEEDDTAILELLTFQRESALAEASRLRNQIHALLLQVDPEYKEHLPTINSKAGLDALRNYAPAVDDTIRRERARAVRRLAERLTLALDQEEQLAEEIRQAAKAGFTPLTKLCGINLLTAGRLAAILGPGNRFTSDAQLAAYAGVAPLEASSAGHTRHRLNRGGNRRLNHVLYFIVLTQAHHLPEAKAYLDRRMAEGKSRREAHLALKRFVIRAIWKLWQECQERRKTTICEVAA

SEQ ID NO: 45283 - protein, 423 aa, unidentified
MEIMYERVAGLDVHKQTVVACVRAMARRKVVRECRTFATTTDGLASLLAWLSAAGCSHVAMEATGVYWTPVWKILSDGQFDLLVANAAHIKNVPGRKTDLNDAMWIADLMACGLIKASFVPEEPFQDLRSLMCTRKQLGREQTRHVQRIQKTIEEANIKLDSVITDILGVSGRRMIEAMIAGVRDPYALAALAHRSLKASPQQLVDALRGRLTDHHRFLLKLHLGQRDALDAAIRAIDREVDRRIERIDQNRKDGEIPLRALILLLSAIPGVSTLSAITILSEIGRDMSRFPTAGHLIAWAGLCPGQNESAGKQKSSRLRKGAPWLKTMLIQCAWAAKRQKNSYYMAQFYRLQARRGPQKAICAVAASLLTAIYHMVKNSTGHHDLGVDYFDRRSPQAKAKRLVAQLSKLGFEVTLQPTATAA

SEQ ID NO: 45284 - protein, 379 aa, unidentified
MTKTMTRSPEFTVLEPCLLLAFELGARSWKLGFTTGHEQRPRLRDVPAGAVDRVLEEVRRAKTRFGLAADAAVVSCYEAGREGFWIHRWAVAQGWTNYVVDSSSIEVNRRARRVKTDRLDLAGLLRLLARAVQGEVGVWHVVRVPSESEEDARHLHRQRETLQQERTRVINRLRGLLTTQGVAVAVRAGFLEQVATVRRWDGTPLPPGLTQRLRAGWAQLASLTTQLAEVDAARAALPADPATATGRWVTRLETLRGMGSIGAWTLTTEIFGWRQIRNGRELGALVGLVPAPYQSGATSHDQGITRAGNRHVRRLVVQLAWSWLRYQPTSALSRWYRTRFDRGPRLRRIGLVALARKLLIAWWRYGDTGLVPEGAVLKA

SEQ ID NO: 45285 - protein, 412 aa, unidentified
MDVLYPRCSGIDIHKKSITVCVLIREAGRKEEKQIREFGTTTAAILSCGDWLRDLGVTHVAMESTGVYWRPVWNLLEGQFELLLANATHVKSVPGRKTDVKDSEWIAQLMQHGLLKPSFVPATVLRDLRELSRDRTSLVAERSRLKNRIQKILEDANIKLGSVASDILGKSGRAMLTAMVKGKENPEELADLAQGQLRLKIPQLVEALRGRVRAIHRFRLQQQLERIDFIDGQIAELEVEIEKQNAPMEEAVCLLAEIPGFDRTTAWSVIAEIGVDMSQFPSADDLASWAGVCPGNNESAGKRLSGKTRKGSRWLRQKLCQSAWCASRCKTSYFASYFQRVAAHRGKKRAIVAVSHSLLVVCYYLLQRKCHFQDLGVNYFDQLNHEKLTHYFVKRLTRLGHKVTLQPCSAAA

SEQ ID NO: 45286 - protein, 337 aa, unidentified
MDKYIGIDVAKATLQIYIPKSDSDIEIKNNPEDLKKLYSKLKKQYKDEIKDIVFIYESTGAYSTILEQFCQEKEILCFKVGAYQSASFSKVIKNRSKTDKIDARMLSQMHILAKEKDIKVPKRDEKAHQIRSYIKYYQSLVKEHRRQSNYLEAATYNLEDTFILKQVKKKITSIEKEQAMIIEKVLEIIKANPTFKQAYENITSIKGVAEKSGIILLYLFLKYPNASRGQITALCGLDPVQRSSGTSVQHKERISKQGLSLVRAILYMPTLNTIVYNPEMKLIYDRLVDRGKPKMLAQMAVMRKVILLAHSLYKNNKKYDENRYLKFTQIKELDMVE

SEQ ID NO: 45287 - protein, 342 aa, unidentified
MGYFAGLDVSLEDTALCIVDDAGRIIREARVASEPETLVAFFGACGMTMDRVGLEACSLTAWLHAGLTEAGITAICIEARQAKAAMGAMPNKTDRNDARGIAQIMRTGWYRAVHVKSPSCRSWRALLTARRMVLNKRRDVENGIRALLREVGLKVGAPSRKDFPARVRELAADDPVLMSLTEALLAVIDVMTREVEKLTRRVLDEVRVEPTCRRLMTVPGVGPLTALAFRATIDQPGRFRKSRDVGAHLGLTPRRYQSGETDVQGRISRCGDELARTALYEAAHSLLIRSTKWSALRAWGMSIAKRRGMARARVAVARKLAVILHRMWVDGSEFRWGKQAAA

SEQ ID NO: 45288 - protein, 411 aa, unidentified
MEQIHDRIAGLDVHRDQVTACARIPGPRGGVRTEKARFGTTAGGLAALAEWLAGHAVTLAAMEATGVYWKPVYYALEDRFLVWLCNAHHVKNVPGRKTDMSDAEWLADVAAHGMVRPSFVPPPPVRELRELTRYRKKQIDTRAAEIARLEKVLQDAGIKLTSVASKVLTQSGRAMIEALIAGQRDPAALAGLARGKLRPKIPELTAALDGRFGEHHAAVAARILAHLDCLDEAVAALDEQIAARVAGRYSSAVRLLADVPGLERRSIEVIIAETGADMSRFPSPAHLASWAGLCPGNHESAGKRRKVATTQGNQWLRRTLIESARAAARTKGTYFGAQYRQIARRRGPNKAAVAVAHSLLDVIWHMLTTGEIFTDLGADYYTSRQDTEHQAQRLVRQLEKLGYTVELAATA

SEQ ID NO: 45289 - protein, 432 aa, unidentified
MMNDVDRFIQFSQFRKQIRGSLTHLIVGIDIAKDKHHAFFGTANGKALWRRLIFSNDLIGYTRLIEQAQVLSSQHHLDKVVFGLEPTSNYHKPLAYWLIKQEYLVVMVAGKAVKDNRELLDGRWDKNDTKDSANLADLISQGKCQFYEQPDEDIVVVRNLLVIRKQLKKEEHILRMRIRNGLIAKYFPEMDRYWGNCLEENLAIVRWYLDPQKISNTEFEEFVLHVTSTNRGVRQMQRLRAIYQAAGESVGLPMDESAGYEAQLLVERLQQVKEQLSQTMQRIENACQNLSGYKLLLTIPGFGPYISALVLGALANPFRFTSRKQVIRLAGLDLNASRSGKKSQDSVPKISKRGNADLRYALYQAALIASYHNDGFRRLYHGMLEGRHGERGIKTKVRVKLAAKMLVVAWTILKNNEPFNARRLLGESVQQR

SEQ ID NO: 45290 - protein, 351 aa, unidentified
MRRYIGLDVHKTSTTFAVMGESGKRLGTHVVETNGRALVEQLKTIPGERHVCVEEGTQSAWIYEILSPHVDEIVVSGISESRGPKNDERDAYDLAEKLRTGAIERRVFKEQGAYKTLRELGRTHGMVVQDVVRVKNRIKALYRSRGVAVNDKTIYSAKGREAWLPKLGEAPRAAATILYAHYDAMNEVRKRAEKELVQEAHRHTISRVLESCPGLGPIRVAQLIPIVVSPGRFRTKRQFWSYCGLGIVMRSSSDWVRTEDAGWARAQVQRTRGLNFSHNHALKNIFKGAATTVVSQLDHEPLHADYQRMLEAGTKPNLAKVTLARKIAAIALSMWKSKETYDPAKHRKPSS

SEQ ID NO: 45291 - protein, 340 aa, unidentified
MIIGCDFHPRFQQIAFVDQETGEYGERRLCHPEEAEQFYRSLVGRQVRIGAEATGNFRWFRQLMQELGHEFVLGDPSAIRAASPRRQKTDKRDARHILNMLVEDRFPAVWQPPVENEDLRQLLLHRCRMVRFRARIKNQLDSMAKNEGLLSKRVWCAMRRKQIEELPVSGWNVERRKDLLFLLEELNKRIEPLDEAVLKAAEENPEARLLMTHPGVGPVVSLFYVLTIGDWQRFPRGKQVASYLGLIPAEESSSDKRRLGHISKQGNTLVRWLLVEAASKAQRYDPSWHRQYLRLSMNKHHGVAKVAIAHKLAVRLYWMLRSGQNYKQVMERGSHAGQSV

SEQ ID NO: 45292 - protein, 426 aa, unidentified
MSQRDYNKQVAKRQRIRKATLIVGVDVGKSFNALGFMDKEGNVLGSCAKLYNNRDGFEEFINLIEGLKAKHHLRDVLIGMEPTGHYWRKLAYFAKDHGYEVRFVRTTALKHHREIDESSSAKSDQRDALTIANITREGKYIDTVIEDGVLRQLRTLSKARERLLRYSVSAKNSLHAALDDYFPELHEIFWSMGSRSLWTILDLCPFPQDVMLMEVSTLQDLIARSSRKKTGSIHKAEKLIEAAQKSIGVKQIGNADRYRVQMCLEEVKRTVLSLKNLDKQLKCLLKETSAATYLMSIPGIGPLSAAVFLGELGDPAHFHNARQIVKYAGYDPQESDSGSRIGRKFISKKGRWLLRKYLFFMSMRVVVLSNYFQEYYLRKLETKNRVGQQPRRKEMLCAVAIKLIKVIFALLRDKREFVDLVPAAAA

SEQ ID NO: 45293 - protein, 315 aa, unidentified
MQKMLNIGVDVAKDAVVAGCDEQGAAVRSIPNQRTALTVWLASLPKPSRIGMEATGCYHELLADLAYQSGHTVFVLNPKDTRHYAQAVGLRAKTDRVDALLIARLIAHEHARLHPYHPATCAQRQLGRLLRRRAQLVKLKGALKQSMKGMTGLARDTSALVAQMDALIAKLEQGMDTLIASMPGTQEDRRKLETINGVGTVVSAALIEPLTRLPFRSADAFVAFTGLDPRPRDSGRKAGRRRLSKRGPAELRRLLFNAAMAAARTQVWKPIYEHYRAHGLPTTAALVIIARKIARIAWSIHRYHTSFDPQRLKTP

SEQ ID NO: 45294 - protein, 376 aa, unidentified
MREKLRFLGLDVHAETIAVAVAETNGETRSLGTIANREDSIRKFINKLGSPEQLRACYEAGPTGFVLYWQLTQLGVDCSVVAPSLVPKKPGDRVKTDRRDALKLAHCHRNGDLTAVWVPDDASEALRDLVRQREAAKQDQLRARHRLTKFLLRTGQRPPLGLKPWTERYMRWLAQVRYAQPAQEVTRLDCMNEFEHMSARVKRLEEAILEVVKQAPQAMQELIRGLQALRGVAHISAVTIAAELGNISSRFETARKLMGYSGAFPSEDSSGNRIRKGGITKSGNAHLRRIVMESAWCYRHLPRVGEKLRKRHQGVPAEIIEISWKAQNRLYKRYRKLTMAGKDQRKVITAVGRELLGFIWAIAIKAEGISTQPIAA

SEQ ID NO: 45295 - protein, 342 aa, unidentified
MQITTIGLDIAKNVFQVHGIDATEKVVVRKQLRRGQVMKFFAALPPCLVGMEACATAHYWARELTKLGHEVRLMPAKDVKAYVKRNKNDAADAEAICEAVRRPTMRFVRAKSAEQQGRLMQHRTRDLLLRQQTQVINALRAHLAELGIVAAQGREGLKQLLAIIADQADARLPLDARASLIVLAAQLQALHTLIKSIEKRLLVQHRANEASKRLESIPGIGIIGASAIAATVTDPKAFQSGRDFAAWIGLVPRQDSTGGKQKLGPISKQGDRYLRRILVVGAHAVLRWAKQNPGKYPWLTQLLARRPFKVVAIALANKMARVAWALLASGAKYRAPRLAAAT

SEQ ID NO: 45296 - protein, 319 aa, unidentified
MDATSRSVVGIDVAKDSWDMMILPEEKGGTFASDAKGLRQLLRQLPEAGTCLIVIEATGGYERKLVAELLQANHCVAVVNPRQVRDFARAMGILAKSDRLDARVIAMFGQHIQPRQLEKAPENQAELEQLVVRRRQLIDLRTAESNRLELTTLKLIRKGIKKMIGQFNRQIEQIEGEIAKLIQADDEWRRKKDVLTSVIGVGEVTSVCLIAELPELGRLNRQEISALAGLAPFNRDSGKWKGKRSIWGGRASVRSVLYMAALSAKRWNPVIRQFAQRLEKAGKPFKVVITACMRKLLVILNTMVRTNTHWNSDFTNQPS

SEQ ID NO: 45297 - protein, 411 aa, unidentified
MEHIFPCCAGLDVHKESVEASVRRIEPTGRLHQQTRHWGTMTRDLLAMADWMAAQGVTHVAMESTGVYWKPIYHLLESRFTVLLVNARHLKQVPGRKSDIRDCQWIAQLLQHGLLKGSFIPARPQRELRDLTRHRTQLVEERTRTVNRIHKVLEDANIKLASVASDILGVSGRAMLHALLEGETDAVKLADLAQRQLRGKIPELEKALEGNVSEHHRYLLRLLWKQLAQQEELIAELDARIEEQTRPFAAQIERLDAVPGVDRRVAEVVLAEVGAEMKPFPTHHHLASWAGMCPGNEESAGKRQRRRILPGNRWLKRTLVEAAWGASRSKNRYLASQYRRLAQRRGKKRALVAVGHSMLVIFYHMLKQGTTYVELGGDFFDRLEPERLTRYYLRRLERLGHKVTLQSTVTA

SEQ ID NO: 45298 - protein, 366 aa, unidentified
MKKLIRKAVRFKGFTLGLDVHKKFIEYCLLDQQGDEVDAGKIGSSPEELKRLLTTLKARGPLQACLEACGCFIWIFDLLVVELSREVVHVAQPSRIKVVANSMEKNDANDAWWLAYLLFEGRLPESFVAEGALRDLRIAARELRSYTDARSDQLRRFKSHLAQAGVAVPKNWHASKTGRAKAKTAIALVKGERKKALQMLLKQIKKLSSQMQYWRERVVEISSQFPEVQTIKENMPGFAEILSATVIGELGQPTRYKSEKAYAKSTGLTPGNRESGGKKIVTMISREGSRHARWAYTRAVIGCMRCKKGPGHQVRAWIEQRSKHKPKRKVIVAAARKLAEGVWRLFAMGEVFDLKRAFPAKCAAAG

SEQ ID NO: 45299 - protein, 388 aa, unidentified
MRKRSTGTSGTGRTATRSDGTKRSTSGRVESVLPAVGPTWTVGMDLGDRTSHFCVLDEGGRVVERGKIQTTREGFGKRFEGQTRMRIALEVGTHSPWVSRLLKELGHEVLVANPRKTRLIYQNRGKQDPVDAEALARIARLDPKLLYPVEHRPESVAQDLAVLRARDALVRTRTLLVNHVRGAVKATGHRLKKCSTRTFSDQAVGEIPEEVHEALSSVLSTIEVVSKQILALDRRIGELGKKKYPETAVLRQVGGVGPIVALAYVLTLEHPGRFRKSRAVGPYLGLVPARSQSGDSDPQLRITKEGDSFLRRLLVQSGQYILGPFGPDCDLRRFGQALSARGERNAKKRAVIAVARKLAVLLHRLWRTGEVYEPLRKAETPQPATVAA

SEQ ID NO: 45300 - protein, 354 aa, unidentified
MTSTKYIGMDVHKESISIAVMNAVGKIVMECVIETKANMILQCIDGLRGDLHVTFEEGTSAAWLYDLLKPHVAELIVCDPRKNASMREDNQNDKIDARRLAELLRIDHLSPVYHGEHGLRTLKELVRSYLTVTKDLVRVMTRVKAIYRSWAIPCNGKEVYAARHRAEWLEKIKELGVRRRAEFYYQQLDALRVLRQGVRRELLAESKKQKAWKLLRQIPAIGPIRAAVLLGILQTPHRFRTKRPLWKYSGLAIETCSSADHRSINGQLQRSKKNSVRGLNQNCNHDLKNLFKGAAVIAASKPGPFQEFYAALLAKGMRPEMARLTLARKIATIVLIVWKKGVCFDAQHLKPQTA

SEQ ID NO: 45301 - protein, 449 aa, unidentified
MLPPSPGLSDALQVYHPHAAGIDIGEAEHWVAVPPGCDPQPVRRFGTFTADLDALADWLLDCGVTTVAMESTGVYWIPLFELLEARGLQVLLIDPRQAKRVPGRPKTDRLDCKWLQRLHTYGLLAGAFRPEAHVCVLRSYLRHRQMLLTYAAHHIQHMHKALEQMNLKLTQVVSEITGVTGLAILKAILAGERDPQRLAKLRNPHCHHDEEDIAKALQGTWRAEHLFALRQAVELYAFYHQQITQCDQQIAAHLKTFGDKSAGQPLPPKAHRHKKTNEPRFDARTPLYRLAGVDLTTIEGIEEGTALVILSEIGTDMHRWPSVKHFCSWLGLCPQHKISGGKVLSRRVRPGAHRVTVALRLAARTLHHSQSALGAFFRRMKARLGTPKAITATAHKLARLVYSLLQHGSAYVQQGLDAYEAQYRERKVTVMAKQAKALGYTLVPLAAQG

SEQ ID NO: 45302 - protein, 355 aa, unidentified
MDSTKYIGMDLHKESISIAVMNAAGKIGMECVIETKASTILEFVDGLRGNVHVTFEEGTSAAWLYDLLKPRVTKLVVCDPRKNKSMREGNQSDKIDARRLAELLRLDHLTPVYHGEHGLRTLKELVRSYLTITKDLGRVMTRVKAIYRSWAIPCTGKQVYAASHRAEWLAKINEPGVRRRAEFYYQQLDALRVLRQQVRQDLLAESKKQQAWKRLCQIPSIGPIRSAALLGILQTPHRFRTKRQLWTYSGLGIETHSSADHRSVHGQLQRSKKSVLVRGLNRNCNHDLKNLFKGAAAVASSKPGPFEQFYAALVAKGMRPEMARLTLARKIATIVLIVWKRGVCFDAQYLKPQTA

SEQ ID NO: 45303 - protein, 340 aa, unidentified
MRYIGIDCHKEFCQMSVVNEAGEEERNERVPTQRDVLLAFLKGFEDDKPGTKFVLESTVRWRMVHDIIAGQGFEVKVAHPRGVKMIAASKVKTDKVDAYIMGNLLRVDMIPECHVASDDAQRWRKVVRHRYFLVNESTCIKNRIHSELREEGIDIPKQYVKPFSQKGKEWTRSLNMLMVDDLLDCLEELEAKIKGIERLIEDECLGDREARRLSEIPGVGCYTALTLRAEIDDVDRFPDPESICAYFGLVPSVSQSGNHCHHGPITKQGSPMVRFLLAECVHVHAECCPESSISRFLERKGREIGKQKATVAAARKLLVATYFMLKRDEPFRGPEPDLEV

SEQ ID NO: 45304 - protein, 421 aa, unidentified
MAYRVAAIDVHKRVLIVVVATAAAEVKDPAGEALEFECRRFGACAQDRSALIDWLQQRGVSEVVMESTAQYWKPVWLDLEPQMGKLHLAQAQSNRAPKGRKDDYRDAKRLARRLLAGELMLSFVPGAEQRTWRELARAKDQYVRERVSVQNRIESLLEELRIKLSGVISDLLGVSGRRILTALAQGQTDPVKLAELGHEKLQSGRETLIDALRGAPTPVQLKILKLHLEMLNKIDDVIGLLDQLLANELNQHNETVGRLAAVPGFGVDSAQRMIAEIGVDAEAFPTPEEFASWFGGCPGSNVSAEDNHSSRSPKGNRQVRKLLTQAAQAAVKKKGSFFQALFRRFLPRLGYSAAIWAVAHRLGKLVWKILHQHVHYLERGEETTPQARKRRAQKLAQALRKLGYTVALSPTIPNTQPAVQG

SEQ ID NO: 45305 - protein, 310 aa, unidentified
MDAIFVGIDVSKDRLDVHVRPSGEAFVVTRDGKGLEELVERLRALVPRLIAVEATGGFETIVAAAVGGAGLPLVVVNPAQVRHFANAIGRRAKTDPIAAAVIALFTEAVKPELRPLPDEAQRLLAELVGRRRQIIEMLVAERQREKRAANVPVRKSILRHIKVLEKELPEIDGDIGTLVRGSPVWREKQDLLVSVPGVGDKLARTVLAELPELGDLTRREIASLVGVAPYTRQSGHWKGRSMISGGRAAARAAVFLAALVASRHNPVLKVFHQRLRAAGKPKMVALIAVARKLLTILNAMLRDKKKWQPA

SEQ ID NO: 45306 - protein, 341 aa, unidentified
MGEVSIIGLDLAKTVFQAHGADASGAVVFRKKLRRDQLLTFFAGQPRCLVAMEACAGAHYWAREIGALGHETKLIPPSYVKPFVKRQKNDMADAEAICEAAQRPTMRFVAPKSADAQGAALIFRTRDLLVRQRTQLINALRAHLAEFGFIVRQGPGHVDRLIALMQDPASDLPDMARPILVVLVQSLQALRDQIALLDREIAARSKADPVAKRLMTIPGIGPIVATALVALAPPASTFRRGRDFAAWVGLTPRQHSSGGKERLGRISKMGERSLRRLLILGASSAAKVAAREPSRASPWLTGMLARKPRMLVTVALANKIARIVWALMAHGGTYRAPAAAA

SEQ ID NO: 45307 - protein, 348 aa, unidentified
MLIIGCDYHPGFQQIAFVDTETGELRERRLAHREEAEQFYTGLKGQSVRVGMEASGHSRWFERLLGELQFELWIGNAAEIRTKRVRKQKTDRQDAQLLLRLMIEERFPRIWVPDSENRDLRQLLWHRHRLVQMRTRVMNQLHVVALNEGLRRKKALWRPAGRQELESFALARWGSRRRQDLLDLLDQLTPKILELTRALEAEVERRPVTRRLMTHPGVGPLTALAFELVIGTPERFHCGKQVASYVGLVPVEESSGDRRRLGHISKQGNALLRFLLVEAAQVTVRSQPQWRSRFFHLAMRRGRKIAKVAMARKLAVHLYWMWRQGWDYGQLQKLGSHAGVPGNLDGVQ

SEQ ID NO: 45308 - protein, 444 aa, unidentified
MSQTEYPPLPEFAAYLAIDWADQKHVWKMQVAGTPRIESGECEQQPEAMEVWAAQLAQRIAGPIAVCVEQRRGALVQLLLKYDQLVIFPVHPNTAARFRQALYPSGSKNDPVDAGVLLELLVHHRGHLRRLDPDTPETRQLQDLVEQRRRLVDEKTRQKNRLTDRLKICYPQALQWFDLDTALGRAALQRWPSLPEWQACHPGTRKRFWHQHHSYPSAPELQQRCQQIQAAVPATRDRAVVESGKLAVRSGVDLLEVLHQHIGILEQEIARLAESHPDRGIFASFPGAGPALMPRLIAAFGTHRERYQSAYELQCYSGIAPVTERSGKKCWTHFRFQCPKFLRQTFHEFAQHSLHKSLWARACYQHHRAQKQSHHAAVRAVAHKWLRIMYRCWKQGVPYDEQVYLESLRRRQSPYVPVLAPLIDATQIQWQSVAGFQKLTADFS

SEQ ID NO: 45309 - protein, 350 aa, unidentified
MMIIGCDYHPGFQQIAFVDTETGECGEHRLPHREETEKFYRDLAAQGMKVRVGMEASGHAHWFERLLAELNFELWIGDAAVIRTKRVRKQKTDRQDAQLILQLLMEDRFPRIWVANWENRDLRQLLWHRHRMVQARTRIMNQLQAVALNEGLRCKKRLWREAGREQLESFSLAPWASRRRRDLLEVLDRLTPTITELSQAIEQEAEKCPEAQRLMTHPGVGALTALAFVLIIGRADRFQCGKQVACYLGLVPLEDSSGDRRRLGHITKQGNSLLRFLLVEAAQVTVRSIPEWRTKYFHLALRRGRKIAKVAMARRLAIALYWMWRKGWNYEQVKKFGSHAGQPEHRHGVK

SEQ ID NO: 45310 - protein, 385 aa, unidentified
MQKLNDLSRSPSPLDPDGTLIAVIELSLSSWLVAGIVPGVERQPLKKLAVDESALLKLLHRWREEAAKAGHRIKRIAVAFEAGRDGFWLARWLRARGIEAYVIHASSVAVSREQRRAKTDRLDTELLKRSFLGWLRGERDHCKMVAIPTTQDEDAKRPNREHESLVGEQSRIVNRMKATLIRFGIRGFNPKLKKAAERLDGLRTPEGEPIPPNTLAELRRDMVRRRLISDQIRQIEDARLERLKQAPNDGPHAMVRLLARVIGVGVETADMLVQEVLSRSMRDRRAVARYAGLTGSPDESGRRRREKGLTRSGNARVRRGMIQLAWRFLMFQKDSTLAQWFRARTESARGTRKTMIVALARKLLIALWRLVREGVVPDGVVLRPA

SEQ ID NO: 45311 - protein, 341 aa, unidentified
MEQVTTIGLDIAKYVFQAHGADAGGHTLFRKRLVRRKLLEFFAPQAPCVVAMEACAGSHYWAREIGKLGHTVRLIPPAYVRPFVKRQKNDVADAEAICEAAQRPNMRFVPVKTEEQQANGVVFRARDLLVHQRTQCINALRGHLSEYGYVFPQGIAQVAALIAHVEDPNAALPDNARTILKLLIDTFTTLEAQIHELDGEINRRSKADPVARRLMTIPGVGPITATAITALVPAAEGFRVGRDFAAWLGLTPLQKSTGGKQKLGAVSKRGERTIRRLLIIGACAVIQQASRRGAPAGSWLAQMLSRKPKMLVIVALANKMARVVWALLVKGGVYKAPAAAV

SEQ ID NO: 45312 - protein, 358 aa, unidentified
MVESTKIHFENQQFFVGLDTHAKQWTVTIRCNQMELKTFSMNPSPQELYRYLNRNYPGGEYFSVYEAGFGGFWIHKELTQLGIRNIVVHAADVPTTDKEKDRKTDRLDSRKLARELEDRKLKSIYIPDLFHQQLRSLCRLRNEVTVSSTRIKNRIKGFLYYYGISMPPHAEMSHWSNKFIQWLKQIPFEYPTAQDYMHFCIEELAQHRKRLAEITHSLRKYCRQYDLLGHIDLLLSIPGVGTTTAMSYYSELIDINRFPNLNHLASYVGLVESVHSSDNKGPDLGLTRRRNRYLRYLIIEAAWIAIRKDPALLHKYNKLTRRMSKQKAIVHIAKLLLNRIRFVWKNQMPYQMSVVHSN

SEQ ID NO: 45313 - protein, 355 aa, unidentified
MNSIKYVGLDVHQSTISVAVLDAEGKLLMQSVLATEASAIVDFFAGLRGTLHVTLEEGSYAAWLYDLLVRRVAKLVVCNPRKNALLKAGNKSDQIDARKLAELLRAGLVSAVYQGQKSTAAVKQLGRSYSALTEDTTRTMGRLKALYRSQAIACGGEKPYSVRHRAEYLAQLNEPGLQRRAQRLYQELDLLEQLRREARRDLLRECRKHRESKLLRSIPWLGPIRTALLIARVQTPHRFRTKRQFWAYCGLALETRSSADYQMVNGQLERRAKPVFIRGLNRNHNPDLKNLFKGAATSASGSRGGFGSFYENLLRKGMKPELARLTLARKIAAITLHIWKKGEPFDADYLKLHAA

SEQ ID NO: 45314 - protein, 453 aa, unidentified
MELDIINPNAAGIDVGSRSHYVAVGQSLEDVKEFGVYAEDLKALCEWLISFGITSAAMESTGDYWQNLYAELMKHGIEVVLCNGKFTKHAKGKKTDVKDCQYIQKLHALGLLTSSFLPDETTEKLRTYCRQRKNLISSASGACRKMQKFLKFLNFRLDVVVKDVCGLTGLAIIEDICKGNLDPESLSNHRHYNCRKSKEEIAKALHGNNREDYLFGLRQELQAYKFFQKQLEACDKEIEKFISEELKKSPEKRDLKTTEKPHKRQNKNAISIKDFNQVAYKYFGGVDLMAIEGLSHATVLAIMSEIGPNGFTKFGTSKQFVSWARLAPNNKISGGKVLSSHIPKGSNRLKIALRQAANAIGNLKDTHLSDFFKRVAYRKGRQAAVSATARKLGVIIWTMVTKKVPYSPANEYLFLDQKRKLGLVKRIQKQMVKFDIKPEEIGIGNYLITNYNY

SEQ ID NO: 45315 - protein, 314 aa, unidentified
MAGGEVYVGIDVSKQQLQVALRPSGEQFSEANDARAVRRLVKRLKPLPCRRIVLEASGDYEALLAAALYAAGLPVVVVNPRWARDFARSIGQLAKTDALDAALLAQYAELPQLKVRALPDPQTRELKALCARREELIDMLVAEEHRLEHVPARLRREINGHIDYLRKRLKHLDHDLDQAVRNSALFREQSALLTSVPGVGRVLCVSLLARLPELGRLNRAEVAKLVGVAPLNHDRGKLRGVRMIAGGRAALRRVLYMAALSATRANPLLRAYYRHLRDLGKPGKVALVAVMRKLLLMLNAILKTQTPWRPPCPA

SEQ ID NO: 45316 - protein, 354 aa, unidentified
MSNKSIAAVATMSIDIGKNSFHVVGLDRRGAIVLRQKWSRGQIETRLAAIPPCLIGMEACVGAHHLSRRLQAHGHDARLMPAKYVRAYSKGQKNDFRDAEAIAEAVQRPTMKFVATKTADQLDLQALHRVRERLVRQRTGIINQIRAFLLERGIAVRQGFRCLRSELPGLLAKRSDALSPRMIRLIEDLAGDWRRLDERIEGLSTDIASLVEQDPACERLMTVPGIGPIISSAMVAAIGTGEVFSKGRDFAAWLGLVPRQISTGDRTILGKISKRGNRYLRVLFVQAAWVVLIRPQSWERYGLRPWIQAAKKRLHHNVLAIALANKLARIAWAVLNKERNFEVTRTTAPSSQPA

SEQ ID NO: 45317 - protein, 316 aa, unidentified
MSVETWFVGIDVAKDRLDVAVHPTDERWTGSNDPAGIEALSEQLVRLAPQLVVLEATGGFEVPLVGALGARGLPVVVVNPRHVRDFAKALGRLAKTDRIDATVLAECAARVRPVVRPLPDEEARELHAWLARRRQWVEMMTADENRRQQAVAPIRRQIEGHLRWRRCQLAALERELTTRVRRSPVWRESETLRRSTPAVGPVLARTLLADVPDLGRLTGQQIAALVGVAPFNRDSGPRQGHRSLWGGRAPVRGVLDLAALVATQHNPVIRAFSQRRVAAGKPWKVVLTACMRKLLTILNARMKHRTAWKPVPALGA

SEQ ID NO: 45318 - protein, 483 aa, unidentified
MVLRVPIGSWMPYKRINLPKTTWHGAILTLKFKNMSKIKTKNEKVKRISQLPVIRPATAGIDVSDTEMMVAYPISSEQLEIRAFGCFTTDLHSIVKCLKENGITSVAMESTGVYWVALFLLLQEEGFEVYLVNAKHVKNVTGRKEDESDAEWIQKLHSCGLLNASFQPDNMTRTLRSMVRHRKNLVRTSSSYINRMQKALELMNIKLHTIISDIDGKTGLRIIEAILEGERNPEILADMRDKRIKASREDIVKSLEGYWTTEHLFELRQCYQLYCTHRQMIEECDREIEKQLVEQIASRNEGIIPDIPKVKRKVSGGKHKVPFNLTAHLREILGVDVTEVVGISEISALTIMSEVGTDMSKWKTEHHFTSWLGLAPNTKVSGGKTISSRIMKKKHHAGQAFRMAANSLNNSKSPLGDHYRRIRAKAGAAKAVVATARKLAIIYYKMVANKEAFNPKALEDYQQKYKQKKINQLKKKIALLEAA

SEQ ID NO: 45319 - protein, 430 aa, unidentified
MRSEVKSEKQELQFAAFVSIDWGDKKHVWCLQAAGSEQRESGELEHTPEAVEAWVGQLCQRFAHRPIAVALEQSRGALVFMLSKYEPLHLFPVPSTMSASMRKALYPSGSKDDPRDADLLLELLLKHRDNLRRLSPDTEATRRVQNLVEERRKLVDEKTAQTNRLTSDLKIYFPQVLDWFEHLDTELVCDLLERWPTLEELQKVPPAKLRTFFRKHYCRDEALIERRLLAIRQAIPAIRDRAVIEAKSMVVRVIVQVIVSLLEGIADLDKKIEEAAATHPDFFIFDSFPGAGAVMAPRLLAAFGSQRERYGNAGEVQTYTGIAPVMEKSGKKKWVHFRWACPKFLCQSFHEWAGHSIAQSVWARSYYQQLRSRGKGHHAAVRALAFKWIRILFRCWKDRVAYDENKYLAALARRGSPLAVVNVAIAGKGL

SEQ ID NO: 45320 - protein, 352 aa, unidentified
MLIIGCDFHPGFQQVAIFDNLTGEIEEKRLQHRAEAEQFYRSLAGQEVGVGMEACGHYPWFERLLAEMGFELWFGDAAQVRASVVRKQKTDRRDAEHLMHLLIENRFPRIWVPSLEVRDVRQLLVHRHKQVQARTRTKNQLQAMALSCGVQKKRKLWTKAGREELEQLPLLPYASERRKRLLEALDSLEAEIGELDRRVSEEARQRPEAVRLMTHPGVGPVTGLAMVLTLGPAERFGSGKQVGSYFGLIPREESSGGKQRLGKISKQGSSFLRFLLVEAGQTAARLDPQLKRFYRRLAVRKNRSVAKVAVARKLATRLYLMLREDWTYAQLCQAVMQVSPSHSVAGESEPSA

SEQ ID NO: 45321 - protein, 387 aa, unidentified
MSQTAAVLTPAAVDYERTLVLSIEVSNKSWVLAAQVPGLPHTKAKRTINPEAEALSAAIAGYRARAAAVGRSIERVIAVYEAGWSGFWLARWLMSHGVEVYVIQPSSVPVDRRMRRAKSDGIDAELLLRTLLAWLRGEPRVCSMVPIPDEADEDARRGVRERAELISERVGLVNRITAVLATLGVSDYNPLLRNRHRRLAELRTGLGKPLPLNAHAKIVRLLARLELVLAQVAVLEHERDAVMQADASNQANKMIQQLASLRGIGVQSATVLVREAFVRRFANGKALGSYAGLASSPYSSGGIDREQGIGKGGNRRVRTVMVELAWLWTRYQPAAAQVCWFRERVGSTGRRVRKVMVVALARKLLIALWRFVTDGVVPEGAVLKPAT

SEQ ID NO: 45322 - protein, 318 aa, unidentified
MSSNPESFVGIDVAKSWLDVAWLDGTVLHIEHTEEAIGGLVERLRSQPPTLVVMEATGGMETELASALVAAGMAVAVVNPRQVRDYAKACGRLAKTDRIDAMILAAFAAAIRPQVRELPDEHTRALSDLLARRRQLIEMRVQEKLRLPRASSVQRISLREHIAWLDERIDRLDVELTHALRSSPAWRDKDDLLKAIPGVGSLTRATMLGLLPELGTLSRRQIAALVGVAPFNRDSGKQQGQRVIWGGRAQVRRTLYMATVAAMRCNPVIRSFYEHLRTQGKPAKVALTACMRKLLVIMNAMLKHRSVWSPTLDTQHGC

SEQ ID NO: 45323 - protein, 407 aa, unidentified
MLFTGIDWSDQALDFHLRTADGQVLAEGTVRPNLEGLAALYGKLDVHASPDQIGIAIETSHGAWMQSLLDHGYRIYPVNPKSVDSFRKALSANGNKSDAIDRKVLAMFLVTFHQDLRSLQPDDPEIITLRIACEDRVRLVRERTAKLCELEALLKIYYPAFVGFFGDFDSQITLEFLQQFPTQAQMQGLTPGRLRGWLKRHAYTCGGRIEAMTATLKKPALPVPQHLQKAKGTLIRFLATSLIALKAEIAQRDGEIGDRFGQMPEADWIRTLPGTGPTLAPALLACLGRDRRRFATTEDARAFMGTAPVTFASGSSRVVRFRRGCWKFARRTLQLFADASRHQCTWAQNLYDRQRAKGRSHHKALRALAHKWLKIILAMWRTGTPYNEAVFRASQERYLLKKTAPET

SEQ ID NO: 45324 - protein, 347 aa, unidentified
MQIICGVDVSRAWLDAWITPEAYQRFANDAQGVIDLAAFCREHGAELAVMEASGGFEQPPYIALWQLGQLCAIANPAAVRHFAKAMGYLEKTDRIDAQIIAGYAAAKRLNPVPPPSCDQQKLTALAARLRQVTADLSVQKQRRHFTRDEQALASLHEAIAFFTRQAKALAAQIAALVEIDPLWQALDRSFRSIKCVADRTVAVILADLPEIGTISNKAIAKLVGLAPIANDSGTRTGKRPVRGGRDTVRSILFLVADLARKFDPSLADFRKRLLDQGKPKMVVRIALARKLLVRLNAKARDARAQLDHPFDNPDSRSARTISGGRSAPKEGSSRISGLARKERLGRV

SEQ ID NO: 45325 - protein, 361 aa, unidentified
MSTIADDDRRVIAGVDTHKEFHVVVVLDELGRRLDQATFPATARGYRDLTGWVTSFGEVLAIGVEGSASWGAGLSRHLRARGLNVVEVNQPDRHRRRRRGKSDRIDAEVAARSVLAGDATAIPKAGDGPVEALRQLRVARTGAMKARTAAANQLHSVCDTAPEQVRAQLRGLTTRRRVAVASRYRPGDPMTPTGGAKRALVTIARRWATLDTEIKELDRAIKAILDSIAAPLLKRHGVGYDTAGALLCTAGDNPDRLATEASFASLCGTAPVPVSTGNSNRRRLNRAGDRNANSALWTIVMVRLRSRHTPTVAYLERRVTEGHSKRDAIRCLKRFVAREVYLDIRAITRPHQHDTQLDIAA

SEQ ID NO: 45326 - protein, 359 aa, unidentified
MQAQSKSLNFEGQNIYVGFDAHLKSWQVTILTENMSHKTFVMPPKPEVLSTYLKDNFPKGNYFSAYEAGFCGLWAHYKLKSLGVDNIVVNPADVPSTQKDKVQKEDKRDSRKIARSLRNGELSAIYIPSESTLEDRSLVRARSMLVGDMTRFKQRIKSFLYFYGIEFPKEFEHSNTHWSGRFMKWLDSIQMNERTGRQALDVLVEEARGQRKLLLETTRKIKRLSESAKYNEQAQLLRSIPGIGLINSMVILTEVENINRFQKAEKFSSFVGLIPTSHSSGEKEKNGEITFRFHDFLRKAFIESAWVAVRFDPALLLAYQTLCKRIEPNNAIIRIAKKLLNRVYVVLKSKTKYEYNRTN

SEQ ID NO: 45327 - protein, 350 aa, unidentified
MSEQYAGKQIVGMDLHRRRSVLVRMTETGERLETVRISNDPEYLRAVMTRAGEAPDVVLEACYGWYWAADTLAELGATVHLAHPLGVKMFSLRRVKNDERDAADLADLWRMGRLPEAWIAPPACRELRGWVRHRAKLVGLRSNLKCQVHAVLANAGVQVGMSDLFSAGGQDLLARVALTPESRARVDSALRLISGLDFEVELFGKLVANRLRSDPGYLAIQAIPGVGPVLAAVLVAEIGDIGRFARPEQLASWAGLTPKHHESDTTVHRGPITKQGSRLVRWAAVEAVQRVGGHTRLGQVRDRVGQRRGRNIGVVAAARELTELVFYGLRDGRLRCLTTPSASNTANPAA

SEQ ID NO: 45328 - protein, 341 aa, unidentified
MLVAVDERGRELARGRISGNSVHAFAQFFEALQGPGRVVLEACWNWGRIYDVLSEIEQVEEVVLAHPLKTRLIAEAQIKTDSLDALALATLLRGNLIARAHVPSKATRARKELLRQRLYWARLRTRVRNRVHAVLDRQRELEMPQCSDLFGRKGLNALSKLRLAEPDATLLGEELDLLKLIDSQIKAQEGRIVAFNANEQATQYLQSLPGMGKILAAVAAAEIDAIERFDGAAKLCAYAGLVPTTYGSGGKVHQGHLLKSRNKWLQWAFIEAAWVAVGCSSYFGGIYRYHRARGKKANIAITIVARRMCRIAFTLLKERRNFQEQHRTFPGRSAVRLTAAA

SEQ ID NO: 45329 - protein, 366 aa, unidentified
MKQVTTSVGIDAHKKDLFVAMLIGAATTPVTWQLANEPGAVRRMVRKLERDAPGPVQVFYEAGPCGYALQRQMITDRITCDVIAPALMPRKPGERVKTNRRDARKLAELGRAGLLTVVQPPTPADEAVRDLARARDDAREDLQRCRHRLGKLLLRRGLHYTGRNWTQAHRRWVDSVTWTHAAERAVVDDYLLAIDHTEARLRGLDARLAELAEQAPYREPVGWLRCFRGIDTLTAMLILAELHDFRRFDSARALMAFLGLVPGEDSSGEKHRRGRITKMGNALVRRILVEASWHYQHRPGVGRALNARRTGQPARVIAIADKAQQRLCRRFRRMLAEHKPAPKVAVAVARELAGFIWAALQPPVVA

SEQ ID NO: 45330 - protein, 331 aa, unidentified
MKKKDVIGIDVSKLTIDAYLKLAQAHAVFGNDTKGFRQLVKWIMKHTDCKTEELLICFETTGLYSLQLASFLSQSNIDFVMENPIQIKRSMGLVRGKDDHVDSKRIAEYAYMRKEKLKLTQLPSEELIKMQNLLAIRERMIRQKAGYQASLGEYKRVLVQQQQKDFFLLLNNMINALKKQIRKAEETLIEIIHSSSKLLNIYTLLTSIKGIGVILAANIMVTTICFTKFNDSRKYACYCGTAPFKYSSGTSINGRTKVSQMANKKMKALFNLAALSAIQHDPELKLYFDNRMANGANGMSTINIIRNKIIHRVFAVVKRGTPYVVMAKYAA

SEQ ID NO: 45331 - protein, 347 aa, unidentified
MTEAYDGRQVVGMDLHRRRSVIVRMTEDGRKLGTTRITNSPAALRAEIAKAGKNPRVVVEATYGWYWAADVLEAAGAEVHLAHPLGVKAFACRRVKNDERDAADLADLLRMGRLPEAWIAPAEIRELRELTRYRHKLVKARTSVKDQVHGVLAKLGIPVSHSDIFGVRGQAWLDELKLPQPYAGKVASLRQLAGTLTGEITLLDTVLGDLLAGHEGYAAIQQLPGIGPVLAAVIVAETGDIRRFPGPGQLACWAGLTPRHYQSDTKVIRGHVTKQGSRVLRWAVVEAIQRQPAGSRPREVKDAIIARRGKEARNIAKVAAARELLTLVFYAMRDGHVRRAAQRGQAA

SEQ ID NO: 45332 - protein, 342 aa, unidentified
MSEIITVGLDLAKNVFQVHGADGAGRAVLRKKLRRMQVLAFFSQLPPCVVAMEACGGAHFWAREIGKLGHDVRLIPPAYVKPYVKRQKNDAADAEAICEAAVRPTMRFVPVKSEEVQGAAMVFRVRELLIRQRTQAINALRGHLTEFGQIVPQGAANASKLIAIVEDPDSGIHADAIATLKVLVLALAHLEAEIGKLNAEIARRAKENDVARRLMTIPGIGPLIATAIAVLAPPPETFRKARDFAAWLGLVPRQHSTGGKQRLGATTRMGERSLRRLLIIGANSVIIKRHVHATAKPGTWLGGMLTRKPPMLVRVALANKMARIVWALMARGGVYKAPAAAA

SEQ ID NO: 45333 - protein, 347 aa, unidentified
MEHYAGIDVSLDSASVCIVDAHGKILKEAKVACEPEALIAWLAAHGTAMARIGLEAGPLSQWLFAEMKAAGLPVELLETRHVRAAFKAMPVKTDRKDARGIAQLMRLGWFRPVHCKSLPAQEVRALLTTRKLLQAKRHDVEMSLRGVLRGFGLKVGPTTPKTFAMRVQELVAHHDTLRTIAEALLKARAVLAQEFKAIEKRLAALARTNAPTRQLMTTPGVGAIVALTFASAIDDPSRFRSSRRVGAHFGLTPRKHQSGETDVTGRISRIGDHGVRVALYEAANVILTRAVRGSDLKSWALRVAQRAGMKKAKVALARKLAVVLHRMLADGTTFMASKVAQSAAGAA

SEQ ID NO: 45334 - protein, 349 aa, unidentified
MAMLADTVDAVIGVDTHTDTHTACLLDRLGCQLGVITIPADQRGCRTLLAWAQQNAPGPRLVWSVEGTRSHGLGLTRYLHAHDQLVAEAGRPERASKRPGGKSDPADAARAARDALSAQRLAQPRSDGSREALRILLTARAQATTARTAAVNTLKALILGAPDDLRRQLRSLSTPRQASRCRSLRVHPSQPIAEQVLRAELRRLATHIGAWDTELRANKAQLRQLVAQTMPALLEQPGVGPMSAAQLLVSWSHKGRCRSEAAFAALAGTSPLQASSGTITRHRLNRFGDRELNRALHVIINWRMLHHTTTHDYMARRRAGQKTDPEIRRCLKRYAARQLFRLMETTATT

SEQ ID NO: 45335 - protein, 353 aa, unidentified
MKKIVKQVVGIDVAHKELVICLGAMFDDWTPQIYDHKAFANSTKGFIALLAWVRKNTQSEADLRFVMEATGVYHEALAYFLNENNHAVSIVLPAKISNYARTLDTKTVTDKTASEAITMFGLERKLTDWKRPDPIYKELKQLTRERDQVVQMRTMAKNHLHADQAEARPNPESIKRTKKQIEFFNKQILQIQSEIRALTKKDNRIKNTTDLICTIPGVGMLTAVTVLAETNGFELIGNKKQLTSYAGLDVREKQSGTSVKGKPRISKRGNKFIRKAMHLPALTTIRHSDRYKAIFARHVSKHGIKMKAAVAVQRKILELIYTIYKTNKPYDPTYLKNQGAEKLLPEQTGSRPS

SEQ ID NO: 45336 - protein, 346 aa, unidentified
MDQIIRIGMDTSKHVFQLHGVNAAEEPILRKKLRRQDMVTFFTKLPPTVIGIEACGGSHHWARLLHSLGHEVKMLPPQFVKPYLKRGKNDAADAEALCEAMSRPTMRFVPVKTPEQQAALMLVGMRDRLVRQRTQLANAIRGYAAEFGLVAAKGLARIEPLLERIQADDTLPPLARKLFDIHAKEYAQLQARLEEAEDKLMAWHRADECSRRLAKIPGLGPIGASMLVMKAPSPEAFRSARHFAAWLGLTPKDHSTAGRVRLGVITRAGDEALRSVLVVGATAVIRHAQRSQARGSPWLAALLMRKPPKLAAVALANKIARIAWKLMVTGEVYQPQSSPPARAHAA

SEQ ID NO: 45337 - protein, 403 aa, unidentified
MNAVGIDVSKGKCMVAIMRPFGEIVASPFEVTHTGSELSELADMLKSLRGETKVVMECTGSYYLPIAYSLRENGLFVSTVHSLLIHDFGNNTIRKVKTDKADAIKIANYALANWLDLPEFIPEEDIRHMLKAYSRQYSKYTKLKTMLKNNLISLLDQTFPGVNTLFTSPPRKDGHQKWMDFATKFWHCECVCGLSPKAFTERYRAWCKRNGYRFSEFKADDIYVESCGHVSVMPKNETTKFLITQAISQVNTVSETLAVFAREMKSLAASLPEYPVVSDFFGVGDVLGPQLMAEIGSVYRFRKKSSIVAFAGLEAPPFQSGQFESNNRRISKKGSPHLRKALFQVMGCLIKLSPPDDPVYQFLDRKRAEGKHYYSYMTAGCAKFLRIYYARVKEFLDKLDDEA

SEQ ID NO: 45338 - protein, 310 aa, unidentified
MGTEVYVGVDVSKDSLDVAIGAARDIVTFTNDQKGVDALVKKLSQINPALTVFESTGGYELLATSCLAEAGLAVVIVNPRQVCDFAKSAGILAKTDAIDARVIARFAEAVKPDVRQLKDRQTSELTALVTRRRQIIEMIVAETNRLRLANKRNRKDIEDHIRWLKKRLDKIETDIGKMIQSSPIWRCKDDILQSVPGIGPVTSARLICDLPELGVLNAKKIAMLVGLAPLNCDSGKYRGRRRIWGGRAAVRSGLYMATMAAIRCNPAIKGFYQRLMAAGKCHKVAATACMRKLLIIVNAMLRDQTLWQQN

SEQ ID NO: 45339 - protein, 323 aa, unidentified
MKTVLGIDVAKAKLDVALRRPDGKFRHKVVENAPAGFAALSAWLHKEGMTDLHVCMEATGVYWEAVAEYLADAGYTVSVVNPAQIKAFGAAALVRTKTDKADAKLIAEFCQAQSPAPWQSPSPALRELRALVLRRNALDAMRTQEQNRLLVARESVRSGITAHLSYLEKAIAEVEAAIRQKIDDDPDLKQQRDLLDSIPGLGDKTIPVLLSYYGGPQRFDKAKQAVAFAGLDPRQHESGSSVRGKPRLSKVGHAFLRKALYMPAMVTITRTVWGRAFRDRLAAAGKAPMVIIGAMMRKLIHVAFGVLKSGTPFNPALHGMAGA

SEQ ID NO: 45340 - protein, 422 aa, unidentified
MESEYRIYVGIDWATEAHQACVLDRARRILAERSFAHTGNAIAAFAQWLSELAGDDPGQIAIAIEIPRGAVVETLVERGFHVYALNPKQLDRFRDRHTVAGAKDDRRDAFVLGDSLRTDRACFRRVRLDDPLVIRLRELSRVDEDLRREGNQLANRLREQLHRFYAQALQLCPSADEPWLWALLELAPSPSVARRLRPQRVERLLREHRIRRLSAPDVVAALRAPALQVAPGVVEAATEHIALLLPRLRLVHTQRQRCGLRLEALLDELQATQDDDDEQREHRDVEILRSLPGVGRVVAATVLAEASGALAERDYHGLRAHAGIAPITKQSGKRCIVLMRHACNGRLRNALYHWARVAAMCDPPSTIYYAALRQRGHSHGRALRGVADRLLRILIAMLNSGTLFDPSKTRPPQAGAPSEEVA

SEQ ID NO: 45341 - protein, 315 aa, unidentified
MENQGVYVGVDVSKERLEVAISPGNQSFSEGNDERAVARLVKRLQPLGCTRIVLEATGGYEALVAAALYAEGLPVVVVNPRWARDFARSVGQLAKTDRLDAQLLAQFAQRPELKVRELPDRQTRELKALCARRAELVEMLVAERHRLEHAPQPLRRGINGHIDYLRKQLKRFDHDIDQAVRGSELFRAKSEVLTSLPGVGRLLCAALLARLPELGRLNRGEVAKLVGVAPLNHDSGKLRGVRMIAGGRAELRRILYMGALSAIRCNPVLCAHYQHLRADGKPHKVALVAVMRKLLLILNAMLKTRTPWRPPCPAA

SEQ ID NO: 45342 - protein, 359 aa, unidentified
MYFSGLDAHLRYVTVAVLDRLGGVALETTVPTREPDRLLAVLAPFRPLEVVVETCPFWPWLYDLLVPAGIGFHLAHAKALRAIATAPQKSDAVDARLLARMLLSGLIPEAYPRSADQRELLRLLRHRTALVRFRTRLAGRIHSQLHQQRLSLPRENLLRRATRAWLEATAWPRLTVEQRAIVTTHSELIDHLTPLIRALERRIAAAAAGDATAPLLATIPGIGPYRSLLLAAELVPISRFPRAEHLVSYAGLAPVTRSSGGHTHHGSIPPAANRWVRGALVSAIPSHVRYAPTSPVTVAYEQLKARLGWRVARVAAARKLARVVYVMLTRRAPWHGVPAAGDVRDEVQNSHVAPTTSFC

SEQ ID NO: 45343 - protein, 456 aa, unidentified
MSHCTANKKAASAFVRRNSIPTTGAVAKALFNSAIGIDVHHDILVCAYQHCNRESDEITTEVCSFGTTASELAKFTDWCRNYHPEQILMESTGVLWFSPYEALESVGFTNRQLSLINARDFKAIVGRKSDKQDAERLALYARIGNVRSSFVPAKCFREMRAVSRLLSKTTDEQSRARSRYLKTLNFIGCRASSVFSDVRGKAATAILEVLAEGTREQLIDAIKIHGRRLRKSAAEILDALDFAVSPAMAMQLRIQKQHMEALSQTCEELYALLKVMQANYQLWINRLITVPGIKERAARVIFAEVTNDLSSFPDAAHLASWVGVCPGTMESAGKRYSGRAAKGNRYLRRILVECSQAIGLMRKGALYSLFQAFKERKGTRRAVVAMAHHLVKIIYCLFTKGGNFEAQSTDALTKVRKQKYLSAVANIKKQNFEILTSGSLVDKATGAITTVDPMTV

SEQ ID NO: 45344 - protein, 352 aa, unidentified
MEKNNKLDFGGQHIYVGMDVHKKSWSVSIHTEQFEHKTFTQPPEVEKLTYYLERTFPGATYHTVYEAGFSGFWLHDKLRAKGIDCMVVNPADVPTKDKERAGKRDRVDCRKLARGLRNGEINGIYVPPRVKVEDRTLVRTRQSMVRKQTRCKNQITSILFFYGIVIPEEGRWSRRFINWIESIRMERASGDFALKAHLEELKHLRQIIANLNKAILSLSRDEEYRADVLLLKSVPGISTLTAMILLTELADFSRFSSLDKLASYAGLVPDIRSSGETEYAAGITFRRNAALRALLIESSWVAVRKDPALTMAFNKLSVRMKKTKAIVHIARKLLNRIRFVLKNRQEYVPAIV

SEQ ID NO: 45345 - protein, 315 aa, unidentified
MLIHYIDIAKRNFVIAVSSLSKTKTETNNPKGIAHTIEYLKKHKVALVVTESTGGLEIPAAKAIRRAGIAVIIANPRQTHQFAQSQPLTKTDAKDAKMPAFFAQMTAQKEDWQTMPYQPPTEAEEVLEALVNRRNQSADMRTAEKNRLHQFHETQVGSVKQLIAHFDRLIDELDKQIDNHTRTHFDGKAQVAEQIKGIGSITTATLMAMLPELRRLSHKRIAGLAGIAPHPRESGETKFKSRCFGGRSAVRKALYMATVAATRFEPLIRDFYQRLPSEGKPYKVAVTACMRKLLTISNARIRDYFAENDTAENGI

SEQ ID NO: 45346 - protein, 318 aa, unidentified
MTGQTCTYVGIDVSKGRLDVAIGERGDFWNVANDEKGIAKLVERMKEVQPELIVLESTGGLEMPAMTELYASQVPVALVNPGRVRQFARSVGLLAKTDKLDARLLARFAEAVKPAVTRMPDEQEQHLIALVTRRRQLIEMLVAEENRLITVRLSLRENLEEHITWLRQALKDLNREIREFIRQSPIWKDKEDLLQSVPGVGPVTASTLLAELPELGKLDRKRIAALVGVAPFNDDSGHRRGKRKIKGGRSSVRNVLYMAALSSSRFNPILRPFYKRMIHRGKLKKVALTACMRKLLTFLNAILRDQQRWNPSLKQFTS

SEQ ID NO: 45347 - protein, 485 aa, unidentified
MEAKRTKAYRSVKQNLHNQNRPIRPAARMPVVNRHAAGIDVGAVKHYVCVPEDAVPEGQSNVRSFGAFTADLDQLVEWLQACGVRTVAMESTGVYWIALAQKLEAANLEAVLVNARHLKYVPGRKSDVKDCQWLQQLHSYGLLNGSFRPAQDICCVRSLMRHRGNLIESCGREVQHMQKALQLMNVHLHHAVNDLVGATGLRILDAILAGERDPNKLVELRDSHCSKTSVEDLKKALQGDWREEHLFVLKQALETYRHLLQQVVECDAQVEKALSEVVIPEPIEPEVFIPKNPKAKEGAKPKKKRFHHRKTGTSLKQDLTQELERICGVDLTQVIGLNVLSVLIILSEIGVDMRPWRNVKAFCSWLGLCPGNKISGGKVLTSRTAHVVNRVAILLRTLGPSVGQTDTWLGIFHRRMRARLGPAGANTATARKLACLIYHLLKYKEEYIDVDHLFLLEKIRRQRISRLRKHAAELGMEVVEKKMAA

SEQ ID NO: 45348 - protein, 406 aa, unidentified
MRKLRCPLTEVLIEAPGHKRRRRLLVLNTRVEHDHLIEVLQAYGRPVVCAFEATGNYHRPIAWRLAEAGFEVRLVSSLALARTREALHNSWDKNDPKDAQVMLHMLRIQATQVYHDPLRAGINDVQELSKTHEAIARAKTEIQHRILTHYLPLYFPEIDRFRGNSRSDWFFAFLHAFPTPASITALTKEEFVTAAWDVVGRKVSKTQILLDIYETARSSTGLPLPLDAPAIRMFRMVIDEARGLIRQRNEIEAQADELLRHSQDYQLLRQIPGIGPINALTIIAEAGDLRRFAHQRQFVKFCGLDLSTQQSGQYRGQTRLSKFGNARLRRTLWIAGQVAIRQRENGFRHKFERYIARDRDNPDLRRKAMTAITAKMARVVHAVVKGGSDYRPFVEGRVPGGRTSVS

SEQ ID NO: 45349 - protein, 350 aa, unidentified
MLIIGLDYHPGFQQIAYVDSETGELQERRLQHREEAEKFYRELAAQGMKVRVGMEASGHARWFERLLGELQFELWIGDAAEIRTKRVRKQRTDRLDAQLILKLMLEGRFPQIWVPSWENRDLRQLLWHRHRMVQTRTRIMNQLQAVALNEGLRWKKRLWREAGREQLVAIRLAPWTSRRRQDLLELLDQLNPSIAKLTEAVEQEAEKCPEAQRLMTHPGVGPLTALAFVLVIGTAERFGCGKQIASYLGLVPSEDSSGERRRLGHISKQGNSLLRFLLVEAAQVTVRSNQEWRSKFFHLAMRRGRKIAKVAMARRLAIRLYWMWRKGWNYEQLTRFGSHAGQPGNPHGVQ

SEQ ID NO: 45350 - protein, 400 aa, unidentified
MSGLKGGFDCIVGIDVSKDKFDACGITEEETRLFQISAAMDRKGFEKLKRHFAAVSVSSVLIGMESTASYHVNLFSYLVAEGYKVILINPLLISNYVKMQLRKTKTDKKDAVVIAQFLLANGDTLIQRATPALISDLRDLSRQRESLVDEMTSLKIEIKQLLNITFPELEHMVGIFTKSILKLLQQYPSANALRDADIGQLSQTLIADSYGHKREEFAKTLIKVARSSVGTNSPAKEMIIKQKIGLLLHLEEALQEITDMLIEMARKLMEEDINIMTSIKGIGDKTAANFLVEMGGDINNFECSGKIIAMAGLDPAVYQSGQHEGRGRITKRGNRHLRRIIWMMTTSVIQYTDIFHAYYLKRRKEGLPYKMAVLATAHKLIRVIYAMLTQRTTFCPQVNS

SEQ ID NO: 45351 - protein, 469 aa, unidentified
MVYPSFNHIQGRLGSRWANFIRNTGSENLLIVAIDAAKYTHKAMICTFYGDILVRPFEFDASSTGFTKVKQVVQSEKQRHQMKEVVVGIETTGHYYEDLVWACKAEGFHVRVLNAASTAQERQALLNWSKTDNLDLMAIVQSIMHNRGTSSELSSGNIHKLQTLTRARRKLVQEESAVQNRIRVYVDHIFREFQGKSIWIDGKRQHIQPFSKLFGKAPRYMMRHCLHPGDILELGEEGLRAISIRENLKIRDYSIKILLDYARDSISKPKEAVEAEQFLLVQKLDQLEQLMKQISELEKEIQDLFVQTEGAVILSVPGIGVVTGAELYAEMDNNSDFDHAGQLIKMAGTNPIVKQSGGRSPSYYAVSKQGRRVFRNVVYQVGKSLATNNPEMKQRFEAMKARGKHHRQAYIALGNRMIRLAFSMIKYQTLYRSDEENYTLYDQLDKKLYSKNLKYFYERFVVPDNSLTA

SEQ ID NO: 45352 - protein, 306 aa, unidentified
MEQVTTIGLDLAKAVFQVHGVDAAGAVMVRRSLRRKQVLAFFAKLPRCLVGMEACATAHYWARELAKLGHDVRLIPPAYAKAYVRRNKNDAADAAAICEAVSRPSMRFVAIKTEAQQASAGIHKVREMLVKQRTMLINTLRGLMAEFGIVVAEGPRHVGELVAILADPADARIPAPLHDGLMAIVESLRGLEQRIARVEKQIVGGGRDNATCRHLITIPGYGPILSSAMAAMIVNPAAFTSARHFAASLGLVPRQDGTGGKSLPLRRRGSSSVRSANAAMATCVGCWSMARCRCCAVNAPKTIPGW

SEQ ID NO: 45353 - protein, 347 aa, unidentified
MFPFYLGIDLHLKRTYLVLMNAEGEVIDKRRLKNPEMASYISKNIPKETYAVMEATRNWPFFYDLLEKHVDRVELAHAKGVRMIAAAAVKTDQIDASVLAHLARLNFLPIAYAAPKEIRDLRQHLRYREWLIDERRRAKNRIHAVLAGYNLASPVTDLFGRAGREWLKEMVEKELRPTSQRVVLETLAMIDQLDDQIKELAKDIPLPEELKPKAELLMSMPGIGKLISAVILAEIGDISRFNSPKALCNWAGLTPRVHKSDEVVRHGRISKQGSRYLRTAMVSAAMTACRISPRWYGVYENLARRIGRRGAKVAVGRRLLTVVYYMLKRNQPYGEDYEQRRAVEQGA

SEQ ID NO: 45354 - protein, 423 aa, unidentified
MMKLKYSICCGLDVHKNVIVATIVITNKDGISEYMQKSFSTINSDIQRFHNWLIENNCYHVCMESTGKYWIPIFNYLENDIDVCLTHPKYVKAIKGKKTDKKDSKWIADLYKFDLVRCSFIPPKDFRQLRELARYRFKLVCMKSSEKNRIQNCMTVSNVGIASVLSDPFGKTATEIMSYLLEHTADSIDEKAVRKLIKKGAKAKSDEIIEAIRGYNIETDQAKKLELARGHLEYLDNMITQTEVELYVRIKPYYEFVEFVSTMPGMTELSSTIVLAETGVDMNIFDDAKHLCSWCGLSPANNESAGKKKSVRIAKAGDYLKPMMVQCALAAVQSKKQPYFAIKYGRIKKRRGHKKAIIAIARMMMVCIYHMVSEKKPFTPTDYEDLMTPQNHVERVVLNENNVFAYLESLGYDSSKLVKRNDN

SEQ ID NO: 45355 - protein, 392 aa, unidentified
MMVSVGIDVSKDKHDCFIVNSEGEILADVFTIPNNMDGFHYLLQRIQDCANTQNKIKVGLEATGHYSYNLLGFLLDNGLPTYVLNPLRTNIYRKSLSLRKTKTDRVDARTIASMLLSDVGLKPYTDTAYHNEELKSLTRYRFDKVKERAKLKSSIARLVCILFPELEKLVPSLHIASVYALLEEFPGAKQIAAAHLTRLKTLLETASKGHYKRDMALEIRDAARNSIGSWMPAKSLELQHTIRLIRELDDEIAEIEEQIQAIMDELNSPITTIPGIGTRMGAMILAEVGDFSRFDSPDKLLAYAGMSPSTYQSGQLKNCYPHMEKRGSRYLRYALYNATKYVCHWNPTFAAYLAKKRAEGKHYNVALSHAAKKLVRLIFAMEKSRQPYRLVA

SEQ ID NO: 45356 - protein, 362 aa, unidentified
MHFVGIDLHKNSIVVCVMDQQRKVLHRRTFSCAQIEAITEFFAALRPFRAVVEATASSHWLLELLEPTAEKIVLAHPGKLRVIAESTQKTDRLDAQGRAEFLARAMIPEAHRPTPRPRQHRALVRHRHSLQGRITAVKTKIRHVLGDSNADRKDLFTAAGLAHLAAVRLSDADRVVVEQLRAEWEHLRGQLKGLAEQLKQFAREAPTAEAEARAVLKTIPGIGPVTVDVVVSELGDVGRFGNAKKACASAGLVPAVRASGGKAKELGITKAGSPLWRGALVEASWRLVRQGARWRSSSEDLKKRRGGTKAIVAGARRLMCVLSAMLRTMTPYKVVPQEAVAGRRGASEARTTGDPSDRETRR

SEQ ID NO: 45357 - protein, 346 aa, unidentified
MNNNVNSTTFSSVIGLDIAKNIFHLYTLGADGKVLKKKLKRAEVLPYFANYATSLIGIEACGGAHHWARELNKLGHTVVLMNARYVKSFVVGNKNDFNDAQAIFDAVTRPNKRTVRIKTLAQQDVQLVHTVRQSLVNQRTALGNQIRGVLSERGIVIAAGINRLRKELPFILEDAENGLSPLSRELIAEHYEKFKQLDSDIKAQDQRIQRLCAQNPLSQRFLEVPGVGPITATIVASDIGDGQGYASSRDYAASLGVVPKQHSSGDKQVFLGISKRGNRYIRTLLIHGARAVLKNCSNKTDKLNLWLQALIARRGFNKAAVALANKNARTLWAMASKNEQYQPAGA

SEQ ID NO: 45358 - protein, 338 aa, unidentified
MTVVTVGIDLAKNVFAVHGVNAAGKAVLVKPLVRRAKLLELIATLPACLIGIEACTGAHYWAREFQKMGHTVRIMAPQLVSPYRMGGRHGKNDAADAAAICEAVTRPNMRFVPIKSVEQQGQLFVHRAHQGYVSERTALINRIRGLLSELGIVLPQAFKAFLSGVAQVLEDLPGYCNQVIGDLLNELYHIEEKIKNSEKPIQQLARDNSAAQLLMQFRGIGPMTATAIVASIGNGHDFKNGRQFSAWLGLTPRQQSSGGKARLGRITKAGDSYLRTLLVLGARSVLLGAAKNDDPVSRWALQLKERRGYGRALVAIAAKNARMCWAMLHLRDEFIFPA

SEQ ID NO: 45359 - protein, 340 aa, unidentified
MQITTIGLDIAKNVFQVHGIDAAETVVVRRQLRRSQVMAFFESLSPCLIGIEACATSHHWARELTKLGHEVRLMPAKDVKAYVKRNKNDAADAEAICEAVRRPTMRFVRVKSAEQQGQLMQHRTRDLLMRQRTQTINALRAHLGELGIAAAQGREGLKELLAVIADEGDERLPVNARISLVVLAAQLQALQTLIGSIEKRIVAQHRANEASKRLSTIPGIGIIGATAIAATITDPKAFRSGRDFAAWVGLVPREDSTGGKRKLGPISKQGDRYLRRILVVGAHSVLRRAKHNPGRYPWLTRLLARRPFKVVAIALANKIARIAWALLAKGGTYQPRLAAA

SEQ ID NO: 45360 - protein, 353 aa, unidentified
MRKYIGCDAHARYSIFASLREDGSWDPLVRVEHNELEMEGFLRQLPTGSPVALESSGNWYWLVRAMEEAGLDPRLAHALEAKKRMPGRNKTDHLDAKGLARMLRNGSLPEVWIPPASLLDLRDLMRTRLSMRQQGSELKCRILAALRRYGVRRYEDGKDLFADSRRVQLSVSIGRLPQECRIATSEEWAMLGQLEEHIDALEERIRQRIASLGWVRLLKTLPGVGTILGSTIYLEIGAVSRFPDAAHLASYAGLVPTVHSSGGKCWQGPTPRSANHFLKWAFVEAANVISARQKAWADKHVVQLYQRLKATKCHGKAVTAVARHLAESSWWILTKKQPYREPALATMSSSKNG

SEQ ID NO: 45361 - protein, 346 aa, unidentified
MNTLAETITAGVDTHLDVHVAAALNSVGRLLGVESFPTDSAGYRRLLAWLQSLGTVALVGVEGTGSYGAGLTRHLLGKGVRVVEVDRPNRQERRRAGKSDPLDAIEAARAALSGRAKGSPKTRNGSVEAIRVLRVARSSARKDRTRALNELRSLISTAPEELRSELRGLSIFRLVNKAAALRPAGRTDVTNATKLAMRSLARRVRDIDAEVAEIDAVLGPLVAETAPDLLTLNGVGTDSAGALLVAAGDNPDRLRNEATFARLCGVSPLDASSGKQQRHRLNRGGDRQANAALWRIVLVRLRWDPKTQAYVERRCKEGLTKLEAIRCLKRYVAREVFYYLVPLKTG

SEQ ID NO: 45362 - protein, 321 aa, unidentified
MVYIGIDISKSSFVVAYPSVNGYRTKAYPNTATGVRKFIVTLSAVEHHCVMEATGNYGFLLLYLLHQSGIAVSLVNPKQIKHFSRMMMAVTKTDEKDACMIAMYGEKMNPPIYKMPSQAIMLLKQKKTVIRQLRKQLVASKNLRESLIVLPYRDKDCVRALDKTIDFLTKQIEQLEAELADIASSEFDKQLKALTSIKGIGITLATALILTTGGFTYFDNAKQLSRFIGICPTYQQSGTSINIRGHINRNGDEYLRSLLYVASWSALRSNAACRESYLRLKANGKPSKVALIAVANKLVRQAFAIATTDSTYIDGFVSTKK

SEQ ID NO: 45363 - protein, 442 aa, unidentified
MTRKRKYRAISVKNVNLNSVEELADGPVTIGLDVSKDEIFAVVRDGTGEFLRPWKAKQPTELRALVELFQKLSEVRPLVIGLESTGTYGDAVRQAMTDIGLDIQRVSGKAKSDYEEIFDGVPSAHDGKDAAIVAELVAIGKSRPWPYGAPSEVESQMKGWVDWVDAQQDVYQTWLGRLEAQLARHWPEATKILNLTSVTLMRILAHYGGPSNVAEDPEAAQQLQHWGGHFLAKAKVQALCRSAQTTVGVRMTEPEQLQLQRYAQQALAALREINKAKNELQKLCESDERLQTLCEMVGPATACVLWVSLGDPKNYHCAEAYRKAMGLNLKERSSGKHKGKLKITKRGSSQARRWLYFVALRLVQQPSVRGWYEKKKEKDGGMGGRAVVAIMRKLALAIWHVVVRGTSFDPRRLFPGRPLLQPVEPKVRHLGALPPNPRDLSP

SEQ ID NO: 45364 - protein, 338 aa, unidentified
MKLYGGIDLHSNNSVLALLDEEERLVYRKRLPNDATAILEALGAYREAIVGLVVESTYNWYWLMDALMEAGYRVHLANTAALVQYTGLKYSDDDSDARWLAELLHRGLLAEGYIYPKEDRAVRDLLRRRSRLVQQHTANLLAVQNLFARDRGRGMSANEVKRLTPEAVSQLLADPNQALAVQGTLLAMRGQEGAIDLLERAALAQIRLRPAYRHLLSVSGIGQVLGLTIMLETGPIERFSAAGHYASYCRCVGSERLSNGKRKGRGNTKNGNKYLAWAYLEAANFAVRYNAVINRYYQRKRAKSNGVVAIKTVAHKLARACYYILREGSDFDVTRAFA

SEQ ID NO: 45365 - protein, 309 aa, unidentified
MSIHIGIDTGKSMLDVGFYPGERCERFANTAEGHRALLHVLAPLDVPHIAIEATGGYERGILDALAHAGYCVTRLASHRATAYSRAMGRFAKSDTLDARILARMAANITPQPYEVPSSERAELAELVRCRLQMVSQRDDNGRRLKQARLDAARQALQGMIEAASTQIRELDRRIAKATKAVDPASRLREVPGVGPVVEATLIAYLPELGRLTRQQIAALVGVAPYVDQSGCRDGARRVRAGRWIVRRALYMAAWAAVRAKGSALGERYRALRARGKVAKVAIVACMRCLITAINAMVRDQAGWRHAAAA

SEQ ID NO: 45366 - protein, 363 aa, unidentified
MLILGLDLGQSKSAWAQMDTATNEYKEGWVTMEDAALLRLLERCHPQQLVIESGPLAARVHDLARAHGIAVLVADTTAEAWCWRNVKRKTDRDDALKLVRLAALGQINPVHMPAPAVRQLRALLEYRRAMTAEQTRCKNRIRATLLTVGRRLPAGRTGLRRRLAVASWSAAARTTLRAELRPLAECAVEELWRGLAHTELQHLMDVEARLAEVSEKLAALAKHDPAVARLDAMPGVGPLTAQVLVAVLDQPRRFRTRRQVAAYGGLVPRRFQSGQMDRSGRISKRGSPLLRWALNQAAWAAVRGSSEVRAFYLRMGGSSKKRRKQAIVAVMRKLLVIGWALLRDGTRYQADRLRGRRQPAQAA

SEQ ID NO: 45367 - protein, 347 aa, unidentified
MLHIQNIQSGDKTKGDFSLYFFYFQNYLNMRKIVKQVAAIDVAQKELVVCLGYMYDDWSPELYAHKTFANTAKGFEALLAWVKKQSHQEVAVRFVMEATGVYHEAVAYFLVEKGEEVSIVLPNKISSYMRTLDVKTITDRTASEAIARFGLERKLDAWHAPKDIFRKLRQLTRERDQIVQERTIVKNQLHAEEVEAYPNKSSLTRIKARIKMLDKQEQEIKKEIAALIATDTDIQKIVVLICSLPGVGLLTAAIVLAETNGFGLIRNKRQLASYAGFDVKEKQSGTSVKGKPKISKKGNKHLRKAMHLPALTAIRHDERFKAVFARLVSKHGIKMKAAVAVQRKLLV

SEQ ID NO: 45368 - protein, 423 aa, unidentified
MRRCIGLDVHREFAQVAIWEDGIVRHIGQISATPEALRLFADSLAPSDEVAIEATANTHAIARLLERHVARVVVSNPQKTRAIAEARVKTDKVDAEVLAQLLAADYLPAVWLPDDETHALRRQVARRAHIVRQRTRLKNQVQSILHRNLVPRCPAADLFGRKGRTWLCEQELPDDERRTVEALLRQLDFHGEELRIVDAELGRVALRSDEVKRLMTIPGVDATVALSIVAAVGDFSRFSSPQKLVSYLGLNPRVRQSGGQPASHGRITKQGRAHARGMLVEAAWVAAKIPGPLRAFFERVRARRGMQVAVVATARKLAVLCWHLITRGEDYAFQRPSLTEKKLRTLELRAGMPSRRGQKGKAAAYSLKEIRRREAELAEQAEQAYRQLVADWQAKAPAKKGVAAANGARLSKPSAGQAARQGS

SEQ ID NO: 45369 - protein, 350 aa, unidentified
MLYTGIDYHKSFSYLTTMNEKGEIINQKKLPSNGEIVDFLKEFGEDMEIAVEATPSWYWLYDHLEDEGFQVKLSHPLKTKAIASAKVKTDKVDSATLAHLLRSNLLPLSYVPEKTVRLNRELLRYRASLVKIQTRVKNKIHTILAKNNITHSYTDLFGKQGIAFLHSLTFVENYKIAIEGYLTVLDAVRQEIREVSKKVRQIAEEDTDTLLLMTIPGMGYYSALLTRSEIGDVRRFRSAKQLCSYAGLVPSTYASGNTCFHGHITKQGSRWLRWILVEAAIHAVKRPGVLRRFYFKVERKKGGQIAKVATARKLLEWIYHILRDGRTYQEMEQIADLLGMGELGKHSGSE

SEQ ID NO: 45370 - protein, 348 aa, unidentified
MAHFVGLDVSVKETSVCVVDDAGKVILEQKVLTEPDAIIALLTSLGVTYGRIGIEAGPLSQWLVNALTAADLPVICVETRHMKALLTAQQINKTDRNDARGIAQMMRVGLFKPVHVKTLVAQEQRMLLTSRKLLQRKLLDVESDLRGTLRNFGLKVGVVSGGRYDARVRELVAGFPRLAAIVEPVLSVRRVMRQQLAVLHKMLLDTVRGDLVCRRLMTAPGVGAVVALTYRATVDQPQRFLHSRAVGAHVGLTPKRYQSGETDYEGGVSKCGDALLRTMLYEAAHVLLTRGAKWSWLKAWGVRVAQRRGMRRAIVAVARRLAVVLHRMWVDGSEFRWSKDGTAVPAVA

SEQ ID NO: 45371 - protein, 402 aa, unidentified
MNAVGIDVSKGKSMVAIMRPFGEIVSAPFEIKHTASGINSLVELINSVEGESRIVMEHTGRYYEVLAHQLSEANLFVSAINPKLIKDFDNDSLRKVKSDKADAVKIARYALDKWQNLKQYNVMDELRNQLKTMNRQFGFYIKHKTAMKNNLIGILDQTYPGVNTYFDSPARSDGSQKWVDFASTYWHVDCVRKMSLNSFIDHYQNWCKRKKYNFSQSKAEEIYGKAKELVPVLSKDAITKLIIKQAVDQLNSASTTVESLRTLMNETASKLPEYPVVMAMKGVGTSLGPQLMAEIGDVSRFTHKSAITVFAGVDPGVNESGSYEQKSVPTSKRGSSDLRKTLFQVMDVLIKTHPQDDPVYQFLNKKRAQGKPYYVYMTAGANKFLRIYYGRVKEYLSSLPES

SEQ ID NO: 45372 - protein, 354 aa, unidentified
MEHIGIDVHKKASQICILAEGGELIEQRIRTEPERFAAVLGPRPRARILLEASTDSEWVARCLEGLGHEVIVANPNFAPMYATRTRKVKTDRRDARALRDACLLGAYRPAHRLSDPQRHVRGRLTVRAAVVRTRTRSISLIRALLRQQGYRVPSGRAATFVQRVAALPLPGRLLSTIAPLLAIMPPLNVQLTYSDHAIEHLAAHDARVQRLRTVPNIGPVTATAFVATLDDVQRFRHAPQVAAYLGLVPRERSSGETQRRGHITKAGHPRVRWRLIQAAVSILRRRPPTTDALRRWALRIAARRGKQIAVVALARRVAGILYALLRDGSVYEARPAPHHPGPVAASSHVSAGTV

SEQ ID NO: 45373 - protein, 312 aa, unidentified
MEARYVGVDVSKDRLDVHVLPEGAAFAVARDGKGLAELVERLSALQPQRIAVEATGGFETIVAAALAGASLPLVIVNPAQVRHFAQALGRRAKTDPIDASMIARFVEATKPDLHPLADEAAQLLADLVARRRQIIEMIVAERNREKRVAVRRIRKSIARLIAALEKELSEIDAEIDASVRGSPAWREKEDLLASVPGVGPITARTLIAELPELGTLDGKRIASLAGLAPFTRQSGQWKGKAMIAGGRKSVRSALFLASLAACRHNPVLKAFRQRLIDAGKPKMLVAIAAARKLLTILNAILRDKQPWRPETA

SEQ ID NO: 45374 - protein, 479 aa, unidentified
MKKIGILAADVSKGYADFVLWNQQGNCVEKAFKLMDTKKDHEYAKQLVKEFMKRYQLDEIYVGMESTGGYENNWFLLFNSMKSEGVSRVMRINPRVVKATGTARMVRTITDAVSAENIAQYMMNFVSENKTVYKEDNGFRIARHVSAWTKNINKQITQTSNHLEKILYQSFPELLVYCRHGFPEWLLYMLQKYPLPAEIIKAGKHRLIKINFITQRKAEAIIEKAKNTVAQLTIDELLADTIKSMTTILLCNKRQIDKHKRSLTKQFGEAEEVKLIDTMPGITDETAVLLMMEIESVDNYKGAKQLCAHFGLHPMFKQSGDGTWAPKLSKMGRSTVRGLLYMPAITAIRTNEYFKTLYAQQRAKGKKHKQAICVVMHKMLCLMYGILHSKKPFDINIHKKNQQEGAQKKKEAEKKNQQRKKENKTQRERYIKANPFEAPISRKQTKKIKKELLAPIDEYQDVRGPEAHNEDKQINCLSS

SEQ ID NO: 45375 - protein, 377 aa, unidentified
MKAPSTRPAAVLGLDVGKSSHWACLIDRDGEVLASAPVRNREAELDALFASAPAGTLVVVDQFRNIGSLAVRRARAAGLVVAHLPGLAASRAAGLFAGEAKTDERDAAVIARTALGVPDSLSGVPGRGEALEAARALSSQRDHVVACATRDKNRLRAVLLESCPALEAAVDLSDRRWLELLAGFGGAWGIARSGAEGPRAEAAGEAAAASTAPPPALVEAENRQVRFLAARISEALDEAGALAAETAALLEGDETYACLLTVPGIGPRTAAQLAVSVDIGRFPDHDHLASYCGIAPRVRSSGTSVRSVRASRRGDARLKSLLIFSCNSLVRSSGRYGEYYRACRARGMGHGRALKAVARKRLRAIYAVMRDRVPYRE

SEQ ID NO: 45376 - protein, 417 aa, unidentified
MEYARASLPATPPGGVTAGIDWASEDHVAAVVDAAGAVVTRFTVEHTAAGLASLVTQLRKAGAGEAAIERPDGKVVDALLGAGFTVVVISPNQVRHLRSRYGSAGNKDDRFDAFVLADVLRTDRARLRPLQPDSPATITLRQAVRARKDLVCHRVAAANQLRAHLAIAFPGAVGLFAEIDSPVSLAFLSRFDCQDRASWLSQKRLAAWLKAASYSGRTPPGALYARLTAAPRGTTGEDGAAQAGITRALLAVLLTLTEQIKTLQAQIAAQLAEHADAHIFTSLPRSGTIRAARLLAEIGDCRARFPTPESLAGLAGVAPSTRKSGKAKVVAFRWAVDKQLRDAVCDFAGDSRRASPWAAQIYNDAIARGKDHPHAVRILARAWLYVIWHCWHDGTAYDPARHNALQRILSQQDPAAA

SEQ ID NO: 45377 - protein, 359 aa, unidentified
MTQHHSDRPDIFGGVDTHKDLHVAAVVDTHDRVLGVASFPTTRHGYKTMLAWMRSFGELSRVGIECTGTYGAGLLRYLQRNGITVLEVTTPDKTVRRKRGKDDTIDAENAAHAAYAGIRTVTPKTRDGMIEALRVLKVCRKTAVAARRVALQMIQTQVISAPEELRDQLRNMTRMQLIRTLAAWRPDLSGYRDVTMAYRIALKSLARRYLELHDEVADLDVMIKAIVDELAPALVSRMAVGYESASQLLITAGDNPDRLGSEASFAALCGVSPIPASSGKTQRHRLNRGGDRAANSALHIIAIGRLRLDATTQAYVTRRVTEGHSKLEAIRCLKRYIAREVYYVLRHRHQEINQATIAT

SEQ ID NO: 45378 - protein, 407 aa, unidentified
MIFVGVDWAEAHHDVCVLDGDGNVLGRRRVGDSFAGVGELHALVAAHLGDDEEADQVVVGIEKDRGLIVTALVAANYQVYGINPMAAARYRDRHHVSGSKSDPGDAKMLADLVRTDRQNHHQVAGDSALINGVQVLARAHQNAIWGRQRQVNALRSALKDYYPGALEAFGTDLSHMDAVAVLGVAPTPAIGRTLSRAKIVATLKRGGRQRQLDERAEKIQAALRQVQLHQPQVLEDAYGKVTASMVRTVALMTTEIAELEKALSESFEQHPSAKIVRSLPGMGTVLGARVLGEFGDDPNRYFDAKSRRNYAGTSPVTKASGKSRAVFARHSRNKRLVAALDQLAFCSLISSPGARRYYDEMRAREKTHRKAVRQLANRWVGILHTCLERGCLYDEQIAWPRPEEIAA

SEQ ID NO: 45379 - protein, 310 aa, unidentified
MESIIVGIDVSKDRLDVVVRPIGEVFAIERNPAGLEQLTLRLGQLSPEIVALEATGGFETIVAAALAAARLPVVVVNPAQIRAFAKAVGQRAKTDPIDAAVIAHFAEATRPQPRPLPDEATRLLADLIARRRQILEMMGAEHQREKRVTVPHLRKSIVRLLKALKRELTSLDTDINDAVRGSPAWRDKEDLLASVPGVGPTIARTLIAELPELGQLSRREIAALAGLAPFTRQSGQWRGRSFIGGGRTAVRTALFMGAMVAKRYNPILKAFFDRLVAAGKPKMVALIAVARKLLTMLNAILRDRRPWQTT

SEQ ID NO: 45380 - protein, 347 aa, unidentified
MRFYTQQHKFYCGIDLHARTMYLCVLNQGGGVLLHRDMKAAPAPFLQAIAPYREDVVVCVECIFTWYWLADLCAYEGIPFVLGHALYMKAIHGGKAKNDRIDAHKIAVLLRGGMLPQAYVYPAAMRATRDLLRRRMHLMRHRAGLLAHIQNTNSQYNLPQIGKKLAYKANRGGVAERFSDPAVQKSIEVDLALVGSYDRLLTELELEIVNTAKAHDAQTFYRLRSIPGVGKILALVLLYEIHDIHRFPRVQEFVSYCRLVKCAKESAGKRYGTAGAKIGNAYLKWAFSEAAVLFLRNNPAGQKYLARLAKKHGKGKALTVLAHKLARAIYYMLRRDTAFDLDKFFSE

SEQ ID NO: 45381 - protein, 339 aa, unidentified
MFIIGIDPHKRSHTAVAVDRSETVLDTIRVDADRHQRSRLLEWATRFEPRAWAVEGATGMGAMLAQQLVGAGEHVLDVPPKLSARVRLLERGRIDKTDPNDARSAAIVAWRTPALNVVTVNDEHRVVLRLLADRDHQITAQRTRSICRLHALLCVLIEGGTAKSLTVARAEKLLASVHADGPIILERLTMARQLIEEVRTLDAARAEIRRRHVTALEASKTTVTNVFGIGPLTAAIIVGRVGDVRRFPTAGHFARHNGTAPIEASSGPKTRHRLNPRGDRQLNHAIHMAAVTQVRNDTPGRAYYLRKQAEGKSRKEAMRALKRRISDAVYQRLITDAHR

SEQ ID NO: 45382 - protein, 321 aa, unidentified
MVKVKKIVGIDVSKLTIDVYDGQKSYQFKNNVTGFKHLVKKTSGHYVMEATGNYHVQLASYLFECNCLVSVVNPLVIKRFSQMRLIRAKTDRKDAVMIYKYGEIEELKQWEAPQKYIVELKQLFTSIDLMLKHRTGYKNQLEAYAQLKYNNNKNNSAIELQVEQLNNTIKELEAEAEALVLKNAKVLYGKLKTIPSIGPKSAMLLIAITNEFKNFENSKQLASYIGICPRIYQSGTSVNGKGKICKMGMGQMRKILYMASLTASRHNLGCKEMFNRLVENGKPKKVALVAVMNKLVKQAFAIGTNLEDYQESKFNLEIKLN

SEQ ID NO: 45383 - protein, 328 aa, unidentified
MVAKMSDAIVGIDVSKKTLDAYCARGQIQQGRTFANSPDGWKLVRTWLKAIGSKQAHVCMEATGRHSLGVALALHEAGHVVSVVNPAQIRDFARTKLGRNKTDKVDAALIREYAELFKPEPWTPPSPAMRRLCELQTTRAGIIRSRAEWKNRIGSGLGDITATKLAAATIDHFTTQLEAIDRAISETIDQDAELHGRRDLLVSVIGVGDTLAALLMAKMPEPGVLRRSGEIVAYAGLNPSHHRSGTSIDRPTRISKIGNAELRSALYMPALSAMRFNPAVAALVARLKSAGRLKPKQIVVAAMRKLLVLCFGVLKTGKRFDPAIAMSA

SEQ ID NO: 45384 - protein, 349 aa, unidentified
MSQNLNGAVAVIGIDIGKNSFHVVGLDDRGAIVLRQKWSRGQIEARLANMPPCLIGMEACVGAHHLSRKLKALGHDARLMPAKYVRPYSKGQKNDFRDAEAIAEAVQRPTMKFVAIKTADQLDLQALHRVRERLVSQRTGIINQIRAFLLERGVAVRQGLRFLRAELPRILATRPDVLSARMMQVISDLAEDWRRLDDRIDRLSSEIAVLARQDAGCERLMSVPGIGPIISSAMVAAIGTGDAFTKGRDFAAWLGLVPKQISTGDRTILGKISKRGNRYLRVLFVQAAWVVLIKPMSWERHGLRSWIEAAKKRLHRNVLAIALANKLARIAWAVLAGGRTFEANKLQAA

SEQ ID NO: 45385 - protein, 350 aa, unidentified
MDNATRWIGIDLHRRRSQIAVIDEHGELTLSKRIVNDRETMLELLGDPEGAHVVLEATYGWEWLAELLEEADYDVHLAHPLRTRAIAAARVKTDAIDAKTLAHLLRAGFLPEAYIAPRELRDLRELLRHRATLTRMRSAVKNRVHAILAKHGITNEHSDLFGKGGREFLAGLKLRDAPRRRLDSLIALICDFDREIETTTAEIEQRAKADDRVDVLTQIRGVGRYTAMLIIAEIGDINRFPTARHLCSWAGLTPSVRSSDGKARLGHITRQGSAALRWALVEAAQKITTGSGPLREKFERIAKRRGRKIAKVAVAREILTLAYYGLRDGEIRCLARRSRASAKAKLAAAA

SEQ ID NO: 45386 - protein, 346 aa, unidentified
MEHYIGLDVSLKQTAICVVDRTGKIVREGVVSSDPEAISAFIKAHASHVERIGLETGPTATWLWTEMRKMALPVICIDARHAKAALKMQINKSDRNDAVGIARIMQCGWYKEVHVKHLDSHAIKALLVSRALLVKIKRDIENQIRGLLKNLGLVIGRAKMNTFSLRAVKLAEARPELAAAVGPLLKSREAIAQQIEDLDRKVLRLARNNVQVRRFMTAPGIGPITALCYLATIDDPTRFKRSSSVGAYAGLTARRYASGEVDWSGRISKCGDKLLRGYLYEAANVLLTRVAKWSTLKAWGIRLAKKTGLRKAKVAVARKLAVILHRMWIDGTEFRWSSKEAANQSA

SEQ ID NO: 45387 - protein, 419 aa, unidentified
MAFKIFRKNCSGLDVHKTWIFACIGFTDANGRTEYKEKRFSSFSRGLRDLAAWLASYNCTDVCMESTGKYWIPVFNVLEKTCNVVLAHPKYTKPQKGNKTDRKDAKWICDLFMCDMIRPSFIPPAEIRHLRDLVRYRFKLTNMLTGEKNRAQNCLTVSNLKLDDVFSDVFGKSSRSITEYILAHPGETFDVTPFVDKRCKTPIEEIQAAVDGAISPEQAIKLRQCLDHIDELEKHKAEMEREILHVSDPYFDALNLIRTVPGFDKNLFTAIQILSEIGGDMSVFPTDQHLVSWAGCCPRNDQSNFKIKSTRISRAGSYLKPVLVQVANALIKSKKHPEITERYRRIKSHRGHKKAIIAICRMLLTAIWHILTDLKPYTAEGYLAPRPVKEEKILTTSQALSLLKLRGYVIKDTLPAAAS

SEQ ID NO: 45388 - protein, 410 aa, unidentified
MLFVGNDWAEAHHDVELVDAEGRVLVRRRLTEGVSGLAGLHALIADHLGDDDEPDQVLVGIETDRGPWVQALIAAGYTVYPINPLQVARYRERHGVAGTKSDPGDAHVLAEIVRLDRTHHRPAAGDLMVAEGLRLATRAHQTMIWTRQRSANTLRSLLREFYPAALVAFGDDLAGRDALAVLAAAPDPRRARNLSSRQLVSLLRKAGRQRNLDRRAGEIVAALRTEQLAARPGLEPIYAASVSALVAVITEMVTQTVVLEEQVRLGFGQHPDAEIYASQPGLGPILAARVLAEFGDDPDRYLDARGRKNYAGMAPITKASGTRRVVLARYVRNRRLADALYQQALSALTGSPGARAHYDRHRARGATHHQALRALANRLVGILHGCLSHHTLYNEETAWPTALNIDHVAA

SEQ ID NO: 45389 - protein, 356 aa, unidentified
MKYLKDIERFVENKVVFCGVDVHRNDNKLCYLCDGEIVEKVVVNGAVGGIIEHTKELYSKAKEIRFVYEAGFSGFHLYRALTANGYDCIVTPPSRIPRMADKVKTDKRDAQKLAQFHAGGLLRSVWVPPLQIDSDRHYIRLRDRYQKKLSRVKSQIKSQLRLHGKHWSPASGGYWTKRYIRWLESLEFHNESLGLILDEYLSEYRYLRNRVATLTRRIKELSRSEAYHTSYIRLTACRGVGLITAMTFLLEIWDMSRFKSVEAFGSYLGMTPSQHSSGEHVRHGHITREGNARVRKVLVESAWTVIRHDPFLRAKYQRIKSRGTNGKKAIVAVARSLAIRFRRCLLNEEPYVLGVC

SEQ ID NO: 45390 - protein, 480 aa, unidentified
MNIKAKKAKVQPLSKKSVINVLSQDEIKKKVQVIEQELKASTWRELETKGKFEKNDKLSFISEEMLIVGCDIGSETHYIRAIDTRGRELSKGAFEFSNSSEGFASAKAWVLKLAAKNDKKQIVLGLEPTGHYWFAIAAWMVSNGISVVQVNPYAVKQSKEIEDNSQLKDDRKDPKIIANLVKDGNYGMPYLPEDIYADMGRLSMFRDQLTEDRIRNINRLHREMKIYFPEYMDAFGKIDGAFTLEILKVAPIPSDIVELDEEGLKSLWHEAKLRGRGYSRARVIVDYAKKSVGLTGGTDAGRESIKWFVEQIIQLDEQLAEIENVLHQKCMEIPHAENILEINGVGENILAGILAEMGDISRFDDVKEIQKLSGMGLVACSSGKHKGQTKISHRGRKRLRYWLFQAAKSAVAHAVEFKQLHAYYTTRSMNPLKKMQSLVVIACKILRVIYTILNTGMKYDPERMLRDIRYPQGNTVQAAA

SEQ ID NO: 45391 - protein, 346 aa, unidentified
MRVLIGIDPHKATNAVAAIDERGELLEYAVFSTNRAGLRSLARWGKRFQKRRWAVEGAGGLGRFVALCLVAAGELVMDVPAKLSSQARLLATGNARKNDRVDAIHVALAALRRGERLAEVGEEEQAEVLRMLSERREDLIKERTRTLNRLHGLLRDLLPGGAPKNLSAEKAARVLRGVRPRSGPARTRRRLAADLLRDIRRLERQLYELECRIREAVKEASTGLTLMFGVGPILAAEIIGRVGNVARFPTKAHFASYTGTAPIEASSGEVVRHRLSRAGNRKLNHVVHMIAICQARHDTKGRTYYRRKLAEGKSEKEALRCLKRRISDAVYKQLRADLPAANLAAA

SEQ ID NO: 45392 - protein, 362 aa, unidentified
MKQSTTLIAFDQHAATTVAAVLLPGQRTPALHSLTSDSAAIVRFVERLRRGHVVQCCYEAGPCGFELHRALTARDIPCDVIAPALIPRRAGDRIKTDRRDAGQLAVLYRAGALTAIHIPTEQEEAARDLLRCREDIRADLLRARHRLAKFLLRHGRRFTDTKKAWSKRHDAWLRTQSWPLSALDQTHTAYLRTVDEAVARLRTVDEDLRGLLMLEPLRPRVERLRCFRGIDDLTALTIAAELGDPRRFAAARRAMAFVGLVPSEHSSGTKRARGAITKTGNAHLRRVLVEAAWHYRHRPFVGAALRRRQRGAPPAIVAQAWTAQQRLHRRYHRLAGRGKVKQQVNTAIARELTGFVWAALIQ

SEQ ID NO: 45393 - protein, 387 aa, unidentified
MVQVNDLSRSLTAFDPISSLVVVVEMSKASWLVSGAVPGVERQPLKKLEPDATALLRLIERWRNEAVRAGRPISRIVLAYEAGRDGFWLARWLIARGIEAHVIHSASVAVSRERKRAKTDRLDAAMLMRVFLGWLRGERGHCGMVAIPTMEEEDARRPSRERESLVDERSRITNRMKSALARLGIRGFKPHLRKAPERLASLRTAEGTGLPANTIEEFRRDMARLKLVREQISSIEKTRAERLERAPDTGPHAMVRLLARVIGIGIETADMLVREILSRKLRDRRAVARYAGLTGSPDESGLKRREKGLAKAGNARVRRGLIQLAWRFLMFQKDSALAQWYRTRTEGPSGARKTTMIVALARKLLIALWRLVTTGEVPDGVELRPAA

SEQ ID NO: 45394 - protein, 279 aa, unidentified
MLKAKVFIDELKNIIIDATLIEHNKNEFDNLFNSIKNYSNLIVVMESTSIYHLPVENYFRSKGIDTVVMNPKLVKQFKDTLNKSKTDKLDCFKIARCYLGTIDNFYYKNDEYFMYNPLARQYWSLFEGQTRLKNRYKQLIEIVFPEFNLVFNDLYDDLALNFIHDFPHSILFVNTRFDDKYQFVSFLGIDSVTSQSGISAYHGAISKTGCKFGRTILFNVVTIILQISAHANTSNSIYLFFRKKQSEGKHHYKCIIACETKLYKIIYKLCSSNCLYENK

SEQ ID NO: 45395 - protein, 400 aa, unidentified
MFIGVDPHKLSATIEVVDDRETVLATGRFGTDKAGYTAMRKVVARWPDRTWAVEGSNGAGRPLAQRLLADGERVVDVPAKLSARARQFDTGHNRKTDAHDAHAVAAVAVRTAGLRVLSYDVQLETLRMLVDRRQELTRTRIQTVNRLQRLLAELTPGKAKKDITTLQAKAILGSVRPRDLAGRTRRRLAAEQLAELVVVDKKIKALTKELKIMVLARGSTLMDLRGVGPVVAARTLADVGDVARFADRNRFASWTGTAPIEASSGEIVRHRLSRAGNRRMNHMIHIAAACQIRLDTPGRAYYRRKLAAGKTRAEAMRCLKRRISDALYRRLLIDARALMSGGADAGPGGHCGASLESSAAGSHPYTSTSDQPLPGPARTTLPAPTSTQKSSISRPLQPAS

SEQ ID NO: 45396 - protein, 345 aa, unidentified
MPIVGGLDIHRKQITFDYLDTMTGQVRRGQISPADRAHLRAWLARFAGLEDVAFAVEGCTGWRYVAEELAAAGVTVHLAEPADTAFARGRKRHAKTDKTDSRHLRMLLAEGRLPECWIPPGHILEARALLELYHDLRTEHTAWVQRIHAVLFHHGAPALGEGTLRTEQGVAALRAAAAAHLSPAGQLQVATALEVLEALETQLHLLRHQLLAAARHLTGAKVLAARLYGVGPVTGLAITCWLAGEGRFSSSRQAVRFAGLDITVSSSDRKGPPGKLSRQGPPVLRWAVYEAGKTHARTSAPDHRYYATVKDRKNSKRACLSEARKILRQACHILAELGDDALAAA

SEQ ID NO: 45397 - protein, 345 aa, unidentified
MELHTIGIDLGKTVFHLVGLNRRGEVVVRKKFSRKQLLHFTANLQVELIGMEACGGAHFLGRALQEQGHAVRLMPAQYVKPYVKTNKSDYIDAEAIAEAVTRPRMRFVPIKSDDQLDLQSLHRVRERWVMRRTAVVNQIRGLLLERGITIRKGRCHVDAALPGILEDASTKLSGALRLLLAQLRLELDHPQTRLDEADAVIQQTAGENEACRRLVAIPGVGPVTATAIIAAIGNGAAFRKGREFSAWLGMVPGEYTTGGKQKLLGISKRGNTYLRRLFVQGARAVLQQSAKQSSGLSAWLTQLTARTHPNVAAVALANKLARMAWAVLAKNEPYRPPVLAEAATD

SEQ ID NO: 45398 - protein, 347 aa, unidentified
MRPKLLMENDYILRQCVGIDVFKETLVVTMCMFSFAEEAHYSDVKTFKNNKTGFNQLVKWSRKEAYTDKPLRYVMEATGVYHEELANHLVKIGCTVIIMMPNKAREFAIWEGMISKNDTIDSRVLALVGCVKRSMRPWQPSKEIYHELRAMTRFAQDTKKLRLALKNHLEALEHSHQAEKSVVKHYEAMVSYLDKRLEMNLKNMKEKVASDEALNKKVENIITAPSLGFTSVITVIAETNGFALIQNRKQLTSYAGFDVKDNQSGNVKGTSRISKKGNSRIRAILYMPAVQAQLRSKHLKEAYDRIVQKHPDKKMIAVTAMERRLLLLIYALWKSDKPYDEDHNKKK

SEQ ID NO: 45399 - protein, 346 aa, unidentified
MEHYAGIDVSLEFSSVCVVDAQGKIVREAKVASEPEALVVFFASLGFAVKRIGLEAGPLSQWLHAGLKRAGFDILLLETRHVKAALSAMMVKTDRKDARGLAQLIRMGWFRPVHAKSMGSQEVRALLVARKQLLGRLIDVELSIRGILRGFGLKVGVVTRKGFEARIRELVTGHITLERIAGAMLSARATLKVEYEKLHKIVLTIVREDAVCRRLMTVPSVGPLVAITYKSAMDDPNRIAKSKAAGALFGLTPKKYQSGEKDVTGGITRAGDEMARTALYEAANVLLARITRFSKLKRWGIDVAKRRGSKRAKVALARKIAVILHRMWVDGTTYRWTDAQPIAVQV

SEQ ID NO: 45400 - protein, 387 aa, unidentified
MPQPNDLSRSLVALDQDSTIIAVVEMSQSSWLVAGVLPGIERQPRKKLEPSAERLLGLLLCWRDEAVRAGKKITRIALAFEAGRDGFWLARWLSARGVEAHVIHPSSVAVSREHRRAKTDRLDTELLKRAFLGWLRGERGHCSMARVPTMAEEDAKRPNRERGCLVGERTRIVNRMKATLARLGIRNFKPTLRKAAERLATLHTPEGIPLPPNGLAELQRDMARLGFVISQIKEIEEARQKRLEQEPESGPHAMVRHLARVVGVGVETADMLVHEVLSRPMRDRKAVARYAGLTGSPDESGAKRREQGLARAGNARVRRGMIQLAWRFLRFQKESALAQWYQARTADSRVGTRKTMIVALARKLLIALWRFVTTGETLEGVILRPAG

SEQ ID NO: 45401 - protein, 360 aa, unidentified
MSEYDGKQFVGIDLHRSRSVIVRMTAEGERLDAVRIVNDPMRLMAEIGKAGEAPEVVLEATYGWYWAADVLAEAGAHVHLAHPLGIKGFTTRRVKNDVRDATDLADLLRMGRLPEAWIAPPAVRELRELVRYRCRLVGRRSGLKAGVHAVLAKQGLRLPVTDLFGVRGRVLLAQVPLEPVLRARVNSQCRLIDAFGFEIDTVTGLLLRRAAKDPGWTVIQQIPGIGPILAAVILAEIGDIGRFAGPRQLCSWAGLTPKHYESDRTVRRGHITKQGSRLLRWALVEAAQKIPASAGWLVATRDGIRDRRGKGIATVAVARRLCTLVYFGLRDGHIRALDPQTTTTGSPDSDPHPLVAWSWS

SEQ ID NO: 45402 - protein, 438 aa, unidentified
MAKIINPNAAGIDIASNVHYVAVSEDKCENPVRSFKGFTRDLHILSKWLVDLGIKTVAMESTGAYWFQLYTILLDYGMEVFLVNAAHVKNVPGRKSDVIDAQWLQELHENGYLTACFQPDNLTRELRTYVRLRKQIIKEMATETQRMQKAMVNMNIKLHDVISDINGRTGRAIVDAIIDGERDPKRLASFRNRRIKCSEENLLKSLEGNWRDEQVFCLKMARDKYVELERHLQKTDQESERIIKLFTNTDIEEKKVKSRPRQNKQPNFNVGQYLYNVHGVDVLEIFGFKQTGALTVLSETGPNLKENFPSLKQFHSWLNLVPNNEISGGKILKSKVRKRKNHAGQAFREAANGLWNSHNPFGDYLRTKKAKSGAGPAVIATAKKIATIYYKMVTEKVEFDPYIIDGNRQVYLQKRAKSLSKTLESINKQLSEIEKLAS

SEQ ID NO: 45403 - protein, 474 aa, unidentified
MAAREKNTNKGAAPGEGGDGAEVAEERVEVVVYAAAIDVAKGFGMVCTRVPGSRPDRKRQRVWRAEATYHAVVALMDHLRCEGIQRLVLESTSDYWRIWYYLAEAAGLEVWLVNARDVKHLPGRGKSDRQDCVWLCKLNERGMLRRSFVPPQATRDLRALTRTRSRLAHDQARHQLRVEKILEDALLKISVVISDLFGASGRRFLDALVAGERSPRALAALGDARLKATPEQLADALTGRFRDIHAFETGMHLRLIDTINGEIARLDDRIQQQLASIPRVAPACTSCGLTGGGHAPGCASQGTPVPGPAERLDEITGVGVRNAQVLIAELGTDTTVFPTPGHAAAWARLTPRTLQSGTSVRPGRTGKGNPYLRGALGQCVMTAAKTDTRLGEQYRRIARRRGKQKAIVAVSRVICEIAWILISDPGARFTDPGPSYYRPRSPARQTRSKIREIERLNPGMQVTLTPIEPATTAA

SEQ ID NO: 45404 - protein, 362 aa, unidentified
MQKLQRRGTRFKGWTMGLDLHKRFIQYSVLDRRGDEVENGRIDASRKSLLKLLVAWRAKAAVQVSFEACGCFVWVFDALVGVLGREDVHVAQPARLKAIALSPEKTDATDAWWLAHYLYEGQLPEAFVAEGALRELRIAVRELRAVTKEHANLKRRFKSHLAQIGEPLRGNAFETKIGKAELEALLAQQTGMRGEALKCLWRRIQDLRRERNEWAARIEVQAQAFPEIELLQKELAGIGPTLAPILWAELGTPQRFHSAKAYAKATGLTPGYRESGGRRKSVGMTRAGSSDARWALTRAILSCLRCQRGDGVAVKEWVQARFKRKPKKVVIVAAARKLAEAVWRLFEWGEAFDLKRVYGAAG

SEQ ID NO: 45405 - protein, 375 aa, unidentified
MKRFASPVSKVNAEVIGLDVHQAVIVGCRLDRRGQPAGEFRFGGDREALATFLEEEVGRRRPHFALEACGGFLWIYDLLVERFGKERVHLAQPRRIQMIANSTSKNDRNDAFWLAHLTYEGRLPEAHVPEPLYRELRIASRERIHAVQARSKAVLRLRSHLRQMGERLPTRSFATKAGRAFVVERAQAVAGTRGAALREILLEIDTFDALAQRWKLELERLAQELPDAATLDREIPGVGKVLAATILGETGDVRRFSSPKALGRFTGMTPKERSTGGVQIQGGITREGSRALRWALMEAVAHCFLASKGAALAVADWTRSKAKRLGKLKARVAAARKLAESIWRLIHCGETFDAANPFGGRRPEDPALRRAVGLA

SEQ ID NO: 45406 - protein, 314 aa, unidentified
MNRVYVGMDVAKQHLDYALYGQAASYRLPNTPAGWAQLVAYLENQAVALVVVEATGPYSQGVVEVLVAAELPVAVVNPRQVRDFAKASGRLAKTDRIDSHVLAHYAQAIQPRPTALPSAAAQRLKATLARRRQLMEMLTAERNRLGQAHPAVRPSLQAHIAYLEDELAANDRDLDQQVQADPTWHATSQQLQSVPGVGKGLARTLLAELPELGQLSGKQIAALVGVAPLNRDSGALRGRRRVWGGRATVRTMLYMAALSARQHNPVIRAFYERLVQQGKPSKVALTACMRKLLVILNAMRKHATVWQAPALAAP

SEQ ID NO: 45407 - protein, 457 aa, unidentified
MSTRKKVKKKATSKANVQLPTLHPHAGGIDIGATAIQVAVPGDADPRPIRTFATFTDDLHALRDWLLKCGVKTVAMESTSVYWIPLFQILEAAGLEVCLVNARHCKNLPGRKTDISDCQWLQYLHSVGLLRASFRHPEQICAVRSLFRHRAALTRYAGSHVQHIQKALTQMNLQIHNVISDLTGVTGLAILEAILAGERDPQKLAALKDHRIKASRDTIARSLRGDWRTEHLFVIQQALDTWRHYQKLIAQCDEQLQQQMTQFDSKIDLAQHPLPANRRGNKKPQRNEPKFDTRSELYRLNGVDLTQVPSIQVSTALVLYTELGPDFATRFPTAKCFSSWLGACPDNRITGGRVLSVKTRHVNCRSARALRLAAQSLWHSKDYLGDCFRRWKARLGTPKAITAMAHKLARIIWHMVKFRTPYDPSVWDQAIAHSNQKKLKRLQQNAAALGLTLVSAS

SEQ ID NO: 45408 - protein, 366 aa, unidentified
MEKKIAYVGIDYHLNSLSIAVLIDGQKKLYDTIRLKNVDKIISKYMKKLSRDFQIRACYEASTNGYAFQRKMTHWGYSCDVIAPSLIPKKAGNRRKNDFRDARDLAQNFAAGMLSIVHPPSEDEEAVRSLVRCRTAFKDDAKRIKFKINSLLLSQGLRWPRSKWTFAHRKWLSEIQLSSPYLQEVLNEHLGHLHYMETRLKHLESQIEEIARSQIYSASVKKLRAFKGIGTLAAMILISEITDFRRFATPRALMAFLGLIPSENSSGDKQRGGSITKAGNCRCRTQLIESMQHYVKSPHISLQMRCDLSQVDAVTANRAIKCLKRLHKRYWALTMKGKNRPVAITAIAREFVGFIWAVMQPEPLPA

SEQ ID NO: 45409 - protein, 424 aa, unidentified
MNCNQNFKISQVTEGTLVLGIDVGSNTHYARAFDWRGLELSKVFKFKNSFEGFQSFVLWVNDLCCKYNKSKVIAGLEPTGHYWFSLGELLKENNITIAIVNPYHVKQSKELDDNLQTKNDSKDPKIIAKLVIDGRYSFPYIPEGIYGELRVADKLKNDITQQIISIKNKIHRWLSIYFSEYEKIYSSIDSKSGFLLLKETPLPKDIVELGSEGIVERWKQTKLRAVGLDKAKKLEEAAKKSIGCKNITSSARFEIKLLIEGYEYKQNQLNSITEELNKLCEKIPMIKEIAEIKGIGIATAISFVAEVGDIRRFKSAKQVQKYAGLALKENSSGKHKGLTRISKRGRKKLRTILFRATIPLIGFNKEFSSIYNYYIERKDNPLKKKQALTAICCKMIRIFFTILSKGIKYDETKMLHDIKRPVAA

SEQ ID NO: 45410 - protein, 333 aa, unidentified
MDAPFYFIGIDIAKLKFDVAVKKSPRKYLSAQFDNNQQGFALFSEWLATHTKGQPLYIVMEATNIYHEQLADYLYQAQHSVVVINPKCSANLAKGLNIRSKTDKVDAKLLARLGEIYQDEFDLYQPKSQGEKTLLRRLRQVEYYKSLKTKEQVRQQTLMDEICLAMSERLIQHLEQEIIQLEKQINQLVKNDEKLNQNNKLLNTIPAIGKTTAWWLLAHLGDGTRFKNGKAAATHAGLTPMVKQSGTSVDKKCGISRIGQSDLRKALYMPATAFSFGVHKNSIYATFVTRLVEQNKVAKKAVIVALMRKLVTIAQSVLKYQQPFDEKRYANLV

SEQ ID NO: 45411 - protein, 316 aa, unidentified
MSTNEEKTFVGIDVSKSTLDIRIEPASESMHVPYDEQGVKEVCQHLVKAAPTLIVMEATGGLETRLASILVAKGLPVAVVNPRQTRDFAKATGELAKTDRIDAAVLCRFAQAIRPAVRPFQDADTRDLEDLVNRRHQLVENRVQETLRLGTAASKALQRSLKSHIAWLDRQIATLDDDLGKRRRASDAWKAKDDLLRGIPGVGVVTSLTMTAKCPELGQLNRQRIAKLVGVAPLANDSGKHRGKRFVWGGRADVRAVLYTATVSAIRCNPVIKAFADRLKQAGKPAKVVIVACMRKLLTIMNAMVKDNAPWDPKRA

SEQ ID NO: 45412 - protein, 320 aa, unidentified
MSEEIFIGVDVCKAWLDLAQVPAAPADKSGALSPRVGNDEPGRAALVLQLKELGPTLVVMEATGGFEAALASELCAAGIAVAVVNPKKVRDFARATGVLAKTDRLDAQVLARFAQAIRPQVYSLPGETQQEIIELVDRRAQLVTMRAQEKNRLSTVKHVARTSVRQHIEWLDNRIKEIDKDLDGRLKDSTIYQPKYELLDSVPGVGRVTVTMLLGRLPELGTLDRKRLTALVGLAPFADDSGKRRGQRYIQGGRADIRTAMYMAALTAKRCNGPIKALYERLRLAGKPFKVAMTACMRKLLIILNAILKTGQPWRNAEAA

SEQ ID NO: 45413 - protein, 382 aa, unidentified
MTKKSEGVDLLPKRHRGARVELIELHSRDRRSEMNVTTYGLDLAKRVFQVHWIEPQTGEIKRKTLGRAEVRGFFARRESGVVAMEACGSAHHWGRVLTGLGHEVRLIAAQFVRPFVKTNKTDAADAEAIWEAAQRPGMRFVALKSEEQQAVLSLHRIRAQWVKMRTMQAHQVRGLLYEFGLVVPKGWRALLAQAAPLLGAEAPSAVPELLRGELQRQLEGLRALTARIVELEARIGAWQRREHECQRIAAMPGVGRLIATAVVATVGDARSFRSGREFAAFLGLVPRQSGTGGRVQLLGISKRGDPYLRTLLIHGARTVLNQQSRADRTLDPWLKGLLSRRPKNVAIVALANKMARTIWALLAHGRAFDRGWCSARPMPAML

SEQ ID NO: 45414 - protein, 342 aa, unidentified
MEHYAGIDVSLECSSVCVVDANGKIVREAKVASEPQALIDWFGSLGFGLERIGLEAGPLSQWLFAGMKKAGLAVELLETRHVRKAFEAMPVKSDRNDARGIAQLMRLGWFRPVHCKSMSAQETRSLLTARKLVQSKLHDVENSLRGILRGFGLKVGKTTGQKFAGRIEELVAGHPHLQTIAKALLAVRAVLRTEFAAFEKQTRRMVRSDMQARLLTSVPAVGPIVALSYASAIDDPARFKSSKQAGAHFGLTPKKHQSGETDYAGRISKIGDAAVRTALYEAANVMLTKPVKGCSQLKSWAMRIKNRAGMNKAKVALARRLAVIMHRMLADGTSFNAAAAAA

SEQ ID NO: 45415 - protein, 386 aa, unidentified
MIFIGIDIAKNSHFASAVNSDNEVIVKPFKFTNDDKGFNLFINTFKNFDLSNCIVGLESTGIYGDNLTTFLFSKGFKIGRINPIQTDSLRSSNIRKTKNDKIDTLLIAKCLMLGNYTLVTEKDIEIIKLRTICRFKFDVKKSQSKAKVQLVTCLDIAFPELSNFFKGNLHIKSSYALLTKYPTAKIIANTRIDALTNLLYSASKGHFKTDKAIALKDLAKHSIAMDNPAIGKQIQMLIEQIQMLQKQIDLLDIDITNIMEKLNSPILSIPGIGVWLGAIIISEIGDITRFSSATKLLAFAGLDPSVRQSGNFNANNTKISKRGSKHLRFAINYAAELIIWNDDTFYQYYTMKLAQGKSYLNAIGHVAHKLTRVIFKLLTTNTTFKA

SEQ ID NO: 45416 - protein, 416 aa, unidentified
MSSRTQSRPRIKADILVVGIDVAKRTHVAAIRKPDGTKEKPFPFGNDRSGFERLRARSERTRERLGLNGVVFALEATGHYGHALRQYLGLQGYAVLGINPAHTKKAKELEDNSPEKSDQKDARLISDLAAEGRGRLVRPVKGVFAELRRLGKLRERYVVERVRLSNRYSCLVDLVFPELVQEVRKLTIRSIRRLLAEYPTAREIAGLELEELEDRLSRWSRRRLRPDKIARIHRLARESIGIVEGLETARMEMRQLLESLELVEQRLQEVEAAQHAALEKVPYAELLLTVPQLGSVTVATILGETGDLRNYKNAEMVIKMAGYNLYTISSGMFRGKTRITKRGRPMLRRYLFLAACRLSKKGAPLREFHERLTARKAKPQVLVGSCRKLLRLLVAMVRDGKPYEPGRLAVPFGEAA

SEQ ID NO: 45417 - protein, 351 aa, unidentified
MIIIGCDFHTRYQQIATAEETTGELLLERRLDHQSGEAHAFYRSLQGPVRVGIEATGPIHWFERLLAELGHQLWIGDSAKIRASEVRKQKTDERDARLILDLLLAKRFPKIWVPTPAERDLRQLLWHRHKLVGLRTMLGNQLHALALSQGLCRKKKLFSKKGRMELGNLMLGPWAGRRRAKLLELLDQVDPPIAELDRAVLEEAQRREDVVLLMTHPGIGPVTALAFVLAIGPVTRFPRSKKVASYLGLNPSEESSGGRRRLGAISKQGNTMVRWLLIETVHHAVRQDPELRQDYQRLKFRRGHAVAKVAIARKLAVRMYWMLRSGADYAQLVRRQGSPGGTLMNASSSLA

SEQ ID NO: 45418 - protein, 348 aa, unidentified
MRVFIGLDVSLAKTAVCVVDRDGAVQWQGKVPSEPGPLIKRLAEWSGIIELVGIEACPLSEWLHRGLREAGIPVTCIETRHAQRFLSSRPVKTDKNDARGIAEMMRLGHYRPVHVKSPAAQSMRTTLAARMQLVASQLQIEGTIRGLLKVYGLKIGAIHRNRFAARALELLEMAALPELSAAIEPLLRVRESMRAERKVFDRTLAALSRRDDVSRRLMTIPGVGPVTSLAFVATVDDPGRFGSSKVLGAHLGLTPRVYQSGEIDRSGQISKCGDRMLRHLLYEAASALMTRTRKWSRLRAWGVSVAKRRGMKRATVAVARKLAVIMHRIWVTGDEFDFGGPAVAANAA

SEQ ID NO: 45419 - protein, 346 aa, unidentified
MRIIGCDLHARQQTISMLDTESGEVIEKTLQHEGEEVREFYAALSKPVLVGLEATGSMFWFLRLLEELGIEYRVGHPAAIRKAETRKQKHDRRDAELIRRLLVENRFPQIWLPTAEQRDLRTLLQHRHQLVRMRVMTQNGLQGLALSQGLRRGAKLWSQAGQRALDSLPLANYSGTRRQQLQELRQQLNQRLQMLDQAVCEQVERRAGARLLLSHPGVGPITALATEVFLGDARRFPNAKAVASYVGLIPSEHSSGGKQRNGSLSKQGNPLLRLLWVEAARAAARKDARLKQFYRKKLVQKGLGKAVVATARKLGIRLWIMMRDQIDYTEFCRRAEQRCPHAGMPE

SEQ ID NO: 45420 - protein, 347 aa, unidentified
MRFYTKQHQFYCGIDLHARTMYLCVLNQAGEILLHRNMQARPEPFLQAIAPYREDLVVCVECIFTWYWLADLCTAEGIPFVLGHALYMKAIYGGKAKNDKIDAQKIAVLLRGGMLPQAYVYPAAMRATRDLLRRRLHLTRKRAELLTHVQQTNWQYNLPELGQKIAYKANRHGLAARFPDPAVHKSVEVDLALIDFYDQLLRDVELTIVQTAKQHDAQTLYRLQSVPGIGKILSLVLLYEIHDISRFPRVQDFVSYCRLVKCAQESAGKRYGTSGTKIGNAYLKWAFSEAAVLFLRNNPAGQKYLARLEKKHGKGKALTVLAHKLARAIYYMLKRDVVFDLGTFLQS

SEQ ID NO: 45421 - protein, 319 aa, unidentified
MQSKLTIGMDIGKAEVVVACHESAFAVLKMANAVPVLRRWLATLPAGSRLGLEATGGYHEPVAELAHSLGFTVYILNPKDVHHYARALGARGKTDRLDAQVIAAYVAEHNARLHAFVPLSADEKLLRELARRRATLVNAKSMLQQSLRVLPGFEREGRELLRAMGSFADRLERKLAEIAARSSERAALVKRLQTIDGVGTLTSIRCATLFTRVPLHGSDAAVAFFGLDPRPHDSGQHRGRRRLSKRGPSEDRRLLYNAAMSAIRTPTWRPLYQHLRNRGLASTEAIIIIARRMVRIAFAMYQNHSDFNPRLVPRPSCPA

SEQ ID NO: 45422 - protein, 317 aa, unidentified
MSSGHVHVGIDISKDVLDVACIPGDMAWRVGNDEEGIKELVGKLREMAPALVVMEATGGYEILPTALLSHDGLPVVVVNPRQVRDFAKAAGILAKTDRLDAKVLARFGEAMKPTLRPIPDLQQQELSDLVLRRRQLVTMIVAEKNRLEKAKKAVRDSILKHLSWLEKELGNLDKGLEDKIKSSPVWQEKNDLLRGVKGVGPIFAATIIADVPELGRLNRKEIAALVGVAPLNRDSGTMRGHRRIWGGRSRVRTVLYLATLSAIRFNNVIFSFYQRLVTKGKAKKVAITACMRKFIVILNTMLKTGAPWNDMLVAENP

SEQ ID NO: 45423 - protein, 331 aa, unidentified
MNNNTKSILGIDISKHKFDASLRISARRLRQAFANTPAGFVALRQWLDQAGVSQLHAGLESTSRYGLALARFLHEQAFTVSILNPLALHHYARSRLQRSKHDKLEAELIVEYIAKETPPAWSPPSPAQSQLQELSRLLQARKLQLGQERNRLESLPQSRAARSAIQRFIRLLEKEILKLESQLLTSLSAEAQMLADWKLLLTIPGIGELTAAIILAELPSYLQSARAAAAYSGLTPARYQSGLRDTTTGLSPLGNRALRRALYFPALTAVRYNGPIAAKAQRLRTKDKPEKCILGAAMHQLVRQAWGVLKHKRPFDPNWKPPELIPPAVTT

SEQ ID NO: 45424 - protein, 346 aa, unidentified
MTKIIRIGIDTSKSVFVLHGVDPAEQVVLRKKLRRKQVLEFFVRLEPTRIGLEACGAAHYWARELQKLGHEVVLLPPQYVKPYVKRNKNDAADAEAICEAMSRPTMRFVPVKTAEQQAALMLVGVRDQLIARRTQLSNMIRGYAAEFGITAARGLDKIEPLLARIATDPGVPETAKELFDALAAEYAELKPTLRKIEAQLLAWHRQNELSRRLAEVPAIGPIGASLLVMKVPDPHGFRTGRDFAAWLGLTPKDHSTAGKQRLGVITRAGDEALRSVLVVGATAVIQHAKKERGKPSPWLMALIKRKPPKLAAVALANKTARIAWKLMVSGERYDPNRAAAVELIAA

SEQ ID NO: 45425 - protein, 351 aa, unidentified
MPRTSTVHAVTTIGMDMGKNTLHMIGLDTRGAIVLREKVSRGRIASRLANLPSCLIGIEAGLATHYVARELAALGHDVKQVPPTYAKPFRQGHKNDFRDAHSVAEAVQRPTTRFVPAKTDEQLDLQALHRVRSRLVSERTAVINQIRGFLLERGIIVRQGLRFLRQALPDILAKRTDVLSPRMVRIVADLASDWRQLDERIKPVTDEIETLAKSDDGCRRVMTVPGIGPIISSAMVAAIGNGAAFARGRDFSAWIGLVPKQMSTGDRTILGRITKRGNGYLRTLFVQAARVILLRPASWPKHSFGVWLARAAQRLHRNVLAAALANKLARIAWTVLAQERSYEARLTTAAA

SEQ ID NO: 45426 - protein, 382 aa, unidentified
MQASTLATPTAGHCGTVFVAIELSQKTWLVTLHSPDRDRISRHKLEGGDHAGLLALIAQVRARAAKKLGAVPEVTSCYEAGYDGFWLHRLLRAAGIANHVFDAASIAVEQRSRRAKTDRIDGELLLRTLMAHLRGEPRVVRIVRVPDVAEEDARRASRERDRLIIEQTAHTNRIKALLRLQGMAVGNPRRRDWLGWLGRQRDWQGQPLSPQLRAEVTREHTRLMVVREQLAALEQAQAARALPLPAPMAERQDHLQRLKALGPAFAATLVNELFYKNFRNRREVASYCGLTPSPWKSGGIDREQGISKAGNHRARHKAIELAWLWLRHQPDSALSRWFRTRTANAGKRARRIAIVALARKLIVALWRYLTTGLVPEQATMKV

SEQ ID NO: 45427 - protein, 290 aa, unidentified
MAEVVTIGLDIAKSVFQVHGIDAAGAVVLRRQVRRAHLLLFFAKQPKCLIGIEACASAHYWGRELSKLGHQVRLMPPSYVKPYVKRQKNDAADAEAICEAVTRPTMRFVEIKSPEQQSVMVLHRVRMMLMRQRTQLSNAIRAHMAEFGLVAPIGREGLQNLIKLVETSDARVPEEASACLQLLATQLKLLNSQILATDRRIRTSARATETGRRLMGIPGVGPLLASALVATVPDPKAFKSGRNLAAWVGLVPKQNSSGGKERMGGITKQGVTVHIPPPFRRRASRGSWAA

SEQ ID NO: 45428 - protein, 422 aa, unidentified
MSQEKRYAAWIGVDWADEKHAVCEYAVATASRRGYTIEQRSEALGDWIAQLRSRYGSQPVAVVMEQARGGLIYALMGSDFITIYPVNPQSLAKFRKALYPSGAKSDPPDAELLEEMVRQNPDRFRAWDPGDEQTRSLQLLTEARRKFVDDMTALTNQITSALKTYYPQALDWAGELSSPQACAFLRKWPTLDALQKTRAFRIREFYEKYGRPQRELLNERIREIEKAIPLTQDSAVVKAGAMAIQTLVGQIESLRVAIANYDAEIERIFQQHPDRAVFESFPGAGKVLAPRLAAAFGADRDRFQAALEIQELSGIAPVTERSGKTIWIHRRWACPKFLLQTFHEFADQARRLCAWSKLYYQQLRRRGKDHHAAIRALAYKWIRIMFRCWKDRKPYDDAVYMNSLHRRGSGLALDCGKPLSSM

SEQ ID NO: 45429 - protein, 400 aa, unidentified
MLSIGIDVSKGKSTVCGMKPGGEIVYTPFEIQHTREGMSELVSLLHNSGEEVRAVLESTGSYHCPVVAALLENGIFVSVVNSLRMKRFCSQSIRKVKTDRIDAMQIALYGLAYWQELQPTRLPEDTYRELQLLARQYYQMTSMLIKAKVDFNAICDQVLPGMQELMSDHAGRHKLSDFVLRYHHTTHILEMGETRFRKDYCKWAEKKGYRNRERMAALIFATAQNGIPVLPNAPSTQIVITEAIRVLHTVEASRDAILTQMQALAKTLPEYSLVREMPCIGDTLAPRLIAEIGDVRRFHSKRALIAYAGIDAPPYQSGKFCANNRHISKRGNRYLRKTGYEVMQSYVMHKPANDPIFTFIEKKRSEGKCGKLAMVAGLNKFLRIYYGKVTELYRSLPAIE

SEQ ID NO: 45430 - protein, 343 aa, unidentified
MDNIGLDRHKRESQLCILTADGEILEQRIRTSRERFTAVWGGRPPARVLLEASTESEWVARHLEALAHEVIVADPSFAPMYATRRRRVKTDRRDARTLAEACRLGAFRRAHRLSEAQRHVRAELAVRDALVRTRTRYVGVIKALVRRDGLRVATGEPIHLLPKLAALPLPAPLASELAPLLTLFEPLNGEIVAADRRLERRAAADPTIARLATAPSIGPVTATAFVATLDDVTRFASAHQVEAYLGLTPGEHSSGDQQHRGRIPKTGNTRTRWLLVEAGWRLLRSTQPEAAVLRTWGEQVARRRGRRIAAVALARRVAGILYAMWRDGTTFRLPVHAAERATA

SEQ ID NO: 45431 - protein, 418 aa, unidentified
MEMEPLYTCCAGLDVHKQTVVACLLRADGRAERKEIQTFGTTTVALEGLRDWLLAAGCVCVAMEATGSFWKPVYNILEGHCALLVVNAAHMHAVPGRKTDVRDAEWIATLLKHGLLQASFIPSRAQRELRDLTRTRTSLIDERSAAVNRIQQVLEDANIKVAGVGVVTDIMGKSGRAILAALLEGTMDAAAMAELARGRMRRKRAALEQALEGRMGTHHRMLIALHLEHVDMLDEQIERLSAEIAERLRPVEADLARLETIPGVGRRTAEILAAEIGLEMGRFASAAHLASWAGMCPGVHESAGKRKNGKRRAGNKAVRRALMEAAQAAARTKKPGRTYLRGQYRRLVVRCGKKKAAVAVGHTILRIAYRLLKEQETYQEGVLVHLDEHRRARVQQRALDQLKALGYDVTITPKAPAA

SEQ ID NO: 45432 - protein, 332 aa, unidentified
MEDAMFYLGIDVAKAKLDCVLLNPENQKRKSKTVENSFDGIGLLLKTLQGWGVEPGAMHVVMEPTSTYHERVALALVDVGCTVSLINPAHLRRYAQSVGARSKTDAADCALLARYGAAEKPKAWEPPSASARALRALLARRDAVAEDLQRECNRTEKLVTTEVPETVQLSLRDTIAFLEKQLEVLQREIERHIDEDPDLHDKRDLLLSIPGVGDRVAQHMTALLASHRFETAEQLAAYLGLVPVEWQSGSSIKGRPHLSKAGPAHLRKLLYMPAVVAVRHNPHIRALYERLIQQGKHKMAAIGAAMRKLAHLCFGVVHTGKPYNPSFNSKTA

SEQ ID NO: 45433 - protein, 344 aa, unidentified
MDNHTQYSGFAGVDLAKKVMQIHFVTEDGEITDKSTKRAEFLDFFRNRGKCLIGMEACGSSQDWARKLEAMGHGVHLMSPKAVKPFVSGQKNDHNDAIGIYKAMFNGVRRVPVKSTEIRDLQTLRRIRSQVTKDKVKEINHVRGLLAEYGIVMGKSLKAFNKDISSALESLKERGDVSPLVAEELRTTVEAIKTKIKRQKKLDQEIEQLARGCKSYENFLKTPGVGPVTAAMLCVLLCDPSIFANGRQFAAYIGLAPRSRGSGGKNYVIGIPSKFNCDCESRAVFVECAQAIARCKNKSPWVEGILRRKPKKVALIAIANKLARQVWAMANKGESFKQMEILTA

SEQ ID NO: 45434 - protein, 384 aa, unidentified
MKADFIPTEYDIFAGLDVSKKKMSVTFTNHQGFIRSLNMPHKAEHLVNYVRKHFPDQKTAFVYEAGPTGYGLYDGLAAQAYPCLIAAPSMIPRAPGQRVKTNRLDSKGLSENLRGGQLKSIHIPSPTYRQLRHLTQLRDVLVSELAGMKQRIKSLLLFEGIEFPPAPPGSQWSFLVKDKLRKLPCSGTVRFKLEQLLDSLEFNEKQVLKTITEIRRFCRNDLELSQCIKYLMTVSGIGWITASQLLARIGDWRELNNIRQLAGFLGLVPTEHSTGQRVDRGSITRTGDERLRSKLIQASWSAIRQDGELREFFRSVCRKHPREVASRVAIVAVARKLSVRISVVLMQQRPYEVREKVHSAPLTQEETSPQGTTRRQAEPGEKNS

SEQ ID NO: 45435 - protein, 289 aa, unidentified
METVPNVLEKVRELCGRLVSLSPALVVLEATGGLERPLVRELSAAGVPVALVNPRQVRDYARALGKLAKTDRIDAVVLAQFAQAVQPQPRPLPSEAAGKLRDLLSRRTQLKEMLLAEKNRLRRASPTLKEGLARHIRFLEEELAALEKEIAELKKAEKELAEKAAILESAPGVGKVTSAVLIGYLPELGKLPGKQLAALVGVAPFNWDSGRMRGRRAVWGRRSQVRSVLYMATVAAIRCNPVIAGFYRRLRAAGKPVKVALVACMRKLLVILNAMVRDGQSWNPAYTSP

SEQ ID NO: 45436 - protein, 424 aa, unidentified
MIPVPSLRALRHKLLYLEGILKIKHMDRNRTVPGLDVHKDTIYLCIMGHDEAIIFEKTYGVLTTELRQMCNDMVEHGVTEAAMESTAVYWVPVWNELCESMDLKLVNPYFIKQLPGRKSDVKDAQWIAECLLKNLIKGSFVPKPIVQDMRKLNRRIMDLNEDINYNSNKLDAALQRCGFRLSNYVSGTNSKSYQKVLQAIINGERDPEVLVKMVHGRTTNKHGKGTIKAAVMGSFSQTDITVFRQLKEMLDTINRQIDECQKELTDLCEKHFPEEYKRIQTIPGVKERAATAIIAETGVDMKMFATAAMLVGWCGLKPRNDVSNGRYKSRKVTHGNKYLCRILIEVAWAASRKKNCFFSNFSYVQVTQKHKSKMKIQVAIARKILVAVWHMLSKGEDFIDIYHRRLEQQRQMEEQLKSLASKMA

SEQ ID NO: 45437 - protein, 394 aa, unidentified
MTMLYVGIDASKHKHDCFITNADGEVLADVFTIRNSREGFEEFHRRIKSLKPKPSQENIKVGLEATGHYSDNIIRFLRKIGLPPVILNPLQVNLYRKGETLRKTKTDKSDARSIARLLIAKEFKPHSQPSYHSEELKTLTRHRHRMVWERSRFKVSYDRLRSIVFPELEGFTKGPPSVTELNLFLEFPTAEAISNCHLTRLSNLVEKNSHGRHGKEWAVRLKALAKDSIGSNSPARALELRQTIRQIMFISNEIDLVEAEIKTIVDESGTSLMTIPGISYTLAAIIMAEVGNITRFSTPEKLQAFAGLEPTAYQSGQFIGKRDVMVKRGSKYLRWALLQAARTVSIFDPIFGEYLDRKVAEGKHYNSAMGHVAKKLIRVIFKLMNTGEVYVAKA

SEQ ID NO: 45438 - protein, 349 aa, unidentified
MKITTFGLDLAKTVFQLHWVDVETGEVGRRRLRREQVLPFFANRVPAVVAMEACGSAHYWGRQLRALGHEVKLIAAQFVRPFVQTNKTDAADAQAIWEAAQRPKMRFVALKDEGQQSVLALHRMREQLVKLRTMQSNQVRGLLYEFGVVLPVGRERVLAELPKKLEQLETRLPAMLLTTLRLQQARLAELTRDIEAIELQLKGWAKTNAPSQRLQDIPGVGLLTATAAVATAGEAKSFRSGREFAAWLGIVPRQSGTGGRVKLLGISKRGDVYLRTLLIHGARAVINRRQEPDPWLQKLLARRPPNVAAVALANKMARMIWALLAHGRTYEPGYVSIRPVTGQRAPQGH

SEQ ID NO: 45439 - protein, 457 aa, unidentified
MSQRKRKARKSKINVNSLPPHLRHINFKAAGIDIGSDRHLVAVPEGSDDVSVRQFGAFTSDLHEIADWLKKCGVTTVAMESTGVYWIPLFELLEQRGFEVKLVDARHVKNVSGRKSDVLDCQWLQQLHTYGLLQGAFRPPDEVCVLRSYMRQKEMLTQTSSMHIQHMQKALQQMNLLLHNVVSDITGVTGMKIIKAILAGERDPNVLSLNRQEGCRNSKETIAKSLVGNFRDEHMFALKQAVELYETYQAKIAECEQALIKHLETQPDVTDDQPPDSGKPVRARERMRADVDVREKLFKMTGVDLFATPGLAADTLLTLASEVGFDMRAWKSVKHFTSWLGLCPGTKLSGGKALDRRTKRNANRGAQAFRMAAASLARSQTALGAFYRRIRSRTDGRRAITATAHKIARIYYSMLTKGTPYVEAGQQAYEQMFKERRINALKKQAHSLGYQLLPSAS

SEQ ID NO: 45440 - protein, 407 aa, unidentified
MFAGIDWAADEHAVCVIDDVGRVAERFTISHTADGFERLVRRLARHGEPAELAVAIERPDGRLVDRLLDAGHPVVPVKTTAIKAWREAEVGSGAKSDPGDAQVIADYLRLRRHDLRSLRPFSEETRALRAVVRTRTDLVDARVAAGNQLAAMLTAFWPGAGELFADVWSEIALAFLWLYPTPAAAAHLCEGRMAGFLRKHGYSGRRSPAELLARLRTAPAGLPDGPESEARRDAVLATIRVVRALNRSIKDLDRAVVAHLDEHPDAIVFRSLPRAGQVNAAQMLAEWGDCREAYDDPEAIAALSGMAPVTRRSGKHLAVGFRWACNTRFRNAIATFADNSRHASPWAAQVYRAAMGRGADHPHAVRILARAWIRVIYRCWVDQVAYDPGRHGAARRLEEAQTAGIAA

SEQ ID NO: 45441 - protein, 331 aa, unidentified
MNQLGIDISNKVFDVSMQSSAKAHRRQFPNTAAGHRQFIKWSLKNSDSARVCMEATGIYHLQLALALHRQAGIEVMVVNPRAARRYAQAHMVRAKTDAVDADGMLQYLQGMPFRPWCAPRDQVLQLQSLAHRLGQLGKEHTRECCRLHAAQRAGAHARLAQQDIKTHLRQLKKHIERVQRHAIELIGQDRQFADDLRIIDSIPGFAQLSAMKVIAELAPLAKDMGPAQWVAQAGLDPRPQESGSSLHPPRRISKQGNARLRAALYMPALSAIRHDANVKAFYNALLARGKAKMQAIIAVMRKLLHAIWGMLHHRQEWNGSKFYRLETANMA

SEQ ID NO: 45442 - protein, 315 aa, unidentified
MNTIEQPNQPVHIGIDVAKATLQIDLLGKSRKLPNTTAGHQELLGLLPGNAFIIMESTGSYHIAALECFQAAGISVAIVNPVRVKQFGKARGTLAKTDPVDAALLSAFGRAFLPHPTPPRDPERVLLSELVNLRDTLSAQITLWNNLVEHQQSAAAGKLSEAQARAATKAMADVEVRMAKLIKENKTMAPVAAVLRENKGVGAVTVAVLLAEMPELGHLNRREAAALAGVAPCANDSGKHEGKRYIRGGRPRIKRALYLASLSAVRHHATLSPTYKALRASGKPAKVALIAIARKLVVILNAKLKEHYATLAQPI

SEQ ID NO: 45443 - protein, 361 aa, unidentified
MPGTMTYVGFDVHARSTHAAAIDVMTGELSRMRFGGGVDAAVDWLTTLRGPVRACYEAGPTGYGLYRAAVAAGVGMEVIAPGLTPRGRGDRVKTDRKDAELLARCLIAGSLHPVKVPAPAVEAAREVIRAHDACRRDLMNARHRVSKMLLRHGRVYPDSSTWTQKHRRWLSAQQFPEPMSAFTYADLIATVDGLTARKKMLAEQISVLATDPAWWPTVARLRAFRGVDTLTALAIHLELGADWARFEKPTRVGSWLGLTPSRSQSGESDRHGAITKTGSHLARRLLVESAWHQCREPRVGATLQNRQAGQPDHILQISNRAQQRLHHLYTSMRSRGKHHNVTTVAVARELSCFLWAAATAP

SEQ ID NO: 45444 - protein, 320 aa, unidentified
MAATEVFVGIDVSRDSLEIATRPTGDCWHVGNDPAGISALVARLRAVGPGLIVLEATGGLEVAVLAALGSVGLPVVAVNPRQVRDFAKAIGKLAKTDALDAQVLAHFAEAVRPAVRPLPDAATRELSALVTRRRQLVEMLTAEENRRKTAASAIRVDIQEHIAWLRKRLHGVDRELGQAIRSSSLWREQEDVLRSVPGIGPVVSATLLADLPELGTLGRKQIAALVGLAPLNRDSGTLRGKRTIWGGRATVRAALYMGALVGSRCNPVLYAMYTRLVAAGKTKKLALTACMHKLLTILNAMLKHRTPWARPTAASAHTTS

SEQ ID NO: 45445 - protein, 411 aa, unidentified
MEVIYKRCCGLDVHKEIVVACLLIREGGKVVKEIRTFLTMTVDLVVLHDWLKAHQVTHVAMESTGIYWRPVFNLLEEDFTVLLVNAAHIKTVPGRKTDVKDCEWIADLLSHGLLRGSFIPPEPIRDLRDLTRYRKTLTDERVREVNRLHKFLEAANIKLSSVATDVMGVSGRAMLEALTAGSTDPQVLSELAKGRLRKKLPELRKALEGRFRSHHRFMVAEILTHLDFLDEAIERVSQEVSNRIVPFSQKVEVLDPVPGINQRMAEDVLSEMGVDMSYFPSHGHAASWTGLCPGNNESAGKRKSGKTRKGNQWLRRYLIEAAWAAVRKRGTYLSALYYRLVPRRGKKKAIVAVAHSLLVMIYHILKDQVPYHELGSNYFNKLNIAYVQRHHVKRLESLGFKVILEPLSEAA

SEQ ID NO: 45446 - protein, 319 aa, unidentified
MGRNNIEFEQVIERGCGLDVHRDTVVATVMGKGIETETRTFGTTTSSLKELGEWFASLHVTDGAMESTGIYWKPVLHVLREYPLKLIVVNARHIKNVPGRKTDKADSQWICKLLISGLLKGSFIPPENIQELRDLHRYKKKPVGAIASEKNRIIRVLEDANVKLSSVVSDTSGVTATYLINGLIEGRRDLENLIAECYHRKLQASREQIKEAINGRLTPHHAFILKSMQKHIASVEAQISEIDVEIEKYIKDFEKEIELLQTIPGVGKDGAIGIVAEIGVDMDVFPSEHHLASHSGMCPGNNESAGKKKVQEHDKGTNT

SEQ ID NO: 45447 - protein, 357 aa, unidentified
MGSIALGRTDVVIGVDTHKDRHAAVAVDGLGGRLGELSVDATNEGYAELVAWAGSHGRVAAFGVEGTGSYGVGLARFLRRHGIRAIDVSRPPRRHERRLAGKNDTIDAEHAARAVLAGTATATPKLANGAVEAIRLVKIARDTAVKVQSQAMITLKATVVTGTEELRAELKPLTDFALVTACAAFESADDISDPADAMRHVLGSLARRWLALHEEIKLHTRHLKTLTAAAAPKLAEAFGIGFDSAAELLVTAGDNADRVRSEAAFAKLCGACPIPASSGKTSRHRLNRGGNRQANAALYRVVIVRMRWHEPTIAYVTRRTNEGLSKKEIIRCLKRYLAREVFGLLPVLVPQSVPEPA

SEQ ID NO: 45448 - protein, 403 aa, unidentified
MERTAGIDLASEEHRLVVVDGEGRELEKRRISHSEAGVQALIDRLLELEVMRVAVERPNGLVVDRLLEAGISVVPVHPNQLAAARDRYRSGGGTSDGFDAYVLAELARTDMHRLMLLRPDSDETRALRVLTRARDDLVGQRVALCNQLRAQLEAFWPGAARIFADVDSPIARAFLERYPCPEDARALGEKRLAAFLARNGYSGRRSAGELLQRLREAPTGTTGELEAEARRQVVLGLVAALKPIVEQIKLLTSQIRGALDTHADGHIFRSLFRDRKSVVTAAELAAEIGDRRERYPSRDRLEARAGQSPVAIESGKKKVASFRWACNKTLRDAVSVLADSSREHNPWARKIYADASARGCDHPHAIRILGRAWLRIIWRLWHDRQPYDPSRHGNLNRLLAAGG

SEQ ID NO: 45449 - protein, 371 aa, unidentified
MDESSKTLYVGLDVHKDSIAVAYAPEDRGAEVVSLGSIGTRQCDIDALIRKLQSKGATLVFVYEAGPCGYWLYRYLTRKGLSCHVVAPSLIPRKPGDRVKTDRRDAVMLARLMRSGDLTSIYVPGIEDEAIRDLSRGREDAMRDLKATKYRLKAFLLRQDIRYEGRANWNAAHLRWLAEVVCPTRAQQIVFQEYVRGVTEQHERLQRLEGELHAEVKGWRLYPVVEAIQALRGVELTGAVILMAELGDITRFDTPRQLMSHLGLTPSEYSSGERRRQGGITKAGNTHARRALVEGAWAYRYPAKVSRHLQLRLETLPAEVRAIGWKAQVRLCKRYRQLSARGKHANQVVVAIAREMAAFAWAIARTVPLAL

SEQ ID NO: 45450 - protein, 405 aa, unidentified
MKVYIGIDWSENKHDVCMMHETGDVLLVKQIAHTIAGFRQLDQARASLGVGRQAVVIGLETAHNLLVDYLWDQGYEQIYVLPPSVVKSAQKRYRQSGAKDDRWDAHLIANLLRTDQRYYSPWQPDQPLTRQIRAEVRFAQQLGQEMVRDGNRLRSLVLRYYPAVLDAFPHLDSVVFLAFLQAFPTLSQAQALSFEELKIFLRQHHHTQARTWPPIYAGLHSDHPPSNPDLDAAYAPLAVAQARILETLIRSRQACLTRLDKLFQQHPDHEIYDSLPKAGTLLAPALLAKLGDDRARYPTPAVLQAVAGTCPLTKRSGKHAYVLFRTACDRDFRHIVQQWARLSLDASPWAATYYHTVRPHCRTDNDAVRRLANRWLEILWRLWIDRKPYEEALHLKQHTLRSQAR

SEQ ID NO: 45451 - protein, 333 aa, unidentified
MGFDTHLGTFDMVAVDGLDRELESAQVANTPQGWAEAVATAHKFGITLVGVEGASSYGAALARTLLGAGITVKEVPTRDTAWTRRSHGGAKNDRIDARAAARAVLAGKGNVWTDDPAQETMRIVTHHRESLVRAQTRAVNELRALLVGYDPPAAARLGRLNTLKGFNALAGLAPDSDPHRELIAQLIRDLADDCARRLTTIRKLTGQLKTLMPEAGQRLIDSIDGCGVVSAAIILGELAGTDQFATEAKFAMWAGAAPLDASSGQNLHHRLNRTGNRQVNRALHIVIATQLRHGGEAADYLTRRLREGKPPRAAVRACKRHLARRIWKILHQT

SEQ ID NO: 45452 - protein, 348 aa, unidentified
MTIAMIGLDTAKNLFQVHGVDEGGRAVLRRKLHRSELVGFFERQPRCTVFLEACGAGHYWGRLLSGFGHEVKLIAPEAVRPFVKKGRMNDAADAAALCVAGTRPETRFVPIKSVEQQAVLALHAARSLLVKQQTMLANALRGLAGEFGVTVPRGLHKLEELAALVSAEEGIPAAGRQAMAELHAHGRAVAGRVAALEERIVRHARQDATARRLATIPGIGPITASLIAATVGDHIGAFRSARHFAAWLGLVPRQHSTGGRTRLGGITKAGNAEIRRLLVLGATSMVWRATCRDSKAGLWVRGVLARRPVRLVTVALANKLARIAWALMTRGEVYQAQGRAPAAAAAVA

SEQ ID NO: 45453 - protein, 343 aa, unidentified
MDHFAGLDVSVKETSVCIVDETGKVIREVKVASEAEALLAVLANPAYHFKRIGLEAGPLSQWLYSALTEAGLPVVCVEARHMRAVLKAQINKTDRNDARGIAQMMRVGLYRPVHVKTVRSQKLRMLLTHRKLLQSKAIAIDNDLRGTLRNFGLKVGMVGAARFEARIKELVQNVPDLAALIEPLLVVRRVLREQLGILHRRLLAVVRDDDVCRRLMTVPGVGPVVALTYRATVDVPARFRKSKSVGAVFGLTCAKYQSGEIEHSGAISRCGDEMMRTMLYEAAQSMLVHSRRWSWLKAWAMQVAKRRGMKRAIVALARRLAVIMHRIWVDGTEFRWTREVAAV

SEQ ID NO: 45454 - protein, 393 aa, unidentified
MVCVGIDVAKDKHDCFIISSEGEILADVFTIPNNAEGFDTLLQAIRRSTRPEDKIKVGLEATGHYSYNILGFLLDKGLPTYVINPLHTNLYRKSLSLRKTKTDRVDARTIAAMLMSDVDLKPYTDTAYHNEELKSLTRYRFDKVRERAKLKQSVSRLVTILFPELEKLVSSLHSASVYALLSEFPGAKQISSTHMTHLKAVLKNASQGRYGQEMAETIRNAARSSVGSVMPAKSLELQHTIRLIRELDAEIEDIETAIQAIVDEMQSPITTIPGMGVRMGAVILAEIGDFSRFDSPDKILAYAGMSPSTYQSGQLSLSGAYSHMEKRGSRYLRYALYNATKHVCHWDPTFAAYLAKKRAEGKHYNVALSHAAKKLVRLIFAMEKSQRPYCAAA

SEQ ID NO: 45455 - protein, 351 aa, unidentified
MRKIAYLGMDVHSNHCVLGDMDAKGNFRGAQTFCTSEQSIIKALQDVKATEKYLTLEEGNLAYWVAQVAAPYVTEVIPCDPKENALIYKGSNKNDKVDTKKLCRLLRLGELKRVYHPETDERAIFKAAAQHYIDLRDQQISLKQKIKAMYRHWGVIDVAGEAVYSPKKRDNYLCQIKHLAIRNEISRLYYLMDQTESMQERALKAMKQLGRKYPEIKQFQKMPGIGEILSHIFDAFIQTPLRFPDKHKLWRYSRLGVTDRSSDGKPLGFKRLDRSGISELKSLTYQAWMSALRSDNEVKRFYKNSLERTFSRVHARLNTQRKIIATMYGMWKRGEPYNPKLFLDSPQSGVV

SEQ ID NO: 45456 - protein, 350 aa, unidentified
MVVVGADVHKRTHTFVAVNEAGRKLGEKTVKAITAGHAEAVMWARERFGAEIIWAIEDCRHLSARLERDLFALGQKVVRVPPKLMAQSRASARTRGKSDPIDALAVARGFLREPDLPVASHDEVSRELKLLVDRRETLVAQRTATINRLLWRVHELDPERAPKARSLDLAKHRRLLGDWLDAEPGIVAELARDELADITRLTETINALAKRIGERVRAVAPALLAMPGCAELTAAKLIGETAGVTRFKSEAAFARHAGVAPVPVWSGNTHGRVRLTRSGNRQLNAALHRIAVTQIRLDGLGQNYYRHRLANGDSTPEALRCLKRRLARVVFGHLQTDHNHRQKPCQMAAA

SEQ ID NO: 45457 - protein, 410 aa, unidentified
MEVLHAHCAGLDVHKESVVACVRHMADSKVTTVVKTFKTTTQELMALSNWLSAEGATHIAMEATGVYWKPVWHILSDGELELILANAAHVKNVPGRKTDVNDATWLADLMAHGLIQASFVPDEPTQQMRDLLRTRKQMVRERSSHVQRIQKTLEDANIKLDSVVTDILGLSGRRIIEALIAGQTMPQALASLAHRRIHASADELEAALRGRVTKHHRFLLKLHLDQIDALDAALARIDEEVGANVEPFRTAVEMLSTIPGISTLSAEVIVAEIGIDMSHFETAGHLISWAGLCPKNDESAGKRRSNRMKKGAPWLKTTLIQCAWAASRKKNSYLQAQYLRIRSRRGAKKAIGAVAASMLTAAYHMLKDGTLYQDLGANHFDNRAKGKHVLRLVNRLQNLGFDVQITPLAA

SEQ ID NO: 45458 - protein, 430 aa, unidentified
MKSNTQNAKIEAITEKTLVLGIDVGSEMHYARAFDYRGIEYSKKPFKFSNTEAGFVTFKEWILNLKERHEKDKVVPGMEPTGHYWFNLGKFLQDNEMKPVLVNPHHVKKSKELDDNNPTKNDRKDPKVIAGLVREGRYMIPYLPDGVYADLRTASNIRFQLQAELTRIQNRISRWFNIYFPEYKTVYGKPDAKSGMLILKAAPLPEDILTLGIDGVNQIWRDEKLRAVGKARAKTLIEAAEHSVGSKEGAVSARMEIRMLLEDYESRNTRLQEVMVLIEELIRKIPMAEKLLEIKGVGIRTVSGFLAEVGDISRFNNPKELQKLAGLALVENSLGKHKGETTISRRGRKRLIYLLFEVAMSLVSKNQEFRELHNYYTTRRLNPLKKMQSLMAIAAKLIRVFYAILTKGVDYDPKKMVSDIKRPAVYLQAA

SEQ ID NO: 45459 - protein, 333 aa, unidentified
MMNMHSQGRVASEATRPNAGIDVSKEHLDVHLLELGMRVDNDASGWEPLIAKLKESDVDLVVVEASGGYERGLVTALHRARIDVARVNPRQAREFARSMGVLAKTDRVDARCLRDFADVLARHKDRHKYITVPADPERELLAALMTRRRQLVDMRVAEANRLEGATARTVRSIRSVIKTLDKQLHDIDGDIDQHLERHFKPQKELLDSVRGVGPVTILTLTSALPELGRLGRRQIAKLVGVAPLADDSGRRKGVRRTAGGRSEVRAVVYMATLTAIRHNPVIQVFYRRLVAAGKPKKVAIVACMRKLLTILNAIVRDQAPWRTDAGITSSRST

SEQ ID NO: 45460 - protein, 351 aa, unidentified
MPHKLNSGIAVIGVDIGKNSFHVVGHDKRGAIVLRQKWSRGQMEARLANLRPCLIGMEACVGAHHLSRKLQMLGHDARLMPAKYVRPYSKGQKNDFRDAEAIAEAVQRPTMKFVATKTAEQLDLQALHRVRERLVSQRTGIINQIRAFLLERGIAVRQGLRFLRAELPRILAASCDALSPRMLRVIEDLAGDWRLLDQRIEGLSSEIEALARKDKDCERLMTVPGIGPIISSAMVAAVGTGDAFSKGRDFGAWLGLVPKQISTGDRTILGSISKRGNRYLRTLFVQAAWVVLVRIGPKHWDRYGLKAWIEAAKKRLHHNVLAIALANKLARIAWSVLAHGRAFEATKIQAA

SEQ ID NO: 45461 - protein, 342 aa, unidentified
MMGCERGLVCFGRPCDLPRLCREHVSVVVVCPLVLPLVQREEDGVRAVGRSIGLDVHLDFCEVAIAEDGAVRSAGRVETRPERLELFAQSPGPDDRVALEVTGNAWEIARILEPHVKRVIVVSPDDTGIRQARAKTDRLDARALARLLAAGELEAVWMPDARTRVMRRRLARREQLVRSRSRAKNEIHAVLMRRLKGRPPVSDLFGVKGREWLRALELPLEEAETIDSALRHVEFLDQEIAAVERLIARDALGSGEARRLMTVPGVNVICAASFLAAVGDIRRFRTTRALVGHLGLDPRVRQSGSEPARGGRISKQGSASARWALVESAWSVVHQPGPLRAF

SEQ ID NO: 45462 - protein, 340 aa, unidentified
MCEYDGKQFVGIDLHRQRSVIVRQTDSGEQLSAVRIVNDPVALGLQLEEAGSNPEVVLEATYGWYWAVDVLQAAGAQVHLAHPLGVKGFRYRRVKNDVRDAADLADLLRMNRLPEAWIAPPQVRELRELVRYRAKIVAIRSGLKAQVHAVLAKAGVLIAATDLFGVDGRKRLEKTALAGPYAARVASLLHLINVFDAEEAVFVALIAERLAEHRGYRAIQGLPGVGPILGAIFVAEIGEVHRFAGPRPLCSWAGLTPRHHESDTVIHRGHITKQGSKLVRWATVEAIQRKTTVKIGADRKRIEARRGKSVAKIAAARKLLTLVYYGLRDGEIRALARDAA

SEQ ID NO: 45463 - protein, 458 aa, unidentified
MNTRILGIDLAVTAAHKAIVLDQASNAYVSRLLTFHTDPADLDYVLDTARAGASGPVRLQAVLEATAMSWYTVGQYLDRHNVEVYRVNGQQVADLRRVYQRHAKSDRIDARVLARLPLVMPDSLHRCFFPSGPLITLQRACREVKRLKDLVIASKNRILATDQLTWLGLSSVVSPFSPLAFWLRENWYDPWRVQAASAEQLAQAWQTASPEEPAGISWAPALIRQAERVTALYNNPDLLDYAQFQASLQREQARLRQADEQAHQLRLKTVRPLYRQLHPTRNLETLRGVGQDSAAIYIAFIGDIQRFPSLRNFLGWTGLIPFSRQSGDAQARGLRVTKAGPNLIKATAFLNAGIARQWDPQIAAIYHRQMMQHGKHYLQAVCACATHLLTRIYAVLRDDRPYELQDADGTPVDKHTARRICQERYHVPAEVRQRNNRRVRKARQEARLEKSRKRKRRR

SEQ ID NO: 45464 - protein, 347 aa, unidentified
MNGDYAGRQVVGMDLHRRRSVLVRMTEDGRKLGTARIANSPAALRAELARAGENPRVVLEATYGWYWAADTLAAAGAEVHLAHPLGVKAFSYRRVKSDARDAADLADLLRMGRLPEAWITPPEVRDLRELTRYRHKLAGLRTSCKDQVHAVLAKLGIAVACSDLFGAWGSAWLDDLRLPQPYAGKVTSLRQLTGELSTEITMLNEVISDLLAGHPGYLVIRQLPGIGPVLAAVIIAEIGDVTRFRRPGQLASWAGLTPRHHESDTTIIRGHVTKQGSRLLRWALIEAIQRTPAGFGPRDAKDAIIARRGAGARNIAKVAAARRLLTLIYYGLRDGQIRCLPEPARAA

SEQ ID NO: 45465 - protein, 400 aa, unidentified
MMTPDDIDVWVGLDVGKSAHHAHALDHDGNTLYDKPLKQDEKAIRTMLGKLSKHGRVLLVVDQPNTIGSLPLTVARNMGIAVAYLPGTAMRRTAQLLPGDAKTDRRDAHVIAWAALKLPETLRDAGPDDETLAALKLLAGHDKDLAHESTRHVNRLRSLLLQTHPAFERALKGERITRDATLALLERYGGPMGVKRAGIEDVKDWAKSNGLRAGRIIDDMFKAIGEQTVTVPGTLMAETIIPSIAHDIKTIRDRRREVGRQVEKLLEDHPLLTVLTSMPGIGVRTASNILLGIGGDIANFKSSAHLAAYAGISPVTGQSGTSIKGERPSRRGNKRLKNALWQTAFVASTKHPPSVAYYKRKREQGKHHNAAVICLARRRCDVIYSMLKNGTLYQEPALVA

SEQ ID NO: 45466 - protein, 345 aa, unidentified
MAYFVGLDVSVQETAVCVVDEVGKVICERKVPTEPDDIAVLLTSIGSDYVRVGIEAGPLSQWLVNGLTEVDLPVICVETRHMKTLLKAQQTNKSDRNDACGIAQMMRVGLFKPVHVKTPAAQEQRMLLTSRKLIQRKLLDIECDMRGTLRNFGLKVGVVSTKNYEARIRELVESFPRLAAIVEPLLIVRQVMRQQLAVLHKMLLDAVRDDPVCRQLMTVPGVGPVVALTYRASVDQPHRFMHSRDVGAHAGLTPKRFQSGEIDYDGAISKCGDAMLRSMLYEAAQSMLALSKKWSWLKAWAMRVAQRRGMRRATVALARRIAVILHRMWIDGTDFRWSNSTAEAV

SEQ ID NO: 45467 - protein, 426 aa, unidentified
MRFIGLDVHKDFCEVAVVEGDACWSGPRVRSTPEDLEVFAQSLGPKDQVVLEATGGALAIARILEPHVGRVLMANPMAVRAIATAKAKTDRLDARTLAKLLAAGFVPGVWISDERTRLLRRLVSRHAHLVRQRTRAKNEVHAVLQRTLKGRPPVSDLFGKRGRAWLGTQDLPADERQTVEASLRHIDFLDGELRLVDRTMAIQVLSWPEVRWIMTIPGMGAVAAAGVMAAMGDVRRFPTSRHLVGYLGLDARVRQSGSGPARHGRISKQGSAEARHLLVEAAWAAMRTPGPLRAFGERIRARRGANIATVAVARKLAVLCWHVLTREEDYAFGRPSLVREKIRRLELAAGAPNRNGYRNPVRVFATPAQRRLEREVGDQAEKAYRRFVKDFRSSGKKGAGATTGARISAARKGQAARQEQAPDPAL

SEQ ID NO: 45468 - protein, 365 aa, unidentified
MKIIHWIGIDDHADKWTIAQFRGNEQKPAKEFELIPNESGYRKLIAFAKALAGTVRIVYEAGPCGYELYRRLTKAGLQCEVAAPSLTPRKPGQRVKTNRRDAAKLAHYLRSNELTLITVPDEQRESLRDLVRGRTAAQKDLVSIRHQITKLLLRYGHRYRDGRAWTDRFWAWLGKITFEAEHSQFVLKEMIATHGERVERVARYNDEIEAAAKKPEYKSYIAALSVLRAIDTLSAMTILSELGDLRRFPTAPQLMAAVGLVPAEQSTGEKATRLSITKTGNAHVRRIAVEAAWHYQGRIANGPTIQRRRKDQPQELLDIARRCDQRLNRKFFRMTSRGKRSVVAAVAVARELIGFIWAIGQVVHP

SEQ ID NO: 45469 - protein, 387 aa, unidentified
MIKKRGRVVGLDVHPDSFAGAVVKGSDPASAVVLSTSTRVELERLEQWALRHTRTDDTLVLEASGNAFAVAERLRAIGRKAEILDSHRAGKVGKVYCANDRVDAVKIARIYLSALSPIVWQPDQKTLERREVFSAYQAVVKESTRAKQQLRSMLNEHCVRMDKGFRLCHPNAITRLLRLREWTPARTMLLQQLHGSLVSARARRTLLRRHMAQEIVTDEALLRLTRLCGINLITLYGVIAAVGDVRRFSHSKKLVAYLGLNPSVSQSGNFEGGGALKRHGRGALRALLIQSGKKLLEVTNPLQKWGLAVAARRGRNKAAVAVARKLCVAVWHVLMGHVVGALERLNTLETKLSKFATEMGPAALSALGYHNKADFVEKKLYVLRSYP

SEQ ID NO: 45470 - protein, 421 aa, unidentified
MIGAVLECCAGIDVGKKFVVVCLMTGPADGEAHEQTRKFGTNNGDLEKLRDWLSNCGCFHVVMESTGAYWKPIFNVLEEVEGMQVVLANSQQVKNLRGHKTDPNDSRWLAHLLRHGMIRPSYVPPRAIRDLRDFTRRRKQLVRAGVQERNRVQAVLEDANIKIGNVLSDLFGLSGQLMIEALVEGQATVRQVAELAQKQAKKKIPQIQAALEGHRMSDTQRALIRLSMAHLAFLEEQIAQLEEQIFSHIERCGFQHAHALLQTIPGIKKQAAAAILAEVGTDMGVFGKGSRCSSWAGVCPGNNESAGKRKRAPVLRGNPWLRTTLIECAWGASNKTGSVFQARYQRLAPRIGHKRAIVAVAHSLVLVLFEVLNREQPYTGSGADAMPVTKVKRLIRHHSRRVATLRKWLIRASSERAVRAT

SEQ ID NO: 45471 - protein, 449 aa, unidentified
MREPQEIEDEEHEQVTERVAAVDVAKASGMVCTRVPHPSRPGRRRTRVQEVDATTNALIELGGQLVAEGIEKVTIESTSDYWRPFFYLLEAAGLTVQLVNAHDVKNAPGRPKTDKLDAVWLAKLTERGMLRPSFVPPAEIRQLRDYTRLRTDLTRDRARHWQRLEKLLEDALIKVSAVASAMDTLSVRDMLEALIAGQRDPQVLAGLARGKMKAKRAALIEALTGKFDDHHAELARMLLDQIDALTGQIGTLTARIEELIAAIPAAQGVDADGTTGPGAGTGPGAARLNAITRLDEVPGISVHGAQIVLAEIGLDMTRFPTHGHLVSWAKLCPRTIQSGAKNRSGKSGKGNPYLKGILGEIATAAAKTDTFLGERYRRIVKRRGKLKALVAVARTILVIIWHLLADPAARYHDLGAGYYASRIDTERKTRNHIRQLEALGYTVTLTQAA

SEQ ID NO: 45472 - protein, 321 aa, unidentified
MAETVLGIDIGKQKFEVHLLVNGKSKSKSIKNSKEGFETLSQWLNKHNAGLVHACMEATGSYGDELALYLYDSGHTVSIVNPARIKGFAQSELVRTKTDAVDAGIIARFCAAMNPEQWTPPAPAVRRLQAIARRLDALIAMRTQELNRLGVAHSLVEPSIKEHLLYLDSEIEKLKEQMRSEIDQDPDLKNKRDLLISIPGISDATISVILSELDFQKFESVREVVAFMGLAPKDKISGTSVKGKPRLCKTGNARLRKCFYMPAMVAMRFNPVVSSFQRRLKENGKNGKVIVCAAMRKLVHIIYGVLKTGKPFNPQFSSKIA

SEQ ID NO: 45473 - protein, 412 aa, unidentified
MQIVYERCAGLDVHKKSVMACLITPAANGERRKERRTFSTMTADLVRLRDWLTEQQCSQVAMESTGVFWRPIFNILEGHLEVMVVNAQHIKAVPGRKTDIKDAEWIADLLQHGLLRPSFIPPAWQRMVRELTRSRVSLSEERSRVIARLQKGLEEANIKLASVASDLMGKSAQQMLHALLEGELTPEAMAEFARGRMRPKREPLVQALTGHLQAHHRFLVAEPLKHLSELQEAIARLSTEIAERLRPYEELLVRWETIPGVKRRLAEIIVAEIGPAMQRFPSAQHLASWAGMCPGNHESGGTRLSGKTRKGSQWLRTALVEAAHAASHGKNAYLSAQYHRLAFRRGKQRAAVALAHTLLIIVYHLLAQEEKYQDLGGTYFDALDREKQEQRLVRQLEKLGFEVSLTPAVSQA

SEQ ID NO: 45474 - protein, 343 aa, unidentified
MSIVGSFDVHRRQITFDYLDTDTDRVYRGRIAPACRGVLRQWLAQRFASRTDVTFAVEACTGWRFVIEELEHAGIQPSLAEPADTAAARGRKRRAKSDAADTALMRGLLAAGRLPTSWIPPEQVRETRAILELYKDLRDEHTAWVQRIHAMLFHQGVPALGTGGVATPAGRAALAAGEGLSAAGRQSVTVALRMLDALDTELDALHRQIRTFARQQPGCVALQTQYGVGPITAAAIWAMMGDTRRFGASRQAVRHTGLDVTVYSSDGKRAPGHLAKQGPPLLRWALYEAACLASHTRAPDHDFYATVKDRIDHKRAAISVARKIARRSHHILRELGDKAYAAA

SEQ ID NO: 45475 - protein, 375 aa, unidentified
MRRVCGLDVHKDSIYMCILYENGSKIESVFGVLTPELDKLRDLLVSHHVCEVALESTSIYWIPIWNILSVDFSLKLVNPYFIKQLPGRKSDVKDAEWIATVLQKGLIRGSYVPDRMIQCLRQYERRNHELSKNIVHAEQRMDMILQRCNIRISNYVSCISCKGYQKVVNAIISGESNPKVLVTLIHKRTLNKHGRQVVEDSLNGFVSDTDRDILRQYRDERMQMEQHKSENKAKMQAICEAHYCEELELLQTLPGIKEESAANIIAEIGVDMKMFLTASAIVGWAGLKPRNDQSAGKIKSRKITHGNKYLRKILVEAAWSAARTKDSRFMKMYQRLLARGKSKQKALIAVARKLLVLIWNILMVTLLLPCFQSRI

SEQ ID NO: 45476 - protein, 324 aa, unidentified
MYAALDLGQKTIQAVLKREDGRIVREAKLKKQADLVLQFLKGTDAEVVMESGYNYQFLYDLLKEKDYDVKVAHPLMVKAIAYAKVKTDRVDARTLADLLRMDMVPECYIPDIKTRELRDIVRRRHYLVKTRTMFKNKVRVELSKRWIDYSADLFTEKGKEQLRSLKIAAVDDCLDTVDFLDTKIMQLDSEIKKLATDDKYAKHLMTIPGISYYAALLISSEIADIHRFSDYEHLCSYAKLVPGTYQSGDMQYQRPDMKGNDMLNWIMVQCTHVHVRYCDSSITRHYNKIKARKGNKIAIMAAARKMMRAIYVMLKEDRPFRLDG

SEQ ID NO: 45477 - protein, 370 aa, unidentified
MLDTTTFVGLDVHARSIKAVSLDVMTGEVRCATFGYDAGAVAGWVRSVDPKAKCVYESGVTGFDLQKRLSGLGVDCVVGAVSKMIKPSADRRRKNDRNDAEFLARMLSVGNVVEVWVPDDECEAARDLTRALEDARDDLSRSKQRLSKFLLRHGLAFDERTPTGRRKGNWTRAHWSWIESIRFAEGADNDVLAYYVDAVGRAAEEKARLEGLVEAEARKPRWRRRVDSLRCLKGVDTATAADLVFEAGEFSRFRNARSFAAWVGLTPSEHSGGESDRRGAITKAGNKHLRKALVEAAWHYLTCSGRPKDLARGQAPDRVARRHAAKGVRRLVERREALLARGVHNNKANVATARELACWVWAVGLMAEEA

SEQ ID NO: 45478 - protein, 342 aa, unidentified
MLNHYREGEVVEEITTVGIDLAKNVFSVHAVGSQGEVVVRRTLSRAKLSELIAQLPPCLIGMEACSGAHEWARRFAASGHTVKLMAAKFVMPYRKSGKNDGNDAEAICEAVARPNMRFVPVKSLEQQSDLSLHRVRQGFVEERTATLNRLRGLLSEFGHVLPLRASEVHRRVPQLLGKLPTRVAACARDLLEHAARLQAKTLEYEHEIKIHVRSNALACRAQTRLGIGPITASALVATVGNGHDFKNGRQFAAWLGLVPRQYSTGGRTRLGHITKRGDPYLRTLLVMGARAVLQRAASLTDPLSRWALAVRERRGYHRACIAIAAKNARVAWALLAKEPVAA

SEQ ID NO: 45479 - protein, 451 aa, unidentified
MEILYTNCAGLDVHKKTVKVCVMTHASNGQLQKEFRTYFTTTEELLKLSDWLKEQGCTHIAFEATGVYWKPVFNLLEGCFTVLVVNAQHIKAVPGRKTDIKDAEWIADLLQHGLLKASFIPSVPQRELRDLTRYRVRLAEEKAREVNRVQKTLEDTNLKLGDVVSDIMGKASRMILQAIADGETDPGRLAALAVGRVRADQEQLEAALKGKVTDHHRFLLQEHLTQIHHLEQAIERVTAEITRRFTPPSPPEEPTISQKEEGATQEISSDSAPQQQASSSSPAALSWAVAVVLLCSIPGIGERAAMGILAEIGINMQQFPTAAHLASWAGVCPGNHESAGKRLSGKTRKGNPWLRCLLVQAAHSASHQKQSYLAEQYRRIAKRRGSKRAAIAVAHSILVIIYHLLSHQTTYQEKGETFFEEQERQGAEKRLVRQLSRLGYHVELQPIALAG

SEQ ID NO: 45480 - protein, 424 aa, unidentified
MKVTYQTCCGVDVHKSFLVATIVKTTGGIEPSYQKKRFSTFNNSILEFKQWLLDNDCHDVCMESTGKYWIPVFNLLEDEIHVVIANPKWVKAVKGNKDDTKDSKWIGDLFRLGLVKGSYIPCKKVRILREYTRYRYKLVSCRSSEKNRYQNALTVCNVALDSVVSDIFGKSSTSIIDYLLEQSGTSINHEEIASKLLRSLKSKEDAVIESIEGYQMTDAQKYRMRLVRAHIDYITAEINDVDKMIENMISSNPDFENAVQFLCTIPGVKHDSAVTIISEIGTDMSQFSSSKRLCCWAGLTPGSNESAGKKKSVRITRAGVYLKPALVQCAHAAVKSDKSPYYKKKYDSLVKRRGKKRAIIAIARMILTAIYQMLSTGEQWNPSDLYKIDMPATLFEKQKAKAIKQAKKLLQREGLLPPDEPLAS

SEQ ID NO: 45481 - protein, 406 aa, unidentified
MNLNAVGIDVSKRKSTVSVLRPGGDVLMKPFDISHRTADFQTLADKLKALDGETRVVMECTGHYYEPVARELSQAGLFVSAVNPQIINKFQGQGNPLRKVKTDKADSVKIARYTLDNWANLKQYTLMDELRSQLKNMNRQFDFYMNHKTAMKNNLIALIDQTYPGANTYFNSLAREDGSQKWVDFLDTYWHVDCVRKMSLQAFTEHYQKWCSRKKYSFRKSKAEEIYGIAKELVPVLPKDNFTKCIIKQAVAQVNAASQTVEQLRSLMNETASKLPEYPVVMAMKGVGPSLGPQLMAEIGDVTRFTHKGAVTAFAGVDPGVNASGDYSQKSVHASKHGSPMLRKTLFQIMDVLIKTKPDDAVYLFMDKKRAEGKPYYVYMTAGANKFLRIYYGRVKEYLASLPASE

SEQ ID NO: 45482 - protein, 413 aa, unidentified
MKYYTSTTQYNCGIDLHARQMYVCVMDREGKKLVHCNVKDNDFKFFLKLVEPYKHDLTVCCECMFGWYWLADACQDAGLKFVLAHALYVKAIHGGKNKNDRVDSEKLTHLLRSNLIPPSYVYPTQQRPLRALLRQRIYYVWRRAELLARIYSHQLAHNRTPAKQTRRTRDAWEERLLAAENHPQRQFALRNDLAMIRSFDRQISVIEVELQHLTKHLPLSRDYTLLQSVPGIGESLGLTILYEVGDINRFPTVKDFVSYCRLVKGTVASAGKIKGLRGAKLGNPYLRWAFGEAAVIAKRDHYLVGPLSQRLEVQMGGNKFKANTVVAIKLARAVYFMLKNQTVFDPERLVGSLQKCFRPGRSQPAGLTGGAKKAMPSSVAESVSCASSTPPCVGQASTPAPSIGSCGQVPVAN

SEQ ID NO: 45483 - protein, 349 aa, unidentified
MKKIFIGIDFSKEKFDATVIKAEDLSEMLSVGHQEFVNNVSGYRKMLRWVDSLCGADTCEDWLFCGENTGGYSQMMSDYLYSKGYDLWIENALSIKRAFAMKRGKSDRSDSLMIAEYAMRYQDKARLYEPLSPALSQLREVFLYRHMLVRHKCSFEVRRIEKRFTQQKSSAKTMISQSSRHILTELKHEIQKCDQRIQELVRSDEELSRIFGIITSMPGVGTINAVCLMVFTNNFAKFDYNARKIACYYGVAPFARDSGTSVHSAPKVGYLANKMIKSLLSQAALAAVNFCPAMSMYYHRLVDKGKKPMVALNNVKNKMLAIITAMVKNECKYQPEYISINARSEMLNK

SEQ ID NO: 45484 - protein, 314 aa, unidentified
MYYYIGIDVSKKVLNIFDGKKDLIFDNKENLSSFKKYLKKRYPDFSSLVILFEATGIYSYHLKAFCATHMVKVYIINPQASHNFAKSLGTRSKTDTTDARTIWAYHKLIGEKDISIPKVDRRIITLSSYLASYRLTLKQRLSLANHLEGVKDKTLYRLLKKEQERLGKLEHELLIRMDTYIKQYPKLNEDYQRLLSISGIGQKTAISLLTLFHTYPDTNRNQITALIGLDPIQKQSGTSVHGRSRISKHGNQMIRRCLYMPTLSSIKYNHKIKVFYERLVSKHKPKKVAVIAAMRKLLLIAHAIYKNKTVYVTG

SEQ ID NO: 45485 - protein, 523 aa, unidentified
MATKFKSRARRSKRYLTIVKPSGSLHPRVQKVGPEHFGIVAVDCAKARSKWMLADFYGRILIPPTVVEHHKQGFDSMIAAIRSAIQSHGLGDVLVAIERTGIYHLPVKRVFVSYKFDTRIVHPLTTKQYRLPADPGNKTDDTDLCAIHRATTNGFGLIELPLDEIHGPLQLLARYRRNLVRKNASLRNQIIALLDVLLPGYTGLFDDIFNNQAALSIARSVQSASRVRALGSEGLAQMLRELNVRSQRRTLKKILDWANGIDSTTEYSEMYHTILVHLDDERCGRLQQIAKLEQEMAGLLVRTAYVVLLSIPGVNIVTAAEFAGEMGPITNYANDQAITGRAGIYPSRYQSDKVDRCDGPLVRRANRKLRGVIMMIADNLLSCNRFFKALRMRWMAAGMEQQAMCVRVAKRFCRIAYQMVAGSQVFRHPSCQKRDYILRKLSIFHAEHGSSMAQVMTDLQAATDHIPQSEHAPEAKSLSEELQPSTRRQPSGPRRLGEILPVVLAKLGVTAVELSLKGENDLT

SEQ ID NO: 45486 - protein, 314 aa, unidentified
MEVILGVDVSSQKLDACLESPMHSKPMFKTVAYTPEGCKKLLAWANRHNVSRCAMEATGGYEFTIAQRIMKAGIKLYIANPNRIRHFAKGDGILAKTDKIDAFVIAEFARKSNLPAAYEASPVQIELKQLIGRRIELKKSLQVEKCRMNLASGAILQSHENLVAAINLEVEQIDRLIDALEIQHPDIAEKTRILCQQKGVGKATARILIALVPELGHIDRRKIASLIGLAPIPKESGKMKGKRFISGGRYEARRCLYMPAWVATQYDPEIGAFYQRLIEKGKPKKVAITAVMRKLLVRLNAVMRNYLMQSLKKT

SEQ ID NO: 45487 - protein, 424 aa, unidentified
MNFKMQDKQNQLIERISDTHLIVGVDIAQQLHVARAVNFRGIVIGDPLTFENSEEGFINLLNWIQDLKRLKNLDKVIVGMEPTGHYWINLSKWLYNQNIEVVTVNPHLVKRNKENRDNTQSKSDKKDALVIADMIKNGYYSFIRPTSESFEKLRVLMSNRDVIVKRLVMSINQINRWVDVVFPELRQVFKDVSCKGAIATLRLFPTPDEISSMESIDVMRRWKSIMKRQPGLKKAQLLIHLAKSSIGTGQALDAYKFHLEQLLEEYDLAVKQLERVEHQVKEVLYKIPFATKLLMIKGISEISLAGILGEAGDLSGFSHGNSLLRHAGLHLAEASSGKWKGQIVISKRGRSRLRRFLYLATMSLVMNNPEFKAIHSHNVKVKKIKKMKSIMKLIGKLARIFVGIARRNESYCPNKVQILIPLAV

SEQ ID NO: 45488 - protein, 432 aa, unidentified
MISVSPPVTPENSVFAAFVGLDWADQKHSLVLYDQRGGNPEHRELIQTPEAIDEWANGLRQRFGGRPIAVCFEQSRAGIAYALLKYDFLVLFPLPPARLASYRESFSNSGAKDDPTDAALLVDYLLRHRDQLRVWQPDTPATRELQLLAQARRYTVDQRTRLSNQLTAVLKRYFLQAMVLVGHDVDTPLACDFLIKWPTLAAVQAAAPATLRKFYYAHHSRNEERIAERLELVKSAIALTTDQAPIQAGVLQGQCLIGQLRALAKAIEKYEARLNELMDQHPDAALFRTLPGAGPALAPRLLVAFGSDRERFQSAAELQSFSGVAPVTKRSGKKCHVHRRWACPKFLLQTFHEFAHCSCKRSAWAKAFYLQQRSVGKGHHAALRTLAFKWIRILFRCWKTKTPYSEDRYLDSLHRRKAPLLAFLPATETATA

SEQ ID NO: 45489 - protein, 349 aa, unidentified
MVADEVDYVLGVDTHRDKHMLAAVTAPTGAVVAGEEVSADARGYRAALRFAARYAAGRRVWAIEGSGSYGAGLARYLAERGETVLEFSRTPKGERRLRGKDDVLDAVRTARAALASRTMTLPRAGQRREALRLLLLARRSAVDVRREALGQLRAVIVTAPDELRKELRELPVGKLLDRCRRLRQTRMASADELATRLVLRSLALRIAAATSEAEQLERELLGHVRALAPALLDEAGVGPVVAAQLIVSWSHPDRLRSEACFARLAGVAPVPASSGQTQRHRLSRGGDRQLNRALHTIVLHRRQHDPATRDYIARRIAEGKSRRDATRLLKRYLARHLYRLLQQQEPIMA

SEQ ID NO: 45490 - protein, 339 aa, unidentified
MKNTKYFIGLDVHKKKTTYVVKDRIGNIVLEGETATLYSELYERLEPYLKSSIIGLESCTSYYTLYQNFLKNNYNIKVANTIQLRQLIAKNDKLDAKRLAEMLRLGTFPTSYIPDEEIQRLRSLLQVRHSMMEEKVRCNNRIQAFLDRNGIVMPDQEAFGKKWRQKLLQYIGSGEVSLELRYEYDHFVYLEKKSEHLGQEISGYTMKYWKKEYKLIQSITGFGPVLSCYVIAHILPISRFSSNRKLRRYAGVVPTFHESGGKRSKGHIPKTSSRKHLRWALIQAANAAGRTNTKLGRYYRKKKKQKNNAGIAHVAVASSMIDIIYKVLTTKKPYDPKIC

SEQ ID NO: 45491 - protein, 419 aa, unidentified
MLSIKHYVCCGIDVHKKFVVATIAITDFRGVTTYKKKRFATFNSDLRSLKEWLLSNNCTEVCMESTGKYWIPVFNALEDSCHVVVANPKYVRAIKGQKTDDKDSAWIADLFKFNIVPSSYIPDKEIRMLRELFRYRQKLIGHRSSEKNRFQNSLTVSNIALASVLSDTFGKSATAIVGYILTCETFDPEHCKSLLQKKAKDKADDVVKSIIGYELRSDQSVKMKVCRKHFDYINECVTTLEETISDLSKPYHKFIKLATTIPGIKEQSASFIIAEIGVNMAVFKSSKRLCSWAGLTPQNNESAGKKKSVHVSRAGVYLKPLLVQCANAAIMDKKNPYFKFKYDRIKKRRGHKRAIIAIARMMLTCIYHMFQKQEAFNPADTDYSAIPEEMYQRFQEQYDKNAIKRLEKRGYVITPPITA

SEQ ID NO: 45492 - protein, 339 aa, unidentified
MNNSVIGLDIAKNIFHLFTVLADGKTLKKKLKRHELLAFFANYPASIIGIEACGSSHHWARELTKLGHEVILLNARFVKNYVVGNKTDFNDAEAIYEAVLRPNKRVVAIKTVAQQDIQLVHNIRKDLVDQRTALVNQTRGLLSERGIVINQGIEQLREQLPLIIEDAENSLTDLSRELFAEQYEKIKTLDAEIKAQDQRINRLCNTNDLSKRFLDVPGVGPLTATIVAADIGDGGKGYKSSRDYAASLGVVPKQHSSADKQHYMGISKRGNRYIRTLLIHGARAVLKNCGQKTDKLSLWLQSLVARRGFNKAAVALANKNARILWAMASNGKDYEALVA

SEQ ID NO: 45493 - protein, 352 aa, unidentified
MQVIRFGIGLDVAMEKFDACISTIDMERHVLVKNTRSFTNSSKGYQQLYKWAQLQCSPNISVSYLMEATGIYHENLACYLHAHNCLVSVVLPNKAKKYKQALGLRSKTDSIDAKSLSRMICEQSLAAWVPISKSIYLLRGLTRQIQSITQDATSIKNQLHAQAFAMYKNRDVLKCLRQQLKLLEKQKASLQSHVLQIMESDTLLKQKCEKICCIKGLGKPSLAVIIAETNAFTLFENVGQLVSYAGYDVVEDQSGKHRGKTKISKQGNGRIRRILHLPAFNVVRLKQAPFTDLYQRVYEKSKIKMKAYTAVQKKLLVLIYTLWKKNEAYDSAYLKTSGEKEPVPSFATAEGR

SEQ ID NO: 45494 - protein, 366 aa, unidentified
MKLAVPDLISNSYFPAAAAIELGFFKAEGLDVSLETTSICVVDQNGATVWRGKCSTEPKPICETVRKHAPGLARVGLETGQLSNWLTLELRKQGLPIVCLDARHAKAALSLQVNKTDANDAHGLAQVVRTGWFREVAIKSMDAQTLRMLLMARAQLVSQRQAIGNNIRGLLKTFGLVIARGSNGPFASRVREAIADNATLAAIVEPLLLAWQALREQIANFDRQVNLRAKTDIAARRLMTIPGVGVIVSLAYIAVIDDPGRFKRATSVGAYLGLTPRRYQSGEIDKAGSISKCGDGLLRSYLFEAANVLLSRDARSSKLKTWGLALASRIGMRRAKVAVARKLSVIMHRVWKDDRDFDWGDVPAAA

SEQ ID NO: 45495 - protein, 408 aa, unidentified
MNAVGIDVSKGKSMVAALRPMGEVALLPQEFLHTEIGLEQMAYAIIALGEDTRVVMEATGRYHEPVAAALYEYGIYVCVLNPLFIKQSGGGSIRKVKTDKADAMKIAKYGLDNWVDLREYTPMDTVRQQLKLCSRQYNLYMKTVVSLQNNLISLADKTFPGVNELFSSPERADGHQKWVDFVMTFWHCDCVCRVSEKAFTERYQKWCKRKGYHFSAEKALDVYAGSCGHFTTLPKNDNTKLLITTAAQQLLAGKMTLAALCAEMTRLAKQLPEYDTVRAMYGVGETTAAQLMAEIGDVRRFPRRSSIVGFAGVDPAVDQSGKHEAKSTPTTKRGSPHLRKTLYQIVCTYLKKSPVDEPVYQFLDKKRSEGKPYFVYMTAAQNKFLRIYYARVKECLEAFDARQSLAQS

SEQ ID NO: 45496 - protein, 343 aa, unidentified
MQTITTIGLDIAKSVFQVHGVDAAGEVVIRRQLKRRSVLAFFQKLPPCLVGIEACASSHHWSRELQALGHTVRLMPPAHVKPYVKRQKNDAADAEAICEAVTRANMRFVPTKTLEQQSCLMLHRTRHLFIRQQSAVINSIRAHLAEFGIVAPVGRKGVTELLHVVADPSDKRVPEVGRTCLAALGDQLLGLKRQILEFDRMIMAWHRSNQTSKRLHYIPGVGPMLATALVASVADPGAFRSGRNFSAWIGLVPKQHSSGGKDRFGSISKQGDRYLRNLFVARALAVIRYAKIHGTRHRPWLTALLGRRPTKVAAIALANKIARMARAMMAKGERYKQPAALAA

SEQ ID NO: 45497 - protein, 400 aa, unidentified
MSGSRRPFQGFVGIDVSKDKFDACGIREDGAKLFQFSAPMDRNGFEKLKSHLSSVPMGSVLIGMESTASYHVNLFSYLVSEGYAAVVLNPLLISNYVKMQLRKTKTDKKDAWVIAQFLLANRDSLIRRATSPLISDLRELARQRESLVDQMSSLKNDIKRILNITFPELEHMAGIFTKSILKLLQRYPSANALQEVDPDQLTRMLIEDSYGRKRGAFAEALLKAARSSIGTPSPMKDVILKQKVSLHFHLEEALQEITEMLLQTSRGMMGDDMDIMNSIKGIGEKSAASFLIEMGGDIRQFDDPNKIIAMAGIDPAVRQSGKHEGSSRITKRGNRHLRRIIWLMTTQVIHFCDVFRVYYQKRRKDGLPYKKAVLATSHKLIRVIYAMLTQRTFFYQAVNS

SEQ ID NO: 45498 - protein, 370 aa, unidentified
MAQSTPLFVGLDVHKDSIAVAHAQGQSADPPVFVGAIGTRQADLDKLIRRLQAKTSTLVFAYEAGPCGYTLHRTLTGQGFTCHVVAPSLIPKRPGDKVKTDRRDAVELARLLRSGDLTRVYVPTIEDEAIRDLCRARDAARLTLKNAKLRLKAFLLRLGLHYVGRADWNAAHQRYLAKVVCPTPTQQIVFQESVRAVDEQIDRLQRLEDELLERAPAWRLYPVVLALQALRGVQFLVAITVVAELGDLTRFDSPRQVGAFVGLIPSEYSSGPARRQGGITKAGNGRARRALIEAAWAYRHPAKVSQHIQTRIDVLPKPIQDIGWKAQVRLCKRFRRLTARGKHPNVVVTAIARELIAFMWAIAKEVAVTV

SEQ ID NO: 45499 - protein, 333 aa, unidentified
MQYYAGLDIHKKTCQAIICTEKGNIVKKGRIPTDSEKIQEFFQEFKELTIAIEACNTWEHIFETLESQGHQVALAHPMKTRFIAESRVKTDKVDAEILMHLLRTGFLPTSYIPKKEIRDLRNLVRQRIFLGRYTTRIKNKIYAELLRQGIKYKKGPTLFKGIGIKWLHNLKIPSVKTYLNLYESAKKEIKKLEKEFKKQGKQYKETQLLTTIPGIGTYSALIILSEIGDINRFSNEEKLFSYAGVTPSVHQTGQNTYHGHITKQGSKHLRWILTETVRIHLIWTARHMVETKISQFYQRLCKKKPRNVAATAAARKLLQIIYHMLKNKNEFRG

SEQ ID NO: 45500 - protein, 310 aa, unidentified
MDHLVGGLDVAKAQLDVHVRPTGETFAVPPDEAGLTALVDRVRALAPALITLEATGGYEATVAATLASAGLPVAVVNPRQIRDFARATGLRAKTDTLDARVIAHVAEAVRPAVRPLPPEQAQRLGELVARRRPLVEMLGAETHRRRLTRDRGLQRRIDTHIAWLERALRDREPDLHETIRATPAWRATENLLTSGPGVGPSTALTLIAELPELGRLDRRQIAALVGLAPVNRDRGTFRGRRRIRGGRASIRRVLSMATLTATRFNPVIATFSHRLRTTGHPGNVALTAAMRKLLTILNAILRDHRPWQPA

SEQ ID NO: 45501 - protein, 347 aa, unidentified
MRFYTHQHKHYCGIDLHAKAMYVCILDQSGTILVHKNLPTTPEAFLRIIAPYREDVVVGVECMFTWYWLADLCSKEGIAFVLGQALSMKAIQGGKAKNDKIDAHKIAVLLRGGMLPQAYVYPAAMRATRDLLRRRCHLVHKRAELLAHIQNTNSQYNLPEIGKKLAYQANREGVEAHFPDPSVRKTIELDVSLINHYDQLLGEVELYITRTAKTHDVQTFARLQSVPGIGQILALVILYEIQDIARFPRVQDFVSYCRLVKCAKESGGKRLGTSGKKIGNVHLRWAFAEAAVLFLRHNQPGKEYFMKLEHKHGKAKALTVLAHKLGRAVYYLLTREHAFNLTRFVTA

SEQ ID NO: 45502 - protein, 338 aa, unidentified
MSLEYSSVCVVDASGKIVREAKVASEPAALIAWFGGLGVAVGRIGLEAGPLSQWLYAAMREAGLAVELLETRHVRDAFKAMPVKSDRNDARGIAQLMRLGWFRPVHCKSMGAQETRSLLTARKLVQSKLRDVENSLRGILRGFGLKVGATTERGFAGRIRELAAGHPNLETIAEALLAVHAVLLREFNGFEKQVRRLARGDTRARLLMSTPCVGPIVALTYASAIDDPARFKSPRQVGAHFGLTPKKYQSGETDYTGRISKIGDASVRTALYEAAHIMLTKPVKGCSALKSWAMRIAKRAGMSKAKVALARRLAVIMHRMLVGETPFNPTTKPAAAAA

SEQ ID NO: 45503 - protein, 312 aa, unidentified
MTIHPGYVGIDISKNTLDIFETLDQRAQKVANDQETAEKLAKAWRKAGVFVLFEATGHYDTVLRKALLAAGVPFHRVNPSDARHFAKAARHLAKTDAIDARMLARMAQAMQPRPSEPISAEREQLAELHKRRDQLVAMRQQEQTRRTECRSAGIAAGLDRHLAWLQVEIHDTEQQIEVLIAHSRDLTELCRLLRSIPGVGPVAAVTLLSLMPELGSRSPKELAALAGLAPFNNDSGEYQGQRKIQGGRSRVRRALYMAALAASHSRKGRLVEKYQSLRKAGKKPKVAFIALARKILTIANAVIRDRQPFQHA

SEQ ID NO: 45504 - protein, 402 aa, unidentified
MKVLNRRCAGLDVHKDEVVACVRLAMRNKLSHEVRRFATTTRGLLELADWLEASGVTQVAMEATGVYWKPVWHMLEERFQLVLANAAHVHNVPGRKSDVNDATWIADLMAHGLIRASFVPPAPIQELRDLTRTRKQLGREIVQHTQRIQKVLEDANIKLSSLITEVLGASGRRILKALIAGESDAGALAALGSRQELRDALEGRITSHHRFLVGQHLRMIEELEATVTAFDARIEAVLAPFRDAAERLMSLPGISDVAAQVILAEIGTDMSSFPTAGHLLSWAGLTPRLDESAGKRRSTRLKKGAPWLKPVLVQCAFAAARAKNTYLQAQFLRLKARRGPKKAAIAVAASILTAVYHMLRDGTFFRDLGPDHFARYDKTRAAMRLVRRIKDLGYDVEIKAAA

SEQ ID NO: 45505 - protein, 390 aa, unidentified
MTNQGQVSVSTQFVPRNYDVFAGLDVDKKSMAVIFTDHQQLMQSLRLPYSAAQLLNYVRKRFPGQRLAFVYEAGPTGFGLYDELVAAGHPCLVVAPSMVPTAPGARVKTNRLDARKLSENLRGGQLRSIHVPSPKYRELRHLVQLRDTHVQQLTATKCRIKALLLYEGIAFPSDEGKEKQWSQRVLDELLALPCSETVRFKLDQLIGTLHFNFNAAAAAQKQIRHYCKKDAELRQSITWLKSLPGIGEIVATHLVARLGDPSLITNVRQIAGFLGLVSSEHSTGDKQNRGEITRAGDSRLRNKLIQSAWVTIRKDPELREFYDRVYQRHAKKVAARKAIVAVTRKLTTRIYAVLKERRPFVLREVSTAPLTTEETAGLRERLDGQQNEQL

SEQ ID NO: 45506 - protein, 319 aa, unidentified
MSKIICGVDVCSVDLQARIGCDGPECCFPNTPEGIAGLAEFCRQQGVELVAMEATGGYEKQAFSQLWALGLAVAILNPRCVRRFAEGMGWLEKTDRIDAGVIAWFAQVKRSRPCTPASAQQEHLQALVTRLRQLTELQTMQRNQRLLVTDPTVLASFTQVLALLASQIRALATAISEQIAADPLWQQLDQAFRSIKGVADRTVACLMAEMPEIGTLSNKAISKLAGLAPLARDSGTIHGKRAVRGGRAQVRAILFVVASVVRRHHPDFAAFDRRLSAAGKPKKVIRVALAHKLLVRLNAKARQIRAQLRETASGVLVHS

SEQ ID NO: 45507 - protein, 360 aa, unidentified
MLYLAIDQHRKQLTVNLRNEQGDVILKRQVSTQWPRVRKFLEELQTQSHAEGGFVAILEICGFNDWLIKLLKEYGCGELILIQPEKRSKKKTDRRDANALGELLWVNRRRLLTGKKVQGVRRIQLPTETEAEDRQITALRKRLGQLRTRTINKIKHILRKHNLEQECPTKGLDTIKGKKWLSQLALGAIDRLEMDQLLSQWKLWDEQIEKTEAEIGKRQAQNKTAAVLATIPGCGAYGSLMLASRIGSIERFPRPASLANYWGLTPGCRNSGQATDRLGSITKQGSAMARFILGQVILHVLRRDARIRAWYGRIKRRRGSKIARVAVMRRLATIIWHMVKHNEPYVMGGPPTRKLTTQAV

SEQ ID NO: 45508 - protein, 391 aa, unidentified
MVCVGIDVAKDKHDCCILDSDGTIRADCITIPNNMDGFKQLLQTIRDCTKKSDKIKVGLEATGHYSYNILGFLLDKDLAVYVMNPLHTNLYRKSLSLRKTKTDRVDARTIATMLLSDVDLKSYTDTAYHNEELKSLTRYRFDKVRERAKLKQSVSRLVTILFPELEKLVPSLHIASVYALLSEYPGAKQISEIHLTKLTNLLATASKGRYEKEKAIQIREAARTSIGSVMSAKSLELKHTIKLIKELTSEIDEIEDSIQQIMDELHPPLLSIPGMGIHSAAMILGEIGDFSNFESPDKILAYAGCSPSTYQSGKLTNCYAHMEKRGSRYLRYALYNATKYVCHWNPVFAEYLAKKRAEGKHYNVALSHATKKLVRLIYALQKSGKAYLVAA

SEQ ID NO: 45509 - protein, 360 aa, unidentified
MELLHSRCAGLDVAKDEVVACVRVPDGRGGRSQEVRTYPAFTSGLEALAEWLAGEGVTQVVMEATGQYWKPVWYVLEERSFDLLLVNARHVKILPGRKTDVCDAAWLAELLEHGLLRGSFVPPAPIRELRDLTRYRKRLIQAHASEGQRIQKTLEDAGIKLDSVATDVLGASGRAMLTALIAGERDPEVLAELAKGRLRAKLPQLRQALRGRFRGHHALLVRLAVAHLEQLEASIAELDTHVDRVLAPFAAARDRLDTITGVGKRAAETIIAEIGTDMTVFPTAGHLASWAGRCPGNNRTGGKRRSGKPTKGNRWLGEVLIECAWAAARSRDTYCRPSTGGWRVGSARRRPPSRSGTRSW

SEQ ID NO: 45510 - protein, 430 aa, unidentified
MEVIYKKACGIDVHKSFIVAVICDSTSIEPKYLRKRFSTFNNSLIEFRNWLLANDCQNVCMESTGKYYIPVYNALEGYISNVVVANPKWVKCIKGEKDDNKDAKWIADLFKLGIVRHSFIPSKDIRVLRELTRYLYKLTNMRTSEKNRFTNALTVGNCKLDMVFTDIFGKSSSAIINTIISQDKFDSDDIFKNIDRRCKSSHEDILNAVTGISFVDAQKERMSVIQEHIDYLNKSIESVKKTIDILVKPYEGYINFLCSIPGVDRRSAISIIAEIGIDMSQFSSHYRLASWAGLAPGCNESAGKKKSVRISRAGVYLKPALVEVAHAAIKNTNCTYYAEKFKVISKRRGKKRAIVAIARKILVAIYHMLSTGELFYPSDLASVETSDKDRIKYTKNNFLQSTKQLLSLGLTQDDIVLLISSQSSNLTPVT

SEQ ID NO: 45511 - protein, 411 aa, unidentified
MRGSHARRRVRRTDVHKETIVACVRLVIDSKTVKEVRTFSTTTADLMALSEWLAETKCTHVAMEATGVYWKPAWHILSDGGFKLVLANAAHIKNVPGRKSDVKDADWISDLLAHGLIRASFVPDNATQEMRTLLRTRKQLVHEKARHILRIQKTLEDAIKLDSVITDIMGLSGRKMIEALIAGESDPAKLARLADPRVKASQETLRQALRGRVIGHHRFLLRLHLEQIDAIDAAIAKIDREVEAGIGPFRTAVEQVSSAPGIKSLAALQILSEIGTDMSRFASDANLVSWACICPRSDESAGKRRSTRIRKGSPWLKTTLVQCAWAASRKKDSYLHAQFHRIKARRGPKKAIVAVAGSILTAIYHMLKDGTMYQDLGPNHFDTRTKERQKNRLVKRLADLGYAVELAPLPN

SEQ ID NO: 45512 - protein, 385 aa, unidentified
MARRRLPEGVAGIAALHALIADLLGDGEPYTVVVGIETDRGPWVQALLAAGYQVFAINPLSAARYRERHVTSGAKSDPGDAKVLADLVRTDRQHHRPIAGDSELADAVKALARAHQNLIWTRQRQTGQLRSTLREFYPGALAAFDELAGRDALAVLEIAPTPAKGRALSRSKIASALRRAGRQRGIDARAEQVQAVLREPQLAAAPMVEVAFGHTVTAMVAVLAQLTTQIELLEQELNAHFEQHPDAEILRSQPGLGPVLAARVLAEFGDDPTRYADTRARRNYAATSPITRASGTRRVVLARVAGNKRLRDALYLQAFAAISRSPGARAYYDTHRASGHTHHQALRALANRLVGILHGCLRHHTTYDEATAWPATKKRPLANAA

SEQ ID NO: 45513 - protein, 418 aa, unidentified
MNKHNNSGKKSEPTTKRAKPRDPMRRNTKEVLAELVGKLKEKLDPKKPAATSVGEKPKRGELRPNLDRLTVGVDLGDQWSNYCILDLEGETLAEGQLRTTQEDLAEFFQALNAARVVFEVGTHSPWVQEVIGGCGHEVLVANPRMMDGSKRRKRKNDRIDANKLARLGRVDPQSLHTMQHRSREVRQDLVVLRARDALVAARTELINATRGLVKSMGTRLPNCSSPSFAEKVEGTVPAELRDALLPLVRMAAALSDCIREYDKKIEKLGQEKYGHTALLRQVKGVGPITALAYVLTLENPDRFVKSRDVGPYLGLVPKQEDSGEIQPQLGISKTGDTMVRKLLVSSAQYILGQFGPDTDLRRYGLRLCERGGKNAKKRAAVAVARKLAVLLHCLWVSGEVYEPLRQGMSATTAPAVAA

SEQ ID NO: 45514 - protein, 482 aa, unidentified
MKKRTIYTNQSQELLRLFKQVGNSAKVMCVPIDYAKKDHVVMFCNGYGDIVRKPFSVKNSAEGLKYLIDQVTRSCRHRRIRKEHVFFGGEDANSYAENFANALRSKGWLVAHVNAHDAKKQRQNLQASTDRLDLMGIATMLLNRRANCSPAQTGIYRNLRTLVRHRKKLVVMKTEVRNRVHAVVDRLFPGFLSEKKTSITPFSNSSLYLMENSFSAQQIRRRKHSTLVNILKRYGTAAPEGAAAKLRTYAAQVLTTQNQYAATLQLSLAHHIKLYRCLLDNTEQLEKEIALPLAQSQGAFLTSIKGIGIVLAAGVTAEIGSPFEQKPLNNLTSYSGIIPRVKQSGGPNAQAHTGRVSKRSNHLLKDSVVQSAFHIGHFGPKELSLDYKRRKAAGQHADFGMGRRFLRMAMSLMKTSQIYLPPPLRNEQLRAQERAGYYLAVWPQLRDKWNKVDALKVAFAKHNPLGQWRHIVQELYGIKLKL

SEQ ID NO: 45515 - protein, 342 aa, unidentified
MYYIGLDVHKKTISYCVKDASGQVHQEGKVGATRWELDDWIKTLPQPWTVAMEATIFTGWIYDHLLPHAQQVKVAHPLMLRAIAAAKKKNDRIDAGKIADCLRCDFLPECHMASTAIRDRRRTLRYRHLLVRQMVQMKNRISGLLMETGVSHNKRRLHKVGYFRELLASNEEVNESIRPLLRVSRDSIVRLQKTEYALVSSLQRDPLLAERIKRLRTVPGVGPITALTWALEMGEVSRFPSIRQATSYCGLCGDEKSSADKVTRTPLSKQRNKHIQRVLVEAAKLAPRQDHNLALVYEREKQKGNANRATLAVARKMVAYLLAVDRGQRDFVPFADSQSAAA

SEQ ID NO: 45516 - protein, 324 aa, unidentified
MSDAYLGIDIAKRDFHATLLIGEIERRHVFPNNDKGFAQLDAWLINRKVDRVHACMEATGAYAEAVATHLVERGHLVSIVNPARIKGYAQSELSRTKTDAVDAGLIARFCRALKPDAWMAPAPEIRHLQGLVRRLESLTETRQQELNRAQAPGMVDPVAHSIAALVAHLSEQIDALQRQIREHIDRHPTLRQQRDLLASIPGIGHKTVASILGELPDINQFASAKQVAAYAGLSVAQHRSGTSIRGRARLSKRGNHQLRKALFFPAMVAMRCNPIIHAFALRLRAAGKREMVILGAAMRKLLHLVFGVLRSGKPFNANYDTILA

SEQ ID NO: 45517 - protein, 364 aa, unidentified
MYDSMTTVTVGLDVHARSVRLAAVRADELLEERTLPYDHEAVVRVLRRWPGARCCYEAGPTGFGLQRHLVERGIDCRVVAPGLVPQRPGDRVKTDSRDARKLARLLAGGLLEPIHVPSRQLEAARDLVRAREDARLDRMRDRHRLSKFCLRHGRTLPTSSWTVVRRKWLGEQRFEFAAQQQTFDTYVHAVDLVDARIEALEGAIRETAEQEPWRALVARLRCLRGIDTLTALALVAEIGDFDRFKSAEELMAFVGLVPSERSSGEQRRQGSITKVGNSHARRLLVEAAWHARRRPTVGYELARRQRGQEAVVVERAWRCQQRLYSRWQRMAGRGKPQQKIVVACARELAGFIWAIATDQPLRSA

SEQ ID NO: 45518 - protein, 329 aa, unidentified
MQKDLLYCAIDVSKDKLDVDGAALALPAQLGNDHAGFRQLIKAAKKYPDAVQFVFEATGPYHLGLALALWEAQIPLSVLNPARVRYYAKAQGKAKTDPLDKQVIGDFARSFRPPPTPAPDPVRRELTELLQRRDGLISSRAAEQNRLGQCRHKMIKGQIRRMMAQSTEQIDQIDRLMKKLVNSSQELKAKVKALCQVKGVGHLTAVTLLITLPELGTLGRNRIVRLVGLAPLNDDSGTQKNKRYIQGGRARPRCALYMPALSASRHNPVLKEFYQRLLKAGKLKKVALTAVMRKLLICLNALLRHSADQQASEEDFCSAKALVTQPLNA

SEQ ID NO: 45519 - protein, 417 aa, unidentified
MALRIVYPICCGIDVHKSFVVACIAATAGNGVTTYKKHRFSTFTRDLRRLARWLYENNCRNVCIESTGKYWIPIYNILEQSCNVVLAHPKYVKAIRGKKTDVRDAKWIADIFKHGLVSGSFIPPPEIRQMRDLMRYRVKLTNLSTAEKNRAQNCLTISNIKLDDVFSDVFGKSASAIIDQLMLHPDGDFDVTPFIHRRCKAKPEKIQAAVDGLMSLEQRQKFRIIRSHMDSLAICRRDIEDSIIALAEPFKPQIELIMTVPGIRLFSAIAIISEIGTDMSVFPTAKHLCSWAGLVPQNNDSAGKKKTTRISRAGAYIKPLLVQCALAVCRSEKHPEIKSRYLALKKRRGHKKAIIAICRMLLTAIYHILKKSEVYNPELYRKEANAPANRVLTVKQAIALVKRNGFLVADTDDKLAS

SEQ ID NO: 45520 - protein, 362 aa, unidentified
MFDNQLWCSRPIDTWSSKTVLERGSLHRLPSNPNGCKGIEARILQGRVQEDLMETKVFVGIDICKDSLDVAIGPGKEIITFANDQKGVNALIKELSRIGPELIVLESTGGYERLATSSFVEAGLPVVIVNPRQVRDFAKSVGILAKTDAIDARVITRFAEAVKPDVRQLKDRETSELTALVTRRRQIVEMIVAESNRLKLANKRNKKDIKDHIRWLEKRLDKIESDIGKMIQNSPIWRCKDDILQSVPGIGPTTSAVLICDLPELGLLGPKKIAMLAGLAPLNCDSGKFRGRRRIWGGRASVRSALYMGTLAATRYNPAIKAFYQRLTAAGKCHKVAITACMRKLLIIANAMLRDQTLWQQN

SEQ ID NO: 45521 - protein, 370 aa, unidentified
MKQSVLYVAMDVHKESMDLALAEPGVRGKVRHYGKIGGDLDSLDKVIRKLKSQGAELRFTYEAGPCGYQIYRHLTGNGYECLVAAPALIPRRPGDRVKTDRRDALSLARLFRAGELTPVRVPDADDEAMRDLVRGREDAKAVERRAKQHTAAFLLRHGQRFPGKTTWGRGYWRWLRQISMPYPAQQIVLQEYLEAVQEATARVERLTAQIRELLPQWRWHPGVQGLMALRGVSLIVATTVLAEIGDLSRFTNPGELMAYLGLTPSEHSSGAQVRRGAITKSGNAHARRVLVEAAWAYRLKARISRHLWRRLTGLPKPICDLAWKAQIRLCSRYRRLRARGKHQNTVITAIARELAGFIWAIGRMVAPVTA

SEQ ID NO: 45522 - protein, 341 aa, unidentified
MGELYVGLDLHSVNTYMGIMEGETKRRIYQNRHRNELGEILHALEPYRDDVKGIVVESTYNWCWLVDGLMDAGYDCVHLANPAAIKQYEGIKYTDDRHDAFWLAQLLILGILPEGYIYPKEDRPVRDLLRKRAFLMRHRTANILSCQSMIERNTGLRIAGAGIKKLCTEDLRKIFSDEHLLFSGKMSTFIIDVLDHHIKSIEKMVRKVLKVRPGFENLLTVTGIGDILAMTIMLEVGNISRFPGVGNFSSYCRCVNSIHTSNGKKKGVGNKKNGNRYLCWAFMEASNFARMYSERANAYYQRKSRETNPIIARKALANKLSRACYYIMRDQVPFREEALFS

SEQ ID NO: 45523 - protein, 361 aa, unidentified
MTPVKYVGIDVHKKMCQAAVLDEDGALLDEIRFPNDPKGIEEFADKLTTFHDEAKAAVESTGNLWIQIHDRLEEHGFDVALSNPGKTRLIAEAKVKTDRVDARTLAALLRADMIPVCYVPGEELRSKRELIRHRLNLVKNRTMVKNRIHGLLDKHGLHMPEATSFSKGNLAWLRGLSLGFMDDAILRSDLALLETVCEQVDAIEEKIAVIATEERPARLLMTMTGVGYFTAMLILSEVGDVSRFRGEKEFASWMGLAPSVHQSRERTRIGGVSGPGNKRLRWALVECAQAAVRYDSRLGGLHERVSRRRGAGCATVAVAHEMARIMYFMLSRNEPYRGADGGLVERKLKSMSRKAMNGLRN

SEQ ID NO: 45524 - protein, 340 aa, unidentified
METKLYDHYIAVDWALTNMAIARMTAKSNKITVVDVPSDVEELKAYLKNLKGTKILTIEETTTSQWLYTELKDFVDKLVICDPYRNKLLSEGPKNDKIDAAKLVQLLKADLLKEVYHSGEKFLSLRKVVSAYSDLVAAGVRLKNQRYSLLRACGLAGKEKRGVELPSKEDRFVLACLERQIESYEREKEGYEKEFAKLERKYPEIQNQDSLPGIGLISAVKIVSRIVSPQRFPDKGHFLSYAGLIQLEKKSGMVSYGRKNSRYCSEMKSVYKTGVLGAIGNDNEINDYYESLIREKGYVDYNARHKACRRLAVLSWGVFKSGKRYERHRREPVNEESQES

SEQ ID NO: 45525 - protein, 396 aa, unidentified
MTTIGIDIGGRTHVAARCRDGQARADREILRVSQDRAGFATLDAWLERQADPVTLVTMESSGHYWMPLASHLGRRDIPVAVVNPLAAKYFAKSRLARTKSDPADARSLAEMAMRDTPDARDPLAGVELRQAARFAMTLVTEQAKVCQRLIRLVELGFPELGELFEDPTCRTAREVLRIAPTARAATRRRTTTLANANAGPGHRRLGTARAERLQAAAADSIAVPELDAEVAFEIGLLLDQFDLLERQIEDADRRVAGLLDGETARRLQTIPGVGPSIAATLIAEIGDIARFDDFDQLLAYAGVHPAERSSGRKGSNPETAWHMSKAGNSHLRAAAYRMALVGIQHNPVIATHYARKRAAGKSKMNALGHCMRKALSIVWGVWRNGQDFNPDWGVGT

SEQ ID NO: 45526 - protein, 370 aa, unidentified
MFVAMELSKSAWLLATQAAPSGKTSSHRLESGDITGLLALLRRLQARERQACGGGAVQVVVGYEAGYDGFWLQRRLAAEGITCWVMDPGSLQVNRRARRAKTDRLDAAMLLRALIAWCRGDRAACHMVQVPSVAREDARRTHRERQRLVVERVQHVNRIKGLLATQGINDYQPLRRDRSARLGEVRTKDGHALPPRLRREIERELQRLELVLEQLEAVEAERDTAVAAPAVDDADAAKVALLARLGGIGNELATVLVREGLYRSFTNRKEVAAYAGLTPMPFASGERHREQGISKAGNPLLRKAMLELAWLWLRYQPDSALARWFTDRVGSVRGRIRKITAVALARKLLVALWRYATPGLMPEGARIKAA

SEQ ID NO: 45527 - protein, 390 aa, unidentified
MDGGGETLSLFTVPNNADGAAKLQEKLRYTLLHTDYSKVTIGMESTSVYADHLAAYLRNDEFLCKWECAVHVINAKNIKNFKKSYPELPKTDNIDTLIIADFLRFGRIPKSTGHDEKFLALRNLTRARFQAAQNLSREKTRFVETLFQKFSTLDSAKVFSNTFGATSLAVVCEFLTVDDIIYTPIGELTEFVNQKGKGKFADPAAVATALQTAARSSYRIPKTVNDSLNQLLAIRLVGIRSIEEQIKSLDKAIEVYMGAFQNVLISVAGIGAVYSAGIMAEIGDIKRFEGQAALAKYAGLAWSKHQSGDFNAANTKMIASGNKYLKYYLLEAANKVRMHDAEFARFYRLKYREVPKHQHKRALALTARKLVRLVYSLLSTNRLYTPPETQ

SEQ ID NO: 45528 - protein, 408 aa, unidentified
MNCLDDIRLEQFRQLKKEIRGSEEYLIIGIDVAKEKHRAFFGTAHGKTLLKNLIFDNTIEGFEKLDMHVERVKVQYSLSKVVYGIEPTADYHKPLAKHLLKCGLMVVLVGGTAVKNNRQLLNGRWDKNDDKDSANIADLIAQGKCMFYEYPLMTLQNVRVLNALKRRLKKREHGISTYIRNHILAQYFPELDKYYGPSETLAVVRECLDPSAIAGMEYDDFCRTVAAGKMTLARERRVGAIWRTAVNSVGCTMGEAAFHEAQIAVDSLKQVRQEIKAVEDKLENACLEFPEYTYLLSIPGFGPDVSAKVLGAIGDPHRFTNSKQVLRLAGLDLCAKRSGKTSNRATPIISKQGKADLRCALYQAAFIASIKSKDFIPYFTNKLAGRAKEKGIGTKMRVKLAAKLLIIA

SEQ ID NO: 45529 - protein, 333 aa, unidentified
MQNFYFIGIDVSKKKLDICVMSNSKVLKEEQVSNHPQAIATVIAGIKEELSMSNDSLIICAEHTGQYTYPLICACKSVGSKLWLENASQIKYCSGVTRGKNDKVDARRIAVYAMRFFDKAKPYQRPTEELMRLKQLEAERSLYLTDLAKYKAQLSDQEGFMEDKIFKRKAKRLKEMIKSLEKTLKEIAQEMADVIYSSEELSRQMRLLKSVEGVGSVVAMNMIIATEAFTRFDNPRQFNCYVGVAPFAYTSGSSQHSRNRVSQRAVKYIKCLLHMAAVAIAHKKTGDLKTYFERKVAEGKNKMTVLNAVRAKLVARMFAVIRNNRVYQPILSV

SEQ ID NO: 45530 - protein, 338 aa, unidentified
MYYTGIDLHKFTSYLTTVDSSGAIVKQENLKNVAHNFVQYFKSIPGQHTTTVESTMTWYWLNDLLTSMNIPLVLAHAKYVKAIAYAKVKTDKVDSHTLAQLLRMNFIPVAHKISNEKRLLRDALRARLKIVQRHTSVTNSMQLLLAKYNFDSPTQLSGIPLFQYEQLTEVEALLNEQMLDLEKQLYPYLIPNDDIQRLLWIPGIGKMNAFTILLEVDDINRFPDVKNFFSYCRLVPSARNSGGKSKQRSSKDGNKYLKVAFSDAAVHAVHYYPVIKNYNNSLIRKKNKQIAKTIIAKEIAEIVYHVLKNKTDFNNKFKGKELEHKKSLQWPRVVSPYA

SEQ ID NO: 45531 - protein, 315 aa, unidentified
MPQLAGQVDGVVGVDTPVDTHRDTLTAAVVNPIGAVLADAQVSADADGYQRLLELARQQVPGRRCWALEGTGSYGAGLADFLDAVGEHVVEVCRPKRPAQRGGRKTDALDAIRAAREALVSEHLIHPRRRGEREALRVLLATRGGAVLARTAAVNQLKALIVSAPEALRAELRGRTSKQQIASCLARTTRPGDDVELRATMRALGCTAERIQTLTTEARELEQEIDLLVQAMAPELLALVGVGPISAAQILVSWSHRGRFRSDAAFAAFAGAAPIPASSGLTTRHRLNRAGDRQLNRALHTVVLVRARVDPATRA

SEQ ID NO: 45532 - protein, 324 aa, unidentified
MTNSDSFVVAGIDVSKAFLDVAVIGGSIRPSRFANTPEGQGELAQVLSSLGCALTVMEPTGGYEAAAACVLQLRELPVAVVNARRVRAFAQAMGYLAKTDSVDAQVLAELASVLVRKPDVKKFLLPIKDNSRKELEALMTRRNQLIAMRVAEENRLELAPARVKPSIKSMLEAIQKLLDQNDIDLQGQIGGHFQDLDQLLQSIPGIGPVTSRILIGALPELGHLDRRAISALVGLAPMAKDSGSSQGKRRIQGGRAIIRTTLYMATVAASTHNPVIKEFYQRLRATGKPARVVLVACMHKLVVILNAMVRTNTHWRMVPIAVLP

SEQ ID NO: 45533 - protein, 343 aa, unidentified
MEIRSVGIDLGKTTFHLVALGDNCKVLLKKKFTQKQLIAFTANMQTCLIGMEACSGAHFLGRTLREQGHDVKLIPAQFVKPFVKSNKNDFLDAEAIAEAVTRENMRFVPIKTDDQLDLQALHRVRDRLIARRTSVINQLRAFLLERGLVFAKSPAKLRERIPEILENADEDLTPRMRNLLDLLWEEWKDLDQQLADLNQEVELIASSDPACMRLRQIPGIGPLVATAIVAAIGNGAAFHRGREFAAWMGLVPKQYSTGGKAKLSGISKRGNSYLRKIFIHGARAVVLRSKRDRIAMGEWMTALEARVPRNVLIVATANKLARIAWAVLSSGQDYRAVQEPVAA

SEQ ID NO: 45534 - protein, 343 aa, unidentified
MQEITTIGLDIAKSVFQVHGIDASGAVIVRRQLRRSQVLPFFRKLPACVIGIEACATAHHWGRELVALGHEVKLMPPRYVKPYVKRNKNDAADAEAICEAVQRPTMRFVPIKSPEQQSVLMLHRTRQLFVRQRTALINAIRAHMAEFGIVVGIGRNGVEKLLGLICKGEDERIPPAARACLMALAAQLVLVKRQILEADRRVLAWHRTSKTSKRLEAIPGVGPLIATALVASIPDPSVFRSGRDLSSWIGLVPKQSSTGGKERLGGISKAGNRYLRTLLVVGALSVIRRAKQMGYTRHPWLVRLMERRSVKIAAIALANKIARIAWAMMARNESYRTPLPTPA

SEQ ID NO: 45535 - protein, 347 aa, unidentified
MVIIGCDFHPGFEQIAMVETDSGEMRQLRLGHKEEARQFYAGLRGKEVLVGVESCGYTQWLEQMLEGMGHQFRMGDAAAIRASYVRKQKTDKRDAGHILRLLVEGRFPALWVPSAAERDARQLIVHRHKRVQTRTRVKNQLHALAINQGMRLRWQLWTRGGRQQLEALELLPYAAARRADLLRQLEEMDAEIERLDEAVRKEAEARPAAVRLMSHPGVGPVTALAFVLTIGDVRRFKKARQVASYLGLIPSEHSSGGKQRLGHISKQGSPLLRFLLVEAGHSAVRKDAGLSRCYKRLQHRHSTGVAKVAVARKLALRLYWMLRNQTDYARLPVVRMQASPGHPVVSK

SEQ ID NO: 45536 - protein, 348 aa, unidentified
MVVGIDVHKRAHVAALLDERGGEVGTLGFANSPEGMRRLRAWLVAHDAGEAVVGVESPAGYGRLLVASLEAAGHEVLNVPAWRTPRERHRHGPGKTDPGDAIAVAQVVLRGRAELGPALEPALVRALALLELQRRRLVRDRTQAIQRLRADWNQVDPVGEARVVNLTRQRELRRLKRISFGDGVVEQVAARCIRDLARDIEDLNQRITSLDAAIAQLLQEHGNPVGDLHGAGPQIAAAVIAHAGDVRRFRDAAAFARFCGAAPIPCGSGQTAGRHRLHRGGNRQLNAALYRIAIVQARHHPPARAYLARKIAEGKTPREARRALKRHLANVIYRRLYAWAEATPALNT

SEQ ID NO: 45537 - protein, 404 aa, unidentified
MYYVGIDVAKEKHYVCILDDTREIAVKPFWIYSDILGLRDLVKRLTELSLNNDDFIIGVESTGAFSENLYEYVTDADYKIILLNSYQTAKYRDFSTMKKIKNDSIDALVIAELLASDKYKESYISNDDYQSLKVLGRLKKSLSDKIKTIKREISTVVATVNPEITKIFPNIFTKTAIAIIKAYPTSVDISKSTPKKLAKIFRHIKGNNFNDEKAKFLIELSKSSIYTGRAQESRALMIRTNIKILELLCQEKDEIELQINSLIYNKIETIDSSIENIKTIPGVSDKTISAVLGECGDIKRFESAKAFIGYLGLYPTQYQSGNSLSVGRLAKRGIPIAKHALYMAAVASVRHNTELNKLFHDKVSFGKSKKEALIIISKKLATIIYSIFKYNKPYQAKRVFIPHR

SEQ ID NO: 45538 - protein, 353 aa, unidentified
MTSLTDLPDVVDVVIGVDTHVHTHSAAVVDAATGGVLGEITVDATAEGYAEPVEFAGEHATLRAWAIEGTGGHGAGLSRHLLNLGEIVVELDRPKRAPRRNGAKSDPLDAIRAAREALARTRLGTPRSGGERQALSVLLAARRSAVTAATEAQQQVLSLVIAAPEPIRARFRDQKLPGMLATAATLRVHPSWDVETTTTVLALRSLARRARALTKEAAEHQKAILAIIRCWRPDLLEQFGVGPIVAATVLCAWSHSGRIHSEAAFAMLAGVAPIPANSGQVTNRYRLNRYGDRQLNRALHTIVQSRIRYHASTRDHVARRTTQGKTSREIKRCLSRYIARDLYRLLESGPATT

SEQ ID NO: 45539 - protein, 374 aa, unidentified
MTMMPHLQFRYIGLDVHRATIAVAIAEQDGPPSSYGNIANDPSAIRKLMTRLGGPDVRLRVAYEAGPTGYALHRQLAELGIECMVVAPSLIPVRAGDKVKTDRRDALKLARLLRSGDLTPVWVPDPAHEALRSLVRSRADAKADELRAKHRLSKFLLRQGCHPPVGVRNWSVRHFQWLRPLPFEHVADQVVFADYLAEVTAAGERIKRLEAALHQCAGNSSQVALIRALQGFRGIGFLSAVTIVAEVGDLRRFRTAPQLMAYAGLVPSESSSGSKQHRGSITKTGNSLLRHVFGEAAHHARHAPRVAGTLTQRQADLPRPIVDLAWRAQLRLHARYRHLGSRLGPHKALTAVARELVGFIWAVGQLIEEVPAAA

SEQ ID NO: 45540 - protein, 334 aa, unidentified
MKNYSLIIGIDISKLKLDIIGIDANSETILQHQIIENTVSKINSFLKKVIKKYGINDVLFSFENTGVYSYFLASSLDKMNVDYCNLSALEIHRSIGIKRGKSDKIDALVIAKYTLTNRFKLKLSVATEQHLMELKLLYTQREKVTKAIRQFQNNKETELFLPKEMLSKFSKSNTSIIKNLKRNLKLIDTQIVSIININSSLKKDYELVQSIPGIGPQTASYLLIVTKGFTCFENARQLACYAGVAPFPYQSGSSIRGRNKVSHLADKKLKSLLNMCALNAKKYDYQIKIYFNTKVDEGKNKMLVLNNIRNKLLHRVFAVIKRQQPYVNLHNFAA

SEQ ID NO: 45541 - protein, 375 aa, unidentified
MAKNTRFVGLDVHAETIAVAVAEGRNQVRSLGTIANRAEAVRRLVGKLGKLTEVKVCYEAGPTGYALYWQLTQVGVQCEVIAPSLVPMKSGDRIKTDRRDAERLARSYQAGDLTAVWVPDSKHEALRDLVRAREAAKEDQLRAKHRLGKYLLRYGLRPADDGRPWTAAWWQWVRALKLPHPEQNTTLLELILEVDHQGQRIDRFDAAIDQAVDAAPEQLKAIVDALQALRGVAKVTAVTLATEFGCFSRFEKAGQVMSYTGMVPSEHSSGPKTRRGAITKTGNSHLRRVLVESAWHYRHQPKLCKRQKELLTALSPKVAAIAWSAQQRLHRRYWALQNKSKPSAKIVTALARELAGFVWAIGVETEHALKTARAA

SEQ ID NO: 45542 - protein, 271 aa, unidentified
MTAGDIFVGIDVAKEKVDVAVRPRGERWQERNDAKGIRRLGRRLRKLGASLVVMEATGGYETELALALTACGLSVRILNPRQVRDFAKGKGLLAKTDSLDAAILAEYAETYRPEPRPLPDEEAREMAALLTRRRQLIEMLTAEKNRLEHARGQVRRRLLAHIAWLESEIERTERDLDDRMRRSPLYLKEHERLTSVPGVGNQTALSLILNLPELGTLNRKQIAALAGVAPFNKDSGKWRGKKSVWGGRAQVRAVLYMATVVASRHNRVIRA

SEQ ID NO: 45543 - protein, 367 aa, unidentified
MNENTAKAPAISTPPAGIVRVGVDLAKRSIQVHAVDASGKVLINRALSRERFLPWCAQLPPGCAVAMEACTGAHHWARELVSRGLHPKIIPAALVSPYRIQGASGKNDANDAAAICEAASRPQMRFVLPKSAQQQSMLCIHRLREGIKSDRTACINRIRGLLSEFGLVFAQGSKALRQDIMLTLEDASNALPGLARLGIAQACEHWRHLDEQMAWCDQRIAAHAQEDPQVNAAMQIIGIGPITASAAVATVGDFKQFNSGAQFGAWLGLVPRQHSSGGKASLGRITKRGDTYLRMLLIQAAKSAVLTAHKRQDTLSQWMLKLRESRGWQRAAVALANKNARILWAILSKAGRYDPMHVSIKPTAPAQ

SEQ ID NO: 45544 - protein, 363 aa, unidentified
MTKNNRFGSGMAGKMTIGLDLGDRHSYFYSLDSAGENLESGRVQTTRSALEKRFRSCEAARVVIEAGTHSPWVSRLLASLGHEVIVANPRKVRLISDNDGKDDPVDAALLARLGRVDASLLSPIEHRGAEAQADLAVIRAREALVRVRTQLVNHVRGAVKSLGSRMPSCSTRSFAQKAALQLPTDLRFALEPLLEMIAAMTQQINGYDRQIEDACRKKYPETELLQAVPGVGPLTALGYVLTLENPHRFTHSRAVGSFLGLRPGRDKSGQQDPELRITKAGSPWLRRLLVGSAHYILGPFGPDSDLRRWGLKLAGRGRKNAKKRAVVAVARKLAVLLHRLWVNGEVYQPLYQAERVAVPAAIE

SEQ ID NO: 45545 - protein, 401 aa, unidentified
MNNKTMFYVGIDVSKDKSDICIKDEKGNDLIHGFEMTYKKADLEMLYEIIESIKSKIPGNSDVVIGMEATGIYSLPLYSNLKKDGYKVKLYNPIQTNGYRKINIRKTKTDPIDSAIIADMLRHSEPPQASEIQDMQLFQLRELVRIRHRLIEKQALCKTQIIRNIDTIWPDYGGAMKGVFGAASLAILKKYSVPSKLRNESFEKFYELIKKKSRSKISRSKAEEIYANAGNILTIPELDSVMSIEIKTLITQLELYDEQIHSIEGKIDQMMKLTDTKIMSIPGIADILGPIILGEIGAIERFSNAKKLVAFAGLDPVVSQSGRFENKSGKISKRGSPLLRRALFLAANSAIQNDENLKRFYAKKRSEGKHHFSALNAVAAKLLRIVYWVLKNNKEYQIQPN

SEQ ID NO: 45546 - protein, 361 aa, unidentified
MEQQQRYVGIDFHRRRSVIVHKDAAGGILETVHLDNDPIAFARELAKAGEHPEVVLEACYGWYWLADLLDELGANLHLAHPLGNAWGNRRVKNDERDAEDLVDLLRLGRLAEAYIAPPELRELREIVRYRAKLVTLRSGLKSQVHSVLAKEGVPVPMSDLFGTAGKDLLDTATLGRVYAIRIKSLRDLIGRYDNEITMLQTEIDKWLSGDRGYLAIQALPGVGPVLGAIFVAEIGDVARFSSPDRLCCWAGLTPRHRESDLHVARGPITKQGSRLVRWAAVEAATRQGGVQSGRYERIVARRDSKKIARVATRPAPPHPRLLRASRRRDPLPRRKDRVSSAQAGRVLAVGHDPLKGRGRQF

SEQ ID NO: 45547 - protein, 339 aa, unidentified
MAQVTTLGVDSAKNGVCIHGVDAHGHVIVKKRLARQKVLPFVAQLPPCLIGMEASGGAHYWAREFTKLGHTVKLLSPQFVKPYVQSQKNDPNDAAGICEAVARPRMRGVPVKSVAQQDIQALHRIRERQIKARTALINQIRGLLMEYGIVIPQRASQVRHKLPFVLEDAENGLTITAREWLQALAEELQVLDQRLAATDHRIEQVFEADEACQRLAQLGGIGPLTATALVAAVGDATGFKNGRQFAAWLGLVPRQHSTGGKTTLLGITKGGNRYLRMLLIHGARAVLRVVDRNTDAWSRWLQGVQVRRGTNCASVAQANKTARVAWALLAKGDRYRRAA

SEQ ID NO: 45548 - protein, 371 aa, unidentified
MKKDTIFVGLDVHKKSISVALADAGRDGEIRYYGVIDGDLESVNKLVRKLQSTGATLRFVYEAGPCGYELYRSLTNKGFDCTVAAPSKIPRKSGDRIKNDRRDALSLARLHRSGELTPVYVPTPEDEAMRDLTRGREDAVKALRVARQHLLAFLLRYGYRYNGRTYWSKAFWNWIADIKMSHRAQQIMLQEYVHAVHEQSERVQRLTDQIRALVPQWRLAPMVKALQALRGVSLIVASTTLAELGDLTRFSKPKQLMAYLGQVPSEWSSGDSNHRGSITKTGNSHVRRALTEAAHAYSHPARESRVLLKRLEGLPKPVQQIAWKAQVRLCGRFRSLVARGKNRNKVVSATARELSAFMWAIAQEMQPKSEA

SEQ ID NO: 45549 - protein, 400 aa, unidentified
MLSIGIDVSKGKSTVCGMKPGGEIVYAPFEVQHTREGMSELVLLLHNSGEEVRAVLESTGSYHCPVVAALLENGIFVSVVNSLRMKRFCSQSIRKVKTDRIDAMQIALYGLAYWQELQPTKLPEDTYRELQLLARQYYQMTSMLIKAKVDFNAICDQVLPGMQELMNDHAGRHKLSDFVLRYRHTTHILEMGETRFRKDYCKWAEKKGYRNCERMAVLIFATAQNGIPVLPNAPSTQIVITEAIRVLHTVEASRDAILTQMQALAKTLPEYSLVREMPCIGDTLAPRLIAEIGDVRRFHSKRALIAYAGIDAPPYQSGKFCANNRHISKRGNRYLRKTGYEVMQSYVMHKPANDPIFTFIEKKRGEGKSGKLAMVAGLNKFLRVYYGKVTELYRSLPAIE

SEQ ID NO: 45550 - protein, 413 aa, unidentified
MTEENFAWFAGIDWGSERHQACLVDAQGHIVGEREFAHDGKGLADLCDWLLSICGAADTVAVGIEVPHGPVVDTLIDRGFVLHAINPKQLDRLRDRHSVAGAKDDRRDAYVLGDGVRTDRRLFRRLHVSDPRLVELRAWSRLAEELTQERVRLSNRVHHELWRYFPQMLKIADDDVAAPWVLELWNLAPTPAKARRLRAAPVEKLLKQHRIRRIDADTVLRILQEPAIKVGKGVAEAAGVHLRSLFTRLRVVNRELRQAGAKLDALCTAIGETDAESGEGLQRQDVMILRSMPGIGPINLATLLCEGSGPLGRRDYPALRTLCGAAPVTKRSGKSHTVIMRYAAHVRLRRAVYHWARVATQHDPKSKIRYAALRRRGKSHGRALRGVADRLLGLACVLLERQTPYDPDFAQAK

SEQ ID NO: 45551 - protein, 314 aa, unidentified
MQSASEVFVGIDVSKAQLDVAVWDSSGTWQVANDEKGISALVNRLKELSPTLIVVEATGGLEVPAVAEMAFAGLPVAVVNPKRTRDFARSTGQLAKTDVLDARVLAHFAQAVRPQVRSLRTEEQEQLAGLVTRRRQEIDMITSEKNRRCSTRPRLRERLDKHIEWLDGELKALDEEIAQFIKGSPLWKEKEELLRSVPGVGPVTAATMLAQLPELGTLNRQKIAALVGVAPVNKDSGKKRGKRRVFGGRAPVRSTLYMATLSATKFNPIIRSFYERLLKRGKEKKVALTACMRKLLVILNSIIRHRQPWQPHLA

SEQ ID NO: 45552 - protein, 384 aa, unidentified
MNPDRTDAPATGEYGTVFVAFELSKSKWKLGVIMPGLQKMSRYTVEGGDLAGLAQLFAAVRAKAERGGKPVRIMSCYEAGFDGHWLHRWLTDQGVINHEIDPSSIAVNRRARRAKTDRIDLDLLMRAFLAHLRGEPRACSVVHVPTAEDEDRKRRTRERERLIKERTAHTNRIKGLLHAQGIRDAMPLKPGFLSKLDRLCTGDGRPLPARLKDEIRREHERLSLICQQIKAIEAEHQAAHRAPVPGSVEAKIVQLAELKGIGPVFAQVLGNEVFYRRFANRRQLGSYLGLTGTPFDSGNSRREQGISKAGNSRARATAIELAWLWLRHQPDSELSRWFRERVGELKGRMRRIAVVALARKLTVALWRYLETGLIPTGAVLRPSF

SEQ ID NO: 45553 - protein, 350 aa, unidentified
MKQYIGVDFHSQHSYVAVMDDKGRIIDERRLYHTDMNGFSEYFSSFDRGTSVALEATRNWYWLVDCLQDLGLEVKLVHAKKARIIAESTIKTDKIDARVLAHLDRCDFLPQAFIADKETRSQRELLRYYMSLVKIRTSVKNRVHAVLAKNNVHHGFSDLFGKAGTEFLKKVELSAVFRMEIDGYIELMEKLKDLISRAQKEIRAKCKESECVRRLMTIPGISYFSALLLASEIADIKRFRSYKKLCAYAGLVSTTHQSADRRYYGHIIKDSNKYIRYALIEAVPIAVRKDPGLWSFYTNLQRKKGIGKAKIAVAKKLLITIYYMLRNGTEYRMGVTKGFSRVNPCAKLGA

SEQ ID NO: 45554 - protein, 338 aa, unidentified
MELYGAIDLHSNNNMTVLIDQQDQVVYQKRLPNDLPLMIQQLSAYRESLQGIVVESTYNWYWLVDGLMEQGHRIHLANTAAIQQYEGLKYTDDPSDARWLAHLLRLGVLPQGHIYPKQQRPVRDLLRKRGQMVRQRTANLLSIQNLFSRNTGHSMSANRIKVLDRQEVDDLVPNGDLALAIKANLAMLRCADEQIDILEKSVSERVKLKPQFKLLKTVPGIGDILALTIMLETGQITRFPSVGDYASYCRCVGSKKISNGKKKGSGNTKNGNKYLAWAFVEAANFAVRYSAKINRFYQRKKSKTNGIVAIKAVAHKLCRAGYYMIKDQVAFDVSKAFV

SEQ ID NO: 45555 - protein, 318 aa, unidentified
MNTNTLQNINVGVDTGKSQLDIYIRPLDIYFTVPNTDKGISDAIKAIKKHKPQRVVIEATGRLEMPFILACDKAKLPYVVANPLRIKRFAEAIGQRAKNDRLDAELIAHYAERVQPELTKLKSENIRLMSDLVTRRNQLLTIQTMERNRLQILPKNISSTITPILTALKNQLEKVEAKIEKLIESCPEYQAKNTILQSMPGVGKILAASLISNVPELGFITNKQASSLIGVAPITRESGRFKGKRMIKGGRPQVRTVMYMAMMSAIQCNPVFKATYERLLAAGKPKKVAIVACMRKMVVTLNSMLRDGAMWDKDSVKN

SEQ ID NO: 45556 - protein, 326 aa, unidentified
MYSIGLDVSKSTLAVHIPLGNLDIEIENSIKALKSLYAKLKKIYKKEIDKLVFVFEPTGNYSSVLYRFCADKKIQIFIVNPKQSHNFAKAISQRGKSDKVDAQMLSHAIMIAREEDIVVPVIDTSIEEIKEMMNYYKIKLKQRVQLSNHLEALRAKANNSSIVKRLQKEIKELKKVEADIIDEIYQMIAKDETLIKKYEAIISIDGIGKIAAIVLMHLFIRYPNANQRQITSLVGLDPIVRLSGTSIKGKSRISKAGGKMYRGTLFMAAMVATKHNEKLKLFYNSLKENGKHTTVAQIAVMRKLVIIAHSLYKSGESYDENKYLSY

SEQ ID NO: 45557 - protein, 347 aa, unidentified
MKYIGLDVHKHNIAACVVDDDGEPVKSIEIGSRKDLHKIPEYMEGQNYCVMMESSTYVYDVYRYFCESGTEAHVAHAKALRMITTSDKKTDRNDAELLGRYLRLWKKGEIELSMAYIPSKEECELRDICRLKEEVSGKIGDEVRRIKSHMFRNTEPFPDGNDRLAVNKVRAAVTKSYPEDAALQSRMRYLEDLRKQNSELTRLIESQLPGDRNVELLCTIPGIARQTAVQIMSMIIDIERFEDPEKMCSYFGLVPRVRDSGGKEHHGRMTKSGDKMMRAIMERVTLSHIIHCDSSIKEFHRRKASETGTKKALISASRKMLAMIHSILRTKKPFEARVPVPKEQGTV

SEQ ID NO: 45558 - protein, 357 aa, unidentified
MKLDAALDTSATTTAICVMNSRDGTIVLETIVPTDPDAIFRALEPYAARLHLVGHEATSWSAWLHRELEVRGIPMVLLETHHAARMLEAQRNKTDKNDARGLAQLVRSGWFKPVHAKSDGANRMKLLLAHRRTLKRKLLDIENEVRQSLKMFGLMVGPRVQRGSFCTRVRNLVAGDPLLEVLTESMTACWQVLWDEYRKLHKLLVQLVGQEELCRRWCEIPGVGPVAAMTFMAAVDDPRRFGKSKTLGAHFGLTPRREQSGTSVDRAGHVSRRGDGEVRTVLYEAASGMLTRSKQHSTLKAWGMRISAKRGHKRAVVAIARKLAVIMHRMWIDGSTFRFSTKETVSEGTATASLVLA

SEQ ID NO: 45559 - protein, 369 aa, unidentified
MTFFIGVDLHKTQFTVHVRTEEESESLDQIRQYPTTPDGYAEFLARISRYKATGSDVKIGVESTGNTRFFKNQVEKVRAEVRVINTLKFKVINESAKKTDKHDASTISEFLSKDMLPESYLCGKETENIRRLLKSRERLVRSTVGQKNEIHALLVSLGIPDELRSLQSKKGRQKILDTLESNNDYVLEAQSVKLMFEIIERIEESVKIIEKQLVELTKEDEMVNRLLTIRGCGKITAWTIRAYTEDIARFATAKKYAAFCGLVPWVQDSNETIHHGKITKRGPQELRTCFVQLVLGIRRCKDTSDWRMMQRYEYMKTHKGSGKSIVAAARKMAEIVWAMLSDKKDFDVQKMIGKYKPISLAEEALTAMN

SEQ ID NO: 45560 - protein, 421 aa, unidentified
MHVLYQRCAAVDIGKDVIAVAVRLPGDGPEHRQTIKRTFKTFYGVLKHAAGWLTAQQVTHVAMEATGIYSMPVYHALIEHGQFEKVLVCNAGHVRNVPGRKTDLSDAEWLVHLLECGLLRGSFIPPAQIKAARDVIRYRTKLTESRTSELQRLGNVLQDAGIKVDSVASTITTRSVRAMVEALIDGERRPVLLAELAKGRMRARIPDLQRALEGRFDDHHALMCRLHLDHLDHLEEMIARLDTQIQDMMQPFRAQRELLTTIAGIGPFAAAAIISEAGADIGETFPSAGHFASWIGVCPGNHESAGKRHSGKPRKGNQHLQHVLVECAWAASRTPGYLQSLYRWHVRKFGGSRNPTAKNKAIVAVAHKLAIIIWHVLATGKPYTDLGADYLDRRIDPAKETRRLIARLQALGHTVTIEPAA

SEQ ID NO: 45561 - protein, 357 aa, unidentified
MKVTTIGIDLAKDVFGLHGVDGEGRVAFKKRLVRSRLLEYMSQLPPCLVGLEACSSAHYWARKIERLGHRVRLMSPRFVKPYRKSDKNDANDAEAICEAVTRASMRFVPIKSEAQHEVQALHRVREQLLKSRTALVNQVRGLLAEHGIVAPQGIARARRLLLELLADPERHGLSGLFRETLQEMAERLRFFDERVAAYDDRIERVFKEDERCRRLAKIEGVGPLVATAVVAAVGNASEFKSGRELSAWLGLVPRQHSSGNRSQLLGISKRGDRYLRTILIHGARAALRRADHKRDQRSRWAMRIKLARGYNKAAVALANKNARIIWALLTRGENYRPPAISVASPTAGRISLIRVQA

SEQ ID NO: 45562 - protein, 339 aa, unidentified
MYPFYLGIDLHLKRTYMVLMDAKGEVIEKERISNQNIKEYLQEKVPQETYAVLEATRNWPFMYDMLNEHVQLVDLVHAKGVRAIASAAVKTDQIDASTLAHLARMNYIPKAYAASKEIRDLRQLLRHREWMVNQRSKAKNRIHAVLAAYNLVSPVTDLFGAVGRDYLQEVMENELRLSSRQVIEDHLSLIDHLTQRICALEKSISLNKDQEHIVNLLRSMPGVGRLIALILLAEIGDISRFHSPKSLCSWAGLTPRVHNSDAVVQHGHITKEGSRYLRSAMVQAATTACRISSKWYRVHEHMALRCGRRAARVAVARRLLTVIYFMWKKDQPYLENYGQ

SEQ ID NO: 45563 - protein, 287 aa, unidentified
MASAAPAFVGIDVAKAELVISIRPSGEHWAIANDGAGILTLVQRVRSHAPTLIVLEATGGYERAVVAALAAAQLPVVVANPRQVRDFARATGQLAKTDRLDADILALFAERVRPAPRALPDDAAQALDALLTRRRQVLEMLIAERNRLEHAVPAVRRGLTQHIRWLERQLVDVDRDLDDSIQASPVWRAKENLLRSAPGVGPILSRTLIGELPELGTLPRKQIAALVGVAPLARDSGTLKHKRLVWGGRAPVRAALFMGALVGTRCNPCSARSIVASSRPASQRKSP

SEQ ID NO: 45564 - protein, 424 aa, unidentified
MNLTQNDRLKQVTSDTLIVGVDVGSQTHFCRAFDWRGFELSRRVFKFSNTGMGFLTFLRWTEELMNKTEMKKVIVGCEPTGCYWLTFQKFLQDHDIQLVTVNPFTVNRSMELDDNSPEKSDLKDPKTIALLVKDGRFSTSYLPSGVYAEIREASVCRDQIMKQHVRLSNQIQGWLQKFFPEYLECYADWDSTSGLMLLREAPLPQDILKIGAGGINQIWRDAKVRAAGIKRAQTMVEAAQNSVGLEAGEAARLEIWVLVNDYILKAEQLKRLDEYLEEKVKEVPNVEKLLAIKGVGMSTVIGFIAEVGDIGHFTDPKQIQKLAGLEIVKKSSGKKKGQPRISKRGRRKLRRTMYESARALMTWNPAFQDVFLYYRNRTKNSLGGMQAKIAVACKAIRIFYVVLQTGCDFDEEKFRKDIIRPEAA

SEQ ID NO: 45565 - protein, 373 aa, unidentified
MKQTIRSFVGMDVHKETISISVAEDGRSGPVRFIGVIPNTPEAVHKMAKQLTRHGELDFCYEASGCGYGIHRQLTRLGHRCTVAAPSMIPRKPGERIKTDRRDSEKLAILHRSGDLTPVWVPDTTHEALRDLVRARVDASMHLMRARQQLLAFLLRHGRSYPTGKHWTQRHRSWLAGQTFQEHAHGIVFQDYLETVWTAQQRRDALIERISAMVGSWSLGPLVEALRGLRGIDMISAATFIASTGDLSRFESPRLLMGYLGLVPSEHSSGGTIRRGGITKTGNREARRMLIEAAWSYQYPARVAKEKAEILIRLLKKIRDIAWKAQTRLCTRYRSMVARGKKPTVVVAAIARELAGFIWAIGQEMRLLMASSQ

SEQ ID NO: 45566 - protein, 338 aa, unidentified
MKKYSGIDLHSNNCVVAVIDEADQVLYRKRLPNELSVIVAALGVYRGELHSVVVESTYNWYWLVDGLMEAGFEVRLANTAAIKQYEGLKHTDDGDDAVWLAHLMRLGLLPQGHIYPKAERAVRDLLRKRSQLVRQRTANILAIENLVARNSGRLINGNQVKRLSPADLPAIEPEADRRLAIAANLAVMGALNEQIKQLESAVKARTKAHEALPPLKTVAGIGETLALTIALETGGIERFAKVGNFASYCRAVDSRRLSNGKKKGEGNAKCGNKYLAWAFVEAAHFAVRYCAQAKRFYQRKRAKTNNAVAIKAVAHKLARACYYVMRDRVPFDPARCFS

SEQ ID NO: 45567 - protein, 394 aa, unidentified
MCQQYKAEASMTKHNILFIGLDTHKTFTEVAYIEDQRGAKSIHLGKILSNKAAFKKLARQLQSKYPHATLHFVYEAGPCGYWIYRLLTSLTHCCYVIAPSLIPKKPGERIKTDKRDALKLAKLLKSEDLTPIYVPEPEDEAVRDLSRSRETAMKDLKDAKYQLKALLLRNNINSKVKDNWSLQHLRWLAELVLPHPCQQIVLQEAVSTITERLKRLKRLDNELTHQVKNWRYYPVVKAVQAMRGVRLLVATGVIAELGDLTRFDHPRKLMSYLGLVPSEHSSGGKRRLGAITKCGNSRARRLLVEGAHSYKHNANISKEMQLRQEGLPKEIVDIAWQAQLRLCRRYSRLMHKGKHRNVVVTAIAREMIAYIWSISREVVLPTVDVKLRLARMPA

SEQ ID NO: 45568 - protein, 343 aa, unidentified
MTTLYYIGLDIHKKVIAYCIKALDGRLVDAGMISAHRNSLDRWVHGLPGPWVGALEATIFSGWIYDYLSPHAVTLKVAHPEMLKAITAAKKKNDLSDAEKIADLLRVDLLPQCYMLPEEIRELRRILRYRNHIVRTGVQMQNKMCGLLMEVGADYNKRRLRGKKYFKNLLATVEDIPQSVKELLQFSRSGIEMFTAIQKQLVEALRTNELIRDRVQRLITIQGVGQITALTWVLEVGDPARFRSIRKAISYCGLCSTQQESAGKERRGPISKKRNKHLQTMLVEAAKIAPHWNPRLASIYEKEVLKGNRNRATLAVARKLVAYLLAVDRAATDFVCQAEQTIA

SEQ ID NO: 45569 - protein, 433 aa, unidentified
MNYVDDIRLKQFVQMKKEIRGSGQYLIVGIDAAKEKHRAFFGTAQGKTLMKSLIFDNTVEGFEKLDAHMERIKVQYSLPKVVLGIEPTADYHKPLAEHLVKCGRMVVLVGGTAVKNNRQLLNGRWDKNDDKDSANVADLISQGKCLFYEYPLMTLRNVRILNALKRRLKKREHGISSCIRNHILAQYFPELDKHYGPAETLAVVRECLDPSAVAGMEYDDFCRTVAPGKMTLAKERRAGAIWKAAVDSVGCTMGEAASYEARVMVDSLKQIRQTIKEVDEKLEDACLQFPEYTYLLSIPGFGPDISAKVLGAIGDPYRFTSGKQVLKMAGLDLCANRSGKTSNNATPVISKQGKSDLRYALYQAALIASTKTKHFVPYFTNKLIGRAKEKGIGTKMRVKLAAKLLIIAWTLMKKKECFDPKCLKLEADRQEAA

SEQ ID NO: 45570 - protein, 406 aa, unidentified
MTPDHEPGQVPEQVYGGVDTHEDTIHVAVIDGEGRDLDDREFPTTPAGYRRALAFIVSYGEPIAVGIEGTSSYGAGLTRVAVEEGFFVVEVVRPERAERRRLGKSDPIDAYQAARAAMGTHRIAPAKDASIEGIRALHNARRSAMKARTAAMRQIYQQLITAPVAIREKYRNLSSDKRVAVLARMQVRRDRAPLERAVLLALKTLARRCVDLQHEHDHLGIELDHLVTAANPGLRAVYGVGPDTAAQLLLTAGGNMDRLRTDAAFAALCGASPIQASSGKVTRHRLSRGGDRAANSALYRIALVRMAGDQHTKDYVARQRDAGSSSKEIQRKLKRAIAREIFRYLTTPITVPTIEDLRPLRQLKNITLTTAANHLGVWPTTISELERGIRRNDDLATTYREWLTAA

SEQ ID NO: 45571 - protein, 387 aa, unidentified
MSPTVAAPITAALDYERTLVLAIEVSNKSWVLAAQVPGLPRTKAKRTINPEVEALLAAITGYRARAAAAGCSIERVIAVYEAGWSGFWLARWLMRHGVEVHVVQPSSVPVDRRMRRAKSDGIDAELLLRTLLAWLRGEPRVCSMVPVPDEADEDARRCVRERTELISERVGLTNRIGAVLATLGVSDYNPLLRNRCRRLAELRTGLGEPLPANAYAKIKRLLARLELVLTQIAELERERDAVMETEASDKASKMIQQLTGLRGIGVQSATVLVREAFVRRFANGKALGSYAGLASSPYSSGGINREQGIGKAGNRRVRTVMVELAWLWTRYQPAAAQVCWFRERVGSTGPRVRKIMVVALARKLLIALWRFVIDGVLPEGAVLKPAA

SEQ ID NO: 45572 - protein, 407 aa, unidentified
MELIALYKRVIGLDIHQAQITACALIEEADGSTRIEQRQFGGFKRDRRELAAWVAGLRPDEVVLESTGIYWKSPYAALEAAGIRAKVVNARHVKNVPGRKTDVGDAHWLATLARAGLLRGSFVPPAKLRELRLIGRQRQKLVGQLASEKNRLHKVLTDSGVRLGVVVSDLHGQSARAMVKAIIAGQPPQEVLKLASRRLKSSREELFDALQGDLSASHRFVLDELMRHIEEIEARIARFDARLLDELESERNTLALLQTVPGVDLIGAAMLLIEIGTDMDAFGSADRLVSWVGICPGNNESAGKRKSGHVRKGNLYVRRLLCEFAHAASRTTSVFKSKFQSLVVRRGYKRAIIAIGHKILRTLFFMLKRREHYRDSATDYEALSVQRNAPRWIKALTKFGFIATAST

SEQ ID NO: 45573 - protein, 411 aa, unidentified
MDKIYDKCCGIDVHKKLIVACFRKGNKQEVREFGATTRELLVLADWLKDGGCEMVAMESTASYWKPLYNILESSDLNAMVVNARHMKAVPGRKTDVKDAEWIADLLQHGLLQASYIPDKDQRELRELVRYRKSLVGERTRELNRLQKMLEGANIKLSGTVADINGKSARSILEYMLTGEPIDSVKYDEMYEQKVIAHNLKASKDQIIDDLNGVMSPLQRRMMRELLDHLDELNVHIKNLDDEIDNFMKPEEKKASAAIQSITGIGNTSAQAIIAVIGTDMERFPDDAHMASWAGLCPGDNESAKKRKSGRTRKGNALLRTTLITCAHSAVKNKKSYFYAQFMRISAHRGKKRAYVAVAHSMLIAIYHILKDGVVFKDLGAEYYNQFNKERKINAYLKKLKALGWEAPAVAA

SEQ ID NO: 45574 - protein, 347 aa, unidentified
MENATRLFLGLDVGKSEILATLMDDTEAELFRGSFKNQLSGFRKMMKAVNKETSKVSGKHMIHAGMEATGTYYLKLVKFLYEKEEEVIPYVINPGSVKKYMEYRGSRTKTDLQDSRIIAMCVKDGMEKKIFRPWFPARKEHEELKQLVRLREDLLTMRTMEKNRIEGLSQDPDHSEPAMKILQDHVEYLSNQIREIEDILKENIRHGNFPDIGEDIELLKSIPGISDLTATSFISEIGDIDRFDGIKQIVAHAGLAPMERQSGTSVRGRTRICKRGSKKLRQLLYMPTLAAIRCNPAIKSFYERMIEKGKRKMVAVTACMRKLLHIMYGILKNRTPFDPVICIGYVK

SEQ ID NO: 45575 - protein, 350 aa, unidentified
MTIIGCDYHPGFQQIAFVDTETGDYGEQRLAHSEGAEKFYRDLAAQGKKVRVGMEASGHARWFERLLTELNFELCVGDATEIARKRERKQKTDRQDAQHILQLLMENRFPKIWVPSGENRDLRQLLWHRHRMVQARTRIMNQLQAVALNEGLRCKKKLWREKGRQQLEAFRLAPWASRRREDLLQLLDRLNPTISDLTQAIEQEVEKCPEARRLRTHPGVGALTALAFVLIIGRAERFQCGKQIAAYLGLVPLEDSSGNRRRLGHITKQGSSILRFLLVEAAQVTARSIPEWRNKYVHLTMRRGRKIAKVAMARRLAIALYWMWRKGWDYEQLRKFGSHAGQPGNRDGVK

SEQ ID NO: 45576 - protein, 387 aa, unidentified
MTQASSLSPLIPLDYENTLVLAIELSKTKWVLAAQVPGLLRVKAKQTIEPKTEALLAAIDGYRDRSKAAGRTVERVVAIYEASWSGFWLARWLGRHGVETHVVQPSSVPVDRRSRRAKSDGIDAELLLRTLLAWLRGEPRVCSMVPIPEEADEDERRRVREREDLVADRVSLVNRIGAVLATLGVDDYNPLRRDRRARLETLRTALGDPLPPHARARILRLLDRLDLVCAQIAELEQERDAVLEKEAPDRAEKMIRQLVGLRGIGVQSATVLVREAFVRKFANGKALGSYAGLTPTPFSSGATEREQGIGKAGNRRLRTVMVELAWLWQRYQPGSAQVSWFRERVGGTGRRMRKVMVVAMARRLLIALWRFATQGVVLEGAIVNPAS

SEQ ID NO: 45577 - protein, 340 aa, unidentified
MNFALGLDVHKETTAYAIVNGEGHIQRKGEIKTNPKLCLDLVSWLPASAVQIGMEASTYIYPLYDALNDAGYKVKVAHPAKLHRITKSVIKHDDKDAKDIALQLLRNDFPESYMLSKEMRDKREIIRLHLKITQEQTAIKNRIYSLLARHNCRLPCKLESIKSIQMLSDIQLPQDARITLSLLTEQLNKTKSQLKTVNKLIAQFVNGSEEAQKLMKINGIGSFTAATFLIELGDWKRFQSVKQLTAYVGMIPKMSGSAHKMYYGRIRAEGNRKIRYAFGRAAESAIKKENEFKLFYVKLINKGKKRRTAISAVANKLLRTCYGVLHTQQPTYSGSLMERG

SEQ ID NO: 45578 - protein, 467 aa, unidentified
MSRKRKTKRSGRSNQPEGIPILNPNAAGLDIGANEIFAAVPVDRDPQPVRSFGTFTAELHALSAWLHECRIETVSMEATSVYWIPAFQILETSGLEVCLVNPRYFQNVPGRRTDVSDCQWLQRLHSAGLLRGSFRPLQEVCVLRSLTRHRDNLVQLASTHILHMQKALDQMNVQLHHVLSDITGLSGLAIIDAILDGERDPRVLAGLRDGRVKASEETIVQALTGDYRPEHLFSLKQSLASYRHYQKLMSACDREIEQQLKQFDARVDAKARPLAPPKVRRRKLFSNEPKFDLRGHLYRIFGVDLTAVPGISVLTAHTILSEIGPDVSKFRNASAFASWLGLCPHNDISGGKILSTKTRRVNNRAALAFRMAANALFRSQSPLGDFFRRMRAKLGAPKAITAAAHKLARIVFHMLSTRQAYDETIVGRNERQFRVRAEARLRAQAKALGYSVVAVIPATAAAPDSQR

SEQ ID NO: 45579 - protein, 336 aa, unidentified
MIKFKTFTGIDISKKTFDAALLFSETGIVQHHCFAQTKEGFMSFAKWLKSHRVSMQDTLICMEHTGLYTNGIIEFLVGVKANLWVEMAIKIKRSMGLQRGTDDKASAITIAEYCMRFTDRARLWEPVDTSLSKLKNMIVQRDRIVNALKQLSVPIEEMKSCNAAKEAAELERLQLPAIKGLNKAKEKIEASIQSYISSEETIHKSIQLMCSIKGVGLQTAASLYVYTKGFTLFENAKQLACYCGVAPFSKSSGTSVRFKPGVSPFANRKPKSLLHLCAMSALRWDKDIKAYYERKVLEGKNKMSVINAIRNKLLLRIFAVLRDQRAYVENYRLASA

SEQ ID NO: 45580 - protein, 317 aa, unidentified
MNQKGLYIGIDVSKAHLDLAAHLSGEPWRVINDEAGINAIVTHLREAAPSLVVVEPTGGLELPLTAALGAAGLAVAVVNPRQVRDFARATGRLAKTDRLDAQVLAHFAHAVQPTPRPLPDAQTQELAALLTRRHQLMQMLTAETNRLATTRAPVRERVQEHILWLKQELGDSDRLLGNAVQESPLWRVKDDLLRSVEGIGPVVSFTLMAELPELGALDRRHIASLVGLAPFNRDSGLMRGKRKIWGGRARVRTGLYLAALTATRYNPVIKAFYQRLLAAGKVKKVALTACMRKLLTILNAMVKHQQPWNPKLNLRNS

SEQ ID NO: 45581 - protein, 348 aa, unidentified
MLIIGCDYHPGFQQIAFVDTETGECGERRLTHREEAEQFYGSLKGRSMRVGMEASGHSRWFERLLNELQFELWIGNAAEIRTKRVRKQKTDRQDAQLLLKLLIEDRFPRIWIADAGNRDLRQLLWHRHRLVQMRTRVMNQLHVVALNEGLRRKKALWRPAGRSELESLVLAPWASRRRQDLFDLLDQLTPKIQELTRALEEEVEKRPVTQRLMTHPGVGPLTALAFELVIGTPERFHCGKQIASYVGLVPTEESSGDRRRLGHISKQGNSLLRFLLVEAAQVTVRSHPQWRSKFFHLAMRRGRKIAKVAMARKLAVHLYWMWRRSWDYGQFEKLGSHAGAPGNRRGVQ

SEQ ID NO: 45582 - protein, 337 aa, unidentified
MYYTGIDLHRKTSYLTTVDSDGRIIKKANLYNDEPTILEYFLNLDDDTQVVIESTANWYWIYDLLTLHAIPVVVSNPVKTKAIASARIKNDKLDAHMLAQLLRADLLATVHVSSQKTRQLKELLRHRHKLVKDAVRMKNRIHNIMAKNNLKIPVSDLFGKQGLAFLADAELPHYQRRQVDTYLHLYHPLKEQVDALTKQIKQQAKTDPMAQLLMTIPGVGAITAMFMVAEIEDIGRFKSYRHLASYAGLVPRLDASADKQRMGRITKQGSPYLRTALVEAAQVAARTKGRLRIFFRKRIVRSGYQKAVVATAHKIIQYAYYILRDQTPYRESIDALA

SEQ ID NO: 45583 - protein, 347 aa, unidentified
MKVLIGVDPHKASLAVAAVDEATGELLERASLPQDRAGLRSLERWARRFPKRRWAVENACGLGRHLAVRLAAGGSVVDVPPKHSARVRVLSSFAGNARKNDGLDALATALAASRNERLAPVDLEAASEALRLLSERREDLVAERTRALNRLHALLRDLLPGGVTGKLSADRATRILRGIRPKGTSARLRRGLASEVLRDLRTLERKIAELNGRIEAEVDASGTALTQIFGVGPILAATIIGAVGSVARFPSKGHFASYSGTAPVEASSGEVMRHRLSLAGNRKLNYALHMVATCQARSDARGGAYYRKKVVEGASRKEALRCPKRRVSDAVFRSLLADSQALSRSAA

SEQ ID NO: 45584 - protein, 352 aa, unidentified
MVYVGIDLHRKTSHVAAFDEEGLELLSRRVTNDPEALCAIFAELGGEAKVALEAAFGWEWLADLLEAEGIELHLAHPRHTKAIAAARVKTDAVDARTLAHLLRADLLPEAYIAPRELRELRELLRHHIGLTRLRTALKNRVHGLLARQGVQHGRAELFGPEGRTFLGELSLPPPTRRRLESLLALIADFDRELQAVKREIRACAKDDPRVDVLTQIPGVGLFIALLVIAEVGDVTRFPSARHLASWSGLTPRVRNSGERVRLGSISHQGSGHLRWGLVQAAQTAVRAEGPLKTTYERIKHRRGSKVAKVAVAREILTLCYYGLRDGKIRRLDAAAARANSGLAMASSGGPIG

SEQ ID NO: 45585 - protein, 455 aa, unidentified
MNRQGFLGIDVSKGYADFMLMDNSKSVIEQSFRLNDTRKDHKQLGELIEGWLASGLETIFCGVESTGGYENNWYHYLQGLGQSKAVKVTRLNAKGVKGISDAALKRTITDQVSAENIATYLVCFPEKVSYSGNLKEHDSFFKDGRSYYNFIQMLQKQKVQISNQLEKLLYEHFNEMLIYCRHGLPVWLLKMLSKYPSATRVKKAGVANLQKIKGISAGKAASILKKTEDSIRQSSDTISHAIASMAEEILYKEEQLQGHKYKLSKGFADNEDVKLLQSMDGIAIDSAVALMIEIERVDRFVMCKKLCSFFGTHPTFKHPGDGTWGSHMSKKGRPAVRKILYMSALTAIRRNPSLKQLYARNRSKGFNHYQAIGVVMHKMLRIIYGILRNKTPYNIETDNLNKQKSQEKEQQKKEIEKQQKKQNKRDLFRFQSPSLDAPISRRSADKIKKQMTSQT

SEQ ID NO: 45586 - protein, 382 aa, unidentified
MNENAKSSMSVYAAIELSKSTWLVAVLSPNSDRVKLRQVRGGDTAALVGMLEREQASAAQVHGCPAEIVVCFEAGYDGFWLARFLRKRGIRTSVLDSTSFLINRRSRRAKTDRLDAESMVRMFRSFDQGDRTVCREVCVPTPEEEDAKRLDRERVQLSAERTRHVNRIRALLNLHGIREVKALWGGDWRKWLQVVKTADDEPLGKFLAAELTREFQRLELVHAHIRDLDRQLEEGLSNGTLGIPNIDKVHRIATLRGIGRLSAVLLVSEVFHRQFANRKCLASFLGLAPSPYASGSVKHDQGISKAGNRFARRLLVELAWCWLRYQPTSALSQWYRGTFGAGSGRSRKIGVIALARKLAVAIWRFVEDGLVPQGASLKPEAP

SEQ ID NO: 45587 - protein, 346 aa, unidentified
MSEVIREGAARVGVDLAKRVIQVHAVDAGERVLTSRALARDKFLAWCARLPAGCIVAMEASSSAHHWARKLLALGLQPRIISAQLVSPYRQEGATGKNDANDAAAICEAASRPRMRFIPVKSVEQQSMLCVHRLREGLKEDRTACINRIRGLLLEFGLAFAVGVRALQAVLSEVLEDASNELGHLARLTLQRAQAQWHELDEHLAWCDERIAEHGRANVAVKQAATLIGVGPVSASAAVATVGDFKQFKSGAQFAAWLGLVPRQHSSGGKDRLGGITKSAHFSDRGHPFHVDRGHRFTLIADGVQRVRVTGFIVSQVSAMAVKPPVLSTPARSAGVDNTAPKAMFG

SEQ ID NO: 45588 - protein, 340 aa, unidentified
MKLYGAIDLHSTNSVLVVIDEEDKIVYQKRLPNDLALIHKELCVYQSRLEGIVVESTYNWYWLVDGLMAEGYQVHLANTAAIQQYEGLKYSNDDSDARWLAHLLRLGILPQGYIYPREERPVRDLLRKRSQLVRQRTMNLLSIQNLMTRNTGSSMTANQIKGLDKPQVDGLLPDGDLSLAVKANWSVMCSADEQVELLEQRVTERVKLRAQFSFLKTVPGIGQILALTIMLETGDIGRFATVGNYASYCRCVGSQKISNGKRKGSGNTKNGNKYLAWAFVEAANFAIRFNSKIKSFYQRKKAKTKAVVAIKAVAHKLCRACYHIMKDRVAFDVTKAFGQK

SEQ ID NO: 45589 - protein, 391 aa, unidentified
MVCVGIDVAKDKHDCCILDSDGMVRADCFTIPNNMDGFKQLLQTIRNCTKKSDKIKVGLEATGHYSYNILGFLLDNDLAVYVMNPLHTNLYRKSLSLRKTKTDRVDARTIATMLLSDVDLKSYTDTAYHNEELKSLTRYRFEKVRERAKLKQSVSRLVTILFPELEKLVSSLHGASVYALLSEYPGAKQISEVHLTKLTNLLKTASKGRHGKENAIQIRDAVRASIGSVMPAKSLELKHTIKLIQELDSEINEIEDSIQKIMDELNPPILSIPGMGVNSAALILAEIGDFSNFSSPDKILAYAACSPSTYQSGKLTNCYAHMEKRGSRYLRYALYNATKYVCQWNPVFAEYLAKKRAEGKHYNVALSHATKKLVRLIYALQKSGKVYLAAA

SEQ ID NO: 45590 - protein, 403 aa, unidentified
MFYLGIDVSKKTARYLILDEAGSKLKSFTLENGKETLEPLPERLESLSINKDNLLIGIEATGGLWENIYSFLKDKGFHIVLLNPYNTNKFREALAKKAKTDDIDALVIAQLLRTGEYVQSQVAEENIQALRELTNLRYEFIKDRKNLQRQVYSLLAVVFPEYGKTVIAKPFSQASMAILMRFPTAKHISEAKTKHIEKIVRKIQGNNFSINEIQHLIETAKNSIYSGRAKDARAITLRMLLGHIQNLSTSIEELESEIKEILSPSDKDGTFRGENILSMKGVGEKTLAAILSYLGSDGSNFSSSKAAVGYVGFYPKIYESGQTKRDNTISKRGPKVLRWALYMAAVASLKHNKEMRTLYHKKLSQGKTEKQALICVGKKILQIALSLLKSGEPYNPARVFVSN

SEQ ID NO: 45591 - protein, 370 aa, unidentified
MAHASTLFVGLDVHKETIAVAYVGEERDAEVVSWGTIGTRQGDIDKLLRKLQAKGKTLHLVYEAGPCGYWLYRYLTKKKLTCWVVAPSCIPKKANARVKTDRRDAVHLARLLRSGDLTPLYIPNVEDEALRDVVRAREEVLKDLKAAKVRLKAFLLRQDLRYEGRATWGPAHLRWLAEVVCPAPAQQIVFQEYVRAVSEQTERLQRLEAELPALVQSWRWLPVVEAIQALRGVQFIAAVTLIAELGDLTRFANPRHLMSYLGLIPSEHTSGERRRQGSITKMGNSHARRVLVEGAWAYRYPAKVSRHLQLRLEKVPKAIQDISWKAQVRLCKRYRRLVARGKQVNQVVVAIAREMAAFVWAIAREVKVAH

SEQ ID NO: 45592 - protein, 346 aa, unidentified
MEHPTTIAVDLAKSVFEIAVSKQPGRVCLRRRLTRSQMAAFFANRPPATVLMEACGTAHYWGRLLRSFGHRVLLLPAQHVCRYRLRDKTDAADVLALLEAHRNEKIVPVPVKDLPQQAIAALHRIRSGFIATRTARLNTVRGLLRELGINIPLGAKLVLPRLSQALSEPKQLIPEILHPVLLAAAAEIRTLEQNIKDIERQLETLSRSLPAALSLRSVPGIGLLTSTALIASVGDPSRFRSGRRLSSCLGLVPREHSSGSSRHLGSITKRGDPYLRTLLTHGARSLLWAAKHDKSPDALRRWALSVQQRRGHNRATIALANKLARIAWAVWSKNTVYQPRTAEAIS

SEQ ID NO: 45593 - protein, 344 aa, unidentified
MRQETMVYVGLDIHKEFCQACVMNESGKVLSNEKFPSTQEALDKFLDRFDKAKFVLESTGIWEFIYEGIEKRGFEAVLAHPLKVRAIAEARVKTDKVDAQTLAHLLRADLIPRSHVPSRDMRNLRQLVRQRTYLVRQATSLKNRIHAELLRNGIRRPEELKTKFSGKSIRWMRSLGLPTVNSNLNCLESINEQIEKLNSLLLDEYGMRRNAQLIATVPGIGFYGALLILSEIDDVRRFPHPSKLCAYAGLVPTVRQSASSVRYGGISKEGSAYLRWILIESVYVHLMNHPDSRLSKFYRRIERRRGKKVAIVATARKLLHIIYWMLLNKEKYHGQGSNPLLKPA

SEQ ID NO: 45594 - protein, 392 aa, unidentified
MEVMIETCCGIDVHQKTIVCCILDGPLDTNKPKKSYKIFGTRTSELRKALEWLEENDVTDIFMESTGQYWVPVFNIFSEGNFNMVLANPEHIKNVPGRKTDMKDAEWIAQLGRVGLIQNSYIPAPEVMELRLMTRRRQSYTQKRTQSKNELHNILQRSNIKLTGYLSNIFGKTGQALLQLFIDGEVLTLESVEACLHGRVKASPKDILQAMDGKISLTDRRLLDDSLDEYQFYTRKIKKIEHDIEQYILSHFPLEYELLQSIPGVKQHSAAIILAEIGPSIDAFRTVSYLASWAGLSPGSYESAGKKKSSRVTRGNKYLKKALITSGGMAGRSRDPAFGSLYHRVSNRGTKMKAVVACGHKLLRMIYKILDDKVPYDEKRALGLRQQKLVLN

SEQ ID NO: 45595 - protein, 344 aa, unidentified
MKITTIGIDLAKAVFQIHGVNEHGKVAVRKQLKRAEMSSYFANLETCLIGMEACGSAHHWARKLEGYGHTVKLMAPQFVKPYVKTNKNDMADAEAICEAVSRPNMRFVAMKTVEQQAILSVHRARQGFVKARTAQSNQIRGLLSEFGIVIPQGIRSIMKQVPEILEDGENGLPGTMRNLLERLTENLKEMDRQAKELEVQIQVWHRENEASRKLAEIPGLGPITASAIVATVGDAREFKNGRQLAAWMGLVPRQHSSGGKQTLLGSSKRGDTYLRTLMIHGARAVIRFAANKAEPEGWLRKLMARRNKNVAAVALANKNARIVWALLANDRTFRPDYTPAHRQP

SEQ ID NO: 45596 - protein, 420 aa, unidentified
MKVVYPTCCGVDVHKSFLVATIIKTTTGVEPSYQKKRFSTFNNSILQFKNWLIENDCHDVCMESTGKYWVPVFNLLEDAINVTIANPKWVKAVKGNKDDTKDSRWIGDLFRLGMVKGSFVPCKNIRILREFTRYRYKLTSARASEKNRFQNALTVCNVALDSVVSDIFGKSAASIINYLIEQSDNSINQEEISNRLLRSLKKKSESVIESIEGYQMADSQKYRMRLVRAHMDYITSTINDIDTMIDSLVEPYENAINLLCTIPGVKRDSAIIIISEIGIDMAQFASSKRLCCWSGLAPGCNESAGKKKSVRITRAGVYLKPALVQCAHAAVKSDKSPYYKTKYERIMKRRGKKRAIIAIARMILTAIYHMLSTGEVWNPCDLYKIDMPQPLVDKQKAKAIKQAYKLLVSEGLIPESFLAS

SEQ ID NO: 45597 - protein, 346 aa, unidentified
MMIIGCDYHPSWQQISWVDTATGETGERKLDHASGEAERFYRQLPGPALIGMESTGNCQWFVEMATTAGHEVWIGDAAKIRASEVRQQKHDRRDAALILKLLLEGRFPRIWTPSGEEKDLRQLLIHRHKLVRIRVQVKNELQHLAMNQGVTKKEKLWSKGGEKVLRELPLKPWASRRREDLFKVREMLNGQIDLLDQAVVEVAQKNEKARLLMTQPGVGPITSMAFVLTMGDVSRFPRGKQVASYLGLIPREYSSGGKQRLGSISKQGNGFMRMLLVEAAQAAVRCDPQMRQEYLHRCHRKAKGVAKVAAARKLAIRLYWMLRTNRGYPEVVRVESSSRVPLVSAS

SEQ ID NO: 45598 - protein, 367 aa, unidentified
MKLNVGVDLHKSQFTVYWKLEKSKEGKFARFATTESGYGAFEHQVLKAVNQGIEVAIAVETTGNARYFRARMERIGARVVVVNSLKFKVITQSVKKTDRHDASTLAEFLDKDMLPEAVLCSEESEELRRLLKVRKRLVESIVVIKNQIHGLLLSLGVESSRGQLQSKKERRRVQNVLAAHTLTGAAVEPLFETIDRLYDEVKKLEKIIEQKTADDPAVELLRTIPGVGIITAATLRAWIDDINRFDRPEQLAAYSGVVPWVQTSNESIRYGRITKRGPSELRTALVQAVLGMVRMKRTTGSWRIITRYDRMKREKGSGRSIIATARLLSEIIWHMLTNNESFDPLHMTDSEVRRKAREMRAAAFNAA

SEQ ID NO: 45599 - protein, 398 aa, unidentified
MTESSDYESVQVFIGVDVGKDTHHAVAINRSGKRLFDKALPNDENKLRSLISDLKQHGQILLVVDQPATIGALPVAVARSEGVLVGYLPGLAMRRIADLHAGEAKTDARDAAIIAEAARTLPHALRTLKLADEQIAELSMLCGFDDDLAAQTTQASNRIRGLLTQIHPALERVLGPRLEHPAVLDLLQRYPSPEKLASLGEKKLAAQLCKLAPRLGKRLAADIAQALAEQTVVVPGTNAAAVVLPRLALQLITLRKQRDEVALEVEQRVLAHPLYPVLTSMPGVGVRTAARLLTEVACRAFASAAHLAAYAGLAPVTRRSGSSIRGEHPSRRGNKALKRALFLSAFAALRDPLSRAYYTRKMSQGKRHNQALIALARRRCDVLFAMMHDGTFYTPQGS

SEQ ID NO: 45600 - protein, 377 aa, unidentified
MERIKFVGLDVHAETIAVAVAEQGGEVRSLGVIPNREESIRKLVKKLGPVEQLRFCYEAGPTGYVVYWQLTALGAKCEVVAPTLVPVKAGERVKTDRRDALKLARNYRAGELTPVWVPDAAHEALRDLVRAREAAKKDQLRAKHRLTKFLLRQGRRPPMGVKPWTRNYLAWVKNEVHFEQMAQEATLLDYLHEVEHAEARIARLDLAIDEAVKLTPPKIRAVIEAFQALRGVARVSAVTIAAELGEVSRFTEARELMGYGGIVASEHSTGQSTRRGSITKTGNAHLRRVVVEAAWAYRHRPNIGETLRKRQEGVSEEIRAIAWKAQHRLHTRYRKLMARGKVKGKVVTAIGRELLGFIWAIGVKAEAAQKETKLRAA

SEQ ID NO: 45601 - protein, 354 aa, unidentified
MSDSTVWVGLDLGFRRTRVSVVDAFGAELLNDECETNVDALKTMLGSFPPERIGLIAAESGNDTHIVRKLRESGFPVAIFEARQASKFLAIRRNKTDAGDAKGLADLARLGRNSVSQVYLKSPECQQLRGLLVMRRRLVMMRVAAVGSIRSRLGSHGLVLPPGGAPGQLRQLIKSQLAALGKSEARALEADLEPLVDLCESLGTYLRKLDAGLAKTARSHPVCSLLMEVPGVGPICAISFYTAIDDPTRFRLASHVGAYLGLSPRRHQSGVKSRTGGITKSGNKLARTNLVIAAMVFGKAAPDCALKRWYLALRERAGPGRARVALARKLAVILLAMWKSGTNFQFHGTGSSNG

SEQ ID NO: 45602 - protein, 344 aa, unidentified
MGEVITVGLDIAKSVFQVHAVDKAGAVMLRKRISRAKMLEFFADLQPCLVGIEACPAAHHWGRELQALGHTVKLMPPSYVKAYVKRSKNDANDAAAICEAVTRPSMRFVPIKTKEQQAALMLHRARHLLVRQRTMLSNAIRGHLAELGIVSAKGRTGTAALLAIIADTEDMRVPRMARGILEVLARQYSALGAELGSIDRSIVAWHRSCEASRRLEEIPGIGPVVATALIAEIGDWKAFGSGRSLAAWIGLVPKQQSTGGKDKLGGITKQGNRYLRWLLVAGAMAVIRYAQKHGTLKRPWLGRLMARRPTKVAAVALANKIARMAWAIIVHGERYREPASLLAA

SEQ ID NO: 45603 - protein, 348 aa, unidentified
MSKSNQYVGLDVSLKETSICVIDDAGKIVWRGRVDSTPEAIATAVKQHAPHAVRIGLESGQLSSWLFHELKGAGLPVICVDARHAKAALSLKVNKTDANDALGLAQIMRVGWYREVTVKGLDCQAVRALLVARAQIVSQITTLKNCVRGILKTFGRVLPKGLRSQFPARVRTAIDGHPVLGTIIEPTLRVLEAMRAQLLVYDRAVIQRARSDDTARQLMSAPGVGTVVALAYITGVEDPARFKRSSSVAAYFGMTPRRYQSGEVDHAGRISKCGDGMVRSLLFEAAKVLLSRSARPSTLKTWGEALGKRIGAKKATMAVARKLAVILHRMWTTGTTFQWNAEAASSAA

SEQ ID NO: 45604 - protein, 382 aa, unidentified
MNLKYSVGLDVSSKKINACMSCIDEKQKVIVKSSTVISNNKKGFKILQDWVLKHVKENVPVVVCMEATGIYHENCAYYLFEKGFSVSIILPNKAKKYLEAIGLKSKNDSIDAKGLSQMGAEQCLDTWQPMGTFFYELRLYTRQHQNVTELKTVLKNQFDALSFAMHQVDPVTNQLKETIILFDKQLKELEKVINNHIKSDAKIAERVANILEIKGIGILTLATILAETNGFELFNNYKQLVSYAGYDVVEAQSGTRVGKTKISKKGNSRIRRAMHMPSLVVIKCEVKPFKEPFKELFERTYNKHGIKMKSYVAVQKKLLTMIYYMWKKKERFEPNYIKSIQEKEQKSFSMFAFEKGIKNSPNKIEAAQGKHPVNDHSKFPLC

SEQ ID NO: 45605 - protein, 338 aa, unidentified
MKLYAGIDLHSNNSVVSVIDEQDRVMFEKRLPNELARIVVALMAFKEALVGIVVESTFNWYWLVDGLMQAGFKVHLANTAAIQIYEGLKYSGDEHDARWLAHLFRLGILREGYIYPRQARGVRDLMRRRLQLVRTRTTQLLAMQTVLMRSHGHGMSANDLKRLEVEELEALLDDAILASGLRANLEVVHTLNAQIARLEREVLGQVKLAAQFEPLLSIAGIGKILALTTMLETGEIGRFAKVGQFASYARCVDSQRLSNGKKKGEGNSKCGNAYLAWAFVEAAHFAVRYNTRVRRFYERKAARTNKIVAIKATAHKLARAAYHVMRERVPFDEARAFG

SEQ ID NO: 45606 - protein, 356 aa, unidentified
MSSIVSEEYDFVIGVDTHAATHTFAVVAGSTGAVLDHAVFPTSPAGLERAKGWLVRRCGDARTLIVIEGTGSFGAIVTERLMAAGRTVVEAARMPAGDRRGKGKSDELDAARIARAVLGLAITDLRIPRSLTGNRSRVAMRVLVVAREEMTGERTRAVNALTALVRTVDLGVDARTSLTAAQITAIAGWRTRAEDTTARICRQEAVRLAQRIRTLDGEITSNRATVTKLIAQDTPQLLELTGVGAIVAASVLVAWSHPGRVRSEAALASLAGTCPIPASSGNTVRHRLNRGGDRRLNRALTTIVIVRMRTDPATRTYVARRRAEGRTTKEIMRSLKRYVTRQLFRTLAAAHPIPVT

SEQ ID NO: 45607 - protein, 405 aa, unidentified
MVACVRIASGGEVSRAVRTFETTTARLIELAEWLEASGCTHVAMEATGVYWKPVWQVLAGSGFELVLANAAHVKNVPGRKTDVNDATWLAELLAHGLIRASFVPGPEIQELRGLLRTRKQLVREKASHVQRLQKTLEEANIKLESVLSDVMGRSGRAMIQALIAGETDPAKLAALAHPKVRAPQARLREALRGRVKRHHRFLLDLHLQQIEALDAGIAAIDREVDAGLASFRDAVKQLSTIPGVSELSAQVILSEIGTDMSRFATAAHLRSWAGLCPRNDESPTGQARGLKAHGKRRSTRLRMGAPWLKAMLVQCAWAAARTKATYLNAQFVRLRTRRGPKKAVCAVAASILTAAYHMLKDGTFYQDLGATHFDRRRPDAQARRLVKRLADLGFSVQLKPAAAVS

SEQ ID NO: 45608 - protein, 411 aa, unidentified
MEVLYERCCGIDVHKRIVVACLKCGKQQEIREFGTTTDELRTLTKWLQDNGCQMIAMESTGSYWKPLYNIFELSALDAMVVNAHDMKNVPGRKTDVKDAEWIADLLQHGLLRASYIPTREQRELRELSRYRKSLIEERSRELNRLQKMLEGGNIKLASVVSDINGRSARNLLTRMLRHDMPLTKEEISSMIHGRLRRKVEAIMKALDGFLTPLQKQLMLKVVDHIDDMTKRIDEMDTLMDQYLTDYHEAIHKLDEVPGIGRQSAETILAEIGLDMSRFPTEKHFSSWAGLAPGNNESAKKRRYGRTTKGNMTLKTTLIQCAKSAVKKADSFLAAQYQRLVVRRGANRATVAVAHTMLIAIYHMLKDNVPFIDLGAAYYNKFNTQSKINHFLKKLKQLGWEPNDATTLATAT

SEQ ID NO: 45609 - protein, 363 aa, unidentified
MVVLIGADVHKNSHTFVAVDAAGKQIGQITVRATHSGHEKAYRWARKSFIEQDRQWGVEDCRHLTGLLERDLLAHGEPVVRVPAKLMARQRATARTRGKSDPIDALAVARAMAREDDLPVAFTDEQAREIKLVLARREDLVAERTRVINRLRWHLHELDPEVDPAPRALTHRPAQERVRELVEASEGIVAEIAGMVLADLERLCSSISELDARLRVMVREVEPVLLEIPGCAELSAAKILAETAGIERFANEGKYAMFAGCAPIPVWSGKTEGRVRLNRGGNRQLNCAIHRIALTQVRLEGPGKEYYDRLREQGKTVMEALRCLKSAIARRIWRALTRAHAEALATTPIPLNPTSTTCVPQAA

SEQ ID NO: 45610 - protein, 396 aa, unidentified
MPRIWAGVDIGKEHHHCVVIDQRGDRLLSRRVLNDESALLELIGDVLALDEDVLWAVDLNGGGAALLIGLLLSHDQPMVYITGLTVHRASAAYRGEGKTDAKDAFVIADQARMRRDLGLLRPGDEVAVDLRILTTRRADLVADRTRQINRLRAQLLEIFPALERSLDLTNKGPVILLTGYQTPAAIRRSGAKRIETWLRNRKVRGAAALARTALEAAEAQHTALPGEKLAAAMVVRLAKGVMALDEEVLEVDALIEARFREHPHAEVILSLPGMGKMMGAVFIAATGGDMDAFGSADRLAGFAGLAPAPRDSGRVSGNLRRPRRFHRGLLNAMYLSALSSLKSCPASKAFYARKRAEGKGHKQALLALARRRVNVLWAMIRDGACYQARPPVTAAA

SEQ ID NO: 45611 - protein, 309 aa, unidentified
MSLTLVGIDVAKATLAVCVLPHQLHLTLPNTSAGHAQLLAHLKGHSVDNLLLEATGGYERALMRVLSKAGLPVTRINPRRARAFAEALGKIAKTDPIDAQVLAHMAGVVKAPCQAVEPEREALRAWVQRREQLVQQRDDERRRLKQAELAGLRKDLLDNIKQLGQRILKIDKVIAQAQGQLDDALGRSLMAVAGIGQVTAASLLAYLPELGRLTRKQIAALAGLAPYNVDSGKHAGKRRIRGGRAPIRRVLYMACLSVIRKQPDFKTRYEALRQRGKCAKVAITACMRVLLTRLNAMARDQTEWRMTGA

SEQ ID NO: 45612 - protein, 318 aa, unidentified
MQEGVVDSDPEAIALFVRSRAPGTVRIGIETGPTTTWLWTELNRLGLPVICIDARHAKAVLKMQINKSDRNDAAGIARIMQTGWFKEVRVKDLDSHAVKALLASRALLVKIKRDLENQIRGLLKNFGLVIGRGKFNVFAVRAAELIENRPELIAAVRPLLEARKAIEQQVDDLDRKVHKLARHDVQVRRFMTVPGVGPITALCFKATIDDPTRFKRSRSVGAYIGLTTRRHASGEIDWSGRISKCGDAMLRMYLFEAAGVLLTRVQKWSALKAWGTRLVKRNGLRKAKVAVARKLAVILHRMWIEGTEFNWSKKAIAA

SEQ ID NO: 45613 - protein, 416 aa, unidentified
MTKDIVYVGIDIAKVRNDVRVELSDGKVQRFKVTNRKEDYDRLVKYLGSLKNDCQIGLEASGNYHRPLAYYLLKKGFKVYLISSLALARTREAIHNSWDKNDPKDAQVIVHLLKTGIKQRYYDTFINGFQDFEELSKTHYQVSLAKTKIQHSLLTHFLPLYFPEAEKYFCTTRAAWFSKVLYHFPSPHHIGEMGQDKFVEKAWDIVGRKVCKEEFLKDFYKTAKNSIGLPVDKDSCALKMFKRTLKHHHDLCVKRQELEDLAHQKLKDDRVYQILRTVPGIGPILALTIISETGEFDRFKHYRQYLKFCGLDLSTSQSGQFRGQSKLSKRGNRRLRCAYWFAATVAVRMRENTFRKKYSRYIQNDPDNADLKRKAVVATAAKMARVCLGLVKSSEEYRPYYDEDIPSGEIRSLCVR

SEQ ID NO: 45614 - protein, 366 aa, unidentified
MKKTSTVRVNGNVIFKGRKLTIGMDLGDCWSFYCVLDEAGKIILEQKVATTAEAMKQTFERIPRSLIAMETGTHSPWVSRLLTELGYKVIVAHAQKVELITKSDRKDDRHDARTLARLARIDPELLGPVRHRSAQAQIHLTVIRARAELVSARTALVNAARGLVKSYGQRLPKCGTQQVSRELAAGLHAELRDVLEPLLKEIESLNERIQEYDERMEKIANKSYPQVERLKQVKGVGTQIALTYVLTIEDPHRFPKSREVGCFLGLRPGRRNSGQSEPQKKITKAGDRYLRTMLVQAAHYILGPFGQDSDVRRWGLKLAERGGKNGKKRAVVAVARKLAVLLHRLWVSGEVYEPLRNSHKAMRTAA

SEQ ID NO: 45615 - protein, 341 aa, unidentified
MGEVSTIGLDLAKSVFQVHGADASGAVLFRKKLRRQQVLAFFSSQPPCTVAMEACSSSHYWAREIGRLGHAVRLIPPAYVKPFVKRQKSDAADAEAICEAAQRPTMRFVAPKSEEAQAAAVVFRARDLLVKQRTQIINALRGHLAEFGLIRAKGPAHVPHLVQAIEDGTETIPELARPILQMLIETLRGLNEQIARLDREVAERSKGDETARRLMTIPGIGPVTAVALAALAPPAETFRRGRDFAAWVGLTPLQRSTGGKQKLGATSKMGERTLRRLLIIGANSILLRVARHGAPAGSWITRMLARKPPMLVRVALANKMARIVWAVMARGEVYRAPAAVA

SEQ ID NO: 45616 - protein, 375 aa, unidentified
MAAIPANHRSSSRRREPDVQGTLGVSQQTRKRRKETPVEQQREYVGIDLHRRRSVIVRITESGEVLETVRVDNDPLSVVHAVMHEDPNPEVALEATYGWYWAADLLQAEGATVHLVHPLGLHWDSRRVKNDERDATELAKRLSRGDLPEAWIAPPQLRELRELVRYRAKLTALRTSAKAQVHAVMAKEGVLPAYGRMFGPAGQRLLDEMPVEGVYRDRVESLRHLLEIYERELLLVESHLSRRLKHHQGYSAIQAIHGVGPIMAAIFVAEIGDASRFPSARHLCSWAGITPSHRESDVKVHRGHITRQGNNLVRWAAIEAVARYHGGAPIEPTFQRVAKRRGTMIARVAAARKLLSLVYYGLRDGEIRCLTREAS

SEQ ID NO: 45617 - protein, 422 aa, unidentified
MCLPFILTRGLLWFWPEQSRTNGRDTRVPEALQCKQFELANTPMKSELYLGLDVDKEWIVITVAEWGRNGAVQDLGAISNDLHALEKLLARLRKRYGPEVIIRACYEAGPCGFTIARRLRQLGVECAVVAPSLTPTRAGDRLKTDKRDARKLARLLRAGELTEIYIPEPTDEAIRDLCRARSDAVDDRRRSRHRLKAFLLRHGYRYQGKSAWSAAHERYLRELVLPHPAMKVILEEYLISVQLASERIARCEAAMSDLLGKWRLEPAVRALMAMKGFQTVAAMIVVSELGALDRFTHPRQVMAYLGLVPSEKSSSDRRRQGAITKCGNAHARWLLVECAQHYAAPPKVSKELSRRQQNQSRAVRTLSWKAQNRLHQRYCRLMARRLLRNKVMVAVARELCGFIWELLRTQACYHAPCPSGIK

SEQ ID NO: 45618 - protein, 409 aa, unidentified
MKLFVGMDVSSSDLKVCIMNQEGETLNSFTVSNNLNGASYLRDQVIALADKHRSKEIQMGLESTSVYSWHPAMFLNEDEELRKRNTKVYTINPKLIRKFKEAYVDMDKTDHIDAWIIADRLRFGRLPFTVIMQEQYVALQRLTRMRYHLMHNLTREKQYFLQHLFFKCSAFTTEVESSVFGHAMMELLLEKYSLEEIGAMEVSELASYLKEKGKNRFPDPERVANCIQKAVRSSYSLSKCVEDTIDILLGTSIESIRSIQAQIKQLDKAIEKVLDGIPNTLQTIPGIGPVYCAGILAEIGDIARFKDQASLAKYTGLTWSKHQSGKFQAEETNMIRSGNRYLRYYLVEAANSVKRYEPEFRDYYQKKYLEVPKHQHKRALVLTARKLVRLVDALLRNDQIYTPGRKVNN

SEQ ID NO: 45619 - protein, 383 aa, unidentified
MRTTQVDYRTEALVLAVSLELSSGSWKVAFHDGRCTRARVVTCAAEDLSERLSELMAEIAEVRSRWSLDESTRILVGYEAGQDGFWLARKLESMGLEVIIMDPASIPVERHARRRKTDRLDAIQLVMLLRRWLLGERSAFSRVRIPSREDEDQRSVRRERNQLLKERNQHRDRIRKLLRTQGCWVKSVDAKLGERLLAGTVHDGDGQALGPALLKRLQREWRRLEQVVEQIRELKQSIEQARVLNDRVREQVERLTRLRGVGTWSAMPMSTELFWRDFNNRREVGACVGLVGEPYDSGDSRKDQGISKRGNRHLRAVLIELAWMWLRYQPDSALSRWFRHRTEGQGKRARRVMIVALARKLVIALWRYLEHGEIPAGAQLKAA

SEQ ID NO: 45620 - protein, 319 aa, unidentified
MTTTAVVVGVDVAKDRLDVAVRPSGEVWSEANDETGITTLVGRLRPLRPALIVCEATGGFERAAIAALAAAGLPVVVANPRQVRDFARATGQLAKTDRLDAGILALFAERVRPTARPLPDAAAQLLDAVLTRRRQLLEMLVAEKNRLGFAPKPVHRGIQAHVRWLERQLDDVTKELAALIEASPVWRAKDDLPQSVPGVGPIVSYTLLGELPELGTLSHKQIAALFGVAPLARDSGTLRGKRLVWGGRASVRTALFMAALCGRRWNPALQRFYERLKAAGKPTKVALIACARKLLTILNAMVRDDKRWAVPAPSVQYSC

SEQ ID NO: 45621 - protein, 356 aa, unidentified
MQTQVTKKIDFSGKDLYIGLDVHKKSWSVTIVVDGIEHRTFTQPPDPLVLRNYLQRSFPGGSYNSAYEAGFCGYGIHRDLNSLGIRNIVINAADIPTTQKDKLQKRDPVDSRKIARSLEKGSLHAIHIFDRSLEELRTLNRTRFYLMRDLRRSKNRIKSFLQYYSEPIPEEFDNNQWTLKFVSWLKQVKMQTASGQDAFSNLISSYEYHRGQLLTLSRQIRQRIREYDNELYSLLKSISGIGPLTSSALITELGDINRFKNIDQLGSYVGFIPRIRESGETTHTGGITFRCNTFLRTLLIEASWQAIRMDPAMMQYYHKHLVNNKGHKVVIKVARKLLNRIRYVMKNRQPYVKGVA

SEQ ID NO: 45622 - protein, 496 aa, unidentified
MSTNIFPRRSQAAETVLAGGDLRKILVVPIDFAKETHVAQIARGTGEYLRKRPLNVRNSVAGSKHLIEKVEGCCARYRIGKSRVLFGGEDPPEYVWNFIGSIQAAGFSFVRVNAKEAKKHRTNTRATSDELALDGIAQVMLLRRAYDLASRDEVYGAMKLAERARRKLKRQETALKNRIHRVADVLFPDFLNESRSSLLPFGVSCINLMEAGCSVVRIRRMRTDTLAKRLKEGRTQKPEEVAAKLKELAQSALVPDPAIVPYLEKSLAAKARHMRALRDSIRVEETEMARCLVQTPGFLLTSVPGLGIVLAGGIIAEYGDTSDWRIPDQMASYAGIVCRQYQTGGPASAPVKGRLPIDANHHLKDQLLQAAYHTGHNRHPGWRRLDLPGEHPLFEQYRTVELREGKSRLSTAKKLLRIASAMVRDERIYLPPCALNPNASDAMPTKQFVAYHQVVAEMLRSKWKHYDLSGIPDERNRLKRWLQDTNELAEHLLKDK

SEQ ID NO: 45623 - protein, 378 aa, unidentified
MHSMTQQETLVVGGVDAHADTHHAAALDQRGALLSTKSFPTTTSGYRQLLDWLSSYGEIDVVAVESTGSYAAALVRYLREHDIAVVEVNQPHAHTRRRVGKSDPIDAEMAARLFQAGKATAVPKQTNGIVESIRLLRVARSSAVKSRSAALVQVRDLLITAPQEIRDQLSDRKTLRGKVTVCARLRPSGRGLRSPSQAAKFELRSTAQRIEALDHEITTLDRELEQLVATAAPRTVGLLGISTGHAGQLLVTAGQNIDRLRNESSFSTLCGASPIPASSGKTNRHRLNYGGDRQANRALHLIAVCRLRYCERTRAYVKRRTAEGKTQREIMRCLKRYIAREVFNSLRADLAHITQPRPRVATTIMCGTPRSAINRTRT

SEQ ID NO: 45624 - protein, 453 aa, unidentified
MSARPRSKPVKTVPALPTLHPHAAGIDVGAREIYVAVPPDCGVPAVRAFATFTEDLHALRDWLQACGVTTVAMESTGVYWIPLFQILEAAGLQVCLVNARHCKNLPGRKTDVQDCQWLQQLHACGLLRGSFRPPEQVCAVRTILRHRDGLVRGAARCVSHLHKALTQMNVQLHHVISDLTGVTGQAILTAILAGERDAQKLAALKDHRIKASRDVLAKSLRGDWRAEHLFTLKQAHALWQAHQRLITACDEEIAALLGQWASRTAPEAALAPAKTSHKKAQKNEPQFAAREECCRVLGVDLTAVPGFQSPTVLVLVSELGPDFAAKFPTAKHFGSWLGLCPDNRITGGKIYSVRTRDVKSRVAEALRLAAQSLWQAKNYFGDLFRRWKARLGSPKAITAMAHKLARVLWHLLKFKEPFRPEVFAKEEEKMQRKKLARLQNLATALNYHLVPNQ

SEQ ID NO: 45625 - protein, 338 aa, unidentified
MIVIGVDVHKQSVTAVAVDEAGRMLDEKTAAIASEELIVWARGLGEQRLWALEDCRQLTRWLERQLLEAAEDVVRVPPKLMAPERRAGRTRGKSDPIDALAVARAALREPQLSRPRPDEQIFRDLKLLVDHRDDLVDERRRAHQRLRWHLHQLDPTFVVPLRMLARSSHLERVGRWLARREPELQVRLARELVARCRALNRNIAELDDELERRTAATAPALLELAGCGALTAAKLLAEIGPIDRFQSDAQLARHSGVAPLEASSGRVQRHRLDRGGNRQLNAALYPIAITQSRYHPGAPAYLERKQAEGKSRREAIRCLKRLLVRVVYRTLKTSPALT

SEQ ID NO: 45626 - protein, 338 aa, unidentified
MYYTGIDLHKRTSFITTIDQNGKVIFRRNFPNVEELILDYFRNLDGPTKIVIESMCSWYWLYDLLSANNFTTLISNPLKTKAIASAKIKNDKVDSHMLAQLLRADMIATVHVCNIKTRKLKELIRHRRRLVQDSARMKNRIHMLLMKNNINIPVSDLFGKRGMKLLKEVSLPGYHQQQFNSYLALLRYLTEQIEPLTEQIRDLAKKDPMARLLMSIPGIGFLTAMTIIAEIEDIGRFPSYRNLASYAGLVPSLDASADKCRTGRITKQGSPYLRAALVEAAQAIPRTKQSRLNIFFRKRIVRAGYRKAIVATAHKILQYVYYVLKNQVFYSEEYLARA

SEQ ID NO: 45627 - protein, 322 aa, unidentified
MTIIRVGVDIAKSIFHVHGVDRHDQVLWTGKYSRQKWLNALCKRVPAGAEIGIEACASSHHWARELQARGYHVKLIAAQFVKPYVKSNKNDRVDAAAICEAMSRPHMRFVPVKTVAQQDIQAMHRIREELVGQRTAKANQIRGLVGEYGIVAPVGIQELRKALPCWLEDADNGLTDAFRCLLNGLAEDLRHLDDRITSLDEKVSLSVQQDPIASKLMTLRGVGPMTASALAGALGNGEAFRKGRDFAASLGLTPRQHSTGGRDRLLGISKRGDSYLRKLLVHGARSVLCHVGEKDDHHRRHRLCEKVRCRNPSAVRVYRSPL

SEQ ID NO: 45628 - protein, 343 aa, unidentified
MDYFAGLDVSVKDTSVCIVDGAGKIVREVKVASEPDDLLQVLRNPTYCFKRIGLEAGPLSQWLFSALGEANLPVICVETRHMRAVLKAQINKTDRNDARGIAQMMRVGLYRPVHVKTLRSQKLRMLLTHRKLLQSKAIAVENDLRATLRNFGLKVGIAGWTKFEARIEELVEDVPDLAVLVEPLLVVRRVLREQIAVLHRRLLTIVRDDEVCRRLMTIPGVGPVVALTYRATVDVPARFRKSKSVGAVFGLTCSRDQSGERDRPGAISRCGDEMMRAMLYEAAQSMLVRSTRWSWLKAWAMQIARRRGMKRAIVALARRLAVIMHRIWVDGTEFRWTRSAAAA

SEQ ID NO: 45629 - protein, 346 aa, unidentified
MMIIGCDFHPSWQQVSWVDTETGETGVRKLVHASGDAKLFYERLARPARIGMEATGNSQWFIELVEDLGHEVWIGDAAQIRASYVRKQKTDKRDADHILKLMMENRFPRLWTPDREQRDLRQLVLHRHNLVEMRSRVKNELQHLSLNKGMQRKHKLWSQAGQKLLRELPLKPWAACRREDLLGLLATMEEQIGRLDAAVQRAAEQHPQACLLMTQPGVGPNTALAYVLTIGDVSRFARSKQVASYLGLIPREESSGGRQKLGAITKQGNRMLRSLLVEAAQIAVRFDPGMRKQYLHRCHQKPKGVAKVAAARKLAVRLYWMLRTNVAYPEIVRIESGPRVPLVGAS

SEQ ID NO: 45630 - protein, 378 aa, unidentified
MNRIIKIGMDVHTTNYTLCIFEPSFEHDGTVHCITQVKPEVKNIIHVIETLKKKHENEELNIVCGYEAGCLGYSLYHELKEKGIECVILAPTTMKTEKGGRKLKNDYRDAKMIAECLAYGGYSAVHVPTELDNSVKEFIRMRDDIKENLKSIKQQIIAFLTRNGKQFDGKSYWTQKHIDWINTISFSEPLLQDTLKEYMIEYNHLCDRVETLDKQIEEVSLKEEYVEKVQQLQCLIGIKTHTALSLIVETSDFNRFKKGNMYSAYLGLIPGDDSSGGHENKLGITKAGNSHLRKLLVEAAQGYTRGRVGFKSKDLKSRQEKCSSEVVAYADRANERLRRKYYRMTLRGKRYNVAKTAVARELACFVWGIMTDHMDLCS

SEQ ID NO: 45631 - protein, 345 aa, unidentified
MEIHTIGIDLDKTVFHLVGIDVRGEVVVRKKCSRDQILRFTANLQVSLIGMEACGGAHFLARALREQGHDARLIPAKYVKPYVKTNKNDYIDAEAIAEAVGRARMRFVPIKTDDQLDLQSLHRVRERWVSARTAVINQIRGFLLERGITIRKGRSHIEQSLPGILEDADNKLTGALRALLNQLRLEMQYLQKQIDECNESILQIADELEDCRRILAVPGIGPMTATATIAAIGNGSAFKKGRGFAAWLGVVPGEHSTGGKQTLTGTGRRGNRYLRKLFIQGAHAVLQQRMKQSTGLNTWLAQLTSRKRIQVAAVAMANKMARMVWAVLSKGEAYRPPFLLETAPA

SEQ ID NO: 45632 - protein, 423 aa, unidentified
MMKLKYSICCGLDVHKKVIVATIVTTNKEGISEYNQKSFSTINSDIQKFHDWLIGNNCYHVCMESTGKYWIPIFNYLENDIEVCLTHPKYVKAIKGKKTDKKDSKWIADLYKFDLVRCSFIPPKDFRQLRELARYRFKLVCMKSSEKNRIQNCMTVSNVGIASVLSDPFGKTATEIMSYLLEHTADSIDEKAVRKLIKKGAKAKSDEIIEAIKGYNIETDQAKKLELARAHLDFLDDMITQTEVELYVRIKPYYEFVEFVSSMPGMTELSSTIVLAETGVDMNIFDDAKHLCSWCGLSPANNESAGKKKSVRIAKAGDYLKPMMVQCALAAVKSRKQPYFAIKYGRIKKRRGHKKAIIAIARMMMVCIYHMVSEKKPFTPTDYEELMDPQNHVERVVLNENNVFAYLETLGYDSSKLVKRSDN

SEQ ID NO: 45633 - protein, 459 aa, unidentified
MAQRKQKQARSKTTLPPQLAAVNLHAAGIDIGAEAHWVAVPPSDDPQPVRSFGACTADLEALADWLATCRITTIALESTGVYWIPLFELLETRGFEVLLVDPQQVQKIKGRPKSDRHDCQWIQRLHTFGLLAGAFRPADQICVLRSYLRQRAMLLTHAGQHIQHMQKALTQMNIKLQHVVSDLTGVTGLAIIRAILAGERDPEKLAQLRDYRCKHDEATIARALQGNWRDEHLFALAQAVALYEVYHQKITECDQHIGAYLQTFADRSDGEPLPPPSRPRKRGGNHPAFAVREPLHRISGVDLTQIEGIDETTSLVILSEIGLDMTRWPTVKHFTSWLGLCPHHRVSGGKVLSRRTKPCANRAATALRLAAACLHHSQSALGAFFRRMKARLGAPKAITATAHKLARLIYTMLKHGTAYVRQGMDEYEQQYHERAVKQMTRRAKALGYMLVKAPEGALV

SEQ ID NO: 45634 - protein, 340 aa, unidentified
MNYYAGIDVSLEASSVCVIDANGKIMREGKAASEPEALIVWFGSLGLELTRIGLEAGPLSQWLYAGMRQTGLAVELLETRHVRNAFKIMPVKTDRKDAHGIAELIRLGWFRPVHCKSMEAQETRALLTARKLVQKELLQVAASLRGILRGFGLKIGKTTPVQFEARVRELVAGHPSLEVIAHSLLSVRAALRREFNGFEKRLRAMARSDTRARLLMSTPGVGTIVSLTFASAIDDPSRFKSSKTVGAHFGLTPSKYQSGETDRTGRISKIGDGSVRAALYESAHIILTKPIKGCTGLKSWAMRIAKRAGMNKAKVALARKLAVIMHRMLVNGTTFTTQPA

SEQ ID NO: 45635 - protein, 341 aa, unidentified
MEGDVNYCGIDLHSNNSVVVISDESDRVLYAKRLPNRLSDILAVLEGYRQELAGVVVESTYNWYWLVDGLQEAGYRVHLANTAAIKQYDGLKHRGDESDARQLAHLLRLKLLPQGHIMAKQQRAVRDLARKRMQLVQCRTTQILSVENGVSRHTGAHISSNSVKRLQEADLTALQLGEMPTLGIKANVAVMQALQEQIDGLEKVLIRHCRTEPGYRLLKTVVGIGDALATVILLETGEITRFADVGNYASYCRCVGSKHESNGKKKGEGNTKNGNRYLAWAFVEAANFAVRYCEPARRFYQKKKAKRNSTVAIKAVAHKLARACYHILKNQEAFCVERCFA

SEQ ID NO: 45636 - protein, 401 aa, unidentified
MESPIVSIDVSNGNSHYMCFIKNNKRFGKVKKIDHDIEGFKRLLEDIQKLEAETSEKVCAVFEATGVYTKPLERFLSKNSIKTYIINPLESARKRKEEIHNKKTDKLDPISISKVYYDKEEMMELKKKDETYNWLRKKNRLYEDQLNHLRKYKVTFQNQLSICFPGYLDLFKDGYSDIPMTILKKYPHPDLLKNKKAETVARYLEKNTCHTHKVSLEYALKIIEFAKKTYPGCEKDDVEVEIFKILLDKVIETQRECEKTLNEMITVASTLEEYRYILSIDGIGTNLAARIIAEIGDIEEFKSREALVAYAGLDPHIYQSGDQDGKHLKISKKGNKYLRCLLFLAVGCSIRGAKDNPVNRFYQKKKQQSNPLNSKAAKTACTAKLLKIIYGICKNKTTYER

SEQ ID NO: 45637 - protein, 326 aa, unidentified
MDKTICGIDVSKDRLDVAVRPSGERFVVARTGAGLDELVARLKVLKPNLVVLEATGGFETVVVAALAGAGLPVAVANPAQIRAFAKAIGQRAKTDPIDAEVIAHFGEATGVAPRPLPDQATQQLADLVARRRQIVDMIGAEGQREKRANSRIRKSIGRLLKALERELSSVDSEIDDAVRGSPAWREKEDLLSSVPSIGPVISRTLIAELPELGSLGRKQIAALVGLAPFTRQSGQWRGKSFIGGGRTSVRKALFMGAMVARRHNPVLKAFFERLVAAGKPKKVAIIAVARKLLTILNAIVRDGIPWKGALGAGLVAILSEPQLGRP

SEQ ID NO: 45638 - protein, 408 aa, unidentified
MRLFVGDDWAEDHHDVEVMGGSGRRLAKARLPEGVAGMARLHAMIGELVGDEVGEDVEVLVGIETDRGPWVAALVAAGYTVLAVNPLQAARFRDRLGVSGAKSDTRDAHVLADMVRTHAHELRPVAGDSAEAEAIKVVARTHKTLIWERTRHTQRLRHALRDYFPAALVAFDDLDASDTLELLAKAPTPALAARLTIGQISAALKRARRKNVADKAAVIQAALRADHLGQPEVVAAAYAASVQALIAVLTVLNTQVQTLQEQVEAHFGQHPAAEIIASQPGLGPVLGARVLAEFGDDPDRYASAKARKNYAGTSPITRASGKKKVALARFVHNDRLIDALMTQAFNALLRSPGARTYYDRQRARGASHNAALRQLANRLVGILHGCLKTGTPYNETTAWSHHINSVAA

SEQ ID NO: 45639 - protein, 387 aa, unidentified
MAQQLDDLSRSLTPLEQDSTIIVVIEMSQASWLVAGIVPGIERHPLKKLEPSEVELLRLLMRWRAEATQKGRTITRIAVAYEAGRDGFWLARWLRARGIEAYVIHPTSVAVSREHRRAKTDRLDTGLLKRVFLGWLRGEPDHCHMAAIPTLAEEDAKRPNREREGLVRERTRLVNRMKGCLVRFGVRTFKPTLRNAPDRLATLRTPEGVPLPPNTLLELRRDMARLRFVMDQIKEVEEMRAQELERAPQDKPHVMVRLLARITGIGLETADMLVHEVLARTWRDRRAVARYAGLTGSPDESGSRRREKGLAKAGNARVRRGMIQLAWRFLLHQKESALAQWYRARTADARGGTRKTLIVALARKLLIALWRMVTTGEVPAGVVLRAA

SEQ ID NO: 45640 - protein, 308 aa, unidentified
MGLYCGIDLHSNNHFVTVIDEEDRRLYERRLPNDLAITKAALEPFRRQLVAVAAESTFNWYWSVDGLMEAGYQVRLAHTGAVVQYDGLKHTDDEHDAFWLAHLMRLGILPTGYIYPKSGRGLRDLARQRMRLVQHRTSHITSVQSQVWRSTAVRLRSETIKGKGKQPWPELLDPDVALSVETGRAAIDALTAQIERLEELLLKRVGLSPQFQVLKTVTGIGPILALTIALEVGDIKRFPGVGEFASYCRCVDSRRLSNTKKKGEANRKNGNPYLAWAFMEAAHFAIRNLPAAQRFYERKRRQRMRCSP

SEQ ID NO: 45641 - protein, 437 aa, unidentified
MMTQRANTMKTYILRDPKAVEPHKAGFVPAGEPQNPRSPRRRDPALAATVDAIGGPPARVPPARAGLALFIGLDVHNDSIAVSLAPGDSTEARRYGIIGGNHDDVLRLIKTLSAAHPGVTLKFCYEAGPRGYPLCRFIRSHGAQCIVVAPSKVPRQPGDRVKTDRRDADQLARLYRVGELTGIYVPDPQDEAVRDLIRARYQVQKQQHRARQQLKMFLLRHNIRYAGTKAWTAAHLRFLATVKLPFAQQQFVFQEQANTLTELSQRWERYEKEIASVVEGWRWEPVVKALMSLRGVALLSGATLVAELGDLNRFATAPQLMSYLGLCPSEHTTGNDRQQGGITKLGNGIARKAIIEAAWNNSSPARISRTVLARQEGLPKAVTEVAWKAQLRLRQRYQHLSGVGRKQSQVAAAALGRELAGFVWAIGRLVKPREVKN

SEQ ID NO: 45642 - protein, 385 aa, unidentified
MGSQTFIPRDYDVFSGLDVDKRSISVTFTDHDRFLKSLRMPYSAEHLLNHVRKHFPNQKVAFVYEAGPTGYGLYDGIVAQGYPCLIAAPSMIPKAPGQRVKTNRLDSKALSESLRGGQLKSIHVPSAVYRELRHLTQLRDVLVSELVGMKQRIKSLLLFEGIEFPPAPPGSQWSSRVKNKLRKLPCSGTVRFKLDQLLDSLEFNEKQILKTIREIRRYCQNDPELSGCMKYLMSLPGIGWIVASQLLARIGDWRELHNIRQLGGFLGLAPTEHSTGERIDRGSITRTGDERLRSKLIQASWSAIRQDSELREFFRTVYRKHPREIASRVAIVAVARKLSVRIAVVLMKQRPYEVREKVHSAPLTQEETSPQGTTRREPEPGEKNS

SEQ ID NO: 45643 - protein, 364 aa, unidentified
MGKPNSVHLPPPEPAFLIGIDVHKNESQICILTQTDEVLELRITTRHERFAEVLGDRPRARVLIEASTESEWVARCLEELGHEVVVADPNFAPMYATRTRKVKTDRRDARALAEACRLGAYRRAHRTTDGQRRVRARLAVREALVRTRTGYVSLARALLRQHGQPVGTGTPERFAERVERLSLPGQLLSEVAPLLAIILQLNKQIAFLDALIEEVGRQQQSVRLIRSVPSIGPVTAVAFVAALDDDASRFRGAHQVESYLGLVPREMSSGEVQRKGRITKTGDGRVRWLLVQAAVSILGLKKPETAVLRTWAERIALRRGRKTAVVALARRLAGILYAMMRDGTIYNPTPAHRSVAAPTPAAAA

SEQ ID NO: 45644 - protein, 337 aa, unidentified
MDYFAGLDISMDETHVCVLDREGVVIYESKTASTAQSIANELAKAPSCRRIVFETGRMAPILFHGLSELGLPVVCVESRQAYQALKSLATHKTDRNDARGLAHLARTGFFKPVHVKSLSAHALRSLIIARKKLVGQRVTLENQIRGLAVVFGIRLPRALTAAFIDQALKASEGIAGLSAAMRGLIAARTAVMTAVAAIDADIRRMTTASEACRRLMAIPGVGQLTALAFVAAIDDPSRIRRSRDVGAYLGLVPKRHQSGEVDYVGGISKCGDRRVRTLLYEAANVMLTRYKGQLKLKDWAFAIARRSSMRKARVALARRLAIIMHAMLRDGTAFIAA

SEQ ID NO: 45645 - protein, 347 aa, unidentified
MSFIGVDLHQNSFTVCRRKTDGAESFETLTLSAADLERFCLSLDADDELAVEATGNSAWFRDCVLPCVGRVVVVNPSQFKVIRKSVKKTDRNDAAALALFLAKDMLPETRARTQGENELASLTQTRDLLVKQRTRLLNKIHALHVRKGLKLRKESLGSKRALASIDLALFSACEVIEIEVLREQALSLTASLARLDREIEGVASTFKGYAGLTSIKGVGPRSAAVLLSTIGNVHDFESADKLAAYFGIVPRVSQSNETDNRGRITKRGNKLARTTLVQCSLIAMRYSSYLKTYYDRIRQRRGAGKAIIATARKLLAIIYDTLKNGWVFDDFTQFSRRDPLIPAGQTS

SEQ ID NO: 45646 - protein, 340 aa, unidentified
MEKITTIGLDLAKSIFQVHAIAEDGSVVTRRGLRRSQVLEFFRKLEPCLVGLEACASAHYWANSIIELGHTVRMMPAAYVKAYVKRNKTDAADAEAICEAVTRPTMRFVPIKTHDEQAACIVLKTRQLFVRQRSQTANALRAHMAEMGIIAAAGMASIAKLILVLRDHEDHRLPNAARAALIEMADQIEMLTARIEKLDATIAATVKADAAARRLISIPGVGPLIAATVRASVQDPGSFKTGRDFSAWIGITPRAHSSGGKERLGKISKQGNKQLRTLLIVGATSILKLARRGAKLPAWLVSLMARRPYKVAAVALANKIARTIWALLVKGGTYEMPAMS

SEQ ID NO: 45647 - protein, 411 aa, unidentified
MVKENFIYVGIDLHKETHTAVMIDCYNQKLGEITFPNRPAAFPKLVTKVKKCNTDGKEVVYGLENAYGYGRALAVWLIDKGYLVKDVNTAISHRQAKHRGAMYRKSDSDDAKAIALATLNMLDKLPDACPNDAYWSLGQLVHRRDNIMKQRTRLVNQLHEQLCIAYPSYKQFFNDISRPTALYFWEHYPSRKYLKGKSVEDLRAELVPVSHNKCSTKTCEKILDAVASDKVKNIAYQDARDMVTLSIVSDLQHYDSQLTEVDKMLEQMYKMLGCTLTTIPGVNVITAVKILAEIGDIKRFSNANKLAQFAGIAPLHLSSSGKGKDVATKQGNRRLHATIYFLAIQMVQLSSKGTPRNPVVRAYYEKRKAEGKTSQQALICISRRLISIIYGMLKSGTEYRMPVMENTGETV

SEQ ID NO: 45648 - protein, 518 aa, unidentified
MLIDHTNKALIYPNLNGGRLNTVSDIFDIIGRIAFPIFAFLLVEGFFKTRSRAKYLATLLVFGVISEVPFDLFTTKQFFEPNWNNIMFTLALVLVTIWMIDVLKKKMEKTICNDPQVCRIVDLPVYYELETNNGNRDYRIQIGGHYMNYNTVYVGMDVHKESFTLCSCKYEDEKASHYQRTPASYKNVLRYLAFLRTIYGEDTRFVCGYEAGCLGYSLYHQLENFNVECVILAPTTMLEQRSKRRIKTDKRDAEIIARSLAQHNYSPVHIPTETDNQTKEFIRMRDDHKAELKKIKQQILSFCLRQGYQYDGSGNWTAKHVKWLRSLKPAGLYKEILDEYLLTYTILTDKLNRLDQRIEELASKEEYKESVSKLTCFLGIKTHTALSVIVEVGDFQRFVSARKFAGYLGLVPGQHSSGDDRNGLGITKAGNTHVRRLLVESAQSYTRGKIGYKSRVLRSRQAGNSPQVINYADRANERLRRRYYKMVLKDGKKYNIAKTAIARELACFIWGMMTDNIY

SEQ ID NO: 45649 - protein, 325 aa, unidentified
MILGIDVAKAKVDVALFDNKQFIAAGQFDNTPAGFKKLAKWLTGKGAEPVWACMESTGRYGDALAGWLYQQGHQVSVVNPARIKKYAESQLKRNKTDKLDARIIADFCRTQEPTLWQPPAPEARELQEMVRRLDALISEQSRERNRLQAGLESEVVKASLVDHLDYLANQIARLEEQIQNHIDHHPDLKRDQELLTSIQGIGSKTAAKIMGEVVDMNRFDHSGQVVAYAGLSPQQHDSGSSVHKPTRLTKTGNQSLKTAMYFPAITAIRHNPIVKALAARLESRGKEKMVIIGAAMRKLIQLVYGVLKSGRPFDPNYAANSQGTA

SEQ ID NO: 45650 - protein, 355 aa, unidentified
MNQEKYIGMDVHAATISVAVKNAEGKLLMECVLETKAATILEFIQGLRGTLALTFEEGTLAAWLHDLLKPHVSRLVVCDPRKNARMRDGNQNDRVDARNLAELLRTNQVKAVYHGKHGTRALKELGRSYLTLTKDSTRVMNRIKSVYRSWAIPCAGSSVYSRRHRAEWLAKLVEPGVRIRAEHLYQQLDSLEPVRQAARRELLRESRKHAAVKLLRQIPAIGPIRSALLVALLQTPHRFRTKRQLWAYSGFAVQTYDSGEYRMVRGKLQRNRERITVRGLNRNHNHDLKNLLKGAAISAIEHPGPLQDFYAALVEKGMRTSMARLTLARKIAAITLTMWKKGVSFDPKQLQRQAA

SEQ ID NO: 45651 - protein, 397 aa, unidentified
MIAVGIDVSKSKSTVAILNGDGSIRAKPFDVHHVADELQALVDYIKRTSEPPTILMEPTSHYHYPLLKAFTEAELPVCLINPYQMKKYGDTELRKAKTDKRDSLRIAQYALEKSYSLIPYTPQDQKYEDLRFLSRQYSQRISTLTVAKVQLLSLLDETMPGITTILPLKSRDPDNCVLLRFIKRFKSFDVIRKMGKTRFLDSYQVLVKKTKDRFAGSKGLAIYELVLSSVTTRGENPLSAMTQDQCVDLVSTSQKAADEINLQMRIIAETMPEYKVLRSMAGVGDRLGPIILGEIGDIRRFHSGKALNAYAGNDAPPYQSGQFESRNRHISKRGNPALRKACFEVMQALKLTKPQDDPVYLFLLKKEQEGKPYNVAKMAAVNKFLQIYYARAMELYK

SEQ ID NO: 45652 - protein, 347 aa, unidentified
MDTIGVDLHKRESQLCILALDGTATEQRILTSRERFTAVLGDRPGARILLEASTESEWVARHLENLGHEVIIADPNYAPMYATRARRVKTDKRDARTLAEACRLGAYRVAHRVSPARRHVRAELAVREALVRTRTRYVSLAKALVRREGLRVPSSESHLVMQRIAALELSETLGAELAPLVHVLGPINTEIAAAARRIAALLDDDPIVALLATVPSIGPITASAVVATADDITRFETAHRFEAFLGLVPGERSSGEKRRIGRITKAGNSRVRYLLVEAGWRILRSKGDDTAALRAWALGIARRRGQRIAVVAVARRLAGILYAMWRDHSAYEASRIRAPRARLGATG

SEQ ID NO: 45653 - protein, 348 aa, unidentified
MTEQLMAGIDLHSNNLVIGIMDQSGQRLKHQKLDCNLQQVEQFLAPFKAQLKSIAVESTYNWYWLVDGLRARSYPVVLANPAQIDQYSGIKHADDKNDAYFLAELQRLNILPTGHIYDPVLRPVRDLLRRRMSLVHQRTALMLSFKSLYARTTGQAMSLSRLKSMEMAEAKTLYEHPANCLIATVQKEHIEKLDQSVERIEKAVLQSARELPCYERLNTLPGIGRILGLTVTMEVGEIKRFKTPGDFASYCRTVDSKRLSNGKKKGDNNQKCGNKYLAWAFVEAANFAKRYDEHCRKWFDRKAAKTSTVIATKALACKLAKAAWHVMSQGTDYEAKRMFPELALKTTT

SEQ ID NO: 45654 - protein, 436 aa, unidentified
MSTKSEIKNNVEEEANSCVAVIGIDWADSGHALAVFSDPGSPQAEPELSMLAQEPGELQQWAQGLLARWPRGRIAIVIEQKKGPLINFLYGVERLAIHVVAPQSLAHYRKTFSMANVKADASDAVLLGRLFLLHPEAFPALERAAEEVRLLDAFCRQRRQALRELWVLVLRLRQVLKESYPQAITMLGGVLDNHLACSFLRRWPSWKALGKVRAQTIRKLFYACHFRSPDILEKRLKAIEDSVALTGDRATIEAAAVQTGHLCARMEPILRAVEDYDRRIEKLFARQPAAKLFSSFPGAGKQMAPRLLCAFELHAADLSKAEDIQRLSGVAPVQRASGKSLQICRRLARPIFLHQSFVEFSCWSTRQCCWANAFYQQQKERGKSTGSALRVLAFKWQRILFRCWKSNTPYDDARYLECLRLNNPVLYAKTLRLATK

SEQ ID NO: 45655 - protein, 376 aa, unidentified
MEVLYPRCAGLDVHSKTVVACVRIASGATVTYEHCTVSTNTRGLLELADWLAARAVTHVAMEATGVYWKPVWHVLEGHATLVLANAMHIRNIPGRKSDKNDATWISDLLALGLIRSSFVPPAPIQELRDLTRTRKQLVRETTRHTQRMQKTLEDANVKLTEVISDILGMSGRAILTALVAGETDPERLADLTSGRLKATRVELVEALTGRVTAHHRFMLNLHLTHIAALDAAVADIEARIGEMLVPFRAAVSLLTTMPGVSETAAAVIVAEIGDNMTTFPSAGHLLSWAGLCPRLDESAGKRRSTRTRQGAPWLKTTLVQSAWAAARKKQSYFHAQFLRLKSRRGPKKAILADRRLLHAARRRGIPRPRRPVLRAT

SEQ ID NO: 45656 - protein, 336 aa, unidentified
MWHVGVDLHRKTVVIAAVHDSGEVRPPVRLQNSETERIKETFCAFGSFRAVVEATGTYRWFHKLVSPLGTVLLAHPGKLRIMVQRRCKTDTLDAQLLANLLRINQIPLAYIPPDEYQLLRDITRQRARLVRGQVSVKISLRALLARYNMEPIFKYPFGPRGLCWLSKQDFGFVDNVVRDELIARFRHYAAQIEGVHERLAKLEAMYPQIESLTVLRGIGAYTAMVIIGELGDVRRFRRAKQVASYAGLTARVHQSGEHCYHGHISKQGSPWLRWLLIEAAMKLVHQDVPLANFYQRIRKRSSAKIARVAAARKLAEICWKRLVSWERQHHPEVAVA

SEQ ID NO: 45657 - protein, 410 aa, unidentified
MRRIRDRVAGLDVHRDTVVACAQLFEGGEVRVEKARFKTTLPAVGELAGWLAEREVTTVAMESTGVYWKPVFYPLEGLFEELWLCNAQHVKNVPGRKTDMADAEWLADVVAHGMVRPSLIPAEPVRAVRETTRYRKTHITMRGQEIQRLDKILQDAGIKLSSVASTVLSKSGRAMLEALIAGERDPEVLAELALTRMRAKIPQLIDALQGRFGAHHAMLCRQILDHIDFLDGQIAQLDEAVVEGLGPFEPAIDLLCTIVGWQSRTAEVFFAETGGDMSKFPTAPHLASWTRLAPGNHESAGKRRSVSQRPGNSWLGRALIEAARAAARTKDTYFAAQYRRIARHRGPNKATVAVAHSMVVAAWHILTTGEPYHDPGGDYFQRRRDRDHETRRLVAQLEKLGHTVSLDPAA

SEQ ID NO: 45658 - protein, 416 aa, unidentified
MNAVGIDVSSRKSTVAVLRPLGEVVCLPFDVTHDIAGLASLAEKLKALDGETRVVMEHTGRYYEAVAKALHEAGLFVCAVNPLLIKEYGANSLRRVKTDKADAVKIARYALDNWADLRDFTPMDAIRYDLKTLNRQFQLASKQRTASANNLIALLEQSFPGIRKCFDSPVRSDGTQKWVDFAYSFWHVDCVRKQPFAAFCERYRKWCKRHAYLFKQSNAEEVYALAKRAVVLTPKSKVVKVLVQEAANQLISISRSVEVYRAEMDRLAAMLPEYPVVMAMYGVGKSYGPQLMAEIGDVRRFERKQALVAFAGIDPMPNQSGDKNVRSNKSSKRGSPYLRKTLFNVIRTYLQCAPQDEPVFQFLNRKRAEGKPFYVYMLAAANKFLRRYYAKLRDYFASLDTLQPVAPIPTILKATL

SEQ ID NO: 45659 - protein, 387 aa, unidentified
MPVAAHQPKAPTAIRTDLGAIFVSLELSRSKWLITSLSPGGGEKMSKHAVAAGDVAGMLARFADINRKTQARTGRHFPIIVIQEAGLDGFWIHRVLQAEGIKSHVVDPASIATSRRRRRAKTDKIDGEALVRALLAYKRGEPRVCAMLRVPTPEEEDRRRVTRERKALTNERVRHVNRVKGLLFAQGVSGYEPLRRDRRKRLEALKTGDGRPLPAHLQAQVGRELDRLELLLEQIKAVEAERDAMLAVTQVVSSAPAMLLDLKGIGPEFAAVLWSEGLSRHFDNRRQVAAYAGLAPTPWQSGSVDHEQGVSKSGNPTLRTTLVQMAWLWVRHQPHSALTFWFKERVKQNNGRLKKTMIVALARKLLVALWKYVNAGVVIEGAIMSVA

SEQ ID NO: 45660 - protein, 376 aa, unidentified
MNEFNNIYVGLDSHKATIAVGIAQEGREAPLYYGEIAYTEAAVAKLVKRLSKDGQTLHFCYEAGPCGYELQRQIQHLGHACEVIAPALIPRKAGQRMKTDRRDALSLSGLYRAGELTPVWIPDRAQESIRDLTRTREDMKENELRARQQLGAFLLRHRRIYSGKSRWTQAHSRWLEQQVFSEPAQQLVLQEYIDQVSAMSRRVAALEQAMRQALEHWHWKPVVQGLMALRGVSLITAMTTVAELGDLTRFDSPRQLMGYLGLVPSEHSSGLTRRHGGITRTGNGHVRRVLVEAAWAYQFQARKTRTIERRAEQTSLQVQAIAWEAQKRLCGRYRNLLSAGKRKQQAVTAVARELAGFIWAIACEVQGKPHASKVIG

SEQ ID NO: 45661 - protein, 443 aa, unidentified
MSFKTLQTKRHFIFNKIIVGIDPAKKKHQAAMIGADGLQMGNSFTFSTTYAGFNQDLWIKLKKIMPDVNTNHVVFAIETSCNLWQTLASHLQRTGYEVLLVSPLSTKYSRPAMNHDFSKTDPKDALLIASNTRNGHFDFFRNYSDHIIAMHRLAITYYKLRNDYIRNLQRLRSVIERVFPEFLQVMQADSATARYLLKKYLRPQDFLDLNLNQEAEAISKISCKKFNLDTLHRLQQDARHSIGIPTHHENILVERLSVDAWLMIIEILKNQIDAVFEQLLILVKQTPYYDLLNSFRGLGISDILIALFIAETRNLADYNHYKKLEKLAGYNLRRNDSGQYIGQRKINRIGNKRLSWILYWMTKGAAKHIPEVALKYLRRQMHHAKHRKNIVACIPVLLKLIVAMVREQRPYQLREEKIKELEILRQAFAAQKENKKEKRLHAA

SEQ ID NO: 45662 - protein, 408 aa, unidentified
MNEFGKRYIGLDVHKHYLIALGVDHDLQVVLPARRVELAHLEAWMKKTLTRQDAVVLEMTTNTWQLYDELVEYAGSVTVVHPPHVALITRSQVMNDKIAASILARLLAKGLLVGIWVPPQEVRELRGLVAQRQKMTRLATQAKNRLHAVIQRHHLMPPEGNPFAKTNNGWWESLSLGRLEKMNLQSDLETLQFAGKQEARLQEEMTGLAAENEEIGRLLHISGFGVITAVTVYAAIGDISRFEDAEHLVGYAGLGTRVHDSGLTTRTGKITKAGRRDLRVALVEAAHVAANSHPHWKAELARLQPRLGYNKAIVAIARKLLISVWHVLARKVADRFAEEEKVSKKMLHFAYEVGKANRAGKSAAQFARIRMDALGLGSELTSIPWGSKKPIPLPPSMLGKKESAVPNK

SEQ ID NO: 45663 - protein, 445 aa, unidentified
MATNFYLGIDVSKGYADFVILNQKKEVIEENFQLDDTFEGHNQLFKILSDFYVSHPVAKLFVAVESTGGYENNWFNTLHKLQSTMALSVARLNPFGVNHSSKASMNRIITDKQSAKYIAEYLISYPEIVNYQSEDYFATARRQWSSIKIFTKQKTQLLNQLNSLLYIANPEILAFCRDGVRLWTLLLLQKYPTALKLSRARVSSLSKIPYLSKARAEEIIGNAKESVASASDEIIEETITTLVGQIISLRKIIARQIKLLETNVNLPEEVKLLKSFNGIGTYSAVGLMIEIISVERFASSKKLASFFGLHPVFKVSGDGKSGFRMSKKGRKEPRNILFNVTRYSIAHNQFIKDIYINHLKKGISKLSAMGAIMHKILRIIYGMLKNNSTFNAQIDIDNRNKSKAVENQSSKIGIERRFQKHDINAPISRRQNKMRKKNDLTPKTS

SEQ ID NO: 45664 - protein, 341 aa, unidentified
MQVTTIGLDLAKHVFQVHGIDAAEKVVVRRQLRRSQVMAFFEALAPCLIGMEACATSHYWARELTKLGHEVRLMPAKDVKAYVKRNKNDAADAEAICEAVRRPTMRFVRVKSAEQQGQLMQHRTRDLLMRQRTQVINALRAHMTELGIVAAQGREGTKALLAIIADAGDERLPVDARVSLIVLAAQLQALQTLVGSIEKRMIAQHRASESSKRLASIPGIGVLGASAITATATDPNAFRSGRDFAAWIGLVPRQDSTGGKQKLGPISKQGDRYLRRILVVGAHAVLRRARQHPKKYPWLTQLLARRPFKVVAVALANKMARIAWVLLAKGGSYRVPRLAAA

SEQ ID NO: 45665 - protein, 334 aa, unidentified
MQNVTLIGIDLGKHSFHVRAQDKNGNALLRKKFSRNPLTAFLSTCAASTVVMESCAGAHFMARHISQFGHQVKLISPQFVRPFVKSNKNDFIDAGAICEAASRPSMRFVTPRTEDQQAMSALHRVRDAIVRDCVKTTNQMHAFLLEFGISMPRGIAVIRRLAAVLEVHELPPYLARLLMRLHQHYAYLTEQIEELEQELKTHMADDDTAQRLLTIPGVGLITASLLATKLGDGKSYARSRDFAASTGLVPRQYSTGGKSTLMGISKRGDKNLRRLLVQCARAFMQRLEHNQGRLADRVKAQLSRHHSNIVACGLANKLARIAWSVTTHRTAFIQ

SEQ ID NO: 45666 - protein, 353 aa, unidentified
MSDDQYIAFDVHQATTVVSVVNARGRDLDTTILPTQPQALIGYLQSWRGRLHLTLEEGTYSAWLYDVLEGRVAELVVCDPRRNALLKEGNRTDHTDARKLADLLRTGMLRAVYHGSRSLRNLQELAHAYQALVQDTTRVMNRLKAFYRSRGIDCAGHGVYSRKQRESWLERLPAEASRLRAELLHDELEQLRNLRRKARRALLAESRKHIVAARLREIPGFGPLRVALLIARMQTPHRFRTRRKLWSYAGLGLVQEGSGEYGWVEGRAVRRRHAVQLRGLNRNHRPGLKEIFKSAALAAIRQPGPFQDYYDLRVRRGVDPAILRVTVARKLAALTLSLWKKGGRYRAEGVKQA

SEQ ID NO: 45667 - protein, 431 aa, unidentified
MLKINPLSTLYVGIDVSSKSNYVCALDFFKNKYINSSFANNQPGAEELALKILECLNQHPDLTMVVAALESTSVYSIHIANYLSSCEELMRFKPYVFVLNPKCTANYKKSYIGLGKSDPIDAFVIADYARAGNIESEPWRGSQFLALKRLTRHRLHLVECMTREKTYLISNLYLKFSELQMLEGDDQPFCDIYGATSSSVLMEYLSPEEILASSEEDLIAFLAEKSRNRIKDISKTADLLKKAARDSYRLDKALYEPLNVSIASSFNCIETFKREIKVIDNAIEKEIKGLNPNAFIILQSIDGIGPVFAGGIIAEIGDITAFHSSDALAKYAGLTWKSNQSGDFDGEDTPMIKAGNRYLRYYLGEAANSMRKHNVEYGAYYRKKYNEVPKHQHKRALALTSRKFVRLVYGLLARNQLYSGVSLDTSIKDSN

SEQ ID NO: 45668 - protein, 411 aa, unidentified
MNAVGIDVSKGKSMVSVLRPLGEVVAKPFEVCHTAAELGRLANFLKSLDGETKVIMEHTGRYYEPVSQVIHERGIFISAVNPLLIREYGGNSLRRVKTDKADSKKIARYGLDNWVELREHTPMDTIRYELKTLNRQFHLASKNRTAYSNNLIALLDQSFPGANRWFDSPVRKDGSQKWVDFVMTFWHVDCVRSARLTAFTERFRKWCKRNRYNFCAEKAEQIYNESKEMIALVPKSATTKLLIQGTASQLLNISRMVEVLRAEMNRLASLLPEYPVVMRMFGVGESFGPQLMAEIGDITRFAGKQSLVAFAGVDPMPNQSGTKDQRSNRSSKRGSPYLRKTLFNLMRILLQLAPSDVPVYQFLDRKRSEGKPYYVYMTAGANKFLRIYYGKVRDYLVTADSASHDPMPANP

SEQ ID NO: 45669 - protein, 328 aa, unidentified
MGGRQCVGIDVSASEITVAIEGQVGRTTLANDAAGHKQLVRQLTRGKGIARVCLEATGIYHLDLALALHRAPRVEVAVVNPAAVRDFGRALMQRSKTDGVDADVLLAYAERMPFVAWQPPAPEILDLRAIVRRMGALTLTRTQERNRLHAAGHCAELTEVIAWDIEAHLEHLAQSLERLEQQALALVRTHADLARRFERLVSVRGIGTTSALRILAELAVLPADMSARQWVAHAGLDPRQLESGTSLHKPARISKKGNRHLRAALYMPALVAAREEPHVRGFYQHRIARGLKPLQALVAIERKLLHAIHGMWLRDTNFDGRKFYVDAA

SEQ ID NO: 45670 - protein, 323 aa, unidentified
MSSFVGVDMAKNTFDVATPLDNGKHRTKGKLSNDAKGFAEFESWLCKHATADALIVIEATGNYHEALADFLFQKGYRLHIANPATTAAHAKSELSRNKTDKTDAKLISDFAMQKHRKLRLWVPEPQSRRRLRALVRRLEDLNEIRQMEKNRLEVASPNVVTSIESVIAHVLEEIAKTEKAIKQHIDDDPDLRGKSELMTSIDGLGEKTAALILAELGDPLDYEGPKKLSAFAGLSPRQDRSGGYVGPTRISRTGSSRLRGGLYMPAIVGIQHNVVLREFAKRLKANGKAPRQIICAVMRKMLHLVYGVLKSNKPFEPEIALAH

SEQ ID NO: 45671 - protein, 373 aa, unidentified
MPRYSTAFGMDVHLRSTTVCALDAETGEAVTRRFRGNPWGEVAEWMSGFPGPSLAAYESGYLGFAPQRELSGLGVDCVVAAVSRVPRSAADLSSKNDRNDAARMAKAILSHDISPVWVPSPEIEGLRDLAGAHDAATARLAAARQRLLAFLARRGYAYGGTTPAGNPRRYWTYDFLRWLDKVRPADDGGIRALAALRNEVEAAAETRDDLLAEYRAAVAAGPLSAEVEALQSIKGCGFALAAAFASEVGDFSRFRSGRQVTAYFGLAPKQRSSADSVRLGGISGAGNALVRRLAVEGSWSYVQASHQPKLMPKGSGVPLEVRMHGRKGSERLLRRREEMLARGMPQAKANAATAAELVRWLWALGAMCREATE

SEQ ID NO: 45672 - protein, 353 aa, unidentified
MQIVGALDVHRSQITFKTVELASGELRRGRISPAARQAVREWLERFAGLDAHFALEGTTGWRFLVEEIERAGHSAHLADPAETAAKRGRKRRAKTDNADCDLELKLLLAGELPESWIPPRHILELRTRVRVRKTLIDQRTAWQQRLQAQLFHQGIPTGLKPRTRAGRDALAKAELSAAGRELVALALRMLDTIDRELVPLDRDLRAFARRHPGCRALISNLYGVGAITATAILAELGDARRFTSSDDAVRHSGLDVTVYQSDSKRAPGHLSHEGPELLRWALFEAAQSAARQTSPDHAYFLQVKQRIDHNRACLSVARKLCRRAHHILRQLGNDALAPLEELPAEKEIVRPAA

SEQ ID NO: 45673 - protein, 351 aa, unidentified
MSHKTAAAVAHTIGIDTGKNTLHLIGLDDQGAIVLREKIARGRIAARLANVPRCLIGIEAGMATHYVARELIALGHDVRQVPPAYAKPFRQGHKNDFRDAHAIAEAVQRPSTRCVPVKTDDQLDLQALHRVRSRLVGQRTAVINQIRGFLLEHGIAVRQGLRFLRQQLPDILAKRSDVLSPRMIRIMEDLSGDWRRLDERIEHITKEIEVLAGTDVNCGQLMTVPGIGPIVASATVAAIGNGAAFARGRDFAAWLGLVPKQMSTGDRTILGRITKRGNRYLRMLFVQGARAILLRPKSWAKHSFGPWLTTAARRLHRNILTIALANKLARIALSVLIQGRSYETRIVSAAA

SEQ ID NO: 45674 - protein, 335 aa, unidentified
MKHYAGLDLSMESTQVCIVDEDGRKLISEKVESLPEAIAAMLERYGPIERIVIESGRMSPAICLGLRDLGVRVVCIDARQAHQSLKAMKANKTDPHDAAGLAQLARTGFYKEVHVKSRAAHGVRSVITARGHLVKARVGLDNMIRGICATFGYRPGPGQGKAFLARIMEATHIPGLGDAISSLLSVRTELVEQIKEMDRRLRIIASQSQACEILMSIPGVGVQTSAAFAAAVDEAGRFRQSRNAGAYFGLVPRRHQSGELDWTGRITKQGDSTVRKLLYEAANSILSRCQETFALKTWAMKIVKRRGFKKARVALARRLAVIMHAMLRDGTLFQA

SEQ ID NO: 45675 - protein, 314 aa, unidentified
MKTMTEKQYIGIDISKTKLDVCAPWWATTKTFKNSPKGLQKLFRAIKSKPISCHLVCEATGGYEGLLLLTAWKHDVTISRVNPRKVRHLAIAMGFLAKTDPIDAFVITEFGKMLKPKPTPEPTKTAQQLGVIVRRREFLMRQLTREKNAKEKASDTFILQDINASIASLSKRLAHFDEAIAKLIDADEVLREKRRRMEQVTGIGPGTSRLLLAALPELGSISDKEVSALVGLAPMNCDSGTRRGKRIIQGGRANVRRGLYMPALCAARHNPTLKAFYDRLCSAGKAHHVALTAVMRKLICLLNRILADPDFNPA

SEQ ID NO: 45676 - protein, 382 aa, unidentified
MDVLHACCAGLDVHKRTVVACVRRVDPAGKVFKNIKTFATMTQDLLNLSDWLAAQGVTTVAMESTGTYWKPVFNLLEPRFAVVLVNAHHIKQVPGRKTDVKDSEWIAQLLQHGLLRPSFIPPRPTRELRDLTRQRTQLTAEKTAVANRIQKVLEDANIKLGSVASDVLGVSGRDMIEAIIRGEFDPVKLADLARRRLRGKIPQLQLALEGSVTEHHRFLLRTQMDHLNHLERLIRRYDERIAEVLDPFAEQVGRLMTIPGIDHRVAEIVLAEIGLEMARFPTAGHLSSWAGLSSGNHESAGKRRSGGTTPGNRWLKSALVQSAWAAYRAKGTHLSRKFRRIAGNRGKKRAAVAVAHTLLVIIYHLLRDGTNYQEIAGDSEAA

SEQ ID NO: 45677 - protein, 407 aa, unidentified
MDIIHQQCAGLDVHKDEVVACARVVTGRRVLRTSARFPTTTKGLLALADWLDEHQCHVVALEATGVYWKPVWHILEARVQLVLANPGHVRAIPGRKSDMNDAAWLADLLAHGLIRGSFVPPPAIQELRDLTRTRKQLGRQIAQHSLRLQKTLEDANLKIASFVSDLLGVSGRAILRGLIDGETTPAQLLARTTGMLRADPEQLCTALEGRVRDHHRFLLRLHLTQIEALEKGIESLDVRLEVLLSPFRAVTARLCTMPGVSTLVAQTILAEIGDDMRRFPTPGHLRSWVGLCPRLDESAGKRRSTRLRHGAPWLKTVLVQAAWAAIRHRDGYPHAQFQRLKAKRGPKKAIVAVAASLLTAAYFILRDEVEYRDLGAHYFDRHDATRAAARLTKRLEALGFAVQLTAA

SEQ ID NO: 45678 - protein, 416 aa, unidentified
MQVLYPRCAGLDVHKDTVVACVRVIERRKVKTEVRTFKTVTSQLLALSAWLSENGCTHVAMEATGVYWKCVWAILSDGEFTLILANAAHVKAVPGRKTDVNDATWLADLLAHGLIRGSFVPDIPIQELRCLVRTRKQLVREQTRQVQRVEKTLEDANIKLGSELSDVMGQSGRAMIAALIKGETDPVTLAKLAHWRVKATPSGLREALRGRVTRLHRFLLELHLQQIDALMAAIERIDQEVDAHLTAKLSSFRAAIELLTTIPGVSELSATIFLSEIGTDMSQFATAGHLLSWAGLCPRNDESAGKRRSNRLRKGAQWLKTTLVQCAWAASRKKRSYLQAQFHRLRARRGPKKAICAVAASILTAVYHILKDGTLYQDLGPDHFHRRSKEAQTRRLVRNLEHLGYAVTIKPVAPAA

SEQ ID NO: 45679 - protein, 450 aa, unidentified
MNKTSFFDGHEVVNHICAGIDVHRDKVNVTLAKSEGNQVRFYYDVFWTIKSSLEQMLAWLISNGCTVVGMGSTGKFWRPVFNVLEGRIPVYLYNARHMKNIPGKKTDKKDSHWIAKVTRYEFIGHSFIPDSLTRATRDFVRYRKSLVENRTRVRQQIHDILTSCGIRIAVYMSDIFGVSGRFLLKGIACNWPFSKGMLESNLHPPINKKVDVILEALDGFVKDSDRTSLIMHLSEEKRLCASIATIEDKLEEMVICSHEREEIINRLIEIPGFSRKSAILLVGEIGIDLSSFPDHKHFASWCGLAPGKKESAGKNLSGRIKVRQHYLRSLLVEVAFASTRCKDTYFNSKFFELKRRKSTQKSVIAIARKLSIAIYMIINKRMNFKELTAEYIPIEAQARDLRNIQRLAKKIGKEATLSILEQLFDTQDPNQPEDKTLTDNLISKDSEDHD

SEQ ID NO: 45680 - protein, 342 aa, unidentified
MQIAILGIDLGKNSCSVVGLDVAGRVVLRRRLRRDGVIKLAAGIPGCVMAMEACCGAHHLGRLLREHGHQVRLMSPEYVRPYVKAQKNDDRDAEAIAEAATRPTMRFVELKSEAQLDMQSLHRARDRLVGERTALINQLRAVLLERGIVVPQGRRKLERYVDAQLAEQEIRLSPRTGLLVEDLRAEWRELDRRILAFDDEFAALARTDETTRLLTSIPGIGPLNATALTAAIGNAETFGRGRDVAAWLGLVPKQMTTGGKPKLLGISKRGNGYLRKMLIHGARAALPTLSKGETPLGAWLRGLLARAHVNTVVVALAAKLARIAWAVIRRGEKFNMKAATAS

SEQ ID NO: 45681 - protein, 316 aa, unidentified
MAKAVSEITLGIDVSKDELVICHWDTGHFTRLINQPAEIQAWLGTLYGPVRIAIEPTSSYHLELVEQAHARGLTVYLINPRQLVHYRKAVNVRNKTDPADAWLLARFLAHESGSLRPFKPQCAKARRLWALIKRRGVAVRARQKLQQSFRELELPAKALFTEFRKVIARIDQQIQALIRELGWWADYQHCLSIPGIGPVNAAALTTVFHRGAFAGSDAYIAFIGLDIRARESGKFTGQRKLTKCGEAEIRRLLYCAAQPARTYRLFDNYYQRQLEKGLSKIAAKVILARKLARIAFTLLANQTSFKKQEINDSQVP

SEQ ID NO: 45682 - protein, 455 aa, unidentified
MNESHTVFEETRRNVAGIDIAGTADHYVCGPRKEDGTHDTTHFGTTTVELHRLLAWLREQKVESVALESTSVYWIPVADLLEANGIEVVLVDTREVRMVPGRKSDVKDCQWIQKLHSCGLLHAAFRPPESMVAVRTLLREKENLVATRTQFIQQMQKSCDQMNIRIHHAVSDIDGATGMAIIAAIIAGERDPLALAKLRDRRCKKTVVQIAEELRGTWREEHLFNLTQAYGMLVSVDEAIARYDEKIASMYRRIAENFPRTPSLRPPPEKEGPIARAKRLRDAEGKQDIARIMGSDLTMISGVAYGTTAVVVSELGWDFAKFPNEKHFASYIGLAPSLGKSAGKNVRQKKRHRNTHRVGRALCMAAATLHRSDTELGAFFRSVARRSDRKTAIKATARKMAHMIYRAVRYGVEYVDKGAQAYEERIRAKTIKTVKFLIKSLGINELELSSMLATA

SEQ ID NO: 45683 - protein, 408 aa, unidentified
MIFVGVDWAEVHHDVCIVDEGGDVLARKRIPDALVGVQQLHAMIAEHLGEENDAERVIVAIETERGLLVTELVAAGYQVFAVNPLAASRYRERHHVSGAKSDPGDAKVLADLVRTDRHNHRAIAGDSVLSDAIKLLARNHQNTIWECQRQVNTLRSALKDYYPGALEAFGTELSGPDAVAILAIAPTPTRGRALTKARIKTALRKAGRRRLLDERVNRIHEILRREQLSQPALLEDAYGVATEATVANIAQLNASIAKLEASLSTHFEQHPSAKVILSLPGMGTVLGARVLGEFGDDPNRYADAKSRKNYAGTSPVTRASGKSRVVLARHSRNKRLASALDQWAFSSLLPSPGARSYYNELKSRDKHHRKAIRQLANRWVGILHGCLETDTPYDEAIAWSHHRSDVAI

SEQ ID NO: 45684 - protein, 342 aa, unidentified
MLIIGCDYHPSMQQIAWLDRETGEGGERRLEHSSGEAEKFYRELRQRGVEVRVGIEASGHTRWFERLLAELEMELWVGHPAKIAAQRVRKQKTDRWDAQHLLQLLLEDRFPRLWVPSPENRDLRQLLWHRHRLVQMRTRIKNQLQAIALNEGVRRQHRLWSQAGRAQLESFALAPWAARRRHDLLQLLDQLTPRIAELSQAIEQEAERRPEVQRLMTHPGVGPITALAFVLVLGTPERFRCGKQVGSYLGLIPCEDSSAGKQRLGHLSKQGNTLLRFLLVEAAQVAVRCDAEWRRRFVRLAMRRQRSIAIAAMARKLAVSLYWLWCQAEDPVAASQTGSHVG

SEQ ID NO: 45685 - protein, 445 aa, unidentified
MKSNTQNAKIEAITEKTLVLGIDVGSETHYARAFDYRGIEYSKKPFKFSNTEAGFATFKEWILDLKERHEKDKVVPGMEPTGHYWFNLGKFLQDNEMKAVLVNPHHVKKTKELDDNNPTKNDRKDPKVIAGLVREGRYMIPYLPEGVYADLRTATNIRFQLQAELTRIQNRISRWFNIYFPEYKTVYGKPDAKSGMLILKAAPLPEDILTLGIDGVNQIWRDAKLRAVGKARAKTLIEAAEHSVGSKEGAVSARMEIRMLLEDYESRNTRLQEVMVLIEELVRKIPMAEKLLEIKGVGIRTVSGCLAEVGDISRFNNPKELQKLAGLALVENSSGKHKGETTISRRGRKRLRYLLFEVAMSLVSKNQEFRELHNYYTTRRLNPLKKMQSLMAIAAKLRRLSCFPRARSTRKRFGLSSLWKIWICPNFRMGQPTRRSRTMYWNIAD

SEQ ID NO: 45686 - protein, 410 aa, unidentified
MPNYEVYVGIDWATRSHQVCITDAGGQRLGESTVAHSGTGLDEFVAELTRHGPDPTRIAVALEVPRGAIVDTLLERGFHVFALNPKQLDRFRDRHTVAGAKDDRRDAWVLADALRTDGAAFRRLDPEDPRLLQLRELSRVHDELVQEHSRLTNRLREQLWRFFPQALALCPAADEPWLWSLLEEAPTPARAQRFTRAALRALLARQRIRRFTGDALYTALQERSLRVAPGTIEAASEHLALLLPRVRLVHEQQRRCERRLDGLLAELATPARQDDQQEHRDVTILRSLPGVGRVVAATMLAEASRPLAARDYQTLRAHAGVAPVTRQSGKGRFVAMRRSCNGRLRGALFHWARNSVRLDAHCRAHYARLRQRHGHARALRGVADRLLGVLVAMLTSRTLYDPARRHAAPA

SEQ ID NO: 45687 - protein, 385 aa, unidentified
MSSQVEFPQLFDRCAGIDVHKENVVVTVKINQKADQTRTFGTFTEDLLALKDWLQAEQVTHLAMESTGVYWKPVFNILEDSFHLMLVNARHIKYVPGHKTDCKDSAWIAKLLMSGLLKGSFIPPQEIREMRELFRYRKKQVGYRVSERNRLQKILEDANIKLGNVVSDVFGKTGWAIICAIIDEQSDPTLLAGLAKGRLKSKIPQLILALNGKITAHHRFMLQTSKLALEGIQQHIDRIDRRLEQYIQSHSTEVELLETIPGVSQETAKGIVSEIGFNMSVFPTAQHLASWAGVCPGNNESAGKTKSSRVTQGNKILKTVLVEAAWVASRMKNSWFKAKYYALAARRGKKRALLAIAHKILIAAYHILKEGLPYKAPDLKYLHSK

SEQ ID NO: 45688 - protein, 426 aa, unidentified
MKLEDKEGEKPICAWIGIDWADEQHEVSLYEVASGKQEASMLRQSPEAVQEWLGQLRSRYEGGYVAVVLEQGRGGLLNALMGCELLVLYIINPKSLSSFREAFYGSGATSDPVDAELMRDMVRQNPSRFRAWRPDDVMTRSLRLMTEGRRDLVNQSTALTNQLTALLKGYYPQALSWAGTLDTAWACNFLEQWPTLQSLQASSRRQIRRFYEKYPRASLDVNEQLKQIQEARALTQDAAVLESSALMVHALVCQLRPLLASIAEFDRKIATIFRKHPDRPIFESFPGAGAALAPRLTAAFGTDRDRFQAATEMQELAGIAPVTEKSGKKRFVHWRYACPKFTRQTFQEFADHSRRWCEWAKAQYELLRKRGKSHNAAIRALAYKWIRILFRCWKDRKPYQDEVYTKSLLKHGSPLGSLLAKPVENG

SEQ ID NO: 45689 - protein, 475 aa, unidentified
MRKVKHIKASKRTEVQKQLRNIPYDKVLVVAIDPAKYSPKALICNYFGEILVNSFFFTINSKGLNLLLTKIKDSVNNISAQKVLIGIETTGHYHEIIVRYLQEFDYNVLLINAYTTSKSRAENLNWSKTDDIDLFAIASALIDGKTTKSRLLNGNYEKLKNLCRYRRYEVQKRSAIKSKIRALMDKIWPTFQGKGKIINGTSKVENIFSDFWGKAPLFIMKNYPHPSLIKKLDKKDLRKISRENNLKFRNSTIEKLLLAAKDSYARPFEKLKVEIELLTMTIADYENANQKISLLQDKIENILVQNPGLLLLSVPEIGIITAAEFTAEMGPVNQYDYAGQVIKTAGTNPLVEESGGKKARYGSISKQGNPSFRHIVYLAGRSLATGKTNPYFKTYADKLRKKDKSPNQIYIAVGNKFIKVAFAMLRDHKLFDPPMWKGKSLTSNIFDKIDSPENKEIALKTLENYLGVNSSKLAG

SEQ ID NO: 45690 - protein, 373 aa, unidentified
MPKYSTAFGMDVHLRSTTVCALDADTGEAVTRRFPGNPWGEIAGWMDGFPGPSLAAYESGYLGFAPQRELAGLGVECVVAAVSKIPRSAADSASKNDRNDAARMAKAILAHDISPVWVPSPEVEGIRDLAGAYDGATARLATAKQRLLAFLARRGFVYGGTTPAGNPRKYWTYDFLRWLDKVRPEDDGGVRTLAALRNEVEAAAEARADLLSEYGAAVGASPIAAEVAALQSIKGCAFALAAAFSAEVGDFTRFRSGRQVTAYFGLAPSQRSSGDSVRPGGISGAGNALVRKLAVEGSWCYAAARHQPKLMPRDTGVPLEIRMHGRKGSERLLRRREEMLARGMPAAKANAATAAELVRWLWALGMMCREGAE

SEQ ID NO: 45691 - protein, 343 aa, unidentified
MKYVGVDLHKQTISLCVVMQKAGRRIVVKRETLRCDEPRRIQSWFRRLGAFQVTVEATSSYEWFVQLVEPLADRVVLAHPKKLRVIAESTRKTDKLDAQVLAEFLLLGMIPAAHRPSPRLREHRALVRQRQYIQRRITSAKNRLRHLLSHYNADVKYLFSEKGQAYLNELPLSAADRFVVRQLQGSLAHWRSQLLEMQAELRKFAKKAPEAEREARQVLETIPCVGPITIEVVLSELGDVRRFRSQKQVAAYAGLAPGIRESANRTKQLGITKEGSGLLRWVMIQTAWRAVGKTRRWGLAYERLKARTGAKKAIVAIARRLLGVMVAMLTSGRRYCLASEGRT

SEQ ID NO: 45692 - protein, 391 aa, unidentified
MSQHCHFDASRSLTALEQDSTIIAVIEMSQSKWLVAALVPGVKRHPLKKLDAQEEGLLKLLHRWRNEAGQAGREIKRIVVAYEAGRDGFWLARWLRGRDIEAYVIHPTSIAVSREHRRAKTDRLDTELLMRAFLGWLRGEKRHCSMVAIPTIEEEDARRPNRERQNLVTEQTRIVNQTKAIFARFGIRTFRPTLRKAEEKLKGLRTAEGTSLPENTRAELCRHLARLRVVREQIRAVERERLRKLAAAPAAEKGSHAMVFLIARVLGIGIETADMLVSEVLSRRWRDRKAIARYAGLTGSPDESGKRRRERGLARAGSARIRCGMIQFAWRFLRFQKDSALAQWFAARTADRRASTRKTMIVALARKLLIALWHLATRGEVPQGVILRPAS

SEQ ID NO: 45693 - protein, 433 aa, unidentified
MESRPEPKSKPEPESSSIVAWIGLDWADQEHHVCVQAVGSTQVEHQVVAQRPEELQDWVRQLRARFAQGRIAIALEQSRGALIYALMSYDFLLLYPVPGKTLADYRKAFFGSGAKGDPSDAELVLELLRCHRERLRVWAPDDVPTRHLGLLNEQRRKLVDDRTALTNRLGSLLKESFPQALDWAGELGRPAACEFLAKWPSLAAVQQARPATLRHFYRRHFRPKPEELERRLAEIGQAQALTSDPAVLESHALIVPLLAAQLQALLSSLGLVEAAIAKSFSQHPDYALWEILPGAGDALAPRLLVAFGSDRKRYQNAGELQMFSGIAPVTVSSGKSRWVHWRWACPKFLRQTFHEFAAQSIPRSIWARAYYCQQLARGKHHHAAVRALAFKWIRILYRCWQNHTPYNEQQYLQALARRGSPLLAYFQTPEVTA

SEQ ID NO: 45694 - protein, 414 aa, unidentified
MDGEINKSCGLDIHKRFVIATILSRSGEKQQQRFARDDDGILNLKNWVTSEKCDVVACESTSDFWVPIYESLIDHLPVIVGNARDMKAFTHKKTDKIDSEVIAQLALNKMVQPSRVFPKRHREFRSYVRLRLTLVRKRTDIKNEAHAILSSEMLHLGDVLTDIFGKNGRAILAGISSGKNVDQIIESLSPNVRKKAVQIREILDREISQSAAIRLQICLNLIKHLDDEIEVLEREIFSYAYSNHNHEMEILMSVPGIGEIGAATLLAEIEDFRDFSSGDKLASWLGLVPNVYQSADKYHNGRITKRGSKVARWILTQIAQAAARKKNSRLKEFFNRKKKTIGFAKAIIALARKIVTIIWHLITKDEMYEDETGYQKGEIQKRKIVETEIFSVDERITIISGIIAIMGKKEGEST

SEQ ID NO: 45695 - protein, 346 aa, unidentified
MLHAGLDLSRKRLDFHLLDREGATVEVGSVPPDADGLRGLTERLHRHGEPIRAAIESMNGARFVHDRLELAGWQVEIADAQKVKGLAPLACKTDRIDAGVLAELSRRELVPAIWLPDPSVRAERERARWRLHLVRHRSSLKQRVHAVLLAHGKPCPVSDLFGLRGRQLLARLQLPEPWQGTVAASLRLIDELDREIAACETELRRLGADHRYVPLLLTVPGIGWVLAYTIAAELGDIDRFPSPAKLAGYTGLCPRVYQSGESDRRGPLAKQGPRYLRWALVEAATHACTHPIYRHRYQQTKARIGKQRGTKVAQIDLARRLTEAIWHMLSRNQPFAPKGATDPLAA

SEQ ID NO: 45696 - protein, 426 aa, unidentified
MKSNTQNAKITAITEKTLVVGIDVGSETHYARAFSWRGFEFTRKPLEFSNSEEGFEALKAWIEDLKKKRGLDKVIPGMEPTGHYWFNLGKFLQDNGMRPVHVNPHHVKKSKEMDDNDPSKNDRKDPKVIAGLVNEGRYFYPYIPDGIYAEIRVLSGLRVQSQSEITRLKNRIARWFSIYFPNYKDVYGNVGAISGLMILRVAPLPEDIVKLGADGVNQIWRDAKLRGVGIKRARTLVEAAEHSVGSRDAQEAARIELQILLSDYDRQTKREAELMALINEKIREVPYIDKLLEIRGVGLKTVIGFVAEVGDIKRFDDPKQIQKLSGYAIVKNQSGKHKGESHISYRGRKRLRYVLYEAAVSVVSHSPEFRSIHQYYTTRDKNPLKKMQSMIAVACKLIRIFYVILKNGTRYDAAKMMGDIRRPEAA

SEQ ID NO: 45697 - protein, 353 aa, unidentified
MSEDKYIAFDVHQATTVVSVVNAAGREVNTAILPTQAQALLGFMEGLRGRLHLTLEEGTYAAWWYDLLQGRVGELVVCDPRRNALLKEGSKTDRNDARKLADLLRTGMLGAVYHGERSLRNLQELAHCYQALVQDTTRVMNRIKAFYRSNGIDCAGRGVYSRKQRESWLVRLPAGASRVRGELLHDQLEQLRSLRRRARHELLAESRRYTVAARLRGVPGFGPVRVALLIAGMQTPCRFRTRSKLWSYAGLGLVQKGSSEYRLVEGRAVRRPGALQLRGLNRNRRAGLKEIFKSAALAAIRQPGPFKDYYQSRLQRGVDPAILRVSVARKLAALVLSLWKKGGRYRAEGMKQA

SEQ ID NO: 45698 - protein, 355 aa, unidentified
MDSAKYIGLDVHKESISIAVLNAAGKLVMECVIETKASTILQFVRGMHGELHVTFEEGTSAAWLYDLIQPHVTEVVVCDPRQNALLNAGNKSDRIDARKLAELLRGNQLKSVYHGEHGVRTVKELVRSYLTISKDVARVMTRVKALYRSWAIPCTGKQVYAPGHRAEWLAKITVAGVHRRAEFYFQQLDALRSLRQQVRRELLSESQKYPAWKLLCQIPSMGPIRAAVLIGIVQTPHRFRTKRQLWAFSGFGIETHSSGDYRLVEGQLRRTNRPVSIRGLNTNHNHDLKNLFKAAAIVAAHKPGPFQEFYTALLAKGIRPEMARLTLARKIAAITLHIWKKGARFDAQYLKPQAA

SEQ ID NO: 45699 - protein, 406 aa, unidentified
MDIEDIAVFIGIDVGKSEHWATALSRDGQKVLDRALPNDEERLRAVYKKLADHGSLLVVVDQPATIGALAVAVAQDMGITVGYLPGLSMRRIADLTPGSAKTDAKDAAVIAGAARTMPHTLRAVTTSDEEAAALSMLTGFDLDLARQVNQSANRIRGLYTQIHPALEAVVGPWLEHDAVLEVILEVIAAWPTPADLKRAGKARIDARLKKHGCRRHATWAGQIVSALEHQTVVVAGTDAAATVLPHLASQLISLHAQRADVAAQVEALVQAHPLYQVLTSMPGIGVRTAAVFLAETLGKTFDTGAQLASYAGLAPDTRRSGSSIRGEHVSHGGNKRLKRAMFLSAFASLRSDPVSRAYYQRKRDQGKRHNQAVLALAHRRILTLHAMIRDGALYDPQPATKLPAAA

SEQ ID NO: 45700 - protein, 399 aa, unidentified
MIAVGIDVSKSKSTVAILNGDGSIRAKPFDVHHVADELQALVDYIKRTSEPPTILMEPTSHYHYPLLKAFTEAELPVCLINPYQMKKYGDTELRKAKTDKRDSLRIAQYALEKSYSLIPYTPQDQKYEDLRFLSRQYSQRISTLTVAKVQLLSLLDETMPGITTILPLKSRDPDNCVLLRFIKRFKSFDVIRKMGKTRFLDSYQVLVKKTKDRFAGSKGLAIYELVLNSVTTRGENPLSAMTQDQCVDLVSTSQKAADEINLQMRIIAETMPEYKVLRSMAGVGDRLGPIILGEIGDIRRFHSGKALNAYAGNDAPPYQSGQFESRNRHISKRGNPALRKACFEVMQALKLTKPQDDPVYLFLLKKEQEGNPYNVAKMAGVDKFLRIYYARAMETLKQQ

SEQ ID NO: 45701 - protein, 359 aa, unidentified
MGSIAFDPADVIVGVDTHKDQHVAVALDGLGRRLGERFVSAAPAGYADLLAWAAGLGRVAAFGVEGTGSYGLGLARFLRRHAVMVLEVARPPRKGQRRLQGKSDPVDAEHAAREVLAGTSVVTPKTGEGAVEAIRLLKVARDTAVVAHSQAMITLKATLVTASDTLRAELEPRTDFALVTACAALEVSGDLADPEVAMRHALRALACRWLALHEEIKAHSRHLKRLTSRTAPALVATFGIGFDCAAELLCAAGDNAGRIRSEAAYAKLCGACPIPASSGKTSRHRLNRGGNRQANAALFRIVVVRMRWHPATIAYVHRRTAEGLSKREVIRCLKRYVAREVYRLLPVPATASAEPLQAA

SEQ ID NO: 45702 - protein, 354 aa, unidentified
MIIIGADYHPGFQQIAFVDTETGELQERRLQHREEAEKFYRDLAAQGMGVRVGMEASGHARWFERLLSELQFELWIGDAAEIRTKRVRKQKTDRQDAQLILRLLLEDRFRQIWVPSWENRDLRQLLWHRHRMVQARTRIMNQLQAVALNEGLRRKKGLWREAGRKQLESFPLAPWASRRRRDLLELLDRMNPTIAELTQAIEQEVEKCPEAQRLRTHPGVGPLTALAYVLIVGRADRFQCGKQIASYLGLVPAEESSGERRRLGHITKQGNSLLRFLLVEAAQVTVRSDPEWRSKYFHLAMRRGRKIAKVAMARRLAVRMYWMWRKKWDYEQLTKFGSHAGQPGNRDGVQLNTE

SEQ ID NO: 45703 - protein, 321 aa, unidentified
MQKDLLYCAIDVSKDKLDLDAAALALPAQLGNDHAGFRQLIKAAKKYPGAVQFVFEATGPYHLGLALALWEAQIPLSILNPARVRHFAKAQGKAKTDPLDTQVIGDFARSFRPQPTPAPDPVRRELTELLQRRDGLISSRAAEQNRLSQCRHKIIKGQIGRMMAQLAEQIDQIDGLMKKLVNSSEELKAKVKALCQVKGVGHLTAVTLLITLPELGTLGRNRIVRLVGLAPLNDDSGTQKNKRYIQGGRARPRCALYMPALSASRHNPVLKEVYERLLKAGKLKKVALTALMRKLLICLNALLRKLADQHPSPQGLCLAKP

SEQ ID NO: 45704 - protein, 411 aa, unidentified
MLSVGIDVSKGESMVCALNQFGKVVLTPRRYKHVKSALGSLVERLRSFGDNDIRIIMEATGIYSLPVAKYFKEQGFFVAVINPYAMSRFRIGGQGSLRNVKTDKADSMTIAGYGRQCWDTLMEYNPAAETYWKLDYLLRLYQKILAYRVSILQELYGIIEQTMPGIKEIGIKSPQVSTAKDILLDFAKTFWHYDQITGMSEKKFISRYLVWAKKKGHRPDVGKAAAIYAMAKDGIPCLPADPIVKQSIHTNVETLERVGTTLRDILSQMSGLAKTLPEYDIVRAMGGVGDVLVVKLIAVIGDIKRFRKAKSLVAYVGIDPPPYSSGKFEGNKRRISKRGSTLLRKIGYEIMKSLTRNKRPEDGAVYDFIRKKEEEGKAKKQAKIAGLNKFLQIFYDRVKSIYKKTTEGKAA

SEQ ID NO: 45705 - protein, 406 aa, unidentified
MLLDHPVEPSAIRTQFGAIFVALELSRTKWLVTSLSPGNGEKMSKRCLEAGDMAGLMCLFFDLKRKAAVRAGKSYPIIVIQEAGLDGFWIHRVLQEQGIESHVVDAASIAVPRRKRQAKTDKIDGEKLLRVLLAYKRGEPRVCSMVVPPSPEEEDARRLYREREVLIAERIAHVNRIKGLLFSQGIGDYEPMLCKRRVRLEELRTGDGRALPLRLKAQISRELDRLELLLEQIKAVETERDGLLAAARQDGLGGKPHPVAMMFELRGIGPDFATGVWLEGLCRHFDNRRQVGAYAGLAGTPWQSGSIAREQGISKAGNPRLRTLMIQLAWLWLRHQPQSALARWFHAQGLRGQKKWRKVAIVALARKLLVALWKYVTHGVVIEGAVMKRAPAKGTASTRAVMAAAA

SEQ ID NO: 45706 - protein, 327 aa, unidentified
MRQHKSLTEKVKTTVAFDVCKAVLDVHIRVDGKAFQVPNTDEGFDRIAVVLADYDVSLVLMESTGGYEDASACYFQSVGYDVAVINPRHARNFAIAMGQAAKTDRLDAAILADFAAVIDSRPDRARFVKPPTDEERKFLSQMVARRRQVVDLQSTEKQRLSHADDYAKQSINKTISFLESQLKEINQDISVYVKKNYADLSKMLSKIPGIGELSVGLLIGDVPELGKVDNRQLSAVIGVAPFNHDSGKRRGKRCISGGRQNVRNVLYMGIMSATRYNPVIKAFFDRLIAKGKSKKLAYIACVHKLLRIINAMVRDGTSFNPELHTVI

SEQ ID NO: 45707 - protein, 409 aa, unidentified
MDVLHERCAGLDVHKDTVVACLRRTEGAGEVRREVRTFSTTTRGLLELSDWLTEHGCTHVAMEATGVYWKPVWHVLEGSFELVLANAAHIRNVPGRKTDINDATWIADLLAHGLIRGSFVPPAAIQHVRELTRTRKQLVREVAQHTQRIQKTLEDANVKLTGTISDVLGLTGRAILDALVGGETDPEKLADLAHRGIKAPRAKLVEVLRGRVTAHHRFLLKLHLGQVDALRAAIAEVDEQLGKALGEATAMAKLLTTMPGVGELVAQVIVGEIGTDMRRFPSAAHLVSWAGLCPRSDESAGKRRNTRIRHGAPWLKTTLVQAAWSAAAKKNSYHRAQFQRLKARRGPKKAIIAVAASMLTAAYHMLRDGTAFEDLGADHFDRQDRDQTAKRLTRKLEQLGYVVDVRPAA

SEQ ID NO: 45708 - protein, 347 aa, unidentified
MNGDYAGRQVVGMDLHRRRSVLVRMSEDGRKLGTARISNSPAALRAELARAGKNPRVVLEATYGWYWAADTLAAAGAEVHLAHPLGVKAYGYQRVKTDARDAANLADLLRMGRLPEAWITPREIRDLRELTRYRQKLVGLRSSCKDQVHAVLAKLGLQVTCSDLFGAWGRSWMDGLALPQRYAGKVTSLRQLMGELNTEITMLSEVIADLLAGHAGYQVIQRLPGIGPVLAAVIIAEIGDVTRFRTAAQLASWAGLTPKHRESDTSVTRGHVTKQGSRLLRWALIEAIQRARAGSWPGDVRDAIIARRGRQARNIAKVAAARRLLTLVYYGLRDGQIRCLTEPALAG

SEQ ID NO: 45709 - protein, 407 aa, unidentified
MDLLKTVFGIDVSSRKSNVCIMVNGQKVNDYAISNDMVGFNRLLGDLKQVTKPQIIFEATGVYSRRLQAFLDMHELRYVMMNPLEAKRKTKDDLHQNKTDKLDALYLAKLQSEHPQRLAYVQNKEYQELMANNRIYEQASHDLITNRNRLHKAVQLTFPEIEHLMVNPRGKNYWSIVLRFPHPDIVLETKEADIIDFLKGLTGIGKKRANDIAQSLIRLAKVACPAVKKNSAHVRGLKMAINNILSAEEECQTALQEMAKLAPKRDLEILTSIPGIGENTALRIISELGDIRRFNNPSQLNAFVGVDPQVYESGNLTAHLSISKRGTAIGRKVLYLAINQIQSAKKAGKPCHIADYYEKRKRSSETASHKKAAIASIHKLLRTIFALIKNDQLYSYDVAKHNQRLLS

SEQ ID NO: 45710 - protein, 318 aa, unidentified
MAMRVEKIILGVDVSQEWLDCCRNGDEETTQIGNVRRDIDAWLKPYAGAPVALAVEATNTYHELVVERARHFGLTVYLISGYQLKRYAECLNVRMRTDPVDAQLLARFLDREIDALKPYEPPSPQHRLLWRLLKRRAMLVKQKQKLSQSFAGLPELRVSVRSLLRRIQDLIALIDRRMKKLARELGWNQDLARLRSLPGVGQLNALALCAAYRSRTFVHRDPFIAFLGLDVRTKDSGKHQGRRKLTKKGDPEYRRLLHNAAMTATRDKGYFHDEYQKLTARGLSKIAALVVVARKIARLAFGLMRRQETFDPMRHRQP

SEQ ID NO: 45711 - protein, 367 aa, unidentified
MKKVSTAVIKQSRNFSQQKLTIGLDLGDRSSCYCVLDETGRMVMEHKVCTTPKALQAAFGAMPRSRIALETGMHSPWISRLLSGLGHEAIVAHARNVRLIGESRRKDDRLDAQTLARLARIDPELLCPVKHRSAKAQADLTVIRARAGLVRARTALVNTARGRAKSYGERLCGCNVRNMNPEKAEGLSPELQAALEPLLMALESLSEQIREYNERIEKLAQESYPQVTLLKQIKGVGTLIALTFLLTLEDPHRFRKSRDVGCYLGLQPGRRNSGQSEPQMHISKEGDPYLRTLLVQGAQHILGPFGLDCDLRRWGLKLAERGGRNGKKRAIIATARKLAVLLHHLWVSGEGYEPLHNSGRMAMPAAA

SEQ ID NO: 45712 - protein, 370 aa, unidentified
MQKTLYVGLDVHKVNISVTTAQEGRDGEVRFIGAIPNTPTDVAKLAKRLANEDRRLEFCYEAGGCGYGIYRQLVDLGHGCTVAAPTLIARKPGDRIKTDRRDSQKLALQHRFGDLTAVWVPDPVHEAIRDLVRARMDAVMQLMRARQQCLAFLLRRGRSYGPGKKNWTLRHRRWLATQAFEQTTHQIVFQDYVEAVWAAQDRRDQLEARISAMLSDWSMAPLVEALRTVRGIDLISSVIFVAAVGDLGRFESPRQLMAYLGLVPSEQSSGSRIRRGGITRAGNSEARRMLVEAAWSYRYQPRVSSGKTDIVGRQPKPVRDIAWKAQVRLCSRYRKLAAAGKKPTVVITAIARELSGFVWAIGHAVRSGVP

SEQ ID NO: 45713 - protein, 317 aa, unidentified
MNTINNQNEINVGVDTGKTQLDIYIRPLDIYFTVENNQSGIKHAIQTLKKHPVTRVTIEATGRLEQPFIIACAEANIPFVIANPVNIKRFAGAIGQKAKTDKLDAQLIAHFGEAIKPPLSSLKPEQMRLMSDLLSRRRQLMDMQTMEKNRSQIMPKTLSSLIKPILTALKNQIEKVDFKLQKLVSECDEYKTKNAIIQSVPGVGNVVAFNLLSDMPELGYVNNKEAASLVGVAPFNRESGVYQGKRMIRGGRPKIRTAMYMAMMSAIQCNSKFKNLYQRMVKAGKPKKVAIIACIRKLVVIINSMVRDGVMWDPKMV

SEQ ID NO: 45714 - protein, 395 aa, unidentified
MFIVGIDVAKRSHEVCMITSDGRTVQRPFSIRNNCTGYNLMLEKIRKHTNIKSQIVFAMESTAHYWLALFTRLRKDGYHVILLNPIQTSAMRDMFIRKIKTDAKDSFIIAELIRFGRYAESNVAQDRLLALKELCRNRFYLVDMAGDLKRKLIALIDRVFPEYEAQFDTIFCKSSVALLKKYPTPQKLSNAHLDKLTELLWNSSNGHFGEWKARELRELARNSFGVEDCDGAYSTLILLMLDQIQSLSGKADALEKEISRLFQSFDTTVTTIPGVGPIIGAVILSEVGDISRFSSADKLAAYIGVDPSVNQSGEFQAAHAHMSKRGSPYLRRCIWMASQVAVQRDPMFRAYYEKKAAEGLKYMTIIGHVTRKMTAVIFAILRDHKVYEPVLPTAA

SEQ ID NO: 45715 - protein, 410 aa, unidentified
MDAIRECCAGLDVHNKTVVACILNGPLDHKPKKQIETFGTTTRELLRLQDWLVANQCVAVAMESTGVLWKPIWNVLESTCELVLANARMIKNVPGRKTDANDAQWIAGLHRCGLIQPSVVLPEHLRDLRDWTRYRVKIVQSITAEKNRIHKLLQDGNIKLSSYITDVFGVSGRLLLEQLMNGEVLEEENIRQLVKTKIKKKVPELMDALNGRVRLHHREMMRFHWDHLLYLEKQVEQLEVQIERQLAPYSEEMELLDSIPGIERNTAAAIFAEIGPQVHERFEGEERLTAWAGVSPGNKESAGKKSKTKCLQGNKYLKRALTQAAWANEKSTNRIGQHFRRIRKRRGDKKACVATAHLLVKIIYALMKNRSVYEEKDVQDSTSRERALSYYLKQIQGLGLTVQVTSPEAS

SEQ ID NO: 45716 - protein, 387 aa, unidentified
MQGHPPALRLRFQLRRGKRAGGTPETHIEGSSIRALSSESQKIKKKEEPMAMYCGIDLHSNNNYVAIQDGERRDIACRRLRNDLETVLSFLEPHRKELKTIAVESTFNWYWLVDGLMEAGYDVRLVNTTKASKYSDMKYTDDRHDARWIAHLLALGILPEGYIMPPKERGLRDLLRRRSFLVNKRSALYLSIKTIFTRSTGKRVSIQDIQHWDAETVPGFFDDPNVAESIIVMLPVVRVVTAQIKKIEKIVLKTEKLRDEFRLLRTAPGIGQILALTIMCETGDISRFAKVGNYGSYCRCVKSEHTSNYKKKGKGNRKNGNKYLSWAYSEAAHHATRFEPGAKRYFERKKSCSHQMVAARALANKMARACYYVLRDQVPFDPSRTFC

SEQ ID NO: 45717 - protein, 374 aa, unidentified
MGPSAGSRVVAWLETGTASPYQECPPRLHFDARRTFVFIIGIDPHKGSHTAAVIDGDEQLVGEVAVRADRRQRDRLLCWAGSFVPRVWAIEGATGVGALLAQQLVSVGETVLDVPPALSARARVLDSGRKDKTDAHDARSAAIVALRHPNLRPVALDDHRQVLRMLARRHHQLVAGRTRAICRLHAVLCEMIEGGLARNLSAKRAAEEIRKLRPIDAVGIERKQIASEFLAEVRRHDRALVELHARIVAAVNAADTNVTGVFGVGPIVAAYLIGYSGDIHRFPTAGHYARYNATAPIEASSGPKVRHRLNPNGNRRLNHAIHVAALGQISHDTPGRAYYLAKQAAGKSRKEAMRCLKRQISDAIYRQLRADLTT

SEQ ID NO: 45718 - protein, 409 aa, unidentified
MVCWPRLGEGETPRRRFDAKGESVAERDVTHDGAALSELCAWLIEVTGAQPAQIAVAIETPRGPIVETLLERGFVVYSINPKQLDRFRDRFTVAGAKDDSRDAHVLASSVRTDRRAFRLLTFDDPLIIELREWLRIEDELKQERIRLSNRVREQLWRYYPQANRLSDDVADDWFLDLWEQVPTPATAAQVNENTVAKILKTRRIRRFNAAEALAILRQQPLQVAPGTAKAATAHIRTMAVRLRLINEQIKQAERRLDELCAGIKASAPGQICEQRDVAILRSFPGLGRINIAALLAEACQPLRERDYQVLRVLSGSAPVSRRSGKSWIVLRRYACNNRLRNAIYHWARVAIQHDAVSKRRYDELRRRGHGRARALRGVGDRLLYVLCKLLQRQTPYDPEYKIQQMQLTA

SEQ ID NO: 45719 - protein, 380 aa, unidentified
MKKATRFVGLDVHADTIAVAVAEAGRDGEVRSLGIVPNRPEALRKLVQKLGGNKGVKACYEAGPTGYALYWQLEKLGIECEVIAPTLVPAKSGERVKTDRRDATKLARCYRAGELTAVWVPDPAHEALRDLVRARESAKKDQLRARHRLSKFLLRNGHRAPQDFGAWTQEHMKWLRALTFEHAARRATMTDYLAEVEHAAARIDRLEEAIHDAAKTASPSLSKVVAALQALRGVGKIVATTLAVEIGNFSRFPHPKQLMAYSGSTPSEYSSGKRRVQGAITKTGNAHVRRVLFEAAWSYRHRPSNGKALSQRQRGLPEQIKELAWKAQHRLHRRYAALVAKGKPLQKVITAIGRELLGFVWAIATRIEQEQSANPKALAA

SEQ ID NO: 45720 - protein, 344 aa, unidentified
MVYVGLDVHKEFCQAAVIDDSGRVLSNEKFSSTRKELDRFLARFKRAKFVLESTGIWEFIYEGIEKRGFEAQLAHPFKVRAIAEAKVKTDKVDAETLAQLLRADLIPRSWVPSKDVRDLRQLVRQRAYLVKQSTSLKNRIHAELLRRGVRRPENLKIPFSKKSIDWMRSLGIPTVSSCLNCLENIQAQIEEMNIQLLDEYNRRPDAQLIATIPGIGYYGALLVLAEIDDIRRFSHPEKLCAYAGLVPTVRQSAASVKYGSISKDGSSYLRWILTEAVHTHTRCVPGSRLSRFHAKVARRRGKQKAVTATARKLLLIIYWMLVRHEPYHSQGLDPGFPSARASAT

SEQ ID NO: 45721 - protein, 427 aa, unidentified
MNEVDAIRIEAFRQFKKEIRGSKEYLIVGIDVAKEKHHAFFGTATGKTLLRRLVFENDLDGFSKLLDRAEALRIQEGLSKVVFGLEPTGDYHKPLGEHLIKCAKFVVLASGVAVKRNRELLDGRWDKNDGKDAANVADLVVQGKCMFYEYPEGKVRDLRVLLSLKMHLKKQEHRLRVRIRNHLVAQYFPELDRAWGHSESESLAIVRWCLDPSVIAGLEPDEFIKRVTHRDRGARQRARLEGLWKSAVDSVGCQVPEAVSVECQVVVEGLKRLKEEIKEVSDEIELICHRFEEYPFLLSIPGFGPGVSAQVLGAIGDPHRFNNASEVLKMAGLDLSASRSGKTSETARPVISKRGKAHLRYMLYQAALIASIHNRDFINYYTQKLVGRQQEQGIKTKMRVKLAAKLLVIAWTLMKKKEPFDPGYLKN

SEQ ID NO: 45722 - protein, 358 aa, unidentified
MTTTAKTTAADTILAIDLGKYKSVACVYRAAADARFTTVPTSRQELGRLLDKYRPGIVLFEACLLAGWVRDLCAERGVPCLVANTTSEAWKFKHLKRKTDKDDALRLAEVYRLGKFPAVTLPEKDVREKRGLIETRQKLVGRRVALQNRIRSILVGQGLPAPCGHKAWTEVGLAGIAAHAAPIAACGPLDLWRGRLHLALAELGHIRDLLDQAERKLDELAKTNDGMKILDTIPGVGPRTAEAVVAFLPEPERFQTTKQVSAYGGFVPRQYQSTDTDHRGRITKRGPKTLRKLLVECAWVMLRYNSWARAIYQRLTHGGKTRKKQAIVALARKLLVRCWAMLRDGTVWRADPVAAAAP

SEQ ID NO: 45723 - protein, 408 aa, unidentified
MNTLYVGIDISSKSNIVYIMLPNGDKHSNFSVANSHEGSIQLVKRIYSALTSHSLDTVLIGLEATSVYGDNLVYFLREDATLAPFNSRIHVLNPKQVKRFQDAYNDLPKNDYVDSFVIADCLRFGRINKEVYSGDYRYQALRNLTRARFFTVQNLIKEKQRFMNILFKKYSTMTQEKVFSNTFSATALAVYEEFASAEALANMDLHELTDFIIEKGKNRFQNPDAVAKAIQKAARSSYRLPKTVNYSVNQVLSISITSMKALESQIKEFDKAIKAQTELLPNVLISIPGIGPVYSAGIMAEIGDINRFDNQAALAKYAGLAWKQYQSGGFEAEVTRLIPSGNRFLKYYLCEAAFSLVRCDKEYSDFYHLKYKEANRCQHKRALALTARKFVRLVFRLLKDNRLYCPAK

SEQ ID NO: 45724 - protein, 363 aa, unidentified
MTGRGLDWVLGLIRSKLAGLDVPVKVGIEAAGHYHRPLLGPSVWPAGWQVLELNPAHVAEQRRVQGRRRVKTDALDLEAITELVLAGRGLPVTAREAVIGELGAWAAHRTRRVQARTATKNQLLGQLDRAFPGLTLVLPDVLGTKVGKLIAAEFADPKRLATLGAGRFIRFAASRGLQVRRPLADGLVEVARDALTTVDAPVARQVLGADLALLTELSAQIEVAEAEIARLLPLSPFATLTTTPGWGVVRAGNYAGALGDPQRWPGPSQIYRAAGLSPTQYESAGKRRDGTISREGSVALRRALIDLGMGLWFNDAPGRAYADGLKARGKKGGVIACAMAHRATRIAYAMVRDEVVYDPARWA

SEQ ID NO: 45725 - protein, 358 aa, unidentified
MKHYIGCDAHKKYSVFAGIGEAGEIIPAQRVEHDREKYSSFLKGLPPASQIAVESVGNWYWLIDEMEKAGHIPTLVNAGKAKLMMGNINKTDKLDARGLAVLSLNGTLPTVWIPPGELRDQRELARMRIFLVHIRTGLKNRIHATFAKYAITFPEVSDLFGVRGRNLVEKRLVELPPETRHSMKEQLKLLDQLQRQITEVEKRIWEIVKVTPEMQLLMSLPGVGPILAILIAFEIGDVARFGDGAHLASYCGAVPRVKSSGGKTYYGKTRPDVNHYLKCAFTEAANAIVVNQHRMTGRHVVALYQRISRTKGHAKAIGALRRHLAEAAYAVLKSGQPYHEPVPSRKSLVAKEVCAGLA

SEQ ID NO: 45726 - protein, 458 aa, unidentified
MAGQRKRSQPAPDIPEGLPLLHRNAAGIDVGSREHYVAVPPGRDPRPVQRFGSFTADLHRMAHWLKACGIETVAMQATGVYWIGLFEVLQAHGFQVQVVNAQHTKTLPGRKTDVQECQWLQKLHTFGLLNNSFRPVEEIRVLRSYLRQRENLVVASSTCVQHMQKALTEMNLQLANVISDITGVTGLAILRAIVAGERNPEKLATLKHVQIRASREEIARSLEGTWRSELIFMVEQNLALYEVYLAKIQQCDEQIETHLKTMTSKVDPALQPMPPSRHGRKRRKHGPGFDLRQHLYRLTGVDLTEIDGFDVQIAQTVLSEVGTDMEPWKTEGHFASWLGLCPDNRTSGGKVLKRGTRKVINRAATALRIAAWNLIRSQSALGAKFRRLRARLGAPKAITAMAHHLARIVYRMLKFGQAYVDQGQQSYEAKYRLQQRKWLEKQAAALNLQLVPRQGFAP

SEQ ID NO: 45727 - protein, 394 aa, unidentified
MEPLCSLPDIGQNQRKKVFKKGEIMSIKRILVNQIDTNLEYEVIGIDLAKNCVSAILLTTDGEIFGIDRLDYQELEKSAQELSPTIFAMEPCTEMNYMVQKLEDWGHQCIVISGKNVKDYVESHFSNQKTDLNDAQALAFLTKDTQLRTVKAKDPEQLKYASLTTLREQYVKQYRQTMVSLKGICQVWGLNISKGISGKARLKDMIENHAEFPAELRTALVGMVAHAQAVQKDLKSVTKILEELAKKDKACQLIQTVPGLGTICSCRLRATVGDIKRFKHPKDFPAYYGLVPRSMATGHNEKKGKITHRGDKTMRSLMVQGAGIVINQATKGNLNSKQLTKWILKKQKEKMPWGKLVCAVAAKLLRIVRAILISGKPYNPKIAGVAKCSLPKAS

SEQ ID NO: 45728 - protein, 341 aa, unidentified
MTKYAAFDVSVNDSALCILDADGNVVEERKVASEADAVAEALRQHRAEIGLVGLEAGPMSQHLFDGLAKAGYPVVCCETRHTKAFLKARRNKTDRNDAKGIAQMMRTGLYQEVHVKTRASQEIRTQLGARKTLQRQMLDLQNSIRGLLKNFGLKVGSVSGDAFAAKVRQLIVTEPALQQAIEPLLEALAELRKQFKEQDRQVRRLAKKDEICRLFMTVQGVGELTALSFKAGVDQPQRFAKSKSVGAHFGLTPSRYESGEIAYDGRISKSGDGSVREHLYEAANAMLNNTKKWSWLKSWAMEIAKRRGMEKAKVALARRLAEVLHRMWCDGTTFQWQRAAA

SEQ ID NO: 45729 - protein, 391 aa, unidentified
MTDYVGIDVAKRQHKVSMMKENGDLMSKPFSVSNNREGFETLQERLAELEEPVDIGLEATGHYWLALFDYLTRAGYSVHVLNPLQVNAYQRSGIRKRKTDKIDATWIADFVRIGGAHPGPGPDAMPAYLQLRQLARFRMSLSDQVGDAKRRILGVLDRIFPEYESLFSSVFIISSRRLLAEAVTPQEYAEFDLDELAQLLKQSSRGRLGLSKAQEIQTAARRSIGVTFLADAARVQIGCLLAQMEFLQQQVAEVDAALEQLVQELPDQYLTTIPGIGPVNAAVILGEIGDVQRFASIEKLAAFAGIDPSVYESGQFKASQAHMSKRGSPHLRHALWLAAGIARQHDPDLRAYYEKRLAEGKPYGVVMGAICRRLLNRIYAVLREQRPYVVH

SEQ ID NO: 45730 - protein, 374 aa, unidentified
MYEFSKYVGLDTHKDTIAVAVSDACGGKPRYYGEIANTPEEITKLAKKLSPDGEVLSFCYEAGPCGYGIYRQISKMGHDCSVVAPSLIPRKPGDRVKTDRRDSESLSRFHRAGELTAVWVPDQEQEAIRDLTRAREDMKAMERQARQRLNAFLLRHGKVYESGKSKWTQAHFRWLERVKFEVPVQQIVFEEYIGAIKQSQQRVSDMEDEMHKVMDGWSLAPVVEALMALRGIKLITAMTVMAELGDITRFDSPPQLMAYLGLVPSEYSSGKSTRRGGITKTGNGHVRRVLTESAWCYRFQARKTAHLQRRAEKTSDEVQAIAWKAQKRLCGRYQHLLERGKLKVQVCTAIARELVGFIWAIACEVMGRQGVIAR

SEQ ID NO: 45731 - protein, 357 aa, unidentified
MTMLAEQVDGVIGVDTHRNTLAAAGVSPIGAIMETIDAPAHGRGYRRLLDFARQHVPGRRCWALEGVGSYGAGLAAFLEDAGERVVEVCRPKRPAIRGGRKTDMLDAVRAAREALSTEHVIQPRTRGEREALRVLLATRQGAVLASTAAINQLKALIVSAPDDLRAELRKLTRPAQITRCAGLRDRPAQTVEHRMTIRALHSTAQRIKNLQAEAKQLEGEILQLVRQEAPELLDLLGVGPITAAQVLVRWSHPGRFRSEAAFASFAGVAPIPASSGLTNKHRLNRSGDRQLNRAFHTITLIRMRLDPATKEYVARRVSEGKTSRDAQRCLKRVICRQLFKILEHRSHPIVEHRSQAA

SEQ ID NO: 45732 - protein, 351 aa, unidentified
MTMVGGLDVHRQQITFDYVDDDGLVHWGQIRPATRKTLRGWLAEHCPDGDGEFALEGCTGWRYVSEELAAAGLGVHLGDPAEIAVLRGPKKRAKTDRADAKLLRTLLLEGRFPESWIPPAHVAEIRSLGRLYYTLMDERRAWQQRIHAQLFHQGCPPIKALLSASGRDALARAPLSAAGRQYVDTALRRIDELSAEIEPLRTQLVNFARRQQGCQALQRHYGIGWLCAAIIWAEIGDTRRFTSSDQLVRFAGLDITVYSSDSKRSPGHLSRQGSPELRWAAFEAAKCAARRGSPDYAYYHRQAAKHEGHNGKNPTLAVERKILRRCYHTLRDLGDAALALPDTRPQQEVAA

SEQ ID NO: 45733 - protein, 342 aa, unidentified
MKITTVGVDLAKNVFQVHGIDELGEVVVCKALRRGQMKSFFTRLEPCLIGMEACATSHYWGRELCALGHRVKLMPPAYVKPYVKRGKTDAGDAAAICEAVTRPTMRFVAIKSPAQQSILALHRTRGLLVRQRTQLVNMIRAQLAEFGIVLAKGIQHAHRLAGQLVEGAELDIPPLAVKVIVTLAEQLRALQVRIEGLEKDLKICCRDHDAVKRLKTIPGIGAITASALDASITDPHQYKSGRQFAASLGLTPRANSSGGKERMGRISKMGDQYLRRLLVSGMTSQLQSARRNPNDHPWVIGLLRRKPPKLVAVAMANKAARIAWVVMTRGESYRTHHTETEA

SEQ ID NO: 45734 - protein, 344 aa, unidentified
MEQIIRIGIDTSKNVFQLHGVNAAEQPILRKKLSRREMVKFFEKAAPTTIALEACGGAHHWARLLGSFGHEVKLIAPQLAKPYVKRGKNDAADAEALCEAMSRPTMRFVPVKTADQQAALMLVGMRERLIRNRTQLANAIRGFATEFGIVASKGMCRIEPLLERIAGDQSLPELARELFAAHGHEYRDLLLEIQLVEEKLMDLHRTDECSMRLAEIPGVGPIGASLLMMKTPDPQMFKSGRDFAAWLGLTPRDHSTAGKVRLGVITRAGDEMLRSVLVVGATALLQHIRAGRSRHASRWLIELLQRKKPKLVAVALANKIARIAWKLMVSGEKYRRTEGPAQAA

SEQ ID NO: 45735 - protein, 351 aa, unidentified
MTTQTTAVPKVFIGMDVHKKSWTVHFKTDLFDNKTVTMPADPATLVNYVEKHFPYHEVSCCYEAGCCGYWIARALKQKEWEVKVVNPADVPRVNKQDWQKTDKLDSRNLCKHLSDGNLKGIYIPGEEQEQLRSLFRRRIHLVRHLRTIKNHIKSQLLYYGIKLPEQYDNPNWSRNMKDWLQSLAWKYKTGSAVMRSRLKQLEFLWYEELHISTELRGYCRKFYKKDYYLLKSIPGIGGITASGILAELGDIRRFNRLDELAAIVGLVPGIYQSSENKIDLGLTKRSNQQLRSLLVEATWVAVRNDMALQAYYRKHAHKEPNKAIIKAAHKLLSRIRAVIITGIPYQCGLVK

SEQ ID NO: 45736 - protein, 482 aa, unidentified
MKKSSIYPNRSQELATLFEKASNPSKLMCVPIDYAKKDHLVMFCNGNGEVLRKPFSVKNSVDGVKYLLGQVNRSCRHRHIQSDLVFFGGEDVNSYAENFAHTIRSKGWLVANVNAHDAKKQRENLQASTDRLDLMGIATMLLNRRANCFPAQSGVYRNLRTIVRHRRKLVKMKTEVRNRIHTLIDRLFPGFLNEKKSGILPFSNSSLYLMQERFSAPQIRRRQRSALIRNLEKRGTKKAEQVAAKLQEYASQVLTTPDEYTATLQVSLASHVTHYRCLYDGAQQLVNEMAQLLAQTQGAFLTSIKGIGIVLASGVAAEIGDPLVQRSTDQLASYAGIVPKVKQSGGSQGSSVTSHVSKRSNHILKDFVVQSAFHIGRYGPKDLKDDFSRREAAGQHADFGIARRFVRMAMCMMRTSQVYLPPDMRSTHIKPERRADYYLAMWSYLRNKWSKAGGLNVAFAMDKPLGQWRYIVQEVYGIKLKM

SEQ ID NO: 45737 - protein, 406 aa, unidentified
MDTLYPRCAGLDVHKDTVVACVRCVDKPQRHEVRTFGTTTSELIALREWLESNVCSHVAMEATGVYWKPVWHILEGSFELVLANAQHIRNVPGRKTDVNDAMWIADLLAHGLIRSSFVPPAPIQELRDITRSRKQLVREIAQHTLRIQKTLEDANIKVASVLSNIIGASGRSMLGAIIAGEDDPERLADLAVGTARRKMPALVEALRGHVTPHHRDMIKLHLGVITALQKALDALDLAAGKALAPIQKRAALLTTMPGVSDIVAQVIVAEIGVDMSRFPTAGNLISWAGLCPRNDESAGKRRSTRVRKSGTWLKTTLVTAAWAAVRKKESYLKTQFLRIKSRRGAKKAILAVAASMLTACYYMLRDGAPYHDLGPLHFDRRDRAKAIQRLLRRLGDLGCKVQMAAA

SEQ ID NO: 45738 - protein, 403 aa, unidentified
MNNVAGIDVSKGKSMVSVLRPFGEVVAKPFSIGHTGSELKELADYLKSLDGETRVVMEHTGRYYEPVARFLHDEGVFVSAVNPKLIKDYGNNTLRKVKTDKADSRKIARYGIDNWAELRQHTPMDTIRMQLKTLNRQQSLYTKTKTMMKNNLIALLDQTYPGVNALFDSPVREDGSQKWVDFATTFWHVDCVRNMSLTAFAERYRKWCKRHGYNFSQSKAVEVHAGAQDLIAMLPRDALTKTMVRQAIDALNAISASMERLKAEMQALAAQLPEYPVVMAMHGVGDSLGPQLMAELGDVTRFTHRNAITAFAGVDPGADQSGTHEAKSTRVSKSGSPELRRALFLVMDCLLKTQPHDDPVYRFMDKKRAEGKPYLVYMTAGANKFLRIYYGRVKEYLASLEGN

SEQ ID NO: 45739 - protein, 435 aa, unidentified
MIQAAIEKCAGIDVGKKWLAVCIMVGPLEAEPRTETRRFGTNVADLQALRDWFQAEGITHAVMESTGSYWKPVFNILEESLTVYLANPHQVKPRKGHKTDNKDGHWLAHLLRHAMIQPSFIPPRPIRELRDLTRRRKKLIGTATSEKNRIQKVLEDANVKLGNVLSDVFGVSGQLMLDALLEGKAGPREIAGMAKRRARKKIPDLVAALEQHRMSDHHRRIIRYSVEHMELLEKQIAQLDEDIVAQIRDIGLATQWELLQTIPGMQALSAATILTETGADMRQFGDERNISSWGGVCPGNNRSAGKSKSSHTNKGNPWLRSALTECAQGASKKKDCFLKDKFWRITTKHGGKRAPGVMAVAHNLLRFVFQILSTGNAYHEKAATPLEPQQRERMIRHHMRRLGKLGMAVGQRGAAAPRPRRRPAAKGAAARAVST

SEQ ID NO: 45740 - protein, 340 aa, unidentified
MSNIKVLGIDLAKDVFQLHGTDAKGKQVLSKRLNRQTLTECVAQLQPCLIGIEACMGAFYWARVFKKMGHGVKIMAPQFVKPYVMANKNDRNDARGIAEAVTRPDMKFVAVKSIEQQDVLLSHRVREQLMKQKLAQVNQIRGLLMEYGVVIPKGIKHMTTLTAVLENNEEKLTQKAIRIFKQMYEQFKNYEKQIALYDKEIEQDVAQNSVCTEIMKIGGIGPITASAIVATVGDAKEFKNGRQMAAWLGLVPKQHSSGNTIRLSVISKRGDGYVRKLLVHGARSIVNTCQKKTDKKSKWVADKKNRIGYNKASVALANKNARTIWAIMATGECYRAPIAA

SEQ ID NO: 45741 - protein, 314 aa, unidentified
MDKAYYVGIDVSKDRLDVHIRPDARAFAVTNNAAGVAELADLLAPLRTEKVILEASGGFEKRAFLALVEAGHAVAIVNPRQVRDFAKGAGRMAKTDTIDAAVLAHFAEVFQPRDTIPLSPLEAQVGEYVAYRRYLIRETIGIRNQLRCQANPSIRQALEMRLTAAKVECKALEGEMAALVRQSEKRPLFDLLTSVPGVGSLLACTLIASLRELGSLSRREIASLVGVAPMNNDSGRRRGHRFVTGGRGAIRTVLYMATLTASRFNGPIRIFYGRLREAGKPPKVALTACMRKLLTILNAMARDGRAWQHQLAAS

SEQ ID NO: 45742 - protein, 409 aa, unidentified
MLFVGDDWVEDHHDVEIVDDAGRRLAARRFPEGLFGLTGLHALIGEHLPEPGPGPDSEAQVKVAIETDRGPWVAALVAAGYEVFAINPMQVARYRQRHSTSGAKSDAADAHLLAEIVRLDREHHRPIAGDTPQAEAIKLVARAHQTMIWDRSRAVLRLRAALRDFFPAALEVFDDLDAPDVLELLARAPDPDRAARLSKAKITAALTRARRKNVEARARHTQQIFRAPQLRQPPAVQAAYAVIIANTVRLISQLNSQITELGEVVGEHFGRHRDAEVYLSQPGLGSILAARVLAEFGDDPHRFADSKARKNYAGTSPSTRASGTRRIVLARYARNRRLGDAVHQWAFCAMRGSPGAKAYYKTMRARGIGHQAALRQLANRLVGILHGCLKTGTLYNENTAWAHHITAAA

SEQ ID NO: 45743 - protein, 362 aa, unidentified
MNYVGVDIHKKYSVLCAVDERGRKLREARVEGNAPFGFAQFFSGLGGPSKAVVEACWNWGRIHDELEELEGIEEVVLAHPYKTRLIADAQIKTDRLDAYALSTLLRGNLVARAHVPRRETRVRKNLLRQRLYWARLRTMLRNRIHALLDRQRSLELPQCSDIFGVRGLSFLRRLELSETDAALLREQLALHDLIAQQMKAQEKRIGLEFGSEAMHQQLLSVPGIGPTVAAVIACEVDSIERFSSAEKLCAYAGVVPTTHSSGGKTSHGQLLPFCNKWLRWALIEASWVAIGCSPYFGALYKQHRARGKKANSAVLIVARRMCRIIWQLLHEKRDFEKRPLRPNFNFPGCSVVRLTAATAARP

SEQ ID NO: 45744 - protein, 430 aa, unidentified
MKSNTQNAKIEAITEKTLVLGIDVGSETHYARAFDYRGIEYSKKPFKFSNTEAGFVTFKEWILDLKERHEKDKVVPGMEPTGHYWFNLGKFLQDNEMKPVLVNPHHVKKSKELDDNNPTKNDRKDPKVIAGLVREGRYMIPYLPDGVYADLRTASNIRFQLQAELTRIQNRISRWFNIYFPEYKTVYGKPDAKSGMLILKAAPFPEDILTLGINGVNQIWRDAKLRAVGKARAKTLIEAAEHSVGSKEGAVSARMEIRMLLEDYESRSIRLQEVMTLIEGLVKQIPMAEKLLEIKGVGIRTVSGFLAEVGDISRFNNPKELQKLAGLALVENSSGKHKGETTISRRGRKRLRYLLFEVAMSLVAKNPEFRELHNYYTTRRLNPLKKMQSLMAIAAKLIRVFYVMLTKGVNYDPKKMVNDIKRPAVYLQTA

SEQ ID NO: 45745 - protein, 346 aa, unidentified
MDYVALDVHKHYSWARVENDQGQKIFECKLAHSRGTIRNFTNKWSPGTPVAVETVGNWYWVVDEIEAGQGLPQLVNARLAKLMIGSVNKSDKLDAKGMNRLQRAGTLPTVWIAPSAVRDARELPRTRMVLSKQRTQFKNRIHATLEKYGLKVEGVSDAFGKKGRQIIEELSWKLPPHTQQALQLMLDELDHVGANLKTIEEQMQQAFAPCAQTTYLQSEPGVGEMLAVVIWTEMGTIERFGRAEQLASYAGLVPRENSSGGKVRYGRVRKDVNLYLKWAFVEAANSAVLNRQRCQYRHVARLYENVKARRGHGKAIVAVARHLAEASFWMLKKGENYREPMSSTQG

SEQ ID NO: 45746 - protein, 428 aa, unidentified
MTKELMAGIDLHSNNLFCGIVDAQGKRVFEKKLPCALPQVLQALAPFKERLDTIAVESTYNWYWLVDGLQDAGHREVLANPAGMQPYRWLKHSDDKCEEFFVAEMLRLKILPTGHICERHLRSVRDLLRRRLMLVSKRTALILSLQSLHARTLGHGLSVGEVKVLSVQEVQRSFAHPAEKLISGLDVQLIEHLNKSIKQIEKMVLAMTKPLPCYQVLHSLPGVGKILALTITLETADVKRFASAGDYASYCRCVDTQRISNQKKKGENNGKCGNKYLAWAYVEAANFAKRYDLQCRQFHDRKSARTNKILATKALACKLAKAAWHMMSEQKAYDPARMFPTALAGRASAVPTVDLSHEDRSRRQACQHADKAPCRPAVFGPKAALGSLPSGALSSASAKRNSKGRSARQKDNLGTVTVNRGKGLAQKP

SEQ ID NO: 45747 - protein, 411 aa, unidentified
MELVHQRCAGLDVAKDEVVACVRVPDGHGGRDQEVRTFPTFTSGLEALAEWLAGEGVTQVVMEATGQYWKPIWYVLEERGFELLLVNARHVKILPGRKTDVCDAAWLAELLEHGLLRGSFVPPAPIRELRDLTRYRKRLIQAHAAEGQRVQKTLEDAGIKLDSVAADVLGVSGRAMLAALINGERDPQVLAELARGRLRAKLPQLRQALRGRFRGHHALLIRLALGHLEQLEGAIATLDHRVDEVIAPFAWARDRLDTVTGVGKRAAETIIAEIGTDMTVFPTAGHLASWAGRCPGNNRTGGKRRSGKPTKGNRWLGEVLIECAWAAARSRDTYLSAQYWRLARRIGKKKAALAVGHSILVIAWHLLTNDCDYADLGGDYFVRRDTDRQRQRAVAQLQALGYRVVLEPVAA

SEQ ID NO: 45748 - protein, 340 aa, unidentified
MGQATIIGIDLAKKVFQIHGATADGAVAFRKKVTRAKLLPFLSSQAPCLVAMEACGSSHHWGREIQAIGHDVRLIAPAYVKAFVKRQKNDMADAEAIAEAASRPTMRFVAVKSVAKQASAMVFKTRDLLVRQRTQTINALRGHLTEYGVIAPQGLPNLDRLVSEVRSPTSGLPAIVTELSELLLEHIVALDERIAGLDRQLREQVRTDETAKRLVTVPGIGPICAAAIVALAPAPGTFAKGRDFAAWLGLTPRQHSTGGKAKLGSVSRMGQRDLRRLLIIGAMSVVRWAARRGAPAGSWLARMMAKKPRMLVATALANKMARVAWALLAHGGIYEVPAAA

SEQ ID NO: 45749 - protein, 355 aa, unidentified
MVTTQAAPPQAQIIVVGVDTHKDTHHAAVLDLNGVVLGDAPFPATQAGYQGLLDWAGSHGVIDRIGIELTGSYGAGLARHLSAAGIQVLEVNTTDKATRARRGKDDRIDAIAAGQKVLAGMATATPKDTTGIVESIRMLTMVRDVAVRNRTQALNQIKDLRVTAPTALRERVAGLSLNALAKEATRFRPDTTRLAEPEQAAKLTLKRLGERVMALTVEIDAAKKDLKTLVTQTAPTLLSRPQIGIHSAAQFLISAAANIDRFPNEAAFARLCGAAPVPVSSGKTNRMRLHRGGDRQANKALHMIIVGRLKHHPETIAYLQRILAEGLSKNDIKRALKRFLARQVYNDLKTDLSRT

SEQ ID NO: 45750 - protein, 440 aa, unidentified
MQLLDRPPASEGGRLYLGVRGRLAEEYRRVALAERPSGREARSENSVSLFCRSAPRPNFLKLKRITGHKSLHLQAQLEIAQGRGARATAYSKGGVMDKMAACGIEVSAQELVVALTGKKGEAVLHRFANTAVGHGQLLRVLTRGGKRVRVCMEATGMYGLDVALLLSAQEGIEVMVANPRAVRHFAQAMMQRSKNDQLDAVVLWEFVARMPFTAWARPEKNTLALWALARRLEALTKQCTAEKNRQHAAGASQAIPECVRRSIARTLRFLQREIKQLRAEALRCIAAEARLQKRYDLLRSVPGIGEASAMHILAELLLLPGDRDVRQWVAYAGLDPREYSSGTSVRKYTRISKVGNRHLRNSLYMPALVASRREPHLRGFYQHLLAQGKKKKPALTAVARKLLHAIYGMFRSGRAYDGALSYALPASALFPTVAPVQSRT

SEQ ID NO: 45751 - protein, 354 aa, unidentified
MPIIGALDVHRKQITFKWLNTETGETNRGRIVPALRKTVREFFVPFKGLDAHFALEATTGWRFIAEEISRAGLRAHLAEPADTAALRGSKRRAKTDRRDCDHMMDLLLTGRLPESWLPPEHVVEMRTLVRLRKGLVDERREWQQRMHAQPFHLGLPSIRFMTTEGRGELAAADLSAAGRRVATIGLEVMEQLDQQLLPLDAYLVRFAKLQPGCRALKQRLFGVGTITAVFIWAELGDCVRFSSSDDAVRYSGLDITVYESADKRPPGHLSYQGPEALRWALYESAQSACRRSSPDRVYYEQVKARLNHKRACLSVARKICRRAHHILRSLGDNAFAPVDASVLPSFERPASKTA

SEQ ID NO: 45752 - protein, 362 aa, unidentified
MKKDSTGKQVKGSKRVVTVAVGIDIGDKDCQACGRDAAGRITFERKVRTTRAGLASALGKLKACRVVLEAGSQTRWIAEAIIKMGHRVKVVDPRRMRRIYESDSKSDVRDARELSEAALDRWERLPEVKLRSRESQRKLSVLRTRDALVRSRTALVNVVRSLLKQYGIKVSKCTTEAFPKKAAALVPEELSVAASPLLRQISELGLQIKGLDKWIESQAAGDANIRVLRQIQGVGPVTAAAFVWTLDDPERFKRSRSVGAYLGLRPKRDQSGEVDKQLPITKAGDRYVRALLVSCAHYILSKKGPDTALKRFGLRLAERGGKVAKKKAAVATARKLAVLLHHLWVAGEIYEAFPDTCKRRAA

SEQ ID NO: 45753 - protein, 376 aa, unidentified
MTTTRTLPGSVREPLLSVAFEVGGKSWKLGMTSGFGTRPWVTSVVAGDWAAVRRVLVRAKARFGLSATAPVVSCYEAGRDGFWIHRALIGEGIGNRVVDSASIEVNRRARRAKTDRLDARKLVLMLVRVLLGEEGVWREVHVPSTADEAARHRSRERTQLVQDRTRLINQMRSWLATWGARLPARRGAGWWTAVRDWAGVPLPGEVQARLARAEARLAVIATQLTALAGAQAATAKCAPAASAQGRLVRLKGIAATGASVLLEEGLVWRGFRNRREVGGMLGFGPLPYQSGEQARDQGIDRAGNRRWRAISIQLAWNWVQWQPTSVLAQWYRRRFGGGGARLRRVGIVAVARKLLIALWRYATTGQVPAGAILKTA

SEQ ID NO: 45754 - protein, 393 aa, unidentified
MTKSVCLFIADSGAIGSPVERRKGHMESRAFVGLDVHRENISISIAEEGRDGAVRFIGVIPNSAEAVAKMAKRLSRHGELDFCYEAGGLGYGIYRQLTTLGHKCTVAATCMIPRKPGERIKTDRRDSQKLAVLHRSGDLTAVWVPDASHEAIRDLIRARVDASMQLMRARQQLCAFLLRHGRTYTAGKCWTKRHRSWLAGQTFELHAHQIVFQDYVEAVWTAQERRDALIEKITEMTASWSLGPLVEALRGLRGIDLLSAATFVATTGDLSRFESPRLLMGYLGLVPSEHSSGSHIRRGGITKAGNREARRMLIEAAWSYRYPARVAKEKAEIVVRLPKRVRDIAWKAQTRLCTRYRTMIAKGKKPTVVVAALARELAGFVWAIGQEVKPTMA

SEQ ID NO: 45755 - protein, 348 aa, unidentified
MNHFIGLDGHKNSCTFVVLNEKGKIKRKAVLPTDQKQLLQFIKSIPGRRHLCIEEGTQSQWFYEIFSDHVHDLAIVQGRKSPGNKDDERDARNLAERFRTRDLGNRIYKVPESLATLKELVRGYEMLNKDLTRVKNRIKHLYRSRGIAYAKDGCPFCTGRGPCQKPGFHQTLHLLRTQQERLVPLKAEAQKAMVAEAKRHPITRIIQTAPGFGEVRTAELLSIVIDPCRFRTSRQFWCYCGLAIVNRSSANWIQKPNGELDRVKSNQSRGLNHNFNRMAKAIFKGAAVTVLTSMPTEPLRKDYERLVANGTKPNLARLTLARKIAATVLAMWKNQEAYDPGKYRLTSI

SEQ ID NO: 45756 - protein, 329 aa, unidentified
MSVHQQGRETVAASRPCAGIDVSKAHLDAAWGERFERVSNDAGQWDALVAKFKADEVDVVVLEASGGYESAAACALQAAGLAVVVVNPRQARDFAKSLGRLEKTDRIDAHILRDFAEVIARHAQRERYIRVLPDAQRAHLAALVMRRRQLLDMRTEETNRLHTAHQAARKSVQAIVKAIDKQLAAVNDDIDRHMQQHYKDLRTWLESASGVAQVTSSTMIALLGELGHLPRRSIAKLVGVAPLARDSGPRRGSRVIWGGRSEVRNVVYMATVSATKHNPVIRAFYERLIAKGKPPKVALVACMRKLLTILNAMARDHTVWDPAKHIKPA

SEQ ID NO: 45757 - protein, 407 aa, unidentified
MRLYVGDDWAEDHHDVEVMNEAGKVLAKKRLPEGAAGMSQLHGLIGRHVPEDADDAEVVIGIETDRGPWVAALIAAGYTVYPANPLLASRYRERHAVSGAKSDGGDAHMLADMVRTDSHQLRPAAGDSPEAEGIKVVARTHKTMIWDRTRTVQRLRHQLREYFPAALEAFDDLDAPDALELLAKAPDPARAAKLTRAQVAAALKRARRRNIADKTGAILAALRGEHLGQPAALTAAYAATARSLIAVITTLNAQVKILEEQVRDHFGRHPDAEIYQSQPGLAAILGARVLGEFGDDPRRYVSAKARKNYGGTSPITRASGKKKVVAARFIHNDRLVDALMSWAFASLNASPGARAFYDEQRAKGHDHNDALRRLANRLVGILHGCLKTRTPYDEATAWSHRESSLAA

SEQ ID NO: 45758 - protein, 420 aa, unidentified
MTFHAGLDWGGASHSICVVDSSGQIVARCEVRHDAAGLRALLASLRKIAPAADLPIAIERPTGLLVDTLVGAGHPIVPIHPNVVKACRPRYRAAGGKSDPGDAYMLADILRTDGHRFRPLSPVSDDIRALRVLVRGRDDLVAQRIVLANQLRSLLDSFWPGAAAIFAAIDSPIALAFVGRYPTPDSASRLGEKRLASFLAQHSYCGRRSPAQLLDRLHAAPGGHAQDAEADANGELVRALAALLEQLVTQIAKLSARIEHAVAELPDGQIVMSFPRTGRICAAQILAELGNVRQRYLSDDHLAAEAGVCPVTHASGKSRGVVFRWAEPAYKVPAMRSIVGRPAEGCNHRLRQAITCFADNSRHASPWAADIYARAKARGCTHQHATRILARAWVRVLWRAWQNHAKYNPDIHQAALKLAA

SEQ ID NO: 45759 - protein, 325 aa, unidentified
MVLGIDVSKASFDVVLLTDEQSKGLHKIFPNTPRGCEELRDWLAKQGAEQLHACLESTGSYGVPLAEYLVAEGYTVSVVNPRRIKHYAKSRLSRNKTDKQDAFVIARFCLKEQPEPWVPLAPETKQLQALVRRLEDLKDLKQQEENRLEASLDGAVKDSLESMIAYLDEQIAAVGATINHHIGQHPALKRDTELLESIPGIGSITAHKLLAEIAFAHFASARELAAFVGLTPRQNQSGTSLKGKGRLSKVGSSDLRKALYFPAVNARRFNPLVRSFCKNLLDKGKPMMVVVCAAMRKLLHLAFGVIKSGRPFDAQQLNHTPSLAP

SEQ ID NO: 45760 - protein, 486 aa, unidentified
MNESVSEQPLSPKVAAFVGIDWADQKHDVVLRSAGDPAKAEHQVIKSEINALNDWIAQIQERFGTKGKVLVCLEQSRGALIYQLMAYELFELYPINPSQLANYRKTFFSSGAKDDRPDADLLSELVMCHRDRLKAWKPDDQLTRELASLNEGRRNAVNRRTELANEIKSQLKLYFPVALQILENDITTALAADLLVQWQTLAELQKVSPGKLRKFFYGHNSRQEKKILERLALIKEAKPLTTDVAIIRPNALRVKLLAQQLKSLLPFIAEYERRIAELFGSHPDRFLFDNLPGAGPALAPRLLTAFGTDRDRFEVAGDLLNLSGIGPVRIASGKKTGKSASVHCRRACPKFLRQSFHEFGECSIRYCPWAQACYQAQRGRGKGHHAAVRAVTFKWIRILFACWKQRTPYDPQRKLSKLAVQTTPKLPPDTPPETVNKRVNKIVKNVDGPTQMSRRRARPRFIGLLRREKSRSSWQLFCSVSVSVRC

SEQ ID NO: 45761 - protein, 399 aa, unidentified
MFYSVGIDVSMGKSTIAIISTDGEVISEPFEIEHTKSGFNLVLEKIKDIPKDNVKFVMESTGNYCKSLLKIITDNGYFATVENPLTIKKYCDINIRKVKTDKKDALKIACYGSERWHKLIRYTPSDEIYSELRFLSRQYDEQMSLKVMKKIHLSGLIEVTFPGLKKIFNGDSLYMLMLDIYKKYYHPSLVLSKSKSSFIKDVEKISKKTGHRIGTRVAEEMYSLANECIPSSPCNESTQLAVSNCVLLLQNLEEITINIIAKMDELARRLPEFETVSNMSGVGNKIRARLIAEIGDVRRFKNSNCLIAYAGIDVPPFQSGQFVATNRRITKRGNKHLRKVGYEAMKSLKTVKPTRDNAVYLFILKKEDEGKGSITAKIAGLNKFLRIYYARVMEVYNNL

SEQ ID NO: 45762 - protein, 343 aa, unidentified
MDHFAGLDVSVKETSVCIVDDTGKIVREVRVASEPEDLLQILSNPAYHFKRIGLEAGPLSQWLFSALADAGLPVICVETRHMRAVLQAQINKTDRNDARGMAQMMRAGLYRPVHVKTLRSQKLRMLLTHRKLLQSKAIAIDNDLRGTLRNFGLKVGVVGKVRFEARIRELVANYPDIAALVEPLLIVRRTLREQFCVLHRRLLAIVRDDEVCRRLMTTPGVGPVVSLTYRATVDVPARFRKSKSVGAVFGLTCAKYQSGEVEWSGRISRCGDEMMRVMLYEAAQSILHSKRWSWLKAWAMQIARRRGMKKAIVALARRLAVIMHRIWVDGTEFRWTREQAVAA

SEQ ID NO: 45763 - protein, 404 aa, unidentified
MFYLGIDVALNTHRLVMLDDHGERVSSGISFQNNTADFEKVLAKLKELSINPDNSIAGLEATGNNWENLYCFLTGNKFKTTLLNPHQTNKFREALRKKAKTDDIDAFVIVGLLRSNEFVSSYVPEDKIQTLRELTKLRYEFIKDHKNYQRQVLSLLTIIFPEYRKTALRNPFTIASTAIFKAFSTAKHLALAKPKHIEKIVRSIKGNNFNVKEIESLISTAKTSVYSGRCQESRALTLNILLTQVESFDNSIQQLDEQINQIFSPSSNDNTFPGSNLLTIPGIGPKTLAAILSCTGESGQAFSTGVKLIGHIGFFPQIYESGETKKANRLSTKGPAYLRHALYMASVACLKHNLQLRNLYHTKISQGKEPKQALICVAKKLAHLCLSMLHSGQDYNPARVFSYV

SEQ ID NO: 45764 - protein, 461 aa, unidentified
MKSKSSRKPNPVDPVAEEIPDAEHELVIERVAAIDVAKASGTVCLRLAGKSGRRVSRVWDVQAVTGAVAGLADQLTEVGVQRVTVESTSDYWRIWYYLLEAAGLDVQLVNARDVKNVPGRPKTDKLDAVWLAKLTEKGLLRPSFVPPAPIRQLRDYTRLRVDLTRERTRYWQRLEKLLEDALIKISAVASTLDTLSTRDMIEALIAGERDPRRLADLARGKMKVKRSALISALDGRFDDHHGELARMLLDQIDTLTAQIATLTSRIEQLLAAMPDTRSPGDGGTGGDRERVSRPTDAALLTPVEQLDEITGIGEHNAQTILAEIGLDMTRFPTPEHLVSWAKLCPRTIQSGPVTRAGKTGRGNPYLKGALGEAAAAAARTDTFLGERYRRIVKRRGRLKALVAVARSILVIIWHLLADPAARFRDLGPDYHTNKAVIERRLRNHVAHLTAMGYRVTIEPAA

SEQ ID NO: 45765 - protein, 313 aa, unidentified
MQNIIVAGIDVSKSKADLCILPDGIVATFNLDDDGIASLIEALKASAVNLAVMEATGGYEAKLAAAIFHADIPVAVVNPRQVRSYARAIGQSAKTDRLDAEVIARFAQDIKPQPRALPDAKAAQIRELIDRRRQLMKARTAEGNRLQQASNAKVIASIKRTITHLEKELKAIDINIDKNIKDSPIWLEKAELLESVKGIGDATTRILIADLPELGKLSRYQIAALVGVAPMNRDSGKYKGYRKITGGRSHVRHALYMATLSAIRCNPKIKAFYKHLKTQGKKGKVAMVACMRKLLVTINAMVRDNQNWCSENA

SEQ ID NO: 45766 - protein, 395 aa, unidentified
MPVENETAAPADAESNTLYVAIEISGKSWVVGVKSPASEKIGLHSLEPADLEGLRVLLEHQRAKAERVLGRDVRVLCCYEAGYEGFWLERWLEREMSIVTVVLDPASLLVNRKAKQRKTDRIDAKKMVRALLAHDRGDAAVLSRVWVPSVEEEDRKRLIRERRRLVKERTSLTNSIKGLLKLHGVFDLDPRARAFQAQFANVKTGYGLPLPPRARQEILRLAERLALAERQIAEVEAERDRVARSGARVAIADAPEGSDAQAAGKIATLTRLKGIGENDATVLVHEIFYRGFRNRRELASWVGLTPTPWASGDVQRDQGIGGDGPAWIRAQLIQMAWRWLRHQPESPLSKWFDDRTAGAKGRIRKVMIVAVARKLLIALWRFSESGLVPSGARLA

SEQ ID NO: 45767 - protein, 313 aa, unidentified
MKRYIGIDVSKARLDVAVHDSAQCFSCDNTEAAVEALVKKMKELEPELIVMEATGGYERLCAAMLAAAGLALSVVNPRQVRDFAKSTGILAKTDRLDARVLAHFGATIKPEPRALPDAQQQLLDELMLRRRQIVAGLVAEKNRLGMARTDAVKKSLREAVAFYERLLADVDRQVGEHIERSPLWRAREDLLRSFKGVGPVSSRTLIGDLPELGTLDRKRIAALVGVAPLARDSGKRKGTRAIFGGRGQIRAALYMVAITAIRANDPIRQFYQRLRAAGKPAKVAIVACMRKILIILNAMVRTQSRWNEHLVIS

SEQ ID NO: 45768 - protein, 447 aa, unidentified
MQEPMMQRFLGLDVHKSVVEVCAIDEAGKTLFRRRIDCTREVLLKFAEELTAADVVALEVTTNAWAVADLLEPFVGRVVVSNPLKTKAIVEAKIKTDKVDAEVLAQLLRCDYLPSVWVPDPTTRVLRQLTSRRERLVSQRTRLKNRIQSVLAGLLVVVPVKTLFSQAGRQWLADCDLPAYERALVESDLRLIEAVDQEIDRLEQQLQQEAWNAPRVRLLMTIPGVDYGTALTLIAALGDLTRFEDGDRAASYLGLTPSVKQSAQTCHYGPITKRGNTQARWMLTQSAQNMARHPGPLGVFFRRLAKRKCWNVAVCATARKLVTIAWLMLKHNEPYRYASPATTQQKLSRLRVAVTGKHRQAEHKGRRPGVKNGAHPPSRLVPSLGRVCDQEGLPPAHGFEQLPAGEQRVLKSLGVIDYVQQISTDRRTPRQRKLRSVRVPREEAKKS

SEQ ID NO: 45769 - protein, 343 aa, unidentified
MQTVTTIGFDIAKSVFQVHGIDAAGQVVVRRQLKRRQVIAFFQKLPPCLVGIEACASSHYWSRELHALGHSVRLMPPAYVRPYVKRQKNDMADAEAICEAVTRANMRFVPTKTAEQQSGLMLHRTRHLFMRQQTSVINAIRAHLAEFGIVAPVGRRGVEELLRVVADPSDKRVPEVVRACLAALGSQLLRLKQQILDFDRMIMAWHRSNQTSKRLNCIPGVGPLLATALVASVADPKTFRSGRNFSAWIGLVPKQHSSGGREKLGSISKQGDRYLRSLFVTGALAVIRYAKIHGTKHRPWLTALLARRPTKVAAIALANKLARMAWAMMATGARYNYPASLRV

SEQ ID NO: 45770 - protein, 344 aa, unidentified
MEQLSRIGMDTSKHIFQLHGVDAAEKVVLRRKLRRKEVLQFFGTLGPTMVGIEASGGAHHWARKLTELGHTVRLIAPQYVKPYVKRGKNDAADAEAICEAMSRPTMRVVMVKSAESQAALMLAGLRDRLIRNRVQLANAIRGYAAEFGVIAAKGAARIEPLLLQLQADQAIPALARELFVEYAKEYAQLMSQIAAIDAKLMSWHRGNEVSRRLAQIPSVGPVIASLLAMKTPDPQAFRSGRQFAAWLGLTPKDHSTAGKNRLGAITRAGDETLRSLLVVGATAVIWQARRGKSRSVSPWLLALLKRKPPKLAAVALANKTARIAWKLMATGETYDARRTVAATA

SEQ ID NO: 45771 - protein, 328 aa, unidentified
MNSICLSTEQVILPVLGLDVAKKSIQAELRIAGKNVRFGFANNPKGFAQLARILDQHNAPKIWAGLEATGPYSHALALWLHARAHRVSVLNPRRVKQYARSAGNRNKTDRLDAAVVADFLCAHRPAAWRPPLQELVQLRALVRRREELSLMLQAEKNRLEGVASQVRCSLKRIIVTLSAEKARVEKLICQQIRSHKQLCRDHQLLCTIKGIGSLTAAILLAEMAGPGQVQRARQAAAHAGLVPRHEESGTSVRRNRGIGKEGNRYLRKALYMPALVAIKYNAPLRYFASRLRAAGKPKMKIVCAVMRKLIHIAFGILKHQQPFNPSLA

SEQ ID NO: 45772 - protein, 411 aa, unidentified
MIKENYMYVGIDLHKETHTAVIIDCYNQKLGEITFPNRPADFPKLVTKVKKCNTDGKEVVYGLENAYGYGRALAVWLIDKGYLVKDVNTAISHQRAKHRGAMCRKSDSDDAKAIALATLNMLDKLPDACPNDAYWSLGQLVHRRDNIMKQRTRLVNQLHEQLCIAYPSYKQFFNDISRPTALYFWEHYPSRKYLKGKSVEDLRAELVPVSHNKCSTKTCEKILDAVASDKVKNNAYQDARDMVTLSIVSDLQHYDSQLAEVDKMLEQMYKMLGCTLTTISGVNVITAVKILAEIGDIKRFSNANKLAQFAGIAPLHLSSSGKGKDVATKQGNRRLQATIYFLAIQMVQVSSKGTPRNPVVRAYYEKRKAEGKTSQQALICISRRLISIIYGMLKYGTEYRMPVVENAGEKL

SEQ ID NO: 45773 - protein, 322 aa, unidentified
MARVQGETTTEVAQHFAGIDVSKAYLDIRLTREKRSRRFSNDPAGFAALAAHLGPAPHLIVLEPTGRYHHAVWKALAAAGHGVAPVNPLHVRRFAESDGELSKTDALDAAVLARMAVERRPAAKAPPGEDQLRIKELTTSLADRIDRRAMLKAGRKEVRNPLIAKLDEAEIDLLSGAIGTLKAEIAGLIEADPARARCAEILVSIPGIGVSSAHRIIAEMPEIGTLDKKQAGALLGAAPRASESGKRKNRRRTKGGRRHLLAALHMPAIAAGRANPDLKAFRQRLKARGKPGPAITTAVLRKLIVLANALVQQNRLWAPKMG

SEQ ID NO: 45774 - protein, 396 aa, unidentified
MKNECSRVVIGMDPHKRSVTIEVMTADETVLGVGRYGTDSAGFAEMVRYVSQFPDRVWAIEGCCGIGHHVAVRLVAAGEEVVDVPPKLSARARVFATGQGRKTDATDAHSVALVGTRMAGLRPVVDDEQLAVLRLLVDRRRSLGEEHTRKTSQLHQLLLELIPGGAKRDLSAAQAKALLATVRPRDVVGKTRRRVAAELVADLERIYARKKAANKELIELVRATGTTLLDLHGVGPTGAARLLVEVGDITRFPDKAHFASWNGTAPIDASSGDQTRHRLSRKGNRQINRVLHTMARVQLRNPTEGRSYYDRKKADGKAPMEAMRCVKRRLSDIVFQTMLNDAVRTDNATSGAGPGGQRGDDSDSSAAGSQPHTNSSDKPLPGPARKHPRTPLPAAS

SEQ ID NO: 45775 - protein, 341 aa, unidentified
MYSIGLDVSKASLSIHVPLNSLDFEIKNTLKDLKSLYAKLKKLYKKDIDKLVFVYEPTGSYSSLLTKFCALKNIKSFIINPKQSSNFSKALGYRSKSDKIDAHMLSQAISIAKEREIKVPVINATAEDIKELMSYYMFTVKQRVAVNNHHEALSSKDGNTYALKDLKKRIKELKLKEAEILEKIKDIIQEDDEIAQGYSNIKTIVGIGEVAGIVLIHLFIKYPNANKNQIVSLTGLDPVIKDSGTSVKSRPRISKSGSKLYRAVLFMATMVSIKYNNEMKEFYDRLKENGKHSTVAQIAVMRKLIVIAHSLYKNNTQYDKELYNKACGKIKTIEAEKELVA

SEQ ID NO: 45776 - protein, 466 aa, unidentified
MKHNRRRSPGKPRVSPTVFDRLNPNVAGIDCGSAEHFVAVPPDRDPNPVQSFTTFTTDLLRLADWLTACRVTSVAMEATGVYWIPIYEILEARGFEVLLVNARHLKNVPGRKSDVSDCEWIRELHSVGLLRGSFRPTDPIVALRAYLRHRQTLIESAGTYIQRMQKALIQMNLQLPLVVSDITGVTGLRILRDIVAGQRDPQPLAEHRDHRCRASKAEIIAALTGNYRPEHLFVLQQNLALFDACQAQLATCDLAIEAHLQTLSAQVSTPAVPLPPPRVTKKPRDNEPRFEVRAPLHRLTNGVDLSQIDGLTPYTVLKLVAEIGTDPSRWPTEKHFTSWLTLAPKNKISGGRLLSSRTQPSANRAAAVLRMTAMSLGRTQTALGAFYRRLAARIGKPQAITATARKLAILVYRVLNGALVYRDPGADAYDGHQRTRVLRRLRQRAATLGFELVNRETGEILEPAIS

SEQ ID NO: 45777 - protein, 382 aa, unidentified
MDLIHSCCAGLDVHKKTVVACIRRTGPDGRVDRQVRTFGTMTADLLALADWLAAADVRQVAMESTGVYWKPVFHLLEDRFEVVLVNAHHIKQVPGRKTDVKDAEWIAQLLQYGLLRPSFIPPPPIRELRDLTRQRAQLVRDRAAVANRVQKVLEDANIKLASVASDPLGVSGRAMIRAMIAGEQDADKLAELARRRLRGKIPELKRALQGRVTAHHRFLLRMLLGQIEALEGLIAQFDDRIGVVMAPFVEAARRLEAIPGVGPQAAEVIVAEIGTDMTKFPTAGHLASWAGLCPGNDESAGKRRSGKTTKGSQWLRAVLVQVAWSASHTRETIFSAAYRKWAKRMGKKKALVALGHKILVVIYQLLKDQTQYQERAKPAQAA

SEQ ID NO: 45778 - protein, 349 aa, unidentified
MRKVYVGIDIGSKQCSAAAINSRGKLIEAETFRTSEMNLISFVKGKNGEVNVLIEEGELAGWVMRTLLPYASSVEVSDPKRNAWIAKAANKSDRVDAAKLAELLRLGSYSVIYHPEEEDIAAFKVVVKHYDEASKRMARVKCQIKAGLRSQGIMTSGTLIYGKTGREKALVQIEDPHVRRAIERDYDLLDYLARDKADARRQVSMMSKRFPVIERLMRMPGIGIILASRFVAIVGNPYRFNKRTIASFSRLGIVKRSSDGSPLGPEHIDKSGNGKMKDISRKAFESAIGTKRPNGIKDFYLRSLSRTKNETSARMNTQRKILAIMLAVWRDGTEYSDELVTGKRAFARA

SEQ ID NO: 45779 - protein, 345 aa, unidentified
MPIVGGLDIHRKQLTFDYLDTATGEVKRGQITPADRAHLRAWLVRFAGRDDVAFALEGCTGWRYVAEELAAAGVAAHVAEPADTAFARGRKRHAKTDRTDSRHLRELLAEGRLPECWIPPSRILECRALLETYHDLRAEHTAWVQRIHAVFFHQGAPALGEAALRTGRDLQAVRASAAAYLSPAGQLQVATALEMTGALEARLEVVRHELLDAARHLTGARVLAARLYGVGPVAALAMTCWLAGEGRFSSSRKAVRFAGLDITVYSSDSRRSPGRLSRQGPAVLRWAVYEAGKTHARASAPDHRYYAQVKARKDGKRAALSEARKILRQACHILAELGDDALTAA

SEQ ID NO: 45780 - protein, 346 aa, unidentified
MTIIRIGLDTSKHLLQIHGVDENETPVLRRQVRRLAVAEFFAKLAPARIGIEACGASHHWARVLRGLGHEVVLMPPQYIKPYVKRGKNDAIDAEAICEAMSRPTMRFVPIKTAEQQAALTMLGARNLLVKQRTMLINAMRGHAAEFGVTAPKGPQQIAELQRRLAADESVPALAREMLALLADQLEGLNAKLKTIEARLMAWHRQDQTSQCLATIPGIGPIGGVSFALKVPDPRAFRSARHFAAWIGVTPREASTAGKSRPGKISRQGDEDLRRLLVLGATAVIGAANPRVKPAGQGPTGRASAWLLELLARKPKKLAAVALANKMARIIWAMMVSGETYRRPKEA

SEQ ID NO: 45781 - protein, 321 aa, unidentified
MTYIGIDVSKATFVVAYSSAKNSKTRTFKNTAKGVHEFIQTISAGSHHCVLEATGNYSSLLVYLLSEAGITVSLENPLKIKHFSRAMLAVVKTDEIDAHLIALYGEKMQPAPYKLRSETILLLKQKRTVLRQLKKQLTANQNLKGSLEVLPKFDPKCKRTIEKTIEFLNKQIKSMEEELASLAQDEFKKQMSLLTSIKGIGVTLAAALIVATGGFTYFDNAKQLTRYLGLSPTYQQSGTSVNVKGNINRNGDPHLRSQLYIAAVSSIRCNTECQACFSRLRSNGKPGKVAIIAVANKLIRQAFAVVKQEKTYVDGFKSAKP

SEQ ID NO: 45782 - protein, 342 aa, unidentified
MDKIYDKCCGIDVHKKLIVACFRCGRKQEVRDFGATTRELLELADWLKEGGCEMVAMESTASYWKPLFNILESSDLNAMVVNAHHMKAVPGRKTDVKDAEWIADLLQHGLLRPSYIPDRDQRELRELVRYRKSLVGERTRELNRLQKMLEGANIKLSGTVSDINGKSARSILEYLLTGESIDEAKYDEMYEQKVIAHNLKATKEQIIDDLNGVMSPLQRRMMKELLKHLDELNIHIKNLDDEIDNFMKPEEKKASAAIQEVTGIGNTSAQAIISVIGSDMERFPTDSHISSWAGLCPGDNESAKKRKTGKTRKGNALLRTTLITCAHAAVKNRTIYRILQEG

SEQ ID NO: 45783 - protein, 401 aa, unidentified
MISVGIDVSKGKSMVCIMKPGGEVLKTPFEMLHTMDEVLSLATLIKSYDEEVKVILESTGYYHLPIVTVLIEKGIFVSTVNALRMQKFCSQNIRRAKTDRIDSINIAMFGICYWDELNSVMPPEDTYRELKLLARQYYQSTSMLIKAKINFGVLCDQIMPGVQNIIHEYRGTQKITGIVKRYLHFDNILKMSKNHFKTDYCKWAQKQGYRNCEQTAEKLYAAAQNGIPVLPNSLSTTIVITEAIRVLHEMEASRNTILTQMQALAKTLPEYQVVREMSCIGDVLAPKLIAEIGDIRKFRNKHSLIAYAGIDAPPYQSGSFNATERHISKRGNRYLRKTGFEVMQSLIQHKPADEPVFAFIEKKRSEGKCGKEAMIAGLNKFLRIYYGKITELYNSIDEELN

SEQ ID NO: 45784 - protein, 421 aa, unidentified
MIEAVLECCAGIDVGKKFVVVCVITGPGDGEAQEQTRKYETTNGELEKLRDWLKSCGCSHVVMESTGAYWKPIFNVLEEVEGMRVVLANSQQVKNLRGHKTDPNDSRWLAHLLRHGMIRPSYIPPRAIRELRDFARRRKQVVRAGVQERNRVQAVLEDANIKIGNVLSDVFGLSGQLMIEALVEGQATAKEVAELAQKQARKKIPQIQAALEGHRMSEAQRILIRFSMGHLAFLEDQITQLDEQIFSHIERCGFQRAHALLQTVPGIKKQAAAAILAEVGTDMGVFGTGSRCSSWAGVCPGNNESAGKRKRAPVLRGNPWLRTTLIECAWGASNKTGSAFRARYQRLAPRIGHKRAIVAVAHSMVLVFFDVLSRDQPYTGSGADAMPVTKVKRLIRHHSRRVATLRKWLNPASSGRAVRAT

SEQ ID NO: 45785 - protein, 416 aa, unidentified
MSHKIAGIDVHKRVLMVVVIDATAPAEKPERRRFATMPSDMWRLASWLRAQDVKEAVMESTAQYWRSVWLELEPYMLLHLAEAFSNRAPRGRKHDFRDAEGLVRRLIADELILSFVPNGEQRIWRNLTRSKTQLTRDRVRLQSQIECLLEEMRIKLSSLVSDLLGASGLRILHALAKGETDPRKLAALKDDRLRCTEEQLVDALTGSSQPLHGEMLALQLEHLELIDTQIEKLSSMIAEAMKPHREAVVRLAEVPGLGVDSAQQVISEVGAEAGTFASAAELTSWVGTCPGKDESAGENHNSRSAKGNKYLRRVLNQAAHAAVRKKGSHFQTVFRRLLPRLGYQSAIWAIAYRLCRVVWKILHEGVRFIEQGSEPDPAVRNRRAEDLARALRRLGYDVAITPIKPAIANGMQILGS

SEQ ID NO: 45786 - protein, 369 aa, unidentified
MADRITYVGLDVHKDSIVVAVAAGGLRGEVREYGRIANTSAALDRLLRKLGGDGMTLRFCYEAGPCGYGIQRRLSARGHECIVVAPSLIPKRAGDRVKTDRRDAASLAKLHRAGELTAVWVPDCRHEAMRDLVRARLDAVHSLRRARQQLAGFLLRQGCHYGRPAWTKLHRRWLAGLRFEQAIHHIVLEDYIAAVEAAEARRDRLTGQIEAMLPDWALAPVVAALQTMRGMALVNAATLTAELGDLSRFANPRQLMAYLGLVPSEHSSGASVKRGGITKAGNAAARRLLIEAAWSYRFPARLNRALLLRQESQPKLIRDIAWKGQLRLCARYRRLARTGKPANIVTTAIARELSGFVWAIARQVTVTTR

SEQ ID NO: 45787 - protein, 362 aa, unidentified
MSKKLWVGLDVGEREMVVCIVNAEGVRVREEVLPTSTSALDTLLRSMRRGNIAVVAMEAGSTSTRLARGLENLNYDVAVFETRQLSTYLGMRQNKTDRNDARGIAEVARTGRGTISEVLVKSSECQRVRSLLAMRQNFVRMRVSGEAGLRGLLQLYGGKLGHSATAKMLRRNVSAEIARVKKEEKIDLREEAEPMLRICEAMRLHLEGLSKKLTAMANANPVCRLFMEIPGVGPLTALSFYSAIDDPFRFDRNEDVGPYLGLVPRIRQSGATIARLRISKTGNNMTRSHLTSAAKTHLGKRSKDTRLKTWGLKVRERRGAGKANVAVARKLAVMMLAMWKRSTPFDPEFVTPASVESSALAP

SEQ ID NO: 45788 - protein, 408 aa, unidentified
MEVLYPRCAGLDLGKDALVACVRIHARPVQQEVRTFGTTTRELLALAAWLTQHGVTHVAMEATGTYWKSVWHMLEEDFTLVLGNAGHIRNVPGRKSDVKDAEWIADLLAHGLIRGSFVPPAPIQEVRDLTRARKQLVREIAQHTQRIQKTLDIANLKITGLVSDVLGVSGRAILRALIVGQTDPIQLADLARGTLKNKRAALVEALTGRVTPHQRRLLKLHLDLIERLEAAVADVDAQLGEALAPFREAVERVDGVPGIDTIVAQAILGEIGLDMSRFATHQHLISWACLCRRLDESAGKRKSTRTRKGACWLKTVLIQAAWAAVRTKNTYYRAQFFRLRARRGPKKAIVAVAASMLTAIYYILRDGVEYRELGGQYFERLDRTKVTQRLVKRLRDLGYHVQLEQVPA

SEQ ID NO: 45789 - protein, 345 aa, unidentified
MTEAYDGRQVVGIDLHRRRSVIVRMTEDGRKLETVRITNSAAALRREIAKAGEHPRVVVEATYGWYWAADVLEAAGAEVHLAHPLGVQAYSCRRVKNDQRDAADLADLLRMGRLPEAWIAPPEIRELREITRYRHKLVQARTSVKDQVHAVLAKLGIPVTHTDIFGLHGQAWLDGLRLPQPYAGKVTSLRQLAGELSAEITLLEQVLGDLLAGHEGYAAIRQLPGIGPVLAAVIVAEIGDITRFRKAGQLACWAGLTPRHRESDAKVTRGHISKQGPRILRWALCEAIQHQPAGTRPRQVKDGIIARRGPQARNIAKTAAARELLTLIFYVLRDGRVRRAASPAA

SEQ ID NO: 45790 - protein, 323 aa, unidentified
MNHKVGNDNTVARFIGIDVSKQWLDVACLPERETRRFGNDCAGLEQLCAWIVPLAPELIVMEATGGFETNAATALAARGLALAVVNPKHVRDFARAFGILAKTDRIDALVLAAFAQKVHPPVRPLPDEERRELIDLVDRRRQLVTMRAEEKTRLTQATPAARQDIKEHIEWLNERLRRLDIDLTAKLRSSSLWKTKEQILTSAPGVGRVTVATLVARLPELGTLNRRAIAALTGVAPFARDSGQHRGRRMIWGGRADVRNVLYMATVTAARINPVIRSFYLRLKQAGKPPKVALTACMRKLLTILNTMVRTNQPWQTPPTQTI

SEQ ID NO: 45791 - protein, 307 aa, unidentified
MSTSVGIDVAKRSLEWSVGSEGTIQHTRNEPRPIAQLVRRIVTLDPDRIVVESTGGYERALVAKLAEAGLPVVVVNPRRVRSFGEGLGFLAKTDTIDARLLALFGEKARPPIRPILQGTDRLLADLVARRRQVVSMIVAEKSRRDTASRTVRRTIEPVLRTLSKLVRDLERQIDATLGQDAERGELLALLHTVPGVGPGVARTLLIDLPELGHLSRREIASLVGVAPFAKDSGTFRGHRRIRGGRASVRTVLYLAAMTAARFNPPLAEIYRRLRQAGKPPKLAFVAVARKLLTILNAIARDRTAWQA

SEQ ID NO: 45792 - protein, 378 aa, unidentified
MSQSTTLYVGLDVHKDSIDIALAEASRDAEVRHLATVGGGNEAVTKALRRLVSAGHRLHIVYEAGPCGFALQRHLSALGWRCDVVAPSSIPRPSGERVKTDRRDAMKLARLARVGELVPVRVPDSADEALRDLVRGREDAVREQRNARHRLKALLLRNGIAYSGRAAWSGAHLRWLASMKLAHPAQQIAFQEYLHAITEAGARIVRHEQALRDALSGWTLAPVVLALQALRGVQLIAAITLVAEIQDFWRFATPRQLMAYLGLVPCEDSSGPRRRQGVITKAGNAPARRMLVEIAHQYRLAARVSPSIARRQSDLELPKAVTDIAWNAQTRLCSRFRRLSARRLPHNKIVVAVARELCGFVWAIARQVTPAPSTPQTI

SEQ ID NO: 45793 - protein, 433 aa, unidentified
MKVMYERVAGIDVHKDMIKVAIRSPGDKLWTRKTEILEYRTFYGVLQEMARELRRRRVTHVVMEASGVYTEPVYYALCEQDFTEVAVINPVHAKALKGHKTDAKDCARLAELFECGLLRGSYIPPAEQKEVRDLTRYRIKTVQSRTSEIQRLGKALESAGIKLGSVASEITGKGSTAMIEALIDGERRGAVLADLAIGRMRSAGKLTDLSMALTGRFTGHHATLCRLHLDRIKVLDDAVDGLDDRITAGAARWQREAGLLKSVPGFGDVVTCAWLAEIGPAPHKWFSRHEKLASWVTLCPGNNISARKRKSGRTGDAGTYIKPMLIQAAWSAIRVRGRLQARYSRLVRRFGGQKNPAAKKKAITAIAHTLLKIAYQVLKSGTPYQDLGADFYTRRNSPEEQQKYLERQLQKLHPGCTITITISPPEAALTPGA

SEQ ID NO: 45794 - protein, 362 aa, unidentified
MFRPHTLYIRIRIVRKVSEPAFAMKDQDVTDVIRRKQQTAMKYIGIDVSKATFVVAYSSDKGGEIRTFNNTTTGIKQFIGALPKDSSIHCVMEATGNYSAMLLYLLNVAGIAVSMENPLKIKNFARAMLSTVKTDKIDARLIALYGEKMNPQPFKIQGEAILRLRQKRTVIRQLTKQITAMSNLRGSLACLPVPDKGATHTVDETIKFLEKRRDRLQVELTDLVEIEFSRQLALLTTIKGIGITLATALIITTGGFTYFQNAKQVSRYLGICPTYEQSGTSVNIRGHINRNGDAYTRGLLYVAAWTASRFNTKCGETYTRLRQNGKPGKLAMIAVANKLVRQAFAVVTHDKEYVDGFVSNRP

SEQ ID NO: 45795 - protein, 395 aa, unidentified
MARDEMRWTPPAFRVDPGFQQTVEGWNPWSPHGIDVPNWDCVNNHTRDRGTTMNDITTYGLDLAKQVFQVHWVDLHSGEIRRKTLRRTQVSTFFARAPRGVVAMEACGSAHHWARLLRGLGHQVKLVAAQFVRPFVKTNKTDAADAQAIWEAVQRPDMRFVSVKSEQQQAVLSLHRLRAQWVSIRTQQANQIRGLLYEFGIVIPLGWRSLLKAVPQLTNEVPTLLRTELLEQLEALRTATARIDALEKQLANWQRAEPECRCLLAIPGVGPLTATAVVASVADARQFRSARQFAAYLGLVPRQSGTGGQVKLLGISKRGDGYLRTLLIQGARSVLISHTRKRRDRPLDRWLGDLLQRRSSHVVAVALANKMARTIWALLAHARTFDANWHRAVTA

SEQ ID NO: 45796 - protein, 408 aa, unidentified
MQVAHPVCCGIDVHKDTLTACLRRVDANGQVSKERREFATTYTSLLTLSDWLVEQHCPIVAMESTGVYWKPVYHVLVGTVEVYIGNAHELRSRPGKKTDKRDAAWLAELFAHGLIQPSFVPPPEICALRDVTRTRVALVQTRSQSKNRVHKLLEDTNLKLGSVVSDLFGVTGRRMLAALVAGARDPQVLASLALGALKHKRPQVELALTGQFTAHHGTLLGLLLELIELLDRQIATLDQPIGELMMPLHAQLAQLDSIPGVDIIAARDILAEIGTDMSRFGDAARLASWAGVCPGNHESAGKRYRGKTRKGNRYLRRVLGPCAWGARKTPTFLGRTFRRLEVRIGKKKAALAIAHKILVIVYHLLATGSCYEEARYDHYHPKQEARERQRAIKALERLGYTVTVERAA

SEQ ID NO: 45797 - protein, 430 aa, unidentified
MDQCAPYPLRGRAARDGVCVSVRVLRDVLRKADDMNHNVAGIDVHKKVLAVAVGKATDDALVFERKLFGTVGRSLAELAEWLKERGVKEVVMESTAQYWKPVWLALEGSFDLHLAQARSNLAPRGRKTDFRDAERMVRRLLSGDLTLSFVPSAEQRQWRLLARSKYQLRRDRVCLQNQLEGLLEEGRIKLSSVVTDLLGLSSLRILRALADKRLRVSGEDLAEALRGSLTRIQRLLLNQFLTRLDVIDGQIRELDRTLAEEMEQYSDAIHRLSQIPGVGPDAAAQIIAEIGPKAAAFAAPEKLASWVGVCPGRQESAGESTSNRSPKGNRPMRRILTEVAFAAVKTKDSHFQEVFRRLVPRLGIKKAIWAIAHRICRLIWKLLHEGAVYIEQGARGQDPQAIRKRARKLVGDLRRLGYKVLIEEPTPKAA

SEQ ID NO: 45798 - protein, 360 aa, unidentified
MTTVAEIPRGIEEVPPLWDAFVGGDTHRDTHQLEMLSGIGTVISVITIENDADGYEQAIAWITEHAPGPRVLIGLEGTRSYGVGLSRALQVAGLQVVEVEQPSKADRRGRGKSDPIDAHHAAMRVLRMPLDRKALPRSDGDREAMRILLIARNEISTTRTGQINRLRALLLLGDDDDREWCRCTMTKANLEKISRRRGRQHETTEQAVRRAEARRLALAIRAADVELAANLKQLGELADGFAPGLLELKGVGPFCAAQAIVSFSHVGRCRNEAAFASLAGVSPLQASSGRTTRHRLNRGGDRQLNRAVHTIMLTRWRDCPRTREYIERRRKENKTDREIRRCLKRYIARELFRELTAAGS

SEQ ID NO: 45799 - protein, 412 aa, unidentified
MKDLLEISCGLDVHKEKIVACILTGPLGKPTRSEIREFSTLIPDMIALRNWIVSKNCHHVAMESTGIYWMPIYEILEDAFSGDITLLVVNARHMKNVPGKKTDMRDSEWISTLLRAGLLNGSFIPEKRIREFRDLNRYRKSVIRDITSQKNRIEKFLQSSGFRLSSFISDIFGASGRNIILHLIEHGQIDKTTLDSCLKTKTRKHIDEILMSVNGTLSEHQKAFLRILMTHYDSLKKHLAEIETSLEEDMAPFALQVEQLNSIYGISTTASCAIIAEIGIDMKPFKTAEHICSWAGLCPGNNESAGKRKSTSVTKGNPYIKSMLCEIAWVIAGKRNTYLSAWYWRIKQKKGAKKAIVALARKLLVIIYTMLKQGTLFDESCFETRRKHCEQKQLSRYIRELEKHGYHVEAQS

SEQ ID NO: 45800 - protein, 497 aa, unidentified
MPSTKVAAEVTIDGAMKRKSIFKNNSQNIDAAFIEAGLPEKVLLVPLDFAKSTHYACFCDGLGRYLRQAFTVKNNKEGLDYLVERIEATRKSRAIRDKRHVIVGGEDSASYTRNFMQRLGELGYLAVRLSSCEVHRQAESVDSSTDRTALRAIAKTMLNRDARPIDGHDVYNELRALTRQRRRIVHLNTAVKNRIHTHADRLFPGFLAKDSALAPFSRASLELMSKPSFGAVSISRKNEKTLEQLLKRHGTPRSVEVASALKQQARDSIPADKDSARLSAYILAGELELFRALESNLQTLDKECARLLARTPEAFVTSIKGIGITLTSSVCAESGSLAQVTRADSLNAYAGIVPKVKQTGGPESEAKIRGRRRSFNRVLKDYTMQAGNHLYLHGPEELMQDAVRRKLGGRAVDTAMARRFLRIGRALCKNHFIYLPTHLRGQNASSQERAQYILDTWPALLVKWKRLGLHEVAFAPENPLGQWRLIMQEIHDIDLPL

SEQ ID NO: 45801 - protein, 342 aa, unidentified
MYYIGLDVHKKTINYCVKDVSGQVHREGQIGATRRELDGWMKTLPQPWTAAMEATIFTGWIYDHLLPHARQVKVAHPLMLRAIAAAKKKNDRIDAGKIADCLRCDFLPECHMASTSIRERRRTLRYRHLLVRQMVQMKNRISGLLMETGVSYNKQRLHKVRYFRELLTTNEEVNESIRPLLRVSRDTIVRLQKTEYALVSSLQRDPLLAERIRRLRTVPGVGPITALTWALEMGEVSRFPSIREAISYCGLCGDEKSSADKMTRTPLSKQRNKHIQRVLVEAAKLAPRQDHDLALVYETAKQKGNGNRATLAVARKMVAYLLAVDRGQRDFVPAEAHRSAAA

SEQ ID NO: 45802 - protein, 328 aa, unidentified
MNKETFYVGIDVGQEELVVCLDGFKPRSFKHNTMGIRKMVGWSREVSCDAELHFCLEATGVYGYSLATSLVSRFGVRVSIVNPAQIASFAKAQLRRAKTDNIDARVILAFAQSQHPPCWKPESKMQRQLYHLVTQADKLRRILRQLSNRDHSFKYVLDLPAEIVKSQRSLHRSIERQLAGIQKAIEKLRTEDNELKERVDLLCSIPGIGSHSAVRILAYGKNIIEERDRKALTAHAGLAPSQKQSGISIKGKSRIAKQGDCRLRSALYMPALVAAYYNPTLRVFYKRLIDKGKPKLLALVAVMKKLLLLIQAILKKKIPYRADYSPLT

SEQ ID NO: 45803 - protein, 464 aa, unidentified
MPLLIMEDVPMKRKISTKNKAKRIKKHLEEINLYAAGIDIGSREHFVSVPESLDDQPVRHFGCFTIDLETMADWLVRIGITTVAMESTGVYWIPVFEILETRGLEVILVNAHHVKNVSGRKSDVKDCQWLQQLHTYGLLAGAFRPEDEYCVLRAYMRQRGTLVSTLSTHIQHMQKALRQMNILLDNVVSDVTSKTGMLILRAILSGERNVEKLASYRDRRCKNSVEVIAKSLLGNYRKEHLFSLKQSIELYDFYHEKLRDCDQEIEQQLAQFEKQPDLVEGQRPTKKRNKKHEKNAMQFDVANYLYDLCGTDLTDIDGLDEGSVLKVLSETGIDMTKWKTASHFVSWMGLSPNNKISGGKVLSSKTVKTRNRAKQAFKLAAWGLSNSKSGLAAHYRRLRARIGAPKAINATARKIAVIFYNMLKNKTAYITQSQEEYDKAHQQRILKQLQQKAVQFGLELVPIA

SEQ ID NO: 45804 - protein, 341 aa, unidentified
MNKFIRIGIDLGKNHFQVHALESEDGRVRTRKLSRQAMRKFFSEIEPCFVGMEACASSHYWARELLTMGHDVRLIPPIYVKPYVKRGKNDAADAAAVCEAMSRPGMRFVPVKSEESQATLMLHKTRELLIKQQTMSVNALRGHLAEFGIVAAKGIGRVDELIEKAENDATLPAAALAALRVFVQHLEAIDTSVADLDRRIVSAHAQNETSRLLAGIPGIGKITASAIVASVPDPNVFKSGRDFSAWLGSTPRQNSSGGKEKLGSITKKGNRYIRRLLVLGATSLLNVIGKRKGALRDWVVALLARRPARLVTVALANKLARTIWAIMTTGEAFRIETFAKA

SEQ ID NO: 45805 - protein, 407 aa, unidentified
MELPAIFQCVVGLDVHQAKISACAMIEQPDGTLTVEHREFGAFKRDRRALAEWVRTLGPDLVVMESTGIYWKSPYAALEQVGIAAWVVNARHVKNVPGRKTDVADAQWLATLARAGLLRASFIPPADIRHLRLIARQRQKLGGMLASEKNRLHKLLADAGIRLNVLVSDIHGQAGRAMVKALIEGQPIPEILDLAGRLRASREELFEALQPEQLSDAHRFVLSEIMAHIEELEARMGRFEQTLLAGLAAWEPQLVLLQTLPGVDRIGAAMLLVEIGTDMASFASAEKLASWVGICPGNNESAGKRKSGKIRKGNAWVRRLLCEFAQAASRSRCGLQEKFKALSIRKGHKKAIVALAHKMLRIIFAMLKNHTPYQDQAVDYEALLVQRNAPRWIKMLLKHGFISPAST

SEQ ID NO: 45806 - protein, 414 aa, unidentified
MSVTDTSLVTRAVAAGIDWAETNHAVCVIDADGEAITRVELAHSRAGIAGMITVLSRHRVQAVGIERPDGPVVDALLSAGISVYVIAPAQIKALRRRYGTAGNKDDRFDAYVLADTVRTDRRRLTPLQRDSDATVALRQLCRVRKDLVAHRVAVTNQLRAHLLTVLPAAVGLFSSLECPISRQFLVRFATQDAVDQLTCRRLTAWLKRAGYNFRTKPEVLHQRLIDAPRGAIGTHTAALAEITRAYVATLTTLCAQIDALTDQVSQALDAHPDKDIFTSLPKAGTLRAARLLAEIGDARGRFPTATALACLSGVAPSTRESGTHRVVSFRWAVDKQLRDAICDFAGDSHHANPWAADLYAKARARGHDHPHAVRILGRAWLDIIWKCWTTNTPYDTGRHKALQRVVNRDQQSEG

SEQ ID NO: 45807 - protein, 384 aa, unidentified
MSSIIGIDVSQKSSSFHLIEAGNKEGIDGSFPMTREGFESLLARTGCTNAPRFFMESTGRYHITLAHFLLQKGLQTFIVNPVLVKQFSKGHTLRKTKTDKVDARLIARFAERGTGTKSNTRRTMDDQRLSIARRREQVAEEVAKTKTQLKADLTVAFPEILSRNVFTLGMLRFLNRFPCAASICEATDEQLLLALKGERGRGLSITVTQLRDLASGSIGLPTCGPLVADSAESLLFLNRKLDRLTDQLLCLVRQTQSEEMDIITSIHGIGDITAAHFLTEIGSIDRFERYQSLIAFCGTDPGIYQSGAITKRGRITKRGNASLRKYLYLMAMGLIRCNPYFKTYYDKKREEGFPHRKAMVALMNKLIKTLFAMLKKKEKFIVQS

SEQ ID NO: 45808 - protein, 354 aa, unidentified
MGWALEEVVENQVFVGIDVSKERLDAALRPRDESFKVANNPRGIATLIKRLKKWRVSRIVLEASGGYEIAAAYDLAAAGLPVAVVNPRQVRDFARATGRLAKTDAIDARVLAHFAEIIQPQTRPLPDMQTRELMALVARRRQVVDMLTAETNRHGRAVDAVNRAIAAHVRWLRKQLADLDAALERAIRNSPLWSEKARLLRSVAAVGSVTVITLLSHLPELGTLNRRQIAALVGVAPFNHDSGKLRGTCAIWGGRAQVRAVLYMCTLGRNPQLQAFYARLIAAGKKPKVALTACIRKLLIMLNAVLRQRIPWNPELATLPSPFSAARGGAVVCWACSTAREVKVLYQPDGCEGK

SEQ ID NO: 45809 - protein, 472 aa, unidentified
MTTTSTPGAERRRQVRTASKAKVPLPPQLKQVNLNASGIDIGSEEHWAAVPPGRDREGQDVRRFEAFSGDLCALADWLKRCGIETVAMESTGVYWIPLYELLVERGFEVLLVDARRVKNVPGRKTDVLDCQWLQELHTYGLLRGAFRPADQVCILRSYLRQRSMLVAYASHHIQHMQKALEQMNLKLAHVVSDITGVTGMGILKAILSGERDPIELAKLRDPHCKNSEATVARALEGHYRQEHLFALQQAVELVEFYQRQITACDCQIEACLQRFENKSTESPLTARPRKRRRSGVGFDARSYLYRITGVDLTQIDSIEANTALTVIGEIGLDMNRWPTEKHFGSWLGLAPGNKVSGGKRLSGRTKPSANRAAAALRLAAQSLNQSQSALGAYFRRLKARLGAPKALTAAAYKLARILYRMLKHGAGYIDQGEATYEERYRDRTLRNLKRRAAELGFQLTAISSSTGQPALT

SEQ ID NO: 45810 - protein, 355 aa, unidentified
MDSVKYIGMDVHKEAISIAVLNSSGKLVMECVIETKAITILQFVQGLRGSLHITLEEGTWAAWLYDLLKPHVTKIVVCNPRRNALLKEGSKSDRIDARKLAELLRSNLLRPVYHGEHGVRTLKELARSYLTISKDLGRVMSRLKAIYRSWGIPCTGKQVYAPRYRAEWLAKISEAGVHRRAEFYYQQLDALRPLRQQVRQELLAEARKHSAWKLLRGIPSIGPIRAALIIAILQTPHRFRTKRQLWTYSGFGIETHSSAEHRYVDGNLQHAKKQISIRGLNRNHNHDLKNLFKSAATLAAAKAGPFQEFYDALVAKGIRPQMARLTLARKMAAITLIVWKKGVHFDAKHLKPQTA

SEQ ID NO: 45811 - protein, 387 aa, unidentified
MPQPNDLSRSLVALDHNSTIIAVVELSQSSWLVGGVLPGIERQPRKKLEPSPERLLAVLHRWRDEAIRAGCNITRIALAFEAGRDGFWLARWLAARGVEAHVIHPSSVAVSREHRRAKTDRLDTELLKRGFLGWLRGERGHCSMVRVPTLAEEDAKRPNRERECLVKERTRLVNRMKGALARLGIRNFRPTLRNAAEHLAGLYTPEGSPLPPNVAAELERDIARLGLVIGQIKQIEEARRQRLEEQPESRPHAMVRLLVRVVGIGTETADMLVNEVLSRPMRDRRAVARYAGLTGAPDESGAKRREQGLAKAGNARVRRGMIPLAWRFLRFQKDSALARWYQARTADRRAGTRKTMIVALARKLLIALWRFVTTGETLEGVVLRPAA

SEQ ID NO: 45812 - protein, 311 aa, unidentified
MAIYVGIDIAKHGFELACEPKQKIQHFDNNAEGIQRCRERLLQHQPELIVMEPTGGYERPLADELQGAGLPLAIINARRIREFARASGQLAKTDKLDAQIIARFALVLQPPAQKPQDRQTRTLKALVARRQQLVQMHTAENNRLEHAADKTVVRTIRTLLRTIERQMKQVEREIRDQVENTPTLKQKTQQLESVPGIGQTTAALLVTELPELGRLNRRQIAALIGVAPINRDSGIYRGKRMTGGGRRHLRARLFMPTRVAVRHNPVICCFYRHLLDRGKTKMVALIAATRKLLTILNTMLKKNEAWNPKTA

SEQ ID NO: 45813 - protein, 344 aa, unidentified
MTQYKRIGIDTSKTVFTLHGIDHSEQPTARKNLSRAQLIPFFRKLPPTEIVMEACGAAYHWARQLIALGHDVRLIPPQYVKPFLKRGKNDRNDAAAICEAGGRPEMRFVPVKSIERQAQGMVLKVRQTLIDQRTALANTLRGHAAEFGVIAGKGVGRIVALLAALEREPAIPPVAKEMFVVLGQEVAHLDTRIDQLDARLAAAHKANEDSRRLATMPGIGPVIALTLATEIDPGAFRSGRHLAAWIGLTPKEHSTGGKPRLGGISRAGNERLRALLVSGATSVINATIRFGDQRTTEWLRALLRRKPRKVAAVALANKMARIAWAMMVRGESYRRPAAVGAAAA

SEQ ID NO: 45814 - protein, 403 aa, unidentified
MPLFVGIDWASAEHAVCVVDDAGKVLDRFTVTHTASGMDALRRQLAHLGPDLAVAIERPSGLLIDTLVEAGFTVVPIHPNALKASRPRYSAAQGKSDPGDAFILADLLRTDGHRFRPLRPLSDETRALRALVRTRDDLVHQRVGLANQLRSLLESFWPGAAAIFADVDSPIALAFLDRYPTPQSADRLGEKRLAHFLAQHAYCGRRSSALLLERLRSAPTGLCGEAESEAKGELVRVLVRVLEPLVVQLVKLSSAVEHAVAVHPDGPLVTSLPRAGRINAAQILAELGDDRLRFSSDDQLAAEAGVAPVTHASGKHRGVSFRFACNKRLRQALTCFADNSRHGSPWAADVYRRARARGCDHPHAVRIVARAWLRVLWQCWQQRQPYSLAAHRGAQRLSSEVAA

SEQ ID NO: 45815 - protein, 360 aa, unidentified
MAGFSLSKVRAFIRGFEDSRFFIGLDVHKRSFHVAIRRSDGETDTWVAPASSQCLVDQIHRLDIRVGCLAYEAGPTGFSLARTLENAGYNVVVAAPSRIPRPSTSSAKTDRLDCIKLAEYAAKGMLKTIAIPSEQDEADRSLARRRHQLVDEVRRVKNRIKAFLLYLGIEEPAELRLWTRGSIDALNELDLQQASRWTLESMLIELSCLEGNLATVNKQLGELSGNQRHKGIVDCLRTVPGVGPVVASTFRFELFKPERFDRAREVAGYLGLAPTVRQSGEGKSRGQLRPAGQERLRSLLVEAAWSWRAKDPWAGRTYRKLLSRCGIAQKAIVALARKLAIILWRLCLEERPYYVKPIEA

SEQ ID NO: 45816 - protein, 345 aa, unidentified
MTIVGGLDIHRKQITFDYVDTVTGRVQRGRIAPADRAHLAGWLAQRFPGRTDVEFALEGCTGWRYVAEELAAAGLIAHVGEPADTAALRGGRRHAKTDKTDSRHLRELLADDRLPQCWIPPAQVLECRALLELYRDLRVEHTAWVQRIHAVLFHQGAGALTVPALRSQAGLVELSEQAADLSSAGKMQVVTALEMLAVLDAQLTQVRRQLLDAARHLRGARVLTARLYGVGPITALALCCWLAGAGRFSSARKAVRFAGLDVTVHSSDGKRSPGHLSRQGPSVLRWCLYEAGKTHARGSAPDHAYYAQVKDRIDGKRAALSEGRKIVRQACHLLSELGDDALTQV

SEQ ID NO: 45817 - protein, 450 aa, unidentified
MKKKEDRLSGLPVLHTHAAGIDIGSRFHVVAIPGELDPEPVRTFQAFTTDIERLADWLISVGIQTVAMESTGVYWVPVYEVLETRGLDVILANARETKTVPGRKSDVNDAQWLQRLHSCGLLRASFRPGRDITALRSYIRLRERHLDYGAAHIQHMQKALTFMNIQLHHVVSNITGVTGMNIIRAIVDGERDADKLAQFRDMRCKADLATIRSSLVGNYQPEHIFALKQALAAYDFYQDRIKDIDVEIESILGKLSCEMPHPVTPLPAPKHKTKAPNAPDFDVRPQLYQLTGVDLTQIHGVGPYLALRVISECGTDLSRWPSAKHFTSWLALSPGCKISGGKVLSSHTRKTSRRLTAHLRLAAVTVGRTDTALGAFYRRLAARIGKAKAVTATARKIAVHLYNAMRFGTSYQDPGSDYYEARYRERVLRQLHKRATEFGFELQPIAVNVS

SEQ ID NO: 45818 - protein, 392 aa, unidentified
MGRVIIGMDPHKRSATIEIINDREKILGQGRFGTDRDGYTAMLTIGRRHKDRVWAVEGCNGIGRHIAQRLVADGETVLDVPAKLSARARLFDTNQARKSDPADAHCVAVAALRTTGLRQVTVEDTTVALKLLVDRRDSLGRSRTDVLNRLHQLLLELVPGGAKQFLSAPQARALLNTARPRDIVGRTRRQLASELITEVAVIDKKIKAANAQLTDLVASTGSTLQDLVGIGPSGAARLLGDIGDIDRFASRDHFASWNGTAPIDASSGDQHRHRLSRAGNRRINRVLHIMAIVQLRHDTLGRDYYRRKRAAGKPALEALRALKRRLSNVVYQQMVNDAKRSRTGPAGTGPGGQPGATLTSSAAGPIPTADTSDKPLPGPATRQPRTPPPAAA

SEQ ID NO: 45819 - protein, 366 aa, unidentified
MNKLENMTNNTITIGVDVSKQYFDIYIYESGKTMRFDNNSRGIKKFIKYITPLNPTLVAMEYTGGLERQLFFALQNNNIPCCCIKPINIKNFAKTIDAKAKTDLISAKLIAHYAFLYKPAPQPKPDEKSLLLKALASRHFQLTMFLASEKNRLSSASFPKTKSQLKKSIKVVEKFIEENKKQLKELIYSDPILKAKVELLDTMPGVGEHSAMMLAVLLPELGNISGKQIASLCGVAPFINQSGKATGKAFIKGGRDKARITLYMIALVAIVYNPTIKDYYNRLICKGKPPKVALVACMRKIIRILNAMVRNNLPFIPDYYETYVREQNNNNAFKLILTKNNEVEQGSYLVLSDANFLREPNIKTIT

SEQ ID NO: 45820 - protein, 384 aa, unidentified
MRRARKRGPGPSHLLITPDCAGNVVGIDPHKRTVTATVADPRGGILASEHFRVSGDGHRALEAWALGFGPIARWGVEGASSWGRHTAMFLCGRGYDVRDVCANRTPRNDRARQRGKSDVLDSERIARETLAHPLLPKAFKRAGEDQGPDESHQLLALWHNRRRSILTSRQHLLNEAEHLLCELPLQLRDQLPDSKAVRPRLTALADRNRRRRYDPPTRLRLALLDGYAAQIAALDREEKTVLRELRALVRTSGSTLAELCGLETRSVAELLVEVGDPRRFTEGGFARFNGTAPLPASTAEGPGEPVRHRYNPGGNRRINAVLHRMAITQLRCEPRAQAIFATARAKGHTKKEARRILKRHLSDVIYRRMIRDLASHTAQPLLAA

SEQ ID NO: 45821 - protein, 465 aa, unidentified
MTTGKKQWQNRKEKKEWARRLQSEDPGLDVVHPCAAGIDVGNSAHYVAVRPDRDPEPVRRFECFTVDLHRMADWLQSCGVKTVAMQSTGVYWIPLYEILEERGFKVHLVNARHTKNLPGRKSDVQESQCLLKLHTYGLLNNSFQPVSEIRVLRTYWRQRGEHVRGAATCIQRMQKALTQMNVQLANVISDISGLTGQAIIRAIVAGDRDPKKLAGLSDRRVHASQEEIAKSLEGNWRPELLFVLQQEVDMYDAYQKRIVACDQQLQKQLARLTGVTPPSKQQIQKPKTKPAAAKNAPRFNLSSELQRVTGVDLTHIDGIDVMVAQTLLSEVGLDMSRWKTESHFASWLGLCPDNRISGDKVLARGTRRVVNRAATALRQAANTLIRSRSYLGAQYRRLRTKLGAPKAITAMAHRLARLVYRMLKYGQAYVDKGTEYYEERFRQQQIQLLRKRAAKLGLQLAEIQA

SEQ ID NO: 45822 - protein, 361 aa, unidentified
MSENMALVGLDVHQAQSVAALLDPSSGELRVERLRGAPALVVPAYLSQLGRPVRAVYEAGPTGFGLARVAADRGLDLRVIAPGSIPRAPGDRVKTDRRDAKRLVRLFAAGELSFAFVPSEQDERFRDLVRCIDDARKDLMRSRHRLSKFLLRRGLRFPGRQWTQPHERWLGQLSFDDALSRATFIDYCCAVEALAHRRRTVIGALEDAVPASSHAATVARLRCFRGIDTLSAAGLCAEVGRFERFSKPALLSGFLGIVPCEYTSDQKRVQGSITKAGPTHARRLLVEASHHYRHRPVVGQGLAARQAGQDPRVVAVAWRAQRRLNARWAHLRQRRGKPTGTVAVACARELATFCWEAATLD

SEQ ID NO: 45823 - protein, 352 aa, unidentified
MRTSQKTSETITTIGIDLGKNTFHLVGLDKRGAIVLQRKVSRGQLERRLSNVPRCLIGMEACSGSHHIGRQLTALGHDVRLIPAQYVKPFLKGHKNDYRDAEAIAEAVQRPTMSFVAIKTAEQMDLLALHRVRSRLVGQRTGVINQIRGFLIERGIIVRQGVVPLRKALPDILSSNTDVLSPRMVSLIADLMQDWRRLDERIETVSAEIEALAQQDDSCQRLMTVPGVGPIISSAMVAAIGNGAGFKQGRDFGAWLGLVPKQESTGDRTILGKISKRGNKYLRTLFVQAAHVVLVRRPSAAMRGLWPWIEQASKRLHRNMLAIALANKLARIAWAVLARGRTYQPRIVANAA

SEQ ID NO: 45824 - protein, 358 aa, unidentified
MRIIGCDLHARQQTIAMLDTDTGELEEKTLEHEGDTVREFYSALPGPILVGIEATGSMQWFLEMMEELGIECRVGHPAKIRRAETRKQKHDRRDARLLLTLLAENRFPTIWMPSSEQRDLRTLLRHRHQWVRLRSRVQHTLQSMALNHGLRRGRSLWSQAGQDELRALPLAPHASERRAALLSLYPRLQESIDQLDQQVGQQVQQHPPARRLMTHPGVGPITALATEVFLGDPLRFSDGKALASYIGMIPSEHTSGRRQRLGAMSKQGNTLLRYLWCEAAMHAVERDPELKRFYRRKLVQKGLGKARVAAARKLGIRLWIMMRDQIDYQEFCRRGKARQESGSVRAGMPDRNSGPAEA

SEQ ID NO: 45825 - protein, 354 aa, unidentified
MNIKYIGMDIHKETISIAVMNGDGKLVMESIIETKAITILQFIQGLRGDLHVTLEEGTWAAWLYDLLKPHVTELVVCDPRKNALMKRGNKSDKIDARKLADLLRGGYLCSVYHGENGLRTVKELARSYLTISKDLSRVMNRVKALYRSWGILCGGQQVYAPRHRSEWLNKIGEAGVRRRAEFFYQQLDALRALRQAVRRDLLAESRKHSATKLLRQIPYIGPIRAALLIALIQTPYRFRTKRQLWTYSGLAIETRDSAQHRYVAGQLRRSKKPQQVRGLNQNHNHDMKAIFKSAATMASSREGPFNDFYQGLLTKGMKPAMARLTLARKIAAITLIVWKKGAHFDAEQLKPQAA

SEQ ID NO: 45826 - protein, 412 aa, unidentified
MSVASATGPAPLFAGVDWAENNHVGCVIDADGTIIERVTVSHDKAGIARLITVLTDAQVSGVGIERGDGPLVSALLTAGLTVFVIAPSQVKALRGRYGSAGNKYDRFDAFVLADVVRTDRRRLTPLMPDRAETSTLRALVRARKDLVGHRIAVANQLRAHLLMVLPGVVGLFAELDAPVSRAFLADFGTQDAVDALTEGELAAWLRGRRYTRRPAGVLLQQLRTAVPGVTGPAGHALAGITRAYLAALDAVMAQIDVLEQQIEAGLHAHPDAIIFTSLPRAGTVRAARLLAEIGDCRARFPTAAALAGLAGVTPSTRQSGHTRIVAFRWAVDKQLRDAVCDFAGDSRRDNAWAAHLYAQARARGKNHNHAVRILARAWLTVIYKCWTTHTPYNPTRHRALQTLLQQDPQPAG

SEQ ID NO: 45827 - protein, 426 aa, unidentified
MSRNDYNRQATRRQRIRKTTLIVGVDIGNAFNAVGFMNKEGNVLGSCAKLYNNREGFEQFVNMIEGLKTKHHLRDVLIGMEPTGHYWRKLAYFAKEHVYEVRFVRTTALKHHRELDESSSAKSDQRDALTIANITREGKYIDTVIEDGVLRQLRTLSKARERLLRYSVSAKNSLHAALDDYFPELHEIFWSMGSRSLWAILEQCPFPQDVMSMEVATLQDLIARSSRKKKESLQKAKALSKTAQESIGLKQIGSADRYRVQMCLEEVKRTVLSLKNIDKQLKFLLKETPAALYLMSIPGIGPLSAAVFLGELGDPAHFHNARQIVKYAGYDPQESDSGSRIGRKFISKKGRWLLRKYLFFMSMRVVVLSNYFQEYYQRKLETKNRVGQQPRRKEMLCAVAIKLIKVIFALLRDKREFEDLAPAVAA

SEQ ID NO: 45828 - protein, 418 aa, unidentified
MKVVYPICCGVDVHKTFLVATIITSEGINPHYSKKRFSTFNNSILRFKQWLVDNHCFDVCMESTGKYWIPIYNLLEDTIRITVANPKWVRAVKGNKDDAKDSKWIGDLFRLGLVPGSYIPPKPIRILREYTRYRAKLVACKSSEKNRFQNAFTVCNVALDAVVSDMFGKSASSITDYLLSSETFDPGHCSSLLQKSLKKKAATVIESIEGYQMTREQKERMVMVRSHLEFVQQSIAKLDEKLDKMMAPYESAITLLCTIPGVDRASATTIISEIGTDMSQFANSKRLCCWAGLTPGNNESAGKKKSVKISRAGVYLKPALVQVAHASVKSDSSPYYQNKYERLYKRRGKKRAIIAIARMILTAIYHMFVTGEVWNPSDLYKIDMPQEMLEKQKQKAIKQALKLLISNGVIKEAAISTA

SEQ ID NO: 45829 - protein, 276 aa, unidentified
MSKSLRFIGLDVHKDSIVIAVAENGREPAYVHGEIPNDWSILRKTLKRLASGRLLRCCYEAGPCGYGLYRKMKEAKIDCILVAPSLIPVQSGKRIKTDRRDARKLAHFLRSGDLTEVFVPDEEAEAIRDLERAREDAKKAQRVARQQLGNFLLRHGRRWQDGNWTRKHLDWIRQQKFPQQAQQRVLVDYIKTVEEATEREEQLVKDLAELIRHTKLYPLIRALQAFRGIRLITAVTIAAELVDLRRFGSPRQLMAFLGLVPSEHSSGATQHRGKIT

SEQ ID NO: 45830 - protein, 402 aa, unidentified
MNAVGIDVSKGKSMVAIMRPFGEIVSAPFEIKHTASGINSLVELINSVEGESRIVMEHTGRYYEVLAHQLSEANLFVSAINPKLIKDFDNDSLRKVKSDKADAVKIARYTLDKWQNLKQYNVMDELRNQLKTMNRQFGFYIKHKTAMKNNLISILDQTYPGVNTYFDSPARSDGSQKWVDFASTYWHVDCVRKMSLNSFIDHYQNWCKRKKYNFSQSKAEEIYGKAKELVPVLPKDAITKLIIKQAVDQLNSASTTVESLRTLMNETASKLPEYPVVMAMKGVGTSLGPQLIAEIGDVSRFTHKSAITAFAGVDPGVNESGSYEQKSVPTSKRGSSDLRKTLFQVMDVLIKTHPQDDPVYQFLDKKRAQGKPYYVYMTAGANKFLRIYYGRVKEYLSSLPES

SEQ ID NO: 45831 - protein, 415 aa, unidentified
MSLKIVYKICCGIDVHKTFVVACIASTNDKGVTSYESHRFSTYTSGLKTLLQWLLKHNCKDVCMESTGKYWIPIYNILENDCSIVLAHPKYVKAIRGKKTDKKDAKWIADLFKHDLVAGSFMPPADIRQLRDLMRYRFKLTCFQSSEKNRLQNCLTVSNIQLGNVVSDTFGKSAQAILDKLLENPADTSFDLEPLVYKSLKKKLPQLRDAINGYITPEQVGKLKVIKAHYESLESRKAELEELILALATPYQQELAILQTAPGIRSLFTAIGIISEIGTNMEAFPSAKHLCSWAGLTPTNNESAGKKKSVRVSKAGCYIKPLLVQCANAVVTSKKHPEIRNRYLRLKKRRGHKKAIIAIARMLLTALYHMLKNGENYNAELYRKYDLPPTNWEITVEQAIIIAKNQGYKIKSATA

SEQ ID NO: 45832 - protein, 517 aa, unidentified
MATAARSRKSSRAFFVHKPQGQINHRVQSVGPEHFGIVSVDCAKMRSKFFLCDFFGNVLIRPTVLPHTQADLQAAVTLVRQTMQEHPLHDLIVAIERTGTYHRPVQDAFRNAGWETRLVHPFASRQFRQPADPANKTDDTDLAGIFRATVNGFGLLEPVWPDDYQQLQLFARHRRDLVRKQAKLRCQIRAHLHSLMPGFADCFEDLFDYPAALAIACGTGSAQAVRDLALPGLRQFVGQSGLHCQQSTLNKILAWAQTAVAPTPPVEPRRQILANLEDDRHAKNQQILGLEQRLAHLLVRTPYLLLLAIPGLNVVSVAELTGELGPITGYANANHITGRAGLRPSRYQSDTVDRASGPLRRCSNRRLRNALIQIADNLINCNHHFHVQALALKQRGKDPRWIRVKLTKTFTRLAFAMVAGRSLFRHACCQERHYILDKLVEFHRRCDTPMSLMMHDLPMAVGQLPRSSFAEEAKPLHERLEQLRKRKRGPQPLADILPIVLARLGIHLVPSEEQDPS

SEQ ID NO: 45833 - protein, 358 aa, unidentified
MVDKVTEAAVVGGVDTHKDLHVAAVVDQNNKVLGTQYFSTTRQGYRQMLAWMTSFGTLKRIGVECTGTYGSGLLRYFQNAGLEVLEVTAPDRMERRKRGKSDTIDAECAAHAAFSGIRTVTPKTRDGMIESLRVLKTCRKTAISARRVALQIIHSNIISAPDELREQLRNMTRMQLIRTLGSWRPDASEYRNVTNVYRISLKSLARRYLELHDEIADLDVMIAAIVDELAPELIKRNAIGYESVSQLLITAGDNPQRLRSESGFAALCGVSPVPVSSGKTNRYRLNRGGDRAANSALHIIAIGRLRTDAKTKEYVARRVAEGHTKMEAIRCLKRYISREVYTLLRNQNRRINSIPITA

SEQ ID NO: 45834 - protein, 316 aa, unidentified
MATRSSVFVGVDISKKSLEVATHNGNSLSNFSNNPEGIPQLIALLLELKPVLVVVEATGGYEQALVHALHQASIPVAVVFPKLIKNFARARGLVAKTDKLDARNIAFFGFSLNPRPTPPVSSPRDRLAALVDRRRQIVNMIKVEKNRLKMASSDMQPSFQDHLEWLIEEDHNLSSEIRLLIENQPEMKAKSEIVQSATGIGIVTASTLVAELSELGALDRKKISALVGVAPLNNDSGKKHGKRRIHGGRREVRSALYMATLVAVRYNPVIKAFYERLLARNKEKKVALIACMRKMITILNAMVRDNQPFRYQSSMA

SEQ ID NO: 45835 - protein, 367 aa, unidentified
MSSVASQAGLIHLGMDTSKNAIVVATLLPGEEVPVTDRIANEEAAIRRLVGRFADRSVLRAWYEAGPGGYELFRLLASMGVACQVVAPSLIPKGGSDKVKTDKRDSRRLARLGRAGELTPVRVPSPAEEAVRDLARARDAMLADRKRAQQRLTAVLMRHGRIWRGATYWTAAHRAWIAAQRYEEPALAAAIGYYRATLAVREAELAAIEAELMPWAAREPLAGPVARLGCYRGIAELGALTLAAEVADWRRFPAARTFMGWTGLVPAEYSSGERTRRGHITKAGSEPVRTALIEAAWAYRFAPAIGAGLRRRQAGAGPDTLARSWKAQRRLHDRYVHLTRDGGKAAPEAAVAVARELAGFVWAEMTA

SEQ ID NO: 45836 - protein, 412 aa, unidentified
MTATNQFAAHVDLDWADKKHDVCVQFKNGERTFHVIEHTPEALDVWLTELHQKVKGRIAIAVELKKGPVVYALQKYPFITVFPVHALSLARYRQAFSPSGAKDDPQDAELALELMLRYPQKIKAIEPDNADIRLLQQLVEQRRQLVEDKRRFVNRIINTLKQYYPQPLEWFSHRGSLLLCELIIRWPSLQQLKRARRDTIRNFLNAKGGRAMALTEQRVASIDNAIPLTTDPSVIEANALMATALATQIKVVSEIIKTYDERIEALFDTLPDAELFKSLPGMGPCMGPRMLAALGDNRDRFNSAEEIQNYAGIAPVTERSGQKSWVHWRWQCAKFVRQTFVEWAAKTVNSSYWARLYYQGLREKGKSHQSAIRALAFKWIRIIYRCWKARTQYDEAKYLLALEARHSPLLKP

SEQ ID NO: 45837 - protein, 328 aa, unidentified
MTMNPALCTFNHVVAFEVAKDSLVIHVLPADTQSVTANKPKAIRKALLAEMRRNAKASLGPLLVVCEATGGYERHILAICLELGIAAHKAHGARVRHFARYLGLLAKTDPIDARVLALYGLKTQDLRLYVPPTPELLALRDLKTRRDQVQQMLFAETNRLEHARHASVSRGLKAHIASLRKALTALEAEIAEHLKASQALAHKARLMRTLKGVGPTTVAALLAYLPELGAFTKGEAACIAGLAPINNDSGSFQGPRHIEAGRAAVRKTLYMTALVAIRYNPVMRLFAEKLKRCGKPSKVVIAAVMRKLIVTLNAILRSDKPWSHAQGA

SEQ ID NO: 45838 - protein, 319 aa, unidentified
MNKNEITFEQIVEKGCGIDVHKKVIVATIRGIGIKEMTRSFNAFTASIEELRDWLKEYGITHVAMESTGVYWKPIFNILEEDFDIILVNARHIKNVPGKKTDKKDSKWIAKLLLSGLLKGSFIPPKPIRELRDLTRYRRKIVGQIASEKNRLQKILEDANIKLSSVVSDMSGATATKIINAMILGEEDINELVKFRHGKMQSSIEDLASSLKGNLTEHHKFMLTTIKESINEKEALIEKLDKRIDEQLKDNELELDSKLLQTIPGVGKDAATGIIAEVGNNMDQFPNEQHLASWAGMSPGNNESAGKKKVAEQPTEIYS

SEQ ID NO: 45839 - protein, 436 aa, unidentified
MQPLPVLDPKAAGIDVGSEQMYVSIAGGAPKVFGTTTGQLHALRDWLVAEGVHSVAMEATGIYWLCAYEVLERAGLEVLVVNGKHVRNLPGRKTDLKDCQWIATLQAHGLLRSGFVPPEHIRRLQDYLRLRTDHIAMAASHEQHMQKALERMNVKLHDVISDLTGVSGLKLVRAILGGERNPVALLALCDVQIQKRKAEQVREAVRGTWKPEHLFALRQALELWEFYQQKIAECDQALAEVLHEVAGPDDPANPAPPATKRGGHNSPDIQNLHGMLWRLCGGKDPTVLPGVADYTMLQLIAETGDDLQAWKTEKQFTAWLGLAPGSKQSGKRHGNQKRRRNRAGRLFCVIARSVGRAVDKALGGFYRRLKGRRGGLVANLALARKLAVLYWRLMVHGMHYVEQGLKKYELQVVQTEQRVLRKLAKKHGLELQPRAA

SEQ ID NO: 45840 - protein, 354 aa, unidentified
MAKTREAAVAVVGIDIGKYSFHVVGLDRRGAIVLRQKWSRGQVEARLANMPCCLIGMEACVGAHHLSRRLKALGHDARLMPARYVRPYSKGQKNDFRDAEAIAEAVQRPTMKFVATKTAEQLDLQALHRVRERLVSQRTGIINQIRAFLLERGIAVRQGRLSLRAALPQLLAAPSEIVSPRMLHLIEDLAGDWHRLDERIRALSDEIEAIARQDAGCERLMSVPGVGPIVSSAMVAAIGAGDTFAKGRDFAAWLGLVPKQISTGDRTILGSISKRGNRYLRVLFVQAAWVVLVKRKSRERLGLDRWLEAAKKRLHRNVLAIALANKLARIAWSVLAQGRSFQVGRLAEAHGQTA

SEQ ID NO: 45841 - protein, 350 aa, unidentified
MLIIGCDYHPAFQQIAFVDTDTGELQEGRLQHREEAEKFYRDLAAQGMKVRVGIEASGHARWFERLLAELNFELWIGDAAEIRAKQVRKQKTDRQDAQHILRLLLEDRFPQIWVPSWENRDLRQLLWHRHRMVQARTRIMNQLQAVALNEGLRCKKKLFRETGREQLEAFRLARWASRRRHDLLELLDRLTPTIAQLTEAIEQEVEKCPAAQRLRTHPGVGPLTALAFVLIIGKADRFQCGKQIASYLGLVPLEKSSGNQRRLGHITKQGSTLLRFLLVEAGQVTARSLPEWRSKYFHLTMRRGRKIAKVAMARKLAVRLYWMMRKQWDYGQLTKFGSHAGKLGTGDGVK

SEQ ID NO: 45842 - protein, 403 aa, unidentified
MSNYFAGLDWASQTHALSVVDERGGVVERFEIEHAAAGLAELQRRLRRLGSPPVAIERPSGLLVDTLVEAGFTVVPIHPNAVKASRPRYRSHGGKSDASDAYMLADLLRTDGHRFKALTPQGDEILALRALVRGRDDLVASRVQLANQLRTLLESFWPGAAAVFADIDSPIALAFVDRYPTPESAKALGPKRMAAFCAQYAYSGRRTAQDLLARLHEAPAAVCAEMQMEAKGELARCLARTLRAVVEQIRLLSSRIEHHVASLDDGQILMSFPRAGRICAAQILAELGSVRERFTTDAQLAAEAGVAPVTYESGKSKAVTFRWACNHRLRAALTCLADNSRHASDWAAHVYAKARARGCDHPHAIRILARAWLRVIWRAWTDRKTYDPAQHRAAQLLLKTAEG

SEQ ID NO: 45843 - protein, 422 aa, unidentified
MAESGYCFYVGIDWATATHQVTVLDPERHLIGERSVAHTGEALAELADWLTQLASGAPERVAIAIEVPRGAVVETMLERGFHVFAINPKQLDRFRDRHTVAGAKDDRRDAFVLGDALRTDRPAFRRIYPEDPLIVQLREHSRLDDDLLQALVRLTNRLREQLIRFYPQPLALCPAADERWLWALLEVAPTPTTAHRLTRPRIARLLRSHRIRRFTADDLLAQLHTPALHVASGTAEAASAHIALLVPRLRLLRDQRSACARQIEDVLAHLEQRAVIEGQPGEHGDVAILQSLPGVGRTIAATMLAEAGWALAARNDRALRALAGIAPVTKKSGKRRLVLMRLGCNRRLRYAFYHWGRGAIQSDPRARAHYQELRQRGHSHGRALRGVVDRLLAMLIAMLTARTLYDSNRRLVVVPGAGEKTT

SEQ ID NO: 45844 - protein, 430 aa, unidentified
MICAAVERCAGIDVGKKFLAVCVMTGRLEEEPRVKQRQFLTVRRELDGLRDWLKQEGVTHVVMESTGSYWKPVFNVLEDSVKVYLANPQEVKIRKGHKTDQKDSWWLAHLLRHAMIHPSFIPPRALRELRDLTRRRAKLTQAGTAEKNRVQKILEDANVKLGNVLTDVFGASGQLMLNALLEGKAGPEEIARLAQRRAKRKIPEIVAALEGHRMSGHHRAMIRYSLAHMKFLEEQIEEIDKDIAEKIHQAGLDQSWQNLQTIPGLQQRSAANILAETGADMTQFPSQRHLASWAGVCPGNNRSAGRNLSSRPTSGNPWLRGALTECAWAAAAKKNCFLHTKFWRLCSKSGGKKASALVAVAHTLLQLVYETLRSGKPFQDRTAPPPSQQQRERLIRHHVRRLGKLGIRVHSIRTAPMKSAKQSHQPLENT

SEQ ID NO: 45845 - protein, 423 aa, unidentified
MLKIVYPVCCGIDVHKKFVVATIATTNDKNVTSYQTRSFNTFKNDLIALNNWLVENKCKDICMESTGKYWIPVFNVLEDFCTITLANPRYVKNIPGKKTDKRDSIWLADLHKHALVKGSFIPPKPIRELRDLIRYRFKLTKVSSSEKNRVQNSLTVSNIMLANVVSDTFGKSASSIIKHMLENPDLTSFDYSSMLHKSLKKKADEIEQAVAGKFSKEQASKLSVCYEHFNSVEKCIETLEATILELSLPFKEQIDIIATLPGIKQASATAILSEIGTDMSVFTSDKHLCSWAGLTPQSNESAGKKKSVRISRAGVYIKPLLVQCANAAIKDKSCTVFKNRYEAIKKRRGHKRAIIAVARMMLTCIYHMLSKNEPFNPLLYDDNTKSKQRSKEDFQSIEQAILFLQTKGFTVNVSDLVAAKNQY

SEQ ID NO: 45846 - protein, 400 aa, unidentified
MSTAHGRIWVGIDAGKGHHWAVAVNTDGETVFSTKVVNDESQILTLIAAAREKADEVRWAVDISGRASALLLALLVAHGQQVVYVPGRTVNRMTGAYRGEGKTDAKDALVIADQARMRRDFAPIETPPELVSTLQLLTGYRRDLIADRVRLINRLRDLLVGICPALERAFDYSAVKGPVVMLTEYQTPAALRRIGVKRLTTWLERRKVRGANTIAAKAVEAAQSQMTALPGESRAAKLVRDLAHQLLALDERIKDNDREIHETFRTDDRAEIIESMPGMGPILGAEFVAIVGDLSGYRDADRLASHAGLAPVPRDSGRRTGNYHRPKHYSRRLRWLFYMSAQSAMMRPGPSRDYYLKKRAEGMIHTQAILSLARRRVNVLWAMLRDKRLFTPVPPVTQAA

SEQ ID NO: 45847 - protein, 483 aa, unidentified
MKHKQQEKTKNAAYQPTQHHWHEMNRKQRRETMRKIQSEDLSLEVIHPDAAGIDIGNESHYVAVPPGRDSQSVRRFGCTTAELKAMADWLQQCGIRTIAMQSTGVYWVAVYDILEQAGLEVYLVNARDTKNLPGRKSDVQESQWLMKLHTYGLLRNSFRPSQEIRVMRTYWRQRNDLVQSASRHILRMQKTLTQMNLQLANVLTDISGATGQAIIKAILAGEHDPHKLAEFRDPRVKASEEQIAQSLEGNWQEDLLFVLKQEHEGYEFCQKQMAECDRQLQQYLQQREDRSHGAPLPEEKRKGRRKKKRANKPQFDLREGLFRMTGTDLTRIDGIDVMTATTVISEAGYDMSKWQTENHFVSWLRLCPDNRISGGKIIGKGRLPTNNSVSIALKMAASTLRESKTYLGAQFRRLRTRLGAPIAIKAMAAKLARLVYRMLRYGMKYVDQGAAFYELRHRELQIKRLKAKAEKLGYRVTPIPVAA

SEQ ID NO: 45848 - protein, 350 aa, unidentified
MKKNSRTVERHPAETIGIDLGDRTSHYAILNEEGMVVEEGSFRNNADSIAKHFGKKARVRVALEVGTQSAWIAREFNKLGHEVIVANARELKWITSSDTKNDRNDAVKLARLARADRNLLAPVEHRTAEQQAELAVIRARDALVRSRTLLVNTARSLAKGFGLRLPASITHTFGARALALLEENLRAAMQGLLEQIDALGVKIRDYDQRITEVSAKHPDVERLASVPGVGALTAATFVLTLGRKERFAHSRDVGSFLGLRPRQKQSGERDPQLGISKSGDKYLRKLLVQCAHQILGHWGKDSALRQWGLSKSSGSSSKKRAVIAVARKLAVLLHRMWTTGEIFKPFPKMA

SEQ ID NO: 45849 - protein, 361 aa, unidentified
MSTMLSGQVDFVIGVDTHRDNNVAAIVEAVTGGVVDHLHCSTDAMGYKRALAFATLHAPGRRVWAIEGTGSFGSGLTTFLLENGEWVVEIDRPARPARRDGAKSDELDAVRAAREALSREHLAAPRARGDREAMRVLLTARHGAIVGRTKAIGQLKALIVNAPQQLRDQLRRGTTDQQLDRCARLRTLPSHSIEHRATVQAIRATARRALYLEAEAAEHEAELEQLVLQACPELLALPGVGVITAAQFLICWSHPGRIRSEAAFASLAGVAPIPASSGNTVRTGSTAAATDNSTEPSTPSPCPGCNTTNPPVPTPHAAPPKASPAETSSGASNEPSPARSTATCRPTPRHSTSTKLLLDEP

SEQ ID NO: 45850 - protein, 320 aa, unidentified
MQTPSVVRNIGADVAKDEIVVACSEGSFPVRKVANQRTAVLAFLKGLPAGSRIGVESTGSYHELFADAAHQLGFLVFLLNPKDTHHYAKAVGLRGKTDRVDAELIARMIAHEHTKLHPWIPPTPQQRELDRLIKRRATLISLREAVAMSLHELDGFAADLKALRTRFNQLIARIDLRVKALVEASPERKQNFTRLCTITGVGPVIGTALVNTLERVPLKSADAFVAFTGLDPRPDDSGQHRGKRRLSKRGPGELRRLLYLAAMSAIKTKTWRPLYDHYRAKGLSSTATLVILARRIARTAWSIYTHKTEFDPGRLTKPLT

SEQ ID NO: 45851 - protein, 323 aa, unidentified
MSSFVGVDVAKNTFDVATHLPNGKHKTKAKLANETKGFKEFEAWLHKQVEPSALIVMEATSVYHLELAEFVYNKGYRVCVVNPATTNAYAKSELRRIKTDKSDAKLIADFAKEKHEKLQLWEPEPLKYRQLKAMVRRLDDLQEMEQMELNRLDVSDEKVKNSINSVLRHIEKEIAETHKAIKKHIDDDPDMRQMRDLIVTIDGIGQKTLERLLAELGDLRKYANPRQLVAAAGLNPKLQDSGLLKGRTVISKIGSARVRAGLYMPGLVALKHNKAIMAMKDRLKANGKAPKQIICAAMRKLLHFVYGVLKSGQPYDPKLALAQ

SEQ ID NO: 45852 - protein, 347 aa, unidentified
MAFIGVDLHTNSFTICRLHDDGSEAFETFTLSASALQAFCMSLDADDEIAVEATGNTAWFCDEIRSCVGRIVVVNPRQFQVIRKSVNKTDKNDARSLAFFLSKDMLPETRLKSTAEAELGSLVATRDVFVKQRTMLLNKIHAMFVRRGTKLKKEGLASKKRLRELDVSQFSALEQVELNALRNQALSLTETLVELDKAIEAAGAKLPGHEGISSIKGIGSRSAAILLSGIGNIEDFESADKLAAYVGIVPKVSQSNDTDNRGRITKRGNKLMRTTLVQCTLIATRYSGYLNAFYQRIKERRGAGKAIIATARKLLSIIYDTLKNGWVFEDFTEFKIKQNQCPTGQPS

SEQ ID NO: 45853 - protein, 356 aa, unidentified
MRFLKAQHQFYIGIDLHARTMYVCVMDNTGAVVYHKNMPSTPASLDHVIGKFGTDVVIGVECIFTWYWIADFCSERSIPFALGHALYMKAIHGGKSKNDRIDSEKIAAMLRGGMFPIAHVYPKEMRATRDLLRRREYFVRHQAELYAHIENTNYQYNCNTVLAKTKMKSAAYRNTLPDSFQDPLAQKSIHADMFLADAFHTLIRDIETQIHTQARCHDPVSLELLKSIPGIGDTLSLTILYEIQDIQRFPAVGNFLSYSRLVKPAHESAGKRVSGGNNKIGNGHLKWAFSEAAVCFLRKHEQAQRLHQKLVSRYGKAKALSLIAQKLGRTVYFMLKHKEPYDAVKFFMDGTYDHGT

SEQ ID NO: 45854 - protein, 338 aa, unidentified
MQTGQTVRTYALFVGVDIAAKTATVATQRPGTKTGRSLTIEQTPEGYTSLLQQLQATGSVPSQVLVVMEATGSYWISLATRLVHAGFAVSVINPAQAHHFAKALLKRAKTDAIDAQTLAQLAMVLQPEPWTPPPQIYYALQQRLAQRDDLLNLRQQVRNQLHALVQHPEVIPEVRARMDRLLTTFEAQLVEVEREIAVALTQDSAWAAAATRLQSIKGVGWGTAAWTLVTTLNFTSCDTVDSLTAYAGLAPMPRQSGSSVWYRPAMGHTGNSRLRTAFYMATLSAAQHNPIIKAFYARLREAGKPEKVARCASARKLLHITWAVVKKDQRFDPHYAQG

SEQ ID NO: 45855 - protein, 422 aa, unidentified
MGDDRVVLEWEVAMDVIVERPGALDVHKEQVTACVRASDEGGRRVAHVEQFKTTVRGLLVLRDWLKAHGVTQVTMEATGVYWKPVFHVLEDDFELVLVNARHVKQVPGRKTDVCDAAWLCQLAEAGLLRASFVPPKPIRALRLLTRYRKAQIGERQREANRLHKALEDTGIKLDCVASDILGVSGRAMLEALTCGTTDPSVLADLARGRLRAKIPALREALEGRFEPVHALLIGAILAHLDFLDEQIERLSDAIEVQLAPFGPAVELVCTIPGVAQRSAENMLAEIGLDMSVFPSAAHLASWAGQCPGNHESAGKRRSGHTRKGSKWLNEALKNAAMAAVRTNDSYLQALYLRLRPRVGHARAIGAVKHSIICACWHMLSTGEVYRDLGGDYFRRRDPERQTRRLIAQLERLGHAVTLQEVA

SEQ ID NO: 45856 - protein, 433 aa, unidentified
MDEVRDEPLHRDRVCGIDIGKASLAATIRVPSDRDPSRRAAETRTFGTTRREVLALADWLRCWQVPAVVMEATGDYWKPVFYRLEAEGLECVLADARQVRNLPGRPKRDPSDSRWLAACFERGAVSSCFVAAPEFRLIREHTRYRRDLTGERTREKQRAEKLLESAAVKISSVLTDVHGVTGRDIMGHLIAGERDPRALAELARGAARKKIPQLAEALEGAEFFTPEHGALLKAMLARIDRIDADIAAVTAVTERLLAPYEEQLQQAESMPGWGRRAAQDVIAETGVDMTRFRTPGHLASWAGRTPLDKQSGKRAGPARHKHGNRYIGAVTGETSVAAGKTQTREGARYRRLSRKRGKAKANVALGNTQMRVLHVLLSNPGMRYHDLGPDYYDHDRNTARQVSHHVGKLGALGYEVTLCRRPEPDGTGDTQAA

SEQ ID NO: 45857 - protein, 319 aa, unidentified
MTQALCVGIDVSKASLEVAFGSSGEVRSVANESIAIESLAAQLLKLGPELVVMEATGGYERMAAALLWDAGLRVVIANPRQLRQFREGMGQHAKTDRLDARMIAQWAEHRRPEVRPLPDAQARELSELLARRRQLLEMLVAERLRRAQVLGKSVRKELDASIGSLERRLKRLESEIEQRIGKSDLWQRTRELLESVPGVSKVTSFMLIAELPELGTVDHRRLASLTGLAPYVRQSGQWRGQAMISGGRAAVRSALYMAAVSASRWNPALHPFYQRLLERGTPRKKALIAVARKLLVILNAIVRDRAPWRPPCLATPAKS

SEQ ID NO: 45858 - protein, 349 aa, unidentified
MSEITRVGVDLAKQVIQVHAVDQAEAVVTRRAVPRRAFLDWCARLPPGCLVAMEACTGAHHWARLLSKLGLKVRLIAPHLVTPYRRQGKTGKNDANDAAAVCEAASRPDMHFVPVKTVEQQGILSVHVMRQGWEKDRTACINRIRALLAEFGLVLAKGPEKLRLQLPELLEDATNDMPGVTRLAIQRAVQHWRQLDEDIGWCDQQIQRHARTEPRAQQAQTLLGIGPIGASALVASVSDFSQFTSGRQFAAWLGITPSQNSSGGRTRLGGITKHGDEYLRMLLVTGAKAAIHRGKPREERVWLWAKQLSERAGWQKAAVALAAKNARILWAMFTRGQSFVPNHTSVKPT

SEQ ID NO: 45859 - protein, 352 aa, unidentified
MIEVGMDQHKRFTVAAALNPETGHVIERRFEHDDPDAVTAFLASFDDDVRVTLETTGNWYWLADLIESAGASLRLCHTVEAKRRRRGRAKNDRLDAIGLAELSAEDRVPESYVPARDERDRRERHRFRIRLVRIQTALKNWIHALLAKLNVEVPFDDAFGKGGRAFLDALDLREPYGGHLRAALRLLDALAAEIGREERAIRATLKADDRAEILLSAPGVGELTAYLMLHEIGPIERFPGPKPFAKYCCVTPGTEESADWRGRPGVGRAGNLYLKEAFTNAVLGAVRKDAAIRTYYNRQVRRNGKKKAKVAAAHKLARAVYFMLSRRQAYRPAPRPKKMTTAGKPVLRLGRS

SEQ ID NO: 45860 - protein, 369 aa, unidentified
MTVYIGVDLHKTQFTVHVRVGDRIESLSEIKQYPTTAAGYTKFLERIAGYKAVDFTVKIGVESTGNTRFFKNQVEKAGAEVTVINTLKFKVINESTKKTDKHDASTISWFLSKDMLPESHICSKETENLRRLLKSRERLVRSIVGQKNEVHALLVSMGLDDELRSLQSKKGRQKVLDTLLSHSDLVLEAQSVKLIFQIIEQMIESVKMIEKHLSELTEDDAMVNRLMTIRGCGKITAWIIRAYTEDIGRFANAKKYAAFCGLVPWVQDSNESVRHGKITKRGPQELRTAYVQLVLGIRRCKDTWGWRIMQRLDYMKKNKGSGKSIVAAARKMAEIVWALLTEGQDFDSKKMMGTYKPLTLTEQALAAMN

SEQ ID NO: 45861 - protein, 333 aa, unidentified
MQFESVIGIDVSKLTLDIALISQDAVLESFKIQNKPLVIGKFFQKLFQSVDFESTLICAEHTGHYGYPLLKVCLENDYSLWVEGGAEIKQRSGVTRYKNDKVDAIRIADYAKRYQDKAKIQKTELYTIESVRSLSSERELFIKERAKYKTQVRDFKGFMDEVLYKAKMKRFTKQIESLTKLIKELDKQIITLLKSNETLAAQRKIITSISGIGDQTAIQTIVATRGFTRFDSGRKFSCHVGVAPFSYESGTSQKSRKKVSSKANKDLKKLFHMCALSAIKMEGEFKVYFLRKVADGKNKMTVINAVRSKLINRIFALIRDHRNYEKNYTTTLA

SEQ ID NO: 45862 - protein, 314 aa, unidentified
METPVFIGIDVAKAELVVAVRPTGERWTTPNYPGAWPALVARLQALAPQGIVCEASGRYEVPVAGVLGAAGLPLVVVNPRQVRDFAKATGRLAKTDRLDAALLAHFADAVRPAIRPLPDAATQLFAALVTRRRQLVEMLTAEENRRGLLPAALRAELQDHSADLRRRVAQLDQDLDQHLRASPIWRAQEDLLRSVPGIGPVTARTLLASLPELGTLDRRAIAALVGVAPLARDSGSLHGRRSCWGGRATVRTALYMATLTGVRFNPILAAFYEHLVAQGKRKKVALVACMRKLLTILNAMVRTKTRWAPRPGMA

SEQ ID NO: 45863 - protein, 316 aa, unidentified
MDAILECCAGLDVHQETVVACVLFGPLEHKPKKEIRTFGTTTPELLILADWLEEQKCSHVAMESTGIYWKPVWNILETSSFQLILANAQRIKNVPGRKTDVKDAEWIAQLLRSGLIEGSFVPPVEIRDLRDLTRYRKKLLQDVTQEKNRIHKVLQDANIKITTYISDIFGVSGRNIMESLIDGEVITTEKLTKMVKGKVRSKVPGLVDALNHQLRSHHREMIRYSWEHLGFLEQTITHVEMRIDQCLSPYRQDIELLNLIPGVNSTAASVMVAELGTDMSVFPTDNHVSSWAGVSPGNNESAGKKKEQEPHRGTKH

SEQ ID NO: 45864 - protein, 460 aa, unidentified
MSDQDGRDRVEGNGVEGFPVLRANVAGIDVGSEHHWVCAPARPGVGREVAVFAATTPGVEQMAAWLKERGVTSVALESTGVYWIVPHEMLERAGLEVVLVDTRELGRVPGRPKSDRRDCEWIQRLHSCGLLRGAFRPIEQVCLLRTLVRDKGTLVAERSDWLRRMQKSLDQMNVRVHRAVAELDGATGMAIVRAIVAGDRDPRRLASLRDRRCQKSEAQIAEQLTGHWREDHLFSLQQGLKMYDAITERIQEYGREILRQLAQMTPAARRDDQAPPPTQVTKARAIKKRGEDPLRHALYRMSGVDLTAIDALGVETVTVVLSEYGPDLARFPTEKQFVSHVGLAPHRPISGGKPVKKRKKPASASARVGVALRMAATSMRRSQTALGAYYRRVAQRLGADVAVFATARKLAQWIYRVLRWGHVYVDEGAAAYEQRYHEARLKRLATTARQLGYTLVSVEA

SEQ ID NO: 45865 - protein, 315 aa, unidentified
MRNCIGIDVAKPFFDLHALVSEQDQRFPNEMQGIQACLKLCQDVQPELIVMEATGGYESLLAGTLQAEGWPVAVVNPRRIRDFARATGQIAKTDKLDARIIARYGATLEPAPVEQIDDNCRRLKALVMRRQQLVDMHTAESNRTEHALDKEVKHSIAAIVRTIKKQIEKIDRQIKDHIDNQPQLRQKAEYLKSIPGIGDTTAHLLVTELPELGRFNRRQIAALVGVAPINRDSGMFRGKRMTGGGRKHIRSRLFMPTLVAVRCNPVLKRYYRRLIEKEGKCKMVAIVAAMRKLLCIMNTMLKNNQYWQPELIKNT

SEQ ID NO: 45866 - protein, 335 aa, unidentified
MAWNLAKNIFQAHGGDAAGAVIFRRKLRRDQVLAFFAAQPPCVVAMEACPGAHYWGREISKLGHTVRLIAPAYVKPFVKRQKNDAADAEAICEAAQRPTMRFVAVKSEEKQASAVIFRTRDVLIGQRTQLINALRGHLSEFGFIAPQGPSHIQQLIDQVEDPSSRIPEAARCCLVFLIEALRRLEEQVRELDAEITARAKADDTAHRLMSVPGIGPLIATALEALAPPAETFRSGRDFAASIGLMPLQRSTGGKERLGRTSRMGERTLRRLLIIASSAVVRWAKRKGVPSGSWLHRMLTRKPPMLVIVALANKTARIAWALMTKGGIYRAPTVVA

SEQ ID NO: 45867 - protein, 341 aa, unidentified
MDHFAGLDVSVEETSVCIVDDTGRIVQELKVASEPEALLAVLTNYRFKRIGLEAGPLSQWLFSALTEAGLPVICVETRHMQAVLKAQINKTDRNDARGIAQMMRVGLYRPVHVKTLRSQKLRMLLTHRKLLQSKAIAIENDLRATLRNFGLKVRMVGKVKFEARIKELVEDLPDLVVLVEPLLIVRRVLREQLGVLHRRLLAIVRGDDVCRRLMTVPGVGPVVALTYRATIDVPTRFRKSKAVGAAMGLTPSRYQSGEIDRTGSISRCGDEMMRAMLYEAAQTMLVRSTKWSWLKAWAIQIARRRGVKKAIVALARRLAVIMHRIWVDGTEFRWTREVAAA

SEQ ID NO: 45868 - protein, 355 aa, unidentified
MNESKFIGLDVHKTSVSAAVIDADGKLVMQSIFATGAVAILGFVHGLRGTLRVTFEEGTHSAWLFDLLRPHVSEVVVCNPRKNALLKSGNKSDQIDARKLAELLRAGLLSAVYHGETSTLTVKELGRTYLALTEDTTRVMSRLKALYRSQAIATEGKKLYSKRRREQWLTQLAQVGRRYRAERMFEQLEALQCLRRKARRDLILECGKHSATAWLTSIPFMGPIRAALLIARVQTPFRFRGKRQFWAYAGLALETRSSADYRFVEGELRRAKKPVFIRGLNLNHNHDLKNIFKGAATSASAMPGPFRDFYENLLGKGMEPEMARLTLARKIAAVSLTVWKKGERFDPEQLKAQAA

SEQ ID NO: 45869 - protein, 320 aa, unidentified
MMAQSDRVVVGIDVAKDKVDACIRSLPQRQTFPGNVEGRRRLIAWLRKHKVDSAVMEASGGYERDWAKVLRGAGFEVRIVDPKRVRNFARSAGRLAKNDVIDAEMIAWFAETFVEAPGQAYDAAREKLAQMVCARQGLLDLQTQVKNSSEHSAPEVVEQMQARMLKTIALEVDKLEVAMVALVRATAHFAERAEIIESVPGLAEITSAGLIALMPELGQVRNQAAAALLGVAPYDDNSNKRQGERHIQGGRRKIRNLFYMACMGAATRHNPMLKAFYQRLIAKGKKPKVALVACMRKLIVILNTMIARGEKWDPSRYAVS

SEQ ID NO: 45870 - protein, 316 aa, unidentified
MTGTPTYAGIDVAKDRLDVVLRPSGEYVEATNDERGIRSVVRRLRKDDVALAVLEATGGLEQPAAAALALAGVPVAVVNPRQVRDFAKATGKLGKTDRLDAAVLAHFAEAVRPEPRPLADEHTRELSAVVLRRRQILAMTTAEANRARTAPKAVKKRIEAHLRWLRKELARVDGELKRVVEESLVWKERAALLMSVPGVGPTLSATLLAELPELEHLDRRRLAALVGVAPLNRDSGTLRGIRTVWGGRSGVRTTLYMATLCATRHNPAIREFYGCLVASGKPKKVALTACMRKLLTILAAILRNRTPWQPRLLPDS

SEQ ID NO: 45871 - protein, 424 aa, unidentified
MELRYPCCCGLDVRKNAVVACLLRTVTAGVRSTEIRTFGTTTAELEKLGTWLHEAGCTHAAMESTGVLWKPGHNVLTEAAYGLDVRVANARHVRGMPGRKTDVGDAEWIAALLQHGLLKPSFIPDRAQRELRDLTRTRTGLIDERSAAVKRLQKVLEDANIKPSGVATDVMGVSGRAILAALLAGTTDPAVLAELARGELRAKIPQLEQALAGRMRDHHRGLVALHLSHVAFLDAAIDALSAQVAEKTRPFEAELRRLETIPGVKRRTAEVLAAEIGLTMAPFPTARHLASWAGMAQGNNASAGKRKGAKTRKGSKWLRRALVEAARAAARTKQPGRTACADQDRRLVVRTGPKKAAVAVGHAIAITAYDLLTRQTTYHQGDPVPIDERRRARIRQRALHQLAALGYHVTITPTPTQDTRPEVA

SEQ ID NO: 45872 - protein, 362 aa, unidentified
MRIIGCDLHARQQTLAMLDTTTGEVVEVTLKHEGDNVREFYCSLPGPVRVGIEATGSMQWFLNLMEELGIECLVGHPAQIRAAEPRKQKHDRRDADLILKLLAENRFPAIWLPSKELQDLRSLLRHRHQWVRMRTRIQNALQSIALANGLRRGTALWSHDGQSRIASLPLAPHTAYRRSELQALYEKFEAEIEKLNQRVAEQAGKRLGARLLMTHPGVGPITALATDVFLGDPARFADSKALASYVGMIPREYSSGGRQRLGGLSKQGNPLLRFLWGEAGAHAVRKDPELQRFYRRKLVQKGLGKASVAVARKLGIRLWIMLRDQIEYHEFCRRGQKQQKSSDACAGMPETRYGAKSHRPVD

SEQ ID NO: 45873 - protein, 337 aa, unidentified
MDYFAGLDVSMDETHICVVDRDGGVVLETKTTTSPAAIAAGLAKAPECKRIVFETGRMAPTLNHGLDALGLPVICIESRQAYQALKSLGTHKTDRNDARGLAHLARTGFFKPVHVKSLSAHATRALIIARKKLVGQRVTLENQIRGLAVVFGVRLPRGLSPAFAEQTIRGSQGIAGLSGAMRGLLAARNAVLKAIAAINGDLKGLVRSSEACQRLMTIPGVGQLTALAFVAAIDEPERFRRSRDVGAYFGLVPRRYQSGEIDYTGSISKCGDRRLRTLLYEAANVMLTRYKPPLKLKDWALAIAKRSTMRKARIALARRLTIIMHAMLRHGTEFKAA

SEQ ID NO: 45874 - protein, 347 aa, unidentified
MKFYTTFHQYYCGIDLHARLLYVCILDNLGNKIVHQKIKADPHQLRKLLKPYIGQIVVGVECMHCWYWVSDFCHELKVDFILGHALYMKAIHGGKAKNDKIDSYKIASLMRGGNFPLAYNYPAETRSTRDLLRRRTHIMRHGADLKAHVVNTDSQYNLPAQSLNLKNVSAREGLRHHYDDPIVQRMIALDMNILDCYIRELKHVESFIENKAKQHYGALLMIVRTFPGIGQILALTILYEIGDIKRFPSVQQFASYSRLIKCKAESAGKVYGTSGNKIGNGYLKWAFSEAAVLYLRGNDKAKHYLAKLQKRMSKGKALSVLAHKIGRCIYFMLRDRQVFDEEKFLKG

SEQ ID NO: 45875 - protein, 348 aa, unidentified
MDKIIRIGIDTSKSVFVLHGVNAADEPVLRKKLRRRQVLDFFRIMEPTRIGLEACGAAHYWARELMALGHAVVLLPPQYVKPYVQRGKNDAADASAICEAMSRPRMRFVPVKTAEQQAALMLMGVREQLITRRTQLANMIRGYAAEFGITAARGLDKIEPLLARIATAADVPELAKELFAALAEQYGELKPKLRRIDAQLLAWHRQNELSRRLAQVPAIGPIGAALLAMKVPDPRAFRTGRDFAAWLGLTPKDHSTAGKQRLGVITRAGDEALRGTLVSGATAVIQQVSKARGNPSPWLIALIKRKPPKLAAVALANKTARIAWKLMVSGEPYDRNHGAAARTVGIAA

SEQ ID NO: 45876 - protein, 479 aa, unidentified
MTKQTAQRSDLKAVPLLLNESLYIGVDIGKGTHVAGFLSKTLLERHDRFEACPALVFENSREGFRMLMERARSLAPLEQVFVLMERTGHYHRALQQYLQELDITVYVMHVQSRPSRMLKTDKRDALTLANHLYSQLELGVQVANKLHLVRRVVPPTEAAAQLKGLIRHRYELIRESTQRKNKLTAICDEVFPELTRIVKDPNSLVALALREQFPTPQALAIASFPTLQLIRGGARSLSDAKLLELQRLAAQSIGVKDMARLRGLLLEQRQLIKELRLLREHVDQLESEIGSIVEQAREGQILLSFPGIGPVMAATMIAAIGSIHNFPSAATLKSYFGWAPIREQTGTSYDRSRLTRGGTRTMKQMLFLVVFQAIRLRDNEWAKLYERLVKAKCPYDERTQSHVGKKRVIGRVAGQMTEAIYALLKRDAELLSTVLPGPDPPPPQLYDPEVHRQHRQGQYRPLKSTPPPNTITLVHPSSS

SEQ ID NO: 45877 - protein, 337 aa, unidentified
MRFIGVDLHSNQITICYLTKAGKEKLATFALNNLTEFLNSLRRTDRLAVEATGNTRWFVEQIKSLVQQVVVVNPNQFEVIRRSVKKTDRHDARALAQFLSKEMLPEARMKSEQASEINSLATTRDKLVKLRTTLVNKLHALCRARGVSSRKSQFLSKKGIEAVMKQDWSETQRVEVEVITSQIASLNEGIHRLDHQLGVSGEQLEGQKNLVSIKGIGPRGAAILLAVIGDVADFENEHKLESYFGIVPRVSNSNETVQHGRITKRGSKLGRTTLVQCALVAKKYSPYLSRFYERIKAKRGGGKAIIATARKFLGIIYRTLKNKWVFEDFPNFVLAEG

SEQ ID NO: 45878 - protein, 334 aa, unidentified
MSFTHFIGIDISKKTFDLALINENAADKAITAKFSNNHKGIVRLEQFIRKQELVKQQVLFCIEHTGLYCRVLSNYLVENQYAVWLEMPAQILRSLGIQRGKTDQVDAKRIATYAFTFRAKARLWQPPREEVQKIHDLMALRDRLVESRKSILTPIQELEATGLDEVAATLRKHCQKSIDSLDKEIKQIEKELDEIIDKDTNLKNKYKLARSVPGIGKITAMTLLYFTNEFTLFRTAKELACYCGVAPFARESGTSVRGKTRVSNFANKVLKKLLHMASMAAISSDKELKAFFERKVAEGKNKMLVLNAIRNKLLHRLVAVIKRNSPFQSEYEPV

SEQ ID NO: 45879 - protein, 341 aa, unidentified
MHPTTIGLDLAKHVFQVHGVDAAGKVIIRKKLRRSELKAFFEKLPPCLVGMEACGTAHYWGRELSSLGHHVRLMPAAYVKPYVKRGKNDEVDAEAICEAVTRPTMRFVPVKSAEQQSILMLHRTRDLFVRQRTMLVNSLRGQLAEFGLIAPQGIWRIPELHALAKDTDNSVLPEPARACAELIMMQIEDLQAKIKAIERTLMARHRANEMSLRLATIPGIGLITATAMVATVVDASAFKSGRHFAAWIGLVPQQNGTGGKVHLGRISKKGEPYLRRLLVLGATAVVRYARDKPEFAGWVNALLARRPARVVTVAVANKLARIVWAIMRRGGSFRQRPLGIA

SEQ ID NO: 45880 - protein, 312 aa, unidentified
MLTPSVYLGADVSKSTIDLGCSLFVVPASIPNRPAGFKALLKVLGKSPGPVHVVCEATGPYHKAFVAALHQAGLPVSVVNPRLPRDFARARGKLAKTDKIDALMLADYGRTMRPAPTPRPEAQMTLLDDLVTRRAQLVEDRAREKTRLQQTTRAETVTSLKLHLRHLDGQIEKLLARIAEVVEATPALRAKVARLVEVQGVATLTASALLAALPELGTLSKNEVTALAGLAPFNRDSGAFRGTRSIRGGRFEVRIALYMAALSASRCNPILKAVYLRLRAAGKAHKVALTAVMRKLLVHLNSLLKSLPSSPA

SEQ ID NO: 45881 - protein, 339 aa, unidentified
METLPVFVGLDYHQRFVQVCVLDRAGGVLANRRCDNDHMAIAQFAGPFGDVRAVAIEACTGSADLAEILINTTRWSVHLAHPGYVARMKRGPDKSDFTDARMLADLVRVGYLPEVWLAPEHIRELRKLVGYRRQLTEQRRNAKLRIGALARERRVRSDLPRGSQLRLQSLARSGALGEQSRWIADRHLSRLLELDLEIKAVESRLTALTRDDPVVQRLAQLRGIGPVTAWALRANVGRFDRFANGKQLARFCGLSPRNASSGQRQADAGLVKAGDKYLRSILIEAAHRLIWHDERWKALAARLESRGKPRSVTVAAVANRWVRWLHHEMTEVRPRPMAS

SEQ ID NO: 45882 - protein, 292 aa, unidentified
MQISILGIDIGKNNCSVVGVDDHGAAVVRRTMRRQTLIEFVEKLPTCVIAMEACCGAHHLGRLFVARGYEVRLMSPEYVRPYVKAQKNDDRDAEGIAEAASRPTMRFVELKSQEQLDIQTLHRVRSRLVAQRTTLINQLRAVLLERGVIFAAGRVKFASALDGLLAEADEILSARIRSLVIELRDEWRMLDKKIGALNAEFVALARQNSVMPRLTSIPGIGVLNATALVAAIGDVGSFKHARDLGAWLGLVTRQFTTGGKARLLGITKRGNTYLRTLLVLGARAAMHTLQSK

SEQ ID NO: 45883 - protein, 370 aa, unidentified
MGKYSEGYVAFDTAKLKHAVAIAEGDRKGEIRFLGEIANTPTAIERTITKLAGRYAKLHACFEAGPTGYGLYRQIRALGHDCMVVAPALIPRRSGERVKTNRRDAITLARLFGAGELTGVWVPDEVHEAVRDLVRGRGAAVDDLRRKRQQLLSFLLRHGRIFAGSKHWTRAHRRWLADQSFDHPAQQIVFQDAVSAIEDAAERLHRLEGQLAAIVPVWSMAPVVAAYQAMRGVSFLVAVTFAAEIGDVRRFDTPRQLMAFLGLVPAEHSTGETVRRTGLTLAGNRRARRVLVEAAWSYRHPARVSETLRARLEALPKVVRDIAWKAQVRLCSRYRRLSATGKKLPVIIAAIAREMAAFLWAIGHQVAPAA

SEQ ID NO: 45884 - protein, 416 aa, unidentified
MKKNSKSPMKKEQKAKRAKAQRPAQREPKEVLAELVEKLRGKLEVKATSASPAEAGPRAELGPNLDRLTVGVDLGDQWSHYCILGLQGETLSEGQLQTREAEVAEFFQALPPARVVMEVGTHSPWMQEIISGEGHEVVVANPRLMEGSKRRKRKNDRIDAKKLARLGRVDPQSLHPIRHRSREVRQDLVVLRAREALVAARTELINATRGLVKSMGTRLPNCSSPSFGQKVKDAIPEKVQEALLPLVQLADALSDCIRSYDRKIEELGSGKYGQTKLLRQVKGVGPITALAYVLTLENPEYFEKSRDVGPYLGLVPKQEDSGEIQPQLGISKAGDPMLRKLLVGSAHYILGPFGPDTDLRRYGLRLCERGGKNAKKRAAVAVARKLAVLLHRLWVSGEVYEPLGYASSRAIVQPAA

SEQ ID NO: 45885 - protein, 345 aa, unidentified
MKHYSTTIGLDVSDKYSRYCVIDGCGEVVEEGRVRTAAEAMSRKFSSYEPSCIAMEVGTHSRWVSRLLEAMGHEVIVSNSRKLRMIYASDSKGDRADAEMLGRLGRSDPTLLCPIRHRAESSQLDLALIRSRDMVVRTRSNLINHVRGSVKAFGYRLPTCSAESFVNKVRGRIPKELWLALGPVLETIGELTVRIRAYDRQIEVIAKKRYPETALLTQISGVGELTALAYVLTIEDPYRFKSARSVGAYLGLRPRLNQSGQTDRQLRITKAGDDLLRRLLVGCAHYIVGPFGPECDLRHWGLRMAGRGGKNAKKRTVVAVARKLSVLLYRLWITGEEYKPLLVSR

SEQ ID NO: 45886 - protein, 339 aa, unidentified
MTTTSQDYVGIDVSKDRLDVAVLGQKPITQVANTKKGIAELVKEMHQLNPRLIVVEATGGYEEALVRAMFASGLPVALVSPQRVRQYAKARGLLAKTDGIDAQNLAEYGKNIQPRLFVAKSEQGRRLSALVGRRKQLEDMRKSEKNRLRTVYSEVKGSLETIIDCLAAEIKRLDEEIRKFMQEHEDFKEQEKLLRSAKSIGPVTAATLLADLPELGKLDRKQIAALVGVAPMNQDSGKKRGYRKTKGGRPEVRSVLYMAALSGIRYNPVIKAQYDQLVKRGKEKKVAITACMRKMLTILNAMMRDQQPFRLATPSRNSSALPFKGGFDLDFQHSCCTRC

SEQ ID NO: 45887 - protein, 354 aa, unidentified
MSQTPNTAIAVIGIDIGKNSFHVVGQDARGAIVLRQKWSRGQVEARLANIPPCLIGMEACVGAHHLSRKLASLGHDARLMPAKYVRPYSKGQKNDFNDAEAIAEAVQRPTMKFVATKTAEQLDLQALHRVRERLVSQRTGIINQIRAFMLERGIAVRQGIGFLRTELPTILAMRTDALSPRMLRVIEELAGDWRELDQRIDGLSGEIEALARQDQACSRLMTVPGIGPIISSAMVAAIGTGDVFSKGRDFGAWLGLVPKQISTGDRTILGKISRRGNRYLRVLFVQAAWVVLVRIKNWERYGLKSWIEAAKRRLHHNVLAIALANKLARIAWAVLAKGRAFELTRTDDAGVRPA

SEQ ID NO: 45888 - protein, 338 aa, unidentified
MLHSGIDLHKRDLVIATVDSEGRAVRDARMSTSRSAVSAYFDSLPGPHRAVVESTATWYWLRDHLAAAGVDVRLGHSKYIKAISYAKVKTDRVDAATLAQLLRSDLMPEGHIMSPEHHEARDLLRARLRLVVQHVRARHVIEGLLAQYNVSALSALPPLVQMRTTMLAEQLTLFTQQIKRIEHELQPQLIPTADVQRLVWIPGVGKIVAFTLALEIDDIARFPTARDFVSYCRLVPGAGNSGGKTRHKRTKDGNRYLKLAFSHAAVRAMQYFPEIRAFYHSMARRKPKPVARALVAKELARIVYFVLKKKEPFNNTFKGKPLSRTKQPKWPRLASPPV

SEQ ID NO: 45889 - protein, 381 aa, unidentified
MSKSYDYFVGLDVSQRMTSICVIDTDGKKFGEGKCNTRPEDIRGWLTNRVDVDKTMKIGLEAGNMSSWLYSGLVKSGFDVVCMETFQAHRFLATYRNKTDKNDARGLAQLVRMGGEDFLRVVSIRSQASQETRVLLAMRDHLVSQKVGLENHISGVLKPFGVIVERGNVTADTFYRRTLEGLAEAERNGVHVRPYVLPSLNLYMEAVEKIAPLTEKIHAIANSIEMVKRFMDIPGIGPVTALSFYAAVDNPQRFQKSSDVAAYFGLTPRQFQSGETNFMGGISRRGDPATRRVLVIAATVLLSGSQEWNSLKAWGVRLAKRIGFSKARIAVARKLAMIMHKIWLNNDRFRPKTLSPQERVKLRQELIVVASKSGRVASAPV

SEQ ID NO: 45890 - protein, 353 aa, unidentified
MSTIYIGVDFHARQQTVCSLKTAEGVVVTHNLKHQDKDEVRAFYQQFSGRVVVGIEASGYSPWFEQLLEDLGHEVWLGDATEIRRRARWRQKNDRRDAELILDLLVHDEFPRLQRPSAQSREILRMLRYRQKLVKIRTMGKNSLQALALQSGLAKRSQLFSKSGQQELRRTTMSPAMQWQREQWFQLLEPLNERLLETMLWLKQQSQDDARIKRLRTHPGIGLLTSLCVVHTLEPVSRFRNQRKVAAYAGLEPMERSSAERKHFLGISKAGSRVLRYLLVEAAHTAVKKDDDLKHFYQRLATRRGRPKAKTAAARKLLIRSYIMLRDEIDYAEFRRRAVAARLARQSSRPPCL

SEQ ID NO: 45891 - protein, 343 aa, unidentified
MQIRSVGIDLGKTTFHLVALSAAGRVLLRKKFTQKQLITFTANMQISLIGMEACAGAHFLSRILREQGHDVKLIPAQFVKPFVKSNKNDFLDAEAIAEAVDRQNMRFVPIKTDDQLDLQAIHRVRDRLISRRTAVINQLRAFLLERGMVFAKSPAKLRKEIPEVLENADQNLTPRMRNLLALLWGEWKELEQQIVEMNMEVEQIASSDAACQRLQRIPGIGPLIATAIVAAIGNGAAFRKGREFAAWMGLVPRQYSTGGKAKLFGISKRGNRYLRKILIHGARAAVIRLKRERAPMGSWMSALEARAPRNVLIVAMANKLSRIAWAVLSTGEDYRALPNPTAA

SEQ ID NO: 45892 - protein, 350 aa, unidentified
MQIIGVDLHTRQQTVAMLNVETGEIVEKTLQHEGDSVREFYSTLPGPTRVGIEATGSMQWFLELMEELGIDCQVGHPAKIRAAEPRKQKHDRRDAALVLQLLIENRFPAIWMPSREQRDVRALILYRHQWVRIRTRVQNALQAIALSHGLRRGSSLWSEAGQHAIASLSLTRYAAERRTALQSLYRHLEEQIDDLDRKVEELAWQRPQARRLMTHPGVGPITALATETFLGEPKRFVDGKAVASYVGLIPSEHSSGGRQRLGGLSKQGNPLLRFLWCEAVGHAVRKDAELQRFYQHKLVQKGLGKAKVAAARKLGIRLWILLRDQIDYQEFCRRGQLRQKHGGAHAGMPA

SEQ ID NO: 45893 - protein, 412 aa, unidentified
MSRKVTDKIAAAERQGFWKGGLFMTFYVGVDIAKYEHVASILDSGSGELRLDSFRFGNDLKGFESLLSHLSKLNREDVVIGFESTAHYHQALFSCLNGKGYECILINPLIISRFRKLSLRDAKNDSIDSRIIAQFLLFEHDHLKNEEFVMNDLKELCLQRDFLIQTSTSLKIKMVSYLDRVFPELENVIPKGTLHTKGLRAVLKEYPSAQMIAKTRIDHLVNLAKKASHNRYKEATVRRIRDAAKTSAGFHSDALALKIRQSIESLESIEKQIDEVEGVLCSLPSVQNSPLHKIKGINSIEVAYILSAIISIERFSSAKKLIAYAGLNPKVRQSGTWEAKSTRMSKRGNVLLRYALVWTANNVRKHSPSMKEYYEKKRSQGKGHYSALGHCAAKLCRYIFYILNHPEEDFIS

SEQ ID NO: 45894 - protein, 353 aa, unidentified
MTEHPVGVIGGVDCHSDTHTAAALDPLGRLLGTAEFPTTSKGCAALLEWFAAFGPVVSIGVESTGSYGAGLARHLTEHDVRVVEINQPHAHTRARRGKSDPIDAEAAARKVLSGEAAGAPKNTTGIVEAIRELSVARDGAVKARTAALGQLGDLLVTAPAELREQLGCRKTLEGKATLCTRLRPSSTADQPTRAAKLALRSVARRIQILSKEIAELDSELDALVATAAPKTLALLGLGTHHTATLLVAAGENIDRFSSEAAFAHLCAAAPIPVSSGRTNRHRLNYAGNRAANRALHMIVVVRLRYCEQTKAYMQRRTAEGRTKKEVIRCLKRYVAREIYRTLRADLTTLSLRA

SEQ ID NO: 45895 - protein, 403 aa, unidentified
MFYCGIDIAKYRHEATVIDQARAAVQESISFANSKEGCEKLLALFQRLDISKEGLLIGMEATGHYWLSVYGYLLEQGFEVKVINPIQSEAFRKMYIRQTKNDRKDSFIIAQIMRFGQFSATNLSEETIVALRQLSRYRLALVDTCGDCKRRVIALLDQVFPEYDSLFSDTFGVTSKEVLSQYPTPEGMLTVSIRKLTTLLEKASHGRFGKEKAEQLKAAAASSFGVNFAKDAFAFQIRQLIEQLEFLERQVAELEEQIFSLLKQTGSYITTIPGIGDTLGAIILSEIGDIHRFDAPNKLVAFAGLDVRVTQSGEFTGTRQKISKRGSPYLRRAIWLAASRAAFCDPILSEYYQGLRARGKHHLTAVGAVSRKLCNTIYTILKEDRPWQPIPPKGKKVSNYTEE

SEQ ID NO: 45896 - protein, 341 aa, unidentified
MEEYIGLDVSVKETAVSIRRAGERIWRGKCASDPSIVAELIRKRAPSVKRVVFETGPLSVWFYHSLRTEGLPAICIDARHAKAALDMATNKTDANDADGLAQLAEVGFFREVRVKGFDSMLTRTLVAARTRLVRITTELSNQIRGVMKTFGLLVPAGKGSTFEKNVRNLLADRDRLASIVLPMLEAWRGIRIRAAELGRQLVRDARQSRACRILMTIPGIGAITATSFTTAIEEPDNFRKSRSVGAWIGLTTRRYQSGEVDYDGHISRRGDRPLRGLLYEAAAVILTRSSTHSTLRTWGLQLRERIGFKRAAVAVARKLAVIMHTMLKTGQLFNPNAGAAA

SEQ ID NO: 45897 - protein, 305 aa, unidentified
MISWVGIDISKLNLVVWVQPQKEGFEIPNTSEGFVELIKRLSCYEVGRVLLEATGGYERQVMAALQQTNFQVLRINPRRARAFAVAMGKNAKTDPIDAAVLADFAEVLHGSHEKVISPEREALRELIQLREHFVQQRDDNKRRLQQAQLPTVVSATKDHIRYLQAQIKALEKHLVQGMFDLDVEKARRLMSVKGIGKVAAASLLVYLPELGELDRREVAALAGIAPYNDDSGNHNGKRQIYGGRTRVRHALYMSSWVVIRFQADFKTRYEALRERGKSAKVALIACMRILLIRLNAMLRDGTEWR

SEQ ID NO: 45898 - protein, 413 aa, unidentified
MESYKIAGIDVHKNMLAVVVTDASIEGELPFQRRKFGTLGSDLKELAAWLAARQVREVVMESTAQYWKPVWRQLERQCQLHLAQAHSNRARKGRKDDFRDAERLARRHLSGELILSFVPDPEQRLWRTLTRSKHQLTRDRVRLNNQLEALLEDARIKLATCVTDLLGVSSRRIMEQLAQGETDPARLAALADPRLNAPAEELSDALSAASEMSALHRQILRLFLERLDLIERQMAVLDRNMAAALQLHHNAVERLATVPGLGADSAHQIIAEIGPKAATFHSPQELASWVGVCPGREESAEVSHSDQSPRGNRMMRRVLNQAANSARKTKGSIFQALYQRWLPRLGHNKTIWAIAHRLCRVVWIILHRGEQYIEFGNSRDPKSAQKRTARLVSKLRSLGYQVTPPIAKPEVAG

SEQ ID NO: 45899 - protein, 348 aa, unidentified
MTRIARIGIDTSKGSFQLHAVDDKDQVVLRKVLRRKQFLGFLSSLEVGEIGLEACGASHHWARELRQLGHSVVLVPPQYVKAYVARGKNDKNDAAAICEAMSRPRVRERLVPIKSLDQSAGQMLLRVRESLIRRRTQLSNSIRGHAAEFGLVAARGMSKIEPLLARIAADENLPVSARELFALLSQEHAELAARITAIEKKLLAFHRGNELSRRLMEVPTIGPVGAGLWITRIVDPHAFRSGRCCAAWLGLTPKDHSTAGKQRHGGITRAGDESLRSALVTGATTYLRHVRSGRIAPSPWLAGLLARKPPKLVAVALANKTARIAWKLMTSGERYDPARPPAPQRLAA

SEQ ID NO: 45900 - protein, 455 aa, unidentified
MKRKRSYAAVDVEQLDVEALLPLLTVGSIVAIDVAKTKFVAAIATVGGEVLKLVKFEHPRQTVAFLGLLRALQQAERKPVVVMEPTGTYGDALRYQCHALGLRVHMMPPKHSHDFAEVLDGVPSMHDPKAATVLAKLQAIKPARAWQPESDTRRDLRAWVDQRHPIARTLAIYHGHLEAMLARHWPELEAHVDVYRQRSWFALLTKYPGPQAVAAAGEAAAITLRKASRGHFGPARLQAILDAAKTSTGVPMTAGEQDKLRAIAEQIELQTRRLDAVDATLADLIAEDVVLSRLATAVGPACAAAIGSLVGSPLDFPNARALEKAFGLNLKEKSSGNTRGQMSITKRGPGQVRHLLFMAALRLMKDDAIALSWCRARRGYKADQKIKAVVALMRKLARALWHVARGEAFDATKLFDLRRLDLTSDTTHRKNKAAPTSPSARAAGPYQGGAATASR

SEQ ID NO: 45901 - protein, 404 aa, unidentified
MIFVGIDWSERHHDVCVLDAEGTVLARGRVPEGIEGVAKLHETLAEHAEQPQEVIVGIETDRGLLVGALVAAGYQVFAINPLSVDRYRDRHSTSGAKSDPGDAKVLADTVRTDRHNHRPVAGDSELASSIKLLARTHQSFIWERQRHVNRLRSALREFYPQALQALGTELASRDAIAVLLIAPTPELGRRLSRSKIAAALRRAGRQRNVRPRAAQIQRALRSDQLGVSASLEETYGVIASSLVGLIAGLNDQIAGLEQGLHRAFEQHPDAEIILSLPGLGSTLGARVLGEFGDDRTRYADARARRNYAGTSPITKASGTHRVVLARFARNERLYDACHMWAFASLTASPGSRRYYDAQRERGKTHNQALRALGNRLVGILHGCLKRGELYREDIAWRVREAEAA

SEQ ID NO: 45902 - protein, 437 aa, unidentified
MSQPSSLTALSAHEKRQLAAHTGAVVGVDAGKFAHTLVVRPAGGADAKPVSFPVTREGFETALTAIHAAAPGVAPRDILVGIEFAGTYGFTFAHYLHDQGFPVVSVLAAHTKHWKEVTHNQALKTDAKDAAVVTDLVAQGKFVGFAFLEQPYAELRYLVSAREHVTTLRNAAITRLIAVLDVVFPEYERLFGDLAKPTALAVLAAFPGPAALLTAPKRRVLAVLRRASRGHVGVARYEALVAAARDTLALPGAQGVLKDEVPLIIERIELCHAQLVTLKARMIDILAGLPDAQALLTIPWVAPVTAATFLGCVGNPKAYTSSAQILKLAGLSLVERSSGVTQGRRRLSKQGKPVLRRHAFMFALRSVRADGLYRADFERLLKNNGGKKLAALAAISRKALKLMFRVARECRPYVPTADWRSSDQHTTRTSTEGRSAA

SEQ ID NO: 45903 - protein, 421 aa, unidentified
MIPAVIERGAGIDVGKKFVVACVMTGPANGDARWATRKFGTTRQEVEGLRKWLQAEGCTHVVMESTGVYWKPILNVLEDDPQYSLTVLLANPQQVKAVTGHKTDPHDARWLAHLLRHGMIRPSFIPPRALRDLRDFTRRRKQMIGAAAEERNRVQKILEDANVKIGDVLSDVFGLSGQLMLEALVNGLTDNAQPSAWDIAQLARGHARKKLDALTAALEGHQMRTSHRTLIRHAMRHMAFLAEQIEALDQDIAQLIHEANLSGAYELLQTIPGIRAQAAATILAESGPDMKQFPTAANFSSWSGLAPGNNESAGKRKRARAMKGNPHIKTAVVEAAWSASRTKQSEFEDRYQRRKSNLGHKRALVATAHTLAIRIYEVLSSGAPYQRPGEPLTPRAIKRLVRHHTRRLKCLHHWLVQERPR

SEQ ID NO: 45904 - protein, 408 aa, unidentified
MVIFVGVDWAESHNDALVMDGQGTVLGRGRFGVGVAGLAQLHALIADHAEGPEQVMIGIEIDRGLLVDSLVGAGYRVYGVNPLAASRYRDRHTTSGAKSDAGDAKLLADVVRTDHHNHRPVAGDSDQASAIRVLARAHQGLVWTRQRQVSGLRSTLRDYFPAALSAFGTDLASSDALAILGLAPTPRRARTLSRAKIAAALGRAGRQRNLEHRAAEIHEALRAEHPETSDAVADAFGAASAARVAVLVSLNAQITELEVALAERFDRHPDAEILRSLAGLGSVLGARVLGEFGDDPSRYADARGRKAYAGTAPITKASGRSLVVLARVARNRRLADACERWAFCSLTASPGARRHYDALRARGKTHSQATRQLANRWVGILHACLERREAYREEVAWPAAEQVTRFAA

SEQ ID NO: 45905 - protein, 339 aa, unidentified
MNIVFLGIDLAKNVFQLCGLNQAGKPVYTKRTGRKELLQTLANIPACLIGIEASTGAFYYWQREFEKLGHKVKVISPQYVKPFVRGQKNDGNDAQAIAVALMQPTMQFVPPKSPEQQDIQALHRARQRIVNHRTATVCQIRGLLLDRGIPIGSAVSRARRAIPLILEDAENGLSSRMRRTIAELYDLFNDLGRRIHFFDKEIETVFRQSEACQRIAKVKGIGPETATAVVAAIGKGTEFKNGRHFAAWLGLVPRQHSSGDRQVLMNMTKKGDKHLRTLFIYGARAVVRVATNNNDGHMNQRVNQLKERRGFNKTTVAVANKNARIIWSMLRNDTGYQVV

SEQ ID NO: 45906 - protein, 314 aa, unidentified
MRIVAGVDCHKSSHTVVFLNEIGKVCGELTFPTSEAGYKSALEIAAKLGCHEWGLEGSGCYGYAFAVFAAAEAVQVFDVPGILTQRNRKHSMRRAKSDINDARAIAEVVLRECDRLAKFSHAVMQRALRMRYDQRDRCVRERTKAVNRLRGAALLIGVSELPEDITPNRKASRLASCVEELRSSVSADFALSAILDEIDDACEAIRLLNAKIKTIEQHIRPLVRSAAPDLLKVHGISDVSAAGLIGHTGDIRNCRDASAFATKCGVAPVECSSGRSTSVRLNVGGDRQLNRLLLADDNYPDRPASIILAGCGAG

SEQ ID NO: 45907 - protein, 345 aa, unidentified
MQRMYYIGLDVHKRTISYCVKDGSGAMHAEGTLPATRWELDRWMKTLPQPWTAAMEATVFSGWIYDHLRPHAAALKVAHPVMLRAIAAAKKKNDRVDAQKICDCLRCDFLPECYMATTAIRERRRTLRYRNLLVRQMVQMKNKISMLLMEAGVSYNKQRLHKAGYFRELLATNPDIPEGLRSLLRLCRETVVRLQKTESALVRSLEQDELLMDRVERLMTIPAVGPITALTWALEVGEVQRFASIKKAISYCGLCGAEKSSGNTTQRTPLSKQRNKHLQTTLIEAAKMAPRYSPALALLYDTEKQKGNANRATLAVARKLVAYLMAMDRGQRNFQAPQTSDCIAA

SEQ ID NO: 45908 - protein, 346 aa, unidentified
MLYAGLDLSRKRLDFHLLDAEGATVDVGASPPDADGLRGLSERLNRYGEPIRAAIESMNGARFVHDRLELAGWQVEIADAQKVKGLAPLACKTDRIDARVLAELARRDLVPAIWLPDPRVRAERERARWRLHLVRHRSSLKQRVHAVLLTHGKPCPVSDLFGLRGRQLLARLGLPEPWQGTIEASLRLIDELDREISECERELRRLGADHRYVPLLCTVPGISWVLAYTIAAELGDIGRFATPRKLAGYSGLCPRVYQSGERDLRGPLSKQGPRYLRWALVEAATHACTHPVYRDRYQQTKARIGKQRGAKVAQVDLARRLSEAIWHMLTRDQPFAPKGATDPLAA

SEQ ID NO: 45909 - protein, 372 aa, unidentified
MNYNTVYVGMDVHKESFTLCAYTIDAEKGSHFQRTEADYKNVLRYLEFLRTVYGNDANFICGYEAGCLGYTLYHQLTEHDVNCVILAPTTMLEQRSKRRIKTDRRDAEIIGKCLAQHNYSPVHIPTATDEETKEFLRMRDDHKLALKKVKQQILAFCLRHNYRYDGNSHWTAAHIKWLKSLNPEALYKEILDEYLLTYTTLSDKVERLDKRIEELASKDEYRESVKKLCCFIGIKTHTALSVLVEVGDFQRFASAQNFASYLGLVPGEDSSGDGQTRLGITKAGNRHVRMLLTEASQCYARGQIGFKSKELKSRQAGNSPQVIAYADKANERLRRRYYKMVLGKSKKHNVAKTAIARELACFMWGMMTEHIA

SEQ ID NO: 45910 - protein, 392 aa, unidentified
MTYFIGIDLAKYKHDCFIMDENGEVIRDSFSFNNDKEGFNTLLNVLNSLDSNQEKRIGFESTGHYGSNLKIFLERNGYSFMEFNPLLVHRHFKSETLRRTKNDKVDARKISSYLYTREYKPNPNSSYHLNCLKSLTRTREALIKDRTRHIIHMINVLDKMFPEFKLQFGNQGLNAASAMYLLENYGSPSKMSNMTRASYDKMKSELRRTISYAKFLRIKELARNTIGNEDEMLVFELNTYLELFKELDKKILKVEDKITKEFSIMKCHIASIKGIGIITAAGILAEIESIDRFDNPGQLCAFAGIEPSENQSGTHDGGGKMVKHGSPHLRNYLMQSAGYMLIHNPVLYEYYLKKRNEGKCHTVALSHVAKRLTRIIFYLEKNDTDFNIDKMR

SEQ ID NO: 45911 - protein, 469 aa, unidentified
MAAGKADGTGGPGRGGDGAEVAEDSTQVVEYAAAIDVARGSGMVCTRVPGSRAGRRRQKAWRVEATFNEVTALRDHLRAEGIQRLVLESASDYWRIWYYLAGAAGLEVWLVNARDVRHLPGRGKSDTAGCVWLCKLNERGMLRRSFVPPQPVRDLRALTRTRARLAQDQARHQARVEKILEDALLKISVVISDLFGASGRRFLDALVAGERSPAALAALGDKRLRATRAQLAEALTGRFRDIYAFEIAVHLRLIDAICAEITALDEQIGQQLALVPGTAPACATCGLAGAGHAPGCEDQDVALLPLAGRLDEITGVGAVNGRAIIAELGTDPSQFPTPGHAAGWARLTPRSHQSGQTARPGRTGKGNRYLRGAPGQAAMTAARTDTRLGAMYRRIARKRGRQKAIVAVSRVICEIAWILICDPSARYTELGPDYYHPLSAARQTQTKIREIERLNPGKKVILADAGAAA

SEQ ID NO: 45912 - protein, 369 aa, unidentified
MTDTTIFVGLDVHKETIAVAMAPASPGAAFSYYGAIANTTEALRKLCKKLSAGGETLEFCYEAGPCGYVVQRRLSRWGYRCDVVAPNLIPRKASDRIKNDRRDAITLAKNLRSDQLTAVWVPDEAHEAMRELIRLRSLAMRDQRRSRQQLLSFLLRHGLSYPGTHWSKAHRGWLSDLSFPQPAQHLVLEELLQRIERAESLCARLADAIADLLPSWTLAPVVEALQALRGVSMLNAATLVAEIGSFNRFDNPRQLMGYLGLVPSEHSSGRTVRRGPITKTGNSLARTSLIEAAWTYRFPARVSRIIHKRSAHLPEPIRVIAWKAQIRLTRRYRHLIAAGKAACKTVTAIARELVGFVWAIARMVEPKTA

SEQ ID NO: 45913 - protein, 341 aa, unidentified
MQITTIGLDIAKNVFQIHGIDAAEKVIVRKQLRRGQVTAFFEALAPCLVGMEACATSHHWARELTKLGHEVRLMPAKDVKAYVKRNKNDAADAEAICEAVRRPTMRFVRIKSAEQQGQLMLHRARDLLMRQRTQVINALRAHSAEFGITAAQGREGIKELLAMVAHEEGSRLPSDAHASLTVLATQLQAVQTMIGSLEKRIVAQHRSNEASKRLETIPGIGVIGATTIAAVVPDPRVFRSGRDFAAWIGIVPRQDSTGGKQKLGPISKQGDQYLRRILIVGAHAVLRRARQQPETYPWLTQLLARRPFKVVAVALANKMARIAWALLAKGGTYRAPQLVAA

SEQ ID NO: 45914 - protein, 341 aa, unidentified
MWIIGCDYHPSFQQIAFVNTEGGEWGQRRLEHVKEAEQFYRSLAGQSVRIGMEASGLGRWFERLLAELGHELWIGNPSAIRAAAPRKQKTDARDAAHLLQLLVEGRFEALRIWVPGAEERDVGQLVLHRHRLVQMRTRVKNQLRAVALNEGLGRKPGLWSRAGQEQFRSVVLPAWTAQRRQDNLELLEELVRRTAPLDAAVAEEAARRPEVVRLMTHPGVGPITGLAFVLRLGNATRFRCGKQVASYLGLIPAEYSSGGRQRLGHISKQGNSLLRSLLVEAAHSAVEGDPELGRCYRRLAMRKSRSIAVVAVARKLAVRLWWMWTRGVDYGKLRQSGSHAG

SEQ ID NO: 45915 - protein, 365 aa, unidentified
MQKISTTRTNGRKIFKGQLTIGLDLGDRYSSYCVLDEAGKILLEQKLPTTQETMKQIFGRMARCRIAMETGTHSPWVSRLLTALGHEVIVAHAQNVRLIVKSRRKDDRIDARTLARLARIDPELLSPVRHRSAQAQLHLTEIRARAGLVSARTALINAARGLVKSYGERLRKCGSFQVSREIGSGLSTELREALQPLLREVESLNERIQEYDRRIEKMAKERYPEVALLKQVKGVGDVIATTYVLTIEDPHRFRKSRDAGCFVGLQPGRRNSGDSEPQLHISKQGDEYLRTLLVQGAHYILGPFGEDSDLRRWGQKLAERGGKNAKKRAVVAVARKLAVLLHRLWVSGEVYEPLRNSHKAMSAAA

SEQ ID NO: 45916 - protein, 353 aa, unidentified
MKQFIGCDAHKKFSVFASIDETGEYGRTIRVGHDREVFRKYLRELPPGSEIALETSGCYYWIVDEMEQAGHHPRLAHALTAKRRMAGRHKTNERDAQGLAMLLRTGTLPKVWIPPAELRDQREMLRWRMWLSRSRTRVKNRIHAVLQRYNVEVDFADLFGDGGRAELLGRIVEFPPHSAESVIEQLQMVDWLETQLGECEQKLEQMLYPSLMRDLLDSLPCVGKVLSAVLALEIGDVQRFRGPGALASYAGVVPVARESAEWKRKDRCPRDCNVYLKWAYVEAANLISIHRRRWAERHVAQLYERVKQSTKMHGKATMAVARHLAEASFWMLTKQQVYQDPQLRRQALSSTHG

SEQ ID NO: 45917 - protein, 383 aa, unidentified
MENRPLKFGARRIFGLDLSKKTLKACRLDEDSGFEKQNIFDEKMTDDGRHHLASRLRKGDYVAMEGGSSTSFLARYLMENTEAEIFVLNPCKLHIIFESACKTDKQDCIKIAKYIRDTNPSNWCLIPVPTYEETSLRSLINSHISTKQERTRAINQLHAFFNLNGISFLKKSDLGDSDRRHDLVDHYFSQDDLRGMQARLMLQDIDNIELSTDCYEDMIRKALLSRPRESLIWMSIPGVGPLTALACVAYIGDGKRFSTPDQLRNYVGLTPRIDQSGIREVIYGVNHYGCMPVRRNIVQAAWSVSNLSFDCRFRQRWKELKASGKKGQKIAVKVANDMLTMGWTLLKKGELYNGLGDFSYLKRKLRTYKMTAINSSCFGECLK

SEQ ID NO: 45918 - protein, 377 aa, unidentified
MEAMGRSIGVDLHRDCFTTATLAENGRCYLREWKLKDLGKFAETLAYDDKVAVEMTTNVRLFRDAVLPHVEKVEVVNTRQFKVITESVKKTDKNDAVLLARFLAKDMLPTVHLKPKELADLASLTRTRDTLVKQRTTLKNQVNNLFAASGGKLRRERLSSNKALFEVGCEADALLSFAESLEVEVLLGQIRAINDGVSKLEKEIEAEAKEQPGYVELTSIKGIGTNGAAILISTIGDVKRFENEGKLASYLGIVPRVSDSNETEHRGRITKRGSKLARTSLVQCALIAKKYSPYLASFHERMKRRKGGGKANIALARKLLGIVYRTLRNGWVFEDFPSFRLKDGTIPVWSREGARKYAASRRDLSLSAKTGKKKRAT

SEQ ID NO: 45919 - protein, 403 aa, unidentified
MNGPIVSVDVSKGKSDYQAFKDLNVKFTDVRSIKHTKEGFDEIVNLVKDMEIKLETEVCVVYEATGVYHRVLKKVLEDNNIKQFIINPLLSAKTRKNDSLRSPKTDKLDPKSIAKTYYNQSLHSSYKPQTTYHELRELSRYYEDILVHIRKDKVAFRAQLDIVFPGYDTLFDDLYGAVSLTVIEKYPHPELLQKKSINTVSKIIQKKTRHRQAVSNKMASKAIEYSKTIYSGCGKDDIDVLILERLIKKLNEDLNEAERTINEMIRLVQELPDFIIIKSIPGIGDNLAARIIAELGDMTRFKKKNELVAYAGLDPRIYESGQKDGAHMHITKKGNKRLRCLLYLAVTCSIRLKRDDNSIKDFYIKKMQQSNPMCSKAAKTACASKLVRIIYSMCKTGELYQYK

SEQ ID NO: 45920 - protein, 400 aa, unidentified
MRAVFGIDVSKVSSEVAILVNGEKVHSYTMSNDAIGFSQLLGDLRTVHKAEIIFEATGVYSRRLQAFLDEHGYAYTRLNPLEAKKQLDSLRVRKTDKIDAEKLAQSQFVLNRKPTYVQEEVYQHLRDFSRFYQNLTEDIVRAKNRLHKVLQVTFPELETLLSTPTGEQYWNLVIAFPCKDFVLDLSKDELSESIRLSTSKRISDKRVAYLAEKLTALANQSYCAVKKTSPILEEVRYYAKELLRLFEQRQAVLDEMVELAQPLPEYDILLSIPGIAETTATSIIGELGDIRRFQSANQINAFIGIDLRHYESGNFLAKEHITKRGNPYARKILFKCIHNIASASHTNPCHIADFYEKRKRQSQTTSTKPHTIASIHRLIRTMYYLITHNKLYDYTSTQNQ

SEQ ID NO: 45921 - protein, 346 aa, unidentified
MTIIQTARAVTGGIDTHGEVHVVAALDEVGGLLGTDSFGADPDGYSALLDWLTGFGPVTKVGVEGTGAYGAGVARFLTRAGIEVIEIDRQNRQERRRQGKSDPLDAVQAARATLSGRADGKAKSRDGAVEALRVLVVAKRSARQARVKAIVQMRQLVFTAPDQLQSRIKGLPIPKLVAVAQGLRPTRSTDPVTAATKASLSSLAHRAADLEEEITRLDSLITPLLETTAPELLKIYGVGIDTAAALLVTAGDNPERLRSEAAWAHLCGVSPLQASSGKVSRHRLNRGGDRQANRALWHIVITRLASDPDTQAYMERRMKEGRSKREVIRMLKRYVAREVYRRLPRG

SEQ ID NO: 45922 - protein, 347 aa, unidentified
MRFYTRQHGYYCGIDLHARTMYVCIIGQDGTVLVEKNIRARPGPFLDLIGPYRDDLVVAVECIFTWYWLADLCNEEGIPFVLGHALYMKAIHGGKAKNDRIDAGKIAALLRGGMIPRAYVYPYPMRSTRDLLRRRLHLVRHRGRLLAHIQNTNHQCNHDDFRKKLTYKANREGVPEQFDDPSTRKSVEIDLALIAHYDGIIRDLELFIVRIAKRHDADMFFRLRSITGVGKILALTILYEVHDITRFETVQQFASYSRLVKCSRESAGKRMGTSGAKIGNVHLKWAFSEAAVLYLRANPEGQKYLARLTRKHGKGKALSILAHKLGRATYFVMTRCRNFDEKKFLAA

SEQ ID NO: 45923 - protein, 346 aa, unidentified
MMVIGCDYHPSWQQICWVDTLTGETEEKKLEHASGEAEKFYRGLSGPALIGMESTGNCQWFVEMATTAGHDVWVGDAAKIRASDVRQQKHDRRDAALILKLLLEGRFPRIWTPSGAEKDLRQLLIHRYKLVRIRAQVKNELQHLAMNQGVTKKKKLWSQAGEKVLRELPLKPWASRRREDLLKVREMLNGQIDLLDQAVVEAAEKNEKARLLMTQPGVGPITSMAFVVTMGDVHRFQRGKQVASYLGLIPREYSSGGHQRFGSISKQGNRFMRMLLVEAAQNAVRYDPGFRNEYLHRCHSKAKGVAKVAAARKLAIRLYWMLRTNTGYPEVVRVESSSRVPLVSAS

SEQ ID NO: 45924 - protein, 403 aa, unidentified
MEGPLISLDVSKGKSNYRFFENGTDRKGKKGVIRHDIQEFDSIRNEAEKMEERLRIKPSVIFESTGVYSDVVEKYFTDKGFDVYVISPLLSASMRKEGVRPAKNDSLDTLSIAKVFYSRDDLRKCSENDKKAERLREMSYELDMMNRRIRPMKCQFLRLLDKVWPCLDEVSDYSSRFMLDFIIAFGHPENIKTVKGVLSVIRKSEMGTAGRKDKIAQDLFDYCHTHLSAVSKDSSYVELLKRMAIELKAMAKKKSELIDRMAEEARSKDEFARLLTIPAVAKTTALKIMARVGDISRFRNAEALVAYCGLDPRVYQSGKMTGEHRTITKKGDCILRSTLFLAVKLMVMLYPDTKVARFVAAKTKNGLSYKQAVVAGSAKLARIIYSMLTHHENYVEFNADIVA

SEQ ID NO: 45925 - protein, 364 aa, unidentified
MLELYTNNDMDAPTRIIQYSLNKEQKMESISVVGVDLAKNVIQLHAVDAVGKVILKKAVRRSGFLAFFANLPCCLIGMEACSSSHYWARELTKLGHQVKLMAPQFVKPYVKSNKNDANDAEAICEAVTRPSMRFVAQKSQEQQALLLIHRERDGAVRDRTALINRIRATLAEFGVAVPVGPWRLNKWFAQEFSEQCAHLPETLQRHILRMKARLTLLESEITVYDQEIDSLSKINPLCQKLERVPGIGRLTASALVASIGSGKEFDSGRQLSAWLGLVPKQHSSGGKSKLLGISKRGDSYLRRLFIHGARAVYRHLNPKRKLTTWLNELSCRAHKNVVIVALANKLARIAWSLLAKDQEYVETI

SEQ ID NO: 45926 - protein, 387 aa, unidentified
MRRSNSRIVGLDVHPDSFAGAILEGRDPWKARVLSTSTRVALPLLEKWALGHTTPADVLVMEASGNAFAVAERLRGLKREVVILDSHRAGKVGKTYCATDRVDAIKIARIYLSALSPLVWQPNAKTRERREVFSAYQAVVKEGMRLKQQIKSMLNEHCVRLEKGFRLSHPSALARLLTRRPWSEAQKMLLGQLHAGLVGARGRRQQLRHYMAQEVLAEKELLRLTRLCGISLVTLYGLSAAIGDIRRFATARKLSSYFGLNPSVEQSANYEGPTALKRHGCGAMRALLVQSAKKLLQVDNPLQKWGLAVAMRRGRNKAAVAVARKLCVAVWHVMQGHVIGAIERIDTLHTKLRKLATELGVPTIKQLGYETKEAFVQKKLYLLRSYP

SEQ ID NO: 45927 - protein, 367 aa, unidentified
MKKVSTAVGEATKNFQDHKLTIGLDLGDRSSWYCVLDEAGEVLLEQRLGTTPKAMKEVFGGMPRCRIALETGMHSPWVSRLLSDLGHEVIVAHARNVRLIGESRKKDDRLDARTLARLARIDPELLAPVKHRSAKAQADLTVIRARAGLVRSRTALINTARGLTKSYGERLRGCNPRNMNPEKAQGLSPELQSALEPLLAAIEALSERIHEYNQQIEKIARESYPQVARLEQVKGVGTLIALTYLLTLEDPHRFRKSRDVGCCVGLQPGRRNSGQSEPQLHISKEGDPYLRTLLVQGAHHILGPFGVDSDLRRWGLKLAERGGKNGKKRAVIATARKLAVLLHRLWVSGEAYEPLRNSSQVLLPAAA

SEQ ID NO: 45928 - protein, 363 aa, unidentified
MEVGLAKPGVHGEVRHYGKIGGDLDSLDKVIRKLESQGTELRFAYEAGPCGYQIYRHLTAKGYECLVAAPALIPRRPGDRVKTDRRDALSLARLFRAGELTQVKVPDAEDEAMRDLVRAREDAKAAERRAKQRTAAFLLRHGHRFPGKATWGRGYWRWLQQLSMPYPAQQIVLQEYLDAVQEATARVQRLTDQIRELLPQWRWHPVVQSLMALRGVSLLVATTVLAEVGDLSRFTNPKELMAYLGLTPAEHSSGATVRRGAITKTGNGHARRVLVEAAWAYRLKARISRHLWRRLTGLPKPVCDLAWKAQLRLCSRYRRLRARGKHQNTVITAIARELAGSFWAIGQLVAPRAAKTTTIPRRL

SEQ ID NO: 45929 - protein, 365 aa, unidentified
MKNSQNEKIKAVTDKTLVVGIDIAKEYHYARITDSRGIELRKPIKVNNSQEGFVNLLEIVEKVKQKYTAEKIIIGMEPSGHYWRSFGWYLKLHESMPVIVGVNPYHVKQSRELDDNSQTKSDKKDALVIEHLIREGRYFDMYFPEGEYAELRILNEERQRVMKQINRASNIIIAVLDEYFPELALVWKDVICVTSLTIMKEIAFPAEILKISKTELIAVIKEASNGTEGEKLATGLVKAAHNSVGVQEGQRAAKSRLLRLIGELEYYQVRLTDVEKELEAVMAKSDLSEILQSMKGVGTVISAAFLGEVGEISRFDDWKQVRRLAGLNLVENSSGQQKSKTKISKRGRPYLRHMLYMAGISGCPA

SEQ ID NO: 45930 - protein, 366 aa, unidentified
MLQKAELSCEADSENNLGGSSETMYYIGLDVHKRTISYCVKDAAGRVHMEGKIGSTRRELDGWIQTLPQPRTIAMEATIFTGWIYDHLLPHAEQVKVAHPLMLRAIATAKRKNDQIDASKIADCLRCDFLPECHMASTEIRDRRRTLRYRGLLVKQMVQMKNRVSGLLLEKGVTHTKRRLHKVGYFAELMSDSKEIDQSIRPLLKLSREHIVRAQKLDYALVSSLERDPLLRERLKRLRTVPGVGPITALTWALEIGDVARFRSIKQAISYCGLCGAEKSSADKMLRTPISKQRNKHIQHVLVEAAKLAPRQCHELALIYEKEMQRGNRNRATLAVARKIVAYLLAVERRQQDFVPTENFGGTAAA

SEQ ID NO: 45931 - protein, 410 aa, unidentified
MRIIALDVHRSFAQTAILENGKLRDAGKIDLEYSRLLRFARKLKPDDEIVIEATGNTSAIVRVLLPFVGRVVIANPILVRAIAWAKVKTDKIDAAVLAKLHASGFLPEVWMPDEETEARRRVVAERTQLVSQMTRLKNRIQSVLHANLIPPYKGVLFSQRGRAWLEAQPLAEDQRRVIVRHAGELDRLGAELAEVDKSLAQKALDEPQVKRLMTITGVNSTVAMSVLAAIGDIHRFSSPEKLVSYFGLNPRVRQSGDKPAYHGRITKQGRAHARSMLVEAAWVISSAPGPLRAFFIRIRDKRGKHVAAVATARKLAVIVWHILTKDEDYTWDRPALLQWKLRKLELKAGHPSRRGGRQKGSAAAYSNKSVRDSERETIANAEDEYRRFVTTWKQQSPKGRSGATNEVRRS

SEQ ID NO: 45932 - protein, 343 aa, unidentified
MQISTIGVDLAKNVFQVHGVDSAGKVVITRQLRRKQVIEFFSKIPPCLVGMEACGAAHHWAREVSKLGHTVRLMPPSYVKGYVKRSKNDAADAAAICEAVTRPSMRFVAVKSTDQQASLMLHRTRDLLIRQRTQLINALRAHLAEFGLVAETGREGVAQLAALITDESNREALPFAMKQALQAFVDQLAALELQIGTLDRAIHAHHRANDISSRLETVPGIGVIGATAIASTVTDPSNFKSGWDFAAWIGLVPRQHSTGGKERLGGISKQGDRYLRRLLVIGATAVVRHARQHPQKHPWIMRLLARKPAKLVAVAVANKMARIAWAIMAKGGYYRAPELAAAA

SEQ ID NO: 45933 - protein, 433 aa, unidentified
MPTTHPYDLVIGLDRSDRKADLHLIDTRTGNVQKQTVATSPEALHDWLVQLRRDHPQARVALCLEQPAANLIVFLETYSWITLYPINPISLQKFREAFVTSRAKDDGKDAQYLAELLLSHPDKLKPWQPDDSQTRQLQQLVLHRRAVVDQRTGLTNRLKALLKQYFPQALDLCGEDLWRPLATAFLLKWPTLQSLKKARKESLKQFYYLQGSRSQTLIEQRLERIDKAVPLSDELALLQSYTLRVQLLCKELQLLLKTLQQFDQQIAKVFQQHTDRPIFEAFPGAGPVLAPRLLASMGSERERFAQPENLQSFSGLAPVTKQSGGKCSIHRRYLCPKFLKQSFHEYAKESILHSRWAAAYYGQQPNKGCGHHTAVRALAYKWQRIIWKCWQTRTIYKEAIYEAALKKNKSPLIGLLDQIELGKSPVKSRAKKS

SEQ ID NO: 45934 - protein, 391 aa, unidentified
MLNTRSEHDRFVDLLRGLGKPVIAGFEATGNYHRPLAFRLLEEGIALRLVSSVAVARTREALHNGWDKNDPRDAQVILHMLQIGATQTYLDPIRAGINDIQELSKTHEFVSKAKTELWHRLLTHYLPLYFPEVGRFAGNSRSDWFLAFLEAFPTPASITAHQKDAFVDAAWDVVGKKVSKARLLGDIYETAQLSIGLPVELDGPAIAMYRMVIAEGRSLIRQRDEIERQAEAVLRDHPDFLRLRQVPGIGPIIAMTILAEAGDLRRFRHHRQFLKFCGLDLATHQSGQFRGQTKLSKFGNARLRRAFWLAAQVAIRQRDNSFRSKFERYIAKDRDNANLRRKALTAVTAKMARTAHAVIKTGTDYRPFIEGPVPSGRTPLRACREGASATL

SEQ ID NO: 45935 - protein, 364 aa, unidentified
MTAAQAGRQAASSTVEVVGGVDTHKDTHTAAAVDTAGRVLGSAQFPTDAAGYRALLRWLRGFGTLLLVGVEGTGVYGAGLARSLAAQGVAMVEVDRPDRKARRWQGKSDPVDAEAAARAALARVRTGVPKQRDGRVEALRTLRVARRSAVGQRADVQRQIKALIVTAPESLRAQLRKLPDRELIEVCADLRPDRADADDPGTATKIALRSLARRHRRLSVEVADLDELLGPLVAQINPGLLALKGVGAEVAGQLLVTAGENADRLTNEAAFAMLCGVAPLPASSGKTTRHRLNRGGDRAANCALWRIVITRMGTDQRTKKYVARRTTEGLAKPEIIRCLKRYVAREVFLALQSASTEKRPANAA

SEQ ID NO: 45936 - protein, 346 aa, unidentified
MVVLGIDAHKRTHTVVAVDEAGRQLGVRVTQSTCSAAHLDLVVWAGRFGPGRVWAVEDCRHLSRRLEADLLAAGEAIVRVPPKLMAHARDSARTYGKSDPIDALAVARAALREPGLPAARLEGPERELRLLVDHREDLVAERTRAISRLRWHLHELDPGWDPAPRTLSRRKHIAAAAARLAGMEGMVAGIAADITARIAALSADISALERQIAARVRVLAPALLALAGVAELTAAKIVAETAGIDRFRSKDAYARHNGTAPLPVWSGGRTRHRLSRTGNRQLNCALHRIAVTQKRCHPPARAYLERRAAAGDTPTQALRALKRRLSDIIYRALLADSATAPPAQAA

SEQ ID NO: 45937 - protein, 368 aa, unidentified
MTYLGIDLHTRNMTICAVSSNGKKIGEWKLSNDTDQLDKLIREIGAPLKAVVEATSSWYWLADWAEAREIDLILAHAKMLKAIAYAKVKTDSVDAHTMAQLLAADLIPGAHMVMGRQRELRELLRARLRMVWRRCKVQDSLYNLFFKYNVPIPKYPFRDLNRLEEHFQVHLPPASGLEASLHIDQFRLLEGQVHRIEKQIDTYGPEFPDYERISQVPGIGKVSSWSILAEIGDISRFKSDKNFVSYCRLVPGAADSGGKRRHKSRNKDGNKYLKIAFSQAAIGAVSFYPPVRAFYNKIRRRSGKHVARTVVAKELARIVYFMLSRNEPYKGFKGKPTPKDTYLNWPHSVSPHSIRGRDRADPSQPDAI

SEQ ID NO: 45938 - protein, 352 aa, unidentified
MAATAQSAIAVIGIDIGKNSFHVVGLDGRGAIVLRQKWSRGQVEARFANMSPCLIGMEACVGAHHLSRKLKALGHDARLMPARYVRPYSKGQKNDFRDAEAIAEAVQRPTMKFVVTKTADQLDLQALHRVRERLVSQRTGIINQIRALLLERGIAVRQGQRFLRVELPRILATPPDVLSPRMVRVIEGLASDWHRLDERIEGLSSEIEELAKRDAGCERLMSIPGIGPIISSAMVAAIGTGDSFSKGRDFAAWLGLVPRQISTGDRTILGKISKRGNRYLRVLFVQAAWVVLVKVKPTRWQGHGLRPWIEAAKKRLHHNVLAIALANKLARIAWSVLAHGRAFETNKLLAAA

SEQ ID NO: 45939 - protein, 363 aa, unidentified
MQTCERAKTLFVGVDVHKDTHTAVGLSPFGEKLFELTIGNYPQDFAELAERVRVTAETANLSPRIGLEDCQGFGQRLAEYLNNDGYMVTHVAPILVDHKRKKAAHPEKNDSLDARGVAEVMIQKIDTLPVNKITQDRQIAKDIQELSLDREYLVKEQTRLKNQLHLLLHRIWNTEYREKFKDPFSVKGLRYWKRSVPKNTSPFLSKNMKRKVKKLEALRLEIKELEQDMELLIEKSEHKIHTANGCGIVLAAMIIGEIGDISRFKSPATLAKYAGCAPREHSSGKTHRHRKTRSGNRRLNCAFHRLALSQISRMGNEKAKAYFLRKISEGKSKSQALVCLRRQIVNIIWMIMKHKTDYNLQKN

SEQ ID NO: 45940 - protein, 411 aa, unidentified
MEILTQCACGLDVHQATVVACLLSILNNGKVKKQMRTLGTKTRELVELRNWLQSEGCTHVAMESTGVYWKPVYAILEEGPFELTVANAQHIKHVPGRRTDVKDAEWIADLQLHGLLKPSFVPPKPIRQLRDLTRYRRKLVEARSAERNRLLKVLETANIKLSSVASDVFGVSGLLMLEKLAEGKAEPAEMAQLAKGRLREKIAELEPALEGRMEEHHRYLLQLQLRRLRDLDQDLKELDARIQDKLQPYRQEMDLLMGIPGVDWGGAAVIIAELGPDMKGFPSAAQVSCWAGLAPGNHQSAGKRRQARVTKGNIHLKTALVEAAHAASRAKGTYLRDKFYRVKARRGAKRAAVTVAHKILVAVYHMLSKKVPYKDLGEVYLDKLNQHQLTRNLVRRLERLGYCVTVQPQAA

SEQ ID NO: 45941 - protein, 346 aa, unidentified
MKRLPKLIAGVDISKHTLDIALISERNETLSYHIANSVEDFRNFVKGLKTQFKLRNADLAFCAENMGLYAKFMTDVLLKMHIPIYLESPLQIKRSLGLQRGKTDKKDAIRIADYARKNFPTLREWTPPRPCIIEMQNLLTIRKRLLKVKMILKGNLKMERYYLDSVAADNLAAHSVRSVDAVTQDILDVERRLIAIVKSDERLSHLFDLTTSVRGIGNVIGIQIIIHTNEFKDFSTARKFASFCGVAPFPWSSGISVLGRTKVSFYANKELKALLHMAAMLNIKKTDSSLAIYYQRKVKEGKNKMSIINALRNKLIHRIFSCVIHDKKYEDWPTLSGLSQRIASKL

SEQ ID NO: 45942 - protein, 461 aa, unidentified
MLFVFSEGRTLVSIQSSDPPRLVRVGIDAAVVAQHEVCIRSTDAAGRVEVDRFRVPPTLAGLRSLTDRLAVTPGVLAVTEPTSMTWLGLSVALADAGCGLSLLGARHAARLRGAISGKSKSDVIDADVLARAGEVFDLHPLRRVDPGQLALRRACVRRGSAVIDGNRYLRRLISLARWAFPDVWNGFRGSLPTAIAVLERWPQLAQLATARRSALTGVVALHTRGVADVPARVETIRSAAGAWAGFWDGHLDLDALAFDVSEHLTDMADAKARTERATAAAQRHWRQLYGDDELLLSVPGMGPVTGCVVRGFLADGHLFSSAKAAASYAGLNPSTWSSGTVSQPSRAITKEGPAVLRLALFQAANAARRQDPQMAGFYYRLMTQQRHCHTQACVAVARKLMERTWTVLTRGEPYQLRDFDGRPVSHLEAKKMIKEKCTVPDHIRAAARARSAATNRAKLTR

SEQ ID NO: 45943 - protein, 351 aa, unidentified
MLIIGCDFHTRFQKIAMMDSTTGELVKRRLEHGTGEAESFYAALAAPVRVGIEATLATQWFEKMLRHYGHELWIGDAAEIRAAMVRKQKTDDRDALHILDLLMQNRFPRIWVPSAVERDVRQLVRHRHKLVRFRTSVMNQLHALAMGQGLCLRKKLWTTVGRQKLESLTLDPWASRRRRELLELLDQLDPSIGELDRAVISEAESRPTAVCLMQQVGVGPVTALAFVLTVGPVSRFPNSKKLVSYLGLNPSEESTGGRQRLGAISKQGNTMLRCLLVEAAQTSARLDPELRRNYQRLKLRRGNSGVAKVAIARKLAVRLYWKLREADRPNTAARMQGSPVSPVVGESLSAN

SEQ ID NO: 45944 - protein, 344 aa, unidentified
MEHFAGIDVSLKDSSICVVDAAGRIVREAKVASEPEALVAWFRGLGFAVTRIGLEAGPLSQWLHAGLSGAGFEAVLLETRHVKAALSAMVVKTDRKDARGIAQLLRMGWFRPVHRKSADAQEVRALLVGRKLLQGKLRDVELSIRGILRGFGLKVGEISKGRFAARIRELVAGHEMLETVTGAMLAAREALLAEFMRLHRRMLVTVRADAVCRRLMTVPGVGALVAVTFKTAVDDPGRFSSSKAVGAHFGLTPKKYQSGETDVTGGVSKVGDAMVRTALYEAANVLLSRTTRFCALKAWALAVARRRGAKRAKVALARKLTTVLHRMWVDGSTFRWSKEAPAAA

SEQ ID NO: 45945 - protein, 392 aa, unidentified
MYIVGIDIGKNHHEASIVSPEGKQIGRSLRFATTHKGADSLMSFIFKNIGNSPCVFGMEATGHYWYPIYSFLKAKGYTIYVINPIQSDSLRKMYIRQTKNDSIDSFLIAKVIRFGQFGTTSMADENILAMRQLCRYRDSVISSRTEIKLRIGTIMEQIFPEYEKQFSSLWVSTSMGILEKYLTPENIENAPIDELFEIIKDKSHNRLTRAKAISIKEAAADTFGIKIAQDAFSFQLKQLIDRMNFLDKQIEALDIEIMKYYEQFDCYLHTIPGIGIIGAATILAEIGDISRFKNSSSLIAFAGIDPTVRQSGEFNSTHNHMSKRGSPYLRHAIFLAATTCSFHNSPLNAYYKKKRDQGKHHLTATGAVARKLTTVIYAVLRDSKPYEPKKFC

SEQ ID NO: 45946 - protein, 365 aa, unidentified
MSSVPSVAELIHLGMDTSVKEIVAGVLRPGEEVPVISRVPGDQESVRRLIGRFPDRQLLAACYEAGPGGYELHRLLASMGVACDVVAPSLIPKGTSDRVKTDRRDAIRLALLHRAGLLTPIRVPSPAEEAVRDLVRARGDLLDDRKRMQQRLNAMLLRHGRIWRGSKWTYAHRNWVSGQVFDEPALAETFALYRGALDAREAELAAAEVTMAAWAARDPLAGPVARLGAYRGIAQLTGLTLAAEVVDWRRFACARAFMGFAGLTPTEYSSGGRDRRGHITKAGPEAVRTALVEAAWAYRYRPAIGATLRRRQAGQPPGTLARSWKAQQRLHAKYKKMTARGKPPGVAVVAVARELAGFVWAEMTT

SEQ ID NO: 45947 - protein, 340 aa, unidentified
MQAIRFGLDVAKTVFQVHGVDAAEQVVVQRRLRRGQLLAFFARQEPALIGLEACGSAHHWARELTVLGHEVRLMPPAYVKPYVKRNKTDARDAEAICEAVSRPGMRFVAIKSVAQQCARSLHRARDLLVRQRTQLANAMRGLLYEMGLTAAQGQGGLQSLVQGVEASDEAIPPALLASLAPLARQWRSLAAEIAQLDATIKAEARRDERARRLMTVPGVGPLTAHAVLAAVGEAEPFASARDFAAWLGLTRKNHDSGGKRQRTGRISRAGDRAVRHLLVLGASSWLRQVRARPERGSSWLTGLLARRPVKVAVVAQAAKTARILWALLGSGESYRAPATA

SEQ ID NO: 45948 - protein, 345 aa, unidentified
MELHTIGIDLGKTVFHLVGLDLRGEVVVRKKFSRTQLLRFTANVHVGLIGMEACGGAHFLGRALREQGHEVRLIPAQYVKPYVKTNKSDYIDAEAIAEAVARPTMRFVPIKTDDQLDMQSLHRVRERWVMRRTAVINQIRGLLLERGITLRKGRHHVHAALPLILEDADANLSGAVRLLLTQLKLDLDQLSVRIDEADAVIQKTAHENEACRRLVAIPGIGPVTATALIAAIGNGGAFHKGREFAAWMGVVPREHSTGGQQKLLGISKRGNSYLRRLFVQGARAVLQQRTKQSSGLSAWLAQLTSRMHRNVAAVALANKLARIAWAVLAKNEQYRPLAVADVAAA

SEQ ID NO: 45949 - protein, 354 aa, unidentified
MLYLGIDQHARQITISLRDENGDVVQARQVSTQPEKINAFFQRLTRERARNDEPFVAVLEVCGFNDWLIAMLRNYRCKQVILIQPEERKKRKTDRRDAAALSELLWVNRGRLLEGKPVRGLRQVDIASPTDQQNRRLTTLRKESRQARTRIINKIRHIIRRHNLQWHLPTKTFPTLAAIAWLKKLVLPAIDRLEMNHLLEDLEHAEQRFEELEDVIAERGDDSEDAMILGTMPGVGRFTALALSCRVGRVERFPRGHSLANYWGLTPGCRNSGENNQRLGSITKAGSSMARWLLAQVAYQALRKDGRLREWYKRIKRRRGSSIARVAVMRKLATIVWHMLTKRKTYFACRELDA

SEQ ID NO: 45950 - protein, 315 aa, unidentified
MIGIDVSKASLSVCAWDGEAQRVRWEVEVANTEEGVRGLLARTEPEEPWALEPTGRYSEGVARLGLAQGRQVVMAPPRAAKQFLTSVHPRAKTDRLDAQGLALYACSVALKPYPVKSEHMDQLAQLLAARKSISKSLARFRQQRESLPRAREHVEAAHRALAEQVKSLDRELARLAAQDPEVKRLQQVPGIGPVSATALVVRLKSTDFARYDQFVAYVGLDVRVRQSGQRRGSLGLSRQGDAELRRLLYCCAQASLRTKGSPFAQQYERERAKGLASTQALCAVARKLAKVAWALVRSGQDYDPNRVYAPRPLDR

SEQ ID NO: 45951 - protein, 493 aa, unidentified
MLKHHKLVWFCLVLRAPIGSLMPYKRIYLFETNRHGAILTLKSTNMSKSTKKRESVKRISQLSEINSHAAGIDVSDTEMMAAFPVTPEKLEIRSFGCFTQDLHLLARCLQQHGIETIAMESTGIYWVTLFLMLQEYGFEVVLVNAKHVKNVTGRKDDESDAEWLQKLHRFGLLSASFQPDSLTRQLRNIVRHRKNLVRTSSTYLNRIQKVFELMNIKLHTIISDIDGKTGIAIIEAILSGERDPEVLADLRDCRIKASREEIIKSLEGYWSSDHLFELQQCYTLFCAHKEMIRACDKEIEQGLIKIIASKNQGIIPDIPVLNRKVSSKTKVSFNLTSYLKVLIGVDVTEIDGINELTALTVLSETGTDMTKWGTEHHFTSWLGLAPNTKISGGKVISSKIMKKKHHAGQAFRAAAFGLSNSKGSIGTFYRRIRSRSGPAKANVASARKLAIIFYMMVSKQQEFNPLLLNKYQEKLKEKTIIQLKRKLAMLEAA

SEQ ID NO: 45952 - protein, 341 aa, unidentified
MEQCFVGLDVSKAETSICLCDENGGPVFAAKKVTDPDVIFQVLRKHLGSLKCVVLETGRMVNWLYTELSDRGLPMVCIDARQAHAVLSQMHNKTDANDAAMLAELARTGFYRKVEVKSRVAQERRALLKAREVALKSRVNVENTIRGLLASFGQRLPRHLHTYEERVHAILKDRPILSKIILPLLDLRTTALRQAAALSKEMARHAKNDEACQRLMTIPGVGPVSAVTFVATIDNPHRFVKSRSVGAYLGLTSRRYQSGDIDYGGRISKRGDPMLRSTLYEAASSLLNRVKPGKGSELQRWARALKARTSHKKAVVALARKLAVLMHAIWTNGSTFQMKEA

SEQ ID NO: 45953 - protein, 339 aa, unidentified
MRELKLIAMDTSKYLFTLHGVDEQGQVVLRRELRRGQVETFFRKLPPTDVVLEACGGSHHWGRVLGGLGHRVRLIPPQYAKPFVKRGKNDHIDAEAICEGALRPGMTFVPVKSAETQANAMVLSVRELLVKQQTQAINALRGHANEFGAVAAKGTSNVEALLARITADPAIPQAAQDMFAELSSHVAELSARLLELDRKLIELHRANPLSQLLAEVPGIGPISALTLAMTVDARQFKSGRHFAAWLGLTPKQKSTGGKPRLGGISRQGNERLRQLLVLGATAVIRLVRPGSRQATAWLLGLVQRRPRKVAAVALANKMARAVWAMMTSGEAYRPQRAAT

SEQ ID NO: 45954 - protein, 373 aa, unidentified
MQEFSKYVGLDTHKDTIAVAIAEVDGGKPRYYGEIPNTPGAIAKLVKKLSPDGEVLTLCYEAGPCGYEIYRQLIRLGHKCDVVAPSLIPSKPGDRVKTDRRDGEMLARLHRAGELTPVWVPDQEQEAIRDLTRCREDMKAMELQARQRLNAFLLRHGKIYQSGRSRWTQAHFRWMEQVKFDIPVHQIVFQEYVDTVKQAQIRVAGLEEEMHKALPDWQLGPVVEALMALRGVKLVTAMTVMAELGDISRFDSPRQLMAFLGLVPSEYSSGKSQRRGGITKTGNGHVRRVLTEAAWSYRFPARKTAHLQRHAEKTSETVQAIAWKAQKRLCGRYRYLLGRGKVKVQACTAIARELSGFIWAIACEEMGRPVVMR

SEQ ID NO: 45955 - protein, 416 aa, unidentified
MKTRQRKHELVKGGVLVVGVDIGKFKHFAAFRASGLVVKTLGFENDLAGFERLAREVDHWCKRLEFQRAVLGLEPTGHYWQPLAYWWEDHQGKVVLVNPMHTNRAKELEDNSPLKSDPKDAEVISGLVAQGKYLECHLPRGIFATLRNLVMQRSRCRMRETRLLNQLHQSVERIFPEIERAFSSFAVKSCRELLLRYADPAALAQVSAEDLGAMLRKWSSGQLGKDRAAKIILLAQQTVGIHEGKPAINAEIQRLIKHLWASEQERRELEVEIEKCLSTTPGAALLLTVPDFGPLTVAAILAHTGDLSNYEHPDQVIKLAGLNLYEISSGQHKGRVRITKRGRPHFRKILYMAALRASRRCGSLHAYYSRLVARGLAPTAALVAVMRKLLRISWAMVSKSQNFDAEKLIPNLAKAA

SEQ ID NO: 45956 - protein, 346 aa, unidentified
MILIGCDFHPSWQQVCWLNMASGETNNQKLVHSSGDAEKFYRQLPAPVRVGIEATGNCQWFLELLGKLGHEVWVGDAAKIRACDPRQQKHDPRDARLLLQLLVENRFPRIWTPSSEEKDLRQLLLHRYKLVRMRVQVKNELQHLAMNKGITKGRRLWSAAGEKVLCELPLAPWASRRREDLFKLRSMLNEQVAALDEAVKKAAEENDRARLLMTQPGVGPITSMAFVLTMGDVSRFPRGKQVASYLGLIPREYSSGGHQRFGSISKQGNRFMRMLLVEAAQCVVRYDEGFRNEYLHRCHTKPRGVAKVAAARKLAVRLYWMLRTNTAYPEIARVGSSSRVALAGAS

SEQ ID NO: 45957 - protein, 339 aa, unidentified
MKVTTFGLDLAKRVLQLHWVEMETGEICRRQLKRGQVLEFFANRERSVIAMEACGSAHYWARKLAGLGHEVRLIAAQFVRPFVKTNKTDAADAQAIWEAAQRPGMKFVAVKSEGQQGVLMLHRMRAQLVKMRTMQTNQLRGLLYEFGADLPQGRQQGVERIPSELDKLEAVLPAMVIETIRSQLKRIEALDQDIAQIERHLAAWKKDDKAAKRLMDIPGVGLLTATAAVATIGDARAFKSGREFAAFAGLVPRQSGTGGRVRLLGISKRGDVYLRILLIHGARSVITHGKQREPWLEQLLSRRPFNAAVVALANKMARTIWALLAHDRTYEKGYVAAAA

SEQ ID NO: 45958 - protein, 396 aa, unidentified
MNKRVHYLGLDVHKETIAVAIAPGGDSEVRLYGIIGGTLDALDKLIKKLQLPGVELRFVYEAGPCGYVICRHLKKKGLHCEVVAPSLIPRKASDRVKTDRRDAQQLARLYRAGELTAIYVPDEEDEAVRDLVRARNAAVIDQRKARQRLKGFLLRLGFRYTGKSSWNDAHQRYLARLTMPRPQQQIVFQEYIEAINVESQRLERLTRAMENALPGWKWEPVVRALMSLRGVQIIVAMTLVAEAGDLSRFDDPRQLMAYFGLVPSEHTSSDKRWLGGITKCGNGACRRVLTEAAWQYRLAPKVSPQLRVRQEQQPKVIRDISWKAQQRLHQRYKVLSAHRKKSGVVVTALARELTGFVWAIACQLNATHKLKERKPIQPAAISGRDYKLNPQKKFKK

SEQ ID NO: 45959 - protein, 426 aa, unidentified
MDNNAKKIELLQKKTSFVGIDIAKRTHYASLINQQGLPIKVGLKISNNRDGLNFLQGKLGHIDKSTMLIGMEPTGQYWKCIAYDLQKNGYDIVLTNPFHVNRSKEIRDNKNTKNDTKDSLLIAHLIREGKFLNTLLLDGIYADLREYTKLREQLKKELSRVKIQLKTLLDEFLPEYENCFSVVIIKTSLALLKAYGLRGLGTGNDFTDKIDLIIKISKRKIKSEKAETIVKLLASTIGIQEGINGAESSLKSLIRRIEFYQSEIYEVEEKMKENLEKTEEAKYMLTVPGIGHVTAAMFLGQTGSLKKFKNPKQLEKLAGMDLTENSSGQFRGKKHLSKRGRDLLRHTLYLMAIAAIAHDNEFKKLYEYKVKVCKKAKMMVVVEIMLKILNVIFAVTKHKIDYKGESIFERLPKTQQQEIDFLHRSQ

SEQ ID NO: 45960 - protein, 414 aa, unidentified
MSYKMAGIDVPKKVLMVVVMDASRPEEKPDRRRFATMPSDLQRLSTWLRAQGVEEAVMESTAQYWRSVWLELEPYMRLQLAQAFSNRAPRGRKHDFKDAERLVRRLIANELILSFVPDGEQRTWRSMTRMKVQLTRDRVRLQSQMEGLLEEMRIKLSIVVSDLLGASGLRILHALAEGETDPKQLALLGDDRLKCSEEQLVDALTGRAQPMHRQMLALQLERLQLIDGQIAKLNGLIAQARKPPQDAVVRLAEVPGLGVDSAQQVIAEVGVKANTFPSAAEFTSWVGTCPGKDESAEQNHSSRSAKGNKYLRRVLNQAAHAAVKKNGSHFQAVFRRLLPRLGYQSAIWAIAHRLCRVVWKILHEGVRFIEQGIEPDPKAKKQRARMLARALRKLGYDVAITPINPAAAENGMQM

SEQ ID NO: 45961 - protein, 426 aa, unidentified
MKKDISKTTKRQKAGNAKRKQLRETKQNRAGLETAKKRTANRTTRRREAEQEVEEGHGNAPSNPGDERQAAAELKAGEGKGYTIGIDLGDTRSRYCILDKEGKIVRESSVGTAPAALKLVFGKLAGCRIAIEVGTHSPWVSRTLAALGHEVIVANARQVPLIYQSRRKNDKLDAEKLARLARMDATLLKGIRHRGEEGQGELMLIRSRAQLVETRTGLINMVRGLVKSRGERLPGCTTAGFVVELLKGLDEAMGRALKPVMVLIEQITETIKGYDKQVEEMGKKHAEIARLDQVSGVGPLIAATYILTIEDPERFGKSRDVGGYLGLVPGQSDSGESQPQKRITKAGDGYLRYLLVQGAHYILGPYGPDTDLRRWGLKLGSSGGDRGKKRAVVAVARKLAILLLVLWKTGAKYEPLRNSDKQKGVA

SEQ ID NO: 45962 - protein, 445 aa, unidentified
MLIVIKKLAIQPQKENIQVGQKKRSIAMKKIRKIEKIVNAQTLLVTVDISKFKHTGYFRCPDGTEVLPFEFTNNRIGFTIFSSMIERTKSEKRLNRVVIGFESTGPYAEPLTHYLRNKQVELVQVNPVHTKRIKEISDNSPGKTDKKDPKVIADLIELNRVLKVVVPVGISAELRRLTHARERYLKVKTLLVNQLYDLVFLIFPEFGQIIKDIQTKTAQYLLNHYLRPQQIIELGVDQLETILRKVSRGRFGREKAEQLFEAAEQSVGIREGQVSIFKEINNLLQGIAQQQVFISDCESDICRNLEQISWSRNLLSIKGIGNITVATIIGEVADFTHFKTSDEVEKFAGLNLFEISSGKHKGQKRISKRGRWLLRKCLYFASLNVVRKDGIFHDQYQSYLHRGMLKQKALIAIARKLLRVIFAIVRDHKEFDCSYYRPNQLKEAA

SEQ ID NO: 45963 - protein, 314 aa, unidentified
MPDCFVGIDVAKDELCVALHGQEDIETFANDQKGIAKLCKRIAKAKPLLVVLEATGGYERGVVVALGSAGLPVVVVNPRQVRDFARATGRLAKTDAIDARAIAHFAQAVRPPVRPLPDAECREMADLLAHRRNLVHTRTAQVNRLQQTTVERVASDIRKVIELLEAQIKAIDADLDGRIERSVQWKQKAEILQSTPGVGEQTARALIVDMPELGSVSRQQIAGLLGAAPMNRDSGQMRGRRFTQGGRGHVRAILYMATLSAIRGNPVIRAMYERLLAAGKVKKVALVACMRKLITILNAMIRNNRKWNEAPKPA

SEQ ID NO: 45964 - protein, 424 aa, unidentified
MKSLPEFEFAALVGIDWSDTKHDICLQAGHSEEREFAVLAHHPAAIEAWAGALRQRFGGQPVAVCLELAKGPLVYALQKYDFLVLFPVHPATLAKYREAFVPSHAKADPTDAQLALELLLRYRAKLKALAPQSGPMRMLLRLVEQRRRLVADQSRISNRLTDALKQYFPDVLAWFADKDTILFCDFLTRWPTLKQLKRARRTTLLSFFHDHHVRSQARIDERLRAINSATALTEDLAVILPNQLLVLALVEQLRVTLQAIERFDAQIATVSETLPDYALFRALPGAGASLAPRLLVAFGEQRERYQSAAEVQRYTGIAPVTESSGKKHWVHWRLQCPTFLRQTFVEWAGATIPRSFWAAAYYRQQRAKGCSHHAAVRALAFKWIRILYRCWQTRTPYDESTYLNALKRRGSPLLASMMETAKNI

SEQ ID NO: 45965 - protein, 325 aa, unidentified
MAVIGIDISKQKLDCAWLRDVSTGKVKTRVFPNRRQDFPRLLEWLEHQTGEPQEQLHVVMEATGIYHETLAYWLHAASIQVSVLNPAQVRDFSRSLGVRGKTDKKDSVVLARYGATQDPEAWQPEPEEVRKLKALAARLDALDKDIQRERNRREKAEFAMATDILRSIYDILLALTRERNRLQQEIDDHLDQHPGLKQDRALLQTIPGVGPAVSLRLLATLRSRVFESARQAAAFAGVVPVSWESGSSVRGRPRLSKAGNPKLRQSLYMSAVVGISRNPDISALYRRLIANGKSKMAALGAAMRKLIHIAYGVLKTQTEYRPQAA

SEQ ID NO: 45966 - protein, 366 aa, unidentified
MKKISTMAIERIQIFKENQLTIGLDLGDRISHYCIIDEAGELILESKLPTTPKGIEEVFGRIPRSRVAFETGTHSPWVSRQMSQLGHEVIVAHARNVQLITESSRKDDRLDARTLARLARIDPALLGPVRHRSAKAQIHLTVIRARATLVSARTAMVNAARGLTKSYGARLPKCGSEQMSREIAKELSQELREALDPLLAEIESLNERIAEYDRRIARVAKEVYPQVALLQQVKGVGTLIALTYVLTLDDPHRFRRSRDAGCFVGLRPGRRNSGMSEPQMHISKEGDRYLRTLLVQGAHYILGPFGQDSDLRRWGLKLAERGGKNAKKRAVVAVARKLAVLLHKLWVSGEVYEPLRNSQKAMRAVA

SEQ ID NO: 45967 - protein, 322 aa, unidentified
MAMLSFGGIDVSKDRLDITVLPDEQCSSVSNDAAGWSELIEQLRGSSITAIGVEASGGYERGVVRALLAAGMSVRQINPFKLRQFAKASGILAKNDRLDARMIASFVAIMPTRPAQQQAPMIEQLAAMLTVRRQLSDHKVAAENVSRLLEGAMLQRLSRRRIAGLTADIDLLDQRLVEIVTADPTLAHRFRLLTSMPGVGAVLACTLIALLPELGQMSRKQVAALVGLAPYDFDSGKLKGRRCIWGGRARVRHVLYMAAMSASNWNPGLKAFHDRLEVAGKKPKVTIVAVMRKMITTLNAMVREDVVWADRHSGRNSVTTAR

SEQ ID NO: 45968 - protein, 345 aa, unidentified
MNYIGTDCHISTLSFKVVNQGGQLIQAQEVATSVKNFLQFVKKAPKPRTVIIEEGSLAAWLLEICAQNGEKLVISDPKRNRWIGSSGKKQDPIDAEKLAQLARGGYLKEIHHPVGQRRRFRELMMAYHDTVKDVTRIKNKIKARFLQNGIDCAGGTVYLPAHRARWRQQLPPEPALLVIVDSLWQQLDQTQTAEETILAEAKAEAKEYPEIKLLDGIPGVGFIHAATISAILGEPNRFGNKRKVWMYAGLGIDQSSSGGKIHAEKLSKEYNRILKYTAKQAAQAAIRTDNAFQRTYLAMTLEKGIAPHRALLTIARDIMATAWAMWKKGEKYNPEIDKRKTEEKA

SEQ ID NO: 45969 - protein, 347 aa, unidentified
MLHLGLDLSRKRLDVCVLNEAGTKLAVTRAPPDLDGLRHLAKEVAALGGPVSAAIESMNGARFVHDSLELMGWDVEIADAQKVKGLAPLACKTDKIDAWVLAELSRRDLVPAIWLPDPEIRAERERARFRLHLVRHRVMLKNRIHSSLLAFGKPCPVSDLFGRSGRELLGRLALPDPWTKNIATALSMIDDLDSEIDACEKELRSLGADHPYVSLLQPAPGIAWVLGFTIASEIGDISRFSSPKKLMGYTGLCPRVYQSGGKDFRGPISKNGPKYLRWSLIEAAVHASSHPVYRDHYDRTKARLGRQRGAKIARIEVARKLAEAIWHMLQTGSMFAPARSPAAPLVA

SEQ ID NO: 45970 - protein, 347 aa, unidentified
MRFYTNQHRYYCGIDLHARSMYLCILDAQGEILLHRNMPCAPELFLKAVAPYREDMAVAVECIFTWYWLADLCAKQNIPFVLGHALYMKAIHGGKAKNDKIDAHKIAVLLRGGMLPMAYVYPPEMRATRDLLRRRMHLMRKRSELLAHIQNTNSQYNLPEIGKKIAYKANREGVAERFDEPSVRKSMEMDLSLIDHYDKLLTEVELYITKTARVDNVNAFHRLRSVPGVGKILALVILYEIHDIERFPRVQDFVSYSRLVKCAKESAGKRHGTSGKKIGNVHLKWAFSEASVLFLRANPKGQKMVEKLSSKHGKAKALSILAHKLGRAVYYMLKREKAFDMNKFFSS

SEQ ID NO: 45971 - protein, 365 aa, unidentified
MALIPMLPHETLYVGVDVGKSRHVAGFLSRTLLQRHERFEGCPTFVFEQSREGFRALVDRMREYVPLEQATVLLEHTGHYHKNLEQYLLEWDITVYRIHVQERPKGMTKTDKRDALSLANRLYTQLELGAQVEEKMQLARRTAHPTQAAMQLRGFMQHRYELSHQRTRLRNKLTAICDELFPEFTHIFHDPNLGVALAFREKFPTPHDIASASLSALRETRVKYFPSEANLLRLQQFAEKTIGITNKDRLRGMKIEQELLIKELRLVQEHLERLDTEIADIVRTSREGQILLSMPPIGPVQAATIIATIGHIDNFEKASELKSYFGWAPTRHQTGVTFDRTKLSHRRGTSCETNALSHGCTGHDA

SEQ ID NO: 45972 - protein, 343 aa, unidentified
MKLMRIGVDLAKNVFQIHGVDRHEQPVWRQRLPRDRWLQTVLEKIEPGCEIGMESCGGAHHWARQLQARGFQVRLIAPQFVKPYVKSNKNDANDAEAICEAMSRPSMRFVAVKTIEQQDIQATHRIRAGLVEQRTAKANQIRGLIAEYGLVAPKELLMLRRAIPCWLEDADNGLTARFRHLLNGLWDDLRALDERVSELDGEISAIAASEPSAVRLQQLRGVGPMIATALVAAIGDASQFTNGRQLAASLGLTPKQHSSGGKDRLLGISKRGDAYLRTLMIHGARSALRTAKSKDDRLSQWVVRLAERSHPNVAAIALANKTARMAWAMLRNGTDYQPDRAAV

SEQ ID NO: 45973 - protein, 372 aa, unidentified
MKNGRPWCIMFFSHQKQIHRKKGGRPMQKIAYLAIDLHAKSFMMGNMDDNGVFKGNLKYSTSEKNIIHAVKSVKAKQKYLTIEEGPLAYWAAQLANPYVEQVFACDPRENALIYKSPYKNDKVDTQRLCRLLRLGELKRVYHAEDDDRATFKAAVQHYIDLRNQLIRVKHKIKAMFRRWGVINVSTASVYSKDGRDKYLELIKHPPIRTQLKRLYYLMDQTDALRKAALKSMKQLGRNYPEIREFMKIPGIADIGAHVFDAFIQTPHRFTKKNQVWKYCRLSIIEHSSDGKPLGYQRLDRSGIGELKALSFRAYMSAMSGDNEVRRFYLKSLKRTHNQKHARLNTQRKIISVMYSIWKKGAVYRPELFSASA

SEQ ID NO: 45974 - protein, 355 aa, unidentified
MRRTTKYVALDVHQATTVSSVRDETGRVIARTIIPTEAPALLAFVRSMGGAVHVVFEEGTQAQWLSELLTPVVQRVVVCNRRGDTTPGNKNDQHDADDLSDRLRLGRLRAVYHGRGDHAGLKELTRTYANLLQDSKRVMQRLKALFRARGIKTPGMSVYHPQQRERWLAQLTESGARFRAETLYAQLGVLQALRPRVKAAMVQEAQRDPAWPVLRSIPYFGPVRIALLLATLQTPWRFRTKRHLWAYAGLAVVSRTSAEYEIANDRPVRRRKRWVQTRGLNRNHNPVVKDVFKSAATTAATRSGALQDWYKGICARGLSADLARVTLARKLAAVTLHLWKTGARYDPTQLSVQAH

SEQ ID NO: 45975 - protein, 408 aa, unidentified
MEVLYPRCAGLDVHQQTVVACARIASGSMVQQDVRTFGTTTAELLALADWLTAHGCTHVAMESTGVYWKPVWHVLDGQFELILANALHIRSVPGRKTDVNDAMWIADLLAHGLIRSSFVPPTPIHELRDLTRTRKQLVREVSQHTLRIQKVLEDANLKLTSVISDIIGMSGRAMIEAISRGEHDPQRLADLSQGRLKASRPAVIAALQGRVTPHHRFLLRLHLTQIDALEVAVRDVEARLGDALAPFQAAIDQLMTIPAVGRTVARVIVAEIGVDMSRFPTAGHLVSWAGLCPRQQESAGKRLSTRTRPGNPWLKTTLVQVAWVAARTRNTYLRAQFLRLKSRRGPKKAILAVAASMLTAAYYILKDHVTYHEPGADYFERRDKAHITRRLIRRLEELGLSVEIRPAA

SEQ ID NO: 45976 - protein, 360 aa, unidentified
MNATTVAVDLAKSVFQLAVADQSWRVIETQRLTRTQFERWFANRDVSLVIMESCGSAHHWGRWLNALGIEVRLLPAQYVRAYVKRNKTDAADAAALLEAARASDLRPVRIKSVEQQALQGLHRIRSLWMGTRTSRINALRGFCREFGIAIPVGARTGLEAISRVLADPHTAVPDLIRGTARLLVEEVRLLEARIAQLERELAVMARLSPACTTLLSIPGIGLLTATAMVAATSGDVSHFKDARHFASWFGLTPKEYSSGNSRYLGHISKRGDRYLRMLLTHGARSVLRAATVARTKGHEPQGLRHWALAVQGRSNHNKAACALANKMARICYATLRDQVPFESEQPLNKKMNRQAFAMPA

SEQ ID NO: 45977 - protein, 319 aa, unidentified
MSTTNVARSRNNQRNVGIDVGKEFLDIAILELNTHSQVTNDEEGISGLAKHLKRYKLSRVVVEATGGYERHIVEACAARSLPVIIVQPIKVRQFARAEGLMAKTDKIDAYLIARFGKVMELTPRPMPNKKVRKVRDLLARKRQLNDQRTRELNRLHKAEKFLQASHRRAIKFIENEISWVEKHLAATVATVDEWQATYSIITSAPGIGNGVAYTLLGELPELGQLTHRQIAALCGLAPFNRDSGKVRGKRRIRGGRAPIRTMLYMAMLSGIQHNPVMRQFYNKLVAQGKHKKVALTACMRKMITILNAMVRDQKEWQMV

SEQ ID NO: 45978 - protein, 340 aa, unidentified
MKEVTTIGLDLAKNVFQVHGVDGSGDTVIRRQLRRRQLLPFFKKLGPCLVGMEACATSHHWAREIAALGHEVRLMPARYVKPYVKRNKHDAADAAAICEAVTRPTMRFVAVKSTEQQSVLTLHRTRELLVRQRTMLVNAIRAHMAEFGIVAPVGIPRVKQLFAVIADGDDDRLPAIARACLEALARQFISLHEEIAIAERRIHAWHRSNQASRRLETIPGIGPITATALAATITDPSAFKSGRELAAWIGLVPRQNSTGGKERLGRISKQGDQYLRWLLVAGAMSVIRHAKRRGTTNLPWLANLITSKPTKVAAVALANKIARMAWVVLMRGESYRPAAP

SEQ ID NO: 45979 - protein, 317 aa, unidentified
MAKTNTKVAGIDTAKAKLDIAVHGSTELWQVPNDKDGWRQLAGLLKAQNVKRIGIEATGGYERGVVEALRAYGFTVSVIQPLQIKAFALARLRRAKTDELDARLIAAFTALMDGDRSPPDRRFSPFADRLTFIEQAEEDYKRAKTRLEHQRDPRLRAKLEADARAAKRRVTYEVARLDADLRRHADLAARLDLVLTIEGIGLRTALALIIGMPELGRISREQAASLAGLAPFDDTSAGRVGEAHIAGGRARVRTALYAAALPAAYKWNPALIALRTRLVDQGKAHKSALIACARKLLIFANAVLQRGQPWEKRPLKS

SEQ ID NO: 45980 - protein, 354 aa, unidentified
MDIKYIGMDVHKETISIAVMKDDGRLVMESIIETKASTILQFIHGVRGDLHVTFEEGTWAAWLYDLLKPHVTELVVCDPRKNAVMKQGNKSDKIDARKLADLLRCGYLRSVYHGENGLRTLKELARSYLTISKDLTRVMNRVKALYRSWGILCGGQQVYAPRHRAEWLNKIGEAGVRRRAEFFYQQLDALRALHQAVRRDLLAESRKHGATKVLRQIPYIGPIWAALLIALIQTPDRFRTKRQLWTYSGLAIETRDSAQHRYVAGQLQRSKKPQQVRGLNQNHNHDMKTIFKSAATMASSREGPFHDFYQGLLTKGMEPAMARLTLARKIAAITLILWKKGAHFDAEQLKPQAA

SEQ ID NO: 45981 - protein, 445 aa, unidentified
MSELIPAAEPDFAAFIGIDWADREHAWALELSGGSRREKGTLEQRPEAIEEWAQQLAARFPGRPVAVALEQSRGALLYALCKYPHLVLYPVHPYTSHSYRKAIFPSGSKDDPRDAGALLDLLLWHRSQLRPLRQQEAAIRKVQILVEKRRDLVDLRTAQTNRIAAELKLCFPQVLDWFDQLNSPMVVDFLLRWPTLEQLRKEPRDMLRTFFVQHGSRSSARIDARLEQIDTAQPLLNDSAILDSCCVLIQSLLPVVAALNQAIRRLEDALEQTASAHPDFSIFRSFPGAGPALAPRLLAAFGSDRDRYRSAAELQAFSGTAPVIESCGSSRWIHFRRSCPKFLRQTFHEFAAQSIPHCQWAAEFYQRHKAKGKRHHAIIRSLAFKWIRILFRCWQSKSNYQDSLYHAAPALPTPLSSNAPSAGRNPVNNSLQKLADLLKTLPAIS

SEQ ID NO: 45982 - protein, 417 aa, unidentified
MSLNVVGAVFFVGIDWASAVHAVCVQDAAGRRVAAFTVEHSAAGLAGLMCRLARIGDPDAMPVGIERPDGRLVDALLEAGHPVVPVKPTAIKTWRDGEVLSGAKSDAGDAEVIAEYLRLRHHRLQLATPYTPETKALRAVARTRGDLVDMRVAATNQLAALLDAHWPGAKAVFADVASPIALEFLTRYPTARHAQHLGAKRLTAFCAKHGYSGRRTGEQLLARLRGAPSGATDEVLCEAVRDAVSALVTVLKAVGVALKDLSRSVVAHLGEHPDGAIFTSLPRSGQINAAQILAEWGDARQAYDGPDSIAALAGVTPVTKESGKHRAVHFRWACNKRFRVAITTFADNSRHDSDWAATVYTAARARGLDHPHAIRVLARAWIRIIWRCWIDRTPYDPSRHGNATRLHQSGQTGLLVA

SEQ ID NO: 45983 - protein, 379 aa, unidentified
MKKDSIARLQVTKSQIRRMGAKQRLTVGLDLGDRASRYCILDEAGEKANEDKLPTTKTGLDSLFGKMPTCRIALEVGTHSPWVSRHLKAMGHEVIVANPRRVKLITQSVKKNDRMDAEQLARLARVDPQLLSPIQHRGPEAQADLAVVRARMTLVDARTELINSARGLAKPMGERLKKCDTDSVKESLADGLSEATQNAIRPLLKSVEEINKQIGVYDQRIEGIAKRYPEMKLLTQVHGVGTLIALTYILTIEDAERFAHSREVGPYLGLTRKLRDSGDSQPELGISKAGDELLRRLLVQGAHCILRDGAPDSDLKAWGMAMLQNGGKKVSKARKKKAVVAVARKLAVLLHRLWVTGEVYDPQYNRKAARAAKGKAKAA

SEQ ID NO: 45984 - protein, 447 aa, unidentified
MKRRTTKTSVVNMPLVNPNAAGIDVGDTMHAVAVPEGRDEVQVQSFGTMTCDLQAIISWLKKCRVETVAMESTGIYWKPLFSFLVTEGFEVYLVNSKQVRNVSGRKNDEDDARWIQKLHSCGLLKSSFLPDDEQETLRTLVRHRKTLTLDCNRFILRMQKSLELMNIKVHTVIRDITGKTGTGIVEAIINGERKPENFLVYVDRNIKADHQTIVKSLQGNWRSEHLFILKECYHSYRFYKERITVCDAEIERQLGRYQREVFPNVELDKSVTSKKRATKNKPKFNTTSYLRAILGVDTLAIYGISDISALEILAETGTDMSKWETEKHFVSWLNLCPNNKISGGKMISSMLMKKKPNAASQAFRNAANAVQRSDNWLGDYFRRMKARGGNKYAMVATANKLATIYYKMVRYKQEFNPPDLQEYQQRYKLAKIAYLERKLGELRREAA

SEQ ID NO: 45985 - protein, 350 aa, unidentified
MLIIGCDYHPGFQQIAYVDTETGELQERRLRHPEEAEKFYRDLWERKLRVRVGMEASGHARWFERLLAELSFELWIGDAAEIKAKRVRKQKTDRQDAQHILKLLLKDDFPKIWVPSWENRDLRQLLWHRHRMVQTRTRIMNQLQAVAINEGVRCKKRLWREAGRKQLESLPLAQWASRRRQDLLEVLDRINPTIAELTQAIEDEAEKCSEARRLMTHPGVGALTAVAFVLIIGEANRFSCGKQIASYLGLVPAEDSSGERRRLGHISKQGNSLLRFLLVEAAQATARSDCRWRNQFFHLAKRRGRKIAKVAMARRLAVRLYWMWRRGWNYEQLQSFGSHARQPGNPHGVQ

SEQ ID NO: 45986 - protein, 421 aa, unidentified
MTTSSFTTDQTTWVGIDIAKKHNDVLIERPRRRRQHFKVANQLEDYRRFARFLGDLEERPVIGFEATGNYHRTLAFFLAEKGFALRLISSVAAARTREALYNSWDKNDPKDAQVIIHMLKTGVTQHYHDPLTHGINELQELSKTYFQISLHKVRIQHSILTHYLPLYLPEAEKYMKSRRAQWFTHLLERYPCHAAVAKFSREEFIEDAWVYVGRKVSKTAFLEDFYETASQTIGLPVSEDSEAIRMFRIVLREHQRLCEIRADIEKEAESFLGENADYVRLKTLPGVGPILALTILAEAGDLRRFPHHRQFLKFCGLDLSSHQSGQFSGKKKLSKRGNRHLRYAFWLAATVAIRMRENSFRDKYARYVASDPTNPDLKRKAFTAVAAKMARVAHGMIKHETNYRPFHERAVPGGIIPAKGR

SEQ ID NO: 45987 - protein, 422 aa, unidentified
MQNESTPGARGPVFCGVDTHADSHWLCVLDWRGRKVLSRQFPADAAGYEALAGAIAAAGEPACVAMEGTSSYGAGLTRHLASLGMPVREALSPARMQRRRPGQGKCDESDAERAARAAMSGSKLGTPKSQDGWVDGVRCMLAARSGAVKARTSAINTARSLLTTAPEGLRSRFRGMAGPRLMEELPSVRAEGALADLWAAARDAALDMERAIEASLEENCPALLAMYGCGPVSAAKLAVAAGDNPGRLRSEASFAAICGACPIPASSGKTVRHRLNRGGDRQANSALHEIARQRVMRDPETAEYAERARARGKSDREVMRCLKRYVAREAYRALMRPHEVRRPEDASGLVAARRAARVSQVRAASILGTSEKYISMLERGQRELKPIRRAYEAWVEAGLPLDWDRQAFEAERKMDSKKHLAK

SEQ ID NO: 45988 - protein, 348 aa, unidentified
MTIVEPARLVTGGVDTHLDVHVAAALDELGALLGTESFATTPAGYGELFDWLESFGPLARVGVEGTGSYGAGLARSLMAHGVEVVEVDCPNRKERHRAGKSDTIDAISAARGALSGHANGQPKGGTGPVEAMRVLLVAKRSARSERVRTLNQMRHLVFVAPDDVRARFHGLNVYNLTRQAAAMRPRPGNQVDYVTLMALRELGRRALALEAEADRLDDLLEPIVAGHAPGLLGLFGAGIFVAATLAVAAGDRPERIRNEAAWAHLCGVAPIPASSGKTTGRYRLNRGGNRQANSALHRIVLVRMGYHEPTRVYVERRRGEGRTNLEIMRSLKRYVARETFKQLPRGDT

SEQ ID NO: 45989 - protein, 354 aa, unidentified
MEKYIGLDVHARSTTCAVLGPTGRKLRVAIAETKAGALVELVTSIGGELHICFEEGCQSEWLYELLQAHAKEVVCVQPLRKQGAKNDERDAMQLAEHLRLGTLERVVYKEKGSVGALRQAVRAHRLITQDVSRVKNRLRSVYRSRGVFCPNEAIYSPRKRDFWLAQLPPMSREIAELLNQELDALDGLRQHASERMLEEAGHHAMVDRLATIPGIGKIRAAYIVATVVTPHRFRSKRQFWSYCGFAVVTQSSADWIRQRGGWVRARTARTRGLNINRNPVMKDVFKGAALTIMQMDDEHPVKQDFLQMLHRGMRPNMARLTLARKIAATALAVWKNEEVYDPAKRYCPPKNTAA

SEQ ID NO: 45990 - protein, 346 aa, unidentified
MIFVGMDISSKDFVVHAIKDNKKVLINGVSYSPSKAGIREMLKDLGKHTKLIVIEAGNQLKWIALFLKKQKGVHLHVVHPNELKWITQSGKKTDKVDAKKMAELARLDGLPRKVHVVEGSIRDLRELLAARENLMKKRVGIVNSIRGYLKQEGVSLPAKFFSSKDWQEKLNKIEIGKVKKIIIENFMFALEQLQIAEDCILDEIYKIEDPRIELLESIPAIGPITSRVLLSALDNVDRFDDKKAVAKYGALTPRIYQSGSKSVTGRISNDGRKEMRRCLLQCSHTINRMSKNASAKPLHEFSQRIAGKRNKKIAAVATARKLLTVAYGVLKNGEFYDPKMLKPNAA

SEQ ID NO: 45991 - protein, 338 aa, unidentified
MSLYAAIDLHSTNSVLAVTDETDRVLRQRRLPNELPAILKELEPFRDELTGIVVESTYNWYWLVDGLTDHGYRLHLANTAAIPQYAGLKYSGDESDARHLAHLLRLGILPEGYIYPRKERAVRDLLRRRFQLVRMATGVMLSIQSTWARQTGHGISSNLVRRLSEAQIEQTFAEVPVRFSILARWQIWRAIHEQVQQIERWILHSHPCGQAQRALRSIPGIGLILSLTIALESGEISRFASVGDYASYCRMVKSERISNGKTKGHGNRKCGNRYLAWAWIEAAHFALRFSPPIRRWYDRKCGKRHKIIAIKTVAHKLARAGYHLLRDGGTFDVERAFG

SEQ ID NO: 45992 - protein, 428 aa, unidentified
MDEVNRNRLEEFRQLRQEVRHSEEYLIVGIDIAKDQHHVFFGTATGKTLLRRLVFSNDHEGFRKLLDQTEALRVQHGLKKVVYGMEPTANYHKPLGEYLINLGRTVELVSGVTVAKNRESLDGRWDKHDVKDSANVADLISQGKCLYYEYPSVELRGLRGLLSLKRRLKKQEQGYRVRIRNHLIAQYFPEMDREYERLGAEGLSIVRWCLPATQMTELDVEPFIERVTSRRITMEKRRRLEEVWEKAAESIGCETVPGVDHEAKVMVEGLKQIREMIKETEDKIEELCEQFPEYHYILTIPGFGPDVSSKVLGAVGDPDRFQNGKQVLKMGGLDLSADRSGKDSDKAIPQISKRGKADLRYALYQAALIASTRNREFMRYYTERLRGRDREKGIQMKMRVKLSAKMLLIAWTLMKKKEAFDPAYLNVD

SEQ ID NO: 45993 - protein, 450 aa, unidentified
MGIDVSKGYADFLLLSNDRKVIEEGYTLPDNPKGRQKLKELVCLWQKQGLEELYCGVESTGGYEDNWFRYLRSTFIGEKVYTCRINPKGVKSMGDAALKRTITDAVSAENIASYMISFPHKLDYGIEKHLGNGGFKDGRQHLTTIRMIVKQKVQLNNQLEKLLYQHFAEILVYCRHGQPIWLLSLLVKYPTAAMLIKAGASKISSNKGISPEKAKAIIAKAKNSTQDVSPEIGRIISLTAKEVLHKNLIITKEKEYLTGLYKGAEEMVLLSSIPGVGLDSAVSIALEIEDVGRFETAKKMASYFGVHPTFKQSGDGQWGNHMSKAGRGEIRAVLYMASLSGSRYNPTLKKIYDRYRAQGMKHAEAIGVVMHKLLRMIYGILKNKTKFDADIDQQNQEKSAAKQDVNEQLERTDKKIKQLKKNRFQAVTNEAPISNRKEKAIKKQVASQTS

SEQ ID NO: 45994 - protein, 498 aa, unidentified
MALQKEARTPICAVTFLSTNNWDIEPVHLSLTKQSLFSLGDSQCCCFTFLTVKLRGLIFYTGVIRMKIIHPICCGVDVHKKFLVATIAVTAKSGVTRYITETFSTLNPDLFRFRTWLTDNNCLHVCMESTGKYWIPVFNILEAAGIHVLLTHPMYVRAIKGKKTDKKDSKWIADLFKHDLVRSSFIPPPQIRALRELARYRYKLVCMRSSERNRFQDCMTVSNIGLASVLSDPFGKTATDIMNHVLSSDVFDEQLCQKLIYKSAKKKTDLILQSIRDCKIESDQRFKMTEVNVHMEYLDHSILRTEAELYTRIQPFMSIVDHLSTQLPGISKLSAAMIIAEIGADMSVFESANHLVSWAGLAPTNNQSAGKKKSVRISKAGQFLKPLLVQCALAAAKSKKQPYFAIKYQRIKKRRGHKKAIIAIARMMMICIHRLISTGEDFCPSDYQAVVLPSQPRKQVLNDKTVFAYLAAQGYDVSSLVKLNPDAPLSVSEQPVPA

SEQ ID NO: 45995 - protein, 339 aa, unidentified
MSKLFKNFVGVDISKTWFDAALIRSADPSKIIHQQFTQTPDGYKKMLAWLHDHDVSLHDDTLFCMEYTGIYNTGLVNCLVAQHAQLWVEMPLRIKRAGGLERGSDDRSAACKIAWYALRYHDGAKLWKPADSSIEKIKHLITQRERIITSIKHLTVPAEELKQCGCLHDAKMMEKLQQPVIKALQKTKQGIEALITKTIKLDEALYNKVQLMQSVNGIGTVTATALLVYTKGFTAFNNAKELACYCGVVPFNKTSGSSVKYKPSVSPFANMKLKKLLHLCAMSAIQNDKEMKAYFERKTAEGKNKMSVINAVRNKLIHRVFAVVRDERMFEDNYVRQCA

SEQ ID NO: 45996 - protein, 462 aa, unidentified
MTNWPPLRLARLGCEPVSVVVAARALPSFVMSIEGGDEVKRSFGLDVHLDFCEVAVCEDNQVSQLGRVASTPEAIREFAAGLRAGDQVALEASCGAMMIAGLLGESPARVVVCNAAETRAISHARVKSDRFDAAMLARLLAAGMLAEVWVPDQDTSALRRRVARRAGLVRARTRVKNEVHAVLARCLLGRPPVSDLFGKKGRAWLAGLVLPEEESQTVASGLRHIDFLDGEVAALDKEIARQALARPGFHRLLTIPGVDVGTAAAVIAAIGEIDRFSSPGQLVAYLGLDPKVRQSGSESARYGHISKRGDPQARAVLVEAAWRAIRTPGPLRAFGERVRARRGAQIAAVAVARKLVVLCWHLLSKDEDYAFARPSLTRQKTRRLELLAGAPPLPRRHGGATVTPTRSQREAELALGQQAEQAYRRLIADWRSTAPRGGAGATTGRASKRPTEGQAARQATSP

SEQ ID NO: 45997 - protein, 320 aa, unidentified
MDPVLGVDIAKAKFQTALLLPDGKVRHHSWPNTAAGFEQLAAWLARNGVTHVHATLEATGTYGEALATWLHDAGHRVSVVNPTIIHAYARTQLARSKTDRLDADLIARYTATQQPPAWTPPAPEIRQLQALVRRLDALQGMRTQEANRLTAGVVVADVRASIGAMLASLDAQIAHVQALIRDHLDQHPGLRAQRDLLTTIPGIGEATAAILIAELFDKRYTSARQAAAFAGLVPRLTESGTRRGRSRLSKIGPARLRKALYFPAVTALRWNPTIRALRARLHAAGKQPMVIVGAAMRKLIHLAYGVLKTGRAYEPTCAHP

SEQ ID NO: 45998 - protein, 339 aa, unidentified
MRLYAAIDLHSNNSVLVILDENDKVVHERRHPNDLPAILAALEPHRENIQAIAVESTYNWYWLVDGLMEAGYTLKLVNTLAVKTYDGLKYSSDEHDARHLAHLMRLGLLPTGYIYPKEERAVRDLLRKRSLLVRNRTLHILSIQNLVSRNSGNGIVATSIRKLDDEALSRICGGNSNLVLAIKSSLSVLFCLDAEIKGLESVVLAKARLRPEFKKLLTVDGVWHIIGMTIMYETGDIGRFTKVGHFASYARCVGGGRFSNGKKKGEGSRKNGNKYLSWAFIEAAHYAVMHNERIRKFYQRKKAKTNTVVALKSVAHKLARACYHIIKEQTDFSEERAFA

SEQ ID NO: 45999 - protein, 338 aa, unidentified
MKITTIGLDIAKSVFHAVGVDKAGKLIKKKMLRRKDLLPFIAKIEPCLIVMEACGGASYWAREFEQFGHVVKLIAPQYVVPFRQGNKNDYNDALAIAEAAQRPNMRFVKPKSVEQQDVQLLHRMRERLTKQSTALINQVRGMLAEYGIVMTKSKSAFKAQLPDILVDEANTLTTKGRAIFYQLYDEVIDIEKRLKSCDTQVLNETQNNVICQRLQTIPGVGPVTATAIYAAVGDGKDFSNGRHFSAWCGLVPKQHSSGGKDNLLGISKRGNAYLRTLFIHGARAVLRHSGSKSDKLSCWAIQLAERRGFNRACVAVANKLARMSWVIAAREQEFRLAM

SEQ ID NO: 46000 - protein, 404 aa, unidentified
MVKYHIGIDVSKRRHRACIHNLAQDSYSGIFSIEVNRQGFEKLINTLEKLSTNEEDFLIGIEATGSYGDTLSYYLLSRGYKVVGINPYQANQFRKAQGKIARTDSIDARSLAAQLALGNHKALAIPDPVLDNLRELTRFRADMVKDRSALVNQLHETLSSIFPELATVFSQLDSPSSIALLIAYPGPEYISRAGEAKIAESLRVASRGKMGETLAKSLVEAAQSSIGVLQRQPALATKVSILGERLVSLSAAIGRVEKEIADLFHKLPYKPEDFPVGDISSLATLLSEIEDIHRFPTLKQFLSHFGWCPQSFQTGSYNREHPRMSHAGNRYVRRIIWMLSIVAIRTVPRYRDYFQRRVNEGKSKMHVIVAVARKLLSVLYAILKNGIPYDPDWEVNRHFAMARH

SEQ ID NO: 46001 - protein, 326 aa, unidentified
MHGVDADGQVVIRRKLKRRYLLAFFEKLPACLVGIEACATSHHWSRQLQALGHRVRLMPPAYVKPYVKRQKNDVADAEAICEAVTRANMRFVETKTVEQQSCLMLHRTRHLFIREQTAVINVIRAHLAEFGIVAPVGRKGVEELLRVIADPADRRIPEIARACLAALGTQLQRLKEQLLEFDRMIMAWHRSDETSRRLDEAPGIGPMLATAVVASVADAKAFRSGRNFSAWVGLVPKQHSSGGQDRLGHISKQGDRYLRGLFVAGALAVIRYAKIYGTRHRPWLTALLARRPTKVAAIALANKIARMTWAMMVKGERYKEPVALAA

SEQ ID NO: 46002 - protein, 356 aa, unidentified
MNFMATDYIVGIDLGKFKSVFCSFFAETGEIRYQTLATDPKTFREFLATTKPTMTLFETSTAAGWVSDLCGELQLACQVANPSGEAWQWKKVKRKTDRDDAYKLVRMYMMKEFPTVHMTTPEVRQQRALVNFRQRLINHRTATRNHIRAVFQAQGLSMPAGHKAWTAEACEEWKKTYAQPITECESLQLWRGTLQVDLALLETLETLISQVEKKLNELGKANESVQLLTTIPGVGIRTAEAVVAYLDDPHRFQNSREVSAYAGLVPRQFQSGTMDRKGRITKRGPRHLRKLLVECAWLMRRHNPWGAGLVDRISRGQKGRTKSAVVALARKLLVCCWAMLRKGEAWKSPPLLPAAA

SEQ ID NO: 46003 - protein, 417 aa, unidentified
MLKIVYRNCAGIDVHKKTIVVTIAKTNDRDITDYQTKSFSTFTEDLIKCRDWLLSNNTLDVCMESTGKYWIPVFNILEKNCKCVITHPKYVRTILGKKTDKKDSVWIADIFKHGLVEPSFMPPEDIRQLRDLMRYRNKLVYNRTGEKNRFQNSLTVSNVQIANVLTDVFGKTSQSILKLMLENPNLTLEDITPLLRKNLKSSPEDILKSINGNFDECQSSKMAICLKHYDSINECIDSLEEQILKLTIKYSTEINLLLSVPGIKELSAIFIIAEIGTNMNVFIDDKHLISWAGLSPRCNESAKKKKSVKITKAGVYIKPLLVQCALCAIKDKSCPYIKARYESLKRRRGHKKAIIAIARLLLVSIYHILNTGEVFDYERFDNLLNRNFKSQRNVKNTPEEMISYLTSLGYEVSMQNT

SEQ ID NO: 46004 - protein, 333 aa, unidentified
MDELFKQCVGIDISKQTFTACVCKYYISENASYSNVENFENSRTGFNQLIKWSRKFLSKEKPALYLMEATGVYYESLAYHLHRLNQQVIVALPNKVKHYARYLCINTKNDNMDARILSLMGCMQKMQLWSPPSLIFRKLRSMTRFNTELLKQRTVLINHIEALNNAEDPLPSIIKAYKKMIRDINKNIENNDKEIDILIREDQELNSRIIKLQTIKGVGLSTIVAVLAETQGFELITSRKQLARYAGFDVVERQSGSSVLGKTRISKKGNSRIRSALYFPAMVASRYNSHLKEDYERIVAKNPKQKMIAITALQRKLLLLIYTLWKSGEDYRE

SEQ ID NO: 46005 - protein, 339 aa, unidentified
MQQQINLNLATFVGIDAHPSEHTALAMNRFEEAKGHLRFENTKEGIRQFLAWLETIDTTADKIIVGIEGGSSTRHGLLSQLLESYDHVYEVNPLYTRQRRVFGTRSDKSDPFDAKLIAEVLTKKLNELPKITSNELSSRMLCLKKTVWFYEEKTMQGTRLQNQLHQLQREKELSFSKEEQHALSTIIKEKQQELKRIRTTQKKLEAELKVLLQGYGSNLTTVKGISTITAAKLVAHTNGIERFGNRDKFLRYAGIAPVEKSSGKGKHHIQSKKGNRRLNTTLYWIALNQLKWNPNTKEYFEKKLKEGKTKKHALRCLMKNTACIVYSMLKSGEDYREQR

SEQ ID NO: 46006 - protein, 362 aa, unidentified
MNTTTTVAVDLAKSVFQLAVADSSWRVIEQHRLTRSQFERWFLNRNVSLVIMEACGSAHHWARWLNSLGIDVRLLPAAYIRAYVRRNKTDAADACALLEAARCADIAPVKVKSIEQQALQGLHRTRSLWMGTRTSRINALRGFCREFGISVAAGSRNGLEQISRVLADPHSAVPNLIRGTMKLLVEEIRLLEARIAQLERELTTLAKQSAACTTLLSIPGIGLLTATAMVAATSGNVQHFRDARHFASWFGLTPKEYSSGSTRYLGRISKRGDRYLRMLLTHGARSVLRAASVAQAAGRRLDGLRQWALAVQARSNHNKAACALANKLARICYAALRDAEPYTGVVTRMKKKMERTAYAMPA

SEQ ID NO: 46007 - protein, 317 aa, unidentified
MAMQVGKLIVGADVAKAELVIHHDDRDEIIRLKNSKLEIRRWLKQQSPNTAIAVEATNVYHLDLVELAHSLGFEVYVIDGFQLSNYRKSVGGRVKTDPSDARLLSRFLKNEGQDLRPWSPPPAVYGKLQSLLRRRAALVTARTAMTQSWANESLLKTAFETFVKSIDRLDQLIQKKIKEVLREAGLQEQVARCQAVEGIGFLTAAALVMAFIRGEFKSSDSYIAFLGMDLRVSDSGQKNGRRRLTKRGCSEIRRLLHNAAMAASKSAAWKGLYEQHRSSGKATTQALVILARKLARVAFALMKNQDEYVTKGGKLAC

SEQ ID NO: 46008 - protein, 393 aa, unidentified
MFYIGIDIAKHKHEASIINSDGELLCESISFSNTQKGCEKLLALMQKFTVTADNCIIGMEATGHYWLSVYSYLLELGYSLKVINPIQSDSFRKMYIRQTKNDSKDSFVIAQIMRFGQFSSTSLSSENIMALRQLSRYRMFLVDECSDYKRKVICLLDQIFPEYNKLFSDTFGVTSSELLHKYPTPEDMLSVSTTKLTNFISKCSNGRFGREKALQIKDAAANSFGVKFAADAFAFQIRQMLEQINFIEAQLDELEVQITTMLFEENQVITTIPGIGNILGAIIISEIGDISRFDSASKLVAFAGLDVSVKQSGEFVGTQNKISKRGSPYLRRAIWTAAGRAAFCDPVLSDYYQSLRARGKHHLTAVGAVARKLCNIIFAVLRDNKPYQPIPKN

SEQ ID NO: 46009 - protein, 354 aa, unidentified
MRTYYVGMDVHRASIVVVVLNGAGKVVMQAVIETGAERVRGFLQQLKGRVYVTFEEGTQATWLHDVVRPLVTTVVVCDPRHNKLIGSGNKSDRIDAQKLAELLRNGSLKPVYHQDYRTRDLKELVRVYDSLVQDTTRVMNRLKAIFRGRAISYRGRDIYRKDRRAQWLAKLCQPGARYRAEFLYQQLEALKPLRHEAKRLMIKEARRHPAYRILISVPLLGPVSVAQLIAIVSTPHRFRSKRQFWTYVGLAVVTLSTADHEVVNGVLRRSRRPIATRGLNRNHNHTLKRVFKNAATSACHRAPFKAGYQLRLAQGMNASLARLAIARELSAITLAIWKRGEQFNPERMKQPATV

SEQ ID NO: 46010 - protein, 388 aa, unidentified
MTYYAGIDVSLETSSICVVDQAGSIVREFKVETEPEAVATALTGLNLAFTRVGLEAGPMSQWLHGGLVAAGLPVVLLETRQLRAATRTMPVKTDRTDARAIAQMVRTGWFRPVHVKSLLSQELRVLLTARKLLVTKLRDIDNGIRGLLRGFGLKMGKVGERGFPARVRELVDGRRSLTMVIEPLLQVRGVLLAEREGLHRLVMSATRQDETCRRLMTVPGVGPVTALTFCSAVDDPMRFARSRAVGAYFGLTPRRYQSGETDRTGHISKQGDGLARQALYEAANVLRPGPADGRRSRPGAWVLPGAPACAALRSRSPASSPSCCTGCGATAPSFAGARRRPRPERRPPLHPAPEVPSLRRGRPRPQRPRCQHYRRARLLGWPAPPAWP

SEQ ID NO: 46011 - protein, 405 aa, unidentified
MNVVYERCCGMDVHKKMIVACFRTGKQQEMRQFGTSTKELRNMAEWLEQGECQMVAMESTGSYWKPVYNVLELLGLEVMVVNAQHMKAVPGRKTDTKDAAWIADLLQHGLLKASFIPNREQRELREVSRYRKSLVEERSREINRLEKMLEGANIKLSSVVSNLMGMSSLNLIRASMAGELSEATIDGMIYGKLHPKRDELLAAMDGVLSSAQRMLVGAVLDHISDMTRRIEDIGSIIRIEMQKYEDAITALDAIPGIGVQSAQTILAEIGIDMSRFPTAAHLASWAGVCPGNHESAGKRKSGRTCKGNKTLKTTLVQCAKTAAKTKDTFFRAQYDRLTVRRGANRATLAVAHSMLIAIYHMLKTNQPFRDLGGRYYNQFNAEKKINAYLKKLNDLGWSPPVTAAN

SEQ ID NO: 46012 - protein, 359 aa, unidentified
MSSIALGRGDVVVGVDTHKDEHVAVALDGLGGLLDELAIAANPHGYVQLLAWADELGAVAAFGVEGTGSYGSGLARFLRRHGRQVVEVSRPPRKGERRLSGKSDAIDAEHAAREVLAGRATATPKLADGIVEAIRLVKIARDSAVGAHSQAMITLKATLVTAPDELRGQLEPLTDFKLIGACAALDTTGDIADPAVAMRLALASLARRWLQLHEEIKAHSRRLKKLTQTAAPDLIAAFGIGPDIAAEMLVTAGDNTDRIRSDAALAKLCGACPIPAGSGKTNGRHRLNRGGNRQANAALYRAIIVRMRWHPPTIAYVERRTAEGLSKKEIIRCLKRYLAREVYRLLPEPSSPANLASAA

SEQ ID NO: 46013 - protein, 357 aa, unidentified
MDGSKGQPKTTVGLDLGDKYSHLCLIDSQSGEVIEEGRLRTTPETFRRRFASEQLMRIAIEAGTHSPWVSRVLEECGHEVLVANARKLRLIYANKRKTDEIDAENLARLARLDPKLLYPLKHRGEDSQAHMALIRSREALVSCRTQLVNHVRGAVKSFGGRLPKCPARSFHKKASEHIPEALWPALGPILEQIGSLTQRICDYDRKLEEISKAHYPETELLRQVEGVGPLTALTFVLTLEDPYRFEKSRSVGAYLGLVPAMDQSGDRDPQKRISKEGDQMLRKLLVGSAHYILGPFGSDSDLRRHGEKIASRGAKNAKKRAAVAVARKLGVLLHRLWVSGEVYEPLYKAHRCGDVAA

SEQ ID NO: 46014 - protein, 349 aa, unidentified
MNITTIGIDIAKRFFQIHGINANGKTVLRKKLIRDQVLNFMSNLPKCLVGIEACGGSNYWAREITKLGHKVNLIAPQFVKPYVKTNKNDRADAEAICEAVSRPNMRFVTVKSTTQQDILSLHRVRERLVKNRTALANEIRGLLLEFGYIIPQGIHKITTKLTEILDQGSLTQISHQTFSDLKEEFIENDKKIKDIEKRLKEIANNLNMYQKLKSVPGLGLITATALIASLGNVTNFKNGRQLSAWLGLVPKQHSSGGKEQLLGISKRGDVYLRTLLIQGARSLLNAKFRYTTEEQRSNKDFSKFTAWMLILAEKRGHNRTVVAIANKLARVVFALLSNNYDYDESKVCI

SEQ ID NO: 46015 - protein, 314 aa, unidentified
MDKTICGIDVSKDRLDVAVRPSGERFVVARNGAGLDELVARLKMLKPYLIVLEATGGFETVVVAALAAAGLPVAVANPAQVRAFAKAIGQRAKTDPIDAGVIAHFGEATGVIPRPLPDQATQQLADLVARRRQIVEMIGAERQREKRANSRVKKSIGRLVKALERELSSVESDIDDAVRGSPAWREKEDLLSSVPSIGPAISRTLIAELPELGTLGRKQITALVGLAPFTRQSGQWRGKSFIGGGRASVRRALFMGAMVAARYNPVLKAFYERLVAAGKPKKVALIAVARKLLIILNAIVRDGTPWKGTVRAVS

SEQ ID NO: 46016 - protein, 358 aa, unidentified
MYKFMKKFFIGVDVSKDTVDVSFFDDDRMKSPEYLAQYSNSPKGFREMVKDLRMCCHGVSSGQWLFCCETTGRYDHPLCHWLVDHGMVVWRESALQIKWSSGIQRGKNDRVDSLRIAEYAWRHQDKMQKFVKPSESLSNLKAAFTHRRRLVEKRTATRCQLKSMSSEKGLSASVARMIVRDLSREIERLSASIATMDESIQKIIRSDSELDRNYRHIISVKGVGPITAVALIVCSGNFKAITSAKKMACYCGVASFRSQSGTSINRKASVSNLSNRQIKSLLSMAARSASRSNPVFAEYFNRTLSRGKPVALVYNNLRNKIITVIYKLIERDCDFDVDYMRMHSTGQRANESAIREAV

SEQ ID NO: 46017 - protein, 338 aa, unidentified
MSIVMGLDQHRAQVTADWLETETGEVKRARIVPADRAGVRRFLERFCGQELEVALEATTGWRFVVDELRRVGAVAHLAEPAETSGLRGPKKRAKNDRSDARHLRELLMLGRLPESWIPPDHILDLRARVRLRHTLGEQRSEWQQRIQATLYHHGCPQRRALMTGEGRKWLAALPLPATAREQVTVALGMIEALERQIAPIEKELRAYARRQPGCRALMGHYGIGELTAVTILAELGDCRRFSSSRQAVRYAGMDVTVHESDTRRSRGHLSRQGPPALRWALYEAAQVARRPTSPDRSYYEQTAERIGGNRACLAVARKLLQRSYHTLRELGEEALAVA

SEQ ID NO: 46018 - protein, 338 aa, unidentified
MQTYAGIDLHSSNNFVGVINAQDKVLYGKRHTNRLDEVLRALDPFQDSLQGVVVESTFNWYWLVDGLQERGYSVHLANPSAIQQYEGLKHTDDQWDSFWLAHMYRLGILPEGYIYPKEHRAVRDLLRRRLLFVKHSTSHILSLQSMISRNLGLKMSAREIKKMKSQDVDGMFDCPNLAFMANNSLAAINFLKKIILDIEKKVKPQVQMRKEFLNLLTIPGIGNILGLTISLEVGDIGRFPAAGDYSSYCRCVESKRLSNGKKKGENNKKNGNKYLAWAYVEAAQFCRRYCVKAQSFYQSKAAKTKPVVAVKALSNKLSRASYYIMRDQVAFDEDKLFS

SEQ ID NO: 46019 - protein, 429 aa, unidentified
MKSLNDSLSLFRVMRASVRGSEKYLLVGIDVAKSKHHAFFGTPNGRTLRKNLVFDNSTKSFESLRSLARDLQNQHGLVEVVYGVEPTASYHKPLAEYLIRQGDQVVYVSNVAVKNNRALLDGRWDKNDKKGEANVADLVGQGRCLYYDVPEESLRELRSLIAYRSKLKKQEHALRMRLRNNLFAQYFPELDRLFVKTGQPDDMVLSIAEHCLDPREIARMEFDDFLKLITTRKIRIEQEKRLRELWEGAKNSAGCLVHDAARWEAKSLVSQLKTLREIVKDNELRMKTAAQQYPEYQSLLSIPGFGPIVSAMVLGAIGDPYRFENQRQVLRLAGLDLSAARSGKNSDSAKPVISKQGKAALRYALVQAAMVSSSSNPTVRSYFSGLLQGRELERGIKLKMKVKLAAKLLVIAWTLMKSKEQFKPSCFPG

SEQ ID NO: 46020 - protein, 338 aa, unidentified
MATYAGIDLHSNNIYLAIIDQHKERLFNKRLPNKLSTIKKVLRPYRKALAGIAVESTFNWYWLVDGLQDAGYKMHLANPAAIKQYEGIKHRDDKSDAFWLAQMLMLGILPEGYIYPKDQRPTRDLLRRRLLYVQQRTAHILSLKSMTARSLGETIATKEIRKLKPQEADTLFDQEHLRLAGRHALATIRFLSSQAKSIEKQVMKYTKIKPEFASLLTMPGIGKILGMTIMLEVGDIHRFRRAGNYASYCRCVKSEKRSNEKKKGSGNRKNGNKYLSWAYVEAANFAIRYQPKARRFYDRKASRTNNTVARKALANKMARASYYIMRDQVAYDESKMFP

SEQ ID NO: 46021 - protein, 468 aa, unidentified
MKRARRQVPGSAQAAQGDLVITHRHAAGIDVHAAEHFVAVTPEDVPPDFVNPDHKLPAGVRKFGANTADLEAIADWLKECRVETVAMESTGVYWIPLYDLLASRGFQVLLVDPRQTKHAPGRPKTDVVDCQWIRRLHSYGLLTGSFRPGDEIICWRGFQRQRETLIRYAAQHVQHMQKMLEEMNVKLTEVVSDIVGLTGLKIIKDIVRGVRDPLKLAKHRHESCKRTEAEIAAALHGNWRAELLFGLKQALKLYEFYQQQLRDCEAEIETCLRSMKDKSDGRPLPPSLRKRKPEKNEVRFGARALLFHMSGVDLTQIEGISETTALVILSELGTDLSAFPYEKNFVSWLGLCPQHRGSGGKIFKRRIRRGANRVARALRMAAQGCHHAHNALGAFYRRIQGRSGGGKAVVATARKIAERVYRMLKFGQDYVRQSETAYEQAYELRLLKSLAKRAAKMGYKLVPETSSP

SEQ ID NO: 46022 - protein, 343 aa, unidentified
MNEVITIGVDLAKNVFQIHGVDAAGAVVVRRQLRRAQMLRFFKKQPPCLVGMEACATAHHWAREIAALGHQVRLMPPRYVKPYVKRNKNDMADAEAICEAVTRPTMRFVEIKTPDQQSVLMLHRTRHLFVRQRTMLINALRAHLAEFGIVAGIGRNGLERLLNVIEDGKDERVPSAARDCLLALRAQLEMVKHQILDADRRILAWHRASEVSGRLDDIPGVGPLIATALVASVPDPHAFKSGRDLAAWIGLVPRQNSTGGKERLGRISKAGNRYLRMLLVVGALSVIRRAKQTGCRRRPWLAKLLERRSTKIAAIALANKNARTAWAMMAHGTFYKEPASQAA

SEQ ID NO: 46023 - protein, 314 aa, unidentified
MNTNTLQNINVGVDTGKTQLDIYIRPLDIYFNVTNDEKGIKQAVRTIAKYHPERIVIEATGRLEMPFILACEKANLPYVIANPLHIKKFSGALGNKAKNDRLDAALIAHYAEAIKPKLTQLKSENIRLMSDLVTRRNQLLSMQTMEKNRHQILPQSLASSIKPILTALKNQIAKVENRIEKLIETCPDYQAKNEILQSVPGIGKIAAASIISNVPELGYITNKQAASLIGVAPITRESGSFKGKRMIKGGRMQVRTVLYMAMMSAMQCNPVFKETYQRLLAAGKPKKVALIACVRKMVVILNSMLRDGCMWNGR

SEQ ID NO: 46024 - protein, 482 aa, unidentified
MKKRNIYQNQSQELLHLFKEAGSSTKVMCIPMDYAKKDHLVMFCNGHGDILRKPFSVKNSPEGIDYLLDQVTRSIRRHGIKKKHVFFGGEDANSFAENFVSTLSSNGWLVAGVNAHDAKKQRINLQASTDRIDLMGIATMLLNCRANCSPAQSGIYRNLRTLVRHRRKLVVMLTEVKNRVHGIVDRLFPGFLNEKKSGIAPFTQSSLYLMKDRFSPKQIHRRRRVKLIEILKQFGTSKAEATADKLQQYAAQVLHTPVEYVDTLQLSLTQHVNHIRCLQECIAQLEKEIAVYLAQTQGAFLTSVQGIGIVLAAGVTAEIGDPNEQKPLNNLISYSGIIPRVKQTGGLEGKTYTGSVAKRCNRILKDYVVKSGYHIGFHGPEDLKIDYKRRDASGQHADFGMGRRYLRMAMSLMRTSQVYLPPRLRGNDYTLEERAGYYLSIWPQIRKKWKKFSAIEVAFAKDQPLGIWRQIAQELYDIKLKL

SEQ ID NO: 46025 - protein, 368 aa, unidentified
MKNITTYVGVDAHKKDLFIAMLIGDQTTPVTWTVPNEASAVRRLVRKLEREAPGPVRVCYEAGPCGYALQRQMTTPRVSCQVIAPALIPRKPGERIKTNRRDARKLAELLRAGLLTEVRPPTLEEEAVRDLCRARDDAREDLQRCRHRLGKLLLRRGLHYSGRNWTQGHRRWIESVTWEQPAERVVVADYRLAIEQVESRLSDLDARLAEIAQTEPYRERVGWLRCFRGIDTLTAILMLAELHDFRRFQSPRALMAYVGLVPGEDSSGEKQRRGRITRTGNALVRRVLVETAWHYQHRPGVGVALRRRRKGQPGRIVAIADKAQQRLCRRFRRLMEQHKPAPKVAVAIARELAGFLWAALQPAPVAAR

SEQ ID NO: 46026 - protein, 367 aa, unidentified
MKKVSTVAARPSKKISQQKLTVGLDLGDRNSWYCVLDESGQIQLEQRVRTNAKALREVFGEMPHSRIALEIGTHSPWISRLLSELGHEVIVANARKLRLIAESRKKDDRLDAQALARLARIDPKLLSPVKHRSAQAQADLMMIRARAGLVRARTALVNTARGLAKSYGERLRGCNVRNMNPEKAEGLSPELQTALEPLLACIESVSEQIREYNERIEKLAQASYPQVALLKQVKGVGTLIALTYMLTLEDPHRFGKSRDVGGYLGLQPGRRNSGRSEPQLHISKEGDPYLRTLLVQGAQHILGPFGIDCDLRRWGLKLAERGGKNGKKRAIVATARKLAVLLHHLWVSGDAYEPLHNSSRTTVAAAA

SEQ ID NO: 46027 - protein, 341 aa, unidentified
MSSFNPNSCMGVKPVPSKEGSWRMAQKGLLVGIDVSKDKINVAIRSAAAAATFADIADGRRELLEWLTRHGVCKAVMEATGGYEQRWARLLAKAGLEVVIVDPKRVRHFAKSAGRLAKNDPIDAQMIAWFGEVFDDLTGKPQDEERHELEQLVTARHGLVRLQGLIESWGEHELPKLVQKAHQTLLKAAADQLDKLDAAIATRIKDNPQFAQRAEIIRSVPGLGDVSVSAVIAFQPELGRVDRQAAAALLGAAPFDDDSGERRGQRHIKGGRRKLRNLLYMPVMGAATKNNPVLKAYYQRLLAKGKAPKVAIIACMRKLIGILNVMLARGQKWDPSKHAIA

SEQ ID NO: 46028 - protein, 346 aa, unidentified
MQYYAGIDVSLEQCSVCVVDAAGKIIKEAKIASDPCVLATFFKGLGFAVTRIGFEAGPLSHWLYAGLTQAGFDVVLLETRHVKAALSAMVVKTDRKDARGIAQLLRMGWYQAVHAKSASSQEIRALLTGRRLLLDKLRDVELSLRGVLRGFGLKLGKVTQRAFETRVRELVANHPMLQQITGSMLLARATLQREHNMLHKALLKIVRRDKVCRQFMSAPGVGPIVAITYKTAVDDPQRIKKSKGAGPLFGLTPKRYQSGETDVIGGISRVGDAMVRAMLYEAANVLLSRTMRFSALKRWGLAVAKRRGMKRAKVAVARKIAVILHRMWIDGTSFRWSNKEKAAAHA

SEQ ID NO: 46029 - protein, 343 aa, unidentified
MYYIGLDVHKKTISYCVKDAAGCVHQEGKIGATRRELDGWVRTLPQPRTIAMEATMFSGWIYDHLLPHAAAVKVAHPLMLRAIAAAKKKNDRIDAGKIADCLRCDFLPECHMAPTAIRDRRRVLRYRHLLVRQMAQTKNRVSGLLMETGVEHNRSRLHKVGYFRRLMATDSEIDDSIRPLLKLSRDTIQRCQRTEYALVSSLERDPLLKERIRRLRTVPGVGPITALNWALEMGEISRFRSIRQAVSYCGLCGDERSSGDKVMRMPLSRQRNKHIQHVLVEAAKLAPRLSPELALVHQKAMERSNNRNRATLAVARRIVAWLLAVDRENREFIPAEQRETEAA

SEQ ID NO: 46030 - protein, 412 aa, unidentified
MQDILTCAMGLDIHRDVIVACLAKGELGTDPEIEIRSFSTLIPEMRKLRDWVLEAECRYVAMESTGIYWQPIYEMLEPCFDGQISILVVNARHMKNVPGRKTDMRDAQWIATLLRAGLLKGSFIPDKTFRELRHLTRYRKSIVRDITAQKNRIDKFLQSSGFRFTAFLSDAFGASGRNIIRHLMEYGNISREALDRCLKTRTRKRIDEILIALNGSLSEHQRGFLRMIFGHLEALEQHRHTVEDAITKEITKHEEALSLLCSIPGIDVTAAAAIIAEIGTDMSAFPDSQHICSWAGLSPGNNESAGKRKSAHINKGNPYLKSMLCEVGWVISGKRSLYLSGWYWRIKQRKGAKRATIALARKLLALIYTMLKTGSPYNEDCFEIRRKQSERKRASRMVNELQKLGYFVVAPG

SEQ ID NO: 46031 - protein, 392 aa, unidentified
MNRIVYIGMDVHTSNYTLCSLDPGYGVEKDNYFAEVQFTNNFVTNVVNYVSNLKKKLKDCEFVCGYEAGCLGYSTYKDLTKVGIKCVLMAPSTMAVQKGGKKVKNDRRDARVIAQCLAYQTYKEVYVLSEHDEAVRGYLRMRDSHNKALKRIKQQIIAFCTGHGLFSPTKSNWTVAHLKWLKDLKFNDPVEQEILNEYLSSLTFLSDKIKAMDVRIEELASEKQYCENVKKLRCIKGIETNVALTLLAEIGDFNRFSKPTDFASYLGLIPGEQSSGDKVRGTGITKAGNSTLRRKLTESAKGYWRGRIGIKSATFKKLEKELPKEVTEYALKANTRLQRKFFNMTHVKGKNMNVAASACAREMACFVWGLITNHYEKAPAVPKTDEELLDLN

SEQ ID NO: 46032 - protein, 408 aa, unidentified
MKRYYMGVDWGDRLHQVYVGDEDGKKVREMKLQESPEGLAEIGRWLDEKRAEGFELWAAIEKPQGRIVDFLLDHGVEVYPVNPKAVDRVRDRYRMSGSKSDAFDAYVLAEFLRTDQVHLRALRPSSEKAQELKMLSRDQRRVVRHKTRFLNQLTTTLKEYYARPLEVFEDLETEIALDFLQRYPTPAHLSALTRKQFNRFATKQHHLSKQRCEELWEKLNKPQLAVPEHVVRAKAQLVEVLIEQLGASIKAVKIYNHRVESFFASSPAAQFAKTLPGGKSGTLVAAVWAELGDAQGRWESSRHLQAEAGAVPVTKASGKSRVVHFRFACNKHLRYTMYWFSFVSLNHSEWAKLYYRGQRDNGHSHHQALRALGAKWLKIIFVMWRDHKPYDENYHLANIARQKMRQAA

SEQ ID NO: 46033 - protein, 331 aa, unidentified
MDVHNRYCQVAILDDDSTNPEECRIKAERDELEEFAREHQGAQAAIEATRNYWFVYDCLEPNLDVSVANPHETSLIGDQKVKSDRLDAKRLAVLIRVDALSASYIPPDEFREARKLVRRRKALVDDRTSAKNRVRAALADRGITYDGDLFGEEGREFLADEELPLSSADRHIIEADLEVIQSLDEQIDRLQQEMDEIAATWSETQLLMTVPGIGPCLAVTIAAEIGEIERFDNKKQVVSYAGLDPRVRQSGEKETTDAITKEGPPVLRWALGQAALNVVKYDSHLGNYYSRMKDRKHNQKALVATARKLLVWIYAMLTKEEEYDPPKVTHG

SEQ ID NO: 46034 - protein, 459 aa, unidentified
MAADDPGLTIVHPNAGGIDVGNESHFVAVPADRDSNPVQEFGCWTADLKRMAEWLQACRIDTVAMQATGVYSIALDDILTQHGIRVVLVNAQHTKNVPGRKSDIQECQWLMKLHTYGLLRDSFRLAENMEGVRTIWRLRDRHVKEAGRAVQHMQKALTKMNIQLANAISDIAGVSGQAIIAAILQGERDPWKLADLKNEKVQASREEVARSLEGNWREDLVFELRQAVDNYHFAHRQMRDCDLELERRLASLPTRTLDIPGQTAQTAEATGVKTGKKKKRKTKKARGNEPTVDLKGELKRICGVDLTSIDGIDVVTAQTIISEIGTDMSRFRTESHFASWLGLTPAKDISGGKVVGKGRRKVKNRVATALRMAATTLLKSGSYLGGRYRHLRRALPSNAAAVKAMARYLGVLVHRLLTHGQAWVDRGAAKFEQRRKELELASLNSRALAKGFKLVPLPD

SEQ ID NO: 46035 - protein, 343 aa, unidentified
MEYYAGIDVSLESSSLCVVDATGRIVREAKVASEPETLTAWFNSLGFALSRIGLEAGPMSQWLYAAMKQAGLTVELLETRHVRNAFKIMPVKTDRKDARGIAQLMRLGWFRPVHCKSLPAQEIRSLLGARKLLQGKLHDIELSLRGTLRGFGLKIGKTTPKTFAGRVRSLVTNHPTLTLIAEALLRARAVLLGEFLNLDQKVHTLARQDPRARLLTTAPGVGSMVALTYAAAIDDPARFKSSKTVGALFGLTPKRYQSGETDVTGRISKIGDAAVRTALYEAANIILERPVKGGWLKAWALGVAKRAGMRKAKVALARKLAVVLHRMLVDGTPFRMDRVATTA

SEQ ID NO: 46036 - protein, 355 aa, unidentified
MNSEKYIGLDVHQATISVAVLDSTGKLVMESILETKAATLLEFFAGLRGTLSVTFEEGTWAAWLYDLLKPHVAKLVVCNPRKNALLKDGNKSDRIDAHKLAELLYLNKLSSVYHGETGVRMLRELARSYLTIVKDLTRVMCRLKAVYRSWAIPCAGRDVYYTRHRTEWLGKIKEAGVRRRAERLYQQLDMLQYLRQQARRELLAESRKHAITVKLRQIPSLGPIRSALAVALIQTPHRFRTKRQLWAYSGLALETRTSAEYCYVKGGLRRSKKQISIRGLNKDHNHDLKGLFKGAATRASVLPGPFQDFYQRSLAKGIKPTMARLTLARKIAAITLTLWKKGENFDADKLKSQAA

SEQ ID NO: 46037 - protein, 413 aa, unidentified
MSSSASTSVKAEHWATALDSAGKTLFDKVLPNNESRLRDLYKRLGEHGRLLVVVDQPATIGAPGAWRLPETRASRWATCRGVSMRRIADLTPGSARTDRRDAAVIAQAARTMPHTLRDVTAADEEAASLTMPAGSGPGPGAPGRPRPRAASGACTPRPRPALEAVLGPHLARDAVLEAIAAWPTPTALRKAGKARIDARLKKHGARRHAAWAQQVCEALKKQTVTVAGTDAAGAVLPHLAHPAHLPARSEGRAPRPGPGPWRAAHPSPARSPPPVPGTGVPAAAVFLAETLGRTPATGAQLASYAGLAPVTRRSGSSIRGERRLPRRQQAAQDSHARLRLRLPALRPRQPRLLPAQTRPGKRPGQAVIALAHRRLTHNIGAPPSDRLLQPLRGKPRASGDDPGVGRDVWQVLR

SEQ ID NO: 46038 - protein, 286 aa, unidentified
MYYYVGADLHKEQTWFYVMDHNGTKIDSKSIANSPDSLKSYFASIPTPFTLAVEATYNWYFFMDIAEQFAQTAYLANSYELKAFAKRHKKTDKIDARLIADILRKGFLPMVFIPSREIRNLKELLHYRINLVRDRCRNIFRLKNTLDKLGADSSGDFTTEKRLRTIPTDSLSERYRYIISGYINRIVTLSQRLHSMKTYLKKELLEDKEIQNLITIDGLDYFSAALIKSEIADINRFASFNRLCAYAGLAPRVSQSGNKEAHHGALMVNRRKNLQWILLVHCLINS

SEQ ID NO: 46039 - protein, 387 aa, unidentified
MPQPNDLSRSLVALDQNSTIIAVVELSQSSWLVGGVLPGIERQPCKKLEPSPEQLLALLHRWRDEAVRAGRTVTRIAVAFEAGRDGFWLARWLEARGVEAHVIHASSVAVSREHRRAKTDRLDTALLKRGFLGWLRGERGHCSMARVPTITEEDAKRPNRERECLVGERTRIVNRMKATLARLGIRDFKPTLRKAAERLATVHTPEGMPLPPNALAELQRDMARLGFVASQIREIEDARQKRLDQQPETGPHAMVRLLARIVGVGVETADMLVHEVLSRPMRDRRAVARYAGLTGAPDESGAKRREQGLARAGNARVRRGMIQLAWRFLMFQKESALALWYRARTADSRSGTRKTMIVALARKLVIALWRFVTTGETLEGVILRPAG

SEQ ID NO: 46040 - protein, 346 aa, unidentified
MEHYAGIDVSLELSSVCVVDAKGKIVKEAKVASEPDALVSVFDGLGFPVQRIGLEAGPLSQWLHAGLARAGFETVLLETRHVKAALSAMTVKTDRKDARGLAQLLRMGWFRPVHAKSIGSQEMRALLVARKQLLGKLIDVELSIRGILRGFGLKVGQVTRKEFEVRIWELVAGQATLERIAGAMLSARATLKAEYEKLHKAVLAIVREDAVCRKLMTVPGVGPLVAVTFKSAVDDPRRITKSKAVGALFGLTPKKYQSGEKDITGGITRAGDGMVRTALYEAANVLLSRTTRFSKLKRWGMDVAKRRGSKRAKVALARKIGVILHRMWVDGTTYRWREAKLIAARA

SEQ ID NO: 46041 - protein, 319 aa, unidentified
MKAIDFEQLISVGCGIDVHKDVIVATIRRSSKDYETRQFTAYTSSLTELRDWCRVEGVSHVAMESTGIYWKPVFNILEEDFEIILVNARHVKNVPGHKTDKKDSAWLSKLLLSGLLKGSFIPPKEIRELRDLMRYKKKKVQFVAAETNRIIKVLEDCNIKLSSVVSDVKGVSASKIINDIIDGKDDVAHLLTHVHGRVKAPREEMAEALTGRITPHHRFMLKMIRETIAENEKLIAKLDHQIDLIALQYEVELELLQTIDGVGKDTALTIVSEIGVDMEQFPNQHHLASWSGTSPGSNESAGKKKALGSSTGTSTSNPH

SEQ ID NO: 46042 - protein, 352 aa, unidentified
MSNPTRWIGVDLHRRRSQIAIIDEHGELTLSRRIVNDPETFKELLGDPDGTHVALEATYGWEWLADLLEEVGYDVHLAHPLRTRAIAAARVKTDAVDAPTLAHLLRTGLLPEAYIAPAELRDLRELLRHRAVLTRMRTAVKNRVHALLARQGIRPEHTDLFGKAGREFLAALELPDGSRRRLDSLMSLIGDFDREITATTREIDARAKADDRVPVLCQIRGVGRYTAMLIIAEVGEVKRFPTARHLCAWAGLTPTVRSSDGKARLGHISHQGSPALRWALTEAAQKIPTGGGPLRATFERIAKRRGRNVAKVAVARQILTLCYYGLRDGEIRCLANQPDIDDHDNQDLAEAA

SEQ ID NO: 46043 - protein, 472 aa, unidentified
MGHNNRSTGHCQTRKKKSKRASLSLLERIKPNAAGIDCGSEQHFVAVPSDRDPEPVRSFKTFTADLHRLADWLQACGIETVAMESTGVYWIPIYEILEERGFEVVLVNARHVKNVPGRKSDVLDCQWIQELHSVGLLRGSFRPAAEIAALRAYLRHREKLIQDATSHIQRMQKALVQMNLQLHNVISDITGVTGMRILRDIVAGVTDPKALAVHRDHRCRASQAEIVASLTGNYRAEHLFALRQNLELYDTYQQQIQACDVEIERLLQALAANRDDPTVPQPPPRTKKKPRDNEPRFEIRAPLYRLAGADLTQIDTIGPYTALQLVAEIGTDMTRWRTEKHFTSWLTLAPKNKISGARLISSTTQPSANRAAAILRMCAMVAGRTSTALGAYYRRIAYRIGKPKAITATARKIAILVYRVLRGDLDYRDPGANAYEANHRIHTIRNLRNRARQLGFSLVNLETGELASGPVS

SEQ ID NO: 46044 - protein, 356 aa, unidentified
MSSNIKYIGLDVHKEAISIAVLNGAGKLVMESIIETKAVTLLQFLQGLRGELHVTLEEGTWAAWLYDVLKPHVQEIIVCNPRRNALLKEGSKSDKVDARKLAELLRAGMLRPVYHGENGLRTLRELARSYQTISKDLRRVMNRLKAIYRGWGILCAGTQVYAPRYREEWLNKIRQAGVCRRAELFYQQLDALQALRRSVRPEFLAESRKHKAAKLLRQIPCIGPIRAALLLALMQTPHRFRSKRQIWNYSGLAVETHDSAQYRYVDGQLQRSKKPQQLRGLNQNHNHEMKEIFKSTATSASRGSGPFRDFYATLLAKGMKPEMARLTLARKIAAITLTLWKKGGRFDAEHLKPQAA

SEQ ID NO: 46045 - protein, 349 aa, unidentified
MHSTTIAVDLAKNVFELAVADATGKIVDRQRLNRVRFSSFFVQRAPCRVLMEACGSAHYWARRIAEHGHSVQLLPAQYVRQYVRRNKTDRADAAALIEAARCADIRAVPVKSLEQQQVLALHRLRSQWMGTRQRYLNTLRGLLREFGIAIPLGARVARSHIAQHLAQSRRDLPAAIRPLLDQMLGEVDQLERLTDQVERQIAGLTHADPVVQQLRQIPGVGLLTSTALRATVGDIQRFPCARRFASWLGLTPREYSSGERRRLGSISKRGDVYLRTLLVHGARSALMAAHRQQRTGRPLDRLRQRALACQRQRGHNVATVALANRMARIIWATWKHGRPFDGNWACAAH

SEQ ID NO: 46046 - protein, 358 aa, unidentified
MNYIGIDLHKKFSQVTVLGEGGEIKERVKIDNREEVLNRHFNNFDEPSKVVIEATFSWGWLADYLQSRKIEVMLAHPQKVKAIASAQIKTDKVDSLILAKLLRADMIPTAYFCPKPLREVKEVLRSRASLVGLKTQVKNKIHSLLHKYNIREDEKFSDLFGKSGKEFLNSLELGEYTTPVLKRYLETLSFLEEEIKKTSVDLRQVFEKDEVAQFLERLPGIGFYTAIILSKEIGNIGRFFSAKHLCSYAGLVPSTYQSGEHTRHGKIKQGNKYIRWVLIEAVPKTIGKDKVLNAFYQKIKAKKGHNKAKVATARKMLGQIWYLLKTKQSFVDPETGSPVFFSGASSFPLKGIEVNSHR

SEQ ID NO: 46047 - protein, 351 aa, unidentified
MRKIQKGSGEKKDIFMGIDTHELTYSVSLFFEGEEIHNSTYPSDVRHLKKLLERYEKFTVHAVYEAGPFGYTLHDWLKKQGVKVIVTPPSKMPVAVGDFVKTDKRDARHLAHLLSSGLLKSVPVPDKRKREDRDLLRTRDQLVNQRKRIFLQIQSKLRFHGIPIRNRLLISRKNRKMILEYPDMGLSLREAFRLMLDSYDYYTENLKRVRKAVLELSEDKAYRDGVAILKGIPGVGLLTALSFLLELPDMRFFDSNEKVGSFLGLTCSEYSSGEKQHQGRITRCGNARVRGLLVQCSWKTIAGDEAMKRFYERLKRRRGGKRAIVAVARKLSGRMRTVLMKNEPYQVGLVQ

SEQ ID NO: 46048 - protein, 375 aa, unidentified
MNSIIYLGLDVHSTNYTFCALSVNLGEKPRVIAENQTEADDIHALEMVEYLKTHYGKDTTVICGYEAGCLGFTLYHTLDNHGIECKVLAPTTMPSTRGKKRIKTDKRDAKVIAENLAYNTCSFITVPEEGDMEVRDYIRMRDDHKLALKKIKQQILAFCLAHGYRCESKHWTLAHIKWLRTFECTAMHRETLNEYLMTFDQFNEKIERYDARISELASKEKYEEDVKKLSCLLGIKTIGALSILVETGDFTRFHSAQKYAAFLGLVPGEHSSADDVNRLGITKAGNTHLRKILIEASQSICKGSPGYKSKALKARQQGCDTNVIAYADKANERMRRRYYRLISKGKKRNVAVTAIARELACFIWGIKTGNICKAS

SEQ ID NO: 46049 - protein, 357 aa, unidentified
MKERRDYILRNENVFVGLEDSKKTWSLCVRSSGMVVHETSMPARYEVLRNYFNNKFPECHIRVMYEAGFRGFELLDQLAADGWECVVTPPHTVTDEKCQRKKNDRTDCRRLARNLENGDYRKCFVPDKELREDRQVSRTCGQVQADIKRVLNRIRRMLEFHGLDSDLPAGRWSGAAYSRLRQHLAEIEISDSLRFSFEVMFRELEQVRQLKRELLLRLRKLARSDRYKESVRLLMSAPGIGMLTAIRLTLEWGDMSRFGRKEEFASFLGLVPSDYSSGDREHRGHITKQGNRSVRGWLTESAWVAIRYDPVLLDKYRRVLRNCGSKKKAIVAVARKLALRLRMVLLSGEPYVLGVVE

SEQ ID NO: 46050 - protein, 369 aa, unidentified
MEKDTTYVALDDSKRKIVVGILRSGDTQPELREIANDPRQIRRLFERLKREGPVAACYEAGVSGYDLHRQLIALGVAGAVIAPALTPRRPGQRIKTDRRDAAKLVRLFRAGELTAIHVLDESEEAVRDLVRCRDDIRRDVLRWRHRVLKLLARHGRACLTGKNWSRAHWQWIREQRFDLPPLQRAFEATLFALEQALARQAELDKELEAVAATASYREPVGWLRCFRGIDTLSALILLAEVVDFQRFRRPRELMAYLGLVPSEYSSGESQRRGALTKAGNSHARRILVEAAWHYRHRPTIGRALATRTHGQPDEVVAQAWRAQQRLHRRYRHLVGHGKRTPVAVAAVARELVGFIWAAMTRHESRRAAA

SEQ ID NO: 46051 - protein, 416 aa, unidentified
MNAVGIDVSSRKSTVAVLRPLGEVVCLPFDVTHDIAGLASLAEKLKALDGETRVVMEHTGRYYEAVEKALHEAGLFVCAVNPLLIKEYGANSLRRVKTDKADAVKIARYALDNWADLRDFTPMDAIRYDFKTLNRQFQLASKQRTASANNLIALLEQSFPGIRKCFDSPVRSDGTQKWVDFAHSFWHVDCVRKQPFAAFCERYRKWCKRHAYLFKLSNAEEVYALAKRAVVLTPKSKVVKVLVQEAVNQLSSISRSVEVYRAEMDRLAAMLPEYPVVMAMYGVGKSYGPQLMAEIGDVRRFERKQALVAFAGIDPMPNQSGDKNVRSNKSSKRGSPYLRKTLFNVIRTYLQCAPQDEPVFQFLNLKRAEGKPFYVYMLAAANKFLRRYYAKLRDYFASLDTLQSVDPIPTTLKASL

SEQ ID NO: 46052 - protein, 417 aa, unidentified
MTEEVEWFVGIDWASQSHQVCLIDAQGKVREERTVAHGGAGIGELCDWLLARTGAQPEAIAVAIETPHGPVVEALLERGFGVHAVNPKQLDRFRDRFTVAGAKDDRRDGRVLADSLRTDRHAFRRLSVDDAVIVELREWSRMSEDLRQERNRLANRMREQLWRYYPQMLELADDLAAAWFLDLWRQAPTPAKAARLRESTIERILRAHRIRRWQAAEVARILKQKPLTVAPGVAAAASAHIRTVIARMALVNHQLKTAHRKLDKLCDQLVPPEANAPGQHCEQRDVVILRSLPGLGRIILAVLLGEACQPLQRRDYHALRCLSGVAPVTRRSGKSCVVLRRYACNKRLENAVYHWARVAIQHDPSSRRRYAALRQRGHTHGRALRTVADRLLAVACTLLERQTLFDPAYQAREGAAA

SEQ ID NO: 46053 - protein, 352 aa, unidentified
MTAAVKIGVDAHKHTHTLVAADDLGRQVGTKTVKATAEGDLAAVEWARQWRERAWAVEDCRHLTRRLEGDPLRAGETVVRVPTVLMADSRRSGRERGKSDPIDALAVARAAWREPNLPAASLDGATRELRLLVDHRNDLVAERTRVVCRLRWHLHELAPELDVPAKGFRRDCTIRRVRQHLAGVDGTVAAIARELVERVAELNRRATELERQIKPLVLELGPSLLDIPGCGGLTAAKIIGETAGAARFRSKAAYARWNGTAAIPVWSGNPDRFRLNRGGNRQLNAALHRIAITQAGRPTLGRAYIERRIAAGDTRREALRLLRRRLSDVVFRTLVADEASRRPLIEKSLRAA

SEQ ID NO: 46054 - protein, 392 aa, unidentified
MVVSVGIDVSKDKHDCFIVNSDGEVLADVFTIPNTLDGFHCLLQRIQDCTAPQDKIKVGLEATGHYSYNLLGFLLNNGLPTYVLNPLRTNLYRKSLSLRKTKTDRVDARTIASMLLSDAGLKPYTNTAYHNEELKSLTRYRFDKVKERTKLKSSIARLVCILFPELEKLVPSLHITSVYALLGEFPGAKQIAAVHLTRLKALLETASKGRYKRDMALEIREAARTSIASPMPAKSLELQHTIRLIRELDREIDEIEEQIQSIMDELHSPLTTIPGLGFRMAAMILAEVGDFTRFDSPDKLLAYAGMSPSTYQSGQLKNCYPHMEKRGSRYLRYALYNATKYVCHWDPAFADYLAKKRAEGKHYNIAISHAAKKLVRLIFAMEKSRQPYCSAA

SEQ ID NO: 46055 - protein, 419 aa, unidentified
MSFKIFKFNCCGLDVHKTWIYACIGITDSNNRTEYKQARFSSFSKGLHQLCVWLAKYNCNDVCMESTGKYWIPVFNILEQHSFWVTLSHPKYTKPMKGNKTDRKDAKWICDLYMCGMVKPSFIPPADIRELRDLVRYRFKLTCMITGEKNRAQNCLTVSNLKLDDVFSDVFGKSSRSITEHILQHPGEKFDIAPFVDSRCKTPITEIQAAVDGAISKEQVVKLRQCLDHIDELNKHISEVEQEILRLSDKYEAALNLIRTVPGFNKNPLTAIQVLSEIGGDMSVFPTAKHLVSWAGCCPRNDQSNQKIKSTRISRAGSYFKPVLVQVANALIKSKKHSEFTSRYKRIKARRGHKKAIIAICRMILTAIWHILSDLKPYTPEGFLESRPVKEGKVLSTSQALNLLKQRGYIIKGEPLAVS

SEQ ID NO: 46056 - protein, 385 aa, unidentified
MSQFSGSPQAAVDYNSTIIGALELSEKKWVLAVQLPGVSRYSRHVLDAGGDGLASFVERLKARCATAGRKIARVILTHEAGRDGFWLARFLARRSIEVHVIQPSSLPVDRRARRAKTDIIDVEMLLRTLMAWLRGEPRVCSMVPIPSEADEEARRAHREREDLTGERRSIVNKIDSILATLGVRGYRALRRDRREQLTALRQPDGDRIPQRAKARIERLLDRLELVMKLTEQVESARDAVLKKDAPADEAERMIRSLTDLRSIGADFATLLVREAFVRQFRNRRALGGYVGLGGTPFSSGGSEREQGIGKDGNRRVRAAMVELAWMWLRWQPDSALSVWFRARVGAMGGRIRKIMIVALARKLLVALWRYVTDGVIPEGARMKAA

SEQ ID NO: 46057 - protein, 359 aa, unidentified
MENKVNKNLDFTGQNIYIGLDTHLKSWKATIRVEDTFFKTFSQDPDSEKLSKYLKKKFPGANYFSAYEASFSGFSAHRELNKLGIKNIVVNPADIPTTDKERKQKEDARDSRKIAEQLAASKLTGIFVPDIEVEGDRAMLRFRRTLTKEIARNKNRVKSFLYYHGKTISEQFADKKYWSKRFTKWLLELELPSQSARTTLTEMVEVVEFLRKKQYSILKEIKELSQTENYRKNAELLISVPGIGLITAMSFLTEIEDIARFNNLDKFCSFVGLVPMTNSSGDHEAVGNITKRQNKILRSLIVESSWVAIKNDPALMLAYQKLTKRMKPAKAIIRIAKKILNRMRYVLREQKKYEYAVVK

SEQ ID NO: 46058 - protein, 345 aa, unidentified
MLNCNVIAIDLAKNLFQVCKTDKNGKVIFNKLFTRAKLKELLTKEKKSLVAMESCGGTHYWARMAKKVGHQVKSINARKVKAFRQGQKTDANDALAISVAARQPHIKESRLLSTQEQCLQSIESMRDLLVKQKVSLGNQLRGLLLELGHAIAQSDAKLRQAIPEILEDAENELTHSFRFSIDIIYQRFIDTIDEVKLIEDKLAEVIKQDKTCQRFQALEGVGPVCAILMKVALGNATHFKNGREAAACFGLTPVQHSSGGKEKIGSISKVVGNKKLRSALYKGALAVVSQLEKREVRSQKEVWLKGLTARRGKKVAAIALANKTVRTAFALLKHDQVYQPQLLVA

SEQ ID NO: 46059 - protein, 400 aa, unidentified
MTVMIGVDPHKRSHTAVAIDGDDVELAAIEVRASVRQVDELLGWAERFDAHIWAVEGAGGVGYLLAQQLVAAGERVLDVPATLAARVRVLGSGRSNKTDANDGYSIAVAARHAPKLQQVARADHAAVLRLLAKRNKELGSARTRTACRLHALLVELVPGGIPNPITANRAAALLASVTPASPVEATRHALALEHLEDLRRIDEQMRASKRRISDAVNACATTTTEVFGIGPVGAAIAVGQTRDVSRFADRDHFAAYNGTAPIEVGSGGHSVHRLSRRGNRQLNHAIHMAAITQIRHAHSPGRAYYDRKLAEGKTKKEALRALKRRISDALYQRLVADAAANAGPGGQTGTTAQASVTGLTPQQPALRNSHSRTHTERTTRRAAPTATRRQRTPQGARTKT

SEQ ID NO: 46060 - protein, 343 aa, unidentified
MKILKQSVGIDVSKSDFKVCLGKLDEQLSVAFSFQKAYDNNLKGVTVFLKEVSRLFTAQVPVQFILEASGVYHELLAHKIYQHGYEVSIILPSKSRAFFKSITQKVKTDKVDARLLSQLALERQLDNWVPADPIYAQMRSLTRERESLMKEKTVIMNKIHAQQSAYQIAKSTLRRSKQRLKLLQKQIMSIDSELKTLVESSEMLSSKVNRITKVKGLSLLTVATVIAETNGFGIIRNRRQLVGYAGLDVLINQSGQKSSKGRLSKKGNPHIRKALFMPALSSSRSNELMKIIYQQLNQRQAAKKQGIMVVAKKLLLLIYALWKNSTEYDPQKNIQSRLVLATV

SEQ ID NO: 46061 - protein, 344 aa, unidentified
MFREKVAQSDLNGKGLILEKYDHYVAIDWSMRMMAIAHMTTRRKAPQVFERPTNLKELKTYLSTLSGRIVLTIEETTTSQWLFLELLDHVSRIIICDPYRNRLLCHGPKTDKIDAGKLCLLLYNGMLSEVFHSTSDLYELRLLVGAYVDHVQAGVRCQNQKSALLRGHQDQSPTALFILNRLDSDIERYHATKEEYEKHFATIVRKNKLLRNLICVDGIGNIGATKILACVVDARRFPNRGKYYGYCGLARHEKISGGRSYGSRTPRFNHMLKDVYKTAASAVVGSTKPLNEYYEALRSKGVAEHNARHAVARYIARVTLAMIKSGQSYDPYRWRQNVIEHDHL

SEQ ID NO: 46062 - protein, 337 aa, unidentified
MSYLGVDLHTNSFTVCYRGSKGTERTATFEIRRLNQFRKTLRKRDELAVEATGNTAWFVEQINDRVSRVVVVDPHQFKVIRKSVKKTDKHDAKTLAFFLSKDMLPEARMKSKESTQLHSLAGTRDKLVKHRTALINKIHNVLNSHGIKYQKESLSAEKHLTKILSFDWDMIVRVALEVLAEQIRSLTKSIKKLDDQMSEHGKNLKGHKNLASIKGIGERSATVLLSVIDDVNDFADEDKLAAYFGMVPRVSDSNEIIRHGRITKNGSKIGRTTLVQCTWVAKRYSPYLRRYYERIKRHRGSGKAIIATARKLLGIIYQTLKNDWMFEDFPNFVIANT

SEQ ID NO: 46063 - protein, 402 aa, unidentified
MTRHSIVRPLLLIGWKLLATAKGAHDMTMIGAERPDTEVETILGVDTHLDFHVAVAIDHLGRRLGESSVPTTVKGHERLLRWAERFGPVRCVGVEGTSSYGAGLARHLGAKGIEVLEVERPGRRRRGSRRNLKKSDPSDAEAAARAVLAGESSGVPKSADGTVEMIRALRAARRSAMKARTQAANQLQGLRVTAPEQLRQRLRGLSTKELISVAARFRLGDDPRDVPTATKFALRSVARRYQALSAEIAELEAHLERLVGQVAPELVSLAGIGTDSAATLLVVAGDNPQRLGSEASFASLCGVSPIEASSGKVVRHRLNRGGNREANRALYMICLARMRRDRRTQEYVARRTAESKSKREIIRCLKRYVAREVYRVLISCDARSSPTGPKAAVHIASGSSAA

SEQ ID NO: 46064 - protein, 391 aa, unidentified
MTKPKTKTVNDLSRCLDPLDMDATLIAVIEMSQSSWLVGGIVPGVERQPLKKLEVDERALLSLLNRWRAEAEKNGHRITRMAVAFEAGYDGFWLARWLAAQGIETHVIHASSVAVTREHRRAKTDRLDTELLKRGFLGWLRGERGHCKMVAVPTLAEEDTKRPSRERETLVGEATRIIARVKAAFVRLGIRGFKPKLKAAAARLKTLRTPEGEPIPPNTLAALRRDLERHQIVKKQIRELEQTRLDVLKQAPEKGPHAMVLLLARVIGIGVETADMLVQEVLSRNMRDRRAVGRYAGLTGAPDESGSKRREKGLARSGNARVRRGMVQLAWRFLRFQEDSVLARWYRQRTADAPSMRKTLIVALARKLLIALWQLVRDGVVPEGVRLRPAA

SEQ ID NO: 46065 - protein, 430 aa, unidentified
MKSITQNKKIEAITETTLVIGIDVGSETHYARAFDYRGIEFSKKPLKFSNSEVGFEMFKAWILDIKEKHEKDKVVPGMEPTGHYWFNLGKFLQDNKMKPVLVNPHHVKKSKELDDNNPTKNDRKDPKVIAGLIKEGRYMIPYLPDGIYADLRTASNMRFQIQSELTRVQNRISRWFNIYFPEYKTVYGKPDAISGMMILKKAPLPEDILTLGVEGVNQIWRDAKIRAVGKKRAQTLVEAARHSVGTKEGATAARIEIRMLLEDYESRNSRLQEVMLLIEELVKEIPMAEKLMEIKGVGIKTVSGFLAEVGDITRFSSPKELQKLAGLALVENSSGKHKGQTTISRRGRKRLRYLLFEVAMSLVGKNPEFGTLHHYYTTRKINPLKKMQSLMAVAAKLIRVFYAMLTKGVEYDPAKMLGDIKRPEAYMQVA

SEQ ID NO: 46066 - protein, 399 aa, unidentified
MNSTQACIAIDVSKGKSHVCAYATKDVMVQKPIEILHDREGFKVLDDLYNRLNTVEGSPPIFIFETTGIYHRPLKRYLKDKHYPQSEVSPLLAAKHRKNSGIRIPKSDKADPKSLARLFYDGEMPLSPSSDEVYYELLQLDRSYQALTKLMVTCKVHFKEKMDVLFPRFEDCFDNVYTTYYLNLLEAYPHPDLILHKRSDAIERRLIEDGLQSSRAQPIVQNLKAYCQNCVPGTSSESVDTQILKWFIQQIKVYTEERTRIIEQMTSMVETFPLFEQLKSIPGIGPLLAVRLIAELGDLSRFRNMRQIIAYAGLDPLVYQSGQKDGKHLSISKKGNRYLRTILYQVIGISIQVSTDHPIKTYVQKKKQTHPNKSAKIAGCAKLLRIIYSLYHSDDIYSI

SEQ ID NO: 46067 - protein, 346 aa, unidentified
MIKYKTIGIDLAKRKFHIAAIDQDGKLVFKKAVHRDVFLEETVPLFPVPSHFAMEACGGCHYVAQRLKAAGHRVTLLKPKDVKPYAKSRQKNDLNDALAICKAASDPELKPVQAKTIQQQENAYLHKSRQNAIRQRIQRSNSLMTSLLEFGYLVECGKARFAQTYQSFLDEALEEAKISQAVYDQMQQDGTEITQLLAREKALEKEIIRQNKASQEAQYLLTIPGIGPINASLLSHKPFETYERARDFAASLGLVPRQNTTGGTIRLGSISKQGDRYARTMLIQAGRCLVMRAAKKDIPNNDLYRFIERLKAKGKSFNVICVAVANKLARIAYACLTKQEAFQGAT

SEQ ID NO: 46068 - protein, 355 aa, unidentified
MNQEKYIGMDVHQATISVAVMDSSGKLIMECILETKAATILEFIAGLRGTLSLTFEEGTSAAWLHDLLKPHVSHLVVCDPRRNALLKDGSKSDRIDARKLAELLHGNKLHAVYHGEHGVRTLKELGRSYLTITKDLTRVMSRIKALYRSWAIPCSGATVYAPRHRAEWLAKILEPGVRLRAERLYQQLDLLQPVRQEARCDLLVESHKHHAVKLLRQIPSIGPIRAALLVALLQTPHRFRTKRQLWAYSGFAVETHDSGEYRFVRGKLVRNRERITVRGLNHNHNHDLKNLFKGAALSASTRPGPLCDFYVALVEKGMRPTMARLTLARKMAAITLTIWKKGVEFDAKQLNRQAA

SEQ ID NO: 46069 - protein, 354 aa, unidentified
MAKDTTMKETVGLDLGDKESTFVILGKEGDVRETGKVATSCPGLRKRFGRMEGALIALEVGTHSGWVSRQLRQMGHEVIVANPRQLSLITRSLKKNDRNDAETLARLARADIGLLSPVEQRGERAQEHLAIVQARARLVEARTALVNHVRGTVKAHGERLPSCSAAAFARKAEEGIPQGLRVALLPLLEAIGWHTLQIQRYDREVERLGKEEYPESGALRQVVGVGALTALTYVLTLEEKGRFAKSRQVGAYLGLVPRQQQSGERNPQLRITHAGDRYLRTLLVQCAHYIIGPFGKDCRLRAWGLKLAGEGSGNQKKRALAAVARKLAVLLHRLWVNGEVYEPFYQRKEAAVAA

SEQ ID NO: 46070 - protein, 354 aa, unidentified
MSNDKFVAFDVHAATTTYVVLNDKGKVVTQGVTETTADGLLSFVKGISGKVHLTFEESTQAAWLYERLDGHVAKLLVCNPRKNRRRQENKNDRVDALQLARWLRSGDLSPVYHRDHGTKALKELVRGYENVVDDSTRVKNRLKAIYRSRGLLTPGRDVYNPDERDDWLSKLDSVGLRTRAEWLHTQNDSMDVLVKAARKAVACEARRHTGCKLLRSVPGIAWIRAATIVAHVKHPGRFRTKRQFWCYCGFAVVMFSSDDWEITGTGFVRKSRPQTTRGLNKKYNRHLKAVFKGAARTACGTRGILKPHFDYLVASGMRESMATLTVARKIAATSLAIWKKGEKYDLGKAVIRTK

SEQ ID NO: 46071 - protein, 459 aa, unidentified
MRTIGIDLAIKRAHKAIVADEQGHYVTPIIQFHTQAAELDQLLARARAGAQDPYLQIVMEPTGMAWFPVAAYLARQDNVTLYLVNSQQVAALRRFYKRHAKSDRIDARVLALLPRVNPDHLHRLLMPSAITFACQQGCKELDRLTTYITAIKNRLHALDRFAWPGLDELVFPDIFAPAARWFHQHWYDPVDVIQAGAESIRQQWLASGVDEEDAGLWADSLFEIAHQVVALYGDDGRFVDFKRLQAEVCREQEHLSSLEAVHHRLRLKTVRPLYRQIHPSRHLETLKGVGQDGAAVYTSFIGDPHRFNTNRLFRGWHGLIPDSRQSADSEAKGLHVSQAGPNLIKKYAYLNADVGRQWDPQLAAIYYDQMVHKGKHHNQAVCACATHLLDRVLAVLREDKAYELRDVDGTPVTVHQARAIIAERYTVPDEVRERNNKRGRRERAERKAEKKHQRESRPR

SEQ ID NO: 46072 - protein, 345 aa, unidentified
MEPMYYIGLDVHKRKISYCVKDSGGKIYAEGSLPATRMDLDLWMKTLPHPWSAAMEATMFTGWIYDHLKPHAAALKVAHPLMLRAIAAAKKKNDRIDANKICDCLRCDFLPECYMAPTAIRERRRTLRYRNLLVRQMVQMKIKISALLMEAGVSYNKQRLHKAGYFRELLASNPDIDEGLGSLLRLCRETVVRLQKTESAMVRSLERDSLLIDRVERLMTIPAVGPITALTWVLEVGDVQRFSSIKKAISYCGLCGAERSSGNTVQRTPLSKQRNKHLQTTLIEAAKMAPRNSAELAMLYDKEKQKGNANRATLAVARKLVAYLVAVDRRQKEFLTVERENRTAA

SEQ ID NO: 46073 - protein, 404 aa, unidentified
MIFVGIDWSEHHHDVCVVDEQGTQLAKVRVPEGMEGVVRLHETIADHAEEPEEVIVGIEIDRGLLVGALVAAGYRVLAINPLSVDRYRDRHATSGAKSDPGDAKVLADLVRTDRHNHRPVAGDSELAESIKLIARTHQSFVWERQRHVNRLRSALREFYPQALVAFGTELASADAIAVLKIAPTPELGRRLSRSKIAAALRRAGRLRNLEARAEQIQRALRSEQLQASEAITGAYGVIASSLVRLIEGLNTQIAGFEDELERSFEQHPDAEVLRSLPGLGIVLGARVLGEFGDDPTRYADARARRNYAGTSPITKASGTKRVVLARFARNERLFDACYLWAFTSLTKSPGARRYYDLQRARGKTHSQALRALGNRLVGILHGCLRHGELYREDVAWPSRESLAA

SEQ ID NO: 46074 - protein, 368 aa, unidentified
MEEFISSFVGLDVHKDSIAIAVAEDGREAPRFVGTVGHEIKQLLKALHSVGKPESQLVVYEAGPCGYGLVRQLRSRGYGCEVVAASKLSRRPGDRIKTDRRDALTLARLARSGDLVRVAVPDERDEAIRDLSRAREDALRARLKARQQLKALLLRHGRRYTGRSSWNPTHERFLSTISFSQPAQDIAFAEYRLAVREGHDRVERLTEALRTQTEQWRMKGLVAALSSLRGIDFIAAVTLVAEIGDFRRFSHPTELMGFLGLVPSEYSTGDTQRQGDITKTGNSHARRVLVEAAWNYRFQARLSRLMHIRQERQPKAIRDIAWRAQLRLCHRFRRLRSRKLHQNKICVAIARELAGFIWAIAQQVTVAA

SEQ ID NO: 46075 - protein, 365 aa, unidentified
MASMRMAREGAVRVTVGVDTHKDAHVARAKDQLGRRLGEKIIPTTPRGYRALLAWAKSHGEVATFGVEGTGSYGAGLARYLQSEGHVVIEVIRPNRQARRRHGKSYPADADAAASAVLAGDATGQPKAADATVEMIRALRVARQTAIKARTQASNAMKALVVTAPDDLRECLRELSTIALVRTCARLRPGKLVDPTTATKVALRSLALRHEALETEAKVLEAQLTRLTAGVAPELLAVFGLGTDSAGALLVAAGDNPRRLRSEAAFAMLCGASPVEASSGKVTRHRLNRGGDREANCALYHIVMVRLRWHQPTKDYMARRTTEGKSKREIIRCLKRYVAREIYAVLRSMQLSDVAIAGQAQGEVA

SEQ ID NO: 46076 - protein, 345 aa, unidentified
MPIVGGLDIHRKQITFDYLDTVTGEVKRGQIAPADRAHLRAWLARFAGHDDAAFAVEGCAGWRYVAEELAAAGIAAHLGEPADTAALRGRKRHAKTDKTDAAHLRMLLAEGRLPECWIPPEQILEYRALLETYHDLRAAHTAWVQRIHAVFFHQGAPRLGEDALRTEQGLAALRAAAAAHLSPAGQLQVATALDMLAATEARLGPLRHQLADAARHLTGAKVLAARLYGVGPVTGLALTCWLAGKDRFSSSRKAVRFAGLDITVHSSDRKGPPGRLSRQGPPVLRWAVYEAGKTHARASAPDHAYYAAVKDRKNSKRAALSEARKIVRQACHILTELGDDALTAA

SEQ ID NO: 46077 - protein, 347 aa, unidentified
MNFYTQQHKHYCGIDLHARAMYVCILDQNGTKRVHKNLPTTPQAFLRLIAPYREDLVVGVECMFTWYWLADLCSQEGIAFVLGHALYMKAIHGGKAKNDKIDAHKIAVLLRGGMFPQAYVYPSEMRATRDLLRRRCHLARKRAELLAHIHNTNSQYNLPEIGKRLANKANREDVAEHFPDPSVRKAIEVDVSLIDHYDQLLRELELYLTRSAKTDDVQTFARLQSVPGIGQILALVLLYEIQDIRRFPRVQDFVSYCRLVKCAKESNGKRLGTAGKKIGNVHLRWAFAEAAVLFIRQSQPGKEYFAKLEHKHGKAKALTVLAHKLGRAVYYMLTREQAFDLKRFVAA

SEQ ID NO: 46078 - protein, 374 aa, unidentified
MKIVGCDFHPSWEQVAVFDPETGEVEELKLLHGDGEAERFYRSLESPALVGIEACGNSQWLIDLLERLGHVVWVGDAAQIRCSYVRRQKTDRRDAGHILRLLLESRFPRLWVPTAGQRDLRQLLIHRHKLVEIRTRVKNGLQHLALNRGLQKKSSLWSARGRTCFEKLPLEGWTARRRADLLHLLAELDRHVDELDAAVERAAKEHPQARLLMTQPGVGPITSLAFVLTIGDASRFKHSNQVASYLGLIPREHSSGGKQRLGSISKQGNRFMRQLLVESVQTVNRLDEGFRKQYAARCHHKAKGVAKVAAARKLAVRLYWMLRQNVGYPEIALIESSPRVPLAGENGVPGKRTLLAGVNENHADGLIGRSRIQQ

SEQ ID NO: 46079 - protein, 343 aa, unidentified
MKDNIYDHYIAIDWSIKNMAIARMTKKSNKITAIDVPSDIEDLQVYLKNLRGTKILAIEETTTSQWLYAELKEDVDRILICDPNRNKLLNEGPKTDKIDATKLVQLLKAGLMKEVYHSTDKFLYLRRVVSGYEDLVKSGVRLKNQRYALLRACGKRGKEKIGSTIDSQGEQFVLDCLDRQIEAYKKEKQCYENEFERLARKNPEIKYQKSLPGIGTINAVKIVARVVTPHRFSDKGRYLSYTGLIKLEKTSGGRSYGKRSPRYSRQLKSVYKSGVLAAIAGNNPINDYYDYLIQENGYPEHNARHKACRRLAILSLGVFKSGRKYQPYRRNYIKNNKEDTSGL

SEQ ID NO: 46080 - protein, 347 aa, unidentified
MRFYTNQHQFYCGIDLHARSMYVCILSQDGEMLVHRNMQAAPEPFLKAIAPYRDGLVVAVECIFTWYWLADLCAQEDIPFVLGHALYMKAIHGGKAKNDKIDSHKIATLLRGGMLPKAYVYPAEMRATRDLLRRRTHLMRKRAELLAHVQNTNSQYNLSEIGKKIAYKANREGVAERFADPAVQKTIEVDLDLITYYDQMLSNLELFIIKTAKQHDANTLYLLQTVPGIGKILSLVLLYEIHQIDRFPRVQDFASYCRLVKCAKESGGKRLGTSGNKIGNAHLKWAFSEAATLFLRGNEPGQKYLARLEKKHDKGKALSILAHKLARAVYFMLKRKTAFDLEQFLRT

SEQ ID NO: 46081 - protein, 357 aa, unidentified
MGKSIKNLSSVTVVGLDIAKNVFQVHGVDAKGATIVARSVRRGQLLNFFASLPRCLVGMEACSSAHHWARALNELGHEVKLIPPAYVKPYVRRNKNDAVDAAAICEAVGRPSMRFVAVRSVENQAELMRHRARELLAGNRTRMLNALRGNLAEIGVVAAQGAQHAYGLKRLLADGFDDNGEVVVPDCVRQALAPLVRQIDAIDEEIAAIDKEIEALVKADETARRLTTIPGIGPITASAIVATVQDASAFANGRDFAASLGLTPRQRSTGGKPRLGRITKMGDRYLRKLLVVGACATLSHRKGHHDALRLWADRLLARQAVKYKFKLTAVALANKVARIVFVMLTRGGQYDERPIAA

SEQ ID NO: 46082 - protein, 430 aa, unidentified
MKSNTQNKKIEAITEKTLVIGIDVGSETHYARAFDYRGIEYSKKPFKFSNTEAGFVTFKEWILDLKEKHEKDKVVPGMEPTGHYWFNLGKYLQDNEMKPVLVNPHHVKKSKELDDNNPTKNDRKDPKVIAGLVREGRYMIPYLPDGVYADLRTASNIRFQLQSELTRIQNRISRWFNIYFPEYKTVYGKPDAKSGMLILKEAPLPEDILTLGIDGVDQIWRDAKMRAVGKARAKTLIEAAEHSVGRKEGAVSARMEIRMLLEDYESRNMRLQEVMVLIEELVKQIPMAEKLLEIKGVGIKTVSGFLAEVGDISRFNSPKELQKLAGLALVENSSGKHKGETTISRRGRKRLRYLLFEVAMSLVAKNPEFRELHNYYTTRRLNPLKKMQSLMAIAAKLIRVFFAMLTKGVDYDPKKMVSDIKRPAVYLQAA

SEQ ID NO: 46083 - protein, 388 aa, unidentified
MPQCNDLSRSLVPFRQDGTLVAVVELSRSSWLVAGLVPGLERHPLKKLDPSEEALLALLRRWRDEAAGAGRVVTRVAVAFEAGRDGFWLARWLQAHGVEAHVIHPTSVAVSREHRRAKTDRLDTGLLKRAFLGWLRGEPGHCSMAAVPTLEEEDAKRPSREREGLVGERTRIVNRMRGALARLGVRGFKPGLRGAPERLEALRTPEGAPLPPNTLAELRRDMARLRLVREQIAEVEAARLERLRQAPAEDRPHAMVRLLARVVGVGVETADMLVREVLSRELRDRKALARYAGLTGSPDESGARRREKGLARVGNARVRRGMLQLAWRFLFFQKESALARWYRARTADARGGTRKAMIVALARKLLIALWRLATTGEAPEGVALRPAT

SEQ ID NO: 46084 - protein, 338 aa, unidentified
MYYTGIDLHKFTSYLTTVDSVGNIVKQQNIKNVDHNFVQYFNSIPGEHKTTVESTMTWYWLNDLLDSLKIPLVLAHAKYVKAIAYAKVKTDKVDSHILAQLLRLDFIPQAHKISNENRTLRDALRARLKIVQRHTSITNSMCLLLAKYNFDSPIQLTGIAKYQYEQLEEVELLLKEQILDLEKQLYPSLIPNEDIQRLLWIPGIGKLNAFNIILEVDDIYRFDDVKNFFSYCRLVPSARNSAGKSKQRSSKDGNKYLKVVFSDAAVHAIQYYPVIRKYNNSLLRKKNKQIAKTIIAKEIANIVYHVLKKKTNFNNKFKGNDLEHTKSLQWPRVISPYA

SEQ ID NO: 46085 - protein, 448 aa, unidentified
MILRMPKCVLERVCECARTSDRYLPISGNGNMDAEKEIVCGADIHRDFLVATMISRSGLKLQEQFGMDQDGLLAFRSWILDHRCLRVAVESTGNYWYPIFCILEGHVEFILANAFQIRNIECKKTDRLDSERIAIYCLNNLIKPSRIYPKDYRDLRSITRSREALVNARSKLKNQIHQSLAVCCIKLSSVISDSFGKSGRYIIEQLLEGKTIEQIISKIPSKRVSKKADELRKAIRNGLDPVQILLIKTNLDAIDYLSEKIKLLDAEIAIKVKPFEEDLNIILSMPGIGLTSAATILAEMGDYRDFQNADKLAMYFGIVPSVYQSAGKLRTGKITKRGSKHMRRILVQVAKAISKTKKSSRLKRFFMRVFTRSGKKNVAAIALARKVLCIIYHLLMKREDYQEPEVKKNKPKIPSCVSPLSMMDIDEMIKTISQAGYLVKKGLKEGCG

SEQ ID NO: 46086 - protein, 356 aa, unidentified
MDNKKYIGRDVHQATISVAVMDSAGKVVMDSVIETKAVTILEFIQGLRGALWVPFEEGTSAAWLYDLLKPHVAKVVVGDPRKNALLKAGNKNDRIDARKLADLLRSGLLSPVYHGGAGVHTLKELARSYLTITKDLTRVMNRIKGLYRSWAIACAGQKVFSPRYRSAWLKKLTEAGVRRRAEWLYQQLDDLQPLRREARRELLAESRKHPVNTLLRQVPWLGPIRVALLIARIQTPHRFRTKRQLWAYSGLALRTRVSGEYRVTGGGQLQRAKRPPALRGLNENHNHELKSVVKSTATRASTSAGPLGDFYAALLTTGMRPTMARLTVAGKIAAIVLTIWKKGERFDPEHLKRQAA

SEQ ID NO: 46087 - protein, 309 aa, unidentified
MEIVVGIDVSKERLDVAILPQEEVFAVGNDHAGIDELAERLKGIGVDAIALEATGGFEMLAVAGLSAAGLTVLVVNPAQVRAYAHAIGRRAKTDPIDAAVIAAFVLATKPEIRPLRDAETQALSELVARRRQIVQMTVAEENRLRMALAKQAQKSIKRLLTALRRELESLDADLDSHIRKSPVWRVREALLTSVPGVGATTARTLLAELPELGSLDRRQIASLAGLAPWTRQSGKWKGKSFIGGGRGKVRAVLFMAALVASRYNPDLKAFRDRLVAAGKPKIVATVATMRKLLTILNAIIRDGRPWQNA

SEQ ID NO: 46088 - protein, 446 aa, unidentified
MSDRSGLSRGDRNRNARLARLRQLLPFDHAIVGIDLADDKQAAVVTDHDSRVIARRRVSARAWELGDLLDWAVAKAFAAGFASVTVACEPTGHRWRVLDQLAAGRGLALVCVQPLLACRSREGEDLTRDKSDPKDAVLIARLAGELRCYEPERADAVWARLRHLGARRRQLTTDATAQVNQIRDLLECAWHAVLGASGSPFRSTTWCAALAVVLDRCAGDLSRVVRLGPARFEGAVRRELPRWGAVRPCLRIVRAVYAALRDPAGVMVHRPGALERAHLALGDWRDTCARLAGAEARMVAVLDDLGLTALVTTIAGLTPVGAAAILAETGDPARFASPRSLVKHAGLCPRDNASGEHQGKTSISGRGRPGLRLAAWRAVWAAMPNNPVMAARFTHLTTRQDNRLARQQARTACAAALLRWIHVVVTRRVTWDPAIAAGGTSLQHAA

SEQ ID NO: 46089 - protein, 400 aa, unidentified
MQNYVGIDISKDDFHFCAINEKAETIHSGQLPMSSDGFSQLLSILNTLSNPAVVMESSGRYHLPLYCFLLSHSIQTFILNPKITHRFFEFISANNPSKCDKKDAKIIALFAISNPQFLTSSPDESNLRSLARLIQKLKKELAEAKTQIKYSLSVLFPEAEKSFNIYSHTFLHILLKYPCAKTLSKAKPNEIAKIINNSIVRGRKVSFAPDELISTAKTSIGIEDPYYAQSLVLYIEKLFFLEPRIEKLEQMLMDEIKKTDNDQLKLISSIKGISEKLAGLFLAEVRDIKIFPNAKSIIKYAGTDPVVKQSGKYTARMSISKQGSAYLRNILFQMTVGVVKWNPYFREYFLRKKKQFGSFKKAIIAVLNKLIRVIHALCRKGSLFNPDLHSSSCHMEFPHV

SEQ ID NO: 46090 - protein, 334 aa, unidentified
MEKITTVGIDLAKRVFALHGVDGAGRVGLRKTVRREQLVETVAALPPCLIGMEACSGSHEWARRFQELGHTVRLMAPVFVAPYRKSGKNDGNDAEAICEAVSRPNMRFVPVKSAEQQAVLALHRVRQGWIEERTATINRLRAVLTEFGVVLPNRAQHVRRGARAAAEALSELARRAVEDLRAHLGVLDEYIAAYDRELEAQACASEAAQRLMRIRGIGPLTAVAIVATVGNARDFRSGRQFAAWLGLTPRQHSSGGKTRLGHISRRGDAYLRCLLVQGARSVLLTAMRHSDRMSRWAVSLQARCGYHKALVAIAAKNARIAWALLSKNQTLRTA

SEQ ID NO: 46091 - protein, 348 aa, unidentified
MIIIGCDFHPSWQQICWLDKDTGETAEQKLVHGSGEAQKFYQQLAAPALIGMEATGNCQWFVEMVKAAGHEVWIGDAAQIRASDVRQQKHDRRDAALLLQLLLEGRFPRIWTPSSEQRDLRQLLIHRYKLVRLRAQAKNGLQHLALNQGLQKKRRLWSEGGQKLLRALPLKPWASRRREDLLGVMELLDQKIASLDQAVQEAAEKDPNARLLMTQPGVGPVTSLAFVLTMGDVTRFARGKQVASYLGLIPREYSSGGHQRLGSISKQGNRFMRMLLVEAAQVAVRCDPQMRQEYLHRCHQKPKGVAKVAAARKLALRLYWMLRTQKRYPEIVSIESSSRVPLVVRHGG

SEQ ID NO: 46092 - protein, 345 aa, unidentified
MDIGKRDCKACIMSSDGSIAEEIKYNNTLHEAEIFAYSIIKKYGKCVAVCESTANLWLKTYQAFEKYNIGVKLANPLKTKAIAEAKIKTDTLDARTLAHLLRSDLVAECYIAPREIREDRSLLRLRTNLVQDRTRVMNRVRSLLDKYDVICDYDNIFGVKGRRWLKSLKLSDNDQILLHEYVMQVEFLNTEIKNTESKITCEASKNESVKILMSMTGIDYFSAMMIASEIGDITRFSAPEKLVSWAGLCPSIHQSGNSLYMGRMKYGNKKIRWILIQAANTAARKDDRLRKFYLRIAKRHGHHIAITHVANKMITIIWHMLVNKKLYNERKQSLYETKLKRIQRT

SEQ ID NO: 46093 - protein, 343 aa, unidentified
MQTITTIGLDVAKSVFQVHGVDAAGQVIIRRQLKRRYVLAFFEKLPPCLVGIEACASSHHWSRELKALGHTVRLMPPAYVKPYVKRQKNDATDAEAICEAVTRANMRFVPTKTPEQQSCLMLHRTRHLFIRQQTSVINAIRAHLAEFGIVAPVGRKGVEELLDVVADPSDKRVPAIARVCLAALGAQLRRLKEQILEFDRIIMTWHRSNEASRRLDAIPGVGPMLATALVGSVADPKAFRSGRNFSAWIGLVPKQHSSGGKERLGSISKQGDRYLRGLFVAGALSVIRYAKIHGTKHRPWLTALLARKPTKVAAIALANKLARMVWAMMASGERYKQPVALAA

SEQ ID NO: 46094 - protein, 350 aa, unidentified
MPKPTTKEELMTVIIGIDPHKASHTAVAIGCDEQQLAEIRVRATCQQTTRLLAWAEPLGARTWAVESAGGLGYLLSQQLVGAGERVLDVPATLASRVRVLGTGRSDKNDPNDALSVAIAALRSPGLRLVEPANHREVLRLLAKRNHELGRLRNMVVSRLHAALANLSPGGISKELNASDAVRLLGGFDPITPVEQTRYDMALELLDDVKRLDVQLKESHKRIKTAVKASGTSLTELYGVGPILACALIGYTGDVRRFTTRDQFASYAGVAPIELSSGGRIVHRLSRRGNRQLNHAIHMVAICQIRQTDSEGRIYFERKVGEGKTKREAIRSLKRQISNAVYRQLLLDAQK

SEQ ID NO: 46095 - protein, 361 aa, unidentified
MRYYTGLDVSQKATSICIVDENGKIVTERSLETCPFVIGKFLKETGLTFVHVGLETGHHSHWLEAELKKQGYPVVCICALRLSKFLSAKYNKNDRNDARGTAEALRLGAFHPVYLKSQEEIELRLLLTSRESIANQKKQASNKIRGLLKPLGVRSLGESDKKEFIQNIRDAIKDSVDNVKLGIEALISSFLHQKQLLEELDKEIEKIAKSTPDAVRLMTAPGVGPVTALYFLVEIGDPHRFKSARAVGAYLGMTPRLYESGEVSRQGGISKCGSKRLRSLLRNAGLSIMSRCTPSFNHKTWGYKKVKKIGKQKVYIAVGRKMAGTLWSMLLNQKDFDYRDTPTKKKRKTKKRNELQMVVAA

SEQ ID NO: 46096 - protein, 410 aa, unidentified
MELLHRRCCGLDVHKDTVVACLRLVSDGKVTTEVRTFQTTTADLLRLSEWLAVNGCTHVAMEATGIYWKPVWHILDDGEFELVLANAAHVKNVPGRKTDVNDAMWLAELLAHGLIRASFVPDAQTQEMRNLLRTRKQLVREQSSHVLRVQKTLEDANIKLDSVLSDVMGKSGRAMIEAMIAGETNPAKLASLADRRVKASPEELREALRGRVTKHHRFLLRLHLNQIDALDAAMATVDAQVEANLAPFRTAVELITSIPGIKTLSAHAIVSEIGIDMSRFPSASHLISWACICPRNDESAGKRRSNRQRKGATWLKTTLVQCGLAATKKKGSYLQAQFHRIKARRGPKKAIMAVVASILTAIYHMLKDGTTYRDPGCDHFKRQSTDQQKKRLVKRLADLGYSVELKPLTA

SEQ ID NO: 46097 - protein, 460 aa, unidentified
MNQYFLGIDASKGYSDFVMLNTKKQPVVENFQLDDTFEGHGHLYEFLHSFSQDHPQATIYAAVESTGGYENNWFQSLLKFQGCLPIKTAHLNPLGVSHNSKADLKRNITDKISAQNVAEYMIAHPEKVSYQHQDSLASLRKQWGFITMLTKQSTQLLNQLESLVYNANPEILTYCKENTPQWVLTLLTRYPTALRLSKAQVKSLARIPYLSDARAKQLVAAAKKSVASATDKVTEQLIVATVKQILHLKKNIKTQNDILSNECQIPEVPLLKTFIGIGDYSAIGLMLQIQSVNRFLTSKKISSFFGIHPAYKKSGDGTYKYRMSKKGRKEGRRILFIVAMSAIQSNPLIRDVYQQAVERGMEKMAAMGLCMHKILRIVYGMLKHNKAFDPQIDLKNRQKKPPQQSKIRQDKNRRYQDFDSNAPISRRQKMKRKERKQSQNVDNVECGIIEASVPVNQLPN

SEQ ID NO: 46098 - protein, 316 aa, unidentified
MTQAGGFVGIDVAKAELEVVVRPSGARWTVTNNASGLAQLQERLQAAAPSLIVLEATGGYEVAVVAALATAALPVVVLNARQVRDFARATGRLAKTDAIDAGVLAHFAEVVRPPVRPLPDAMTQDLQAWLTRRRQLVDMLLAEEQRRSRAPRAIQRQIDQHVRWLRAQLGAVEKDVAQTLRESPVWREKEDLLRSVPGVGPILTTTLLGDVPELGQLNRKHIAALIGVAPLNRDSGTYRGRRAVWGGRARVRATLYMATLTAARYNPLIRAFYERLVAAGKPKKVALTACMRKLLTILNAMIARRTAWKPPAAVSA

SEQ ID NO: 46099 - protein, 377 aa, unidentified
MVKEMVIQNNQNGYRYLKNYIKHLDSLFILFESTGIYSRGMKRFCEIHKIDYLEMNPLEAKFKTSSLRSWKTDKSDAHKLALLAFRMKDSKVQRQSEEIYFELRERARFHLEMEINQNRLKVELVETLHQTFPGLEKLFTNRYSKIALSIAKAFPHPDFVSTLTHDELVEKVLHSTDKGISVNKAHKYVQKLIEIQINSFPNVDKSSFLLQKVQYLCDKLLIGIEEMKEFDQEMIDLAKNTTEFENIISIPGIGELTAALLIGELGNIREFKTNKQLNAFVGIDIKRYQSGTSKSRDTINKRGNKKARRLLYLIIMNIIRGRNHYQSHIVDYYYKLREQPHGKTHKTAVIASINRLLKTIHYLIVNNKLYDYQKAPH

SEQ ID NO: 46100 - protein, 345 aa, unidentified
MESKLEQLQERPSRPFTPRGGPAWPARILEAGVIYHVKEELVYCGVDIAKAYLDAAIGKEKRRWPNDSKGHRELISWINQIAGPVQVICEPSGGYERMLLQALVRAQIAVSLVPANRVRQFARAAGVLAKTDRIDTEVLCSFGKAMRPPSLSGARLEQEKLRELDSQRRHLMHLLVMEQNRGARLSDAAVRRFNRRLVNQIKKQIDAIDLLIQNHIEQSQELSAKAEKLTAISGVGERTSALLLAQMPELGQLNRRQVAALVGVAPFNRDSGKMRGKRTIFGGRRFVRHGLYMAALVAARHNPILRTFYQRLRASGKPAKVALTATMRKLLIVLNSALKPDPIYA

SEQ ID NO: 46101 - protein, 389 aa, unidentified
MGEAIRATVACLGIDVGKRSHSACGLDKDGEAVFRSDLENRPADIDRPPGRAGAGALVVVDQKRNIGALVLARAFAHGNPCAYLPGYAEKQARGMFPGVAKTDAIDAEVIARTARGMPGALRPLAEEPEGAASLRILSSQREFAAAARTRAKNRLRATLLEADPALERAVDPSRGRHVAPLAEFDSAAGCSAAGWRRFSAAAKRAGAPVAGARAPWEAMLASARSGRRLPAGEDVAVRMLAREIAALDADVAELEGLVADSLAGDEACECLLTVPGIGPKTAAALVTSVDISMFRGHDELASYCGAAPADSRSGTSVRSTSPQRGGSKQLKNLLIFSRSSLIGTQNRFGRHCDERGARGMRHNKALKAVARKRLKVIYAVMRDAVPYAA

SEQ ID NO: 46102 - protein, 338 aa, unidentified
MKHTVIGMDIAKHIFQLHCVDPSTGEIKRFKLKREQVLDFFAKQSPVLVAMEGCGGAHYWGRELSKLGHTVRLLPAKLVRPFVLRNKTDAGDARAIWVAAQQSDIKSITIKTEHQQSILALHRIRSQLIKMRIMQTNALRGLLMEFGETLPEGYLALRKALPVSLAALETKLPGMLLQTLREQWTRSQGLDQDIAAIELRLKHALAQSSACKAIAEIPGIGLLTATAAVATMGDPASFKNGSEFAAWLGLVPRQTGTGGRIQQLGISKRGDAYLRTLLMHGARSLVNRNKQSVWITGLLARRPYSVAVAAVANKLARILWSVLATGRPYEPATLSAAV

SEQ ID NO: 46103 - protein, 348 aa, unidentified
MDHVIRIGLDTSKRLFQVHGVDASEQAVLKRKLGRSAMEAFFAGLAPTLVALEACGASHHWARVLTSMGHDVRLIAPQLAKPYVKRGKNDAADAEALCEAAGRPSMRFVPTKSAQQQADLMLAGMRERLGRRRTQLANTIRGYAAEFGYVEARGAAHVRPLLETVRDDPEIPPLAREMFAELALELTELEERLCAIEARLKAWHLASETSRRLAEVPGIGPIIATTLVMKTPHPEAFRSGRDFAAWIGLTPKDHSTAGKTRLGRITRAGDETLRSLLVVGATAVVWQVRRGKARRPMPWLTSLLARKPPKLAAIALANKLARIAWVLLARGGRYRMSDARPEACPAAA

SEQ ID NO: 46104 - protein, 365 aa, unidentified
MQLRPDDVIVGVDTHKDQHVAVLLDGLGGKLDELFLPATIPGYEDLLVFCRQRVGPAGRLLTFGVEGTGSYGVGLARFLRRAGCKVREVHRPPRKGERRMSGKSDSIDAEHAARQVLAGLTMALPKTADGSIESLRLLKIARDTAVKARSTAMITLKATLVTADDQLRAVLEPLTDYKLVEACAALESAACLAAPDAAMRHVLGSLARRWLLLHDEVKIHSKHLKTQTKLIAPRLVEAVGVGLDIAAEMLVTAGDNTDRIRSEAAFAKMCGACPIPAGSGKTNGRHRLNRGGNRQANAALYRAVIVRMRWHQPTVEYVKRRTAEGLSKREIIRCLKRFLAREIYHLLPEPSADHRLQAKPVRQVA

SEQ ID NO: 46105 - protein, 440 aa, unidentified
MEKIRTNVAGIDIGAKRVFTAVEGQPVVNHLTFTEDFILLRDYLLKHKIATVAMEATGVYWVILYEMLEEAGIDVWLVDGRQTKQVPGRKTDVKDCQWIQELHSYGLLNRCLVVDADIKELRSYLRLREDHIHSSSMHINHMHKALTLMNIRLKEVLSQLHGTSGIAIIEAILNGERDKNVLVNLCHQSIIKNKKELVLKSLEGKYTEAGLFALRQAYDGYKFYLKQIDECDKKISIVINRIGQSGEGQDENKKRKVIRHHKPSVVKLAPNLINTFGGKDATVISGITDYTWLQLLSEIGQDLSKWDTEKRFTSWLGLSPGQNNSGKTRRNAKKKGHPKAGQIFRVIAQGLINSKDIAIGSFGRRLRGKKGPRIAIKAMARKLALLYWRVMVKGLDYAEKGIKNYEEQIMMSKMKSLNRLLNELNVQTTDSQPVMKFCHW

SEQ ID NO: 46106 - protein, 317 aa, unidentified
MIILGIDIAKRKFDCALLNEGRFRTKVFENNASGLEACTSWIARHAGQSVHACLEATGPYGEALAEVLYDAGHTVSIINPARSHAFAESLGVRTKTDAVDARTLARFCEALKPEPWVPAPKNVRELQQLVRRLDALIEMRTQETNRLAVAHVAVRDSIEQMLLSLDQQIEMIKREIARHIGRHPDLKAQRDLLDSIPGVGPTTCAWLIAELNTKRFDCARSAAAFVGLTPAHRNSGSSVQGKPRLSKRGNGQLRKVLYWPAITALRCNPLVQALGKRLRARGKHSMAIIAAAMRKLVHIAFGVLKSGKPFNPDLAGA

SEQ ID NO: 46107 - protein, 375 aa, unidentified
MGEITRVLIARVGVDLAKLVIQVHAVDAAGRRVLSRALKRDQFIGWCQQLPAGCLVAMEACSSAHHWARKLGALGLDARLIPANFVTPYRMEGKSGKNDMTDAAAICEAASRPTMRFVPVKTCEQQGVMSLHRVREGFKEERTACINRIRAVLGEHGLVFGKSPKALRAVLADVIEDASNELSTRARLVVQRAFEHWRELDEHMRWCDQQVGTHVRSSPEAKRAAKITGIGELTASAMVAGVGDFKQFKAAHQFGAWLGVVPSQDSSGGKTRLGRITKRGDDYLRTLLIQGAKSAVMSAGKRDDPISRWLVQLVARVGWQKACVAMANKNARILWAVMTRELGFDPRHVSIKPDAKQTALEKINPAHSALASCPA

SEQ ID NO: 46108 - protein, 339 aa, unidentified
MKLYGGMDLHSNNSYRVLIDESGAVVQRSRVGNEMGRVLQTLEAYREQIDSLVVESTYNWYWLVDGLKAAGYQVRLAHPSALQPYEGLKYSDDRSDAHWLAEMLRLGIVPSGYIYPEAQRPLRDLLRQRSFLVRQCTSQLLHMGNILSRNRGRKTSRQQLRQMTVAEVRELFPDRERTLAVESSLRVIEVLEQQIRAIEKQVLERIKPEAGFRNLQTVYGVGPILAMTIWLETGEIGRFKQVGDYASYCRCVTSTRISNAKKKGQNNRHNGNAYLAWAYVEAATYAARFYGQAARFVERKTAQVNRTLAIKALAHKLARACYYVLRDQVRFEPARLFGG

SEQ ID NO: 46109 - protein, 323 aa, unidentified
MSQPNLQCMGIDVAKLSLDIATTDTIEPFTVGNDEDGFAVITDKLKHTKINLILMEATGGLEAAIACKLQSEGYDVVVINPRQARDFARSMGYLAKTDKLDAAMLAQLALVIDRHPDRSRYIRHLPDEARAVLAAMVVRRRQLSHMLVAERNRLYPSHPQSRKSIDNIIDALQNELDRINEQMKQHMTAFFQEQARLIGSVKGVGDITVASLIAELPEQGKLNRREISALTGVAPLNRDSGKMRGKRTTFGGRAGVRATLNMAALVATQFNPAIKLFYQRLLAAGKPKKLALVACMRKLITILNTMLRKGEEWNASFQSQVIS

SEQ ID NO: 46110 - protein, 343 aa, unidentified
MDYFAGMDVSVKETSVCIVDDAGTIVREAKVASEPEALLNVLTSPGFHFKRIGLEAGPLSQWLYSALAEAGLPVICVETRHMRAVLQAQINKTDRNDARGMAQMMRAGLYRPVHVKTLRSQKLRMLLVHRKLLQSKAIAVENDLRGTLRNFGLKVGIVGKLKFEARIRELVESHPDLAVLVEPLLVVRRVLHEQIGILHRRLLAIVRGDDVCRRLMTIPGVGPVVALTYRATVDVPARFKSSKAVGAVFGLTPSKYQSGEINRTGAISKCGDEMMRVMLYEAAHSMLTRTIRWSWLKAWAMKIARHRGMKKAIVALARRLAVIMHRIWVDGTEFRWTREVEAA

SEQ ID NO: 46111 - protein, 340 aa, unidentified
MNVTTIGIDLAKSVFQLHGVDAQGEVVFRKKLRRSAVLGFLYDLRPCLIGLEACATAHFWAREIGALGHDVRLIPPAYVKPYVKRQKNDAADAEAVCEAVTRPHMRFVPIKSAERQGVLMLHRTRDLLMRQRTMTLNAVRAHLAEFGIITAQGPHKLLTLIRAIRTGEVPGLPRIAGIALESLARQLDSLTDEIRKLERQLMLWHRADETSQRLMTIPGVGVITATALAASVPDPGVFKSGCQIAAFLGLVPRQNSSGGKDRLGRISKMGDGYLRRLLVVGATSVVRRANSNTSVTGAWVRCLLERKPARVVTVAVANKTARIAWAILARGETYRASVAA

SEQ ID NO: 46112 - protein, 299 aa, unidentified
MDVSKKYLDAFIDGRTVRFENTVKGVSKLMQKAGDIHYVFESTGGYERLAAWQLLRKGRTVSIVNPGRVREYAKSVGQIAKTDSIDARMITEFAGVATLRKAEMPSKECRELSVLVERRQSLVSMLNMETNRLETAGEDLSRQLINKHIRWIERQIKEADDRIGKIINGNEEMRTKAERIQLVQGLGKGTAATLLAHLPELGTLSRREVSALGGLAPYNRDSGKFRGNRHIHGGRKRLRACLYMAAMSAIRCNPEMKEFYRRLVEENHRPKKVALVAVMRKLLIAANSAVKNPQFLVEN

SEQ ID NO: 46113 - protein, 409 aa, unidentified
MEVLYPRCAGLDVHAATVVACVRVASGATVTYEHRTVSTTTRGLLELAEWLTAHQCTHVAMEATGVYWKPVWHVLEDHLTLVLANAMHIRNIPGRKSDKNDATWIADLLALGLIRSSFVPPAPIQELRDLTRTRKQLVREVVRHTQRIQKTLEDANLKLTEVVSDILGVSGRAILTALVAGETQPERLADLTHGRLKAPRAQLVAALEGRVTAHHRFMIKLHLAQVTALETAITDLEARIGEALAPFRAAVNLLMTMPGLRDTAAAVIVAEIGDDMSKFPSAGHLLSWGGLCPRLDESAGKRRSTRTRSGAPWLKTTLVQVAWAAARKNDSYFHAQFLRLKSRRGPKKAILAVAASMLTDVYYMLRDGVEFHDLGSQYFAQHDKEHLTNRLLRRLRDLGVEVEVKSKVA

SEQ ID NO: 46114 - protein, 344 aa, unidentified
MLCVGMDVHKDFTVIDVFDLDAAAKDQHRIRKVPTTEAGLKSVLEPLNGQCRIAVEVGTQIQWVASIVRPLAAEVQVANPSQVPWLFRSGKKNDQIDAKKLAILLSLNQLPTVHLPSADVSAWRMLINHRRAMISRRTAVKNHIRSVVRTFNYRCPHKSFWTRAGRAWIRSLVFDDARQLMVACLMQQLELIQSQLASIEKQLDAIASERPAVKLLQTIPGIGPRSAEAVVACADDVRRFKNKGQFASYFGITPKLDASGATVRHGHISKRGPSVVRWVLVEAVHHVVRHCTAMRRFLERVMRGTRTRYKKAIVASARKILAIMFGMLRDGTQFDETRVSPIIG

SEQ ID NO: 46115 - protein, 416 aa, unidentified
MDTMYERCCGLDIHKKTIEACFRSGKKKAHMSFGTTSAELRKLTMWLVENDCQSVAMESTGSYWKPIFNILELSGTDMEIIVVNARHMKNVPGRKTDVNDAEWIAELLQHGLLRPSFIPDREQRELRELSRYRKSLVGERAREINRLQKMLEGGNIKLTSVVSEVTGYSSRRLLDRLLRNDEPMTEDVISGLVHTSLAGKSKELETALDGLLSELQKGLLIKVLDHIDDMNKRIADLDDFCRKQMKKYEDALDKLDEIPGIARRTAETILIETGLDMSRFPTAKHFARWAGLAPGNNESAGKRSSGRTTKGNPTLKSTLIQSAKVAARKKDSFFKARYQKIAARRGANRASVAVAHSMLIAIYHILKSGERFKDLGEDYYNQFNREKKKNYYLKKLTKLGVNLKEATLLISIQAAT

SEQ ID NO: 46116 - protein, 464 aa, unidentified
MGSHKQQKKLSSQSKDSGMLSKLNLNAAGIDIGSEEHYVAVPEDRDKQPVRKFRCFTADLHALAQWLKACRIDTVAMESTGVYWIPVFQILETYGFEVKLVNARHVKNVPGRKTDVCDCQWLQNLHTYGLLSGSFRPEDQICVLRSYWRHRDNLLRYASSHTQHMQKALTQMNIQLHKVISEITGVTGMRIVRAILAGERNLLVLASMKDRRILCSTEDIIKSLEGDYRQEHMFALKQAVELYDFYHQQIDACDRQIENCLVQFDSKVDIKINPVPPSKKRNRKPRRNEPKIDLHTHLYRITGTDLTKIDGVDVMTVQSVITEVGLNPGSFPTEKHFASWLGLCPDNRITGGKVKSSKTRKVVNRAAEAFRMAAESLHHSASALGAYYRRMRTRLGAPKAITATAHKLALIFYKLWKNGESYLDPGEDYYEQRYKERVVKNMKAKAKQIGYSITLEPLADCAGS

SEQ ID NO: 46117 - protein, 349 aa, unidentified
MNSTTVAVDLAKNVFELAVADSEGNIGERLRLNRARFSSFFVHRAPCRVLMEACGSAHYWARWIGAHGHAVQLLPAQYVRQYVRRNKTDRADAAALIEAARCAAIRTVPAKSLEQQQVLVLHRLRSQWMSTRHRYLNTLRGLLREFGIAVPLGVRVARTRIAHYLAQPPQELPAAIRPLLAQMLSEVKELEHHIEQIERDLTALTRADPVVQQLRQIPGIGLLSSTAIRAAVGDVERFPCARSFASWLGLTPREYSSGERRRLGGISKRGDVYLRTLLVHGARSALLAAHRQQRTGRPLDHLRQWALQCERERGHNVATVALANRLARIVWATWKHARAFDGNWGCAAQ

SEQ ID NO: 46118 - protein, 401 aa, unidentified
METVRDNGTRIKRFRALKATLRTDRTRLLVGIDVAQAEHVVHLRHAHTRVVVPTLTIPNTTRGFTQLWARIQQAQRSTGCREIVCGLEPTGTYHRALAAFLETQGADVVLISSSVAYWNRRTQDGTWDKNDRKDAANCADLIEQGKILFASQPTGPLAELRQLVRLLRRARTELAAYKARWRTTLRPSLAPMGEPLPSRLWAELPAVLQAWEPVAPGRPAVPKGRLPLGVATACTDLGAQVTAVQARITTIEAACTPLAERLPAYALLRTIPGIGPTVGAILVAEIGDVAWFTKFSQLRKLAGLDIVRVQTGQYAGQWRISKCGRGLLRWALYQAAGGLARTTPGRARLAALKAKRCGDRFAGFKAMVELAAKQLRLVWGVWRSGRPYDPTRAGGVQRQRR

SEQ ID NO: 46119 - protein, 427 aa, unidentified
MRVLYDRVAAIDVHKDMVKVAVRVPGKKRGTRTTGVLEYRTFYGVLQAMARELRGRGVTHVVMEASGVYTEPVYYALAELDFTEVLVVNPAHVKALKGHKTDAKDAVRLLDLYECGAVMRGSYIPAADLKEVRDLVRYRVKTVQARTSEIQRLQKTLESAGIKLDSVVSDITGMSSTAMIEALISGERRGQVLADLALGRMRTAGKRADLSMALTGRFTGHHALMCRLHLDRISMFDDAVGGLDAKISPLVARYAAEAGLLKTLPGFGDVVVAGWLGAIGPAPHQHFATAQRLASWVTLCPGNYISARKSRSGRTGDGGNYIKPLLVQAAWAAIRVPGRLQARFHRLARKFGGPKNKGAKKRAIIAIAHTLLKIAYAVLKTGRPYQEPGTDFYTRRDSGQAREDYLLRQLRKLRPGCVITITPAETA

SEQ ID NO: 46120 - protein, 376 aa, unidentified
MNQDSTLYVGFDVHKDSITVAYATGLDDVELFGKIGTTQTALDRLCKRLESKARHVHVVYEAGPCGYGLHRRLIEKGFDSMVCAPSLIPRTPGDRVKTDRRDAFKLVRSLRAGDLSAVHVPTVEDEAFRDLARAWSSARDDLKQARQRLKSFLLSHGVQYSGRANWGLAHRRWLSILSFDSAWQQLAFNEHRRTIEDRLAQCDRLEAALHEAVPAWRFYPVVLALQAMRGIQFISAVGLISELGDLSRFEHPRQLMAWLGVTPSEHSSGGKRRQGSITKVGNSYARKLLVESAWSYQHPARVSKDIQSRQEGIPKPIVDRAWDAQLRLCGRYRRLVARGKTRQVAIIAVARELAAFIWDIGRMAMSLAVPQSEQPA

SEQ ID NO: 46121 - protein, 362 aa, unidentified
MTKHSTKPPAGKTQSSAFAIGVDVGDRFSHVCILDSDGVPCREERMRTSQAGFRQYFERLAPSQIALEAGTHSGWVSRLLQACGHTAVVANARELRKIHQSDRKNDRADAEILARMLRFDPQLLCPIRHRSAQMQADLAVIRARDTLVGARTKCVNAARGLVKSVGARLPKCSTHSFAAAALNHVPVELHTALSPLIETISNLSEQIRRYDREIEALAKNYPATNLLRQVSGVGALTALTFVLTVADPERFRKSRDIGPYLGLVPRQDDSGNRVSQLSITKAGDAHLRRLLVGSAHYILGPFGPECSLRSYGERLAQRGGKNAKKRAVVAVARKLAVLLHRLWTTGEVYEALRSERAQQSAA

SEQ ID NO: 46122 - protein, 321 aa, unidentified
MSEPSCERFVGVDVSKGWLDLCADPPAPDLASHVTYDDTSLRQLCDALKRLRPTLIVMEASGGFEQRLACELAARSLVLAVVNPRQVRSFARASGQLAKTDTIDARTLCAFARAIRPQARPPRDAQTRELADLLARRRQLVDMRIQELQRQHTASSKAMRKSLAEHVAWLERRIAKLDEDMGQQLRDSDVWRIKDDLLQSIPGVGPVLSRTMLALCPELGQLNRREIAKLVGVAPLARDSGRYHGRRRIWGGRSDVRRVLYMATHAAMQHNAPIATFAQRLKTAGKLPKVVITACMRKLLMVMNVVLKTGQAWHDSSVARA

SEQ ID NO: 46123 - protein, 354 aa, unidentified
MYSSKKDYTGQDLFIGIDTHARQWKITIRTRNTILRTLSINPKPKDLLTFLHNQYPGAHYSSVYEAGFCGFWIHRQLLDYGIHNIVVNAADVPVMHKEKDRKDDKIDSSKLARELSKDNLIAIYVPAEQQQQLRSLCRVRFKIMQNMTRVRNRIKSHLYFNGIDMPSRSETNHWSARFIAWLESIEFSHQPGKDCLELYIEELKEHRARLLKITRLLRHYAQQAHLSPIFELLYSVPGVGFVTAVTFITEIMDIARFQTFDQLASFVGLVPSTSSSDEKKTEKGITKRRNCYLRHLIVESAWVAIRKDPVLLAKYDNLCRYMKKQEAIIRIAKKLLSRIRCVWLNRQPYVIGVD

SEQ ID NO: 46124 - protein, 387 aa, unidentified
MIKQDLEENGGRTVVGIDPCSEFLQLAILAPSKKPEFKKLPLSPSITEEIAKSTDPATTQIAIESYGSYGKLFIYDLLKKGYDIREVNPHISKKLSDLYSEEHSDRKDAESLAKALLLIPGLPKISITDKKQWLAKLTRTRKKLVKDLNGYLNRLHIALTESYGVVYKSLFKILFTKKALRFFEDYPIINDSLSDKDVMRRLGETKWNLLKQAGMWEDDFYLETLRTEIRGLIEIMRSIDSTKLAIEEQIHDIAGQVEEMRILKTFPGIGGIAGATLLSEIGDIDRFRQESYLSSYCGVSPVIWQSGTGRIRTKRRKRYSRRLKGILYFISLSQIRINPESKAYYQRKRKEGKTHWQAMNALSRQLIKIIYYMLKNKESYKRSTLIN

SEQ ID NO: 46125 - protein, 346 aa, unidentified
MILIGCDFHPSWQQVSWMDRTTGETEDAKLVHAPGEAERFYRQFPAPTLVGMESTGNCQWFVDLLAKLGHEVWIGDASKLRASDARQQKHDRRDARLLLQLLAEGRFPRIWTPSSEQRDQRQLLIHRHKLVRLRAQVKNELQHLALNQGVQKKRRLWSEAGQKALRELPLRPWASRRREDLLSVKKMLDGPIAELDQALLEAAQQNQQARLLMTQPGVGPVTSLAYVLTMGDVSRFPRGKQVASYLGLIPREYSSGGHQRLGSISKQGNRFMRMMLVEAAQIAVRYDPQFRSEYLHRCHTKPKGVAKVAAARKLAIRLYWMLRTNTGYPEIVRIESSSRVPLVSAS

SEQ ID NO: 46126 - protein, 391 aa, unidentified
MFYMGIDIAKFKHDFCIIDGDTGEIIVPPRTITNNKEGFHEMLEVLTNLHCSQIIKIGLEATGHYGMLIKAFLTSNGFKFIELNPLQVSRFHSQTSLRRTKTDKIDCQVIARYLMAIATKTYQPQVYHLEALKSLTRLRETLVDQRSRCLVKLTNVLDITFPEFKKFFTAKLRSETALFIIRKYKTPSRIARWTDEDITLIHNVSRKMSTSKLLEIKKSAIESIGIAPKYLLDELPSILNVYETVNEEVSKLEEKIKSIIFELDSPSLSIPGMGPISLATILGEFGDLSRFPGAEQCIAYAGVDVGISQSGTKCHRGKMVKRGSSHLRYALMNVVRAVCIHTPTFKEYWVKKKVAGHKFLRVADSHAAKKLVRVIYYLETHNTKYDPSRCK

SEQ ID NO: 46127 - protein, 389 aa, unidentified
MLLDHPSDEPTAIRTYIAAIFVSLELSRSTWLVTSLSPGKGERMSKHSVTAGNVAELLTLFAELRRKAEVRTGQSYPIITIQEAGLDGFWLHRVLQQNGIESHVVDPASIAMPRRRRRAKTDRIDGETLLRACLAYKRGEPRVCAMVVAPSPEEEDRRRLCRERRTLIGERITHVNRIKGLLFAQGICDYGPLRRDRRARLEALRTGDGRELPSHLKAQIGRELDRIELLLDQIKAVEAAQDALLATARKPASEQAAPDPVTMLLALRGVGANFAAILWSEAFYRQFANRRQVAAYAGLAATPWQSGGIRREQGVSKAGNPRLRTTMIQLAWLWIRHQPQSALTRWFKLRSQQGRKRAIVALARKLLVALWKYVSQGVVIEGAAMKPAA

SEQ ID NO: 46128 - protein, 431 aa, unidentified
MTEHDHASPMPSFAALVGIDWADRKHDVYLLGLDAGQREHLVLAHTPEAIDAWACQLRERFGARPIAVCLEQTKGALVYALLKYDFLVLFPLNPARLKSYRRAVTSSGAKDDPTDAQFLLEYLECHRAHLVAWRPDDARTRQLGLAGEERRKAVDLRTQLGNRLRTCLKHYFPQALDLVGEDVHTRMACDFLLRWPTLAAAQRATPQALRKFYHAHNSRHEGLITRRLEALRVARPLTTDPALVQSYRLTATLLARQLRELARAIDAYDKELARLMAEHPDAALFESLPGAGGTLAPRLLVAFGSDRQRFAGPGEVQTYSGIAPVTRRSGRTASVHRRTACPRFLRQTFHEFAGHSVPRSAWAGAYYRLQRARGRGHHAAVRSLAFKWIRVIYRCWKERTPYDEATYLASLRRKGAPLLAYLPPATTPSDG

SEQ ID NO: 46129 - protein, 355 aa, unidentified
MSSEKYIGLDVHQATISVAVVDSQGKVVMESILETKASTLLEFFAGLRGSLFVTFEEGTWAAWLYDLLKPHVSEVLVCNPRKIPLLKQGNKSDKIDARKLAERLRLKDLKPVYHGETGVRMLRELARSYLTIVKDLSRVMNRLKALYRSWAIPCAGRDVYYTRHRSQWLEKIPEAGTRRRAEQLYQQLDMLQHLRQQARRELLAESRKHAITAKLRQIPSLGPIRCALAVALIQTPHRFRSKRQLWTYSGLGLETRDSGEYHYVRGQVRRRKKQATIRGLNKDYNHDLKGLFKGAATRASVQPGPFHEFYQRSLAKGIKPTMVRLTLARKIAAITLTLWKKGEDFDIGKLNSQAA

SEQ ID NO: 46130 - protein, 483 aa, unidentified
MGNGSGVSRGDRNRNARLERLRALVPVTNAIVGIDLADAKQMIVVTDHDSKVLARKTFRCRAWHLGEALDWAAVQARARGFCGVTVACEPTGHRWRVLGQLAGVRGMPFVCVQPMLTSWARRSEDLTFDKTDEKDAVLIARLAAQLRCYVPEPVDEIWGRLRHLGARRTQLLDEACSQVQQMRALLECAWPASLDAARQPFRWATWPAAMSVILDRDGGDLTRTRRLGLARLEAAVRKEVIRRGRQKPCMRIVGQLFAALADPAGVIAHRPGALERVGFLMDDWRQTQRRLADTQTRMTAILEDLQLTDLVTSIAGLSPVGAAAILAETGDPRRFATARALVKHAGLAPREKLSGTFTGRTKLTGQGRPGLRLAAWRAVWGAQRANPVYAARLAHLTSREQNRLTATQAHAVIAAAILRQLHAVITTGQRWDPVFAARGTRPLAATPLAAALLRQLHAVITTGQRWDPVIAAGGRKGQQPIAA

SEQ ID NO: 46131 - protein, 322 aa, unidentified
MSLTILGIDVAKQKFDVALLSDGKTKHKTCKNSTEGFEILMVWLEKQGVQKVHACLEATGNYGEDLAIYLYEAGHTVSIVNPARIKGFAQSELIRTKTDKIDAGVIARFCLAMKPEPWIPPTPAIRSLRALVRRVDSLVDMRSQEKNRISTAHESVVFLIKEHIAYLDQEIEKIRKQIADLIGQNPQLKQRKDLLDSIPGIGKATIPHLLAELNNLEKFNHVREVVAFIGLAPKETISGSSIKGKPRLCKIGHARLRKALYMPALVSIQCNPVMIAFYNRLKEKGKNGKVIVCAIMRKLVHVIFGVLKSGKKYDPNYKPASA

SEQ ID NO: 46132 - protein, 429 aa, unidentified
MNDITDRLYLFRQMKASIRGSENILLVGIDVAKNKHYAFMGTPNGRTLRKSLVFDNSIAGFKSLRSLVQDMQRNHGLGEVVYGLEPTASYHKPLAEYLIRQNDHVVYVSNVAVAKNRGLLDGRWDKNDKKDAANVADLVGQGRCLYYDIPQESLRELRSLISFRSRLKKEEHALRMRLRNNVFAQYFPELDKLYIRAGQPDDLVLSIAQHCLDPREINQMEFDAFLKLITARQIRSEQEKRLRDLWRVSKESAGCEVHDAARWEAQSLVTKLKATRETVKGTEQRMEKLARQFPEYECLLSIPGFGPIVSAMVLAAIGNAFRFENRKQVVRLAGLDLSAERSGDNSNSAKPVISKQGKAALRYALVQAAMVASTLNPDIRSYFSRLLKGRELERGIQLKMKVKLAAKLLVVAWTLMKSKEQFKSSCFTG

SEQ ID NO: 46133 - protein, 372 aa, unidentified
MKTKNLTPSVVTTSTPATIIPGGFTLGLDLGDRSHHVCVLDAAGQIIREDTLPNTRPALAKLLAEFPRATVAMEAGTHSPWISRYLAGLGAKVLVANPRKLHAISRNERKCDRRDAQMLARLARVDPALLYPIQHGTAQAQHDLLGLKLRDARVRTRVNLINAVRFTLKSLGHSVRNPSSESFHKTVLGDIPADCLPVIQPLLTVLGQMTEQIQGLEADLVRRGQQDYPATQRLQQIAGVGPLTALCFVLKIGDPQRFGRSRDVGAYLGLCPRRDQSGGTDKQLRISKCGDGLMRRLLVSAAHYILGPFGPPCALREHGQRLAGAGSAREKKRAVVAVARKLAVLLLSLWKHGTDYEPRATATSPVLALTPA

SEQ ID NO: 46134 - protein, 395 aa, unidentified
MISVGIDVSKGKSTVCILKPGGEVIKPPFDMVHAVENLDFLISLINSFDEETRVVLEDTGHYHIPVASYLSSHGIFVCCVNALRMKKFCAQSIRRAKTDKIDAVRIASFGITYWSELTRAYDAPDTYDELRFLARQYYQITSILVKAKVNLSNLLDQVMPGISNLLQNQKDNHKLTDFVDRYIHFQTILDMGEKKFTADYCKWAKKKGYRCNERKAAEIFALAQNGIPSLPNSQSVKIAVREAIKVIHSTEESRNTILAQMQEICKTLPEYSVVRDMNCIGNVLAPRIIAEIGDVRRFRNKHSLIAYAGIDAPPYQSGAFNASERKISKRGNSYLRKTGYEIMQSLIKHKPINDPVYDFIQKKRSEGKCGKEAMIAGLNKFLRVYYGKVMELYSE

SEQ ID NO: 46135 - protein, 449 aa, unidentified
MKQKVSMEIINPNAAGIDVGSRSHFTAIGQGKDDVREFGVYNEGLHALSEWLLENNVKTVAMESTGTYWQSLFAVLQNAGLQVILCNGKFTKNIKGKKTDVQDCQWIQKLHTIGLLTGSFLPDEATEQLRTYCRHRANLLDNAADTTRKMQKYLRLLNLRLDVVVKDVTGLTGLAIIEAICKGEVNAEALASLRHGNCKKSEEEIAKALQTNGRKDYLFALKHEYRMYQNLQSAIIDCDREIEKMLNEQINNDDEKRQHYIDKKVHKKVNKNSPKNIDIILVSYQYFEGVDLLAIEGVSHSTALSVMSEVGLEGLKKFETAKQFASWLRLVPNNKISGGKVLSHKVPKGSNRLKIALRNAANAIGNLKDTPLSNFFNRINFRKGRVSAISATARKLAVIIWNMVIKKQPYANEHGYEFLDQKRKRKVNEMKKLIHKFDIKTNELGLAYQ

SEQ ID NO: 46136 - protein, 430 aa, unidentified
MKSNTQNAKIEAITEKTLVLGIDVGSETHYARAFDYRGIEYSKKPFKFSNTEAGFVTFKEWILDLKERHEKDKVVPGMEPTGHYWFNLGKFLHDNEMKPVLVNPHHVKKSKELDDNNPTKNDRKDPKVIAGLVREGRYMIPYLPEGVYADLRTASNIRFQLQAELTRIQNRISRWFNIYFPEYKTVYGKPDAKSGMLILKAAPLPEDILTLGIDGVNQIWRDAKLRAVGKARAKTLIEAAEHSVGSKEGAVSARMEIRMLLEDYESRNTRLQEVMILIEELVRKIPMAEKLLEIKGVGIRTVSGFLAEVGDISRFNNPKELQKLAGLALVENSSGKHKGETTISRRGRKRLRYLLFEVAMSLVSKNQEFRELHNYYTTRRLNPLKKMQSLMAIAAKLIRVFYAMLTKGVDYDPKKMVSDIKRPAVYLQAA

SEQ ID NO: 46137 - protein, 324 aa, unidentified
MKSKSLELFIGIDICKDRLDVADDSESLPWSVANDDAGISSLVDRLNALQPALIVMEATGGLETLLYAALTTAGLPAVVMNPRQVRDFAKAMGTLAKTDALDAQVLARFGAALQPAVRPMKDDITQELTALVTRRRQWLAMLTAEKTRLQQAAKWIRKDIKAHTESLEKRLKTIEGHIAESIQKTPGWKDKDSLSRSVPGAGNVLSMNLLSSLTELGTLNRREIATLVGVAPFNRDSGHFRGKRMVWGGRAQVRAALSMAALSASRHNPVIKPFYQRLIAKGKKPKVALTACMRKLLVILNPMVKTQTAWNPNQFLPLDFNHGC

SEQ ID NO: 46138 - protein, 430 aa, unidentified
MTNREPTPADAVLVAIDISKLRNDVLIELPGSVRRKRLTVLNTKTEHDRFVGLLGELARPVIAGFEATGNYHRPLAHRLLEAGFELRLVSSVALARTREALHNGWDKNDPKDAQVILHMLRIGATQTYCDPIRAGIHNIQELSKTHEVVSKAKTELWHRLLTHYLPLYFPEIARFAGHSRSDWFLAFLEQFPTPASITAFAKEEFVSAAWDVVGRKVSKARLLADIYETAGSSIGLPLELGSPAIAMFRMMLAEGRSLIRQRDVIEAQAHALLSENADYNRLRQVPGIGPINAMTILAEAGDLRRFGHHRQFLKFCGLDLATHQSGQFRGRTMLSKFGNARLRRAFWMAAQVAIRQRDNSFRAKYERYIARDRDNADLKRKALTAITAKMARTVHAVIKSGSDYRPFFEGPIPSGRTPLGKGREGASATL

SEQ ID NO: 46139 - protein, 357 aa, unidentified
MAKSIKVLATELNVIGLDLADVNSDWAGLDQDGKVVRRERVRTTESELRGVFGALARTMIVLEVGTHSAWVSRVLKSLGHEVVVANARRVALIHRNRRKNNRIDAEFLARLGRADKELLFPIHHRTVEAQADLAVLRTRDVLTRSRSSLINHVRGMCKSFGVRIPKCSADAFVTRASALVPKELSGATSIVLDQIAGLTAKIKALNRTVTSMMDKHPEAKIVSQIPGVGELTALAYVLTIEDPRRIRRSRSASAYFGLVPGSDDSGEKHQQRRITKEGDPFCRRLLVCAAQYILGPFGKDSDLRRHGEAIAERGGKNAKKRAVVAVARKLAVVMHHLSMHNETYAPLFNSARTDVAA

SEQ ID NO: 46140 - protein, 474 aa, unidentified
MTIRSVGIDFHQGQHRARCLDERAQSCDSFGFQTTPEGLATLEEHIFRDGSNPIVVFEPAGLPWLTVAAYLRSRYPDCRLVKAKTQKVAALRRYLRGPVKSDRIDALTLAKMPFIDPEQMEEIYLPSAEIHALQRLTRQRKRLEGDIAGRKVRIEAIIDGYLPGVRRAFSSPWATQVRAFLRSRLNPFAVVRNGEKALVTFLSKAASREKGSRAESHQVFQACQAVANICELSQSARTINEEFFVELQDEIARELRLMEIEEAESKSLENRISEIYQKLHPSNNLCTIPGVGEHTAPVFLAAIGDPSRFRNQSAFANWTGAVPGSRQSSNVEAKGLRMTKAGPSIMRMALFQSGDIGRRWDPQVAAVYYREMVHHGKNHKQAMGAVMSHLGARVLKVLLEDRPYELRDIQGKSITREDARRLILTEYHVPEDIRRERRRRNSVKAYKTEREMPVSRTNEAAKAPQPVKIMAISR

SEQ ID NO: 46141 - protein, 424 aa, unidentified
MKHHGWPSREGILTESYRFFVGIDWAWERHTICVLGSDGEVIDRRTIEHSGAGLTQLADLLEKLSSGDPFSVAIAIEMPRGAIVESLVERGFAVYSLNPKQMDRFRDRHTVPGAKDDSRDAFVMADALRTDLHLFHRVRLDHPDILRIRELSRSEEDAQQDQVRAENQLRSLLNRYYPQMLQLCPAVDQAWFWDLLEMASLPAQGAKLSKSRIEKLLRSYRIRRLDADEIHQTLSVPALQLAPGAAEAASEHVLLILPVLRLLDRQREEIARRMQLLLEKMSEDEQVVEHRDVKILLSLPGVGRVISATMLAEASQPLAERDYHAIRSYAGAAPITRRSGKRKMVVMRRGCNPRLRNALYHWSRVSSQNDARSKEHYAALRAKGHSHGRALRGVADRLLAVLIAMLRSGTLYDPNHQTAAMPLK

SEQ ID NO: 46142 - protein, 423 aa, unidentified
MEVMHCRVAGLDVHKETVVACVRVMAGRRPTRECRTFTTPTQGLLELLGWLTASRVTHVAMEATGVYWTPVWKILSEGDFTLIVANAAHIKQVPGRKTDMNDAMWIADLLACGLLKASFVPPEEIQELRSLMRTRKQLVREQTRHVQRIEKTLEEANIKLGTVLSDLMGASGRRMIEAMIAGERDPHRLAALAERSVKASPKALHDALHGRLREQHRFLLQLHLRQWDALDAAIRQIDEQVAGHIARVDQQAADGQLPIGELIARLCAIPGVSFLSATAILAEIGRDMSRFATAGHLIAWAGLCPGQNESAGKRKSSRLRKGAPWLKTMLVQCAWAAKRAKHSYYSAQFHRLCGRRGPQKAICAVAASILTAIYHMVRSGASHRDLGADYFDRRTPQARAKRLVAQLAKLGFAAQLQPLAVAA

SEQ ID NO: 46143 - protein, 394 aa, unidentified
MIYTGVDIAKTDHVIGAVDERGAEMCRPMPFKNTEAGLERAVAWLEGLAGSPSDVVVGMEATGRYWMACYSFLVARGCSVAVINPMQVKAVRKLKGLDEVKNDRIDAWLIAETLRIGQYDETRLATDEVASLRSLSRYLQSLRGMAAELKTQCVCLMDAHFPEYAGIFSGMFGAGSRAVLPESPLPFELARRRADSLARDIAEASRRGGKSAGYAAKIKAAARSSIGVRLGQEAASFQVKSLIRQIEFADSECAKVEARVRALLDEVEPLVLTIPGVSYATGAQIVSEIGDVSRFRNAPALVSYAGLNSSVSQSGQFDSGGGPITKHGSPYLRRALWLAANRARQYDPGLRAFYDKKRAEGKPHRVAVTAVARKLCHIVFAVMRDQVPYDPGRE

SEQ ID NO: 46144 - protein, 347 aa, unidentified
MVYVGIDLHRNRSQIAVLDQQGGELLSRRIANDREIFLELLHGLGDDVQVALEATYGWEWLADLLEDAGVELHLAHPLRTKAIAAARVKTDAVDARTLAHLLRTDLLPEAYIAPRELRDLRDLLRHRVALTRIRSALKQRVGAILAKQGIARPYSNLFGPGGSRFLTELELRQGPRRRLDSLLALIAAFDREIDNTTKEIEQRASEDPYVDVLCQIRGVGRYIAMLVIAEVGDITRFPSARHLCAWAGLTPTVRSSNGKARLGHISGQGSPALRWALVEAAQHAPTGGGPLRAAYERIAKRRGKQVAKVAVARKILTLCYYGLRDGEIRCLAPRAKARTNRTTVVTR

SEQ ID NO: 46145 - protein, 361 aa, unidentified
MTTTTPTAASTILAIDLGKYKSVACLYSGSPDSARFDSFTTDRARLAQLLQRCQPSVVVIEACLLAGWVHDLCAALGFTCLVANTASEAWKFKHLKRKTDKDDALRLAQLHALGQLPTVALPPPATRQWRSLIAYRQTLVGRRVAVQNRIRALFVAQGLPAPRGAKAWTATGLEGLALQAKPLGECGPDDLWRGLLHLALAEYRQLRALLDDAEGRLDALAKSDRNVQLLESTPGVGPRTAEAIVAHLHQPERFLSGKQVSAYVGLAPNQFQSGETDRHGRITRRGPALLRKLLVECAWVMLRYNGWARAVYLRLTHGGKTHKKQAIVALARKLLVRCWAMLRDGTPWRDKTPAPAVAAST

SEQ ID NO: 46146 - protein, 409 aa, unidentified
MQVVHEVCCGLDVHKKSVTACVLWASGRRRQIREFGTFTRELLELADWLRTCGVTHVALESTGVYWKPVWNLLEGQFEVLLVNAQHIKAVPGRKTDQKDSEWIADLLQHGLLRPSFVPPTPTRELRDLTRYRASLAQEINRIANRIQKVLEDANIKLASVATDTLGASGRAMLEAIVKGEEDSQRLAEMSRGLLRNKIPELQQALQGRVTGHHRFLLRELLDHLYFVESKMRRIEQEVEERLRPFQSEVVRLCTIPGVDRVTAWGLLAEIGLDMHQFPDAQHLASWAGLCPGSHESAGKRKSGKIRKGSLWLRRCLCQAAWAVSTKKNNYLSALYRRLAARRGAKRATIAVAHNLLVIAYYLLRDQTCYHDLGPNYFDRLNPEGLRRRLTKRLEGLGFKVTLEPFTQVA

SEQ ID NO: 46147 - protein, 398 aa, unidentified
MKTCGLDVHKDKIFCAIYNGKDYTEVKEYDTTTPNIRQMGEYLRCEGVDNVAMESTSTYWVPVWDVLLEMGFELMLVNPFLIKQMPGRKSDVKDAQWIACLLYKGMLRGSMIPSPVIQELRTYCRKYTKLQQQKTRALQKMDRIMVMCGFRIGSCMSNLGTKSVMNIVMSLISGETDPETLSKLVYGSTANKKSGKLKEALSGNLKEHFRKQLEWEKEEYDLFEKQTEQCLIQMRRICQEHYSKEIGLIKSIPGISEISAMIIIAETGGDMSVFENSGKITGWAGLRPKNDESAGKYKSTATTKGNKYLRSVLVQVAWAASRIKNGWFKEKFNRLAMRKSRKKALIAIARKLLTVAWNVLYYKTPYNPQLIHIYNPIKIEAKINYHHREIERMQKLFS

SEQ ID NO: 46148 - protein, 340 aa, unidentified
MEKRYIGIDLHRDRFTCCVRLENGRTYLSGWKLEALPKFVKKLRKADELAVEITGNTRLFHDTVAPHVARVVVVDTNQFGVISRSVKKTDPNDARLLALYLSKDLLPEVRMKNKQQARVASLTQTRDTLVKQRSALKNKVNNILSARGLNLPKEALSSEKRLNEVLSLPFDELLLVELRVIVDQIRSLNKSIGELDKAIAAASSELEGHTSLISIKGIGATTSAILLSLIGDVNDFPDEGRLASYFGIVPRVSNSNQTEHSGRIHKRGSKLGRTALVQSALIAANYSPYLKRFYEQVKARRGAGKAIIALARKFLGIIYRTLKNQWVFEDFPNFVLAEES

SEQ ID NO: 46149 - protein, 370 aa, unidentified
MSVRRILAKTIDTDLEYEAIGIDLAKNCVSAALLTTDGEVVCIDRLDYSELEKSAQVLTPTTFAMEPCTEMNYLVQKLEAWGHRCLVIGGKNVQNYVENHFSGQKTDLNDAQALAFLAQDTQLRTIKAKDIEQQKYASLTTLREQYIKQYRQTIVSLKGICQAWGLNISKGISRKAQLRDLIESHAAFPEELRESLVDMVTHAQTTQKVLNKITKTLEVLAKNDKACQLIQTIPGLGPICSCRLRATIGDIRRFKNSKDFPAYYGLVPRSIATGHNEKKGKITHRGDRTMRSLMMQGAGCVIRLATSGKLKSKQFTKWILKKQKEKMPWGKLVCAVAAKLLRIVRAILISSKPYNPKIAGVAKCSLSKGS

SEQ ID NO: 46150 - protein, 332 aa, unidentified
MISYIGIDIAYKTFDVVVRQDNKNSKVETYNQHKDDHKKLINKLKKLKPESVVMEATGIYYLDLAKALFKADLPVSVINPKSFKSFAETLLKRSKTDSIDASLLAEYGQRMTPVLWTAPDDTMMELRDISRQINRLVYINTQAKNILHAMTATQNTNKYVIEDEKEGICFNEKRIERMRDLALELISNHDALKRQLSNITSATGIGENSAICMMGELNILPKTLKAPQVCHYAGLSVRLKQSGTSVNGPGRLSKAGNTYLRSAFFMPAMSASIHDSNAAAFKEVLLSRGKKKIQAICAIMRKYLMGVWACIKTDTPFDSSKLFSEEHKIACA

SEQ ID NO: 46151 - protein, 324 aa, unidentified
MGPMYYIGLDVHKRTISYCVKDISGKIHAAGSIPATRLDLDRWLRSLPQPWTAAMEATLFTGWIYDYLKPHAAVLKVAHPRMLRAIAAAKKKNDRIDASKICDCLRCDFLPECYLASTEIRERRRTLRYRNLLVRQMVQTKNKIAVLLMEAGVTYNKQKLHRAGYFRELLATNPHIDEGLCSLLRSCRETVVRLQRTESALVRSLERDFLLMDRVERLMTIPAVGPITALTWALEIGDVTRLSSIKKAISYCGLCGEEKSTGDTTQRTPLSKQRNRHLQTILIEAAKMAPRISPDLACSTTEKNRKAIRIVRLSPWPESWWPTW

SEQ ID NO: 46152 - protein, 377 aa, unidentified
MSKIRFVGMDVHAETIAVAVAEEGGEVRSLGVIPNRGESIRKLIGKLGSVKSLKCCYEAGPTGYVLYWQLAEMGVACEVIAPSLIPVKQGDRVKTDRRDAEKLARCHRAGELTAVWVPDAAHEALRDLVRAREAAKKDQLRHRHRLGKFLLRHGKRPNGAGEPWTRKFSTGSRIHVRFDQAALEATLSHYLGEVEHAAERIAKLEQAIDEAVAKAPAKIRAVIEALQALRGVAQTTAATVVCELGSLSRFESPRQLMGYSGLAPREYSSGGRTQRGAITKSGNAHLRRVLVESVWAYRHRPNVQGRVLRRQKALALSEETRQIAWKAQQRLYKRFTGLTARGKTSGQAMTALAREMLGFIWAIAVNTETRFGLPQRA

SEQ ID NO: 46153 - protein, 467 aa, unidentified
MTSGYSLNGSGEKSFLSDYQKRNLLLSYRLLSTRHNNPNEEVSMEQYDDSRLQLFRQMKREIRGSEEYLLVGIDVAKDRHDVFFGSARGRSFLRKLVVDTTREGFEKLCLHAEAMRKQHGLNKMVFGLEPTADYHKPLGEYLIKQGHRVVLIAGSAVKKNRELLDGRWDKHDAKDAANVADLVGQGKCLFYEFPSLDLQELRSLLSLKRRLKRSEQSYRVRIRNHLIAQYFPEMDTYFGYGEGPAIVRWCLDPKALANLPLEAFVRMVSSRNGGEKQRRRLQQIHEKAAVSIGCTVHPSVTFEAQTLLEEVRQLHTMILETDKKIAEVCERFPEYPYLLTIPGFGPDVSAKVLGAIGNPYRFDNARQVLKTAGLDLSADRSGKRTDVTPVISKKGKADLRYALYQAALIASYKSPHFITYVANKVKGREREKGIGTKMRIKLAAKMLIIAWTLMKKKEPFNPERIKS

SEQ ID NO: 46154 - protein, 350 aa, unidentified
MTTMTPLDVVVTGGVDTHQELHVAAALDQLGRVLGTAAFPTTVAGYRQLLAWLRQHGQLAKVGVEGTGSYGAALARHLAGNDVEVIEVARPNRQVRRRFGKTDVVDAIAAARAVLSGEATGVPKSHHGPVEALRTLKAVQRSGNKARTQALNQIHQLLITAPEDLRTRLRPLDRTDLLATCADFRIKPDDDSLHAMTRLALRELAQRVVHLDEQLTLVSKRLRRITAAAAPKLVAIKGVGPEVASTLLMTGGDNPQRMHSEAAFAALCGSNPIAASSGKTNRHRLNRAGDRQANSALWRIVIVRLSCDQRTRDYVDKRIKEGKSKTEAIRCLKRYVAREIYNSMPSTDAA

SEQ ID NO: 46155 - protein, 346 aa, unidentified
MKRYAGLDVSQDQTAICVFDQEGSVLFVGSCATEPEQILATVAHCGQVEKIVHESGPLSIWLTRELMDRGAPIVCIDARAAHKALSARMNKSDRSDAEALAQLARTGWYREVHVKSEASDRLRLLLSARERLIRIRMDIEAQARGILKTFGIRLGPVRAGWSRRNFRDQLSEIVAGDPILEVVFAALIAVHETVCHQATDLDNELQEIAKESPLARRLTTVPGVGPIVALSFIATIDDVDRFRKAVDVGAYLGLTPRRYQSGETDWTGRISKRGDSAMRKLLYEAANVLITRVPKFSPLKSWAVKLAEKKGLKQATVGVARKIAVILTRIWRDGTSFAWTRENLPA

SEQ ID NO: 46156 - protein, 352 aa, unidentified
MVVIGVDAHKRSHTLVAIDGAGRKLAEKTVPATSDGHLAAISWAARWQERVFALEDCRHLTRRLEIDLLTSGEAAVRVPPHLMAGVRRGGRERGKSDPIDALAIARAAQREPDLPVVRLDGEARELRLLVDHREDLVAERTRIQCRLRWHLHELFPGLLVPSRGLRRYRVLAELEERLSGVEGTVAAIARELVARCRELTLRARDLEREITTIVRRLAPSLLAMPGCGPLSAAKLVGETAGAGRFRSRAAYARWNGTAPIPVWSGNSTRHRLTRGGNRQINAALHRIAVTQLRGVGGLGQAYVERRMAAGDTKVEALRALRRRLSDEAFRRLLADETAIGASVASGELAAAA

SEQ ID NO: 46157 - protein, 363 aa, unidentified
MFESMAVTVGLDVHARSIRLAAVRGDELLEERTLPYDEEAVERLLRRWPGARCCYEAGPTGFGLYRHLVERGIDCSVIAPGLVPQRPGDRVKTDPRDARKLARLLAGGLLEPIHVPAPELEAARDLVRAREDARLDRMRDRQRLSKFCLRHGRLLPTSSWTIVRRKWLGEQRFEYAAEQITFDSYLHAVDLVDRRIEALERSIRETAEQGPWRELVARLRCLRGIDTLTALALVAEIGDYSRFRTAEEFMAFVGLVPSERSSGEKRHQGSITKVGNSHVRRLLVESAWHARRRPTVGYELSRRQRGQDALVIERAWRCQQRLYQRWQRMAGRGKPHQKIVVACARELAGFVWAIATDQPLRNT

SEQ ID NO: 46158 - protein, 383 aa, unidentified
MGNSITLYVGLDVHKDSIDIATAESGRTGEVRHVGSIGGDLAALDKALRKLISRGEHLHVVYEAGPCGFVVWRHLTASGLSCEVVAPSSIPKRSGDRIKTDRRDAMMLARLSRSGDLTAVRVPSAADEAVRDLVRARDDAVRECRNARHRLKALLLRNGITYQGRSTWTAAHLRWLSRLKMQHAAQQIGFQEYLHSVTESSARIARLEQAMRDALPDWSLKPLVQALQAMRGVQLIAAMTLVAELQDFTRFESARKLMAYVGLVPGEHSSGPKRRQGSITKAGNSAARRMLVEVAWHYQHNARVTPIIARRQDQLPKAITDIAWAAQLRLHAKFKRLLARRVMKTKAVVAVARELTGFVWAIAGEVHNSGWQGVAITATDNAA

SEQ ID NO: 46159 - protein, 359 aa, unidentified
MARIVERVADRYDVVVGVDTHTDTHTAAVVDRLGAVLAQVTVSTDPDGLARLLDFAVAHTPPRGRRLWAVEGTRAHGQGLCRVLDAAGEDVSEAPKPAAASRRRGGKSDQLDAVAAAHAVLALPLQRVAAPRSDGPREALRLLLVCRRHHSDARTATINLVKALILTADDTLRHTLRGLSTTTQIARLAALDLPETTDLPCEEHTRRRELTTLARQIQTLDAALADNHRRLRALVTHLCPPLLDQPGIGPVTAAIALTAWSHPGRVRSEAAYATLAGTAPIPVASGRTNRHRLNRGGDRTLNSALHTIALTRRRIHPETRDYITRRRTEGRTTKEITRCLKRYIARQIYRTITNHHRTT

SEQ ID NO: 46160 - protein, 358 aa, unidentified
MKYVGIDVHKKMCQAAVLDHDGTLLDEIRFANDLESIEEFSEKLATFRDDVKAVVESTGNLWIQIHDRLEEHGFEVALSNPAKTRLIAEAKIKTDKVDARTLAGLLRADMLPTCYVPGEELRSRRELLRHRLNLVKIRTEVKNRIHALLDKHGLRMPGTTPFSKGNVAWLRERSLGFMDDAILRSDLALLETVDEQVDVIEGKIAALAAEERRVRLLMTMTGVGYFTAMLVLSEVGDIGRFHGDKTFASWMGLAPSVHQSGERTRIGGVSGPGNRRLRWAMVECAQAAVRYDPRFRGLYERVSRRRGAGCAVVAVAHEMARIMYFMLVREEPYRGENRGLTERKLKNMGKRALDGLRN

SEQ ID NO: 46161 - protein, 334 aa, unidentified
MEKVTTLGIDLAKRVFALHGVDAKGRIVLSKTVARGELLATVAALPPCLIGMEAGSGAHAWARQFQAFGHTVGIMAAKFVTPYRRNGKNDGNDAEAICEAVSRPRMRFVPVKSEEQQALLSLHRVRQGFIEERTATINRIRGLLAEFGIVIAQRAPGLRREALQAAAELPSLARQAIDDLHEHLRRLDERIAGYDRQLEAQARLSEPAQRLMQIRGVGPLSALAIVATVGNARDFRSGRQFAAWLGLTPKQHSSGGKNRLGRITKRGDAYLRTLLVQGARSVLNTAARHTDQRSRWICSLEARRGYYRTLIAIAAKNARIAWALLSKNQPLQTA

SEQ ID NO: 46162 - protein, 411 aa, unidentified
MDVVYSRCAGLDVHKATVVACVRVPGAAPGERRGETKTFATTMRGLTELSGWLGRHGVTEVAMESTGVYWRPVYAVLETTVNVILVNARHVKMVPGRKTDVRDCEWLAQLLECGLLKASFVPPQAVRDLRDLTRLRKALIRERAHHVNRIEKTLELAQIKLGCVVTDLMGKTGRAILHALSEGRDDPDQLADAAQGLLRKKRAALREALEGRLTPHYAFLLQQYLALIDTLDAHIARLDARIDELMAPFADAVALAQSMPGVATRAAQAILAETGVDMTAFPTAAHFASWARLCPGTHESAGKRQPVSTGQGATWLRATLQEAAWAAIHTKKSYYRVLYHRLKARGSAKKAIVAVQHAMLIALWHMLKHRVPHHDLGADYFERRHTERTRRHHVHRLERLGYDVVLVEKVA

SEQ ID NO: 46163 - protein, 391 aa, unidentified
MVCVGIDVAKDKHDCCILDSDGMVRADCFTIPNNMDGFKQLLQTIRNCTKKSDKIKVGLEATGHYSYNILGFLLDNGLPTYVINPLHTNLYRKSLSLRKTKTDRVDARTIATMLLSDVDLKSYTDIAYHNEELKSLTRYRFDKVQECAKLKQSVSRLATILFPELEGLVSSIHGTSIYALLSEYPGAKQISEVHLTKLTNLLTTASKGRYGKEKAIQIREAARASIGSVMPAKSLELKHTIKLIQELASEIDEIEDSIQKIIDEFNPPILSIPGMGVNSAAVILAEIGDFSNFSSPDKILAYAGCSPSTYQSGKLTNCYAHMEKRGSRYLRHALYNATKYVCYWNPVFAEYLAKKRAEGKHYNVALSHAMKKLVRLIYALQKSGKTYLTAA

SEQ ID NO: 46164 - protein, 453 aa, unidentified
MAKGNGLTRGDRNRNRKLEAVREVLRRDRAVLAIDLGEDKQVAVVMDHECRVLGRKVARAKAHRLSGLLERAAVVAEGRGGLAGLTVVCEPTGHRWKAVMGLADEAGHGFACVQSLAVHRARESDDYTLGKTDHRDAYLIGKLAVRLECYLPERADAGWARLRHLGARRFRLVADVTSCMQQAGDLLGCCWPAPLDSAKRPLESVTWLAGMAVVTGRCCGDPRRLRKIGYGKFLAAVRRELPRWGGKGYVRHSVVRVLWDALADAGGVAAQRPGALERLGMLLEDWRETRFRLAAVEERMTAVLGELGLAALAASIDGVSALSAAVILAETGDMTRFASGRAVVKHAGLNPSEHSSATMTGRTRISRRGRPGLRAAAWRAVWGALRHNAVLRAKHAHMTGRDTTRLADGQARTACAAALLRWLWAVTTTGQPWDARIAAGQAGVRTPALAAAA

SEQ ID NO: 46165 - protein, 333 aa, unidentified
MNMHPRGGVANCDHGPNVGVDVCKQHLDVCLGSTDQRVLNDANGWSGLVALFKANNVDLVVLEAIGGHERGLVCALQLAGVNVARVNPRQARDFAKSMGVLAKTDQLDARTLRDFADVLARHRDRAKYITPMLDAHTVLLAELMTRRRQIVDMRVAEGNRLEHAHAKSTVRSIKSVLKTLDKQLADVDGEIDDQMEKHFKPQRMLLDTVKGVAPVTILTLTAALPELGKLGRRQISKLVSVAPLADESGPRKGKRRVWGGRANVRAVLYMAALVATRHNPAIKAFYGRLIAAGKPKKVGIVACMRKLLIILNAMLHDQTSWDAARHSLGTTSA

SEQ ID NO: 46166 - protein, 421 aa, unidentified
MRVGDAPAGESSLSPASPPLVSMERPAPGRESVDYAPIGTVAQSYKRREPVLGKPTRFVGLDVHADTIAVAVAEGREEVRSVGTVPNEPECVARLIRKLGGPEGLRVCYEAGPCGYSLYWRLVGLGVACEVVAPSLVPVRPGDRVKTDRRDAIKLARSYRAGELTPVWVPDAEHEALRDLVRAREVAKADQLRARHRVSKLLLRQGRRWHGKKAWTQAHAVWLSGQRFDQPARQAAYLDYLHEVRHAAERITALERAIDEAIAHVPPAMRALIDGLQALRGIGRLSATTIVAEVGPLTRFGHPRQLMSYSGAVSSECSSGGRTIRGAITKAGNAHLRRILVEAAWAYQHPPAVWGALKLRQKGLSGEVKSIGWKAQNRLHTRYKRLQARGKPRQQVMTAVARELAGFVWSIGQQVQREHGA

SEQ ID NO: 46167 - protein, 324 aa, unidentified
MLPTLGIDISKDSFHVELSINHKLRHRRFANRKEGFAELGAWLAKHKTTSVHACVEATGPYSEALALYLHEQGHPVSVVNPAQIKAFGQSELLRNKDDRPDAGLIRRFCEKQQPAAWTPPPAHLRELQALTRHLENLIETRQQQINRLEVTNAKPVVKSLRKLVTQLEAEIKRTERQINDHVDRHPDLKQQCQLLESIPGIGKRTATRLLAEIEDISQYKSARQVAAYAGLTPRNNRSGTMRGPTRLSKTGNARVRKALFLPAMVAKRHNPVVRGFCQRLARHGKNKMQLVGAAMRKLIHIAFGVLKSGKAFDPDHELLFNSAS

SEQ ID NO: 46168 - protein, 345 aa, unidentified
MSNVPVFVGLDYHQDSIQVCVLNQQGDVLLNRSAANDCQELARIVRPLGVVQRVGIEACCGAADLGEQLVEQLGWNVSLGHPAYIAKIKSSPDKSDFSDGRLVADLTRVGYLPRVWLAPANIRELRQLVNHRQRLVDHGRALKLQVGAILREQRVKIDKDRGSRWSKAWTASVQDNPRLSRHARWIVDQLLDDLKYTSGKIVKAEQQLREATQGDRVIEKLMKQAGIGEVTAWVLRAYVGEFGRFKTAKQLARYCGLSPCNASSGNKVADAGLIDGCNKLLRLTVVQAAHRLIRTSDRWGKLADSMRSRGKPACVIVGTVGNRWLRTLHHAMKESMIEQGVTSVN

SEQ ID NO: 46169 - protein, 384 aa, unidentified
MNNSFSVAQLIVAWVGLDWADQKHDICLRASGSAEVERTVVEHQPEALHSWVADLRRRFPQGQVALALEQSRGSLFYPLMNYEFLVLYPLPPKALADYRKALYPSGSKDDPTDAQLLLEFLRQHPERFRPWVADDVQTRQIALRSEHRRPRVDDRTALTNRLTALLKGYFPEARGWAGDLAAPRAWDFLAQFPSLERAQRASRLEVLKLYRAHTRRTPEQLEELGEQIRTALPLTTDRAVIATSGLMVQTLVEQWRVVQAGVERLEHQLRDLFAAHPDHEIFPSFPGAGKARAPRLLAAWGSDRQRFAGADNRPCFAGPAPVTVRSGKSEWVHRRFAGPSFLCQTFHEFAAPSRLRSPWAKAYYQQMRERGADHHAAVRALAYK

SEQ ID NO: 46170 - protein, 410 aa, unidentified
MKLEQTSVVIGLDWADREHTCSLHQPDGKKLSLITVAAAPEIFGRWLDELRQKFPQGQIVVVIERPDGAVVEMMRERAGFVIVAVNPVVLHRFRQAFAPSGAKGDPGDAALLAELILTHPEKFEALEAQDPQLQKLGALVQERRNWVDMSTGLVQQLNDVLKKYYPQALELTGENLGSPMTLAFLRRWPDLAAVKRARWSTLERFYFHYHSCREELLARRRELHANAQSVSEQECYIAPLRLHMQAIIGQLEALIPSIEHFDEAIAEIYHGVEGRQVIDSLPGAGKVMAPRLWVACQQAGPEATALDLALLSGIAPVQKQSGQSKVVSFRHGRPRFLHQTWTEFAYHSILGCGWAKAYYNGRRAKGHGKHASLRALAFKWTRIVARLWRDQVPYDDAFYTCRRSARQTAA

SEQ ID NO: 46171 - protein, 438 aa, unidentified
MKKTNIYQNQSQELLHLFEEAGSNDKVVCVPMDYAKNDHLVMFLNGHGDILRKPFSVKNSPEGIAYIDEQVTRFCRRRGIKKKHVFFGGEDANSFAKNFVSTLRCKGFVVANVNAHDAKKQRSNVQASTDRIDLMGIATMLLSCRANCCTAQSGIYRNLRILVRHRRRLVQMLTEVKNRVHGIVDELFPGFLNENNSGIVPFTQSSLYLMQDRFSPKQIRRRRRQKLIEILKRSGTSKAEHTAAKLQQYAGKVLHAPVEHVDTMQLSLAQHIKHIRCLKESVAQMEKEIALNLAQTQGAFLTSVRGIGLVLAAGVTAEIGDVNAQKPLNNLASYSGIIPRVKQTGGLDGKTYTGPVAKRCNRILKDYVVKSAYHIGLHGPPELMADYKRRDASGQHADFGIGRRYLRMAKSLMRTSKFICQRICESKILHGKTAQGTI

SEQ ID NO: 46172 - protein, 351 aa, unidentified
MRRLYTRQHRFYCGIDLHARLLAICIVDHDTASVVCRTQIPADKQMLLDTLAPYRADVVVAVECLFAWYWVADLCAAEKIPFVLGHALYMKAIHGGKAKNDDIDAEKIARLLRGGNIPVAYVYPKGLRETRDLLRRRMHLVHQRAGLITHIQILNAQNNLPDFKKKLIYARNRAELKAAERFLNPHVRKSVEVDLALIDALDVQIGDLELYLERTAKIEDPTTFHLLKTIGGVGKILGLTMLYEIHDIRRFSSVGEFLSYARLIRCTHESSGKKLGVGGAKIGNAHLKWAFSEAVCLLIRNYPAVKAWQAKKEKRHGKKKTLGILAARLGRAVYHMLRKRVAFDVRRFLGQ

SEQ ID NO: 46173 - protein, 362 aa, unidentified
MFSERTSVGLDVHARSVVAAAIDGVTGEVTRTRLAPSYEHIQSWIADLPGPAAVAYEAGPTGFGLYRALTDAGVRCEVVAPSKLQRPAGDRVKTDARDALHLARLLWLDEVTSVSIPSVYQEACRDLVRAREDCRGDLMRARHRLSKLLLRHGIVYYEGAAWTDAHDRWLRAQAAPQLPTVATRMAFDSDYEHVLMLQARRRGLDSAIEGIAADCEFTPVVRRLSCLRGVGTLTAFALAVEIGDWNRFTGNTIGAFIGLVPSESSSGSTRSQGPITKTGNTHVRRLLVEAAWHHRTKYQARAVMRARWDKAPAARARGHEGNRRLHNRWVDFLARRMRSTVANVAIARELAGWCWSLAVMDD

SEQ ID NO: 46174 - protein, 287 aa, unidentified
MHKSTVTARRPGGEVVLLPFDVEHTAEGLKKLITKLRQLDGEIRIIMEHTGMYWRPIAMTLKEAGFYVSVVNAILIHNFSDNSIRNVKKWCKRTGYKFSASDAERIHAIARNAVATLPKNDSTKLLITQATNSLNAIYDSLQAIRTEMDRLASMLPEYELVMGMEGIGKVTGPQLMAEVGDVRRFSHKGALVAYAGVDASPYQSGSFDSKSRHVSKRGSPHLRRVLFVIMSMTLIRANTANPVFCFMDKKRAEGKHFYVYTVAGSAKFLRIYYAKVKEYLNALEETA

SEQ ID NO: 46175 - protein, 377 aa, unidentified
MKETTRFVGLDVHAETIAVAVAEPGRGEVRSLGIIPNDVASIRKLIHKLGKKDLRVCYEAGPTGFALYWQLAELGVECEVIAPTLIPKKAGDRIKTDRRDALKLARCFRAGDLTGVWVPDQAHEALRDLVRAREAAKYDQHRARQRLSKFLLRTAKKAPPGGTWSQKYVEWIRTLKYDHVAQQATLVDYLSEVDHASERIRRLEQAIDDAVKQASPVVRAVIEGLQALRGVGKLSATTMAVEIGTFSRFESAKRLMAYCGVVPSEHSSGNTRRQGAITKTGNAHVRRVLFESAWGCRHRPNLGAALKQRQRGLSATTNEIAWKAQHRLHRRYVALSARGKPSPKVLGAIGRELLGFIWAIAVQIESEYASATKKLAA

SEQ ID NO: 46176 - protein, 361 aa, unidentified
MKTIRQCVGIDCSKDTLDTAINFLDEMFQTTVYATEVFENNDKGFKNLIKWMRKLCLKELPYQVVVEATGVYHERLAYAMVNNGFSISVVLPNKIRNYCRSTDIRTVTDKICAKQIAEFGLVKKLDNWVVPDKVYNHLKGLTRERTQLQEEKTAVSNQLHAIKHAALVSSTTVHRSAKRIKFIEQQIEQIEGEIKNVVNEHPELKEKVEKICSIKGLGLITVVSIIAETNGFNLVRNQKQLVCYAGYDVIVKDSGTSVKSKPRISHKGNKYIRRALYFPAITAVKYNAPHTNLYNRLFDKHQIKMKGYVAVQRKLLVLIYTLWTKNEAYNPSYMHNSIKNLEQPIEAALTELDHVRSLNLV

SEQ ID NO: 46177 - protein, 369 aa, unidentified
MGEYSEAFVAFDVAKIKHAVAVAEGGRTGEVRFLGEIDNREGPIERTVKKLAGRYGRLHFCFEAGPTGYGLYRQLQALGHDCMVVAPALIPKRRGERVKTNRRDAVTLARLHRAGELTGVWVPDAVHEAVRDLVRAREAAADDLRRKRQQFLSFLLRHSRIYSGSGHWTLAHRRWLANQAFEHAAQQIVFQDGIDAIEDAIARLRRLEEQLVAIVPSWSMAPVVEAYQAMRGASFLVAVTFAAEIGDVRRFDNPRQLMSFLGLVPAESSTGDTVRRKGLTLAGNRRARRALVEAAWTYRYPARVSETLRARLEGLPKAVRDIAWKAQIRLCARYRRLRATGKKLPVVVAAIAREMAAFLWAIGREVAPG

SEQ ID NO: 46178 - protein, 400 aa, unidentified
MISVGIDVSKEKSTVCILKPYGEIVSKPFEVYHVEQELSELATMLLRLNDEVRIIMEATGIYHLPVLSYFKERGFFVAVINPFEMKEYRCQGLRRVKTDKQDAIAISHYGIDHWYRLKEYEAQENIYTELKLLGRQYCHYMRMREESVLELTHLLDYTMPGIKTLLQGWNERNGKDKLGDFAEEYWHYDNITKKSEKQFIDSYLKWAKKKGYHQNQDKAIKIYALAKEGIPTVSSNTPSTKMLVQEAVRVLREVDHTLMTILTQMRSLAKSLPEYPIVRAMGGVGDVLAPKLIAEIGDVRRFHSGKALIAYAGIDAPPYQSGRLVGTERKIFKRGSSNLRKIGYEVMRSLKTHKAPEDADVYEFILKKEREGKSKRAAKIAGLNKFLRIYYARVMEVYRK

SEQ ID NO: 46179 - protein, 342 aa, unidentified
MEITTVGIDLAKSIFQVHAVDAAGHVVVRKALRRAQVVPFFAKLPRCLVGMEACGTAHHWARELMSLGHDVRLMPPAYVKPYVKRGKTDANDAAAICEAVTRPSMRFVPVKSTEQQAALALHRTRDLLVKQRTQLVNMIRGLLAEFGIEMARGLRHALELAARLSAGDAAEVAPLAQRVVTGLADQIGAVQIQLTRLEKELLAWHRDSDLSQRLATIPGVGIVSATALAASVSEPERFRSGRQFAASLGLTPLQNCSGGKERLGRISRMGDCYLRRLLVVGMTSLIRRAKTTPTSVDPRLPALLQRKPVRVVTVAAANRTARVAWAIMTRGGTYRAPAATAA

SEQ ID NO: 46180 - protein, 417 aa, unidentified
MRSIGLDIHRDFCEVAIAEAGEIRSAGRIGMATEELELFAQSLGKDDQVALEVSGNAWEVARIIRPHVARVVVASPSDTGIRGARAKTDRLDARALAKLLAAGTLDSVWVPDEATRAMRRRLGRRSQLVRVRTKAKNEIHGALMRRLIEAPKVSDLFGVKGRRWLEAVELPICERETVDGCLRQIDFCDAEIAGIERVIATEALASPEIRRLMSVPGVNVITAASFMAAIGEIGRFPDRRKLVAYLGLDPKVRQSGASGAARGRISKQGSASARHALVEASWSTIRNPGPIRAFYQRIRARRGHQIAITAAARKLACLFWCMLTRGEDYAYAQPSLTQKKLRRLELRAGHPKGEVERGTWSTNAAMRKAERALAAQGEAAYKRTVADWQRGQKEGADATPGRASKAARQDSAPEPAL

SEQ ID NO: 46181 - protein, 348 aa, unidentified
MKELSAQVRVVAIDLSKHVFHVAGEDGCGKVIYEGVCKTRERFAAFLKTLRSDQQVLMETGPGAQSWARELLSRQIEAKVLPAQLVGQHRSGAKNDRNDALAILRAGRDTAIHAVPIKSAERLALQALHRVRSRYVRNRTAVSNEIRGLLLEQGVALVKGEQALESGLRRVLGGTQVPLPRRLRELIAELSAEWDQLGRRIERLTAELTASAHADPVAQRLMTVPGIGPISAAAMVCKDPQPERYASARHFAASFGLVPDQHSTGGKTRLGGLSKRGDPYIRSLFIQGAQAVLRQVKPPAESASENRLQRWLRHHGRKGAAVRLANRNLRIVWRLLREGTDYHAETNA

SEQ ID NO: 46182 - protein, 339 aa, unidentified
MRKDEFKCIGVDVSKKTLDVALFRGKVDWNEGHIKVDNNSSGYKELRKWLRLKKAEKKQLRICMEATGLYTHDFRSWLEQEGITYYVVDPKRMRHFAPPQSIKGIRQTKNDKADAFRIAIYCSLFHESMEPSRLPSAAYFKLKRLLAERRQYVKQSVLYKQQLHDISVYDSVGSRIRKEDEVKNLNANIKQTDAEMKEIIDSDLTIKRNYDLLTSIVGVGIVVAVTTIVLTENFTVFASPRKYASYIAIAPFPHESGTSVRGATRVSKQGFRQAKADLSISVLSAMSHDSELKEYWLRKKAEGKHAGTILNAIKFKIVLRMFAVVKRGTPYVNTKGYRR

SEQ ID NO: 46183 - protein, 396 aa, unidentified
MFVTREGRDRFSRSLDWPVHTLGRGRAISATEFRENRMEGKEKVTRPVIAGVDTHKDLHVAAVVDQYNRVIGTQSFAATRQGYRQMLIWMRAFGDLQKVGIESTGTYGAGLLRFLQAASVDVLEVTAPDRQDRRRRGKNDDLDAQNAAHAAFSGRRTVTPRTRDGMVESLRILVACRKTAVSARRVALQMLHNTIVCAPDRLRDQLRQMTRMQLIRTLAASRPDLTAYRDVESAYRIGLKSLARRYVELHDEIADLDVMIKAIVAELAPELISRSSIGSNSAAQLLLTAGDNPERLKSEAGFAALCGVSPVPASSGKTVRHRLNRGGDRAANSALHIIAIGRLRTDEKTKAYVARRVSEGRSKLEAIRALKRYIAREVYGIITRRQREIHQTCIAA

SEQ ID NO: 46184 - protein, 310 aa, unidentified
MDVTYAGVDVSKATLDVAVSNQKAVKSFPNDENGIAQAVRYLKEVSPVLTVTEATGGLEKLLAVSLVEAAVPVVVVNPRQVRDFARAKGKLAKTDNIDAAILSAFACDIHPEVRALTDKQTEEIKAMMGRRQQITAMITMEKNRLHSAGPRVKPSVELHIKWLKGELKSLDKELEDMIQDSPAWREKDSLFKSVPGVGPVLSMTLLGVFPEMGRLTRKQIAALAGVAPFNRDSGVYRGKRTIKGGRVKVRPPLYMAALSATRSNPVIREYYNHLLQKGKAKKVALTACMRKLLVILNAIVRDNRPWRYAY

SEQ ID NO: 46185 - protein, 433 aa, unidentified
MKVMYERVAGIDVHKDMIKVAVRSPGEKPWTRKTEILEYRTFYGVLQQTAADLRRRGVTHVVMEASGVYTEPVYYALAERDFTEVAVINPAHAKALRGHKTDAKDCARLAELFECGLLRGSYIPPAELKEVRDLTRYRIKTVQARTSEIQRLGKALESAGIKLGSVASSITGTASTAMIEALIDGERRGAVLADLAIGRMRTAGKLADLSMALAGRFTDHHALLCRLHLDRIKVFDDAAGGLADQIAGKAAPWQRELDLLKTLPGFGDTVAQAWLAEIGPAPHLHFSSHEKLASWVTLCPGNNISAKKRKHGRTGDAGTYIKPMLIQAAWSAIRVRGRLQARYNRLVRRFGGDKNPAAKKKAITAIAHTLLKIAYQVLMSGTPYQDPGADFYTRRESPEQKQAYLERQLQKLHPGCTVTITVSPPEAALPPGA

SEQ ID NO: 46186 - protein, 409 aa, unidentified
MTGVACGIDWAEDHHDVAIVDETGAVVVAERITHDAAGLTRLLELLAAHDRAPRALPVAIETSGGLLVAGLRAAGRMVFAINPLAVSRYRDRYRSSGGKSDAFDAMVLANVLRTDRSAHRPLPQDTAQVQALRVLTRAQQDAIWERTELCNRIRALLKSFFPAALAAFERGGKHQLHSAACRVLLQRAPTPAAAARLTTTQLAAALRRAGRSRGIQAEADLLRGLLRQAHLTQLPEVEQAMGLQLRGLLRQLEAVCQTLAELEAAIEGAFLAHPDASVVTSFPGVGVQLGARMLAEIGDDRTRFVDAKALKSFAGAAPVTRASGKSRFVHARRAKNNRLASAGYVWALAAVRHDPLWEQRYRDRRTAGDRHVAALRNLFNSMLGKLHHCLTTAQHYQTDQAFTGRLLAA

SEQ ID NO: 46187 - protein, 349 aa, unidentified
MVVLGIDAHKRTHTVVAVDEVGRQLGVRVTESTSTAAHLALVVWADRFGPHRRWAVEDCRHLSRRLERDLLGAGEQIVRVPPKLMARARDSARTYGKSDPIDALAVARAALREPGLAVARLDGPERELRLLVDHREDLVAERTRAVNRLRWHLHELDPDWDPKPRSLRNRKNITAVAARLSGMGGLVARIAADLTARIAALTGDINALETEITARVRVLAPSLLTLPGVAALTAAKIVAETAGAGRFRSKDASARHNGTAPLPAWSGNPNRHRLSRTGDRQLNCAIHRIAVTQKRRHPDAQAYLKNRLSAGDTGTEALRALKRRISDAVYRMLLADAKGSETTPASQAA

SEQ ID NO: 46188 - protein, 345 aa, unidentified
MELHTIGIDLGKTVFHLVGLDLRGEVVVRKKFSRTQLLRFTANVHVGLIGMEACGGSHFLGRALREQRHEVRLIPAQYVKPYVKTNKSDYIDAEAIAEAVARPTMRFVPIKTDDQLDMQSLHRVRERWVMRRTAVINQIRGLLLERGITLRKGRHHVDAALPLILEDADANLSGAVRLLLTQLKLDLDQLSVRIDEADAVIQKTAQENEACRRLVAIPGIGPVTATALIAAIGNGGAFHKGRGFAAWMGVVPREHSTGGQQKLLGISKRGNSYLRRLFVQGARAVLQQRTKQSSGLSAWLAQLTSRTHRNVAAVALANKLARIAWAVLAKNEQYRPSVVADVAAA

SEQ ID NO: 46189 - protein, 359 aa, unidentified
MDNNEDGTRHVVGGVDTHKDLHVAAVVDGQDRVLGTACFATTRQGYRQMLVWMRSFGDLRRIGIESTGSYGAGLLRFMQQAGIDVLEVTAPDKHDRRRRGKNDDLDAQNAAHAALAGRRTVTPRSRDGMVESLRVLTVCRKTAVAARRVAIQIIQTTIVSAPDGLRDTLRSMTRMQLVRTLAAWRPDLTAYREVEAAYRISLKSLARRYLELHDEIADLDAMISAIVDDLAPELIARNSIGYTGAAQLLLTAGDNPERLRSEASFAALCGVSPVPASSGKTIRYRLNRGGDRAANSALHIIAIGRIRTDSATKAYGARRTSGGHSKLDAIRALKRYIAREVFHIITRRHREINQTRIAA

SEQ ID NO: 46190 - protein, 323 aa, unidentified
MSVVVGVDVAKRSFDIATPLANGKVRTKARLANDSKGFEQFEAWLQAHAEPDAWVVMEATGTYHEALAEYLHARHYRVCIVNPAVIAKFAEFELRRVKTDKADAKTIAAYAQHKGDSLRQWEPEPEAQRRLRALVRRLDDLKEMRQMEQNRLDVAPLTVQASIKAVIGHITDEMEKTRKAIEQTIDDDPDLRRRRDLITSIDGLGETTAALLLAELGDPLKYESPSAIVAFAGLNPMVHQSGEKVGQTTISRVGSSRLRAGLFMAGTVSMRFNPVIKALAERLNTRRKAYKQIVCAAMRKLLHLVYGVVKSDRPFDPHIALAK

SEQ ID NO: 46191 - protein, 331 aa, unidentified
MISGLGVLLGTRSFPTTASGYRQLLDRAGGFGTIRRAGVECTGSYGAALARHLSANHIEVIEVNQPDKASRRRRGKTDTVDAEAAARAVLSGRARATAKAGDGPVEMLRIFKLAKTSAIKSRTQAINQLKAVLVSADPQLRESLSGLRNPTLIRRCAQLDTSPPHDAPTVAAYTLALLARRILELTTEIDDLNQQITAILTRHAPTLLQRNGVGPDTAAALLIAAGDNPERLHSEASFAALCGVSPVEASSGKTHRRRLNRGGDRRANSALHTIVLSRLRWDRPTRAYLARRLTEGKTRREAIRCLKRYVARELYRLIAPPTEPQRQTPAA

SEQ ID NO: 46192 - protein, 350 aa, unidentified
MLYVGLDLSRKRLDFHAADSDGEPVAVGAAPPDADGLRHLVKRLGDAEEVLAVIETMNGARFVHDQLELLGWDVRVADARKARALAPLACKTDRIDAWVLAELARRDLVPEVWLPDPTVRAERERARFRLHLARHRSSLKNRIHATLIAFGHPCPVSDLFGVGGRQLLERLALPEAWRETLETSLYLVDELDEEIHECERELKRLGADHPYVPLLTTIPGIAWTLGYTIAAEIGDIRRFPSPVKLIGYTGLCPRVYQSGESDRRGPLRKNGPRYLRWALIEAAQHAARSPAYPYRAVYEQTRARIGRNRGGKVAKIVIARKLAEAIWHMLNRNQPFNPCSGKRLVSLTAN

SEQ ID NO: 46193 - protein, 343 aa, unidentified
MEYFAGIDVSLEQSSVCVVDGAGKIVREAKLASEPEALVGFFRGLETGVTRIGLEAGPLSQWLYAGLAAAGFEVVLLETRHVKAALSAMVIKTDRKDARGIAQLLRMGWFRPVHAKSPAAQEVRALLVARKLLQTKLLDVEFSIRGILRGFGLKMGEVSKGRFAARVRELAAGHSTLERITEPMLRAREVLRTEYAKLHGEMLAIVKPDPVCRRLMTVPGVGALVAITFKSAVDDPARFARSRVLGAHFGLTPRKYQSGETDVTGAISRVGDAMVRMALYEAAHIMLSRVTRFSSLKRWALDVVRRRGLKRAKVALARKLATVLHRMWVDGTSFRWGKQAAPV

SEQ ID NO: 46194 - protein, 343 aa, unidentified
MKLSYVGVDLAKNVYQLHGVDRHGKAVWKRRLRRGQWLQVLTDTVEPGCEIGMEACTGGHHWARELQSRGYTVRLIAPQFVKPYVKSNKNDANDAEAICEAMSRPHMRFVTVKSVEQQDIQATHRVRTELKDHRNAKANQIRGLVAEYGLVAPQTLLALRRAIPEWLEDAENGLTDYFRSLLHGLWGDLLTLEGRLKELDKEIEQLARSNEVAKRLQQLRGVGPIVATALVATVGDGAQYSKGRQMAAALGLTPRQNSSGDKHRLFGISKRGDVYLRTQMIHGARAVVSQAKHRDDPLSRWVTDIAKRRHPNVAAVALANKTARMAWAMLRNDTDYDPGLGSC

SEQ ID NO: 46195 - protein, 407 aa, unidentified
MGVFVGVDWGGGAHAVCVLDAQGAVLDRFEADHDREGLGRLLERLARHGEPGGTRVAIERPSGLLVDTLVGAGFVVVPIHPNLVKACRPRYRAVSAESDPGDAYILADILRTDGHRSRPLGPQSDAIKALRGLVRGRDELVATRVALANHPAALLDGFRPGAAAIFADVASPIALAFVERYPTPEAAARLDVERLAGFLAQHRYCGRRSPEALLARLATAPRGRAGEAESGAKGELVRALARTLQALVAEIARITGRIEHAVAELPDGRIVMSFPRAGRACAAQILAELGDVRARFPTEGQLAAEAGLAPVTYRSGKSRAVGWRWACDKRLRAALACFADNSRRESAWAADVYRRARARGCDHPHAIRVLGRAWARVLWRAWTDGQPYDPARHAAAKPFLAPAAATG

SEQ ID NO: 46196 - protein, 417 aa, unidentified
MSIDPSTSAARVTAGVDWAKDDHAICVVGGQGEALERFTVRHDAAGLRQMAARLLRAGVLQAGIERGDGPVVDALLQAGLTVFVIPPGQVKNLRSRYGPAGNKDDRFDAYVLAGVVRTDARRLRPMERDSEQTTALRSTVRARRDLVGHRVAAASQLRAHLEIAFPAAARLFAGIDSAITLAFLSRFTTQEQADWLSPLRLAAWLKSVAYSGKTDPAVLHARLLAAPRGHAGQHAGVHAGTTLALVAVLRALNTQIQALAASIAAQLAAHPDAEIFTSLPRSGTIRAARLLAEIGDARGRFPTRDSLTCLAGVAPSTRQSGKVKSVTFRRGADKQLRDALCDFAGDSRRASPWAADLYDKAIARGCDHPHAVRILARAWAHVIWRCWQDHAPYDPAAHNSLQALLNRDQPSAARPRG

SEQ ID NO: 46197 - protein, 421 aa, unidentified
MLKIHRFNCAGLDVHKNLIVATIGITDKKTRVTEYIQKDFSSLNFDLYNLKNWLIEHECFDVCMESTGKYWIPVFNVLETEIKMNIVLVHPKYVKAIKGKKTDKKDSKWICNLFKHDLLKSSFIPPKDIRELRDLSRYRFKLICMRTSERNRYQNSMTVSNITLASVVSDPFGKTAKAIMNEVLSTEAIDEAKITKLIHGSCRNKDKIIESLKNSKIEPDQRFKMTEIQSHMNELDKHIEAVEIEIIKRASRYFDDFIHITEIDGIQLMSAILIISEIGVDMTQFETDKQLCSWAGVSPANNESAGKKKSVRISKAGQYLKPVLIQCALAAIKNKNSYFGQKYMRIKKRRGHKKAIIAIARMMLVSIYHMILTGEKFNPSDYESFKDPKPQREKNNYTVETALDFLKSQGFDVSSIQEIPK

SEQ ID NO: 46198 - protein, 341 aa, unidentified
MKTTTFGLDIAKRAFQMYWVEAETGEIVNRRFTKQQLIEFLGQRAPGRVALEACGSAHWWARKIVALGHEVVLLHARFIRPFVQNNKTDATDARAIWTAAQQPGMRSVAPKTADQQATLALHRMRSLLVKSRTMQVNQLRGLLYEFGVTLKVGRVAGLAEVRERLHEIEQVVPGALFCALCDQLQHIDRIDGEIKKLERQIVAWQRQEAACQRVAAIPGIGPLTATALVATIGDPAAFKSGRELAAYLGLVPRQNGTGGKVRLGAISKRGDNYIRMLLIHGARAVLFKSKSKGVWCERLLARRPVNVATVALANKMARTAWALLAKDRTYQKDYAAMQKVA

SEQ ID NO: 46199 - protein, 462 aa, unidentified
MARREVKPHILSAHKLAASMPIVNPNAAAIDVHSDNHVVCVPADRDTKNVRTFGANSCDLLQIAAWLKHRGITTVAIESTGIYWIPLFELLEAQGFEVCLIEPGQASRRGARPKTDVLDAQWLQRLHSHGLLRGSFRPPDEVIALRAYLRQRLMLISYASTHIQHMQKALEQMNVKLTEVVSDITGQTGMRIITAIIEGERAPARLAAMRDARCKNDEATIARALEGTWRDEHLFELRQAYELYRTYQMKVTECDGQIEQALARLPDRSAGAKPQRKVRKSGRKPNNLRFDGTEPVFRALGVDLTAIEGIEAPTALVILSEIGVDVSKFPTEKHFTNWLGLCPNHQESNGKRKSRRMRKGKNRLAIALRLAARSLRCSQSALGAFFRRMNSRLGLKGAITATAHKLARYVYAMLKHGEAYVSQGLEQYEAAMHERIERTLRKRARALGYELIPRQPLSPEVP

SEQ ID NO: 46200 - protein, 345 aa, unidentified
MTTMPQPATTPVTVGVDTHADVHVAVATDSFGRRLDTTSVVTTPAGYAELLGWAQRLGQLQAWGIEGTGSFGAGLTRFLRAQGQVVVEVNRPDRQARRRRGKSDPLDAEAAARAAQAHQGSVPKAGDGQVEMIRSLRVARATAMKARTQAINALKGLLVTAPAELREQLRGLSAVRLVQAAAVLEPGPVTTPMAAARLGLRTLARRYQALSAELAVLDAELDRLTATAAPRLVALFGVGSDSAGALLVAAGDNPDRLRSNACFSMLCGASPIQASSGKTQRHRLNRGGDRQANAALYRIVIARLRHDQQTKDYLDRRIREGKSKKEAIRCLKRYVAREVFAVLRP

SEQ ID NO: 46201 - protein, 485 aa, unidentified
MAKRKQSNFERINLERMNRKQRRELGQRLEKSDPGLEIVHPHAAGIDVGNESHFVAVPGNRDPQPVREFGCWTGDLVKMAAWLKGCGIETVLVQATGVYWIALKDIVEQQGIEVVVANAQHTKNLPGRKSDVQECQWLMKLHTYGLVRGSFQLAEDMQGVRAVWRLRGRHVEEAARSVQHMQKALTQMNVQLANVLSDISGKSGQAIIGAILEGERDPGKLAELCDRRVQASTEEVAESLRGNWRDEMLFELSQARESYRFAQQQIQSCDRKLESYLKVLPTRQVEIMLPAPPVPSPATPVRARQAPRKQGNTPEIPGMRDELVRICGVDLTTIDGISIVTAQTILAEIGTDTSRFRTEQAFVSWLGLAPNRDISGGKVIRVVRRKVPSRASTALRLAATSLKSSDSYLGARYRHLQRQLPSKASAVKAMARYLGVLVYRLMTKGQAWVDQGAARFEQKRKALSLATLQARALANGYRLVPVTAS

SEQ ID NO: 46202 - protein, 412 aa, unidentified
MLLLVGDDWAEDHHDVELMDASGRVLARARLGEGAAGMARLHALVGAQFGESAGEDAEVRVGIETDRGLWVTALVAAGYRVFGVNPLQVARYRDRHGVSGAKSDTADAHVLADMVRADAHQLREVAADSPAAQAVKVVARAHKTLIWERARQADRLRHQLRDFFPAALEAYGELGLDSADVLGLLAKAPDPASAARLTTAQISAALKHAHRHDIAAKTAAIRAALRSPQLAQPAPVTAAGAAVVRALAAVITALGQQVKALEGQVEAHFRGHPDAEIILSQPGLGPILGARVLAEFGDDPHRYATAKARKNYAATSPITRQSGKSRYVLARYVHNDRLLDALTRQALCALTASPGARAYYDQLRARKTSHQAALRQLANRLVGILHGCLKTRTLYDETIAWPTPDKQSPAAA

SEQ ID NO: 46203 - protein, 338 aa, unidentified
MVYGAIDLHMRYSQIRIVDETGAVVREQRVVTCRERLVTVFAGLGPMRILVETGTESEWVAQTLEAAGHEVIVADPNYAPMYGDLQRRVKTDRRDVAALAEANRRGWYRAAHRTSAAQRGTRQVLRARRQIVQMRSGAVALIRSLVKQDGYRLRSCGAERVPARLAELRLPATLRAILAPLVRMIETATTEIATLDTALEARAAADPLVQRLQTVPGVGLVVALTFRAQIDDVRRFRHAGQVSAAIGLVPREDSSAERRQRGHITKVGPRELRSLLVQAAWACWRSKQSATLRAWVEQVAARRGRRIAVVALARRLSRLLYALWRDGTTFDVKKLATA

SEQ ID NO: 46204 - protein, 346 aa, unidentified
MMVIGCDYHPSWQQICWLDTLTGETEEKKLEHASGEAEKFYRSLPGPALIGMESTGNCQWFVEMATTAGHEVWIGDAAKIRASEVRQQKHDRGDAALILKLLLEGRFPRIWTPSGEQKDLRQLLLHRYKLVRMRAQVKNELQHLAMNQGVTKKRKLWSKAGEIVLRELPLKPWASRRREDLYKVRKMFNEWIALLDAAVVEAAEKDEKAKLLMTQPGVGPITSLAFVLTMGDVSRFPRGKQVASYLGLIPREYSSGGKQRLGSISKQGNRFMRMLLVEAAQSVVRYDAGFRNEYLHRCHKKAKGVAKVAAARKLAVRLYWMLRTNTAYPEIVRVESSPRVAVVGAS

SEQ ID NO: 46205 - protein, 352 aa, unidentified
MDHYAGIDVSLECSSVCVVDATGKIVREGKVASEPAALIAWFGSLGFGLVRVGLEAGPLSQWLYAAMRDAGLAVELLETRHVHDAFSAMPVKSDRNDARGIAQLMRLGWFKPVHCKSLAAQEVRALLTARRLLRSKLHDIEMSLRGILRGFGLKVGKTTKRCFAGRVRDLVSGHAELETIAQALLAVHAVLLREFNGLEKRVRIMARSHAKARLLMTTPAVGPIVALTYAAAIDDPGRFTSSKAAGPHFGLTPRKHQSGETDRTGRISKIGDAAVREALYQAAHVMLTKAVKGCSELKSWAMRIARRAGMRKAKVALARKLAVILHRMLADGQAFNPAASAKTATKTATAAA

SEQ ID NO: 46206 - protein, 456 aa, unidentified
MAHRSKAKGTRRRTKLRVIYTRAAGIDVGSTFHVVAVPPELSAEPVQTFQSFTGDLYRLASWLVDIGVTTVAMESTGIYWIPVFDILEAHGLEVLLVNAQHVKTVPGRKTDVNDAQWIQQLHTYGLLRGSFHPAQDWSALRVYLRHRERLVEYAAAHIQHMQKALMHMNLQLHHVLSDITGLTGMKIMRAIVAGQHDPAVLATYRDARCKASEETIRAALTGHYRREHVFALRQALELYDSYQARIEACDQEIQFTLESLQNDAIAIETLPAARHKKQQSHEPRFAVREALFRVLGVDLSQIDGFSAYTALKLVGECGMDMRRWPTEKHFTSWLTLAPGNKISGGMVLNTTTRRSANRAAAIFRLSAMNVGQTNTALGAFYRRLGARSGKAKAVTATARKLAVLFYNTLRYGMAYEDPGAAYYEDRYRQRVLKGLHRRAKQFGYQLTEVGTLEGVS

SEQ ID NO: 46207 - protein, 335 aa, unidentified
MLFSITIGVDSASEKFDWHALDSQEVELGYAETKNTSTAIQAQFTTLCIDHKVRPENVLVCIENTGLYSLRLAYELHLEKFSVWMVDAFHLNHSIGRVKGKTDKLDAYRIAKYAVRNTKDFSAFTPDSKALAKIKTLMTQRKRMVKAKNLLMVPINEERKHSPYDLSDCYEETDSVVALAKSMIKAQDARIDKALKTSPEHSQTYATLQSAPGIGPITARLVIAKTNNFVNGFDGRKLCSLAGVAPFPKESGKCLKKRPGNGSGSDRELKSCLYLGMLRQIKMDNKMGKYYAKKIAEGKHHNSVINAMANKILHTVVACLRKGVMYDENYTHKLA

SEQ ID NO: 46208 - protein, 348 aa, unidentified
MFLIGCDFHPSSQQVCWLDRTTGETEEKKLIHAPGEAERFYRQFPAPTLIGMESTGNCQWFVEMVTALGHEVWIGDAAKIRAGDSRQQKHDRRDAQLLLRLLAEGRFPRIWTPSSGQKDLRQLLIHRYKMVRLRAQAKNGLQHLAMNQGLQKKRHLWSKKGQKLLRELPLRPWASRRREDLLSVMKMLDQQIESLDLAVIEAAEKDPNARLLMTQPGVGPITSLAFVLTMGDVSRFQRGKQVASYLGLVPREYSSGGHQRLGSISKQGNRFLRMLLVEAAQVAVRCDPQMRQEYLHRCHEKPKGVAKVAAARKLAIRLYWMLRTQKQYPEIVSIESSSRVPLVVRHGG

SEQ ID NO: 46209 - protein, 343 aa, unidentified
MQRPEYYVGIDVASTSFYATVGKTIKDEWCLLEKPRKFENEYDSLPQFLDWMQQHKIKPQNAIICMEATGVYNEVLAHSLVANGYALAIQPPLEVQRAFKPVGHKSDPVDSSQIAEYAYRFFDELHLWKPREEVLEQIKTLLATREQFSKQKTAHLNALKALQRKVVRTPLAEQVHEKEISQLKVHIYAIELEIEHLIDQDPTYRQFVGLLMTIPGVGLLLAANLLVTFQSNPQCFQPKSLAAFIGICPYQHQSGSSVHGVTTSRHYGPPALRRLLFLAALSVRTHQPQFRLYFYRKLQEAKPKKLIINNIANKLLKIICAVVRTQTPFIVGYRSVHPQLLAC

SEQ ID NO: 46210 - protein, 387 aa, unidentified
MAQVNDLSRSLTAFDPISTLVVVVEMSKASWLVSGVIPGVERQPLKKLEPDATALLQLIERWRNEAVRAGRPISRIALAYEAGRDGFWLARWLVARGIEAHVIHSASVAVSRERKRAKTDRLDAAMLMRVLLGWLRGERGHCGMVSIPTMEEEDARRPSRERESLVDERSRITNRMKSALARLGIRGFKPHLRKAPERLAGLRTAEGTGLPANIIEEFRRDMARLALVREQISSIEKTRAERLERAPDTGPNAMVRLLARVIGIGIETADMLVREILSRKLRDRRAVARYAGLTGSPDESGLKRREKGLAKAGNARVRRGLIQLAWRFLMFQKNSALAQWYRTRTEGPSGARKTTMIVALARKLLIALWRLVTTGEVPDGVELRPAA

SEQ ID NO: 46211 - protein, 362 aa, unidentified
MTVIGIDAHKNWHTLVAVDEVGRRIDVLTVEARSAGHQKIMSWLEQFEEVSIAVEDCRHLTRRLEADLLDAGHKVVRVHTRLMAGMRRSGREPGKSDPIDAEAVARVALRERDLPTAELPGPAREIKLLSDHRRSLVSRRTALQSKVRWFLHEIDPDLRIPSRALRRYHLLDELIAHLDDHTGVVVEIARDILEDIRSLTRRINEIEGRLGTLVRANHQHLLDVPGLGVLGAAMIIGETAGVGRFKSKDAFARFNGTAPIPVWSGNKVRVRLSRGGNRRINTALHMAAVTQLRLGGEGTDYYDKLIAAGKTRTEALRLLRRRISDRVFAAMRADETRPLPDATSPTPTASPRTPIPALQAAA

SEQ ID NO: 46212 - protein, 375 aa, unidentified
MEHHSEAFVALDTAKLRNAVAIADAGRNGEIRYLGEIDNTEAETRKLVAKLASKHARLTFCYEAGPTGYGLYRLIKSIGHDCIVVAPSLIPSKPGDRVKTNRRDAVNLVKLLRAGELTAVWVPDERHEAMRDLVRARDAAVKDYRIKRQNVSSLLLRLGRSYPGKKTWGRTHINWLTGLKLEHREQRIAFEEMLLAVRQVRERIERLEQAMREAVADWTLAPVIEAVQAMRGIDMVGAIAFLAELGDLSRFENPRQLMAYLGLTPSERSTGESVKRGGITKAGNTRARRLLIEAAWSYRFPPRVSKDMQTRIGAAPRTAREIAWKAQMRLCGRFRTLTRKGKRPTIVVTAIARELSAFIWAINREVVGSHATANQ

SEQ ID NO: 46213 - protein, 407 aa, unidentified
MDVHRDFLIACIAATNAQGVTEYQSRRFSTYTGSLRELRDWLLANDCKDVCMESTGKYWFPVHNILEESCHVVVSHPKFVKAIKGKKTDKKDAQWIADLFKHDLVRGSFIPPKDIRQLRDLCRYWVKLSSYMTGEKNRAQNCLTVSNFKLDDVFSNVFGKSASAITTQLLEHPGEQFDVAPFVDGRCKTPIAQIQEAVDGIFTYEQAEKLKIIRGHMDSLERHKAELESLILEIAQNYLPQIELLLTVPGIHDAFTAIRILAEIGADMTVFDTSKHLCSWAGLTPQNTESAGKKKTTRIGKSGAYLKPLLIQVALAASRGEKHPEIYGKKQALQKRRGKKKAIVAIARRLLTAIYHILSKNEPYNPAAYIQEDKNPMARQISQEKAFEMLARMGFIVSNPSPLSSSG

SEQ ID NO: 46214 - protein, 330 aa, unidentified
MQAITTIGLDIAKSVFQAHGSGAEGNMIIRRQLKRRHVLAFFQKLSPCLVGIEACATSHHWSRELKALGHTVRLMPPAYVKPYVKRQKNDAADAEAICEAVTRANMRFVATKTPEQQSCLMLHRTRPLFIRQQTAVINAIRAHLGEFGIVARVGRTGVEELLDAVADSAGSDDRRLPEVARVCIAALGVQLRMLKSQILEFDRRIMAWHRSNETSKRLDEIPGVGPALATALVASVADPKAFRSARHFSAWIGLVPKQHSSGARTGSAVSASKAIAICAACSRPARSPSSVMPRSTVPSTDPGSQRCWLAGRPRSPRSHWPTRSPEWRGR

SEQ ID NO: 46215 - protein, 340 aa, unidentified
MRVYTGLDLSRKRLDWHCCRVDGTPVDAGAVPPDLDGLARLVHRLGDGDVLAVVETMNGARFVHDQLELAGWDVRIADAQRARALAPLACKTDRIDAQVLAELARRDLVPEVWLPDPRVRGERERARFRLHLVKHRTMLKNRINQTLVAHGLGRPTRHLFGPKGRALLERLPLPEPWHGTLQASLVLIESLDEQIAAIDRELRALGADHPYVPLLMTAPGIAWILAYTIASEIGDIGRFPTARKLIGYTGLCPRVYQSGQTDRRGALAKNGPNYLRWALIEAAHTAGRTIYYRPISERMRDRHGRRRGSALAAVEIARRPTESIWWMLTRNQPFAPAGAL

SEQ ID NO: 46216 - protein, 335 aa, unidentified
MVRTDRPAPTTWVGIDVSQDTLDACLLPAPGGKHHARSFPNDPAGHAALAAWADAHTGDTPLGFCLESTGPYGEALATFLADAGRHVAVVNPARVKYAGLMRGQGNKTDRADARLIAEYAARERPPAWHPPTPDVRELQALSRRRDDLRQLAAREKTRLATPGLTPAARASIRRTVAFLGKEADRLQSLADDLIAASERLRADRDLLRTIPGIGPVAAHALLAELPDPSRFATAQQAAAYAGLAPREYRSGTSVKKRTRLSKAGNARLRKALYLPAMTAIRFNPLVGAFYARLVEAGKAKMAALGACMRKLLMIAYGVLKSRTPFDPSRASRTAP

SEQ ID NO: 46217 - protein, 350 aa, unidentified
MLIIGCDYHPAFEQIAFVDTATGDCGERRLEHREEAEKFYRDLAAQGMKVRVGMEASGHARWFERLLAELNFELWIGDATEIARKRERKQKTDRQDAQHILRLLLKDDFPQIWVPSWENRDLRQLLWHRHRMVQARTRIMNQLQAVAINEGLRSKKRLWRESGREQLEAFRLAPWASRRREDLLKLLDGLNPTIAELTQAIQQEVEKCPAAQRLRTHPGVGPLTALAFVLIIGKADRFQCGKQIASYLGLVPLEDSSGNRRRLGHITKQGNALLRFLLVEAAQVTARSLPEWRSHYVHLTMRRGRKIAKVAMARKLAVRLYWMMRKEWDFGTLTKFGSHAGKPGTGDGVK

SEQ ID NO: 46218 - protein, 338 aa, unidentified
MKNTRIPSNTPAFFLGIDVGKPDLFCHIIGPDKTLSQRFDNSPEGIRKLLNWLHEVTSPLQFAACLEQTGHYGRAISHALADAGLAAVYLVNPRQIKAYGEQRLRRNKSDTADARLIACFLESEHSKLLPWTKPTPDTLQIKELSRYAESITQDNASLKTRCEMTTNKPILRSLKRRIKAQEKEIADLRLRIDKIVEGNDLLHRQRELLASVPGIGDITCQILLAELPDLELFSSARQLAAWAGVTPRHFVSGTSGRSTTPITKIGSAYLRRALFMPAMNARVFNPLLKTFADGLKENGKKPKQIIVAVMRKLLHQIYGILKSDTPYNPEKRGIQTAL

SEQ ID NO: 46219 - protein, 392 aa, unidentified
MVVSIGIDVSKDKHDCFIVSSEGKVLADAFTIPNTMDGFNCLLQRIQDCTTPQDKMKVGLEATGHYSYNLLGFLLDNGLTTYVLNPLRTNLYRKRLSLRKIKTDRVDARTIASMLLSDAGLKPYTDTAYHNEELKSLTRYHFDKVKERAKLKSSIARLVCIMFPELEKLVPSLHIASVYALLEEFPGAKQIAAAHLTRLKALLETASKGRYKRDMALEIRDAARNSIGSWMPAKSLELQHTIRLIRELDNEIAEIEEQIQAIMDELNSPITTIPGIGFRMAAMIFAEVGDFTRFDSPDKLLAYAGMSPSTYQSGQLKNCYPHMEKRGSRYLRYALYNVTKYVCHWNPAFAAYLAKKRAEGKHYNVALSHAAKKLLRLIFAMERSRQPYCAAP

SEQ ID NO: 46220 - protein, 394 aa, unidentified
MFLVGIDIGKNKHSFCIIEKETGELIVKPKFFDNNNIGFEELISSIQKLSNQDILIGMEDTGHYHFALLKFLLDKKYQVALINPVTTNLTRKLQGGITKTDKLDTLTICDVLSSSQRVKSYRITKVDRFDMYEQKQLTREHHNLKEQLNVLKNRLQKSIDIVFPEFNSLFDSKYGTVYVNILKEFGSADAVARADIRTIRKCFDIKGKGRRIALTAEKLKEAAKNSIGFPSTAEVVQIKHIINQVKLIEEQISEIDKKIEEFSISNNSPILSIPGISHFSGTSILAELGDIHNYSKPSQIIKFAGVAPITYESSQFTAQHTAITKKGSKYLRKTLYQIITSVIKNNEVFKNYYQLKLSQGKGNRCAQGHCVRKLMRVIFHLLNTNTQFNPSLLV

SEQ ID NO: 46221 - protein, 344 aa, unidentified
MANLNQFCDFTKLIGIDIAKSVFQIYSCDTQTGEITNVQIKRDKVLESLANCGKCLIGMEACGSSQYWARKLQALGHTVRLMDPKLVKPFVRHNKSDKADAEGVYHALVSGVRAVAVKTETERDIQTLLTMRALLVKQRTARINHVRGLLAEYGHVMPRNVNQFDNKVDECINSLEGDAVQLVINMMRDTVKSIRDDQDRIKTLQREISRLANQTRNAKHFLTVPGVGDTIMAYMCVLLADPTQFSSGRQFAAYLGLVPMHTGSGGKTVTTKIPGRCDKALRALLVQGAHAVARSKCRTDWVKNILAKKPKKVAMVAIANRMARQCWAVASKGQDWRRMPVTAA

SEQ ID NO: 46222 - protein, 406 aa, unidentified
MQVVHERCCGLDVHKRVVVTCVLSGRERTIRSFGTMTEDLEAMAAWLEECDVTHVAMESTGVFWKPIHNVLEGHAFELLVVNAQHMKAIPGKKTDVKDAEWIADLLRHGLLKPSFVPSRPQRELRELVRYRKSLVRERAAESNRVQKVLEGANVKLASVATRVLGLSGRAMVEALISGVTDLTELADLARGRLKTKHADLQRALRGVVGPHQRMLLAAQLRHIHYLDGEIESLSQEIASREQPHEAALAQLQTIPGVGRRTAEVILAEVGADLSRFPSAGHLASWAGLCPGQNESAGKRRSGRTRKGSAALREGLTEAARAAARTRRCYLSAQYRRIAARRGANRAAVAVAHSILVIAYHLLTKGSVYEDLGSNYFDDRDKVATVNRAVARIKRLGYEVTVTPNAA

SEQ ID NO: 46223 - protein, 335 aa, unidentified
MQIATIGLDLAKHVFQLHGVGPDGCVVLRRKLRRTHMMPFFASLPPCLIGMEACATAHYWARELSAFGHDVRLMPAHYVKAYVKRGKNDAADAEAICEAVTRPTMRFVAIKTKEQQAVLVMHRARDLLVRQRTQLINALRGLLAEFGISEPQGSQHVGRLRAHLDEDTVPEIGREVLRLLVEQLDELEKRVTVVDAKIRGWHRGNPISQRLAKVPGVGPLIATAIVATVGDASLFRSGREFAAWLGLTPRQSSTGGKQRLGRITHQGDAYIRRLLIIGAQSALQCSKETKENVWVRGLLSRCARLKVAVALANKTARITWALMAKGDSYRRASTA

SEQ ID NO: 46224 - protein, 362 aa, unidentified
MTATKTTRTVRLTSSTLCLDPGEVAHVGVDVHKASYHVAVVTDLRGLVATWTQPADPDLLVERLRPIGTQLAQVVYEAGPTGFALVRRLRAAALKAEVIAPSKIPTMPGPEAKSDRLDCRKLAVFAQKGLLRPVRVPTEQEEADRQVVRLREQLTRKLRVVQQQIKALLLQHGIAEPAGLAHWTTAAVDALRELELAAELRFCLDVMLDERRHALEQVARATRRLEELAKADRHRETTSTLRTVPGVGPITAMTFRVELHEPGRFADGGQVARMLGLAPQVLQSGPTRREGRLLKSGNARLRTVLIEAAWRWVAGDEAAKARYRRLVASTGNGKKAIVGMARRLAILLWRMSLSGEPYRAAA

SEQ ID NO: 46225 - protein, 387 aa, unidentified
MPQPNDLSRSLVALDHNSTIVAVVELSQSSWLVGGVLPGIERQPRKKLEPSPERLLAVLHRWRDEAVRAGHTITRIAVAFEAGRDGFWLARWLEAHGVEAHVIHPSSVAVSREHRRAKTDRLDTELLKRGFSGWLRGERGHCSMVRVPTIAEEDAKRPNRERECLVGERTRINNRIKATLARLGIRNFKPTLRQAAERLATIHTPEGMPLPPNVLAELQRDLARLGLVISQIREIENARQKRLEQQPKTTPHAMVRLLARVVGIGIETADMLVHEVLSRPMRDRRAVARYAGLTGAPDESGARRREQGLARAGNARVRRGMIQLAWRFLRFQKQSALTLWYRARTADSRIGTRKTMIVALARKLVIALWRFVTTGEPLDGVVLRPAA

SEQ ID NO: 46226 - protein, 348 aa, unidentified
MKNKSFVGIDISKNVIDVSIFREDTNIKMFPHEVFNNTRKGFGDMCSWLKKSRVVLSQALFGMEFTGCYSLDLEKFLTSKNYSFCMLSTRIVKHHPMGTIDKRDKNDSAKIADFLYRYDGTECAKPYKLPSKAMQQLKQLVNERKFLVEQRTNFMNRMQMFETKEDSAMYESYIKKLNHDIEKIDQEECELMSKEEAVFDTFQNLLTIPGIGFVNATNIIAITRNFTAFDTARQYARYVGVAPCSHTSGTSVKWRARPSAHCNGQVKADLSMAALRAVEYDVEMQMFYNRKLGGRKDSDTKRKALNAVKFKLIRRMFAIGKQKRKWEVLNTSDDRKNLHIEKSKASEL

SEQ ID NO: 46227 - protein, 350 aa, unidentified
MLIVGCDYHPGFQQIAFVDTETGEFQERRLQHRGEAEKFYRDLAARGVKVRVGMEASGHARWFERLLAELHLELWIGDAAEIRAKRVRKQKTDRQDAQHILTLLVQDRFPRIWVADWENRDLRQLLWHRHRMVQTRTRIMNQLQAVALNEGLRCKKRLWGKKGRQQLESLRLAPWATRRRRDLLELLDRLNPLIAELTQAIEQEVEKHPEAQRLITHPGVGALTALAFVLVIGTAERFQCGKQIASYLGLVPAEDSSGERRRLGHISKQGSAILRFFLVEAAQVTVRSVPEWRSKFFHLAMRRGRKIAKVAMARRLAVHLFWMWRKQWDYQQLKEFGPYAGKPGTGVGVH

SEQ ID NO: 46228 - protein, 339 aa, unidentified
MQLYSAIDLHSNNSHVAIIDDQQNRVFYRKLANDPKLIAKTFAPYRERLNGIVIESTLNWYWLADLLIEKGYSVHLANPCGIQKYSGLKHADDKHDAFWLAQMLALNILPEGYIYPKADRPLRDLLRKRAHLVKVRTSLILSLQNIVMRNHGIKIRSNELKKLTQDPVAELLKDQPELALAGSASKQSIDFLTRQIQRIETAVRSQALLKEPFSKLLTLPGVGDILGMTILLETGPIERFKAVGHYVSYCRKVSSRWTSNEKTKGKGNTKNGNRYLSWAFSEAADHARQTHGPSRNFYNRKLNQTNASVAHNALAHKLARAAYYIIRDHVEFMEDKMFR

SEQ ID NO: 46229 - protein, 343 aa, unidentified
MNYYAGIDVSLESSSVCIVDATGEIVKEARVESHPDALVKFFKASGLPLTVIGLEAGPLSQWLYAGLTKAGFVTTLMETRHINAALSATTVKTDRRDARGISQLLRMGWFRPVHAKSTGSQEVRALLVARKQIQHKLKDIELSLRGILRGFGLKVGKVTEKTFEARIRELVTSHPMLEEIAEAMLAARAALLEQFKKLHKAVLKIVRHDEVCRRLMTTPSVGAIVAITYKSALDDPGRIKKSRNAGPLFGLTPKRYQSGETDITGGISRVGDEMVRTALYEANVLLSRVTRFSALKRWGMEVAKRRGLKRAKVAVARKLAVILHRMWIDGSTFRWTKTEAAYA

SEQ ID NO: 46230 - protein, 413 aa, unidentified
MEVVYHKCCGIDVHAKFLVACLLRDGKKHIRRFSTMTDDLINLRDWLVSEGCEIVAIESTGVYWKPVFNILESALPVMLVNPEHVKALRGRKTDVKDCGRLAEFLSVGLLEPSFIPPPHIRRLRELTRYRESLIRTRAAIANRIQKVIESGNIKLGQVASDVLGVSGKAMLQKLAAGEKDPVVISELARGSLRKKMGELKLALQGELNEAQRFVLGELLQRLKELEIADYKVSRQINQAICDPEHPELFKAWELLQTIPGIGEQVAEVVIAEIGANLREVFPTAGHLASWAGVCPGNKATGGRRISGKTRNGNHYFGCAMVQAAWAATHTKKTFLSAKYHRLVRRLGKKKALIAVAHTLTVVIYNVLVRNEPYNELGADYFDRNHSDKQRKYLVKRLQALGFTVTLEQNVNAA

SEQ ID NO: 46231 - protein, 322 aa, unidentified
MTHTTTTIGIDVSKQYLDACCHHDQQTLRVPNHLKGMTALLAWIGQRQARPLIVIEPTGGYEHPLQAILLDQGFSLAKVNARQVREFARAKGRLAKTDAIDAAVLADYGHVMSPRTMVGPSHEQSELAQLVKRRRQLVELATIKKNRLEKAPDDLATQSIQRLLRVLKEEIQEMDARMATLMKRHQSLAHAHDVVKPIKGLGPLTVATLLAELPELGRIGNKQISSLVGVAPHNIDSGMRRGTRHIRGGRIQIRCALYMAVLSAIQHDPGMKQFYQHLVERGKKPKKVALVAVMRKMLVRLNAKMREYYLQVDSSAWQPQEG

SEQ ID NO: 46232 - protein, 313 aa, unidentified
MMYYIGIDVSKKDLSVFDGKKDLKFINKEGLKSFKKYLKKKVNFSDLVIIFEPTGVYSFYLKEFCAENRIKAYIVNPKKSHNFTRALGKRSKTDKIDARILYQFHKLIEAKDIQVPKVDQQAKALAGYLVSYEFALRQRVALSNHLESLRDKELITLLKKDLKRAKKLEDRLFNDILEYVSKNQNLKEDYQRLLTISGVGDKAAIALLTLFKTYQGTNRAQITALFGLDPTRRESGTSVKGKVKISKNGKGIYRKILFLPTVCATVHNQKIRVFYQRLLAHHKTKKLAIIASMRKILLIAHAMYRDKTEYIAV

SEQ ID NO: 46233 - protein, 367 aa, unidentified
MKKVSTVAVKATKNLSQAKLTIGLDLGDRSSWYCVLDETGEVLLEQKLSTTPKAMREVFGSMPRCRMALETGMHSPWVSRALSELGHEVIVAHARNVRLIGKSRKKDDRMDARTLARLARIDPQLLCPVRHRSAKAQADLTVIRARAGLVRARTALVNTARGLAKSYGERLRGCNVRNMNPEKAEGLSPELQRALEPLLAGIESLSERIRECNERIEELAQESYPQVARLKQIKGVGTLIGLTFLLTLEDPHRFRKSRDVGCYLGLQPGRRNSGQSEPQMHISKEGDPYLRTLLVQGAHHILGPFGADSDLRRWGLKLAERGGKSGKKRAIIAVARKLAVLLHHLWVSGEVYEPLRNRKPTAMPAAA

SEQ ID NO: 46234 - protein, 418 aa, unidentified
MQTELSQYTAVIGIDWADKKHDVCVQDMATGKRRASQVRHRAEDLDEWARSLHRRFGGPIAIAVELSKGPIINVLQKYDFFVIYPIDPSKLANHRKTFTTSGAKDDPTDAEFALDLLSKHTEHFKPLNPQSVGMRTLMTLVEHRRQLMNDRVRITNRLRNALKQYYPQPLEWFDHIDTVLFCDFIRRWPSLAQARRARGATLEKFFREHNMNRKPLLERRIRAIKSAMPLTTDDAVVVPHRLRALALVAQLEVALECIKQYDAEIASLAPQHPDYALFSPLPGAGPVHTPRLMVAFGEQRERFNNAAEVQKYGGLAPVTKRSGESTWVHWRWQCPTFLRQTFVEWAAQTINKSYWAGLYYQQQRSKGCSHQAAVRALAFKWIRILYRCWKTRTPYDESRYLRALQERGSPLLKTADAA

SEQ ID NO: 46235 - protein, 412 aa, unidentified
MEVVHVRCAGLDVHKKRILACVRTADKSGPVERQVKTFGTTTGDLMVLSDWLRSHGVTHVAMESTGIFWKPVYAILEGSFTLLVVNAAHMKAVPGRKTDVRDCEWIADLLAHGLLKGGFIPPVEIRDLRDLTRYRTSLVGERTREVNRLHKLLETANIKLTSVATDVMGVSAQAMLQALLEGTTDPDVLANLAKGTLRKKLPELKKALEGRFTAHHRLFLATILGHIDFLDETIAGLGKEITTYMAPFQKEAEMLDEVMGISVRVAETIISEIGVNMDAFPTDKHLASWAALCPGNNESAGKHKSGKTRKGNAYLKRVLTEAANACANSKTSYLGARYQRIAKRRGRKKAIVAIAHSILVISYHILKYKTPYYDLGLDYFDKLNKQHLVKYHQKRLQNLGFKVTIETLEEAA

SEQ ID NO: 46236 - protein, 342 aa, unidentified
MLYVGLDVHSRQSSLCILNSSGGTVNEIQLKGPRSAVVDRLRQLNQPFSICYEASCGYGHLYESLRPLAAHVSVAHPGKLRLIYGSKRKNDRVDAQKLAKLLLLDMVPPVHVPDIDVRAWRSLIVLRQRVLGQLVRSKNQIRGVLRENDLTGAKWLWSKRQLAWLEGLELHPIAKLRLELAVEELKSLNAKIKRIEAELQKYADRHPAVKLLMTIPGVGIRTAETFVAWVDDITRFRNNRQIGSYFGLVPCQDASADKNRLGHITRDGPPVMRKLICEATWTAIKKCPRFRQFFEQVMGGKSERKKIALVATMHRMIKVMGAMLRSGESYQEPAPLRKTPDA

SEQ ID NO: 46237 - protein, 521 aa, unidentified
MSHPRTARLPKARKAFVLQKPNGQLVPRVQQVGPEHFGIVAIDCAKARSRYFLADFYGRTLLEPTTVAHSRGDLQAAIDLLRQASREHDLHDLVVAIERTGDYHRPIQRAFRQAGFETRLVHPFTSKQYRQPADPGNKTDDTDLAAICRATTHGFGLLEPAWPDDYVAIQLLRRHRRDLVDKNTILQCQVREVLHAAMPGYAECFCHFWDDSPAPMIFARHTTSPQAVRGAGLAGLRHIAAQSQLRCRDETLHKILAWAEQAPPGAGHTPERQRQLIALDDDRLTKTKQILELERDLAHHVVRTPYVLLLAIPGINIVTVADLAGELGPIELYLNANAITGRAGLMPSRYQSDQVDCANGPLRRRGNRRLRAVLMQTADNLVQCNHYFRARAEQWTRAGKDARWLRVKVVKIFSRLAYAMVAGRQLFPHPCCQQRHYILGKLLAFHGEHGTDLMARRQDLEAAVEQLPLKRRAVEAEPLQQELDALSRRRGPQPLADIIHLVLARLAGRVVQSTSHESAGP

SEQ ID NO: 46238 - protein, 481 aa, unidentified
MPKQAKHSKPLGGQKTTAGKGNRGRKRKGMCLEDRPILEANAAGIDIGAREIFVAVPPDRDEHPVRVFSTFTEDLEKMAQWLVSCGVTTVAMESTGVYWIPLYDVVEQHGMKACLVDARGMKNVPGRRTDWHECQWLQFLHSVGLLRAAFRPDGDVCAVRSLMRHRTELVEMTSQHIQHMHKALTQMNVQIHHVISDLTGLTGLAIIDAILAGERDPVVLAKLRDPHIKASPETIRKSLVGNWRAEHLFTLKQSRESYRHYQEQITICDEEIEKLVVAFVARVDPAQKPLPPDRKQKQRGRKKKNGSPKTGFDLRTESYKLFGVDLTQIPGLMAMVLMLFSEVGRDMSRWPTAAHFVSWLALCPDNDISGGRVLWRGMRRVHNRAGDLFRMAAYALHHDQTPLGDYLRRMKSKLGPAGATTATAHKIAIIFYTMVKKQVEYDGTLWAERDAEREKRFEAKLKRQAHQRGYKLVPIEEKPAA

SEQ ID NO: 46239 - protein, 418 aa, unidentified
MTRVARVGRAAGTSSLWAGYTFGFINVKRTNNHTMSAITLYLGLDVHKDSITIAIAEPGSKGEVRLYGTIINSIQAVERALTAIGKAHPHAQLETAYEAGPCGFVIARRLKQLQIPCLVAAPSLIPRKPGSPFKTDKRDARAIARLLRAGDLTGVYVPEPTDEAIRDLCRARTDAVDDLRRCRFRLKAFLLRHGYHYQGKANWSQPHMRYLRELVLSHPAMKTILEEYLQGIDAAHDRVQRIEASMLPLLDSWRLKPAVQALMAFRGFQLVAAMITVSELGDIHRFAHPRQLMTYLGLVPTESSSGPHQRRGGISRCGNGHQRWLLTECAEHYRLPPKISKELSRRQEGQSREVRDLSWKAQNRLHLRFTKLLARRLQRNKAKVAIARELCGFIWALLRTLPCYTLPSTAPAANPSPQ

SEQ ID NO: 46240 - protein, 372 aa, unidentified
MSASIVTYEKEHPLSPLMNSEKYIGLDVHQATIVVAVMDSTGKVVMESILETKAATILEFLAGLRGTLSVTFEEGTWAAWLYDVLKPHVAKVVVCNPRKNGLLKDGNKSDRIDARKLAELLRLNNLKSVYHGETGVRMLRELARSYLNLVKDQTRVMNRLKAMYRSWAIPCAGRDVYYARHRAEWLAKIREAGVRRRAEHLYQQLDMLQHLRQQARRELLAESRKHSITAKLRQIPSLGPIRVALAVALIQTPHRFRTKRQLWAYSGLALETRTSGEHCYIQGQLRRSKKQVSIRGLNKDHNHDLKGLFKAAATRASVQPGPFQDFYQASLAKGIKPTMVRLTLARKIAAITLTLWKKGENFDAEKLKSQAA

SEQ ID NO: 46241 - protein, 423 aa, unidentified
MISAVLECCAGIDVGKKWIAVCVLKGPANGDAQAEIRRYPTTNQCLEQLCEWLVECGCTHVVMESTGEYWRPIYNVLEEATDLEIILANSQQVKGLRGHKTDPSDAHWLAHLLRHGMIRPSYIPPLPIRQLRDLTRRRKQLVRSGAQERNRIQKILEDANIKLGSVLTDVFGLSGQLMLDKLLEGEATPEEIADLAQKRARKKIPQIRASLEGHRMNALHRRLINLSLDHMAFLEEQISTLDEEIVQHIQAHGLEKPYQLLQTIPGVKEEGAASLLAEFGPDMEVFGNAKKLSSWAGVAPGNNESAGKKRRAPALRGNPWVRSTLTEAAWSASRKKDSEFKDHYDGWKGRLGHKRAIVAVAHSLAETVFEVLSTGQPYTKPGTDPMSETKAAHLIRHHTRRLKTLRKRLKPQYQRHERQHATP

SEQ ID NO: 46242 - protein, 350 aa, unidentified
MGNHKFAAADVHAATTTFAVLDDSGKFVMETVVETKAESLLSVVKSISGAVHLTYEEGTHAAWLYDLLRPHVAELVVCDPRKNRNKSGNKSDRIDARQLARWLRSGDLSPVYHGHDSTRVLKELVRGYENLVVDSVRTKNRLKAIYRSQGESTPGGNVYKLEKQEDWLSKLQSSGLRSRAEWLYSQMESLDDLRGEAEKAVLREAKKHRPCALVKSVPGIGPIRAATIVAHVATPFRFRTKRQFWSYCGLAVVTWGSSDWEIDVETLLQKRRPVATRGLNRNHNRYLKKVFKGAVHDARAFRPHLDSLVGSGMRESMARLTVARKIAATTLAIWKKGEKFVLSKAVIKSE

SEQ ID NO: 46243 - protein, 343 aa, unidentified
MKISRIGVDLAKNVFQLHGVDRRGQVVFKRRLRRDQWLRFVFANIEPDCVIGMEACGGAHHWARVLQARGYTVRLIPPQFVTPYVKSNKSDANDAEAICEAMSRPHMRFVSVKAVEQQDIQATHRIRSELMKQRTAKAQQILGLLCEYGLVVPTRLTTLRKAIPGSLEDAENGLTSRFRALLHGLWQDLLRLDDRVSELDNEIKAIAKADPVAQRLQQLRGVGPLAATALLASVGDGKQFKKGRQMAAALGLTPRQHSSGEKNRLLGISKRGDPYLRSILIHGARAVVSNAKHKDDRLSEWVTQIAQRRHTNVAAVALANKTVRIAWSMMRNESDYVPAFAAG

SEQ ID NO: 46244 - protein, 455 aa, unidentified
MKVKTVSALRSKRGLHRANGAEPQVVGLTPQTTDIRKTDTMKTYILRTAKPVERQKLSRLPRQKPAPLVTPASPLGRPATTAKGPFLFIGLDVHNDSIAVSLAPSDSTEVRRYGIIGGEHDDVLKLAKILATAHPGMVLKFCYEAGPRGFALCRCLRAHGLDCILVCPSKVPRKPGERVKTDRRDADDLARLYRAGELTGIYVPEPVDEAMRDLIRARFQVGRQQHRSRQQLKMYLLRHNFRYGGQTSWNAAHLRYLAKIKMPFPTQQIVFQEMLDVITEATARLERYDREIERAVPGWRWEPAVRALMSLRGMALLHAATLVAELGDFNRFEHPGQLMGYLGLVPSEHTTGKDRQQGGITKMGNAPARRALVEAAWQYRVPARLSPHLKKRQEGLPSAITDIAWEAQRRLYHRYTHLTRVGKKKSQVAVTAVARELAGFVWAIARQVKPVATTP

SEQ ID NO: 46245 - protein, 533 aa, unidentified
MWGATTSSAGQNNEALRRPLHVLCAGWTCRNRRFPLVLIQEPDELGRKGGDTATKAPALVTSPERVAHAPKERIYVGLDIGYREHVAAASPLSVFNVGRNPDGWKRVKPIHFASDAAGFGRFQRYLDRHSPDPRDFLILLEPTGSYGLTVLLYLLGKGYRVLQVENRAVKDYREKIFGSETKTDDTDARLMARMGFLHELVGEEFSIQPVLLMNPDAAALRGMVHDLAKLQKEITRRRNQLQQMAALTFPELKTFFKGSTAAPAARALLEYFATPQELATASTEHVAEVLRSAHAYSHATRAAELQALARATAGVPTLTHHQWRQAWLIKQLSVVERARQELVEEVALATATHPYTRVIESLPVKSPIWTATLIGAIGDVDRFSNVNQFKAYLGWSPQLTRSGSSVDHSELAQTGVRPARNVLGQMTVIMLSPTIRGTPFREVYQRLTGRGMRPASALGHVAGKLSVVLYGMLKNMTPYDQDKHRRQLGLVQSADQPGSPPVDVSLELVDLADSRSDLVDDDLTGAGEPQLGL

SEQ ID NO: 46246 - protein, 411 aa, unidentified
MRRVIGMDIHRTFAEVVFWEEGRLRPAGRVSMTRSGLEGFGRGLGKEDEVVIEATGNAMAVVRTLSPYVARVIVANPLQVKAIAHAHVKTDKIDAGVLASLRAADFLPEVWLPDPDTERLRRLVARRNQVVRHRTRIKNEVHAILHAHLILPCPHADLFGRLGRVWLAQQVMPDDECAAIERHLRELDRLGADLGVLDTQVAQAGSDDPAVKRLLTITGVNLIVAAGLVAAIGDVRRFTSPQKLVSYVGLNPRVRQSGLGLAQHGRISKRGRSHARAMLVEAAWATAKAPGPLRAFFLRIRARRGHQIAAVAVARKLAVLCWHLLTKSADYQWARPALVASKLRAMELQAGQPVRKGNKRGTAYAYNVKALRDAEIELARHAEKAYERFVSQWQRRGTAKQRTGAAIEERR

SEQ ID NO: 46247 - protein, 317 aa, unidentified
MVSPQIFVGIDVAKAHLDIALRPTGTRWTVANDEAGIAALVTQLHGMSPTLIVLEATGGLQRPVVAALTVAALPVVVVNPRQARDFAKATGQLAKTDALDARGLAHFADAIRPEPRPVPDAQTEELRALLARRRQLIAMRTAEQNRLGSASRRLHADIEAHIAWLNARLAILDDDLDAALRASPVWREREDLLRSVPGIGPVCARTLVLDLPELGTLSRQHLAALVGLAPFHRDSGTLRGTRHIWGGRAQVRTALYMSTLVAVRYNPVLKAFYQRLRAAGKLAKVALIACMRKLLTILNAMVKHQTPWQPQEVDIVA

SEQ ID NO: 46248 - protein, 291 aa, unidentified
MATETTHALATRFVALDVHRQYLMVGAVDVQQHVVLAPRRFSFEAFDEWAPAHLTHADAVVLEATANAWLLYDHLQPLVAEVIVAHPRAVKLIAAARVKTDSRDTIKLASLLAANLIPAVWVPPQEVRELRALVAHRRRLVQQRTQAGNRLHGVLHRHNLAPPPGKPFAAHQREWWLALDLPPSEELRVQQDMRLHQTLEELISGVEAELGRLSTRDPWVQQVPFLVQLPGLGVLSAMRVLAAIGEITRFPSAKHLVSYAGLAASVHQSGETNRGGHITKEGRSDQRARSG

SEQ ID NO: 46249 - protein, 365 aa, unidentified
MGKLWVGVDLHKGQFTCYVKGEKGAYRRFATNAAGYTAFLRMLEMFRANEQECEVAVESTGNARYFVTMVQRLGVQVRVINTLKFKVVNESVNKTDRHDAKTIAEFLAKDMLPEARLCGEKSEALRRLVKSRTMLVTTVVKLKNQVHGVALGYGLLVKGGKLNSLKGRAEVVAALGEVGGAVVVEPLVAAIEAMEAEVGRIEKKLDELTAGDRAVKILRSIPGTGPICATTVRAFLDDIKRFKSPKELCSYAGLAPWVQQSDQTVHYGRITKRGPSELRTALVQMALGMIKVRAESNNRLMVRYRQIKQRKGSGKAIIATARKLATIVWTLLTEDKDYDSAVMNNSKLFRLAQAMSEEALAKSTA

SEQ ID NO: 46250 - protein, 335 aa, unidentified
MKTPVIGMDIAKHIFQLHAVNVATGKIERVKLKRGDVKNFFAKRERSLVVIEACGSAHHWARQLRQLGHDVRLICAHSVRPFVLRNKSDAADARAIWTAAQQPDARFVAIKSEAQQSVLALHRIRAQLMKVRIMQTNALRSILYEFGEILSEGYQSFTKEIAPALARTSERLPGMLVDSLREQWARIQAVNEDIAVVERRLSHALRDSPECQRIAEIPGVGLLTATATVSTIGDPATFHSGREFAAWLGLVPRQTGTGGRIRQLGLSKRGDTYLRTLLMHGARAVIARCTHTPSLDDLLARRPFNVAVAAVANKLARTIWALLSRQTRYEAPVHA

SEQ ID NO: 46251 - protein, 425 aa, unidentified
MHYTQNQKIEQVTEATLVVGVDIGSRKQYARAFDWRGVELGHVFSFMDCRDGYELFLKWIQNLQTVNAKGQVMVGMEPTGHYWFGLRDFLQHAGIPLVLVNPLHVKQSKELDDNSQTKNDQKDPKVIARLVMEGRYSVPYIPHGVYAELRGIWPLRQRLVERQIALKNRFARWFRIYFPEYLEAYGSFEGKSSMALLAHACLPEDLLSLGQDGIVHIWRAMKLRAVGKRRAQTLLDCAKRSIGQKDGAVAARMEMKMLLQEWKLCEEELEEVMLQIESLLQEIPESAKLMAIKGIGLATVAGFFAEVGDVRRFRSPKQILKLAGLSLRENSSGKHKGRTTISKRGRARLRMLIFNAVIPLLSRNEEFRKIHQYYTTRKVNPLKKKQSVIAVGSKLIRVFFAILTKGCRYDATKMLDDIHRQPPAA

SEQ ID NO: 46252 - protein, 378 aa, unidentified
MKNAQMIPSQTNTTSVVMYIAFELSNSKWKLMFSDGYKRRQKTIAAGDLAQFEQEVVKARHRFKQPGDITIYSCYEAGRDGFWIHRYLETQGICNFVVDSSSIEVNRRFRRAKTDRIDVGKLMDMLIRYTNGEQKLWGVVRIPSVEQEDQRRIQREVDRLKKERTAHSNRIRSLLVLHGIKVKVGCDFIQRLDKVRQFDGRLLGACLINEIKREYDRLLLIGEQLKQLTKEKEQLLQQGAPAAKDVQTLRMLKGIGEVGSWTLVYEFLAWRDFKNVKQVGAAAGLAPTPYDSGDSKREQGISKAGNGRVRKLMTQLSWQWLRHQGQSELSKWYMQRFGTGASRMRRVGIIALARKLLISLWKYLQTGLVPEGACLKVN

SEQ ID NO: 46253 - protein, 376 aa, unidentified
MNYSTIYVGMDVHEASFSLCCYTNEKEEAEYPQKMQGHYSKVLNYIETMRFHYGDDALFICGYEAGCLGFTLYHQLTAHGVKCIILAPTTMPQPKGKKKIKTDKRDARNIARCLAHHEYSPVHVPTAQDEQTKEYIRMRDDHKLALKKVKQQILAFCLRHNYRFEGTGSNWTQAHLRWLRALQPEGLYQETLKEYLLTYDQLVDKLDRLDKRIEELASAEPYKEDVAKLSCFIGVKTITALAVLTEVGDFKRFASAQQFSSYLGLVPGENSSAENQNRLSITKAGNRHVRRLLVESAQSIARGQVGFKSKALKERQTGNLPEIIAYADKANERLRRRYYRMVLRNNKKPNVAKTAIARELACFMWGMLTGRIAVLS

SEQ ID NO: 46254 - protein, 418 aa, unidentified
MRIVYPICCGVDVHKRFFVATIIKTEGITPIYSKKRFSTFNNEILRFKQWLLENDCYDVCMESTGKYWVPVYNLLEDQIRVVVASPKWVRAVQGNKDDEKDSKWIGDLFRLGIVRSSYVPEKPIRILREYTRYRSKLTSCKTSEKNRFQNSFTVCNVALDSVVSDMFGVSASAITDYLINSDKFDPQHCKSLLKRSLKKKGDTVVESIQGYSINPAQKERMVMVRSHLDYVEKSIKLLDSKLDELVNSHEPSIALLCTIPGVDRQSAITIISDIGVDMGQFSNSKRLCCWAGLTPGNNQSAGKKKSVHITRAGVYLKPALVQVAHAAVKSTASPYYKGKYERISKRRGKKRAIIAVARMILTAAYNMLKTGEAWNPSDLFKVDMPVALQEKQKEKAIQRAFKLLISEGLIEPSNLPVA

SEQ ID NO: 46255 - protein, 338 aa, unidentified
MNKLNIIGIDLAKNVIQLHGNDHHGHTRFTRKLKRKEVLAFMVNQPQSLAAIEACGGAHYWARALQAQGHEVKMIHPQYVKPFVQVNKNDARDAQAIAEAAARPAMPTVAIKSIEQQDIQAIHRVRERLVKEKTAISNELRGLLGEYGIVMPQGHKSIRETVLSILENAENGMNMEGRSIINDLREQWLDREERISQYDNKLKIIAKENDVCVRLQTIPGIGPVNATLLYSHTGDHNHFASGRHLSASLGLVPRQHASGGKENLLGISKQGNKHVRKQLVHGARAAYKVLLKEDNTSRLGLWVKRMEGKHPNKIIVALANKMARIVWALMKNEAVYQA

SEQ ID NO: 46256 - protein, 393 aa, unidentified
MIYVGIDVAKDKHDCFIVNSDGEVLYDVFTIQNDMDGFEDLLFKIKTASKDLSKVKVGLEATGHYSCNILGFLHNKGLTTIVINPLYTSLSRKSVSLRKTKTDKVDARTIASMIMSDVSLKPYSDTVYHNEDLKSLSRYRFDKVSDRSKLKQSVSRLVNILFPELEKLVSTLHAKAVYALLSEFPGAHQAASANLKHLTALLSTASKGHFGREKANEIREAARRSISSYLPAKSLELRHTIKLIHELNAEIAEIETEIKKIMDSIDSPTLSVPGISYALGSVIVSEVGDFSRFDNPDKLLAFAGCSPSTYQSGQLYSTHAKMEKRGSKYLRWALLNAAKYVCKWEPTFAVYLRKKLAEGKHYNVAVSHAAKKLVRLLYHLETTGEKYIPQTLS

SEQ ID NO: 46257 - protein, 443 aa, unidentified
MASSRKKGTKKTTPLAPLNRRAAGVDIGSTFHVVAVAPELDPEPVRSFRSFTADLTALADWLVSLGVETVGIYWIPLFEILEARGLEVVLVNARDAKNVPGRKTDINDAQWIQQLHSYGLLRASFRPGAQIVALRAYLRHRERLLEYGASHVQHMQKALMQMNLQLHHVVADITGVTGMKILREIVAGETDPDALAAFRDARCKASVETIRDALTGHYRAEHVFALRQALELHDFYQQKLSDCDVEIERALRALPRGSDVAAPPRPRQRGKNEPRFEIRAVLNSLLGVDLTEIHGLGPYSVLRIFAECGSDMTRWPTAKHFTSWLTLAPGNKISGGKVLSAKTRRSANRATVLLRLAAVSVSRTATALGAFFRRLAARVGKAKAVTATARKIATVLYNTLRHGRAYVDPGASYYEERYRERTLHNLRRRAGAMGFDLVATAVE

SEQ ID NO: 46258 - protein, 321 aa, unidentified
MSTIKQFIGIDVSKRTLDIHIRPSDQSLQVPNTEDGFLKLGKLLPAPDQVECLVMESTGGYERDCALSLTHQGYPVAVINARQGRHFAKAANQLAKTDQVDAKILAWFGEAMHPPIRPLASETQQQLTDLVTRRRQLVEMLTSERNRSLSLRGKALANVEKHIDWLKEQVKELDAEIEQHIQACDAWKQTQRLVMTVPGVGRVMAFTLLSGLPELGQLSHKQMAALVGVAPLNCDSGQKSGRRYVFGGRSPVRQVLYMAALVSVRRNPVLKAFYDRLLERGKLKKVALVACMRKLLTILNAMVKQGKSWEFEADNTNSIAV

SEQ ID NO: 46259 - protein, 379 aa, unidentified
MQQEVKTFETTTQGLLALCDWLSEHGCTHAAMESTGVYWKPVWHILEGSVELVLANANHIKNVPGRKTDVNDAMWIADLLAHGLIRASFVPPTAVQELRDLTRTRKQLVREVAQHTLRIQKALEDANIKITGLISNVLGRSGRAVLEALIAGESDPNRLVELTHGRLRASRGSLVEALRGRVREHHRFLLRLHLAQVDALNAAIQKIENRVGRTLDPIRERAQLLTSIPGVSDTVANVIVAEIGIDMTRFPSAGHLVSWAGLCPRNDESAGKRRSTRLRKGAPWLKTTIVQAAWGAAKTKNSYLRAQFLRIKSRRGPMKAIVAVAASMLTAIYHMLRTGQPYHDLTGAFFDSRDRTRLAKRLLRRLADLGFQCQVAAPT

SEQ ID NO: 46260 - protein, 328 aa, unidentified
MAHKSTLGIDVAKDSLVIFNTATKQHRSINNTEEGLRTFITEHQIKPDEHQVGLESTGDYSLLTIRVFVELGFDVYLLNPILTQNAIKRTIRGVKTDATDSELIAELVLKGEGQKISEKSLNLEKKALIRVERKISQMQADLKRIAKGLELKQSSGVAVGSAAGIVSELLEHFKVSEIQLWDEIAGQKTFLAKQESIISSHVGCGVKLSAIISEEAGDIKRFESARQLIAYAGIDPKVIQSGNADNRGKMTKRGNSNLRHALYLASYIATRFDPELRAYYEKKRTEGKHHTVAVCAVARKMCERIYSTVTHNRMYEKRNIIKEQDIAA

SEQ ID NO: 46261 - protein, 417 aa, unidentified
MNPPPKTVPIERFLAIDIHKHYVMVGGQNRQQEWTLRPRRIPMTRFRDWAARHFRPGDAVVLETTGSVWDIYDIVAPLVSRTLVANAHKVRQIAEARVKTDKEDIRRLITLLIADIVPQVWVPPQHVRELRSLISFRRRLNKQLTMSKNRLHSVVQRFNLQPPAGGLLAAKNQPWWDQQELTALTAFQVTCDREIIAQLENQKAALDQKLAELSNTEPWASQMVLLMQIPGFGLIFSMTVLAAIGDIARFAHPKQLVGYAGLGAGVHTSGQKHQEKSITKEGRKELRWATVEAAWVAVGCDPHWQAQFQRLEKRMPRNKAIVAIARRLLVSIWHILSKQEPYRHFDDQTIAYKMLTWAWSLDDTARQGLTRQQFAKYGLLRLGVGQDLERIERGGYPRRLAPAAEVRALKPELRPPE

SEQ ID NO: 46262 - protein, 392 aa, unidentified
MDGTKYIGMDVHKESVSIAVMNAAGQVGMECVIGTKASMILQFVDGLRGDLHVTFEEGTWAAWLYDLLRPRVTRIVVCNPRRNALLKDGNKSDRIDAQKLAELLYLNKLKPVYHGEHGLRAVKELARSYSTLTKDLTRVMSRVKAIYHSWAIPCSGKQVYGERHRGEWLAKITEPRVRRRAEFYYQQLDALRALRQQARRELLNESKKHKGWKLLCQIPSIGPIRAAMLLGILQTPHRFRSKRQLWTYSGFGIETRSSADHRSVEGQLRRSRKPASIRGLNENHNHDLKNLFKSAAIIAATKPGPFQEFYTALLSKGMRPEMARLTLAKAPARVSLRTPDGRTLATVGRGAELTVTGEPEEVLLFISGRDEVRLTFSDAQAVQAVRAARRGL

SEQ ID NO: 46263 - protein, 412 aa, unidentified
MEVMYPRCAGLDVHKETVVACVRLAAGSDTSHVVRTFATTTADLIELSEWLEENGCTHVAMEATGVYWKPVWQVLADSSFELILANAAQVKNVPGRKTDVNDATWLAELLAHGLVRASFVPEPAIQELRGLLRTRKQLVREKASHVQRVQKTLEEANIKLESVLSDVMGRSGRAIIQALIDGETDPAKLAALAHWKVRASTETLSEALRGRIKRNHRFLLRLHLQQIQALDAGIAEIDREVDDGLACFRDAVDRLSTIPGISQLSAQVIVAEIGTDMSRFATDAHLRSWAGLCPRNDESAGKRRSTRLRKGAPWLKSMLVQCAWAAIRSKGTYLHAQYVRLRGRRGPKKAICAVAASILTAAYHMLKDGTFYNDLGPTHFDRRRPETQARRLIKRLAELGFSVELKSMATAS

SEQ ID NO: 46264 - protein, 307 aa, unidentified
MANHVAKITLGIDAAKDQHVIYNWQTSQTTGLPNEIGDIKTWLKTFHGPVRIAIESTSDYHLALVDEALALGYEIYLINPRQLAHYREAVNVRNKTDPIDAWLLARYLEHEVDQLRPFQPRDPRAQRLWRLVLRRATVVKSRQQLQQSFAEVGVSIRGVLGQFKNLLARIDRQILTLIRELGWWSDYQYCLSIPGIGKSNASALVAAYHRGAFSGSDAFISYLGLDVRIRESGTFKGRRKLTKRGEPELRRLLFCASYPARHYRCFAEYYQRQLDKGLSKIAARVILARKLARIAFTLMRNEEIFMK

SEQ ID NO: 46265 - protein, 408 aa, unidentified
MKTLHKRCAGLDVHKVEVVACLRLISKRKVEREVRRFPTTTQGLLALAEWLESAGCTHVAMEATGVYWKPVWHILEGRFALILANAAHVKNVPGRKSDVNDATWLADLLAHGLIRASFVPPPAIQELRDLTRTRKQLTREIVQHVQRIQAVLEEANVKLCSVITDIMGVSGRRILKALIAGETDAAKLAALGHERLGCTRAELVQVLTGCVREHHRFLLGQHLRTIEQLEDSVAAFDARIEAALLPFHDVVERLNEVPGLGATAVETVIAEIGIDMSQFPSAGHLLSWAGFVPGLDESAGKRRSTRIKKGAPWLKPVLLQSAWGAARKKNSYLQAQFLRLKARRGAKKAAIAVAASILTIVYHMLRDGTYYQDLGPEYFARRNPAKTAARLANRIRNLGYQVEIRAAA

SEQ ID NO: 46266 - protein, 324 aa, unidentified
MAKRTTVCAGIDTGKRKLDVAIDGNCEQLPVENTAEGHKVLLEWLRRHKVKRIGIEASGGYEQAVVIELRRKRFVVVVFQPAQVRAYAKFHLQRAKNDKIDAALIAACTAAVKKIHPAPDPRLQPFAEHLTLIEQVGEDIKLYKNRLETCRDPRIQKLWKEEIARLAKRERVELKALVAAIREHRDLAQRLDLIYSVSGAGMPTAVEILVRMPEIGQLSREQAAALAGLAPYDDDSGEQVGARHIDGGRKRLRRALYTAALPASFRWNPQLIALYQRLKAAGKEHKRCLIACARKLLIFVNTVVARGTPWQDQPPPAAAIAATG

SEQ ID NO: 46267 - protein, 354 aa, unidentified
MIIIGADYHPGFQQIAFVDTDTGELQERRLEHREEAEAFYRELEAQGLKVRVGMEASGHARWFERLLGELRFELWIGDAAEIRTKRVRKQKTDRQDAQLILRLLLENRFPQVWVPSWENRDLRQLLWHRHRMVQARTRIMNQLQAVALNEGVRCKKRLWRDAGREQLQSFKLAPWASRRRRDLLELLDRLTPTIAELTQAIEQEADKWPEARRLQTHPGVGALTALAFVLIIGRADRFECGKQIASYLGLVPLEDSSGQRRRLGHITKQGNSLLRFLLVEAAQVTVRGDQEWRNRYFHLVLRRGRKIAKVAMARRLAVRLYWMWRKRWDYEQLKNFGSHAGQPGHPDGVHSSTE

SEQ ID NO: 46268 - protein, 331 aa, unidentified
MNYSHFVGLDVGKKTFDASLMSADEKELSHKSFDNTPTGIQSLLDWIAGYHLSLSKLLFCAENMGSYVTELSVSSVSMGFSLALVCPLTIKKSIGLQRGKNDRIDAKRIANYAVLHYRKLELYKLPDKDLVRLRGWIIIRDNLVKQKVSSIKLLETFSWMAKLADVTESISFLKEQLKSIKERILEVEEDMEQLIAASTSLYTNYLLLRSIKGIGIINAIVLLCVTDNFQRFDNPRKFACYCGVAPFEHTSGISIRGKTQTSSLANKEVKVYLTRAAITAISWDPQMKAYYKRKIAEGKHKASVINAVRAKIIARSFAVIRRQTPFVTLAV

SEQ ID NO: 46269 - protein, 338 aa, unidentified
MRFYGKQRRFYCGIDLHASKMYVCVLDDQGTVVLHRNMRTEPEALKRALAPYRESVVVGAECMFSWYWVADWCREEGVEFVLGHALYMKAIHGGKAKNDRIDSEKIARLLRGGTFPLAHAYPKEMRGTRDLLRRRNLFVRRRAELLAHVQNTFTQYNVPTASGKGRDRLREGDVGLSFEDPSVQVMLNADIEVIERLDETITDLETHVRKHAKVHDPARLVACAKESAGKKQGSSGRKIGNAHLKWAFSEAAALMIRSSPEAKAFMEKMTRQRGKGPGCGARRRQDRQGRLLDHEAEAALRRPAVLEEQPAEGNAHGGRSRHDALTAHAGLVGEPRHN

SEQ ID NO: 46270 - protein, 411 aa, unidentified
MSHIVVGIDVHKKILAVVLADADEEELRFQRRTFGTGGEETRRLSEWLSEMGAQEAVMESTAQYWKPVWRALERQCHLELAQAQSNRARHGRKSDYRDAERLVRRYLADELVLSFVPDREQQLWRTFSRTKVRWSRDRSRLQNRLEALLEEMGIKLSSIISDLLGVSGKRILQAIAEGEQDCANLARLAEGRLEATAKELQDALQRVCDVDPRYRIVLKQLLAQVDLADKHMAELDKALAEALRPHTEAVERLAKVPGLGVDSAQQIIAEVGPTAERFASAAELCSWVGSCPGENESAGESHGKHSPKGNRPMRRILNQAANAAIKAKGSVFHARYCRMVARDPKAHPIAIWAVANQMCRVIWALLRHGAAYEERGERPNPIAARRRANRLLRQLTRLGYTAKLEAVPAPA

SEQ ID NO: 46271 - protein, 465 aa, unidentified
MAARKKKRMSAQVVEDEDYQLRYEVVAGIDVAKESAVVCVRMPPAAGRKHRTSRLQAVPATVPAIGELAAELKAAGVQMVSMEATSDYWRIWFAVLEEAGLAVQLVNSSQARNLPGRPKTDKEDARWIARLTEMGMLRSSFVPPPEIRALRVYTRHIFDLTADRTRYWQRLEKLLEDALCKLSAVVSKLAGHQTARAIIEKMIAGERDPQVLAALGQGKMRNDRLPALAEALSGMRFGPQHAHAAASLLRAIDLLEAELKDLEERVTAHLAAIPASWGVDADGVTGPEAGRAADAAAFPAVERLDEIPGLGGEAAAALIAEIGLDMRRFPTPQALVSWAGLTPTARQSGPRKSRGKKGHGNTYAKQIAVLAAYAAANTDTFLGERFRRLASRPGGGGRKKAGCAVGRSILVIVWHLLNDPAARYRDLGPDWHARHTDRSRKARNAQRQLQALGYDVIITLREDAA

SEQ ID NO: 46272 - protein, 341 aa, unidentified
MQISTLGIDLGKNSCSLVGLDDCGKIVLRRRMRRETIIAFAARLPACVVAMEACCGAHHLGRALAAQGHTVRLMSPEYVRPYVKAQKNDDRDAEAIAEAATRPTMRFVALKSQEQLDMQTLHRVRDQLVGERTSLMNQIRSLLLERGHVVAQGCAKLAHRLNELLTIPESPFGLRIHSLLADMQARWQMLNERIRALDEEFAAQARTDEQARRLTSIPGIGPLNATAFVAAVGDAATFSRGRDLAAWLGLVPRQATTGGKPRLLGITKRGSKYLRKMLIQGARAALPTLTRGDTRVGVWLRGLLSRAHANTVVVALAAKMARIVWALLRNGQSYQAPQVAA

SEQ ID NO: 46273 - protein, 320 aa, unidentified
MTEDGELLGCRRIPSQPFELAQAIAEAGPEPEVVLESTYGWYWAADLLQDMGAHVHLAHALGNNWGNRRVKNDERDAKDLAAMLRLGRLAEGWIAPPETRELRELVRYRYSLIRHRTSAKAQIHGVMAKNGILPVVAQMWGPAGDAQLDRLELPPAYSMRIESLRGLIARYDAEIAVLDRRIHHELKDDPGYKAILHLPGVGKVIAAIFCAEIGDITRFPNAERLCSWAGLTPKHRESDQTVHRGAITKQGSGLVRWAAIEAVGNYRQRGNQKLRADYLRIAERRGKYKARVAVARKLLTLVFYGLRDGEIRCLREPLAA

SEQ ID NO: 46274 - protein, 395 aa, unidentified
MSKVIMIGCDLHDRNMLLKYAVGTCQPQQLTYDNDKAGRRRMIHRLKGIAEKHGADRIVFAYEASGLGYGLSDQLHDEGIECHVLSPTHLPKTPKSAKQKTDPRDAQMLLEQVRGYVLAGNQLPIVWTPPQRLRDDRELVRARVDVADELTRVKLKIGSMFKRYELRLASPTKTKWTKAFVRYLRDEVVPTLDLAVGTTLKLLLVRFEVYLAERFELDKALKKLSETERYKHASVQLRKLPGVGLLVAMTFLTEMGDLTRFHNRREIAAYLGLCPSSYESGQKDDRKGRITRQGPARLRKVLCQAAWVSVNRCEEAAAAYHRIRQNQKQRTKKALVALMRKLGIKMWHVALASGVSDELTGRGGPHGGQASAQAHQREVVVTFDSPSHQPLGCAG

SEQ ID NO: 46275 - protein, 383 aa, unidentified
MDAPDRALQGQDMPIIGRLYMAFELGEKSWKLSLGDGVRGPSRCTVAAGDTASVLAAIVKAKARCHLATDAPVRSCYEAGRDGFWLHRWLVAQGITNLVVDSASIEVNRRARRAKTDRLDSDKLLSMSMRYHAGERRVWAVARIPTPQQEDERRLHRELERLRQERTAHSNRIRSLLVLHNLRVERIGGRVWTHWWTHHAAQLLPGLRAEIERELERLALVLGQIRPLEAQQKQQVRSGVQPMVARLARLAGIGIGSAWTLSKELFGWRRFHNRREVAGCLGLAPTPYASGTSEIEQGISKAGNKRVRWLMVELAWSWLRFQPGSQLSRWFNERFAGRGKRARRIGIVALARRLSIALWRYLDYGEIPIGARLKPRDSDAVIA

SEQ ID NO: 46276 - protein, 362 aa, unidentified
MNQEETSRRLYTTQHPFYCGIDLHARMMSVCILDQSGEILVHRTMKTDPETFLKAIAPYRQGMVVAVECLCTWDWLADLCADAGLPVVLGHALSMKAIHGGKAKHDQIDSHQIAALRRGGMLPQASVSPATMRATRDVLRRRRPLAHKRAALLAHVQNTHSPYHLPAMGTKIASKANREGVAERCADAAVQKSIAVDLALITSDDALRRDGELPIVTTAKHHDAHTLSLLHTVPGIGTMLRLVLLDAIHDVHRVPRVQDVVSSCRLVQCARASAGTRYGTSGATLGKAHLTWAFSAAAVLFLRDHPAAQKYLARVEKKHDTGHALTSLAQTLARAVSDLLKRPGACETETFFQRYTIREGSG

SEQ ID NO: 46277 - protein, 334 aa, unidentified
MENIALIGIDLGKNSFHIHCQDRRGKAVYRKKFTRPKLIEFLATCPATTIAMEACGGSHFMARKLEELGHSPKLISPQFVRPFVKSNKNDFVDAEAICEAASRPSMRFVQPRTESQQAMRALHRVRESLVQDKVKTTNQMHAFLLEFGISVPRGAAVISRLSTILEDNSLPLYLSQLLLKLQQHYHYLVEQIKDLESQLKRKLDEDEVGQRLLSIPCVGTLTASTISTEIGDGKQYASSRDFAAATGLVPRQYSTGGRTTLLGISKRGNKKIRTLLVQCARVFIQKLEHQSGKLVDWVRELLCRKSNFVVTCALANKLARIAWALTARQQTYVA

SEQ ID NO: 46278 - protein, 333 aa, unidentified
MKLTPVGIDIAKSVFQVHYVDEETGEIVNKPIKRVKFLEHFANRTPCLIGMEACGGSQHWARQLTKLGHTVKLMPAEFVKAFNIRNKSDAADARAIWLAVQQPGKAVAVKTEPQQAVLALHRMRQQLVKFRTMQINSLRGLLTEYGEVMGKGRSALDKAIPAVLARVSDRLPAVLVDTLREQWNGLTRLDEQIVVIERRLRQWMLEDKAVKSITEIPGVGVLTATAAVATMGDVKSFRSGREFAAWIGLVPKQTGSGGKVTLLGISRRGDTYLRTLLIHGARSVLNHAKVPGPWVEQISKRRPQNVVTVALANKMARTIWQSWPTTGLTRRDT

SEQ ID NO: 46279 - protein, 359 aa, unidentified
MSHTSHQNYATGIPAVTIGLDLGDRTSRVYEVTATGERRTEASVATTPQALAKYFGNRSACRVVLEVGTHSPWVSRELARWGHEVVVANPSAVYGKKRRRQRNDRLDAEYLARQGRADVQLLHPIRHRSAAAQEDLALVRARDQLVHTRSGLINHVRGAVKSLGGRLSRCSAEAFPRHVRDEVPTALRAALTPLLEVIAEVSRRIADYDRQLAQAIRARHPVAARLQQPAGVGPLTALAFVLLVEDPHRFRQSRDVGAYFGLVPRLDDSSDSTPQLRISKAGDKLGRRLLVSAAHYILGPFGPPCDLRRHGEAIAHRGGKNAKKRAVVAVARKLAVVLHRLWVSERAYDPEYQANRPAA

SEQ ID NO: 46280 - protein, 382 aa, unidentified
MNRILKIGMDVHSTSYTLCAMEPVLGGEDRIFANIQVTSDYRNVIQFIDKLKEKLGSSDSYSIECGYEAGCLGYSLYHQLTKSGVKCTILAPTTMLTQQGKRVKTDKRDAVMIAQCLSYGGYHAVHVPADKDVSVKEYLRMRDDHKVALKKIKQQINAFSLRQGYFYAGNKWTIKHLNWLKKLVLSDLYRETLNEYLTSYEEQTAKIERFDKRIEELAEDSDYQENVKKLGCLLGIKTHTALSLIVETGDFKRFRKGNTYAAFLGLAPGESSSGEKISRTGITKAGNSHLRMLLIEAARGMCRGRIGYKSKVLRSRQDGNPTEVIAYADRGNTRMRSKYYRMIRHGKKDNVAVAAVARELACFIWGLMTNNITPKEEGTKVA

SEQ ID NO: 46281 - protein, 457 aa, unidentified
MVKKAPPKAKDPGFIPMAVVHPNAAGIDVGDTLHAVAVPANRDEQPVRTFGTMSADLEEIVVWLEKCRIDTIAMESTGVYWKPLFNYLIRHGFEVYLVNARHVRNVTGRKTDQSDAQWLQQLHSCGLLKSSYLPDNEQESLRTLVRYRRTLSEESSRFVLRMQKALELMNIKLHTVITDLTGKTGTAIVEAIIAGERNAVNFLPLIDRRIEADHGVIVKSLEGNWRAEQLFTLEENYTCYKFFQERIAKCDQAIEAQLQRYSAIQNEGEASLAQAKNTELAPVKKKKNKGAPAFDIRSFLAGILGVDVLAIYGLSEISALEILAETGTDMSKWGSEKHFASWLNLCPNNKVSGGKLMSSRLLKKKPNAASQAFRMAANSVQRSNHWLGDYFRRMKAKGGNKYAIVATANKMATIYYKMVRNQVEFSPLDLQQYQEKRQQAKIAYLERKLEQLKKGVA

SEQ ID NO: 46282 - protein, 375 aa, unidentified
MKEKLRFLGLDVHAETIAVAIAEPDGEVRSLGTIPNRLESIRKLVKKLGPVEKLRACYEAGPTGYVLYWQLAELGVKCEVVAPTLVPVKAGDRVKTDRRDAEKLARSYRSGDLTAVWIPNEGSEALRDLVRAREAAKQDQLRARHRLSKFLLRSGQRPAPGVKAWTQIYMAWIRQIHFAQMAHESTRLDYLHEVEHMGERVTRLEQAIAEAAKLASPELREVIQGLQALRGIAQISAITIAAELGQISRFEGARQLMGYSGMVPSEDSSGERKQRGSITKTGNSHLRRIAVEAAWSYRLPPGVGPALRKRQEGVPQEIKEIAWKAQHRLHKRYCRLAATRKDQRKIITALGRELLGFIWAIGIKAETAARQRVAA

SEQ ID NO: 46283 - protein, 406 aa, unidentified
MFYLGIDVALNTHRLVMLDDNGERVSSGISFQNNTADFEKVLTKLKELSINLDNSISGLEATGNNWENLYCFLTGKGFKTILLNPHQTNKFREALRKKAKTDDIDAFVIAGLLRSNEFASSYVPEDKIQTLRELTKLRYEFIKDHKNYQRQVLALLNLIFPEYRQTALKNPFAIASIAIFKAFSTAKHLASTKPKHIEKIVRSIKGNNFNIKEIENLISIAKTSVYSGRCQESRALTLNILLTQVENFDKSIQQLEEQVNLILSPASNDDISSFPGSNLLTIPGVGPKTLAAILSCVGESGQAFSDGVKLIGHIGFFPQIYESGETKRANKLSNKGPAYLRHALYMASVACIKHNLQLRNLYHTKVSQGKKPKQALICVAKKLAHICLSMLHSGQDYNPARVFSYV

SEQ ID NO: 46284 - protein, 320 aa, unidentified
MSASSVVVGIDVAKAHVDVSVLGAKLDAQRFDNEADAHSALAAALQPLGVALVVMEATGGYEVALACALQAAGLPVAVVNPKQARDFAKSMGCLAKTDRIDARMLAELAAVLVRRDDLARFIRPLSNAQQQALAALVTRRRQLLGMLLSERQRLELAITVVRPSIEAMLLAIRAQLDEVEAQMVGHVRQHFAELDTLLRSASGIGPIASATLIAELPELGRLSRREIAALVGVAPMANDSGGSHRRRRVQGGRSDVRRVLYMAALVAARHNPAIQTFYKRLIGAGKLPKVALVACMRKLLTTLNSMVKTNKPWDMSLHRT

SEQ ID NO: 46285 - protein, 353 aa, unidentified
MGSPGSERGAPGNGRPYRKKHIFQLHGVNAAEEPVLRKKLRRQDLIAFFTKLPPTVIGIEACGGSHNWARQLQSLGHQVRMLPPQYVKPYLKRGKNDAADAEAICEAMSRPTMRFVPVKSADQQAALMLIGLRDRLIRQRTQLANAIRGYAAEFGLIAAKGLVRIEPLLERIRADDTLPPLARELFDIHAKDYTQLQARLEEVDDKLMAWHRADECSRRLAKIPGVGPIGASMLVMKAPAPEAFRSARHFAAWLGLTPKDHSTAGKVRLGVITRAGDEALRSVLVVGATALLQQVRRGRGSASPWLEALLKRKPPKLAAVALANKIARIAWKLMVTGEVYQPQSAPPARAHAV

SEQ ID NO: 46286 - protein, 344 aa, unidentified
MSEIKRIGIDTSKAVFTLHAIDQADRPVLRVNLRRAQMLPFFKKRPRTEIAMEACGSAHHWARKLIAMGHDVRLIPPQYVKPYVKRGKNDRNDAEAICEAAGRPGMRFVLTKSEAQQADGLVLKVRETLLGQRTRLINTLRGHAAEFGVIAAKGTSQVVPLLAAIEAEAGIPATAKAMLALLGEEIAHLDDRLKELETKLLAMHRANAISQLLATIPGIGPLIALTLAIEIDPKAFQSGRHLAAWLGLTPREHSTGGKQRLGGISRAGHERLRALLVTGATAVIRHASRADSRLATPWLRQLLSRKPRKLAAVALANKMARIVWAIMTRGEVYRQPTAGAVAVA

SEQ ID NO: 46287 - protein, 408 aa, unidentified
MKRYYMGVDWGDRLHQVYVGDEDGKKVREMKLQESPEGLAEIGRWLDEKRAEGFELWAAIEKPQGRIVDFLLDHGVEVYPVNPKAVDRVRDRYRMSGSKSDAFDAYVLAEFLRTDQVHLRALRPSSEKAQELKMLSRDQRRVVRHKTRFLNQLTTTLKEYYARPLEVFEDLETEIALDFLQRYPTPAHLSALTRKQFNRFATKQHHLSKQRCEELWEKLNKPQLAVPEHVVRAKAQLVEVLIEQLRASIKAVKIYNHRVESFFASSPAAQFAKTLPGGKSGTLVAAIWAELGDAQGRWESSRHLQAEAGAVPVTKASGKSRVVHFRFACNKHLRYTMYWFSFVSLNHSEWAKLYYRGQRDNGHSHHQALRALGAKWLKIIFVMWRDHKPYDENYHLANIARQKMRQAA

SEQ ID NO: 46288 - protein, 374 aa, unidentified
MAKRVQGSGTSSGREGPSAKTLGLSKASPSRRKKEAPVEREYVGIDLHRRRSVIVRKNAAGEVLSKVRIENSPMALAEAVAAAGPEPEVVLEATFGWYWAADVLEEMGARVHLAHPLGNNWGNRRVKNDERDANDLVDLLRLGRLAEAWIAPPELRELRELVRYRLKLVRLRGGLKAQVHAVMGKHGVLPTRCDMFDVGGGAQLDALDLPAGYMARLDSLRDLIEVYDREINDLDRRIVKMLANHQGYRAIQAIHGVGPILAAVFVAEIGDITRFPSPAHLASWAGMTPMHRESDTKVRRGKISKQGSRHVRWAAVEAVSRNHGDGKIKADYRRISERRGRNIGRVAAARKVLTLVFYGLRDGEIRCLTRADRG

SEQ ID NO: 46289 - protein, 361 aa, unidentified
MKKPAHHLIAEVPRKRAKVELTIGIDLGDVWSHYCTLNQQGEVIDRGRFRTTPKAIDQWFTDVPHARVAMEAGVHSIWISEQLEQLGHEVIVANVRELRAISHSDRKSDDVDAEKLARYARLDPEILRPISHRTVQQQEALTLIRARELLVRLRTAAVNAVRGLTKACGHRMPASSTKCFAQRGQAAMPPGLKLALGPILTQIAEMTLKIKQYDRDIQRMTQTEYVETQAMMTIHGVGHITALTFVLTLGDKERFGRSRDVGCYLGLRPKRSQSGERDPQLGITKAGNAYLRSLLIECANHILRPYGRDSALRQWGLHLAARGGKQARNKSVVAVARKLAVLLHHLWTTQEPYVPFYQQAA

SEQ ID NO: 46290 - protein, 326 aa, unidentified
MTLSHLTDNTFVGIDVGGAGLDVAWHRGDSAHYANRPDAIAALVERLRTGPEVTRIVLEPTGGYEKALVKALRQAQLPVEIIHTTRFNAYRALVGVKAKSDTSDAKLLASYAAAPDEVRGRKAGHVELPEDAVREELSELASRRDQLKHMIHAETCRLGTVRKNELRQMITTHLEMLRAEDKQVHRIMLELVRQRDDLRRDQRLLKTIKGIGAKSALVLLASVPELGRIDNKAAAALIGVAPFVRKSGTMNAPARIHGGRAPVRSILYMAAVTASIHNPLLSPFYDRLIAKGKPPKVALIAVLRRLVVFANAVLRSGQPWKGANAT

SEQ ID NO: 46291 - protein, 317 aa, unidentified
MTESVKVNVGIDVSKDFLDVHVGDVALRRVPNRSSGLSVLKRILSRYTVSLVLLESTGGYENLAVTYLQALGYDVCVINPRQARDFARSMGRLAKTDKIDAQILCRLADVIDASPERARFVKPLTDERRQRLVSMVRRRRQLCDLMIAERNRRAKTDAYGSESISTVLDFLTDEVARIDRDIAAHVGSCFSDISSLLQTFTGIGPVTASTLLGELPELGKLNRRQITALVGVAPFNRDSGYMRGRRRISGGRSGVRNVLFMAALSAVRFNPVLKAFFARLVSAGKPKKVALVACMRRMVCILNAMLRDGSRFEVALG

SEQ ID NO: 46292 - protein, 430 aa, unidentified
MACVRHMVDGAVKREVRTFKTTTKDLMALSEWLSAEGCTDVAMEATGIYWKPVWHILADGDFKPMLANAAHVKNVPGRKTDVNDATWLADLMAHGLIRGSFVPDEPTQEMRNFLRTRKQFVRERSSHVQRIQKTLEDANIKLDSVITDIMGLSGRRMIEALIAGETDPFALAGLAHRRIKASQAELEAALRGRVSDHHRFMLRLLLQHIDAIDAAIGQIDQEVDAHVEPFRTAIQILSSIPGISDLSAEVIVSEIGIDMNRFPTEGHLISWAGLCPRNDESAGKRRSTRMRKGAPWLKTTLIQCAWAAARTKGSYLQAQFQRVRSRRGAKKGDRRRRCIGSHRCVPHAEERHSVRGPRQRPLRPPCERQANPSPRQPHPEPWLCRPDHANRGGSMMSLRQALTSEPAQPPDSYAAGRRPDRGQSPSIVSF

SEQ ID NO: 46293 - protein, 338 aa, unidentified
MNVTRIGIDLAKQVFQVHGVDRIGKVLIRKQLRRTQMLDYFSKLTPCLIGMEACGSAHYWARELSKLGHDVRLMAPQFVKPYVKSGKNDANDAEAICEAVGRPNMRFVAIKTVEQQAIQAEHRIRARLIKSRTALSNEIRGLLAEFGIVVATSIGRLRKALPELLEDGENGLPGNFRVLLAGLGEELRALDDSIAAFEARIAQAARKDDRIRRLLEVEGIGPITASALVAAVGNGTQFNSGRDMSAWLGLTPRQYSSGGKNRLGGISKRGDKYMRMLLIHGARAALNAAKNKEDGRSRWVKSLAARRNKNIATVALANKNARIAWSILSRGESYRKAA

SEQ ID NO: 46294 - protein, 307 aa, unidentified
MTLPRHVLGVDVARDWIDTFDLASGEARRIATRPADLKALAARLEGVFVVFEASGGHERPLMDALEAAGVAHARVNPRHAREFARACGKLAKTDRVDAEMLARMGAALDLRPAAPLDPARRRLAELVARRNDIVTAITAEKQRLAQARERFVQLSIQRLLAVLVRQKKAIEAEITAHTRAQADLDVLDQRLRTAPGIGPANASVIMAVLPELGRVDRRAIAALAGLAPQANDSGHRKGRRSVWGGRAPARRALYIAAFIASRSDPMFKAMRQRLEAAGKPFKVAIIAMARKLLTILNAMVRDRRDYA

SEQ ID NO: 46295 - protein, 309 aa, unidentified
MNEELVYLGVDIAKSHLDAAIGKEKHRFSNDAVGHRELIRWVKQTKAPIQVICESSGGYERRLVQAVARAGIRISLVQANRVRQFARAAGVLAKTDSIDAEVLCAYGEAMRPQTVGASELEQEHLRELESQRRHLTHLLVMEQNRGARLSDAFVRRLNRSLIKQIKKQIERLDLLIKEHIEQSPRLTAKAEKLISIKGIGLRTAALLLAQMPELGQLNRREVAALVGVAPFNRDSGKLRGKRAIYGGRRFVRHGLYMAALVAARHNPILRAFYQRLRTAGKPAKVALTATMRKPLIVLNSSLKSDLNYA

SEQ ID NO: 46296 - protein, 408 aa, unidentified
MKRYYLGVDWAEEFHQVWVSDPDGKKVAEMKVFQQSEAMSEFGAWLHQRKAEEIELWAAIEKPHGRIVDFLLDHRVVVYPVNPKALDRARDRFRMSQSKSDSFDAYVLAEFLRTDHAHLRALEPNSVQAQELKILSRDHERLMRQKTRLLHQIGITLKEYYPRPLEVFGDLESKIARDFLKAYPTPQTLSKLNRRGWNRFAKHDHHVSEVRSNELWEKLSKAQLPIPEHIVRAKAKLLLALMVQLGALIPEVEGYSEEVERFFAAMPAAELVKTLPGGKSGTTVAKLWAELGDANNRWQSFRHLQAEAGGVPVTQSSGKSHVVVFRFACNKHLRHAIYWFSFNSLRRCEWAYKSYRQQRAKGHSHAQALRALGAKWLKIIFVMWRDHKPYDENYHLANIARQRMRQAA

SEQ ID NO: 46297 - protein, 348 aa, unidentified
MQSTANLPVIGLDLAKSVFQLHIVDRETGEIQRRQIKRAKLSEFFAQCQRSLVAMEACGTSHHWARVIQSLGHEVKLLPAQHVKAFLLRDKTDAMDAQAIWVAAQQPHLKAVPVKTERQQTCMALHGMRRQLMKMRIMQTNAVRGILAEFGVVLPVGHTQLLKTVQGELATAQRDGRLAPDLVVCLQEQLKRIHDLQVDLDQIGQRLRAMIREDRQMQAIEHIPGVGELTASALVAAVGDFSVFKSGRQFASWVGLTPRQVGTGGKTQQLGISKRGDSYLRCLLIAGARAVIARSTKTGWITRLLERRHYNVVVAALANKMARTAWTVLAKGAAFDPVKWNPLEPVAS

SEQ ID NO: 46298 - protein, 347 aa, unidentified
MNFYTQQHKHYCGIDLHARARYVCILDEQGTKLVHKNLPTTPEAFLRLIAPYREDLVVGVECMFTWYWLADLCSQEGIAFVLGHALYMKAIHGGKAKNDKIEAHKIAVLLRGGMFPQAYVYPSEMRATRDLLRRRCHLARKRAELLAHIHNTNSQYNLPEIGKRLANKSNREDVADHFPDPSVRKAIEVDVALIDQYDQLLGEVELDLTRSAKAPDVQPFARLQSVPGIGQILALVILYEIQDIARFPRVQDFVSYCRLVKCAKESNGKRFGTSGKKIGNVHLRWAFAEAAVLFIRQSQPGKEYFAKLEHKHGKAKALTVLAHKLGRAVYYMLSREHAFDLKRFVTA

SEQ ID NO: 46299 - protein, 345 aa, unidentified
MGQAIRFGIDLAKSVIQVHGVDAQGEVVVRRQLRREQFATFFSKQPPALIGMEACGSAHYWGRELSALGHDVRLMPALYVKAYLKRGKNDARDAEASCEAVGRPTMRFVPIKSVEQQCGRAIERARDLLVRQRTQHANAIRGQLYEMGLTASKGASGIAALLQRIEMSDAAIPPALLPALAPLARQWRAADAEVAALDKQILELVREDPAARRLMTIPGVGPLTAHAVVAAVGDGRQFKTARDFAAWVGLTRHNHDTGGKARLTGRITKAGDRGLRRLLVLGASSWLRHVRAPGRTTYPAGSIWIRGVLARRPVRVAVVAQAAKTARIVWAVLTTGDVYRAPGAA

SEQ ID NO: 46300 - protein, 366 aa, unidentified
MFSERTSVGLDVHARSVAAAAIDGVTGELFQARLTPSHEHIRGWIGGLPGPVAATYEAGPTGFGLARALRADGIRCVVAAPSKLQRPSGDRVKTDARDAVHLARLLRLDEVTAVVIPSEDQEAARDLVRAREDCRGDLMRARHRLSKLLLRHGIVYSGGQAWTGTHDVWLRRQHFDAPAVQLAFESDYDTVLATGARRDRLDAAITAMAADSEFTPVVRRLSCLRGVSTLTSFALAVEIGDWHRFTGNTIGSFVGLVPTEYSSGASRVQGSITKTGNTHARRLLIEAAWHHRARYRAGATMLARWDLASPAARARGDDGNRRLHARWARFDERHKRAVIANVAVARELAGWCWSLAVLQENTAMAH

SEQ ID NO: 46301 - protein, 371 aa, unidentified
MSELPAGTKPARLKAGVSPRPPWACKPGTELGATPTFAVPNPDSRLGLSPHSQGRVMDEPSAVFVGIDVSKDHLDVHLRPTGETLCVPRDAKGLDSLAGHLNDVPVALVVLEATGGFEATVAAALAGVGLPLCVVNPRQIRDFARAMGRLAKTDTLDAEVIALFAERVRPQTRPLPQKERSHLAELVGRRRQIIEMIGMETNRRGQVIDKQLARRLDRHVVFLEKELAEVDRDIGQAIKTSPVWRETEALLKSVPGIGDVTARTLLAELPELGTIGRHQLAALVGVAPINRDSGLMRGRRTIAGGRTSVRNVLYMAALTAIRRGSPFRAFYDRLTSRGRPKKVALVAVMRKLLTTLNAIVRDQTPWQPLNA

SEQ ID NO: 46302 - protein, 426 aa, unidentified
MAYKIAGIDVHKKMLTVVLCDVEVADEYQFARRIFGASPEQLRALAAWLLDEEVEEVVMESTAQYWRPVWETLERYWKPICEQRDDRRPGSATLHLALALSNRGRRGRKRDFADAERLVKRLVAGELTLSFVPDAEQRLWRTVTRRKYQLTRDRIRLQNQLEALLEEAHIKLSSLVSDLLGTSARRMLQALAGGETDPAALAALAHKGLRATPEQLCDSLGAARDLKPTYRRLLKMALDQLQLLDLQIGQLDQEMADLIRPHQDAVQRLTEIPGVGVDAAQQIVAEVGPTAATFPSAKSLSSWVGVCPGEEESAGVNHSHRSPKGNRQMRRILNQTANAAVKAKGSIFEFVFRRCVERLGYKQAIGAISHRQCRLIWLILHQGVRYEERGPAVIKQSQQKRTARMVRQLRKLGYTINAPQPAPSQA

SEQ ID NO: 46303 - protein, 348 aa, unidentified
MLEDELDYLLGVDTHRDEHVLAVVTAPAGAVVAGSRVAASRRGYQEALCFAERYAAGRCVWAIEGTGSYGAGLARFLAERGEVVLELSRTARAERRLAGKDDALDAVRTARAALASETLALPRAGERREALRLLLAARRSAVDVRRQALGQLRAVIVTSPDPLRDELRRLPLGQLLDRCSRLRRTHSTADHLATRVVLHSLARRVQAATAEAEELEREILAQVGALAPALLDEPGVGPIVAAQLIVAWSHRGRLRSEACFARLAGVAPLPAASGQTVRHRLSRGGDRQLNRALHTIVLHRRQHDPATRDYIARRVAEGKSRRDATRLLKRYLARRLYRLLQNQEPLMA

SEQ ID NO: 46304 - protein, 347 aa, unidentified
MLIIGCDFHPGFQQVAIFDNTSGEIQERRLGHRAEAEQFYRSLAGQEVRVGMEACGHYPWFERLLAELRIALWLGDAGKIRAQEVRKQKTDRRDAAHLLELLLEDRFPRIWVPSLEERDVRQLLVHRHKQVQTRTQVKNQLQALALSQGVQRKRKLWTQAGRAELEQLELLPYAAERRTQLLRSLDRLEQEIAELNQRVEAEVAQRAAAVKLQTHPGVGPVTALAMVLTLGPAERFESAKQVGSYFGLIPSEHSSGGRQKLGRISKQGSSFLRFLLVEAGQSAVRKDAELCRFYRRLAARKHRALAKVAVARKLATRLYLMLREDWTYAQLCRAMVSASPSHSVVER

SEQ ID NO: 46305 - protein, 444 aa, unidentified
MKRKSRHAKQQKASLLSEDLQLIEPDAAAIDIGSRSHWVAVNPQRASEPVREFGTFTTDLNRLADWLTECRASSVVMEATGVYWVTLYELLEERGFNVYLVDAHTVRHLPGRKKSDVVDCQWIRRLQSYGLLQGSFRPPQQIRRLRTYLRSRSKVLECAAQQQLRMQKALTLMNIQLHHVISDLDGVTGMGIVRAIVAGERDAKQLARLRDPRIRASRETIEKSLQGNWQEELLFDLKIALESYDHFQTQIAAYDEQIRQELKALPSKVDLQKQPLGAPRPKSCRTRHGTTQQQQVDLRQELYRISGVDLTRIDGVSLQTAQKVLFEIGTDVSAWSDERKFSSWLGLSPNHHISGGKVLKRKSRKVINPLSIALRLAARTLRNSKSALGANFRRLIAKIGMPKAITAMARKLAVLIYRMLKYGSDYVDKAKLLASVCNWFRIRE

SEQ ID NO: 46306 - protein, 457 aa, unidentified
MMETKRRREQRSMLPVHPDAAAIDIGATVHVAAVGPARDPEPVRSFGTFTGDLHRLADWFAQCGIKTVVMESTGVYWIPIYEILEQRGFEVRVVNARDAKHVPGRKTDVSDAAWLQRLHEFGLLRGSFRPQGAIAALRAYLRQRERLLDYAAAHIQHMQKALTQMNLQIHHVISDITGATGMRIIRAIVAGERDPDTLASYRDIRCHSSAETVRQALIGNYREEHLFALAQAVELYEVYQAKVATCDEKIEGVLERLKQPCRAPAKPLRAARHKTRQPNAPAFDARGALYAVLGVDLTQIHGLGPYLALKLISECGTDLTAWPSAKHFTSWLSLAPHNKISGGKILSSRTRPSGNRAAALLRLAATTVGRTETALGAFYRRLSARIGKAKAVTATARKIAVLFYNAVRHGMDYADPGASYYEERYRRRVLTNLQRRAKAFGYVLQPTEIKVVPMAVS

SEQ ID NO: 46307 - protein, 377 aa, unidentified
MDQPIRFFIGLDVHKDSIAIAASQANSRDEARFIGTTGHSVHQVVKALSKSQCSPSELAIAYEAGPCGYGLARELIARGYNCEVVAPSRVPRRPADRIKTDRRDALLLARLHRSAELVAVAVPDPSDEAVRDLTRARDDAVKAQRCARQQLMAWLLRLGKPYREGRGWTQKFLRFLADLQFDDPHHRIVFTEYRLAVQSAGERIERIEAGIREAFNTWRWQPVVRALMCLRGVDFLTAMTIVAEIGDLRRFEHPRQLMSYLGLVPSEFSSGNNRQRGALTRTGNSRVRRVLIEAAWNYRHRPKISREIETRQEGLPAAIIEIAWKAQVRLCHRFHKLRYRGLHQNKTCAAIARELVGVVWDIARRFRPIEHPTSSRQ

SEQ ID NO: 46308 - protein, 315 aa, unidentified
MTFLKTIPSCVVGIDVSKDTLALCEHDKQTVQVIANASRSIRLFMTHLKPDTLVVLEPTGGYEALLVSELCAAGIACHRADTLKVKAFTRSFGRLGKTDNIDAKALAAYGADRWRGLPLYELSDKHQSDLVALVARRQDLMDIQVAEKNRVQAPGCASVKHSCEIVLACIRRQLERLDQQIERLIQTSADLSERMATYQSLSGVGPRTAIALLATMPELGTLTRRQAASLAGLAPHPNDSGTLRGYRKMRGGRPEVRKSLFMAALCASRLKGPLRNFYQRLITNGKKPIVAISALMRKIIVILNARMRDKISAMS

SEQ ID NO: 46309 - protein, 326 aa, unidentified
MQGKEASEQETKSKSNAGIDVSKSWLDAHVLPAGATLRVANTREGIRKLKRWLMQFDLALVVIEATGKWHRDVRRSLHAAMVPVAVVDPFRVRMFAKACGVLAKTDRLDARVLAQFAAVMAPAVRTPASEVMEELAELVTARASAVAEQTALKNQLSTATGIFLKRQLGRRIERLAKDIAALEREILKCIQADQGLARRYAILTSITGFGPVVATTLIACLAELGTCSRKQIGMLAGLAPVADESGQRQGIRVVWGGRPNIRRVLYLAAITAARFDADMKAFFSRLIAAGKPAKLAIIAVARKLVVLANILISEGRMWQPHSPKHA

SEQ ID NO: 46310 - protein, 416 aa, unidentified
MNAAGIDVSSRKSTVAVLRPFGEVVRLPFDVAHNTEGLASLAEQLKALDGETRVVLEHTGRYYEPVAKALHEAGLYVSAVNPLLIKEYGANSLRRVKTDKADAVKIARYALDNWADLRDYTPMDTIRYDLKTLNRQFQLASKQRTASANNLIALLEQSFPGIRKCFDSPVRSDGTQKWVDFVHTFWHVECVRKQSLNAFSERYRKWCKRHGYIFKQGNAVEVYSLAKNAVVLVPKSEVTKVLVQEAANQLTSISRSVETYRAEMERLASTLPEYPVVMAMYGVGKSFGPQLMAEIGDVRRFERKQSLVAFAGIDPMPNQSGNKNVRSNKSSKRGSPYLRKTLFNIMGIYLKCSPQDEPVYQFLDHKRSEGKPFYVYMTAASNKFLRRYYAQVRDYLSTLDDLPPVDMDSTGLKTSD

SEQ ID NO: 46311 - protein, 297 aa, unidentified
MSDSVFIGIDVSSQTLEVASSSQAKTWQVANDAAGIEQLVDQASALTPALVVLEATGGYEFEAACALQAAGLAVAVVNPRTARDFARAMGALAKTDALDARMLAAFARVLHQHPERERFVKPLADAELQQLQALVLRRRQLVQMLTAERQRLRLAHAAARPSIERVIEFLKQEIGDSEAEVATHVQGHHSQLAQALASVPGIGAASVAVLLAELPELGKLDRRRIAALVGVAPLNRDSGQMRGQRSIWGGRADVRRTLYMATLVAVRHNPALKACYERLLAGASARRLPWSLACASY

SEQ ID NO: 46312 - protein, 420 aa, unidentified
MDEITEEPGALVQRVAALDIGKASLTVCLRVPQEDKPGARRQEVRTYATLTPALLELRDWLVCQGVTLVVMEATSAYWKPPFYLLEDDIECWVVNARDVKNVPGRPKTDKLDSVWLCKLAGRGMLRASFIPSRPQRQLRDLTRYRRTLTRERTREKQRAEKLLQDAQIKLSVVISDIFGASGRAMLDALIAGQASPHQLAALARGKMRAKTSALQEALTGHFTEHHAFMLGMMLARIDALTAQIATLTTRIEQATAPLAAQVAQLDEIPGIGTTAAQDLIAEIGTDMTRFPTPGHLVSWAKFAPRARQSAGRSKAASTGKGNPWLGGTLGEAAAGAARTKTFLASRYKRIARRRGKNRAVVAVGNSILTITWHLLSDPSAHFTDLGPDWHDRLAPLRRKRQLIAELERLSAKKVTLQDAV

SEQ ID NO: 46313 - protein, 468 aa, unidentified
MSAQPTTRKRTTKATQSRKPAHRVHNTGRPSAPLSIVHPNAAGLDIGKEEIFVAVPAERDPYPVRSYATFTPDLHALADWLQHCQVDTVAMESTGVYWIPLYELLEQRGIRCFLINAAHLKRVPGRKSDVQDCQWLQQCHSFGLLAGSFRPDAEMVQLRTYLRHRAELIERRAPYVLHMQKALHQMNIQLDVVLSNIMGDTGQAILRSILRGERDPVKLAQLRHPSCHSSQETIAKALTGAYRDDYLFALKQAVELYDYYTTKIAECDAQVERCFSAIKPRFAPAQPAPTERKKKNSNSRNEPASNTRQHLFRITGLDLVAIDGFSNSIAQTVFAEVGVDMSRWPTPKHFASWLGLSPHNEISGGKILRSKTHKTRNRAAQAFRLAARDSALGAFYRRLKARIGPQQALTATAHKIARIYYAICKNRQPFEHVTAETYQQQFHERELKYLRRKAAKLGFVLAPKPDPA

SEQ ID NO: 46314 - protein, 437 aa, unidentified
MSDKKPVELGVSVDVGYRRHSVAIGLASGEVLEEFEISHRPEGFEQFFSRIEKHQKVRNCEVAVAMEGFNGCARPLDRMVRRRGYRLYNINNLKLARFKEIFPGAAKSDRIDARKGLELFQLSDHLPLAKEVLQEVKGTPQENEVLKRLTRRRRRLVDEGVRVISNLQTDLQAVCPGLLEITKNAGNQWFLNFLISAPSLPQLARLRPSTLLKIPAVGRKYASLIEDWQKRAHFSEEVKWVSEMIQEDAQRCLDLDEKIKSLKAKIREVAKESKIAKILLSIPGFGTICTAELAGEIGTIERFLKEGSLALYLGMATLDNSSGKYQGSKQPKHVNTRAKAAMMIAIDRHRKYVPESQRYYEKKRSEGKKHNQAIRALGRHLSRIIYKMLTEEREYEMRPEKGNTKTKVRSRSCVKTQIRKPKISAKGKKNNIYQQST

SEQ ID NO: 46315 - protein, 361 aa, unidentified
MAQVRTWAAFDVHVSGVVAATLERDSGELRVRRLPGSSDEVAAFAAGLPGPVRATYEAGPTGFVLARRLAAAGVECVVCAPGLIPRGPSDRVKTDRRDAERLVRLLAAGELHRVAVPGVQEEALRDLVRAREDLRGDLMRARHRLAKLLLRHEVRFDGPERNWTQAHLGWLAGVQLAQSASQRALEDYRGAVSALMIRREQLEAEIARALPGSPWAQTAQRLMCLRGIDTLTAAGLCAEIGDFHRFRHPAQVMSYLGVVPSEHSSGERRRRGPITKSGSQHARRLLVEAAWHYRRPPRVAGSLARRQTNAEPEIVALSWKAQRRLHHVWQRMEQRHKRRTIIAVATARELAGFCWALATTD

SEQ ID NO: 46316 - protein, 410 aa, unidentified
MEPILISCAGMDVHEKKVDVCVAHGPFDKPPKFEIRTFSTMTSDLEELMAWLKKYEVSTIGMESTGIYWKPIFNVMEGQFEIVLANAQRLKAIPRKKTDIMDCKRIANLLRYGLLPNSFIPPREIRELRDLNRTRRKFVGIMTSEKNRLVKVLESANIKLSSVVSRIYGVSSLAMIRSLLEKDRLSREDISKMAKGKLKKKVGLLEKALNGKLTDHHRFLLEMHLQNIDYLTKQIKKLDEEIEKKMVPFQKESKLIQTIPGISEVNASAILAEIGNDMSQFPDEAHLSSWAGVCPGNNESAGKKKSGKTQKGNSFLKGALTESAWAASKTKNTSYNAFYHNLIRRKGKKKTLVALAHRMLIDIYFVLKTSEPYQDIGAEAIHERTSKRRERSMVRSLEKAGYSVTKAATA

SEQ ID NO: 46317 - protein, 360 aa, unidentified
MEVGQTMADHGVVGGVDTHKDLHVAAVVDALDRVLESRCFATTRHGYQQMLTWMRSFGQLQRIGVEATGTYGAGLLRYMQNAGVEVLEVTTPDTHDRRKRGKNDDLDAQNAAHAAFAGRRTVTPKSRDGMVESLRVLKACRKTAVAARRVALQMIHNTVVCAPDELRETLRRMTRMQLIRTLAAWRPDLTDYRSVVSAYRITLKSLGRRYLELHDEIADLDTMIVAIVDELAPALVARNSIGYGSAAQLLVTAGDNAERLQSEASFAALCGASPVPASSGKTTRHRLNRGGDRAANSALHIIAIGRLRTDPRTKAYIAKRVAEGHSKLEAIRCLKRYIAREVFSLISQRQREINQGRNAA

SEQ ID NO: 46318 - protein, 269 aa, unidentified
MKYKVFIGIDVSKLTIDAYLHGIGASKTFSNEEKGFASLLNWVKKYSKQSEPAEMIICFEHTGLYSIKLATYLNDLGIPFAMLPALQIKQSIGIRRGKNDQIDAQRIAEYAWLHRETIQATVLPAKSILKLQSLLTLRNRMVCDRGGYEATWKEQKKALEGKEHKGIFQVYKSLIMTLTVQVKKIEEQIKAVIESDEAVKLNYQLLTSIKCVGPVLAANMIAYTHNFTRFATWRKFACYVGTAPFEHQSGTSIKGRTRVSSLSNKQLKK

SEQ ID NO: 46319 - protein, 381 aa, unidentified
MTTAATHHEPRNTTAATLFVAFELSEKTWKLGFTTGHGQKPRERTVTARHQERVLDEIAQAKRRLGLPDTASVVSCYEAGREGFWLHRFLQAHGITNQVVDSSSIEVNRRRRRAKSDGLDVRKLLSMLMRYHHGERQVWQVVKVPSVEAEDHRHLHRDLETLKQERASTMTRIEGLLSSQGLRVPSLTKLPEQLDALRLWDGSPLPPGLRRRVLRVYAQYTFLSEQIAEVEAERRTQLQTSSDASLDKVRQLMQLKGIGINGAWLLVMEFFGWRAFKNRREVGGVAGFTPTPYQSGESAREQGITKAGNRHVRWMTTELAWSWLRFQPDSALSVWFRARFGSGGKRLRRIGIVAVARKLLIALWRFLETGVIPAGAMLKEG

SEQ ID NO: 46320 - protein, 399 aa, unidentified
MTNPQAGIGGVDSHKDTIHVAVITAIGQPVTDREFPTTEGGYRRAVAWLIEHGPLQAVGIEGTSSYGIGITTAVTAAGIRVVEVNRTRPAERRRQGKTDQLDAYRAARSVLTGEASTDPKSASIEPLRALTVARRSAVKAQQAAWRQIGALLVNAPARLRDRYRDLSEAKLVASLTNTRPEQQANPDLADTMHALRALARRHRALGQEITDLEARMAARATSTNPALLAMKGVGPVIGAQLLITAGDNPDRLRSSASFAALCGTAPIPVSSGRTDRHRLSRGGDRQANAALHHIVKVRMSYDPATRAYRDAHLAKGWTTKAVFRALKRAVAREVFQALAGHCAVPDYSDLRPARRAKNLTLTAAAHHLGVWPARVGELELGRRPNNEMATRYRAWLNAA

SEQ ID NO: 46321 - protein, 338 aa, unidentified
MNIVFPGIDLAKNVFQLCGLNQAGKPVYTKRTGRKELLQTLANIPACLIGIEASTGAFYWQREFEKLGHKVKVISPQYVKPFVRGQKNDGNDAQAIAVALMQPTMQFVPPKSPEQQDIQALHRARQRIVNHRTATVCQIRGLLLDRGIPIGSAVSRARRAIPLIPEDAENGLSSRMRRTIAELYDLFNDLERRIHFFDKEIETVFRQSEACQRIAKVKGIGPETATAVVAAIGKGTEFKNGRHFAAWLGLVPRQHLSGDRQVLMNMTKKGDRHLRTLFIHGARAVVRVATNNKDGHMNQWVNQLKERRGFNKTTVAVANKNARIIWSMLRNETEYQVV

SEQ ID NO: 46322 - protein, 370 aa, unidentified
MKKNSATKSRRRKQESQETGRITIGMDLGDKTSRYCVLGEDGEVMLERGVPTSRKGMLQAFGAVQRCRIAIEVGTHSPWISRLLTKLGHEVIVANARQVKLISASSRKDDKLDAQMLARLARVDPKLLSPIRHRSAEAQADLNVIRVRAALVDGRTALVNAARGLCKAAGERLPKCDTGQMDVERLAEVPAELGEVLRPLIESVESMTEKIHECDKKLEQIARDKYPETKLLKQVKGVGTLIALTFVLTVEDKGRFARSRDVGCYVGLRPKRSESGESQPQLRITKEGDVYLRKMLVQGAHYILGYRGPETDLKRWGETLAGRGGKNAKKRAIVAVARKLGVLLHRLWVTGEVYEPLRNHKEAKSLKKAA

SEQ ID NO: 46323 - protein, 391 aa, unidentified
MVCVGIDVAKDKHDCCILDSEGTTLVDCFTIPNNMDGFKSLLQTIQDCSQKSDKIKVGLEATGHYSYNILGFLLDNDLPVYVMNPLHTNLYRKSLSLRKTKTDRVDAKTIATMLLSDVDLKSYTDTAYHNEELKSLTRYRFDKVQERAKLKQSVSRLVTILFPELEQLVSSIHGTSIYALLSEYPGAKQISEAHLTRLANILVKTSRGHYRKDKATHIRDAARTSIGSVMPAKSLELKHTIKLIQELTSEINEIEDAIRKIMDELKPPILSIPGMGFYSAAMILAEVGDFSNFNSPDKVLAYAGCSPSTYQSGKLTNCYAHMEKRGSRYLRYALYTATKYVCYWNPVFTEYLTKKQAEGKHYNVALSHATKKLVRLIYALQKSGKAYLAVT

SEQ ID NO: 46324 - protein, 338 aa, unidentified
MQTYAGIDLHSSNNFVGVINDKDKILYGKRHQNRLDDVLRALDPFRASLQGVVVESTFNWYWLVDGLQEHGYPVHLANPSAIQQYEGLKYTDDPWDSFWLAHMYRLGILAEGYIYPKEHRAVRDLLRRRLLFVRQRTAQILSLQSMISRNLGFKMSNNEIKKLKPADIESLFDCSNLVFMANNSLAAIEFLKKITKGIEKKVKSQVKMRKEFEMLLTIPGIGNILGLTISLEVGDIGRFPKVGDYSSYCRCVESTRLSNGKKKGENNKKNGNKYLAWAYVEAAQFARRYCVKAQSFYQSKEAKTKPVVAIKALSNKLSKASYYIMRDQVAFDEEKLFG

SEQ ID NO: 46325 - protein, 445 aa, unidentified
MKQKKSLKKVGMTLPKHLQHINVNAAGVDIGSRSHFVAVPEGVDEKPVREFSGFTGDLERMAEWLIACGVTTVAMESTGVYWIPVFEILESHGLEVKLVNARHVKNVPGRKSDVLDCQWLQQLHTYGLLRGAFRPVEQVCTLRAYVRQRAMLVRSAASYIQRMQKALAQMNLQLHNVVTDITGMTGMRIIKAILGGERTPDVLAAMRDRRCKNSAATIARSLQGSYRPEHLFSLQQAVELYEFHQEKIADCDRQILEQLKSFDAQNAPDDAPPSNVEEALQRMSGVDLTSIDGIDTNTALKILAEIGTDMNRWKTAKHFASWLGLSPGTKVSGGKVLSSATKPVANKAAAALRIAAFTLFNSKSALGAYLRRQRARLGAPKAVTATAHKLARLVYTMLKQGTAYVDVGQEYYEKRYRARVIQNMKRKAQELGFELVAIQGATIPA

SEQ ID NO: 46326 - protein, 347 aa, unidentified
MVYVGIDLHRNRSQIAVLDWDGEQLLSRRIVNDPDVFRELLHGLGDDAQIALEATYGWEWLADLLEEAGYELHLAHPLRTKAIAAARVKTDAVDARTLAHLLRADLLPEAYIAPRELRDLRDLLRHRVALTRMRSALKQRVGAILAKHGIARPYSNLFGPGGSRFLAELELREGPRRRLDSLLALIAAFDREINTTTQEIEQRASEDPYVDVLCQIRGVGRYIAMLVIAEVGDITRFPSARHLCAWAGLTPTVRSSDGKARLGHISGQGSPALRWALVEAAQHAPTGGGPLRQSYERIAKRRGKQVAKVAVARKILTLCYYGLRDGEIRCLAPRAKARTLRTTAVTP

SEQ ID NO: 46327 - protein, 414 aa, unidentified
MCKQQMEPSKKIYGGAIMISVGIDISKGKSTVCILRPYGEIVKNPFEINHSENDLQALSDLILSFKDEVKVIMEATGHYHYPILNYLISKGIFVAVVNALLINKYCNISLRKGKTDKKDSIKIANYGLDLWNRINCFEPKQRIYEELRLLARQYYQTVSIKVKCKIRLLELLNQTMPNIEKLLSNNTKTPGKCKLNDFVKHYWHYDNIKKMSERKFATSYNCWCKKMGYQQSESKAKEIYVFAQNGIPTIPATNASTKMLVTESVRMLEEIEHSTVNILSQMEELAKQLKEYETVLSMNGVGKKLSVLLIAEIGDISRFHSSKALIAYAGIDSPPHQSGVFTAKKRRISKRGSKYLRNIGYEVMTAININKKESCPIFQFMKKKMDEGKAAGVAKIAGLNKFLHIYYARVKELG

SEQ ID NO: 46328 - protein, 411 aa, unidentified
MERIVERPGALDVHKASVTACVRVWQERELEEHLAEFQTTVHGLLALADWLAALGVKQVVMEATGVYWKPVWAVLEDQFELMLVNAKHVKQVPGRKTDIKDAQWLCQLLEAGLLKASFVPPQPIRTLRNLTRYRKTQIQDRQREAARLHKILEDTGIKLGCVASDILGKSGRDMLDALVAGTTDPTVLANLARGQLRNKIPALQEALVGRFDAEHALVVGQILAHIDFLEEAIDRLSAAIEEQMRPFAAQRELLMTIPGVKQRTAEVLIAEIGVDMTVFPTPKHLASWAGVCPGNDQSAGKRRSGKTRQGSKWLRATLTEAANAAARSKNTYLAAQYHRLRGRRGHAKAITAVSHSILTAAWHMLQTGELYRDLGPDYFTKQNPERATKRLVRQLEKLGHSVTLQPREAAA

SEQ ID NO: 46329 - protein, 409 aa, unidentified
MLYCGIDWAWEELTLMVLDEKGNSIKEDFKIQNSLDGFFFALSTIRQLCREQEIIFGIETSNHRIVEFLLSYGYKLYLINPISMDKFRKRYKTSGVKSDCLDAFVIANVLRTDLNTLRIITPKDELTEELGIVLRDRESLVELKTRLTNKLRASLREYFPQALKLFSDISCRTSLEFLEAFPTHEEALRTTKKRIGSVLTRSNSYSYDKVQEIYQALREQQFPSRAAVIRAKRELTLALISQIKPLTKQIEAYDRRINSLLEQHPDSQLFLSLPGVGNTLAAGMIALIGDERARFHSPRQIQALGGTAPITKSSGNYSHTQFRFSCNKDLRNTLSQFAFTSITKSIWARSYYNKKRREGKTKSHALRCLANAWVKVIFAIWRDNSLYDENLHLASVSRHLINQDSLPLA

SEQ ID NO: 46330 - protein, 344 aa, unidentified
MKITTIGLDLAKSVFQVHGIADDGTVVVVKRLLRKQMINFFSKLPSCLIGMEACATAHHWARALAALGHEVKLMPPAYVKAYVKRGKNDAADAEAICEAAQRPSMRYAAIKTEAQQAAGMVFRTRDLLVRQRTQLINAIRGHLTEFGWVAPKGPSHISVLASLLEEGEEIGASLPEAARAMFLVMTGQLEQLNEQVALLDKEIARRAREDEAARRLMTIPGIGPITATALLALAPPAEGFARGRDFAAWLGLTPKQHSTGGKERLGSISRMGERTLRRLLIIGSSAVVLQASRRGAPRGSWLEQMLARKPRMLVTVALANKTARIIWAVLMKGEDYRAPVAAAA

SEQ ID NO: 46331 - protein, 355 aa, unidentified
MLIIGVDFHPEFQQIAWVDTETGEFQEQRLQHGEPGERFYRALAVAGRQVRVGMEASGHARWFERLLAELQFELWIGDAARIQSKRGRKQKTDRQDAQHILKLMLKDDFPKIWVPSWENRDLRQLLWHRHRMMQARTRIMNQLQAVALNEGLRCKKRLWRAGGRQQLEAFRLAPWASRRRHDLLELLDRLNPTIAELSQAIEQEAEKCPQAQRLMTHPGVGALTALAFVLIIGNTERFQCGKQIASYLGLVPLEKSSGNRRRLGHITKQGSSMLRFLLVEAAQVTVRSLPEWRSQYFRLMIRRGRKTAKVAMARRLAIRLYWMWRQGLNYEQLKSSVRTQDSPDIAMVCSRTPSN

SEQ ID NO: 46332 - protein, 412 aa, unidentified
MDVLVERVAGLDVGKEVVVVCVRTPGEGGRRVSETRTFRTMSRSLEAMADWLVESGVTLAGMESTATYWKPVFYALEDRMGTWLLNAAHLKAVPGRKSDVKDAEWIAQLLEHGLVAPSFVPVPEIRRLRNLTRYRVQLMGDRTRDAVRLERLLEDASIKLSAVASSVTTLSAREMLAQLVAGNTDAVAMADLAHGKMRRKLPDLAEALTGHFDAHHALLVGAMLHRLEHVETALAELDVMIAAAMVPWAHQLELLQTIPGVGLKTAQVIIAETGADMAQFPTAAHLAAWAGVAPAMHESAGKRRPAGSRKGNKWLASMLVEAASSVSRSKQTYLAAQYAQIASRRGRKRAALAVAHSMLVSAYYMLTRDEPYREVGNDWFDQRHADAHTRRLVAQLKRLGHTVVLDPADSPA

SEQ ID NO: 46333 - protein, 343 aa, unidentified
MKLHVVGIDLGKTVFHLVGLDSTGKVVIRKKCSRTQLLAFTANLQVQLIGMESCSGSHFLGRALREQGHEVRLMPAQYVKPYVQTNKSDFLDAEAIAEAVQRPRMRFVPIKTEEQLDLQALHRVRERWVMRRTAVVNQIRSLLLERGLTLPKGRSYVDRQLPRILEDGELRLSGCFRVLLAQLKLELEQLTARIEEMDRVIQQTAKENEDCQRLTEIPGVGPVTATALVAAVGNASTFRKGRNLSAWMGIVPGEYSTGGKQKLLGISKRGNKYLRTLFIQGARSVLQQRHRQAPGLSSWLAQLLARAHQNVVIVALANKLVRMAWAVLCKNQRYRAPVLAATA

SEQ ID NO: 46334 - protein, 432 aa, unidentified
MNPFSVSPKPSSVAAWVGLDWADQQHVICLYEVATGQSTVSRLEQKPEALQDWLSQLRQRFGGAPVAIVLEQARGAVIYALLSADFVRLYPVNPQSLASYRKAYAPSGAKSDPADAMLLMEMVRNSPERFRVWKPDDPDTRSLQLLTENRRQLVNQKTALTNQLTSVLKTYYPQALELAGALDSLQACDFLTQWPTLEALQQARPGRIRQLYREHGHPSPEQLDRRLEQIRQARPLTTDPAALLSGAMMVQALVQQLRPLLGAIERFDRQIAVLFRKHPDRPLFDSLPGAGAVLAPRLVAAFGTDRDRFQSAQQAQQLFGIAPVTEQSGKQRWVHWRWACPKFLRQTFHEFAGHSRHWCGWAKALYQRLRRTGKGHHAALRVLAFKWIRILFHCWQTRTGYDEQIYLKSLQKRNPTLWAEIQLLPPRNKKVA

SEQ ID NO: 46335 - protein, 334 aa, unidentified
MENIALIGIDLGKNSFHIHCQDRRGKAVYRKKFTRSKLIEFLATCPATTIAMEACGGSHFMARKLEELGHFPKLISPQFVRPFVKSNKNDFVDAEAICEAASRPSMRFVQPRTESQQAMRALHRVRESLVQDKVKTTNQMHAFLLEFGISVPRGSAVISRLSTILEDNNLPLYLSQLLLKLQQHYHYLVEQIKELESQLKRKLDEDEVGLRLLSIPCVGTLTASTISTEIGDGKQYASSRDFAAATGLVPRQYSTGGRTTLLGISKRGNKKIRTLLVQCARVFIQKLEHQSGRLADWVRELLCRKSNFVVTCALANKLARIAWALTTRQQTYEA

SEQ ID NO: 46336 - protein, 416 aa, unidentified
MKNTKNTFSAFVGLDWADQKHDVSVCAVGETPVHQVVTHTPEALHEWLINLHKQYPDGPIALCLEQTRGAVIYHLLGYEFLTLFPVNPKSLARFRETFTGSRAKNDISDADYLRELVMLHHDRFRSWVPDDVLTRTMMFLAENRRKIVNDRTRLTNRLLSLLKMYFPQAVTLSGGVLHRQMALDFLDKWPVLVAVQRAKQKTVEKFYTSHNSRSSGCIKERLELIHTSTPLTTDQAVIKSSQMMVKTLTRQIYALNKAIEEFDVELKTLYDDHPDKDIFSSFPGSGNNLGPRLVSAWGSDRSRYDSASSMQEYSGTAPVTRSSGKSKNVVRRFACPKFILQTFHEYANVSRSRSIWAQAYYEKQRNHGKSHHVAIRALAFKWIRIMFRCWQNRVKYDEVKYIQALKKSNSPLLEFI

SEQ ID NO: 46337 - protein, 321 aa, unidentified
MFKYNQIFGVDISKDVFDVMSSQGKHFKFKNSSKGFNQLTKHLTKKDLIVMEATGYYHYCLAKYLYDLGYTVSVVNPLAVKRFVQMKLSKIKTDKSDALAICQYASLNEVPIFTSKDSNQAECVQLMSLIEIYLKQRTALKNKLHGEKILGKPSKTVYHSINRSLKVLQKEIQLLENRLLELVKSHQQKQLTLLKSIPGMGTKTAIILIVLTDGFTKFENAKQLCSYAGTTPTIRMSGSSVRGKSRISKMGNQKLRNLLFLCAFSACKYNKACRELYERIVAKGKSKKLALIAVINKLLKQAFAVAKSGLSYDENYVSNLS

SEQ ID NO: 46338 - protein, 344 aa, unidentified
MSKVTTIGLDIAKNVFHAHGADERGTMAFSRKLSRGKLLDFFATQPRCVVAMEACGGAHHWARELSRMGHDVRLIPPAYVKPFVKRQKNDAVDAEAICEAAQRPGMRFAAMKTEAQQAAGLVFRTRDLLVRQRTQLINAIRGHLTEYGWVAPRGPAHVAMLADLLDEEEMASTLPEAARPMFAIMVDMLAELDKRIATLDREIAKRARDDEAALRLMTIPGIGPITATAIIALAPPMETFRKGRDFAAWLGLTPRQHSTGGKQRLGSISKMGERTIRRLLIIGGSSVVRHACRRGAPAGSWLEQMLARKPRMLVSVALANKMARTVWALLTRQEDYKAPAAVAA

SEQ ID NO: 46339 - protein, 368 aa, unidentified
MIVRIITYERSTLVNDEKYIGLDVHQATISVAVMDATGKVVMESILETKAATILEFFAGLRGTLWVTFEEGTWSVWLYDLLNARVDKLVVCNPRKNALLKDGNKSDRIDARKLAELLRGNQLKPVYHGETGVRMLRELSRSYLTIVKDLSRVMNRLKAVYRSWAIPCAGRDVYYRRHRAQWLAKIREAGVRRRAERLYEQLDMLQHLRQQARRELLAEGRKHAITAKLRQIPYLGPIRSVLAVALMQTPHRFRTKRQLWAYSGLALETRTSADYRYVEGQLRRSKKVVSIRGLNKDHNHDLKGLFKGAATMASVRPGPFHDFYQAALAKGIKPTMARLTLARKMAAITLTLWKKGENFDAEKLKSQAA

SEQ ID NO: 46340 - protein, 371 aa, unidentified
MAWTAPYGISCARMRLLRSQTREPSVNQIIRIGMDTSKHFFQLHGVDAGELPVLRRKLRRHEVRVFFAKQPPTVIGMEACGAGHYWARELRKLGHQVKLIAPQHVKAYIKRNKNDGRDAEGLCEAMSRPTMQFVPVKTEEQQAALMLMGVRQQLITRRTQLSNAIRGYAAEFGLITAKGLVKVEPLLADIAQDQSLPALAREIFTLQGRDYARLQVELKAIEARLMAWHRANPDSQRLAKIPGIGPIGATALVMKAPDPRLFPSGRHFAAWMGLTPKDHSTAGKTRIGKITRAGDEMLRSVLVAGATAVIQQAKKGRGRSSPWLVALLARKPPKLAAVALANKTARIAWKLLTTGEKYDGARMPVASALAA

SEQ ID NO: 46341 - protein, 409 aa, unidentified
MKQYVGLDVSQKETSVCVVDEVGQILFEGKAKSDPGALAALLRKRAPQAERIGFETGAMASWLWHELRRIDFPVVCIDARHAHAALSVRMNKSDQNDARGLAELVRVGWYREVKVKSEESQKIRAILVARSRLVAIRRDIENQVRSLIKEYGLLFPRAIGLQFRNQVRELLGEDHQLLGVIAPLLSIHEQICKQQSKFDNEVRELAKSDETTLRLMTVPGVGVVTALTFRHTIDDPSRFRSASTVGAYLGLTPRRNQSGETDINGKISRWGDRLLRTYLFEAATVLLYRTKKWSSLKAWGMKLAKRIGMRKAKVAIARKIAVILHCIWVDGTSFDWGAAAAGLIFARKFLVRSAGLATSRWDGVEATSFIRLVAARSYSAANVEASDPDIIMRRYATSENEMDASLPKS

SEQ ID NO: 46342 - protein, 346 aa, unidentified
MHYIGMDCHISTLDFAVVNEAGRLVKAHRVATSVNGFMEFVKAVPPPRAIFMEEGTLAAWALETCVRFREKLVITDAKKNHWIGSSGQKDDSIDALKLAQLARGGYIKEIHHPVGQRRRFRELMIAYHDTVRSTTRIKNKIKAKFRQNGIRCAGATVYSKTYREEWKGKLPQEATLLLILDGLWRQLEQSEQTEKELLAAARAQAKQYLEIKLFKDIPGIGFIHAATVSAILENPHRFANKRKVWMYAGLGIMTRSSGGKTYSEKLSTDYNRLLKYTLKQAAEATIQAKDNPFRRKYLDMTLLHGIAPHRAKLTIARDMLATMWAMWRRGEKYSPEIREKAAYKQG

SEQ ID NO: 46343 - protein, 354 aa, unidentified
MSNQSNSTVATMGIDIGKNSFHVVGLDQRGAIVLRQKWSRGQVEARLANMPPCLIGMEACVGAHHLSRKLQSLGHDARLMPARYVRAYLKGQKNDFRDGEAIAEAIQRPTMKFVATKTAEQLDLQALHRVRARLVSQRTGIVNQIRAFLLDRGVAVRKGPRFLRTELPRILSTRCDVLSPRMVHVIEELAGDWHRLDERIKSVSSEIEALADQDPSCERLMTVPGIGPIISSATVAAIGNGAAFSKGRDFGAWLGLVPRQISTGDRTILGKISKQGNRYLRVLFVQAARVVLVRPNSWERYGLKSWIEAAKKRLHHNVLAIALANKLARIAWAVLNKERKFECVRTSAMASRSA

SEQ ID NO: 46344 - protein, 354 aa, unidentified
MNEKQIKVYGGIDTHADTHHVAVIDATGRRLADVQVPATAAGYQAALRFLGSWSALVSVGVECTGSYGAGVTHALRQVGIEVFEVNRPNRFDRRIRGKTDVFDAYSAAEAVLSGRATAAPKGSDGLVESLRVLRTSRSSALSARTATINQIKGMLVTAPEQLRARYRGMSNTKLIAALAASRPTVTPTTAAEATAYSLRLLARRWLALTEQVEDLAGHMQRLLDAHAPALMSVFGCGRDTVARLLITAADNPARLRSEAAFGALAGACPVPASSGKTNRHRLNRAGDRKANSALYHVIIVRLRYDKETQDYAERRTAEGKTKMEIIRCLKRYLVRQLYPLIVETLQPQHSTLTA

SEQ ID NO: 46345 - protein, 324 aa, unidentified
MIDGILGIDVSKNTLDASMSSNNKVRARSFANSSDGWRHLLDWLTTQKIRRVHACMESTGRYSLGIACALYEVGHIVSIVNPAQIRDFARTKLGRNKTDGVDAAHIREYCELFKPQPWAPPSEAHRRLGELQTIRSGIVAGLTEWKNRKSSGMVDAVAQSLADVTISHFTSQLGAVDEAIAQTIDNDSGLRRKRDLLLSVSGVGETLAGVVLAELPGPDVLRSSAEVVAYAGLNPRQHQSGTSIDRLTRISKIGNAVLRAALYMPAMSAMQHNPAIVALVARLKSRGRLKPKQIVVAAMRKLLVLCFGVLKTGKPFDPALAMGC

SEQ ID NO: 46346 - protein, 421 aa, unidentified
MNQIRDTEYTAYVGIDWAAAKHDICVQAAAGERREFVCISSQPEEIECWARDLYRRFGGPIAVALELSKGPIVSALQKYDFFVLYPINPLQLARYRETFTPSGAKDDPSDAELALDLMTRHAERFSPLKPQSVRMRKLIALVELRDKFVSDQGRVVNRLGHALKQYYPQVLEWFNEHNTAVFCDFVSQWPLLNRAKRARKASLERFFKSHHVHSAQLIEKRITAIKVAMPLTADPAVIEPHRLQVEILIEQLRITIKALKRFDDEIAATAQKLPDYELLFNPLPGAGHILAPRLLAAFGEDRKRYQHADALQMYSGIAPVTVRSGKKTWVHWRWQCPTFIRQTFVDWAAQTINKSAWAGAYYRQQRAKGCTYQVAVRALAFKWIRILHCCWQNRTPYDESKYLETLRRKGSPLLSYLAETV

SEQ ID NO: 46347 - protein, 383 aa, unidentified
MKAVCGLDVHKDSVYLCILSEFGELIEKVFGVLTYQLEEMRDLMLHHHVIEVSMESTSVYWIPIWRVLSPHFKLNLANPYFIKQLPGRKSDVKDAQWIAECTMKELIRGSFVPPETIQQLRQCDRRIFDLNEEIVRKLSKLDAVLQRCNIRLSNYVSNVDSKSYKAVVRAISQGITAPEELVKLIHGRIINHHGTDVITASLKGVVSLAEIDMISQLRDELDMAEAHKEKCQARMLEICEREFPEELRRLQTIPGIKERTATSLIAEIGTDMNKFETANHLASWSGLKPRNDESNKKIKSRSITHGNVYLRKTIIECAWAASRTKDCFFSRFSYHQTQVRKKNKMKVLVAVARKMLIAVWHVLHDNTIYIDFTTDRKTSQTRG

SEQ ID NO: 46348 - protein, 373 aa, unidentified
MKKVRFLGLDVHAETIAVAVAEPDGEVRSLGIIPNREESVRKLIKKLGPAEQLQVCYEAGPTGYVLYWQLTALGVKCEVVAPTLVPVKAGDRVKTDRRDATKLARSYRSGDLTAVWVPNEEHEALRDLVRAREAAKQDQLRARHRLSKFLLRQGRRAPEGIKMWTQRYLQWVKEQVHFEQPAQEYTLLDYVHEVEHVADRIQRLEQAITEAIKLAPAPMQEVVQALQALRGIAQISAVTIVAELGKISRFEGARQLMGYSGAVSSEHTSGTRVRRGSITKTGNAHLRRIAVEAAWAYRHRPAIGSALRKRQEGLSQEVKEIAWKAQHRLHKRYRTLTAAGKEKQKVITAVGRELLGFIWAIGVQVERNDPRNA

SEQ ID NO: 46349 - protein, 344 aa, unidentified
MTYYAALDVSLRSVNICVIDDQGEIKAETKLDSEVTDIIAYLDSLEMEIASVGLEAGTLCQYLTYGLQSAGFEVVCMEARQVKAALSAMRNKTDKNDARGIAQLLRTGWYSKVHIKSMASHRIRVLLSSRKAVLCKCIDLEQEIRGLFKVFGIKLPPKLGHGAFDAAVRSIITTDATLSFALLPLLEARLVLYHCFRELDNRTRNMAHADPVCQRLMSAPGVGFITALTFKAGVDDPARFKRSRTVAAHFGLTPRRFQSGEIDIDGHISRCGDRNVRSTLYTAANALMTRSSRWSSLKVWGMQKAKTRGHRRAVIAVARKLAVILHRMWVDETQFNWGMEDARS

SEQ ID NO: 46350 - protein, 357 aa, unidentified
MNYTQNEKIEQVTDSTMVVGIDIGSQIHYARAFDNRGRELTKRIFSFHNDLEGFNSFSLWAETLKTENKKTAVLIGCEPTGHYWFAFAKYVNNHQKRLVMVNPFSVKKIKELDDNSPKKTDSKDPKTIAKLVVDGRYSIPYMPEGIYAEIRDLVYSRDRIMKQHNISANRIQRWLAIHFPEYLGLYTRFDAISGLEVLEKAPLPKDVIALGVNGIRKIWHDKKMRGRGVTEDRAKTLVEAAHNSVGLDGGIGTKSELYMLLEEHRLWTSQLEAVNKVLEEMILKVPHVEKLLAIKGVGSITIAGFIAEVGDIRRFDSPKQIQKYAGLELVENSSGKHKGGRGSANAGEGNSERSCIR

SEQ ID NO: 46351 - protein, 336 aa, unidentified
MLYVGLDVHSRQSSLCILNSAGGVVNRIQLKGPRAAVVDRLRTLEEPLSICYEASCGYGHLYEQLRPLAHHVAVAHPGKLRLIYGSKRKNDRVDAQKLAKLLLLLDMVPPVHVPHVDVRAWRSLIVLRQRVLQQVVRCKNQIRGVLRENDLSGVKWLWSKKRLAWLESLDGLHPAAKLRLELAVQEFRALDARITRIEKELRTYADRHPAVKALMTIPGVGIRTAETFVAWVDDITRFRNNRQIGSYFGLVPCQDASADTNRLGHITRDGPPVMRKLICEATWTAIKKDPGFKRFFERVMGGKSERRKIAVVATMHRMIRVMGAMLRSGEAYDGAR

SEQ ID NO: 46352 - protein, 375 aa, unidentified
MSIVTQPLKIDNPIAAGVDTHAEVNVAAVIDHVGRELGHQSFATTPAGHRALHAWIDSLGTLTVVGIEGTGVYGAGLARHLTAGSVHIVEVDRPDRKSRRLAGKSDPIDAYAAARAALSGRASGTPKSRDGNVEMIRVLRVARSSAIKARAVAITQIKAVIKTAPDALRSELRDLDGATLITRCAGLRCNRGPAPTPSPFAKRSPRPGRLDDVTAATKRTLASLARRVHHLSDDIGELDDDLNQLVAETAPTLVAMFGVGTDVAGQLLITVGDNPDRLHSSAAFAHLCGVAPIPASSGKTNRHRLNRGGDRHANRALYTITMSRLRYDPRTQLYRDRILATGKTNKDAIRILKRAIAREAYQAIKTDLITTNIGT

SEQ ID NO: 46353 - protein, 337 aa, unidentified
MGLYCGIDLHSNNHVLTVIDEADRRVYERRLPNELAKAKEALEPFRSELVAVAIESTFNWYWLADGLMDAGYEVRLVNTAAVQQYSGLKHSDDKHDAFWLAHLMRLGILPTGYIYPKAGRGLRDMARQRMRLVQHRSALMTSVQNQVWRSTAIRLKSATLKGEGLETWPELSDPDVALSVKSGRAAIDALTAQIEGLEKVLLKRLRLSPEFRMLKTVNGIGPILAMTIALEVGQISRFPGVGEFASYCRCVESKRISNAKKKGEGNRKSGNKYLAWAFMEAAHFAIRNLPAAHSFYERKSKQRPKIVAVKALAHKLARACFYVIRDQVPFAPDRLFV

SEQ ID NO: 46354 - protein, 350 aa, unidentified
MLIIGCDFHTRYQQIAMMDDATGELRERRLEHENGEAEEFYRGLPKPVRVGIEATGPVRWFERLLGELGHELWIGDAAKIRASEVRKQKTDERDAALILDLLLADRFPRIWVPTPAERDLRQLLWHRHKLVCLRTLLGNQLHALALGEGLCRKKKLFTKKGRRELEKLELAPWASQRRAKLLELLGHVDPPIAELDKAVFEQAQRREDTVRLMTHPGIGPVTALAFVLTIGPVARFACSKKLVSYLGLNPSEESSGGRRRLGAISKQGNTMVRWLLVEVVHQAVRQDPELRQDYQRLKFRRGHAVAKVAIARKLAVRMYWMLRSGADYARLVRRQGSPGPTLMNASSSLG

SEQ ID NO: 46355 - protein, 337 aa, unidentified
MEYFGIDVHSKYSETCGLSEEGKVTIRRRIPTTETALRRFFGPRERSQVTLESGPVTPWVVRLLCELGHDVTVVNPRRVRLIAESTLKTDGIDAEVLARLSRLDLGFLRPVYQRTREAQELRTRLRVRTSLVKSRTSLINTVRGTLRAQGYRVPSCAAKSFVVRFSSMGLETTLSEAIDPLVTTIGELTDRINGLEKALVAESRSNELLVRLQTVPGVGPLVSLAYMGWVDSPDRFKRSRDVGACLGLRPSLRSSGGHEIRGRITREGDSEMRRLLVQAAHAALNCRKDSSLKRWGEGLVERLGKGKAVVALARKIAVLLHRLWVTGESFRAFPQAA

SEQ ID NO: 46356 - protein, 352 aa, unidentified
MIWVGLDLHKRYVTACALDDTGVVVAEHRRLPTDPEVLLAWLRELGGPVMVAMEATLYWAWLHDRLSEAGIAAVAAHPYQVKLIWQARCKTDPIDARKLADLARANLLPTIWVPTPAVRAQRTLLRGRAYLVRMRTGVKNRIHGLLTAENHHIEVSDLYGRAGRAWLHTVPLSPMARVQVDLLLDMVDVLDQRVVRLDKRVQRVVKDEPAAQLLQTWPGIGTFGAALLLAEIGTIDRFTTSHQLAAYAGLIPSTQSSGGKTTHGGVGRAGNPWLKWILIEIVQSLKLAPGPIGHHYQKLLRAKGKAKATVAAARKLCCYLYWCLKEGWSYEQWLQQHEGREVRPLQTLGSAA

SEQ ID NO: 46357 - protein, 330 aa, unidentified
MKITNIVGIDVSKKTFDYHHYNGLENGLSITNDLKGYRTFLKWLKVKVTKDPDQVMIVMEHTGYYSFKLEQFLFKHQVNYCKKPALDIKRSCGMIRGKSDKADAKMISRYGWMRKEELQPCKPVSEVQLELQQLMSHRDKLVADRASYQSKIKEMKMQLGDKMAEQVIKSTQYLLDIFSVEIKQTETFIQELINKNEQLNSNYLLVKSVKGIGFATAVHFLITTENFTSFDNHRKFACYCGVAPFENSSGTSVRGKTKTSSLANRKIKSLLTMAAICAIQHDPELKEKYQQKVNEGKPKMSALNIIRAKLIERIFAVVKRQSPYILRIAA

SEQ ID NO: 46358 - protein, 375 aa, unidentified
MGDYSEAFVGFDTSKLRNAVAIADTGRGGEVRFFGEIENTPAATAKLVRKLSAKYKRLTFCYEAGPTGYGLHRQIKDLGFECVVVAPSLIPKRPGDKVKTNRRDALSLAKLLRADELTPVWVPDGRHEAMRDLTRARETAMLDLRTKRQHVSAFLLRLGRPYPERQKTWTKAHVSWIASQKLEHPQQRLVLEEMMLAIRQAQERLVRLEQAIAAAVPEWSLAPVVTALMAMRGIDLVSATTLLAEIGDLSRFRTPTELMAYLGLVPSENSTGDTVKRGSITKAGNRRARRMLVECSWSYQHPPRVGQAKQPKVDAAPPAVREIAWKAQCRLYRRYRTLIRKGKLKTVAIVAIARELAGFIWAVARAVTTARVAPA

SEQ ID NO: 46359 - protein, 318 aa, unidentified
MGTVMNLNSSVYIGIDVSGSTLDVAIHDTTEHFSVDNETAAIDQLVQRLIALGPTLVVMEATGKLELAVLKALCQAGLPAVAVNPRQVRNFAKATGKRARTDRIDAFVIAHFAAVIKPVVRPLNDVQTEQLQALLLRRAQLIDMLVAEKARLERAHVAAKESLNDHIKWLKQQLTVADKDIDSFMRASPAWRQKEDLLRSVPGIGPGAAATLIAFMPQLGSLNRREIAALTGVAPFNCDSGKHIGKRRIQGGRAIVRRALYMACIPALRFNPVIRAFYDRLRKAGKPFKVAMTACIRKLIVTLNTMVHNSTPWRPSAD

SEQ ID NO: 46360 - protein, 482 aa, unidentified
MKPKSPLGTNKTNDHAMQGRWQEMNRRQRRETMRKIQSEDLSLDVIHRNAAGIDIGNESHYVAVPPSRDSQPVRCYGCTTGELKAMADWLKQRGIQTVAMQSTGVYWVAVYDILEQVGLEVYLVNARDTKNLPGRKSDVQESQWLMKLHTYGLLRNSFRPVQEIRTMRTYWRQRNDLVQSAGRHIQRIQKTLTQMNIQLANVLSDVSGVTGQAIIKAILEGERDPHKLAAFRDSRVKASEGQIARSLEGNWQPDLLFVLKQEQDGYEFCQKQMAECDQQLKQYLQNREDRSQGAALPEEQRKARRQKKKGNKPQFDLRAELFRLTGTDLTRIDSIDVMTATTIISEAGYDMSKWGTENHFVSWLRLCPDNRISGGKIIGKGRLPTNNRATVALRMAASTLRLSDTYLGAQFRRLRTKLGTPCAIKAMAAKLARLVYRMLRYGMKYLDRGAVFYDAEHRRLQIKHLKWKAANLGLQIVEAPAT

SEQ ID NO: 46361 - protein, 438 aa, unidentified
MSNKVIFNLDDLFISVGIDVGADFSWMSIALPNQQFVGKPYKILHSSIDSLTTAVSKIKEAEELYSLESRIFLESTGIYHYPLFCYLRDKGFNCSVINPIITKNSTNINIRKVHNDRFDSKKAALVGLKPDLKVSLMPSDLALNCRNLCREYYDLMDNRSAYVNKLQGELRMAFPQYLGIFSKVTINTSLTLLETYTSPSAFLEADKQEIINIIKSTARFGLTYAQNKYNAIIQAATDANQFGYIIDSNIKRIRLYISFIRKYDEEINNILESLHELVDANEDADFVKQIHLIETFKGAGFLSAVSIMGEIGDFSAFSKPKQLFAYFGLDPAVKQSGKFEGTKVQMSKRGSSIARRVIHTLTLQSISISRNGEAKNPVLREYYLKKCDSKPKLVAMGAVSHKVCNMIFAILRDNKSFEIITPQEHIKQYNASKCDMAA

SEQ ID NO: 46362 - protein, 498 aa, unidentified
MILPPQDGARNKLGRKALQKAVARAQGRKTKKSVKKRGRRERTSRREGQAVPTTPSLNQLERVNRNAAGIDLGAMVHYVAVPPGRDPETDVRCFETFTEDLEAIADWLSGCGVDTVAMESTGVYWIPLYELLEQRGFQVLLINPADFKKFRRKTDVSDCQWLQTLHTFGLLQGSFRPEEKIVTLRAYLRHRDRLVKCASDEVRRMQKALEQMNVKLTEVISDITGMTGMAIIRAILAGQRDPQRLAALRHVGCKNDVQTIALALRGNWRQEHLFALRQALELYEVHLEKLKDLDGQIEAYLQTFEDRTEGEGQQLEPSRRKRALDPCLNSRDLVYKMTGIDLTEVDGIGGTAALQIVAEIGTDMSKWETDKHFVSWLCLCPELHLTGGRRKSDRSHTQPSNNRAAAILRMCAQSLLNANCALGAFGRRIRARKGGAHAVTALARKLAIIVYHMLKERRPYKDQGASYYEERYRQRMVENLRRRARQLGLDLVPLALPE

SEQ ID NO: 46363 - protein, 323 aa, unidentified
MNKDIKYFGIDISHLVFDVTDSDGNYYQFKNSLIGFKKFIKLLDFNSHCVMEATGYYHYKLAYYLQESGIKLSVENPLSVKRFIQMKLSKIKTDKSDSKLICEYAKQVELKLWQGNSKHQLECLQMTRLLSTYTKQSTMLKNKIHGETVLGVPSKSVLSSLKQSLKYLEKQMKTLESKLIILVKQEHQEVLTCLKSIPGIGDKTAIMLVVLTDGFERFTSAKELCSYAGLTPIIKQSGSSVKGRPRISKIGNQKLRNLLFMCSFNACKYNKACKAIYDRIVAKGKSKKLALIAVCNKLLKQAFAIAKSGLIYDDSYKSVLVKN

SEQ ID NO: 46364 - protein, 341 aa, unidentified
MKITRIGLDLAKDVFQVHGVDRDGRTVVRRRLRRGEVLKFFGGVEPCVVGMEACGGAHHWGRELGKLGHLVRMVSAQFVKPYVKSNKSDANDAEAICEAISRPGMRFVEVKTVQQQELQALHRVRSGLVGERTGLANRIRGLLTEFGVVMPRQLAQVRRGLPWILEDGENGLSGTLRGVIEGLRADLERLDERIGELDRLIGQAVREDPACERLATIEGIGPLTASALVAAVGTGAAFANGRGMAAFLGLVPRQHGSGGKAGLGAISKRGDPYLRTLLIHGARSVLQHAARKTDVRSRWLQGLMARRHRNVAAVALANKNARIAWALLAHGQSYRPAACGQ

SEQ ID NO: 46365 - protein, 327 aa, unidentified
MSIATLGIDISKDKLDVALYQDDAYRLATFANERDGYRRLAKWLKKQKAKRCNVCIEATGRYGEAVAMFMHDRGYPVSVVNPARIKAYGASQLKRNKTDKEDAKVIAHFCATQEPGLWTPPAPEIQELQALTRRLEVLKAERTRELNRQKSGIQSKTVLADIKAHIRFLNKQIVAIEQRIHDLIDRHSDLRKQHDLLTSIPGIGDTTAANFIAEVPDVTRFHSANQLAAYAGLTPRKHESGSSIHRRGRLVKTGNKRFRTALFMPALVALRFNPIVQALAQRMEANGKNRMTIVGAAMRKLVHLAYGVLKTGKPFDPDYLVNVQITC

SEQ ID NO: 46366 - protein, 466 aa, unidentified
MMTKQVEEILDEPHEQIVQRVCAIDVGKDSGTVCVRVPAASGTGRRVSKVWDVPARTRAVLGLAAQLSDQGIEKVTLESTSDYWRIWFYLLEAHGLDVQLVNARDVKNVPGRPKTDKLDSVWLAKLTEKGLLRPSFVPSAQVRQLRDYTRMRADLTGDRTRYWQRLEKLLEDALIKVTSVASRIDTLSVRDMIEALIAGQRDPRVLAGMARGRMRLKHADLVESLTGQFDDHHAELARMLLHQIDTLTDQIDVLTARIEALLARLPAGNTPDPDRPAPDGQTRPGTRANAPADEAAQRRTPPTAADMIKILDQIPGIGPSNAQVIIAEIGLDMSRFPTAGHLVSWTRLCPRTIQSGKRSTTGKTGKGNRYLRAVLGEAAATGGKTQTFLGERYRRLIKRRGKLKTIVAIARSILVIIWHLLANPGTTFHDLGVDFNDQRIDIGRRTRNHVRQLEALGFNVTLTAAA

SEQ ID NO: 46367 - protein, 355 aa, unidentified
MNQEKYIGMDVHDATISAAVKNAQGKLLMECVLETKAATILEFIQGLRGTLAVTLEEGTLAAWLHDLLKPHVSRLVVCDPRKNALMRDGNQNDRVDARNLAELLRTNQVKAVYHGKQGTRALKELGRSYLTLTKDSTRVMNRIKSMYRSWAIPCGGTSVYSRRHRAEWLAKLVEPAVRIRAEHLYQQLDSLEPVRQAARGELLRESRKHAAVNLLRQIPSIGPIRSALLVAILQTPHRFRTKRQLWAYGGFAVQTYDSGEYRMLRGKLQRNRERITVRGLNRNHNHDLKNLLKGAAISAIERPGPLQDFYAALVEKGMRTSMARLTLARKIAAITLTRWKKGVSFDPKQLQRQAA

SEQ ID NO: 46368 - protein, 370 aa, unidentified
MKKHSEQKVVATIGVDLGDKESRVCVLDDAGEIIDEGSVATTASALARKFKGLDRHRFVIETGTHANWVHDLLESLGHEVVVANARKVRAISANERKCDELDARMLARLGRVDPRLLQPVGVRPEQIRRDMMLIRARDEVVRARTALANSVRGLAKSTGERLPKCSAKSLHKQKLSQGLVALQPLMDSLEGLDKQIKEYEKQIKEVSAQRYPQTALVRQVTGVGLISSLYFVLLLGDVRRFKNGRAVGAYVGLVTGRDQSGARDPQLGITKCGDELGRRLLVQCAQYILGPFGPDTDLRRFGLRLAAGPKRNKKRAIVATARKLAVLLFALLRKKEVYEPLRNSVKSEGKVEAVPDARPPISRAPRTQLA

SEQ ID NO: 46369 - protein, 326 aa, unidentified
METPFSPAVVGIDVSKATLAVCYQDTGQTHHLEVSNTPTGFAHLLRTCPVDSQYIMEATGTYYLALAYHLHAHGARVAVLNPLVIKRFIQMHLSKGKSDRKDAQWLMRYGQQQDTPCWQPDEAVVVECRQLEQVSEQLLKQKTMVTNALEALAQQPVISPVAQQRLLQTKQLLEEQVKAVEEEMLVLLEQRYAQEMTLLRSIPGIGRKTAGMLLLFAGGFTPYANYRQLIAKAGLSPREHTSGTSIRGKVRITKMGGSLIRSKLYLCSFSAKRANASCKALYDRLVAKGKNGKVALIAVCNKLLKQAFAIVKSGVPYQADFTSIAA

SEQ ID NO: 46370 - protein, 344 aa, unidentified
MENYAGIDVSLELSSVCVVDAQGKILKEAKVASEPDALVEFFETLGFAVKRIGLEAGPLSQWLHAGLKGAGFETVLLETRHVKAALSAMTVKTDRKDARGIAQLIRMGWFRQVHAKSVDAQEIRALLIARKQLLGRLIDVELSIRGILRGFGLKVGPVTRRNFEARIRELVAGQATLERIAGAMLSARSALKAEYGKLHKAVLAIVRDDAVCSRLMTVPGVGPLVAITYKSAIDDPHRIVKSKAAGALFGLTPKKYQSGEKDVTGGITLAGDETVRTALYEAANVLLSRITRFSKLKRWGMDVAKRRGSKRAKVALARKLAVILHRIWVDGTTYRWAEAGSIAA

SEQ ID NO: 46371 - protein, 436 aa, unidentified
MRGCRCSMIMGFTKPIEHFNLQRKKVITMNTLYVGIDVSSKSNVVYLMLPNGDKHSNFSIANSHEGSTQLVKRILSALTSHSLDTVLIGLEATSVYGDNLVYFLREDATLASFNRKIHVLNPKQVKKFHDAYNDLPKNDYVDSFVIADCLRFGRINKEVYLGDYRYKALQNLTRARFFAVQNLVKEKQRFMNVLFKKYSTMTQEKVFSDTFSTTALAVYDEFESAEALANMDLQELTDFIMEKGKNRFPDPDAVAKAIQKAARSSYRLPKTVNDSVNQVLSISITSMKALESQIKELDKAIAAQMELLPNVLISIPGIGPVYSAGIMAEIGDINRFDSQAALAKYAGLAWKQHQSGGFEAEVTRLIPSGNRFLKYYLCEAAFSLVRCDKEYSDFYRLKYKGVNRCQHKRALALTARKFVRLVFRLLKDNRLYCQAK

SEQ ID NO: 46372 - protein, 365 aa, unidentified
MWEAPVKRQRMSDGLDVHARSVLGCALDGDTGEVFQRRLCPDHREIVGWLGELPGPVAVSYEAGPTGFGLARALAAAGITCEVAAPSKLIRPAGDRVKTDARDAAHLARVLHLGQVTAVTIPSASQEAARDLVRARDDCRGDLMTARHRVSKLLLRQGIVYSGGKAWTGDHERWLRAQRFDDPALQLSYEAAWDAMLACLDRRRRLDSAITAMAADSEFTPVVHRLGCIRGVATLTAFGLAVEIGDWHRLTGRTIGAYVGLVPSEYSSGDTRAQGGVTKTGNGHVRRLLVEAAWHHRSRYRPGAELRRRWDLASPAARARGQAANRRLHNRWTGFDARQKRPVIAHVAIARELAGWCWSLAVMPD

SEQ ID NO: 46373 - protein, 469 aa, unidentified
MSNKYYLGIDVYKGYADFIILDNNKKIVEDGFQLDDTFEGHNQLYKILSGFIAKHPEANIFAAVESTGGYENNWLKLLSKYQSKLNLSIARVNPFGVNYNSKATLKRIITDKESSKNVAEYMISHPEKVSYNNEDYYSSARKQWTFIKMLTKQKVQLLNQLGSLLYIANPEVLRYCRSKINQWTLKMLRQYPTARHLSKAELSKLSKIPYIKEELAIALIENAKKSVASSVDDTTAEIIKAIVEQILRLEKLIAWQTKQLENNCKLPEVELLKTFQGIGTYSAVGLMIEILSVERFPTVKHLASYFGVHPVFKQSGDGLYGYRMSKRGRKQPREILFNVARFAIAHNPYIKEIYAMHLKKGMPKMAALGAVMYKILRIIYGMLKHNKAFDPEIDRANREKHSATNIQNNPDRSRRFQPIDFYAPVSRRQIKKRKEQEMSHFSKPLNAESPKEIFTGSNSRSFPEVSNET

SEQ ID NO: 46374 - protein, 385 aa, unidentified
MTTVTPIRIAHEITDRPALFLAFELSVNPWQLGFTPGAAQRPRERNVPARNREGVREEMRRAKERFGLPEDAPVISCDEAGRDGFWLHRWLVTQGVANCVVDSSSIEVNRRHRRAKTDRLDGQKLLTMLLRHTAGERKVWRIVRGPSGAEEDRRQLHRALTTVKRDRTRGINRIKGLLAAQGLVMPHGGDCSQQVEHLRRWDDTPLPAGLRHRLRQEWEHGTALTQRLAQLEAERRAVLQTAEDAVTKKVQQLLRLKGIGINSAWLFVMECFGWRAFRNRKAVGALRGLTPTPDASGTTAYEQGIAKAGNAHSRAMALEIAWGGLRFQPQSALTQWYQQRFGQGSSRLRRMGIVALARKLLIALWRFVETGVVPDGAALKAAGRR

SEQ ID NO: 46375 - protein, 344 aa, unidentified
MEHFAGLDVSVKETSVCIVDDTSKIVREVKVASEPAALLAVLKNPAYHFKRIGLEAGPLSQWLYSALAEAGLPVICVETRHMRAVLKAQINKTDRNDARGMAQMMRVGLYRPVHVKTLRSQKLRMLLTHRKLLQSKAIAIDNDLRGTLRNFGLKVGMVGTVRFEARIKELVENLPDLAALVEPLLIVRRALREQFCILHRRLLAIIRDDEVCRRLMTVPGVGPVVSLTYRATVDVPARFRKSKSVGAVFGLTCAKYQSGEVDWSGRISRCGDEMMRVMLYEAAQSMMRSKKWSWLKAWAMQIARRCGMKKAIVALARRLAVIMHRMWVDGTEFRWTRDHAAAAA

SEQ ID NO: 46376 - protein, 356 aa, unidentified
MSRDIKYIGMDVHKEAIVIAVLNGSGKLVMETIVETKASSILQFIHGLRGELHVTWEEGTWAAWLYDLLQPQVEQVLVCNPRRNALLKEGSKSDQVDAQKLADLLRTGMLRPVYHGENGLRTLRELGRSYQTISKDLTRVMNRLKALYRGWGIPCAGTQVYGPRYREEWLNKIPQAGVRRRAELLYQQLDGLQGLRRHLRPEFLAESRKHKAAKLLRQIPCIGPIRAARLIALIQTPHRFRSKRQLWTYSGLGIETHDSAQFRFVRGQLQRSRKPQQVRGLNRNHNHEMKEIFKSAATRASCGRGPFHDFYAGLLAKGMKPEMARLTLARKIAAITLTLWKKEERFDVEQLKTQAA

SEQ ID NO: 46377 - protein, 455 aa, unidentified
MSIVSSLPSEFERININAAGIDIGAQKHYVAVPRGRDSKGRDVRHFDTFTADLYALVDWLKQCHIETVAMESTGIYWIPLFEILEKNGFEVRLVNPRSIKHAPGRKSDVVDCQWIQQLHAYGLLTSAFRPDEQINVLRAYHRQRTMLVNHAATHIQHMQKALEQMNLKLTNVISDITGTTGMKIIRSILAGERNPKKLVKHRDPRCKKSDKEIAKSLHGNWRDEHLFALQQAVALYDFYQTQIEVCDKQIQAQLCRFEDRSDGGEPPPFTGKSKGSGKRLSFDATEHLYRMTGVNLTQIVGLNTPTVLTIIAEVGLDMSRWPTSKHFASWLGLCPGSKISGGKNFSSKSKPSANRAAHAFRMAAYSLHRSQTAIGAFLRRKKAQLGSPKAITATAHKIARIFYEMLKNRTEYKDLGVDYYQTRYKERMLRNLKRKAKAFGLELVKTNQDQLVTVN

SEQ ID NO: 46378 - protein, 335 aa, unidentified
MQIYGIDLAKEKFDVSFFDLTSKKVSNQPSHKVVTNNLKGIGKFFKGLPSDAVLVAEHTGVYGDTLLKCCMDSNVKIAFVGGYVIHRYRATPDRAKTDVLDCALLRDFGERYPDKLKYKTFPEEALYELRQLARHREMLVEQRKQLITADKSEDCRPIRSLTVKRSMDRIKEMLDTEIAETEKEMLKVINGHESIHHNYELVKSVDGVGLITAVELLVKTENFTKITTARQYAAYAGTAPYEKSSGKMDKGAHISKIGNRRSKTLLYICAESARLHNKEIKLYYERRTLIDKKPRHYVLNAIANKLLRIIFTLVEKGEYYDANFIRQDPRVVKHN

SEQ ID NO: 46379 - protein, 452 aa, unidentified
MRRKRAGKGGAVPSLPCIEADAAGIDVGATEIFVAVPEDRDPQPVRCFTTFTEDLQALAAWLLACRIRTVAMESTGVYWIPVFQVLEARGVEVCLVNSQHVKHVPGRKSDVADCRWLQYLHSVGLLRSSFRPEDAICRVRSLLRHRDGLVEMAAAHIQHMQKALSQMNLQLHHVLSDLTGKSGMAILDAILAGERNPQVLANLRDGRVKASAETIVKSLVGDYRREHLFTLRQSLDSYRHYQALMAACDREIEDYLKEFDSKIDIDQHPLPPERYPHRRRKNEFHFDMRTELYRILGVDLTAIPGFNAITAHAVLAEVGRDLSRFRNAAAFVSWLGLCPQNKKSGGKVLSTKTRRTKNRLNSALRVAAQTLHRSQTYLGAYYRRMRARLGAPKANTAAAHKLARILFHLLTAAQPFDENVFAADEQRRRTRMENRLRRQAREFGFQLVALPS

SEQ ID NO: 46380 - protein, 347 aa, unidentified
MKFYTETHPYYCGIDLHARNLYVCIMSQDGAILVHKNIKARPERLMKLVAPYREDLVIGVECMFAWYWVADLCREQGIAFVLGHALYMRAIHGGRAKNDKIDSHKIAVLMRGGMFPEAYVYAREMRGTRDLMRRRMHLMRKRSELLAHIHNTNSQYNLPEIQKNLRYAFNREGIQQRFDDPSVRKSIELDLNLIDFYDKQLSKVEWHIQKQATACDQHSLILLRTVPGIGKILSLVILYEIHTIERFASVQDFASYCRLIKCKKESAGKSYGTSGRKIGNAYLKWAFREAAVLFLRQNPQAQAWLARLANKHNKARALTILAHKLGRAVYFMLKRKTVFDQQRFLNS

SEQ ID NO: 46381 - protein, 316 aa, unidentified
MSEPVYVGIDVAKRTFEVATTGQAQTFSLGNDEAGHAQLCQLLAPLSPRLVLLEATGGYEQDLALALSAAGLRVSVINPRQARDFARCMGKLAKTDRIDAQALRGFAALLDAQGHEPRMLADEQQRELTALVVRRRQLVAMLVAERQRLALAHPKAKPSILRIMATIAEQLNDLDGQLKEHVLAHHADLAALLTSVKGVGPTTASTLLAQLPELGQLNRKQITSLVGLAPINRDSGTLRGQRHIFGGRADVRRVLFVAALVGTRFNPVLKAFYARLLAAGKPKKVALVACMHKLLVILNAIARTKSPWRNELAEAV

SEQ ID NO: 46382 - protein, 338 aa, unidentified
MTCIGFDHHKKWTQAAAVDDQGKIIREMRVLNDNSSLKGFLKGLPQPLKGVVEAGPTWGWIYDTLSELGVKMIVANPSAVRAIAEAKIKTDKIDARMLASLLRVGLIPEVYVPTEEVRSQKMLWRERIWLVRMHVRLKNRIHRLLNHYHLEVPEFSDLFGAAGRRFLEELKLPEPGNRILEAQLKLLQSYRLQIEEVQRWAVKATQGHPNRAYLESLPGFGKVFAPIVALEIDDPKRFASPGKLASYCGLVPSLYSSGGKSWQGGIGKEGNHWLKWAFIEAAWAAIRSSAYFRVVYQRLRQRKTAQVSIIACARRLCEIAYHLLKERRCYEERSFRCA

SEQ ID NO: 46383 - protein, 428 aa, unidentified
MNFKQSEVQNQRIERITTSHLVIGIDMAKETHVAQATNFRGIVLSNRHISFSNTIEGFDKLQRWIDGIQQKHRLNRVIIGMEPTGHYWWNLANWLTNKGSNVVLVNPAATKRNKENRDNSPSKSDPKDALVIADIVSRGYYYEHTRQAQEFQRLRTLMSDREFWVAYSVRLQNRIIRWLDIRFPEYTSVFKDWSCKRSMATLKELPLPQDLASRSIPDMITTWRKHMHRAGGSTGTQKAAELISQAKRSVGDVTALAEAKRDLERLIAEYERVAEMLGEMQKQILAILNEIPMASQLRSIKGLGPIFVAAILAGAGDLGQYAHGRQLLRKAGLNLAESTSGKRKGQIVISKRGDSTLRKYLFLATLQLIGVNPVFRELHEYNVKVKHMKKLRSVFKLLGKVARILISIVQKGEIFTPEKASHIIAQAA

SEQ ID NO: 46384 - protein, 343 aa, unidentified
MGDVITIGLDIAKSVFQIHGVDADGAVVIRKRVSRAKVLEFFAAVPRCLVGIEACPSAHYWSRKLEVLGHTVRLMPPSYVKAYLKRSKNDANDAAAICEAVTRPSMRFVSTKSEQQQSGLMLHHSRRLLVRQRTMLSNAIRGHMAELGIISAKGRNGTGELLEVIANAKDNCIPAAARFSLEVLARQYIAIATEIGVLEKRIHAWHRSCEESRRLEEIPGVGPIVATALIAEVGDWKAFASGRSLAAWIGLVPKQHSTGGKERLGGISKQGNRYLRWLLVAGAMAVIRYARRHGTKRLWLTRMMERRPIKVAAVALANKIARMAWAIIVRGERFREPRLLLAA

SEQ ID NO: 46385 - protein, 385 aa, unidentified
MTQAAPISSIIPRDYDIFGGLDVDKKSMAVTFRDHGTMRKSLKLPYSASQLLNYTRKHFPGQRVAFVYEAGPTGFGLHDELTAASHPCLVVSPAMVPTAPGQRVKTNRLDSNKLSEGLRGGQLRSIHVPTQSYRELRHLVQLRDTQVAQLTATKCRIKSLLLYEGIPFPAANGRWSGQALRQLEALPCSAAVRFKLDRLIDALQFHFQSAAVVQKEIRRFCQNDPELKHCISFLTSLPGIGSITATHALARLGDWRQIENVRSIAGFLGLVSSEHSTGDQENRGSITRSGDSRLRNKLIQCAWVAINKDPELRAFYRRVYERHPRKVAARKAIVAVARKMTTRMYAVLKEQRPFVIRADNSIAPLTAEETVGPRERLDGAQTGQQ

SEQ ID NO: 46386 - protein, 345 aa, unidentified
MKIVGCDLHTRYQQVAMLDQETGELMERRLEHESGEARAFYVALSSPVRVGIEATGHTRWFERMLAELGHELWIGDAAEIRASMVRKQKTDARDAAHLLDLLLTERFPRIWRPTLEERDLRQLVWHRQKLVWMRNAVGNQLHALAMGEGVCRKKKLFTKKGRAELESLALGPWASHRRQELLKMLDQLDQSLHQLDQAVEQQAEQNAEAARLMTHPGVGPVTSLAFVLSIGPVARFERSKQVVSYLGLNPREHSSGGRQRLGAISKQGNPMMRSLLVEAGHTAARLDAELRQDYQRLKQRRGSGVAKVAMARKLAVRMYWMLRSQAGYAQLVRMQGSPWATLVKK

SEQ ID NO: 46387 - protein, 336 aa, unidentified
MRYIGLDVHKSNTTACVIAANGKPVASMDVKSNEDGLQKILDYMQGQEFCVMMESTTYAYRIFRFFSSHDVEAHVVHAASLKMVTDTDKKTDKKDAESIGRYLRLWKKGDIELSMSYMPTVEECRVKDICRIKEENSLKIGDESRRIKSHMSRNLEEFRRNSDLKTKYVRDDLREDYHGDSVLMFRLDEYERLVAEGNWLKHMVENELPGNRYVELIESIPGIGRQTAVQIMSMIVDPNRFEDGKKICAYFGMVPRVRDSGGKEHHGKLTKNGDRMMRSVMERVTSAHVRFCDSSVTAYFRAKEPVMGTKKAMVTASRKMLTMILAILKRGTPFRA

SEQ ID NO: 46388 - protein, 309 aa, unidentified
MKEELVYIGVDIAKAHLDAAMGNEKCRFANDALGHRQLVNWVKQMPASVQVICEPSGGYERALVRALAGARIKVSLVQANRVRQFARAAGILAKTDCIDAEVLCEFGKVMQPQTVPAATLEQEHLRELESQRRHLTQLLVMEQNRAARVSDASVVRLNRSLINQIKKQIEKLDLLIKEHIEQSPGLSAKAQKLISIKGVGLRTAALLLAQMPELGQLNRREVAALVGVAPFNRDSGKMRGKRAIYGGRRFVRHGLYMAALVAARHNPILRNFYLRLRAAGKPAKLALTATMRKLLIVLNSALKPDLRYA

SEQ ID NO: 46389 - protein, 318 aa, unidentified
MTSTSDVFIGIDVSKATLDLAIHEQESTWRFSNDAAGVTELINFIAPSKTALIVLEATGGLEAGVTNQLIAARLPVSVVNPTRVREFAKAINQYAKTDRIDAKLIAHFAFKLRPAVTNGRSPEQSLLSAVVRRRQQVIQMLTAEKNRVHITAQAVLDSVTDHIAILERERDRLSQQIAELIRADPVWREKEQILQSVPGIGPVTAATLLAELPELGTVSRQKVASLAGVAPFNRDSGRKRGRRRTFGGRSQVRRTLYMAALSASKSNPVIRRFYQRLLERGKEKKVALTACMRKLLAIVNTMLLNMEPWRLTESIEQA

SEQ ID NO: 46390 - protein, 347 aa, unidentified
MAHFVGLDVSVKETAVCVVDEVGEVVLEQKVPTEPDDIVTLLTSIGEAYGRIGIEAGPLSQWLVNGLAAAGLPVVCVETRHMQALLKGQQINKSDRNDARGIAQMMRVGLFKPVHVKTLVAQEQRMLLTSRKLLQRKLLDVECDLRGTLRNFGLKVGAVSTRGYEARIRELVEDFPKLAAIVEPLLIVRRVMRQQFAVLHKMLLDTVRHDPICRRLMTAPGVGVVVALTYRATIDQPQRFVHSRAVGAHVGLTPKRYQSGEIDYDGRVSKCGDTMLRTMLYEAAQSLLTHSRKWSWLKAWGMRVAQRRGMRRAIVAVARRLAVILHRMWVDGTEFRWSNGPAVAKTA

SEQ ID NO: 46391 - protein, 384 aa, unidentified
MEVVETYVGIDAHKNMCHATVMSPEGDIVGEKRFRTNVKVLEAWVRTLPDDAEFAIESGTPTKRLYWTLKAMGRKVHMAHPAEVRRMMGTKKKTDRTDSAFLADLLRMGRLPVSYVPSPEEDQERQLLRHRMDLGKRRSAVKNQVHAILTSAGISTKEYSDVFGRKGLAMLRDVGLEAHQRYILDNHLRHLELLTSQMEGVERVLAKVASDKPAARTLMQIKGVDFYSALVILSEIGDVTRFPTAKHLTSYAGLVPRVYQSGNVARMGHIHKEGPKTLRSMLVSCANASVRGKGKFQRVYKRLKKRVGHGKAIVAVARRMLMVIFVLLTRGCEYEERDDDLTRSKLRRMDRIARDLPDTDLEDALNGISDNTRKLLTERRTMTN

SEQ ID NO: 46392 - protein, 334 aa, unidentified
MKKRYFMGIDVAKATLDFCLLSNNGSCLWKGQLSNNGQGIEQFLTQLQARSWKLSQIHFGLEATGVYGKGLVGALHQAGLRVSVLNPAQVKFFALSVLRRTKNDTLDAWVIARFCQERRPLGTRPLRPLEQQLKLLVHERESRVAEQTRERLRAKKDPYHIELPQLIGQQRQGRLAQLKTEIRQLEAATFGLIETDQTLSRQSKLLCSIPGIAQLTAAKLLAELAGKEFQSARQLAAYAGLTPAECRSGGTRYGQTHLCKIGNAFLRKALYLPAAVARRWCRPLKPWIIMLQRRKLHDLAIRGAIMRKLLHIAFGVLRHQQPFNPTLVFIPKTL

SEQ ID NO: 46393 - protein, 363 aa, unidentified
MIYRTSVGLDVHARSIAAAALDHLTGEVARRSFAYDPAAVAAWVLSLEGPARCVYESGPTGFDLQRSLSAAGVECCVGAVSKMLRPSGDRVKTDKRDAVFLARMLAVGNVIEVAVPTPEMEAARDLARAREDCREDLMRARHLLSKLLLRKGIVYDGGGAWTKRHREWLSRVDLADPCERLVLEEYLEGVRSLELRRSRLDAAIAERAKAPDLAPVVSALCCLRGISTVTAFSIAAEIGDFTRFPTARSFMSYLGLVPSESSSGETVSRGRITRAGNGHVRTLLVESAWHHARRRSPMSATSLADARGVPAPVAEAAERANGRLHERSVRLRSRGKPANLANAAVARELAGFVWALAAMAQAE

SEQ ID NO: 46394 - protein, 454 aa, unidentified
MSKTRSKRQKKAKNLDALEQINLNAAGIDVGAEEVYVAVPKDRDEESVRSFPTFTADLHRLADWLANCGIETVAMEATGVYWIPLFDILESRAFEVYLVNARHIKNVSGRKSDVLDCQWIQQLHTYGLLQASFRPPEEICAIRSLVRHRDMLTKYRAAHIQHMQKALTVMNLRLTNVISDITGVTGMKIMRSIVAGERNPEVLASYRQSNCSKSQAEIAKSLEGNYKREHLFALKQALELYDFYDRQLRDCDAELEALYQEFDLPDEPGTPPPDPRKTKRRKNQPHFDLTQSLYRMTGVDLTAVDGLEAMTVQNILSEIGTDMSPWPTVKHFASWLRLSPNNKVTGGKVKQRGTQPSQNRANAAFRIAALSLVRSDCALGAFYRRIRSRHGAPKAITATAHKLARIVYTMLKNRQPYHDPGADFYEQQYRLRTIRNLQRRASKLGMRLEPIGVT

SEQ ID NO: 46395 - protein, 402 aa, unidentified
MWYAGIDWADAHHDALVIDEAGHQVSSLRVSHTPEGLVQLIDCLSRIAPSKEQMACIIETNHGLLITALLEAGFPVYPVNPKTVDRRRSSSGAKTDAIDAYLLAKTGRSDLADLRQLKPDSALVVELKALTRDQDGLIQSQTRLVNQLTACLKAYYPAALKLFTKLHQRSTLIFLQAYSTPEAAQAASVAEIETVLRKGHHSNPTKIAQQIWQALHQPHLQADAITTRTKSRLMLALVSQLLPLIEQIAAYDREISTLFLTHADSEAFRSLPGAGKRLAPRLLAEWGDDRERYADATSVQALAGTAPVAYESGNYSKPHKRSACIKPLRNVLQQFAWQSTTQEAWAVAYYQRKRTEGKSHSMAVRALANVWVRIIYAMWLKRESYQTAVFETAQRLHRQAAA

SEQ ID NO: 46396 - protein, 353 aa, unidentified
MFGEKPEGGATMITVTAIGLDIAKSVFQVHGVDAAGQVVLRQRLARGRALAFFEKLAPCLVGIEACGSSHYWARELTARGHEVRLMPAQYVKPYVKRSKNDAADAEAICEAVTRPTMRFVPVKTPEQQSVMMLHRVRLMLNRQRTQLSNSMRAHLSEFGIVAPIGRRGLDQLLAVVADAEDTRVPADARLCLQMLAAQLAVVKEQILENDRRVRTSARTELGRRLMQVPGVGPLLASAFIATVADPAAFKTGRDLAAWIGLVPKQNSSGGKERLGSITKAGNRYLRQMLVVGAMAVIRYAERHGTRRPWLVQLMQRRSTKVAAVALANKTARIIWALMTSGERYREPTAAMAA

SEQ ID NO: 46397 - protein, 310 aa, unidentified
MENIVVGIDISKDQLDIHVLPSQDSFCVPRDAAGLERLVQRLLVVKPRLVVMEATGGFETIVASTLAAAGLPLAVVNPRWIRAYAQSLGRLAKTDRLDAATIAAYGKAADIEPQSVPDQAARMLGELVARRRQIIEMMGVERNRRRSLTRSKLIKGLERILAALQKELSDVENDIDEAVRGTPAWREKDELLQSVPCVGPKVSSMLIAELPELGTLTRRKIAALVGVAPMADDSGKHRGRRHIKGGRIHVRCGLYMAALVGTRFNPVIAGYYRRLITAGKKPKEALTACMRKILVILNAVLRDHRPWQSA

SEQ ID NO: 46398 - protein, 403 aa, unidentified
MQDILTCVMGLDVHRDIIVACLVRGAVDAEPEAETRTFSTLIPEMQKLRDWVIEAECRNIAMESTGIYWQPIYEMLESCFDGEISILVVNARHMKNVPGRKTDMKDAQWIATLLRAGLLKGSFIPDKTFRELRHLTRYRKSVVHDITAQKNRIDKFLQSSGFRFTAFLSDTFGASGRNIIRHLIEHGSIDREALDKCLKTKTRNRIDEILVALNGSLSVHQRRFLNMVFLHLEDLEAHKHTIEDEITEEVLKHTDALNLLCSIPGIDVTAAAAIVAEIGTDMSAFPDSQHICSWAGLSPGNNESAGKRKSVHINKGNPYLKSMLCETAWIMASHRKLYLSGWYWKVKQRKGAKRATIALARKVLSIIYTMLKTGTPYSEECFEQRRQRCERKRANRMVNDTNS

SEQ ID NO: 46399 - protein, 345 aa, unidentified
MEPMYYIGLDVHKRKISYCVKDSGCKVYSEGSLSATRLDLDVWMKTLPQPWSAAMEATMFPGWIYDHLKPHAAALKVAHPLMLRAIAAAKKKNDRIDAGKICDCLRCDFLPECYMAPTAIRERRCTLRYRNLLVRQMVQMKIKISSLLMEAGVSYNKQRLHKAGYFRELLATNPDINEGLKPLLQLCRETVVRLQKTESALVRSLERDSLLMDRVERLMTIPAVGPITGLTWALEVGDVQRFSSIKKAISYCGLCGAEKRSGSTVQRTPLSKQRNKHLQTTLIEAAKMAPRNSPELAMLYDKEKQKGNANRATLAVARKLVAYLVAVDRRQKEFLTVERENRTAA

SEQ ID NO: 46400 - protein, 342 aa, unidentified
MNHYAGIDVSLECSSVCVVDANGKILREAKVASEPEALIAWLRSSGLELERIGLEAGPLSQWLFAAMKVAGLAVELLETRHVRKAFEAMPVKSDRNDARGIAQLMRLGWFRPVHCKSMDAQEVRAMLTARKLVQSKLRDVENSLRGILRGFGLKVGKTTGREFAGRIEELVSGHPHLEMVAQALLAVRAALRKEFAIFEKQTRKMAGTDARTRLLMSTPAVGPIVALTYASAIDDPSRFKSSKQAGAHFGLTPKKYQSGETDYTGRISKIGDSSVRTALYEAAHIMLTKPLKGCSQLKSWAMRIAKRAGMSKAKVALARRLAVIMHRMLANGTPFNAAAAAA

SEQ ID NO: 46401 - protein, 410 aa, unidentified
MEIILGCCAGLDVHKETVQACVRKMGAGGKLEQEVRPWGTMTSDLRGMAEWLATAGVTHVAMESTGVYWKPIFNILEERFEILLVNARQFRNVPGRKTDIKDCQWIAQLLQHGLLKGSFIPPRPQRELRDLTRQRAQIMDERSRISSRIQKVLEDANVKLSSVASNVVGVSGRLMLEAIIEGQDDPAKLANLAQRSLRSKIPQLEQALYGRLTEHHRWMLHLLMDQLSTNEALLARLDERIAQCTRPLEPVLERLDEIPGIDVRVAQVLLAEIGPEMKPFPSDAHLASWAGVCPGCNESGGKKRSGKTTKGSRWLRQALVQAAWAAAHKKDSYFQAHARNLMHRRGRKRGLVAVAHSLLIVIYHMLKQGTRYCDLGLPFLDRLRATHLVRFHVRRLQQLGLQVELKAVAA

SEQ ID NO: 46402 - protein, 343 aa, unidentified
MDHFAGLDVSVKDTSICIVDDTGRILREVKVASEPDALLAVLTNRSYHFKRIGLEAGPMSQWLFSALAEADLPVICVETRHMQAVLKAQINKTDRNDARGIAQMMRVGLYRAVHVKTLRSQKLRMLLTHRKLLQSKAIAVDNDLRGTLRNFGLKVGIVGAAKFEVRIRELVEGFPDLAVLIEPLLIVRRVLREQIGILHRRVLSVVRDDEVCRRLMTVPGVGPVVALTYRATVDVPARFRKSKSVGAVFGLTCSRHQSGERDRPGAISRCGDEMMRTMLYEAAQSMLVRSTRWSWLKAWAMQIAKRRGIKRAIVALARRLAVILHRIWVDGTEFRWTRDAAAA

SEQ ID NO: 46403 - protein, 366 aa, unidentified
MKKISTMQTFSNEILKEQKLTIGSDLGDRWSFYCVLDEAGKIILEQKVPTTPEAIKQTFGKIPRSLIAMETGTHSPWVSRLLTELGHEVIVAHAQKVELITKSNRKDDRHDARTLARLARIDPELLGPVRHRSAKAQIHLTVIRARAELVSARTALVNAARGLAKSFGERLPKCGTQQVNEKLAEGLSAQLREVLEPLLREVESLNEHIQEYDQRMEKIAKEVYPEVALLQQVKGVGTQIALTYVLTIEDPYRFPKSRAVGCFLGLRPGRRNSGDSEPQKKISKEGDRYLRTMMVQGAHYILGPFGEDSDLRRWGLKLAERGGKNAKKRAVVAVARKLAVLLHRLWVSGEIYEPLRNSQKTMRAVA

SEQ ID NO: 46404 - protein, 313 aa, unidentified
MTLPQTTVGIDISGRRLDAYLHPAAKARGFTNDAVGIAALIAWTTGHGAFVVVEATAPWDQPLVRALEHAGLAFHRANPGRARDFARSTGMLAKTDRVDARMLSLYGAALDLPATAPVDPERLKLQSLNSRRDQLVEMRKAERIRLKGVTDPVVIDSLKAVIALFDNQIRALERRIGDTVAKARDLARDAALLRSATGVGPVCAAVILASLPELGRVDRRAVAALAGLAPIARESGLMRGKRHVQGGRKRVRDALYMAALTAIRTGRWKQAYDHLKSLGKAPKAAIVAVARKLLVALNAALRQQRPVLNAQIP

SEQ ID NO: 46405 - protein, 327 aa, unidentified
MENQKQNYAGVDIGLEWLDVSWYEQDKVQHVKLPNTLQGFKQLVKRCGATRHYVMEATGPYYVALALHLHLSGIKVSVVNAMVIKRFIQMQLEKNKSDKKDAGWICKYAMSQQPGLWQAPQDHIIRAKQMQTAIMQLTKQRTAAINALKSLKHMPVVSSECKRSYQHVIANLNKEIVLLEGKLETLLKEHEGKKLAVLQTIPGIGKRTVAMMLIATDGFRKVDNYRQLSSWAGLSPKEYSSGKSIRGKVRISKMGGKELRNMLYMCSLTAIKCNKSCKELYDRLKAKGKNGKLALAAVGNKLIKQAVAIAKSELPYDEKYFSKKVCF

SEQ ID NO: 46406 - protein, 433 aa, unidentified
MNSTQNKKIEQVKETTMIVGIDVGSEKHYFRAFNWRGIELTRKPVAFSNSMEGFNSFYNSVVELMQKNELKEALVGIEPTGHYWFDLGQFMGEKNIKFVMVNPHHVHKTKELDDNSPSKNDRKDPRVIAGLVRDGRYFYSYMPTGVYAELRNASNRRFVLVEEQTRAKNRLQKWVAVYFPEYKGIYTHIDAKGGLLVLKQAPTPEEIVRLGVEGIIKIWKDAKLRGNGHKKAMLILNAAMKSIGLKAGLTEARMEIQDLIEDYELQTKRLERVNDLIKELCQQIRYADKLLEIKGIGITTVAGFIAEVGDITRFDSTKELQKLAGLELVADSSGKHDGKTKISKRGRKRLRYLLFEAAISVVGKNEEFKEIHRYYTTREKNPLKKMQSLIAVACKLIRVFHVILTKGISYDASKDVERYSTSGRAVKGCITEQ

SEQ ID NO: 46407 - protein, 421 aa, unidentified
MEDITEEAAELVARVAALDVGKRDVVACVRVPHEDKPGRRLQEVRTYATTTRSLLELRDWLVCQGVSLCVMEATSTYWKPPFYLLEDGIECWVVNARDVKNVPGRPKTDKLDAVWLCKLAERGMLRPSFVPPPWQRELRDLCRYRRTLIQERTREKQRAEKLLEDTQIKLSAVISDIFGKSGRDMLEALIAGQRDPYALAQMARGSMRGKVGVLQEALTGRFRDHHGYLLRMMLDRVDQLSAQIEALTERIDEAIAPFAHQVAQLDEIPGIGKTGAQELIAEIGADMTRFPTARHLVSWAKFAPRARQSAGKSKPGTTGKGNPWIAGTLGEAGMGASRTKTFLGSRYHRLARRRGKQRALVAIGNSILTIAWHLLSDPDARFSDLGPDWHDRLAPIRRKRQLIAELERLSGRKVLLQEAAA

SEQ ID NO: 46408 - protein, 447 aa, unidentified
MTTPSLPVLDPLAAFVDVGSEQMFVSIAGGPPEVFGTVTHELHRLRDWLQERKVKSVAMEATGVYWLPLYGVLEAAGFKVVMVNGKQTRNLPGRKTDMKDCQWGATLHAHGLLQAGFVPPAQIRRLQDYLRLRADHLTSAAANVQHQQKALERMNVKLHDVISSLVGASGSKVIAAILAGERDPERLLALCDVQIQKKKAERVKESLRGTWAEEHLFALRQAVENWEHYQRQIAACDQRIEAVLREINGPDQPANPPPPIASSKRAGANAPEIDDLHSLLVKLCGGKDLTVLPAHTDYSLLQLVGEVGTDLTQWATEKHFTAWAGLAPGSHQSGKRKGSVRRKRNRAGRLFCVMARSLARSKHIALGGFYRRMAARRGGLVANIALGRKLAVLFWRVMVKGLSFAEAGLKAYEEQVLETKRRALCRLAKQLGRVVLPSLAEMQTKPA

SEQ ID NO: 46409 - protein, 408 aa, unidentified
MDLTPLHKRVIALDVHQAKITACSIVEHDNGRVEVTKHDFGAFKRDRRALAKWALEIRPEVVVMESTGVYWKSPFAALEAVGIIAWVVNARHVKAVPGRKTDMADAQWLATLARAGLLRASFIPPLPMRQLRLVARQRQKLVGMCSAEKNRLHKVLVDAGIRINVLVSDVHGTSARAMVKALIAGKPMHEVLDCKGRLRASREELFEALSTEQFSAVHRFVAEEITQHIEQIEQRIARLDQYLLDGLRPWQPQLKLLQTIPGIDEQGAAMLLVEIGADMSAFGSAERLASWVGICPGNNESAGKRKTGRIRKGNAWVRRLLCEFAQAAARTRCALKAKFDALAIRKGHKKSIIALAHKMLRTVYAMLANGTHYQDKEVDYEALNVQRNAPRWIRMLKKHGFIPTPACA

SEQ ID NO: 46410 - protein, 416 aa, unidentified
MKIVRPICCGMDVHKNIIVATIGITNKKTRITEYIQETFSTLNPDLLNLKQWLINHKCFDACMESTGKYWIPIFNILEDEINIYLTHPKYVKAIKGKKTDKKDSKWICDLFKHDLIKFSFIPPKEIRALREISRYRYKLVGMRSSERNRYQNCMTVSNIGIGSVFSDPFGKSAQAIMKEVLESDIIEDEKILKCIHGSCKNKDKILDSIKHCNIETDQRFKMNESMTHMEELQVHINNCEIEMMKRAAPMFDQFMHITQLPGISTLSAILIISEIGVDMKQFESDKQLTCWAGLAPANNESANKKKSVRISKAGQYLKPLLVQCALGAIKDKEGYFGIKYSRIKKRRGHKKAIIAIARMMLVSIYHMILTGETFNPSDYESFRNPNPPIKQQVLTEESAIEFLKKSGFDVSKLTKP

SEQ ID NO: 46411 - protein, 367 aa, unidentified
MKKVSTAVVRQSRNICPPKLTIGLDLGDRNSWYCVLNGAGQIQLEQGVRTNAKALREVFGKMPCSRIALETGTHSPWISRLLSELGHEVIVAHARKVRLIGESRKKDDRLDAQTLARLARIDPELLCPVKHRSAQAQADLTVIRARAGLVRARTALVNTARSLAKSYGGRLRGCNVRNMNPEKAEGLSPELQSALEPLLNAIESLSERIVEYNDRIEALAQHSYPQVALLKQIKGVGTLIALTFLLTLEDPHRFRKSRDVGCYLGLQPGRRNSGQSEPQMHISKEGDPYLRTLLVQGAQHILGPFGVDCDLRRWGLKLAERGGKSGKKRAIIATARKLAVLLHHLWVSGEVYQPLHNSSRTTVPAAA

SEQ ID NO: 46412 - protein, 352 aa, unidentified
MKCDKYMGMDVHQATTVVAVLDAEGQIVLETIVETQAASIIRLVQSLSGPLHVTFEETTQADWLYEVVRHFVTEVIVCDPRRNKLLSEGSKGDKVDARKLAELLRSGMVRAVHHGDSTRQLKELVRGYETICRDTQRTMARIKAIYRARGIRTPGRSVYQPKQREQWLAQLNEPGMQRRAGWLYEQLDHLTPLRRQAKQAMIQESRKYRGVRLLRTIPQLGPIRAALIVATIDTPHRFRTRHQLWSYSGLAVITHMSSEYELQQGRVVRSRKPIATRGLNRNCNRRMKDVFIGAATGGSQTEPYRSYLQGLEDKGIRKEMARLTLARKISAVALTIWKKGETFDPKKLNWTT

SEQ ID NO: 46413 - protein, 340 aa, unidentified
MQQLYAGLDLHSRNTYIGIMDKEFKRLYGKRVCNKLPLILSALDPFRDQLNGIVVESTFNWYWLIDGLMDAGYQCIHLANPSAMKQYEGIKHTDDQNDAFFLAQMLILGILPQGYIYPKEDRPVRDLARKRLFLVRHKTSHILSLQSLISRCCGQSISANEIRKITIDDLQQLLKEEHIILSAQANLDTITFLKQQIQRLEKTIKNKVKLNKTFQQLLTVPGIGLILAMTIMLEVGDIGRFPQVGNFASYSRCVSSKRLSDGKSKGHGNRKNGNRYLSWAFTEAAHLSRRHNEHFRNYYNRKVAQANTSLATKALSNKLARICYYIMRDQTPFRKELLSH

SEQ ID NO: 46414 - protein, 351 aa, unidentified
MFMIGVDYHPSVQQIAFTDTETGECGERRLNHSDGEAGKFYRELKQRGLSVLVGMEATGYARWFERLLAELGFELWIGDPAEIKTKRVRKQKTDRQDAQLLLRLLLENRFPRIWRPSPENRDLRQLLWHRHRLVQMRTRIMNQLQAVAMNEGKRWKKKLFSAQGRAQLEELPLAPWASRRRHDLLELLDRLNPTIETLTAAIKQEAKRRPVVLRLMTLPGVGPITALAFVLIIGTPERFQCGKQIGSYVGLIPCEDSSAGRQRLGHISKQGNTLLRFLLVEAAQAAVRWDPDWRRRYLHLAMRRDRRISKVAMARRLGVRLYWMWRNGWEYSQLVKFGSHAGQPVHVHGVR

SEQ ID NO: 46415 - protein, 384 aa, unidentified
MNSVGIDISKGRSTVAVMRPFGEVVISPFEVRHTDSELSELARQLKSLDGETRVVMEATGNYHTPVAKLLHDAGLYVSVVNAKLVHGYGNNDLRRVKTDKKDSVKLANYGLDRWLALTRYVPEEDTRLLLKNCYRQYRQYSKVQTVLKNNLISLLDTVFPNVNRLFSSPIRGDGSEKWVDFVAEFWHCRCVSEKSQKAFTNKYQRWCRKHGYNFSEAKAHTIHAETCGHIDVIPKSETTKLLVEQAVAQFRATSAALAALKHEIQSLASVLPEYPVVMDLFGVGPTLDPQLIAEIGDVRRFYSKKALVAYAGLDAPPNDSGDVTGRHKSTSKIGASSLRRTLFLVMSVYLLTAPLDEPVYQFMDRKRAEGKPYRRCESRLENAL

SEQ ID NO: 46416 - protein, 495 aa, unidentified
MKSLVEVERLLPRLRECIQPRPRPGAQTITTRFDAMTSRKKKQREFSGDETLCPIRQNTAGIDVGATEHWVSVPPDRDGEAVRCFKAFTGDLHALADWLEVCCIDHVAMESTGVYWIPLFEILEERGFEVALVNAKHLKNVAGRKADWTDCQWIRIVYSRGLVSASFRPPQQIAALRSYLRHRKMLVEYAACHVQHMQKALSQMNLHLHHVISDITGVTGTKIIEAILAGERDPARMAQLRDRRIKSSPEIIAKALEGNYRIEHIFALRQAFDLYKTYCQQIDACDQQIHQHLQQLEAKIDPDHKPLPASRRQRRLRKRRNEIRFDSRREAYRIAGVDLTTIDGIDESTALLILSEIGPDLSPWKSEKHFASWLNLSPNHQISGGKILNRKTRKQKNRVRDGLRIGAQSLLHSQSALGAYCRRICSRIGHPKGIIATAHKLACLIYRLLKFGGAYVDQGQQHFEQRFKERAIKNIASRAKEHGYQLIPLPQVQVP

SEQ ID NO: 46417 - protein, 464 aa, unidentified
MNEESKPGSEHGVGRKEEGISALGRKVAGIDVGSRVHWVCAPARGGEGREEEVFGATTRELERMAGWLLERGVESVALESTGVYWIAVHEVLEGQGLKVLLVDARALARVPGRTKTDRRDCEWIQRLHSCGLLRGAFRPPEQICMLRTLVRDKGILVAEQSDWVRRLQKSLEQMNVRVHRAVSDLTGATGMALLRAIVKGERDPRQLAKLRDPRCRQSEEEIAEQLTGHWREDHLFSLGQSLKMYEAIQERIEAYERAILEKLGEMERDDCQGENPPPLPNKVKAQTIRKRGQEPLRQALYRVSGEDLTAIDALGVETVQAVISEYGTDLSPFPDEKQFVSHILLAPNKATSGGKPVKHKKRRGSASSRVGAALRMAALSLRHSQTALGAYYRQIARHKGGDVAVFATARKLATLIYRTLRWGKSYVDEGAEAYEKRYQEARLRRLSSIARELGYQLTPLAVKA

SEQ ID NO: 46418 - protein, 458 aa, unidentified
MYRELFPLRQALSAELKANLSPAVPGIDSEHLLQSYLDRLTMYVGCDVADQILTFFAVDAAGEELGHLSAANDPQGFEQVWDWLEDLRSQHGLRIILLAMESTGVYYWACWDFLAQRSNLARVLYNPRTTEHMTVVLSKKVRNELVDAYALAEQVRLGSTPEVVLPEDADLLTARFCSRAARDLAGQINRKKNQLRDLLRAYNPAISQVFPGAKFHHQAVYALLQQFVFPDECVDAGVETITAILEAHCRTAFDSQHAERLVTLCRDTLSRPIRREQIRQRVHHLIDDITTCQKRKSYFIKAGYRLIENRPETPLLRDATGAGPSNTLALVSEVGDVQRFKSGEHLASFLGLTTSKHISGATIFVSKHITKQGSPNGRYAAVNVAQHLSQRVPKYQHMYQRIKSRKPPRKGHFVALVAIARDFVTNVLYDMWRYQRPFFLEVEDYRAYRRKNPRTDEE

SEQ ID NO: 46419 - protein, 434 aa, unidentified
MLRLKDKACGADIHKKTVVATILSSDGTKVEGEFGTTVTELIRFKEWLKENDCNSVAVESTGTFWQPIYSVLEGSVEVIVANPYMIKHMPGRKTDKVDSNWIAQLCLKGMIEPSRIFPKADRELRRLTRARESLGKIRTQLKNSIHKDLDSSHIKLSSVISDIFGKSGMHILRGLLDGQNLDAIIKGIPSGRVRKKADQIKEAIHNNLDLTQVILIESSLSLIRSVEQQIDMIESEIASRIVSRQEDLEIARSIPGVDFISGATLLAEIGNYQDFSSPEKMAAYFGIVPSVNQSAGKLHTGPITKHGSKHMRWILVQIANAASKKIGSKLRRFYLRIKAKSGHNVAIIALARKILCILHHLLMNREKYVEDDKSKRSKSKKNFRTSSPRVMDIQEMIDIIRQSGYEVQKVDTSKGASWKRSRNGRRNIQGGTCG

SEQ ID NO: 46420 - protein, 359 aa, unidentified
MYFAGLDAHLKYVSIAVLDRRGQVALETSVSTREPEQLLAALAPYRPLEVVVETCPFWPWLYDLLVPAGIGFHLAHAKQLRAIAAAPQKSDAVDARLLARMLLAGLIPEAYPRPADQRELLRLLRHRTTLVRYRTRLAGRIHSQLHQQRLSLPREKLLRQATRAWLEETAWPRLTVEQQAIVTTHLELIDGLTPLVQALERRIATAAAGHATAPLLATIPGIGPYRSLLLAAELSPITRFPRAEHLVSYAGLAPVTRSSGGHTHHGSIPRGANRWVRGALVSAIPTHVRWAPTSPVTMAYAQLKARLGWRVARVAAARKLARVVYVMLIRRTPWRGAPAAGDVRDEVQNSHVARTTSFC

SEQ ID NO: 46421 - protein, 348 aa, unidentified
MGMRMRISVLGVDLGKNVCSLVGFDASGAVVLRRRAKRETLIALAAKLPPCVVAMEACCGAHHLGRVFAAHGHDVRLMSPEYVRPYVKAQKNDDRDAEGVAEAATRPTMRFVELKSQEQLDMQTLHRSRDRLVGERTALINQLRAILLERGIVAPQGKRKLEQFLVNLMDEQGGAGLSPRMIMLVTDTRVQWAELDRRIAAFDAEFVRWTKENEDARRLATIPGVGATIASALIAAVGKAETFERGRDLAAWLGLVPRQFTTGGKTKLLGISKRGNKYLRKLLIHGARAALPYVAERDTPLGRWAKALLSRAHPNVVVVAFANKLARIAWAVLRRGEPFAAKGTPLAA

SEQ ID NO: 46422 - protein, 416 aa, unidentified
MTYRIAAIDIHKKVLMVVVATAAAEVADAAGEALEFTCRQFGTGALERQHLVSWLQRQGVTEIVMESTAQYWKPIWLELEPHFQKLHLAQAQSNRAPRGRKHDFKDAKRLARRLLAGELSLSYVPEPEQRLWRIMTRGKQQLVRERIRIRNRMEALLEEMQIKLDSVISDLLGVSGRRILKALSEGETDPNRLAQLGDERLKCSQEELADALRGHPTPTHISMLKLYWEHVELMDRQIADLDRLVAQALKPYEEAVQRLAEVSGFGVDSAQQLIAEVGVLADAFPSAGQFSSWVGTCPGSNVTAEENHSSRSPKGNKFARRLLNQAANAAIKKKGSHFQNIFRRFVGKLGYQGAVWVVAHRLTRLVWLILTRQVRFVEQGEETNPKAKLRRAQKLARALRRLGYQVSLTPIQPAQA

SEQ ID NO: 46423 - protein, 321 aa, unidentified
MTKVLLVGIDVASREFVLATNRGEWTFDNDPAGHRRVVRKLTRGGRRARVVLEATGIYHLDLAMALHKAKAVEVMVANPRAVRDFGRARFQRSKTDRADAKVLLAFAEHMPFRSWQPPSPETLALRALSRRMAALTATGAQERNRLHASRHAVIREDIEAHLDELQQRILRLQAEALLLIQASPTLRRRFSHLCSVKGIATASAIRILGEITVLPEEMTVRQWVAHAGLDPRHVESGTSTSKPPRISKVGNAHIRAALYMPALVAIQHEPHVTAFYEALLARGKKPLQAIVAVMRKLLHSIYGMFEHDTDFDGRKFYEIRP

SEQ ID NO: 46424 - protein, 315 aa, unidentified
MTQSIAATIGIDISKDYLDVAVHPETTPQRFSNDKSGHRDLVRWARTIKPENIIFEATGSYHRALELCLDKAGLRFSKMNPRQTRRFAEASGRLAKTDRIDAQMLAHFGAVLRPKPSTLPSTGVRKLTELVMARKALVKERNAAANRAKARTILMLRNHDEKMMALIDEHLKDIDQLALECVQADSELKVRFDILVSIPGIGAVSAIAMIALMPELGNIEPRQAASLAGLAPVCRQSGTWKGKSFIRGGRPLLRHTLYMPALVAARRNPDFKKKYDAMIAAGKPAKLVITTIMRKLLILAGTLIKNNRIWTPIRP

SEQ ID NO: 46425 - protein, 396 aa, unidentified
MENVYVGIDVSQRKCDASIKDRSHNELVEPIVFEPNMEGIDKLLKVVTEVCKRLKAEPIFGMESTGIYHLPIYAELTALDYTVKVYNPTQINAFSKKSLRKTQTDKIAARTIADALSYEGVPRERHVDKETMKLREYCRIRHRLNKKASNAKRQIARDMDLIFRGYRRVFKDIRGKASRTLLKEYTTSQAICDLGEKELTKVLRTNSGGVLGQERAKKLLEACDKNIRSNLEEPCVEEIRYLLQLIELMEEQISDLDKKITKCFDQDSELMTISGIGEVNGAIIYSELGNIDDFEDGSDIVAFSGLDPSIKESGKFKGTKHHISKRGSPYLRSALYSSAVVASRCNPVCKRFYERLLARGVPKKAALCAVARKLCYIIFSVMKNKRPFYVPEDLKK

SEQ ID NO: 46426 - protein, 356 aa, unidentified
MSQTHDTTVAVVGIDIGKNSFHIVGHDQRGAIVLSQKWSRGQVEARFANMPPCLIGMEACVGAHHLSRKLKELGHDARLMPAKYVRPYSKGQKNDFRDAEAIAEAVQRPTMKFVAMKTAEQLDLQALHRVRERLVSQRTGIINQIRAFLLERGVAVRQGLRFLRAELPRLLATPPDVLSPRMVRIIEDLAGDWRRLDERVEGLSSEIAAIARQDSGCERLMSVPGIGPIISSAMVAAIGAGDAFSKGRDFAAWLGLVPRQMSTGDRTILGKISKRGNRYLRVLFVQAAWVVLVKVKPHTWERHGLKPWIEAAKKRLHRNVLAIALANKLARIAWAVLAKGRNFETRKTNNAIAQPA

SEQ ID NO: 46427 - protein, 332 aa, unidentified
MPLYAGCDLHSNNNYFALVDHWKLANDPQVILETLRSQRLKIVGIVVESTYNWYWLVDTLMGAGYRVHLANPAAIQQYSGLKHADDKHDAFWLARMLRLGILPEGYIYPKEERPTRDLLRKRGHLVRLRTSLMLSLQNIIDRNYGLRISGNDMKRLREDRVSPFFAGDGDLVLVGSVSKEAIDFLTRQIRKIEKVLEEKVELRAPYRYILTLPGVGKILALTIMLETGPISRFAKVGNYASYCRKVSSQWLSNERVKGKGNKKSGNKYLAWAFSEAAEFARRQEGAARAYYQRKRQRTNLMVAHSALAHKLARAAYHLMRDEVPFHPEKLFS

SEQ ID NO: 46428 - protein, 401 aa, unidentified
MPESITAGIDWGGSVHQVAIVDGRGRQLASFPVAHDVAGLAELGERLATYGADLPVAIERAEGLLVEHLQALGLQVYPVSPRIAARIRERYRVAPIKDDAFDAFTLADALRHEQPRWRPLAEPSPLLAERRALTRDRERIVAEHVRVQNQLHAILESYHPAAARLFSRLDRKVALSFARDYPTPARAAQVGERRMARFLARNGYTGRVAPAVLAERLHANLLAAAPGTVAGKSFAARHHADLLEQLTRTREAYDERIARLLAEHPDGELFRSLPGVGPVLAAILLAEIGEDRARFPEAALLLAEAGLAPVTRQSGKTRRVRFRRAASHRLRQAFTWWAFNSLTESPWARLVYEENRARGQRYYRALRGLSARWGRVLYRCWQDGSCYEVERHPGALELVET

SEQ ID NO: 46429 - protein, 429 aa, unidentified
MPYRIAGIDVHKKMLAVVVSDVEIDSEYQFERKRFSSNPEQLRSLAAWLLEQAAEEVVMESTAQYWKPVWEALERYWKPTCEKREGARRKSGTLHLAQALSNRGRRGRKRDFPDAERLVKRLVAQELTLSFVPDTEQRLWRTVTRKKYQLRCDRIRLQNQLESLLEEAHIKLSSFVSDLLGLSAQRMLKAISEGETDPAVLAALADKHLRATPEQLCDALGACTQLNPVYRRLLKLALEELGLIDDQIGRLDREMASLLGQHQDAVQRLAEVPGLGVDSAQQIIAEVGPTAATFPSAKCLSSWVGACPGDDETAGVNYSHRSPKGNRQMRRILNQSANAAARTKGSIFEIVYRRSVPRLGHNQAIGAIAHRHCRLIWLILHRGVRYEERGPAVTRRSKQLRTWRMIRQLRSLGYHIAPPNPQPSQEQAR

SEQ ID NO: 46430 - protein, 396 aa, unidentified
MDRQKTVAGLDVHKDSIYLCVMGHDEAIIFQKTYGTLTPDLRQMCADMVSHGVTEAAMESTATYWVPVWNALCDSMSLKLVNPFFIKQLPGRKSDVKDAQWIAECLLKNLIKGSFVPDSVVQDMRKYNRRIFDLNDDMVYNTNKLDAALQRCGFRLSNYVTHVKGKSYQSCISAIISGITDPFELAKLVHGRTINKHGKDVVMAAVTADFHQADIDLIRQYKEMIDIIDRQIKECQSALTALCKEHFPTQYERLQTIPGVRERAATAIIAETGADMSHFHKSTNLVGWCGLRPRNDESNRKIKSNKITHGNKFLRKILIEIAWTASRTRNCFFSNFSYVQCTVKRKTKMKVQVAIARKILVAVWHMFSNDENFFDVYLKRLEKEAEGQRLFQESIQ

SEQ ID NO: 46431 - protein, 368 aa, unidentified
MSKTENSRLCVGVDLHKTQFTVCAMNEEGEYLLEKKYPTTEEGYEAFCREMHRQEEQGYSIELAVETTGNARYFKNRMEKEYFLVKVVNTNRFKVITMSTKKTDANDAATLAYYLMKEMLPEANLCSQTSEEIRRMLKTRTILVQSMVKIKNQIHGMMLGYGIETKAAQFQSKKKRQELMNDLADHEYSAFTASSLKVMLQIIDDLSEEIKRVEAQLEEMVKKNEDVELLMSIPGIGINTATTIAAYTENLERFEGNYKRFASYIGIVPSVHNSNETKHLGRITKHGPQELRTAFVQAALGMVRLTKVTSEWWLIKDYHRKKDDKGSGRAIIALARKISRIVFVMLSKRESFNPDLMQNNEQNFQQTA

SEQ ID NO: 46432 - protein, 349 aa, unidentified
MTEQRRSYAGECVYVGVDVHKETYTVTCVCHKQIVKTATVQAEPASLAASLRRWFPGATLASAYEAGFSAFVLHRALTKAGISNIVVNPASLAVAANDKVKTDRRDSKRLAVDLADGRLRGIYVPTEEEELARLLPRTRAQLVEHRATLARQIKAKLHQFGLIAPSSRRLLSHRYLREIESWTLPPELRASLKLLAEQWRFVTRQLIEMRRLLREQATAQAAIDKVYRSVPGIGEVVARTLATELGDMTRFANERALFSYTGLTPSEYSSGAAVRRGPISRQGSSRVRHLLVETAWRALPYDAVLQTMFERIAATRGKKRAIVAIARRLIGRIRACFRQGTMYAVGTLA

SEQ ID NO: 46433 - protein, 360 aa, unidentified
MNYTQNEKIEQVTDSTMVVGVDIGSQIHYARAFDNRGRELTKRIFSFHNDLEGFNSFNLWAETLKTENKKTAVLIGCEPTGHYWFDFGQFMGEKNIKFVMVNPHHVHKTKDLDDNSPSKNDRKDPRVIAGLVRDGRYFYSYMPTGVYAELRNASNRRFVLVEEQTRAKNRLQKWIAVYFPEYKGIYTHIDAKGGLLVLKQAPTPEEIVKLGEEGIIKIWKDAKLRRNGNKKALKILNAAMRSIGLRTGLTEARMEIQDLIEDYELQTKRLERVNDLIKELCQQIRYADKLLEIKGIGITTVAGFIAEVGDITRFDSTKELQKLAGLELVADSSSKHNGKTKISKRGASVFVIFFLKHRYR

SEQ ID NO: 46434 - protein, 408 aa, unidentified
MQLLFRRCAGLDVHQKTVVACMRWVREARVDKEVRTFATTVEGLLELLRWLQGHDCEAAVMESTGVYWKPVWAVLEGHMELVLANAQEVRNLPGRKTDVRDADWLSDLLAHGLIRSSFVPSAPLRALRDLTRTRTQLTREITRHTLRLQKTLEDANIKLTNVLSDILGVSGRAILEAMIGGITDPEALVALRRKGVKATREEMLAALHGRLTDHHRFLLRLHLDQVDALSDAVAKLDERIAEQLEPFRPQYELLRTVPAVGDHTAAVILAEIGPDMTRFPTAGHLVSWAGLCPKSDQSAGKQRSRRLRRGNRWLKTAMVQIGWAAARKKDGYHKRFYLNVKSRRGPKKAVVAVGASLLTSIYHVLLRSTPYQDPRPVDLTPKARQRAVNRLLRRLNGLGVQVEVKHAA

SEQ ID NO: 46435 - protein, 309 aa, unidentified
MLTAEADKCKTKVVVNTAAGVQALLAWCAKHGAQPAQLHAILEPTGLYHEQAATELPQVRVSLVNPAQARDFAKALALRSKNDALDSYVLARYGQTLSPALWHPAPLHARQLRALLTRREALSKDLLRELNRKEKSQFSPSAPLVDGSIDKAIAFLREQIKQIERAIDQHIDNHPDLKQDCELLNSIPAIGPQAGNAILAVMHNRHIDSAQSLAAYLGVVPVQRQSGSSLNSCARLSKAGPSQVRATLYMAALVGTRHNPHIRALYQRLLKAGKSKKAALGAAMRKLVHLCFGVLKNRIPYQPNYAMNG

SEQ ID NO: 46436 - protein, 373 aa, unidentified
MVRAALALRSVRQWCHEPVYKFDPEPLRTSHCRHARKGRSTHSRLPSPGLRAGAADEEAMMEILYPRCAGLDVHRDSIVACVRLAERGIERHVETFGTTTTELERLSAWLASHQVTHVAMEATGVYWKPVWAVLVEDFELLLANARHVKTVPGRTTDVNDAVWLADLLAHGLIRPSFVPPPAVQALRDLTRTRKQLTRERAAHVQRIDKVLQGANLKLGSVLSNIMGQSGRAILDALAAGESTPETLAGLLRANVRASRAQVIEALHGRLAEHQRLLLRVHLGQIDAIEAAIVALDRELSERLEPFREAVTRLSATPGLAVLSVASILAEIGLDMSPFPSEAHLISWAGLCPRNDESAGKRRSTRLRPGAPWL

SEQ ID NO: 46437 - protein, 413 aa, unidentified
MEVVYERCCGLDVHKKSVVACLITPSPDGKPIKETRSFGTMTEDIVSLCEWLDEAGCTVVAMESTGVYWKPIYNIMEGLFELLLVNAQSIKAVPGRKTDIKDAEWIADLLRHGLLKGSFVPDRERRELRELTRYRTSLIQERAAELNRLQKVLEGANIKLASVASDIDGVSARAMLERLVAGSTDASAIADLAKGRMREKIPELEKALSGRFGAHQRFLVAQQLVHLDTLDELIERVSAEIRERMRPFEEAITRLDTIPGVGRETAEVIVAEIGVDMSRFPTGGHLSSWAGLAPGNNLSAGKSKSGRTRKGDKWLRTALVQAAKAATKSKKSYLSSQYHRLASRRGKNKATIAVAHSILVIAYHLLRRRENYRDLGALYFDQRNQDRVRQRLVNRLQSLGYNVTLEPIKEDAA

SEQ ID NO: 46438 - protein, 402 aa, unidentified
MNCVGIDVSKGKSMIAVMRPFGEVVVSPFEVRHTANELSELAGLLKSLDGETRVVMESTGNYHAPVAWLLHDAGLYVSVVNAMLVHDYGNNSLRRAKTDKKDAVKLANYGLDHWLTLPRYVPEEDTRLMLKTCYRQYQQYSKVQTMLKNNLISLLDTAFPDANRLFTSPPRADGSEKWVDFVAAFWHCECVCGLSKKAFTAKYQKWCRKHGYNFSEDKALDIYASACRHFGVIPKTDTAKLLVEQAISQLQATSAALAALKQEMQSLAASLPEYPVVMGMFGVGPTLGPQLIAEIGDVRRFHSKKSLVAFAGIDAPPYQSGQIDVRSRSISKRGSASLRRTLFLVMSVILQCAPIDEPVYQFMDKKRSEGKPYRVYMMASANKFLRIYYASVKAYLESLEHD

SEQ ID NO: 46439 - protein, 425 aa, unidentified
MKRDLSVENQFSVYVGLDWGTEFHRACVLNSRGEILRECRIDHSGQAITDFVRSLHEMGNGKPDQVAVAIEVPRGPVVEALLEGGLVVFSINPKQLDRFRDRYAVAGAKDDSRDAYVAADSLRTDQHCFRRIAADHPDVVRLRELSRTEESLGEDFRRVVNQLYQLLLRYYPQLLQLNSTPDEPWIWALLELAPIPQRGARLTVARLKTLLSKHRIRRWTADALRVAIATPPLPLAAGSADAISEHALLLLPQLRLLYSQRKEVRDRIEALLNRMTLLGSERSECREHRDVGLLLSLPGLGYLIAANLFTEASDPLAQRDYYALRAHSGIAPVTKQSGKSRQVVMRRGCSERLRNAMYHWARCSVQHDPLSKLHYARLRKLGHKHGRALRGVADRLSSILIAMLKSGQPYDAKRRQTAAASAHTA

SEQ ID NO: 46440 - protein, 339 aa, unidentified
MMMCYAGIDLHATNSVLVVIDDADRVLYQKRLRNDLPLILAALEPYRVAVQGVAVESTYNWYWLVDGLMDAGYRVHLAHAPALPQYSGLKHADDQHDARWLAHLLRLGLLPTGYIYPKAERAVRDLLRKRSQVVRHKTMVVLSLQSLLTRLTGTRLSLPRLRQLTPEGVRALVPFPEQVQAVMSSMTVLQCLEQEIRTIEGTVREAGRTQPGYALLQTVPGIGPILAGTILLEAGDLQRFATVGHFASYCRCVGSEHVSNGKRKGAGNTKNGNKYLSWAFIEAAHFAIRYEAVIRNFYQRKQARTHPLVALKAVAHKLARACYHMLREQVPFDVSRAFG

SEQ ID NO: 46441 - protein, 368 aa, unidentified
MSNVFHVGLDVHKDSIEVAFIDENGEARNYGKIKNNMNTLEKLIRRLHSKGPKELKFVYEAGPCGYGIFRHLTGLGFECVVVAPSMIPKRSGCRIKNDRRDALNLCRLFRAGELTPVHVPTPEDEAMRDLVRARDDAKSAEKKAKQKLKAFLLRHDLRYSGRSHWSQAHMNWLADLRMEHPAQQIALQEYIDELKESMQRVARLTEQIRILLPDWNKAPIVEALQALRGVRLVSAAIIVAEIGDFRRFKNAKELMTFLGLVPSEYSTGDQIKRGGITKTGNRFARKALVESAWSYRMSAKVSRDLLKRQEGLPQAVRDISWKAQVRLCNRYRRLRAKGKPQQVTVTSIARELAGFVWSIAHEVTPEPE

SEQ ID NO: 46442 - protein, 355 aa, unidentified
MKDQAIHYLGLDVHQATVVATSRNESGAIVLKATVPTEAKAVVGHVRGQGPRVHVAFEEGTQAQWLHDLLQPVAERVIVCNVRGKKELVNKNDDIDSGLLSERLRLGSLRGVYHGAASVLALKEMVRNYGNLVEDTIRVMQRIKAMFRARAIPTPGTSVYGTRRRAEWMSKLKGSGVRLRAESLFTQLDALLPLRRKAKEAMIAEARRQPAWKILRSIPFLGPVRVAQIIAIVGTPFRFRGKRRFWPYIGLGVVTHSSADKEIVAGTIRRRRRAPLTRGLNRNHNPVLKDVFKGAATAAAHKDGPLKNLYKQSLDRGVDPDMALLTLARKISSVALRLWKKGELWDPKKLTTQAT

SEQ ID NO: 46443 - protein, 348 aa, unidentified
MSQVTTIGLDIAKSIFQVHGVDAAGRSVLRQRLSRRRVLEFFGKLPRCLVGLEACASSHYWARELMALGHEVKLMPAQYVKPYVKRGKNDVADAEAICEAVTRPTMRFVGVKTPEQQSIMMLHRVRLILTRQRTQLSNALRSHLAEFGIVSPIGREGLDRLLTIVADTDDGRVPAEARASLEMLVVQLEGVKAQILANDRRIIASARATEVGRRLLEVPGIGPVLASAFVASVADPAIFKSGRDLAAWIGLVPRQNSSGGKERLGGITKAGNGYLRQMLMVGAIAVIRYAQRNSARRPWLVQLMGRRPAKVAAIALANKTARTVWALMSSGERYRDPQAIQAAVSANA

SEQ ID NO: 46444 - protein, 417 aa, unidentified
MKCFVGLDVSSTKLDVCIMLSDTTTPFTASLSNDLTGASEIKKHILELNETYSFERIVIGMEATSLYSFHPAMFFNEDSQLKALNVEVMVEQPNKIKKYRETFEESKNDTIDAFYIADYFRIERFSPAFLKEEKYLALQHLTRTRLQLIEQLTRTKQHFIENIYYKCNTLSTEIKNENLTTSLWSSTMISLMTKDYTLDELATVPLKDLADFIQKLGRGRFKAPDKLAKAIQAAIRGSYRLPKLQQDSVNVILGLLAREIRNLEQMIKDIDKAIEDMVEVIPEYQCLTSIPGVGKVYAAGIIAEIGQIERFKDHPQVAKYAGLNWKQNQSGNANSQNTDLVKRGNRYLRYYLVEAANSVRRHDSEYQAFYKKKYQEVPKHQHKRAIVLTARKFVRLVDALLRNRQLYTPPRRLMEDK

SEQ ID NO: 46445 - protein, 411 aa, unidentified
MRLFVGDDWAEDHHDVELMDSAGRVLARKRLPEGVAGIARLHELAGQHLGQDPDDAEVVIGIETDRGPWVAALVAAGYTVYGVNPLQASRYRERHGVPGAKSDRGDAHMLADMVRTDSHQLRAVAGDSAAAEAVKVVARTHKTLIWERTRQVQRLRHQLREYFPAALAAFEDLDAPDALELLGRAPDPGRAAALTRAQVSAALKRARRRDITGKATAILTALRSAQLGRPPAVTAAYAVTARSLIAVITVLNEQVKALESQVEADFGRHPDAEIYLSQPGLGPILGARVLGEFGDDPDRYVSGKARKNYAGTSPLTRASGKRKVVAARFIRNARLIDALMSQALSALGASPGARALYDAERARGTEHNAALRKLANRLVGILHGCLKTRTLYDEATAWPHREKTPQSDIAA

SEQ ID NO: 46446 - protein, 445 aa, unidentified
MSTTKPDTDTNSSAAAVPAPAAEPHFAAFIAIDWGDEKHAVALRVAGQTQTEHTTLEQKPQALTEWIAGLRQRFAGGTLAVILEQKRGALLYALQPHEHLVLYPVNPQMSAKFRQAFYPSGAKDDPTDADLQLDILLQHRDRLTAWRPDDATTRQLSLLVEGRRRFVADQVRVTNRLRDALKSYFPQALELAGEDLTTLMACAFLQKWPSLAALQQVKPTVLRKFYYAHHSRSEELIAQRLQLQAQAQPLTTDAAIIAAQSLLVQSLAQELAILHPVLARYEKQIAQLFAAHTDFALWDSFPGAGPALGPRLAVAWGTQRDRFPDPQAMPCFSGIAPVKEASGKQLWIHVRWACPKFLRQTFHEMAKCSLKGCAWALCYYQMQIERGKGHHAAIRALAFKWQRIMWRCWQDHLPYEDAKYVASLKRSARDLYARLSAAPAKERCE

SEQ ID NO: 46447 - protein, 400 aa, unidentified
MNYFLGIDIAKTNHVASLINNTGDVVIRAIKFTNSNEGFNKLLTTIQDKLGDLSNIEVAMEATGHYWLSLYSALTDNNFNVSVYNPYQVKSYRGAYNNRKQKNDIIDSIIIADYLRVFGTKESKLPEENLLSLKQLTRFRSNIVDNVSSLKVQVIGLLDKVFPEYKKLFCDTFGITSKQLLLNYPTPDDIIKISTTKLANLLSKHSKGKFNKDTALHIKEVAKESFGIKFTTDACSFEIKQLINQIIFLENQIDAVSKQVKELYNKLDSHLLSVPGVSVNLAPIILAEIGDINNFDKPSKLIAFAGTDPSENQSGNKLSSNDKTSKRGSPYLRHAIYTASLVAISNEPELRAYYDKKISEGKHHFVALAGISRKLLTIIYYILKEDRDYIKYDNIKDKLN

SEQ ID NO: 46448 - protein, 347 aa, unidentified
MDVHKEAIVIAVLNESGKLVMESIIATKASNILQFLHGLRGELHVTWEEGTWAAWLYDLLQPHVQHIVVCNPRRNALLKEGSKSDKVDARKLADLLRTGMLRPVYHGENGLRTLRELGRSYQTISKDLTRVMNRLKALYRGWGIPCAGTQVYAARTREEWLSKLPQAGVRRRAELLYQQLDGLQALRREVRPEFLAESRKHKAAKLLRQIPCIGPIRAARLIALMQTPHRFRSKRQLWTYSGLGIETHDSAQYRFVSGQVQRSKKPQQVRGLNRNHNHEMKEIFKSAATRASCGRGPLYDFYAALLAKGMKPEMARLTLARKIAAITLTLWKKEERFDAKQLKTQAA

SEQ ID NO: 46449 - protein, 339 aa, unidentified
MQLYAGLDLHSRNTYIGIMDKEFKRIFNKRVVNKLPVILDTLKPFQDQLKGIVVESTFNWYWLIDGLMDAGYDCLHLANPAAMKQYEGIKHTDDQHDAFFLAQMLILGILPQGYIYPKEDRPVRDLARKRLFLVRHKTSHILSLQSLITRCCGQRISANEIRKFTVEDLQRLLEQEYIVLSARANLDTIVFLKQQILHLEKAIKNKVKLNKQFQQLLTVPGIGLILAMTIMLEVGDIGRFPQVGNFASYSRCVSSQRLSDGKKKGQGNRKNGNRYLSWAFTEAAHLSRRYNEHFRSYYNRKVAQANTSLATKALSNKLARICYYIMRDQVPFQKNLLSQ

SEQ ID NO: 46450 - protein, 347 aa, unidentified
MDVHATSTVWCLLDGTGAVVARGRVATTTAGLAELIRELGGGADLVAGHEVGTMAYFVHDTLTAAGVRCLAFNAQHLRMIAASRKKTDRRDAYWIAKALQSGMYPPPVYIPTGEVRELRVLLHRRRQLHVEYGRWRARARAALRAAGSPAPRQAVGLRAALAQGMAAAAGSVPLLGETLALCQRQMAGLRLELQRVEQTLRGRATEIEVVQRLRTVPTIGVLVALTIYAAVGDVRRFPTAKALAAYAGLVATVRQSGETLVYGAITKQGAPALRRVLVQAAHVLLTRCARPQAQPLRAIGLRILTGRGRRKIAVVALARHLLRIAYYILRDGTTYDPTRLASMRPAA

SEQ ID NO: 46451 - protein, 356 aa, unidentified
MPMLADIVDGVIGVDTHRDTLAAAATTPIGRILAQTATSADAAGYRALLDFADAQIPDRRCWAVEGTGSYGAGLTTFLLAHCERVVEVGRLKRPASRTGAKTDAIDAVRAARDVLGHEHLALPRRRGDREALRVLLGCRRNAVSARVAAINQLKALIVSAPDGLRAELRGMATTTQITRCAGLRDRPARSLEHRTTIRVLRITAQRIQQLHAEIDELGSQLTTLVDAIAPWLVDLPGVGPVTAAQVLVSWSYAGRLRSEAAFAALAGTSPIPASSGQVTRQRLNRSGDRQLNRALHTIVIARLRDDPDTRAYAARRTAQGKTPREIRRCLKRFTARQLFKLLERYDQPGIEILRAA

SEQ ID NO: 46452 - protein, 369 aa, unidentified
MRRDILHIGLDVDDNFFTGAIFNSRTGKTEIFRVRPTIGALLKYLKKLQEKGKEFRICYEATYIGYSLCRELRKRGIECEVIAPSLIPVKPGKKVKTDKTDAINLSRYYSRGDLTIVNVPDEEDEAVRSLIRSRSFVVEERKRLKLHILSLCRVHNLNYKSESKRKNYWTQMHIKWLKEKISGLSENLRKCFELLIEQYISQNIIIEEYDREIKAASEKERYSKKVKALNCFRGLDTLSSMTLITEIGDVKRFSHPNKLTCYSGFDIREYSSGGKEQKYGITKMGNKRIRTTLIESCQFNFSEVKISRRLKLSREGAEMKYINIADRCMERLRKKSIMMKVKNKHHNKIKTACAREMLCFIWEALMLAS

SEQ ID NO: 46453 - protein, 404 aa, unidentified
MWYSGIDWADEHHDALVIDEKGQQMGSIRVHHNPQGLAALDAFLMQIIGSAPKEQMACIIETTHGLLIVHLLEAGWPVYPVNPRTVDRRRSASGAKTDLIDAYLLAKTGRADFADLRRLTPDSEKVAELKQLTRDQDSLIRTQTRLVNQLTACLKAYYPVALDLFSKLQQKSTLMFLQAYPTPQAARAASLKEIQQQLKQTRHPHPAAAAVSIVELLHQPQLQADVVLTRTKSRLMLALVSQLLPLIEQIADYNKEISTLFLTHEDHALFESLPRAGQHLAPRLLAEIGDDRQRYQGASSLQSLGGTSPVLYQSGMYSKAHRRLGCIKPLRNALHQFAWQSTQSEAWAKDYYQRKRTEGKSHTVAIRALSNVWVRIIFAMWTHRECYQTATFELAQQQHARRAA

SEQ ID NO: 46454 - protein, 348 aa, unidentified
MTVYIGVDFHARQQTISFLTTETGEIQHLVLLHQDLATVRVFYAQFAGQRVVVGFESSGYAAWFEELLEELGCEIWIGHALYIRQFAKRRQKNDRRDADLILDLLVKGDFPRIHRYSRRTREILQQLRYRQRLVKMRTMAMNMLLFMASSRGVSLRTQLTSKRGQARLAQLTLPQPLNSQRDELLQLLQALDEKIKTVEQWLQRETKADAAVQRLQTHPGIGLLTSICVRYTLEQVERFTTTRQVSAFAGFDPMEDQSDERQRRGAISKQGSRWLRFYLVEAGQIAIRKDADLARVYKRICVRGGHAKAKVAIGRRLLVRAFIMLRDEIDYDEFLRRGVAARSSRGTA

SEQ ID NO: 46455 - protein, 334 aa, unidentified
MNYNFFIGIDVSKKTLDFAVFKGKELHFKWVGENDEPGIKKFWGQLKLQQGFCVKEAMFCMEHTGIYNQYLLNFLYSKKAFVCLEAAVHIKLSSGLQRGKSDQIDAVRIAQYACKNSSELRLWQPKREVIQRLKHLSGLRNRVINARKQLTVALNETIGFDKNAACECKKLCKASLKALDDDIKRIEVKMDQVIASDTELKKLFSIVTSVEGIGKVTATEMIITTNEFKDITDPAKFACYSGVAPFEHSSGSSLKGRPRVSHKANKTMKSLLHMAALVAINYNADMKAYYQRKVEEKKNKMLVINAVRNKLIWRIFACVRNNRPYQKNYQLSLV

SEQ ID NO: 46456 - protein, 349 aa, unidentified
MAMLADTVDAVIGVDTHTDTHTACLLDRLGCQLGVITIPADQRGCRTLLAWAQQNAPGPRLAWSVEGTRSHGLGLTRYLHAHDQLVAEAGRPERASKRPGGKSDPADAARAARDALSAQRLAQPRSDGSREALRILLTARAQATTARTAAVNTLKALILGAPDDLRRQLRSLSTPRQASRCRSLRVHPSQPIAEQVLRAELRRLATHIGAWDTELRANKAQLRQLVAQTMPALLEQPGVGPMSAAQLLVSWSHKGRCRSEAAFAALAGTSPLQASSGTITRHRLNRFGDRELNRALHVIINWRMLHHTTTHDYMARRRAGQKTDPEIRRCLKRYAARQLFRLMETTATT

SEQ ID NO: 46457 - protein, 313 aa, unidentified
MSQNNLPILYVGLDVAKASLQLDLAGQPHTLANDAKGHAKLLKLLRDHPTAQIVCEATGGYEQPAVRALHAAAVSVSVVEAGRVRHFARAKGQRAKTDLIDAAVLSEYGRAFEPAPTTAPTAQQTRLAALSTRRGQLLQTRLAEANRAEHYVDKLCLSQSRQLLRTLDKQIAAGEAAIAELIAADEILQAKATRLDAIPGVGAITAGTVLAELPELGQISDEAVAALAGVAPYNQDSGNMTGTRHIAGGRRSVRCALYMATLSTLRYDKILKAFYLKLRAAGKKPKVALVACMRKLVVLMNRLLKNPEFQLAN

SEQ ID NO: 46458 - protein, 343 aa, unidentified
MGEVSTIGLDIAKSVFQVHGVDVDGAVVICKRVSRAKVLEFFGRLKPCLVGIEACPSAHYWSRRLQGLGHTVRLMPPSYVKAYLKRGKNDANDAAAICEAVTRPSMRFVPTKSEPQQSGLMLHRSRQLLVRQRTMLSNALRGHMVELGIISAKGRKGTAELIKIINADDDRVPAAARVSLAVLARQYEAIAAEIGVIEKSIHAWHRSCEESRRLEEIPGIGPIVATALVAEVGDWKAFSSGRNLAAWIGLVPRQHSTGGKDRLGGISKQGNRYLRWLLVTGAMAVIRYARHHGTRRLWLARLMERRALKVAAVALANKIARMAWAIMVRKERFEEAKLLPAAA

SEQ ID NO: 46459 - protein, 345 aa, unidentified
MEHVVIGMDPHKRSVTIEVMTGTERVLAKHRFDTTAAGFRQLLSYAKQWPDRLWAVEGCNGIGRHVASRLVMAGETVVDVPPKLSARLRMFDTRQGRKTDPDDAHAIAMVALRMNGLRPVVNDERHALLRILADRRRALGEDHTRMISQAHQLLLELIPGGAKKDLSAAQARVLLASVRPRDLVGKTRKRVALELVGDLEKIYQRSKALDKEIKQLVVDTGSTLMDLHGIGPSSAARLMIEVGDITRFPDRNHFASWNGTAPIDASSGENTRHRLSRAGNRQINRALHVMAIVQLRNQTEGRAYFDRRKAAGKTSMEAMRSLKRRLSDIVYRTTMPNTPATEQAA

SEQ ID NO: 46460 - protein, 416 aa, unidentified
MNYVGIDIAKNFHIVTIIDENEVKVFKKAFRVENDIAGYTGFIEKLEAISSDKTNFIIGIEATGIYGENLLEFLKLKAYNVKLLNPFQTSRYREQTTMKKVKNDNIDSLMIALFLKDGKYSEGYVTDDEYQSLRTLYRNRTTIQSDMQDLKKRILTNLAVTFPEFEYIVNPFTNIGLALLDKYPTAEHYKHSSVDRIVKVFRHIKGNNFTSEKAKQILEASKQSIFSGKAKDARAIAIKSSIRLLQIYLQEIEILEEEIFSLLEKQNISTQQFEEDMKADYKTTTLIHNLKSIPGVAEKTIAAIISECGDLTRFPTTAKFIGYLGLFPTENSSGNSKVIGHLSKRGSSIAKHALYMSAVGCLLHNPELKTLYDTKKSQGKSKKESLIAVSRKLATIIYAIFKYNTPYNPNRVFAKS

SEQ ID NO: 46461 - protein, 462 aa, unidentified
MSSKKKPTSKPRRSAPKRVDWKALEVVHLDAAGIDVGGSEHWVAVSPDRDPEPVRCFGCFTADLREMGRWLVQKGVRSVAMQSTGVYWMPVFEVLEQQGLEVYLVNAQHTKNVPGRKSDVQECQWLLKLHAFGLLNNSFQPSDEIRTARTLWRQRSNLVAEASSVIQRMQKVLTEMNVQLSNVLSDLSGMSGMKIIGAILEGERDPWVLAALVEPEVKATPENIAKSLEGNWREELLFVLRQHVELYRIYQEKIVDCDLQLRKHLKSLGSKVDPRMQPIGPRPKGKKNSRNAPSFDLRTELYRITGIDWSQINGIDVLTAQTVIAEAGADLGAFPSEKQFVSWLGLCPTNEQSGGQILNRRTRKVVNRASVAFRNAAVTLLRSQSYLGAQYRRLRTRLGAPKAITAMARKLACLFYRLIKHGQQYVDKGAEYYEARYREQQIRSLAKRAQKLGLQLVIPKTA

SEQ ID NO: 46462 - protein, 369 aa, unidentified
MGKYSEVFVAFDVAKKKHAVAIAEGGRTGEVRFLGDVENSPLPIERTIKRLANRYGRLHVCFEAGPTGYGLCRQIQALGHNCMVVAPALIPKRAGERIKTNRRDAVTLARLHRAGELTGVWTPDEAHEAVRDLVRGREAAADDLRRKRQQLLSFLLRHSRIYSGGGHWTLAHRRWLADQKFEHVAQQIVFQEGIDAIEDALQRLRRLEKQLALIAPDWSMAPVVEAYQAMRGASFLVAVTFAAEIGDVRRFDTPRQLMSFLGLVPAESSTGDTIRRKGLTLAGNRRARRALVEAAWTYRYPARVSETLRARLEGLPKPVRDIAWKAQVRLCARYRRLSATGKKLPIVVAAIAREMAAFLWAIGREVAPA

SEQ ID NO: 46463 - protein, 340 aa, unidentified
MEVATIGLDISKHVFHIHAVDGQGQVAGRQRLRRGEIVSFFSSLAPCLVGIEACATAHHWAREIRQFGHDVRLIPPAYVKPYVRRGAKNDAADAAAICEAVTRPNMRFVPIKSVENQGFLMLHRARGLLVRQRTMTACAIRAHFAEFGIIVGQGRQRVDGLVDLLDDEELTLPAHARIALAVLVNQLKELDRQVEAIERELAQIQRVNPMAKLLSSIPGIGPITASALAATVPDATMFRSGREFAAWLGLTPKQNSTGGKDRLGRITKQGDSYLRHLLVIGARNVVRYPKARSRVGGGWIEALLERRRPMVVAIAVANKLARIVWAMMTTGEFYRPKLAA

SEQ ID NO: 46464 - protein, 345 aa, unidentified
MTVYIGVDFHARQQTVSYLTTEDGEIRRLQLDHGAPARVRAFYEQFAGSLVIVGFEASGYAAWFEEMLEELGHEIWIGHATAIRLFARRRQKNDRRDADLILDLLLRGDFPRIHRYSPASREVLQQLRYRQRLVKMRTMVVNSLVFMAASRGVSLRTQLKSRRGVERLRQMALPHPLREQRDELCQLLLELRTRIEQVEIWLAAKAESDVRVQRLRTHYGIGPLTGLCLVHTLECVERFANPRKVTAFVGFDPVEDSSGERRRIGSISKQGSRLLRFFLIEAGQVAIRKDQDLARVYRRVLVRRGHAKAKVAVGRRLLVRAFIMLRDEIDYAEFQRRGVAARSSR

SEQ ID NO: 46465 - protein, 361 aa, unidentified
MSESMALVGLDVHKSRTVAAVLDRVTGELRMERLRGAPERVVPAFLEELDRPVEAVYEAGPTGFVLAREAEQRGLDIRVVAPGSIPRAPGDRVKTDRRDAKRLARLFAAGELRFAFVPSEADERFRDLVRCVDDVRRDLMRARHRLSKFLLRRGVRWQGKTWTQPHERWLCTLHFEDPLSQAVFVDYLAAVQGLAQRRKTLGSVLEGAVPNSSHAETINRLRCFRSIDTLTAAGLCAEVGDFTRFAKPALLSGFLGIVPSEYTSDEKRTQGQITKAGPTNARRLLVEAAHNYRHRPAIGENLKARQLGQDPRVAQIAWRCQQRLHQRWMHLGGKRGKPTGKVAIAVARELAAFCWEAATLN

SEQ ID NO: 46466 - protein, 322 aa, unidentified
MPVKKNTRRSFIGIDVSKQLLEIAVHQSDQRFCCPNNPHKFPNLIAELIALRPARIVLEATGGLEIPLLQALGAVGLPVVLINPRQVRDFAKALGLLAKTDRLDARVLAHYGAAVEPPLRPIKATEDTELDALMGRRNQLSDMLGAEKNRRGSAATEAARADIEAHIEWLEQRIKALDKQLKDQVKCSATWQQKDKILQSVKGIGFVTSVSLLADCPELGRLNRHQIAKLAGVAPLNHDSGKQRGPRHIFAGRAQVRAKLYMATLTAIRCNPVIKTFYQRLIARNKLKKVAITACMRKLLTIINVMVRDNKLWDVTAHSVSA

SEQ ID NO: 46467 - protein, 294 aa, unidentified
MTIVMGLDQHRAQITAEWLDSGTGEVSRARLAPAHRESVRRFLSRFSGQDLEVALEATTGWRFVVEELRRVGAGVHLAEPAQTSALRGNKKRPKSDRADARHLRELLMIGRLPESWIPPDHLLDLRSRVRLRHTLVDQRGEWQQRIRAVLYHHGLAHRRELDLLSGEGRAWLKDVELPDAAREQITVAIAMTEALNTQIAPLDRQLRLYARRQAGCKALQAHYGIGELTSVAILAELGDCRRFSSSRQAVRYAGMDITVYESDQRRSPGHLSRQGPPALRWALYEAGEEALQPA

SEQ ID NO: 46468 - protein, 417 aa, unidentified
MTFISKAMPFDRYIGLDVHKDYITVGGMNFHQEIILRPRNVDIQRFRSWAEKNLRPTDAVVLEATTNTWAVYDIVAPLVAKTVVAHPPEVKQIANASIKIDKLDVIRLIRLLIVDMVPEVWVPPVHVRELRALMSYRWRLLKMSTMVINRLRSLLHRHNIPGPEGKLYAIKNQGFWDTIQLSSIETLRVRQELDTLRQLRTQIDEIQDQLAILSNSDPWKDQAVFLMQLPGVGLVVTMTVLSAIGDISRFSSAKKLVGYSGLGAGVHHSGKTKHGKRITKRGRRELRWAMVEAAWRAVRYDPHWKAQFEDLKKRKHPSQAIVAIARKMLVVVWHVLSKQQPSRHSSDEDLAYKMLIWSQRLDDNALNGLSRRQFAKYGLLRLGTGHNIERIVRNGLPRRLAPTKEVLKLIPDLEPPQ

SEQ ID NO: 46469 - protein, 401 aa, unidentified
MPSLRENSQRIKRFRELKATLRTDRTRLLVGIDVAKAEHGVHLRHAHTRIVAPTLTIPNTTRGFTQLWVRIQQAQRATGCREVVCGLEPTGTYHQALATFLEGQGADVVLISSSVAYWNRRTQDGTWDKNDRKDAANCADLLEQGKILFASQPTGPLAELRRLVKLLRRARTELAACKARWRTALRPSLAPMGEPLPNRLRAELPTVLQAWERPTRGAPAQPRGRLPLGLATACADLGAQVTAVQARTTTIEAALTPLAARLPAYALLRTIPGIGSTVGAILVAEIGDVAWFTKFSQLRKLAGLDIVRVQTGQYAGQWRISKCGRGLLRWALYQAAGGLARTAPGRARLATLKAKRHGDRFAGFKAMVELAAKQLRLVWGVWRSGTPYDPRRTGGLRRQPR

SEQ ID NO: 46470 - protein, 380 aa, unidentified
MSDVSSPEPARVSRFIALDVHKLSIVAALLPAGGGEPEIVQTENTERAVRRLVRGLGGPEGLAACDEAGPCGDDLYRLLSEMGVPCWIVAPSLTPVRPGDRVKTDRRDARKLVRLFRAGELSFVSPPSPEQEGLRDLVRCREDLRRARLSARHRVAKQLLRYGRVFRGGSLSWTKAHQAWVRAQQLPDPQAQRALEHMRAHLEALDAQIGALDAELDEIATQEPWREPVAWLCCFRGIGTHTALGLLAEIGDFRRFPSPRELMSFLGLTPSEYSSGQQRHRGHITKSGNQHARRLVIEAAWHYRHPPRSSARTRRAARVAGPEVAARAWAAQIRLHRRQRDLLGRGKRSTVVNVAVARELLGFLWAAMTERPLREETLAA

SEQ ID NO: 46471 - protein, 314 aa, unidentified
MLDMTTMPSCFIGCDVGKTSIAAFDSASGRAATLSNDPDALRDFAQGLDPGCLVICEATGGYEAGLLAALADAGRAVHRADARKVKAFIRSLGTLGKSDKIDARALARYGEERHDRLARWQPREVDRDRLHTLVTARRELVRQRTACHNRIAAPGAAPVAERLGRVLAALDREIAGLDADIAALVEASQPLAAAVRTLQSIGGIGATTAAALTALMPELGSLTRRQAASLAGLAPHPRQSGNADHYRRTRGGRPEIKQTLFMAALSAARHDPALSTFYKRLRDNGKKPLVALTALMRKMIILANARLRDQLASI

SEQ ID NO: 46472 - protein, 420 aa, unidentified
MVYLERGYNLKELPWSKIVSNSFLFKEACMILVGVDVAKDKHDCYIMTSEGEVLFKSFTIANNMEGFNQLYEKILSVIDNFDNVKIGLEATGHYSYNILGYLLDKGLTPYVINPLHSNLYRKSLSLRKTKTDKVDSHIIASMLMSDVSLKPYSNTLYHNEELKSLTRYRFTKVQERAKLKISISRLVTILFPELEKLVPTLQMNSIYALLYEFPSAHAISKAHLTRLTNLLNTTSKGHYTKDKAVLIREAAKNSIGSNMPAKSLELKHTIKLIKELTSEINKIEEEIKIIMNKINSPILTIPGIGLSTGAQILAEIGDFKNFSSPDKLLAFAGLSPSTYQSGNMYSSNTKMEKRGSKYLRFALFNAAIYVSYWEPTFSQYLKKKRVEGKHYYVAISHVVKKLVRLIFHLEKTNERYSTVI

SEQ ID NO: 46473 - protein, 355 aa, unidentified
MNKIKYIGLDVHKSSISIAVLDATGKLIMEVTIETQAEALLDFIRGLRGTLYVALEEGTCAAWLYALLAPQVAKVVVCDPRQNPRRLGEKKSDRLDARKLAEWLRLGTLKPVYHGDPLEPALRESARSYRTLVSDTTRVMNRLKALYRGRGIRCAGTRVYSPRWRGEWLEQLPPSGVRPRAELLYQQLDLLMPLRQEARATMLAESRRHAAQKILRSIPALGPVRVALLIALLQTPHRFRGKRQLWAYAGLALVTRSSADYRIVDGQLGRSRQQALVLGLNANHNHVLKALFKDAAASALAHPGPLKDFYATRVAQGMKPELARLTLARKIAAITLTLWKKGERFNVEHLKAQAA

SEQ ID NO: 46474 - protein, 422 aa, unidentified
MGRLKIVYPICCGMDVHRDFLIACIASTNAQGVTDYESKRFSTFTGGLRALRDWLADRKCTDVCMESTGKYWFPVHNMLESTCNVVVSHPKFVKAIKGKKTDKKDAMWIADLFKHDLVRGSFIPPEDIRQLRDLCRYWQKLVWCSSGEKNRAQNCLTVSNFKLDSVFSNVFGKSASAIIDYMLEHPGEAFDVAPFVDGRCKSPIEDIQAAADGAFNPFQAEKLKVIREHMDNLERLKALLESAILTLAEPYMHQIELLLTVPGISEVMTAIRIIAEIGVDMTVFESSKHLCSWAGLTPQNNESAGKKKTTRIGKAGQYIKPLLIQCALAACNPRSDKQPEILRRYQQLKKRRGYKKARVAIARRLLTAIYQMLLKDEPYAPFVAPAKESIPEKRILSREQGLALLRRRGFIIEDDLNFSSAS

SEQ ID NO: 46475 - protein, 400 aa, unidentified
MRTVFGIDVSKASSEVAILVNGERVHSYTMPNDIIGFSHLLKDLKTVSNPEIIFEATGVYSRRLQAFLEENNYDYTRLNPLEAKKQLDSLRVRKTDKIDAEKLASSQFVLNRKPTYVQEEVYQNLHDLSRFYQNLTEDIVRTKNRLHKVLQVAFPEIENLLSTPTGEQYWNLVSIFPTKHWVLELSEVELKETIRNSTSKRISENRVGNLAEKLVGLAKQSYSAISKTSPMIEEVKYNAQELIRLTNRREQVLQQLIALAEPLPEYEILLSIPGIAETTATSIIGELGDIRRFKSANQINAFIGIDLKHYESGDFLAQEHITKRGNPYARKIMYKCIHNIASASHTNPCHIADFYEKRKRQSQTTSTKPHTIASIHRLIRTMYYLIMHNKLYDYTLAKSH

SEQ ID NO: 46476 - protein, 387 aa, unidentified
MPQPNDLGRSLVALDQDSTLVAVIEMGQASWLIAAIVPGLNRHPLKKIAADAEQLLQVLRRWKQEAETAGRTIKRVAVAYEAGRDGFWLARWLRAHGIEAYVIHPSSVPVSREHRRAKTDRLDTELLKRAFLGWLRGEPDHCSMAAIPTLTEEDAKRPGRERENLVGERTRIVNRIRGALARLGIRNFKPMLRNAPQYLETLRTPEGAVLPPNTLAELRRDMARLSFVKQQIKEVETARLERLQRAPGAGGNAMVQLLTRVVGVGVETADMLVQEVFTRNLRDCKAVARYAGLTGAPDESGKRRRERGLAKSGNARVRRGMLQVAWGFLVHQKDSVLAAWYRARTADARGATRKTMIVALARKLLIALWRLATTGEVPSGLALRAAA

SEQ ID NO: 46477 - protein, 419 aa, unidentified
MSFKILKNNCCGLDVHKTWIFACIGITDSNNRTEYKQARFSSFTKGLNELCDWLAKYNCTDVCMESTGKYWIPVFNILEQHNLWVTLSHPKYTKPMKGNKTDRKDAKWICDLYMCGMVKPSFIPPADIRELRDLVRYRYKLTCMITGEKNRAQNCLTVSNLKLDDVFSDVFGKSSRSITEQILQHPGEKFDVAPFVHGRCKTPIEEIQAAVDGAISKEQAVKLRQCLDHIDELNKHISELEQEILRLSDKYEAALNLIRTVPGFDKNPMTAVQMLSEIGGDMSVFPTAKHLVSWAGCCPRNDQSNQKIKSTRISRAGSYFKPVLVQVANALIKSKKHLEFTNRYKRIKARRGHKKAIIAICRMILTAIWHILTDLKPYTPEGFLDSRPVNKEKVLTTSQALNLLKQRGYFIKDDPLSVS

SEQ ID NO: 46478 - protein, 483 aa, unidentified
MVLRVPIGSWMPYKRINIPKANRHGAIFQTLKFKIMSKSKTKKEKVKRISQLTVINPTAAGIDMSDTEMMVAYPISPEQLEIRVFGCFTRDLHSIANCLKENGTTTIAMESTGVYWIPLFLLLQEYGFEVYLVNAKHVKNVTGRKDDESDAEWIQKLHSCGLLSASFQPDNMVRTLRSMVRHRKNLVRTSSTYLNRMQKAMELMNIKLHTIISDIDGKTGLLILEAILAGERDPEVLADLRDKRIKASREDIIKSLEGHWTTEHLFELGQCYQLYCTHRQMIDECDKEIEKQLVIQIASKNEGVIPDIPKVKRKASGKHKVQFNLTADLKEILKVDVTEVFGINELSALTILSEVGCDMTKWKTEHHFTSWLGLAPNTKISGGKVISSRIMKKKHHAGQSFRMAANGLYNSKSPLGDYFRRLRAKAGAPKAVVATARKLAIIYYKMVANKEAFNPKALDDYRKKYNEKKINQLKRKIAQLEAA

SEQ ID NO: 46479 - protein, 393 aa, unidentified
MLYLAIDQHKNQLTINIRNEQGDVIQRGQVSTNHTDIDDFFATFVKKSRKHRGYMAIVEICGFNDWLLEKLNKTRCSEIVVIQPDNSAVNKTDKRDANALSELLWNNRKRLQGGQRPNGIRRVFPADPADAQVRQLANFRQHLIKRRTKTINKIKGIINKHNMAQDAPTEIYSTKKFRQWIATVPLPVVDRLEVNMNIQSWELYDKQILEVEAELVKRSEVRAADVFRLKAISGISAMGAITLLSRIGDIKRFKNPDSLANYFGLTPGCHNTAGKHRVGGITKRGNAVARQVLNFAVIHITRKDPAMKAWHKKIKNRRGAKTARVAVMRKLATIIWHMLRWEKPYQFRYDPPLATPKKGDLRSPKEVLGGIGNSNHSQRQGKTPLKCRSKAKA

SEQ ID NO: 46480 - protein, 393 aa, unidentified
MLLDHPSDGPAAIRTQFGAIFVSLELSRSNWLITSLSPGRGEKMSRHSVAAGDVAGLMTLLADLRRKAAARTGQNYPIITIQEAGLDGFWLHRVLRQEGIESHVVDPASIATPRRRRRAKTDRLDGETLLRALLAYKRGEPRVCAMVVAPSPEEEDRRRLCRERQALIAERITHVNRIKGLLFAQGISDYGPLRRDRRKRLEALRTGDGRELPPHLKTQIGREFDRIELLLEQIKAVEAERDALLAAVSKPAEKPADGKAAPEPVAMLLALRGVGANFAAVLWSEAFYRQFSNRRQVAAYAGLAATPWQSGGIRHEQGVSKAGNPRLRTTMIQVAWLWIRHQPRSALTHWFKERSPQGRKRAIVALARKLLVALWKYVTHGVLIEGAVMKPAA

SEQ ID NO: 46481 - protein, 347 aa, unidentified
MAKLIIGIDFSKEKMNYCCMESESMSILQEGEVENSRKGCTQMTGRLRSLYKGLKAADFLFCGENTGMYSMEVVECFTQRKYLFWLENPLQIKLSSGIQRSKTDRLDARMIAEYACRHRDKAKGCTLPDKGLKKLRELHLTRRMLKECEVKLRNFSGSTSKASSEASKALRKVMKAIMESVKSLEKEIRETLMEEDEFKENTELALSVPGISWVTASAIILDTRNFMRFDSARQYANHTGCVPHEHSSGTSINKKPRVSKASNRYVNSLLTQGALSLLTHNPRTKEYAQRKKAEGKPFGFIVNNIRNKTIHRLFAVIRNKTPFCWDYVKGSPTSCVNLLQKDVVTFA

SEQ ID NO: 46482 - protein, 348 aa, unidentified
MKDAAGKIQSEGKIGSTRRELDAWIKTLPQPRMIAMEATIFTGWIYDHLLPHAEKVKVAHPLMLRAIAAAKRKNDKIDASKITDCLRCDFLPECYMTSTEIRDRRRTLRYRGLLVKQMVQMKNRISGLLMETGASFNKQRLHKVGYFTELMAGNEEIDCVRPLLKLSRETINRSQKLDYALVSSLERDPLLAERLQRLRTVPGVGPITALTWVLEIGDVARFQSIKNAISYCGLCGAERSSADKVARTPISKQRNKHIQQVLVEAAKLAPRYSHELSLIYEKEKQRGNRNRATLAVARKMVAWMVAVERKNRISCLPRNAEARWQPKSLPMNEKHQDYSDAQTARPRK

SEQ ID NO: 46483 - protein, 393 aa, unidentified
MPIRARSRLSAGWPAGAFMNERDFPIPNQAPVAGGGIKVPRWGSHAPSTHSKGKSMAIVTLGIDLAKNVFALHGVGPTGKPELVRPEVRRSRLLELVASLPPCLIGMESCSGAHHWAREFEKLGHTVRLMAPKFVAPYRMAGKRGKNDANDAAAICEAVTRPNMRFVPIKTIGQQADLFIHRARQGYIEERTALINRIRGLLSELGIALPLKTSAMRREALAVLEDLPGWCNTAIGDMLNHLGRLDERISEYDKYLAQIVKQNDRACRLMKLAGVGPTTATAIVASVGNGHDFKNSRQFCAWLGLTPGQHSSGGKARLGSITKTGDSYLRTLLVMGARALLMKAAAHSDPVSRWALQLKQRRGFGRAVVAIAAKNARMCWAALRLGDAFKVPV

SEQ ID NO: 46484 - protein, 384 aa, unidentified
MKKDNILFIGLDTHKEQTQVAYTLDHRTAEVCDLGRIQTTKAALTKLARQLQSKYPHATLHFVYEAGPCGYWIYRLLTSLGHCCFLVAPSLIPKKPGDRVKTDKRDTQNLARLLKNNDLDPIYVPEPEDEAVRDLSRARAVAIRDLNDAKHQLKSMFLRNNISYKGADNWSLKHLRWLTELALPHPCQQIVLQEMIQTISERIARLKRLDNELTHQVKIWRYYPVVKAIQAMRGVRLLVATGLISELGDLSRFDTPRKLMKYVGLTPSEHSSGEKRRLGGITKCGNGRARRLLIEGAHSYRHAAKVSKEMQVRQEGLPKVIIDKAWEAQLRLCRRYQRLIQRGKLRNVVVTAIAREMIAFIWSISREVVLPRVDPKTRLSRVPA

SEQ ID NO: 46485 - protein, 481 aa, unidentified
MALEPLAGYPPLPLRARVSVSCTDPGPWPLARLVPIGSGLPLQEVADGMKVMYEHVAGIDVHKDMIKVAIRSPGDKPWTRKTEILEYRTFYGVLQEMARELRRRGVTHVVMEASGVYTEPVYYALAEQDFTEVAVINPAHAKALRGHKTDAKDCARLAELSGCGLLRGSCIPPAELKEVRDLTRYRMKTVQARTSEIQRLGKALESAGIKLGSVASSITGTSSTAMIEALTGGERRGGVLADLAIGRMRSAGKLADLSMALTGRFTGHHATLCRLHLDRINVFDDAVDGLDDRIAAGAARWQREAGLLKSVPGFGDVVTCAWLAEIGPAPHKWFSRHEKLASWVTLCPGNNISARKRKHGRTGDAGASIKPMLVQAAWSAIRVRGRLQARYSRLVRRFGGDKNPAAKKKAITAIAHTLLKIACQVLKSGTPYQDLGADFYTRRNSPEEQQKYLERQLQKLHPGCTITITISPPEAALPPGA

SEQ ID NO: 46486 - protein, 350 aa, unidentified
MSIRNQPRDAAVFGIDIGKTVFHVVGLDAGHAPIQKATFRRETLLQFFERASPVLVGMEACPGSQWLARKLQAMGHTVRIVPAQFVKPFVKSNKNDIIDAEAIAEAVTRPTMRFVEIRTPEQIDLQALHRVRDRMIAHRTRLISQMRAFCLEYGIAIHQGAGKFKVELPRLLADESNEITPAMRRILTEVHGEMMELEQRIAAMNNEIEAIAARSDTARRLMTVPGIGPLASTALLAAAGSGRQFRKARDLAAWLGLVPREHSTGGKTKLLGISKRGNKYLRRMIVHGARSCVTHLDRSRDRLGPWLDGLERRMHKNKVTVALAAKIARIVWVILTKQGATYERRVPALG

SEQ ID NO: 46487 - protein, 447 aa, unidentified
MESYAGVDWASDKHDVLVADAAGEKLLGATFAHDEKGLRSLCRQLVRLKVALVAVERPDGLLVERLLDAGLRVLALHPNQVAAARDRFRVSGGKSDGFDAFVLCELARTDHHRFRVLEPDSDATKALRALTRGREDLVGARTALVNQLRAELERFWPGPLHLFSDLHSRISLAFLERYPSPADARGLGEARLRAFLARERYCGRQKPAVLLAKLRQAPEGRVGELELATRRQLVCTLVAMIKTLNAQLSELEGQIATAIREHPDGAIFLSLFKGTVITAAELLAEIGDCRARYPAGDTLAADAGQAAVAIESGRRKAATFRWGCNKRLRQAFHTLADSTRHWHPWAQHLYASARARGHDHPRALRTVGRAWCRVVWRCWQDRVPYDPARHRALQRHITVTIPTPSGPVPDLAATQRMAGTAVTQRAARRAERAALDRTPTSAKSLQA

SEQ ID NO: 46488 - protein, 374 aa, unidentified
MLYLGIDQHARQITISLRDDQGEVVQARQVSTQPEKVHAFFQQLTRERLPAGGSFIAVLEVCGFNDWLIRMLHEYRCHRVILIQPEERKLRKTDRRDATALSELLWVNRDRLLQGKPVRGLRQVDIARDADQEDRRLTTLRKDAGQARTRLVNRVRHILRRHNLQWEMPTKKFPSKSGLAWLKQLALPAIDRLEMNHLLADLEQVQGRRKELEQVIAQRCGVSAEAVLLSSMPGVSYFTAVALACRVGRVGRFPRAASLANYWGLTPGCRNSGEHSQRLGSITKAGSSMARWLLAQVTIKVLRRGARLREWFKRLKRRRGASIARVAVMRKLATVIWHMLSKRMTYAECRAAGEAGTKVAEKRGRATGKEAEGI

SEQ ID NO: 46489 - protein, 414 aa, unidentified
MSYKIAGIDVHKKVLMVVVIDATTPEGKPERRRFATMASDLRRLSTWLREQGVQEAVMESTAQYWRSVWLELEPCMLLHLAQAFSNRAPRGRKHDFKDAERLVRRLIADELILSFVPDGEQRTWRNMTRMKTQLTRDRVRLQNQMECLLEEMRIKLSIVVSDLLGGSGLRMLRALADGETDPKKLAALGDDRLKCSEEQLVDALTGRPEPMHRAMLGLQLERLQLIDRQIAQLNRMIAQAMKPHQDAVIRLAEVPGLGVDSAQQVISEVGPQASTFASAAELTSWVGTCPGKEESAEENHSSRSAKGNKYLRRVLNQAAHAAVRKNGSHFQAVFRRLLPRLGYQSAIWAIAHRLCRVIWKILHEGVRFIEQGSESDPKIRKQRTRILARALRKLGYDVAITPRNPATTEMGIQM

SEQ ID NO: 46490 - protein, 342 aa, unidentified
MQITTIGLDIAKNVFQVHGIDAAEKVMVRKRLRRSQVLTFFEALLPCLIGMEACATAHYWARELTKLGHKVRLMPAKDVKAYVKRNKNDAADAEAICEAVRRPTMRFVQIKSAEQQGQLMQHRTRDLVMRQRTQLINALRAHLAELGIVAAKGDKGVKELLTIVADERDTRLPIDARASVIVLAAQFQAVQTMIGSIEKRIKAQHRSNQASKRLETIPGIGVIGATAIAATVADPTVFRSGRDFAAWIGLVPRQDSTGGKQKLGPISKQGDRYVRRILVVGAHSVLRRAKENPAKYPWLTQLLARRPFKVVAVALANKMARMAWALLAHGGTYRAPELAAAA

SEQ ID NO: 46491 - protein, 282 aa, unidentified
MNTNTLQNINVGVDTGKSQLDIYIRPLDIYFTVPNNEKGINDAIKTIKKHKPQRVVIEATGRLEMPFILACDKAKLPYVVANPLRIKKFAGAIGQRAKNDRLDAALIAYYAERVQPELTQLRSENIRLMSDLVTRRNQLLTMQTMERNRLQILPKNIASTISPILTALKNQIEKVEAKITKLIDSCPEYQSKNTILQSMPGVGKVLAASLISNVPELGLITNKQASSLIGVAPITRESGRFKGKRVIQGGRAQVRTVMYMAMMSAMQCNPVFRTTYERLLAA

SEQ ID NO: 46492 - protein, 348 aa, unidentified
MLADEVDYVIGVDTHRDQHTLAVVVAPTGAVVAQTVVRASPAGYTRALRFAERHRGVRAWAIEGAGHYGAGLTRYLGERAETVLEVGRHARGERRLRGKDDPLDAIRAARTGLAAETRTLPRAGERQEALRVLLLTRRSAVDVRRVALVQLRSLIVTAPEQLREELRRLPLAQLIRRCSRFRRSGSRTPDELAVVLALRSLARRIEAATAEADELEREIRQHVRALAPELLDEPGVGPIVAAQLIVTWSHRDRVRSEAAFARLAGVAPLPASSGQTIRHRLSRGGDRQLNRALHTVVLHRRQHDPATRDYIARRVAEGKTTREATRILKRYLARHLYRVMQNATPLTT

SEQ ID NO: 46493 - protein, 353 aa, unidentified
MKCDKYMGMDVHQATTVVDVLDADGKPVLETIVATEAAAIIRLLQSLSGLLHVTFEETTQAAWLYEVIRHFVAEVVVCDPRRNKLLGEGSKADKPDARKLAELLRAGMLRSVYHGHEATRKLKELVRAYETLSVDTERTMVRIKAIYRGRGIRTPGRGVYQLKQREQWLEQLSEPGVRQRVSFLYEELEQLRPLRRRAKQAMLAESRNHRAVTLLRSIPQLGPIRSAMIVATVDTPHRFRTKRQFWSYSGLAVVTHMSSEYEIKAGRVVRRRKPVATRGLNRNCNRRLKELFIGASAGGGQTEPYRTYLEGLKQNGMRAEMARLTLARKIATLALTVWKKGESFDPKKLNWTT

SEQ ID NO: 46494 - protein, 387 aa, unidentified
MQDVADQSLAPTTIGADLCAIFVSLELSRSTWLVTSLSPGGGEKMSKHSVSAGDIAALLARFSELRRKACTRTGKSSPIVVLQEAGLDGFWIHRVLLSEGIESHVVDAASIATSRRRRRAKTDRIDGETLLRALLAHKRGEPRVCSMVRTPTPEDEDRRRICRERKVLIMERVQHVNRIKGLLFSQGASGYEPLRRDRRARLEALQTGDGRRLPQHLKAQVCRELDRLELLLEQIKAVEAERDTLLTQQTKASAPPPMLLGVHGVGPEFASVLWSEGLSRQFDNRRQVAAYAGLAPTPWQSGSVNREQGISQSGNPRLRTTMIQLAWLWLRHQPRSALTLWFQDRINRNGGRRRKTTIVALARKLLVALWKYVSAGVVIEGAMIRPA

SEQ ID NO: 46495 - protein, 368 aa, unidentified
MLYVGVDISSESFDVCFYLPEKKKMKSMKYKQDREGFREFLKKLNTYKGEKQVGMEATGSYHSNLYGFLRSKGIDVQLLDPYTLSKFMKAMSRSKTDKKDAKSIAVAMYRIFDLLSVSQVPEEEMSAFRDLVRMRSTVVANCSDLQRKLKSKLKIHMPELLKTFRSISSPVLLHLLSVYPSREEILANEEDAVKLLSSHRNWSEEKAKEVIDSLKDSIGKPDTFGTYSTITSTFITEIKLLKEHVKALDEEIKKFLQKFPDNPLRTIPGIAEITEAEIVSEVGDINRFSSGKAFVSYIGLDPVIKQSGNMTRGLSISKKGNKHLRKTFYQLAKNLIKNTEKVQEQIREDDREGGEKESGPCSNCKSCS

SEQ ID NO: 46496 - protein, 322 aa, unidentified
MAQAEAMVGVDVSMARLDVAVWPGGESFSLSNDLAGVEQLLKRMLELRPQAVVIEASGGPEDLLVSELCAAGVPVAVVNPRQVREFARSLGQLAKTDRLDALVLAQFGQSAQNHGRLTLTQLPTAAEAEIKALVRRRRQIIGMLVAETNRRQRVSKVVKRSIVASIRALKRSRAELEQQVRETIKNSPAHQQKIAMLQQVPGIGPHLARTLIAEVPELGQIGRRQIASLIGLAPHAHESGKFKGRRMIWGGRAGVRSTLYMAMLSATRYNPAVAPFYRRLLQRGKSKKLAYIACARKLLVILNAMFRDHTTWSPSVDFQHSR

SEQ ID NO: 46497 - protein, 353 aa, unidentified
MRKMQEYIVKNNSIFVGLEDSKKTWKVCVRSERMIVHETSMPTEYENLRNYLKNRYPGCKVRVMYEAGFQGFWLHDRLEADDIDCIVTPPNKVTQEKSNKVKTDKIDARRLAKNLENMDYVSCHVPDKERREDRQISRTLDQVQKMITATKGRIRMFIYQHGLHENLPLGEWKPSDYTKLKELKLSYALQVSLDVHLKLLDELVNHRDHLLKELKALSKKERYQELVHYKKSCPGVGWLSAIRFTLEWGDLSRFRTGKHIASYAGLTSREYSTGDTVKRGRITGQSYERVRAWLIQCAWRAISSDPVLLHKYQSVWRNSGSKKKAIVAVARKLVVRMRALEWTQQPYCSGVIE

SEQ ID NO: 46498 - protein, 336 aa, unidentified
MTLYCGIDLHSNNNYICVIDDKDKRLFERKLDNDIDQVLTALKPYKRRLKAVAIESTFNWYWLVDALMEAGFEVMLVNTAKIVQYSGLKRTDDRYDAFHLGHLMRLGILPTGYIYPVAERGLRDLLRKRMGLVQDRTHYILSLKTQHQRQTGQVLESNKIKAKHFKVPVVGDANVQLAMAANDNMSKALTQQIKVLEKTIMSQIKITPGFELLKTTQGIGDVLAETILLETGDINRFKGPGNYASYCRCVDSRKESNGKKKGVGNRKNGNKYLAWAFIEAANFAIRHSPKAKRFYEKKKARTNIVIARKALAHKLARACYYMMKRGVAFDEDKLFS

SEQ ID NO: 46499 - protein, 401 aa, unidentified
MVSDFKKGRYNLMKIFVGIDIAKLNHFAAAISSDGEILLEPFKFTNDADGFQLLVSKLESFDKNSIIIGLESTAHYGDNLVRYLVAEFYQVCVLNPIKTCQMRKNNVRKTKTDKVDTFVIAKTLMMQDDLRFITFFDLDMMDFKALGRFRQKTIKQRTRLKIQLTTYVDQVFPEIQYFFKSGLHQHAVYALLKEAPSPKEIASMHMTHLANLLKVNSHGHFTKEQAKELRVLAQKSVGANDSAISIQITQTIQQIELLDSQLEKIEAEMTDIMKFNDSVIMTIPGIGYINGGMILGEIGDIHRFSNPNKLLAFAGLDPSVYQSGNFQAKTTRMSKRGSRVLRYALVNAAWNVVRNNATFKAYYDAKRAEGRSHYNALGHCAGKLVRVIWKMLTDEVEFNLE

SEQ ID NO: 46500 - protein, 346 aa, unidentified
MQPVIGCDAHKKFSVFVSVDQHGKPSRPVRVDHDRDLYCEYLRTLPPASEIALEATGHWYWIVDAMEQAGHHPHLANPFEAKRRMAKSNKTDALDAKGLAILLRCGTLPESWIPPGQLRDQRELLRTRMALRDLRTSLKHRIHAGIDRYGLQADAISDLFGTKGRAYLASILKALPPETAHMVAVQLHSIDQLEEKIEAIERRIAETLKASPEIRLLRTVPGLGPILAPLVWLEVGDVERFPRAEHLASYAGLVPRIIASGGHIRHGGTCRNVNHYLKWAFVEAANCAIRMKAHREDHIGLLYHRLYPNKGHGRAVVAVARHLAEASYWVLCKKQHYRAPQPRISD

SEQ ID NO: 46501 - protein, 413 aa, unidentified
MEVVYHNCCGIDVHAKFLVACLLRDGKKHIRRFSTMTDDLINLRDWLVSEGCEIVAIESTGVYWKPVFNILESALPVMLVNPEHVKALRGRKTDVKDCGRLAEFLSVGLLEPSFIPPPHIRRLRELTRYRESLIRTRAAIANRIQKVIESGNIKLGQVASDVLGASGKAMLQKLAAGEKDPVVISELARGSLRKKMGELKLALQGELNEAQRFVLGELLQRLKELEIADYKVSRQINQAICDPEHPELFKAWELLQTIPGIGEQVAEVVIAEIGANLREVFPTAGHLASWAGVCPGNKATGGRRISGKTRNGNHYFGCAMVQAAWAATHTKKTFLSAKYHRLVRRLGKKKALIAVAHTLTVVIYNVLVRNEPYNELGADYFDRNHSDKQRKYLVKRLQALGFTVTLEQNVNAA

SEQ ID NO: 46502 - protein, 398 aa, unidentified
MSSRAAQPETPSSTATSVEPPATRSIIYLGLDVHKDSITIAVLPEGAKTPTRLDRLPNDLPKLKRWLDRLAKEGELQACYEASGAGYVLHRALREWGYACEVIAPSLIPMRPGVQRKHDKRDAADLARFYRAGELVVVRIPSEAEERVRDVVRCRETFQREILKSRHYILKFLARRGFVFREGTNWCTPHLRWLQHLTTEASPLAPHDRLVYREYHALLLYKLQRREELDRQIEQLALLPTLAPMVRRLQCFRGISLHSAMVLATEIVDWRRFDHPRKLACYLGLISREDSSGNRTRLGSITKAGNSHCRHVLVQAAWSYRHRPATSVDLKRRQAGQPPAVITHAWKAQQRLHQRFNHLSYRKRPQIAVVAVARELIGFLWAVLRDVPATPAAEVQAA

SEQ ID NO: 46503 - protein, 333 aa, unidentified
MGFEPGPSKEGSWMMAQNDLIVVGIDVAKDKADACIRSLSQRQAFLSTAQGRRKLIAWLRRHKAGKVVMEASGGYERDWTKALREAGIEVRIVDPKRVRSFARSAGRLAKNDAIDAEMIAWFAETFGEAPGQAHDATREELAQLVNARQGLLEVQTQLQNRGEHGVPESVQKMHARLLKKIALEIARLEVAIAALIKATARFAELAEIIESVPGLGSITSAGLIAAMPELGQVSSKIAAALLGAAPYDDDSGRRQGQRHIKGGRRKVRNLFYMACLGAATRHNPVLKAFYRRLIAKGKEPKVALVACMRKLIVILNIMIARHQKWDANLYEPA

SEQ ID NO: 46504 - protein, 312 aa, unidentified
MEKLSYGGIDVSKDRLDVVVLPEGWFFSVSNDTAGWTELVARLRPLAVCAIGLEPSGGYERGIIRALLAARLSVRRINPNKLRQFARARGVLAKNDRLDARLMAEYVAIMPTRAVQRDDAVDRLAEVVTMRRQLCDEHVTVENQTAHLEDAMLRRLSKRRLVRLEADIRLLDKRLAEMVATNAAFARLYELLTSMPGVGPVLAFTLIALLPELGKMSRKQIAALVGLAPYDFDSGKLRGHRSIYGGRMPIRNVLYMAALSASRYNPALKTFSNRLAHANKKSKVIIVAVMRKMITTLNAMLRDNAVWQPQSN

SEQ ID NO: 46505 - protein, 354 aa, unidentified
MDVSKDAIAVAVLSPDRDTAEVDKIFHDTDSVRRLVKRLGKPKEIWACYEAGPTGYDLHRLLTSMGVRCDVVAPSLIPKGSGDRVKTDRRDARRLAGLHRAGELTPVAVPTPAQEGVRDLCRTRSDMVQDLTRARNRLSGFLLRHSVVWRGGSPWTERHRRWLATLTFEDPAIATTYAHYLATVKLRDTALESVEADLVPWCTQDPFGEQVPRLAAYRGVTRVGALCLAAEVFDWRRFPRARPFMSFTGLVPGENSTGLTQRRGSITRAGNAHLRGQLCEAAWAYQHSPNVGAGIRERQQGAPPETVARSWAAQIRLSRRFRQLAAHKNVRSVVAAAIARELAGFLWAEMVAEV

SEQ ID NO: 46506 - protein, 425 aa, unidentified
MAESFANVGIDPAKYKGMAAVVDEHGKTASGPLRFCPTCEGIARLLSQVSDCAPEVELRFYIEACGWLWYAPAAILQELGYKVYLVNPAYTKAQRKMSSPGAKSDFRDAQALARAPFNMGDRAEHIADVPVGIRLNLQNLCRHRLSLRQDATAIQLRLIAWLGLTSPGLTAIIGTDLSEMDQSIIAQYPVISEMAGQDEETVQAFLTECANGRAVDPALAQELMGLAAEAYTPRDLDPKCIAIQVEIELARLELLQQQIARLDREIASLLKLCDPHGYAQTLPGFGPVIAAILVAEAGVDVSRFEDAAHFASWTGMVARAFGSSGKHVQGLPMTKAGRSDVKWALYMAAKTASTRDPLLKDFYDRLRADGKCHQEALVAVGHKLARWYWAIMNEQRPFERREPETQQPQAEPTPSEADNQQPVCA

SEQ ID NO: 46507 - protein, 325 aa, unidentified
MPHVTSIGLDVHARSVAAAAFNPFTGEVVHRDFGTDAAEIAEWALGFEDPRACYESGPTGFHMARELRAFGLDCAVAAVSRMQRPAADARRKNDRRDAEFIARMLATHNIVEVPLPDAAVEAARDLDRALEDTAADYLRARQRLNMFLIRLGYVWDERNADGTRKGSWTRAHWRWISEIRLEGPQRDVLEHYVTAVRCAESDRRQLEKKVLALARTDRWRPAVEALSCIKGIDALTAFRLAAEAGSFTRFRTAPAFASWCGLIPSERSSGETERRGGITKAGNRLARTALIESAWHYSRCTPRPKAPPPGADVPAAIRADRKSVV

SEQ ID NO: 46508 - protein, 322 aa, unidentified
MTKHITICAGIDTGKRKLDVAIEGRREQLQVENNPEGHAILLAWLRQHRVKRIGIEASGGYEQPIVTELRRKKFVVVVFQPAQVRAYAKFHLQLAKNDKIDAALIADCTAAVRKIHPAPDPRLLPFAEQLTMIDQIGEDIARLKNRIESCRNAQINTLWQEDIARLEKREKTELKALVASIRKHPDLAKRLDLIYSVDGIGLPTAVAILVRMPEIGQITREQAAALAGLAPYDHDSGNQTGDREIEGGRKRLRRALYTASLAASFRWNPQLIQLYRRLTAAGKEHKRALIACARKMLIFANTVVARGTPWCDEPPMRSSSVS

SEQ ID NO: 46509 - protein, 364 aa, unidentified
MLIIGCDYHPGFQQIACVDTDTGELSEHRLAHREEAEAFYRVMQQRNLSVRVGMESSGHSRWFERLLQELGFELWIGDPAEIRTKRVRKQKTDRQDAQLLLRLLMENRFPRIWVPDAENRDLRQLLWHRHRLVQMRTRVMNQLHVVPLNEGLRRKKALWRPAGRKELEAIALAPWASRRRQDLLDLLDQLTPKIQELTHALEEEVERRPVTRMLMTHPGVGPLTALAYELVIGTPERFHCGKQLASYVGLVPTEESSGDRRRLGHISKQGNVLLRFLLVEAAQVTVRSQPEWRNKFFHLAMRRGRKIAKVAMARKLAVHLYWMWRQGLDYGQTLKLGSHAGEPGNPDGVQSITDVMIGHPAPSK

SEQ ID NO: 46510 - protein, 367 aa, unidentified
MAPRERDRSQRSGSGVMKTVGQLGSSRSTGHQPEQLRGPRARIVQERETRRCTMSGTCFDGMDVSQDTVDVVVHPGTAFQITNDEPGIAEAVQQLHAVQPTLIVLEATGGLEVPLAGALAAAGLPVVVMNPRQVRDFAQATGKLAKTDRLDAQVLAHFAETIRPPIRPVPDAQTQALAALVARRRQLIEMLTAEKNRLRLAARPIQKRVQAHITWLEKELESTNTDLTATRRESPGWREKEEVLRSVSGVGPVLTTTLFANLPELGTLTRKEVAALAGVAPFPRDSGTLKGRRTIWGGRAHVRAALYMAALVATRKNPVIRAFYQRLCQAGKAKKLALTACMRKLLTILNAVVKIGTLWRVAVNQPT

SEQ ID NO: 46511 - protein, 391 aa, unidentified
MVCVGIDVAKDKHDCCILDSDGTIRADCITIPNNMDGFKQLLQTIRDCTKKSDKIKVGLEATGHYSYNILGFLLDNDLAVYVMNPLHTNLYRKSLSLRKTKTDRVDARTIATMLLSDVDLKSYTDTAYHNEELKSLTRYRFDKVRERAKLKQSVSRLVTILFPELEKIVPSLHIASVYALLSEYPGAKQISEIHLTKLTNLLATASKGRYGKDKAIQIRDAARTSIGSVMPAKFLELKHTIKLIRELTSEIDEIEVSIQKIMDELNPPILSIPGVGIQSAAMILAEIGDFSNFESPDKILAYAGCSPSTYQSGKLTNCYAHMEKRGSRYLRYTLYNATKYVCHWNPVFAEYLAKKRAEGKHYNVALSHATKKLVRLIYALQKSGKAYLVAA

SEQ ID NO: 46512 - protein, 367 aa, unidentified
MSHIIYCGVDFHARQQTICCLKTETGEFVTHELKHDPKEALRKFYAELGGPVIVGLEASGYTPWFEELLEELGHQVWLGDATEIRRRARRRQKNDRRDAELILDLLIHDEFPRIHRPLPQSREILRMLRYRHKLVKVRTIIKNSLQSLSLQAGLSLQARLFTRQGTQQLKDLALSPVMGQQRQQWLELLQELNQRITETEGWLKQQALSDPRIQLLRTHPGLGLLSSLGIVHTLIPVSRFPNTRKVAAYGGFDPMERSSADKKRYLGISKAGSRLLRFLLIEATQTAVRTDPDLKRFYHRLVQRRGKPKAKVAVARKLLIRSFIMLRDEINYAEFQQRGVAARLAREFARPNVPVPLIGQPASPAKG

SEQ ID NO: 46513 - protein, 343 aa, unidentified
MKAYVGLDVSQKKTAICVVNDAGEKICQASVDTCPKAIRGYLVLQGCQNAKVGMETGPLAVWLYHSLKSADLDVDCIHAQHVHAALSMQLNKTDQNDALGIARLVCSGWYRPTHVKSLDCHHQRLMMTAREKLIQVRVTITNQIRGLLKTFGVIRPPGKNSVFKRSILESEPTIEAVKPVVLMLLGTWNHITAQIRTLDKILDRQAKSDPVCQLLTSIPGVGILTAISFKTAVDDPTRFSSISDVGAFLGLTPKKYQSGEVDRNGGISKHGSRQTRSLLYKAAACLLSRYGTQTTLAKWANSLRQRMGYKKAVVALARKLSSLMLSTWKSGEFYNDDQGKLAA

SEQ ID NO: 46514 - protein, 378 aa, unidentified
MGQKAFIPQEYDVFAGLDVDKKSISVTFSNHQQGFVRSLHMPYSVERLLKHVRKHFPAQKVAFVYEAGPTGYGLYDGLAAQGYNCLVAAPSMIPRAPGQRVKTNRLDSRALSESLRGGQLKSIHVPSSIYRELRHLTQLRDVLVSELAGMKQRIQSLLLFEGIAFPASPAGSRWSLKVKSQLRKLPCSRSVRFKLDQLLDNVEFSEKQVMKVTKEIRKLCQNDCELAQCIEYMMSVCGIGWIVASQLLARIGDWRELKNVRQLAGFLGVVPIESSTGERTDRGSITRTGDGRLRSKLIQAAWSAIRQDAELREFYSSVCRRHPRHVGPRVAIVAVARKLSARIAAVLMEQRPYLVRQKVHLAPLTQEETSPQGTTRRR

SEQ ID NO: 46515 - protein, 355 aa, unidentified
METIKQNLGVDVDSKELKVSLNFMMADLSIKTKGSRTFKNTLKGFQSLQEWVEKKRIKDLPLSITMEATGVYYENLAYFFEEQESYLVHVVLPNASNAYFKSLKLKSKTDKIDAWGLAHMGLERKLGTWTPVSQQMRDLKKVVRERLRLIKEKNMVTNQLHAELASFKPSSIVCKRYEKRITFLEKQMLATEKDLHKFVEKDPDLKEKLDNVCTACGIGFITAVGVVAEYNGFILFKNRNQVVSYAGYDVRQKESGTSIKGQDRISKQGNSYVRQMMYMAAMAAARHDPHHRAYYLRIVAKTNIKMKANVAIQRKLVLLIYALFTKNEKYDPLHFLKVRNRLKAKSTKKTELVET

SEQ ID NO: 46516 - protein, 311 aa, unidentified
MKELFVGIDVAKDTLEVATTRGEKRSFANSDEGRSQLEAFVRPLDPVLVVLEATGGYELSVVEHLAIRAIPVAVVNPRQVRDFAKALGKLAKTDKIDASTIAQFALAVRPEPRPLKDAQAQKLDALITRRKQLVEMITAEKNRLGLAKEWVREDIQATITWLNQSLEKIDKEIADLIRSSPLWRERDALLQTTQGVGPVTSCSLLCDLPELGRLNRQKIAALVGVVPFNRDSGKVRGKREIWGGRSYVRSILYMATLSAIQCNPIIRPFYHHLIAKGKLPKVAIVACMRKLLVILNAMVRTNTRFQVPSCV

SEQ ID NO: 46517 - protein, 342 aa, unidentified
MKDMMIGVDLAKAVFQIHGAIRTGEVQFRKKLTRTQFSVFMAQQKPCLVIFEACGSAHYWAREMEALGHEVKLIAPQYARPFVKRQKNDAADAEAIVIAARQPEMRFVEAKTVDQQSHAAVFRCRERLVHQRTADVNALRALLYEHGHVFPQGISSLNRMTALVENETVDLPALIREECLDLLTQIAEKTERIIKRTAKLKTLATESERARRLQTMPGVGPLTAIAVEAFGPDLTQFKSGRGFAAWLGLVPKQHSSGGKERLGRMTKAGQADIRRLLIIGAMSRLNWLGQRGILEGSWLSHMLKRKPKMLVAIALANKMARQIWAMMTRNEDYRDPELVGAA

SEQ ID NO: 46518 - protein, 448 aa, unidentified
MRTRKPPRPRKMKLPKHLQHIHPHAAGIDVGSRSHFVAVPEGSCEQPVREFTSFTDDLQRMADWLIACGVTTAAMESTGIYWIPVFEVLESRGLEVRLVNARHVKNVPGRKSDVLDCQWLQRLHSYGLLEGAFRPVEQVCTLRAYVRQRMNLVRYAAAHIQHMQKALSQMNLQLANVVSDITGVTGMRIIKAILAGERDALVLARLRDPRCRSDESTIARSLRGNFRPEHLFSLKQAVDLYEFYQHQIAECDRQILDQLASFDAADGNANGPPANLEEALTRMSGVDLTRIDGIDTNSALKIIAEIGTDMSRWKSPKHFASWLGLCPGTKVSGGKVLSAKSKPVVNRAAAALRMAAFTLLKSKSALGAYFRRQRSRLGAPKAITATAHKLARLVYSMLKHGTAYVDEGQKQYEERYRTRVVQNLKRKAQDLGYALVEIAEKQPQPATI

SEQ ID NO: 46519 - protein, 345 aa, unidentified
MPIVGGLDIHRKQITFDYLDTATGEVKRGQITPADRKHVRTWLARFAGRGEVAFALEGCTGWRYIAEELAAAGLEAHLGEPADTAALRGRKRHAKTDKTDARHLRTLLAEGRLPGCWIPPEQILEYRALLELYHDLRAEHTAWVQRIHAVFFHQGAPRLGEGALRTEQDLAGLRAAAAAHLSAAGQLQVATALDMLAAIEARLGPLRHQLRDAARHLTGARVLAARLYGAGPITALALTCWLGGADRFSSSRKAVRFTGLDVTVHSSDRKGPPGRLSRQGPPVLRWAVYEAGKTHARTSAPDHGYYSQVKDRKNGKRAALSEARKIVRQARHILAGLGDDALTAT

SEQ ID NO: 46520 - protein, 340 aa, unidentified
MTVIIGIDPHKRLHAACAIDETEREVAQLQVTADECQLEKLLGWAAPFATRTWAIESAGGLGYLLAQQLIGVGECVVDVPATLSARVRVLGSGRSNKNDSNDARAVAVAALRAPSVVSVRREDHVTVLRLLAKAHLDAGRARSKACSRLHALVRELVAGGIRKEVVVSQAETVLAEIEPTNAVQRQRLELAREQLDDIRRLDAKLKRSKVRVADAVTTSATTLTDLYGVGPIIAAILIGYTGDVRRFPTGGHYAAYNGTAPIEMSSGGRVVHRLSRRGNRTLNHAIHMAAVTQIRHTDSEGRAYYDTKIAAGKTRREALRALKRRISDRVYRQLLADTRR

SEQ ID NO: 46521 - protein, 343 aa, unidentified
MDYFAGLDVSVKETNVCIVDDTGKIIREVKVASEPDALLQVLRNATYRFKRIGLEAGPLSQWLFSALGEANLPVICVETRHMRAVLQAQINKTDRNDARGIAQMMRVGLYRPVHVKTLRSQKLRMLLTHRKLLQSKAIAIENDLRGTLRNFGLKVGMAGATKFEGRIKELIENLPDLAVLVEPLLVVRRVLREQIGVLHRRLLAVVRDDDVCRRLMTTPGVGPVVALTYRATVDVPARFRKSKSVGAVFGLTCSKYQSGEIDRNGRISRCGDEMMRVMLYEAAQSMLRSKKWSWLKAWAMQIARRRGMKKAIVALARRLAVIMHRIWVDGTEFRWTREATAAA

SEQ ID NO: 46522 - protein, 284 aa, unidentified
MNYYAGIDVSLKESCVCVLDAGGKVIRETKVASEPEAIIAWFAQLGLAMELIGLEAGPLSQWLFAAMKQAGLAVELLETRHVRNALKTMTVKTDRKDARGIAELVRIGWFRPVHCKSISAQETRAILTARKLVDTKLHDVEMSLRGILRGFGLKVDKTTATSFAARIRELVDGHPTLQGLVDALLSIREVLLREFKGFEKRVRTMARHNEQAKLLMSTTGVGAIISLTYAAAIDDPARFESSKVVGAHYGMTPKKYQSGQTDYNVASRRSAMRACAGRSGRPLM

SEQ ID NO: 46523 - protein, 387 aa, unidentified
MKQSTTPSAARATKVAAMPMTSKKEASTQEPSAATSPTSITVGLDLGDRHSHFCVLDAAGRPLEQGRVAMSPAELTAFFQRFASARLILEVGGQSPWVSRLAQAAGMEVIVANPRRVQLITRNERKNDRTDAELLARLGRVDPQLLSPVTHRSVEHQADLALKRARDAAVASRTALINHVRGAIKSFGHRLPTCSPDSFHSRVLARLPVELAPALQPIVRLIGQVTGEIKNFDAQIEELADERYPVTKVLRQVSGVGPVTALSFVLTLDNPARVSESRQVGPYLGLVPRTHDSGASSPQLRITKAGDPALRRLLVIAANYILGPFGPDCDLRRFGLKLAAQGGKNGRKRAKVAVARKLAVLLHHLWKTGEVYDPFHLAKKRGELVPA

SEQ ID NO: 46524 - protein, 318 aa, unidentified
MNTKINQNEINIGVDTGKTQLDIYIRPLDIFFTVHNDDKGIKEAVKEIKKYNPTRVVIEATGRLEQAFIIACANEKLPFVVANPVHIKKFAGAVGQLAKTDKLDAKLIAYYSEALKPALSTLKPETLRKMSDLLSRRCQLMDMRTMEKNRLQILPKFLESTINPMLTVINNQLTKIDNKMAKLIEQCDEYQLKNDIIQSVPGVGNVVAFSLLSNMPELGYITNKEAAALVGVAPINRESGAFKGKRMIRGGRHQIRTAMFMSMMSAMQCNPVFKATYQRLVAAGKPKKIAIIACVRKMIVILNSMVRDGVYWDPKMNQ

SEQ ID NO: 46525 - protein, 423 aa, unidentified
MNFKAQAKQNQLLERISTQHLVVGIDIAQQSHVARAVNFRGITLGTPLHFSNNDVGFSQLLQWMKDLQETHQLNDTIIGMEPTGHYWLSLAAWLKDRSLEVVLVNPHLVKKNKENRDNTPSKSDIKDALVIADMVKNGYYTVIKDTSEVFIELRVLMANRETIVHRLVSVKNQIHRWVDMVFPELPQVYKHLIGSGSLATLRLFPTPADLRKLTVRQVIDGWKTVMKRHSGERRAGELLALAAQSVGAKHAEKAFKLHIQQLLAEYDLSMNQLQVIEDEVATALTRIPLAKPLLAIKGMNILSVAGILGEAGDLSGYAHGNALLRHAGLNLAEASSGKWKGQMSISKRGRPRLRHALFMATMALIMNDETFKRQHEVNVKTKSMKPMRSVMKLCGKLARILVSIARSGEAYEPNRVLPMKQIA

SEQ ID NO: 46526 - protein, 348 aa, unidentified
MEQVTRIGMDTSKHVFQLHGVNAAETPLLRQRLRRQDMVAFFAKLAPTVIAIEAGGASHHWARLLRSMGHEVKLIAPQLVKPYVQRGKNDAADAAALCEAMSRPTMRFVPVKTVEQQAALMLVGHRERLVRQRTQLGNAIRGYAAEFGLTAAKGMAHLEPLLERLQADEQLPDLARELFAAHAEEYAQLQAHICRVEAKLMAWHQAHACSQRLARIPGIGPIGAVLLLMKTPAPELFRSGRDFAAWIGLTPKDHSTGGKIRQGGITRAGDEGLRSVLVTGATAVIRMVRNGRGRSALSPWLEQLLQRKPPKLVAVALANKLARIAWKLMATGATYAGRPAPTAAAGPI

SEQ ID NO: 46527 - protein, 412 aa, unidentified
MELLHRRCCGLDVHKETVVACLRLLCDGKVTTEVRTFQTTTADLLRLSEWLAMNECTHVAMEATGVYWKPVWRILDDGEFALVLANAAHVKNVPGRKTDVNDAMWLAELLAHGLIRASFVPDAQTQEMRNLLRTRKQLVREQSSHVLRVQKTLEDANIKLDSVLTDLMGKSGRAIIEALIAGETNPVKLAGLADRRVKASFEEFREALRGRVTRHHRFLLRLHLNQIDALDAAMATLDAQVEANLGPFRTAVELIGSIPGIKNLGAHVIVSEIGIDMSRFPSAAHLISWACICPRNDESAGKRRSNRARKGGTWLKTTLVQCAWAAVKKKDSYLQAQFYRIKARRGPKKAIMAVVASILTAIYHMLKDGTMYKDLGRNHFDRRSSDQQKNRLVKRLVDLGYVVEIKALAATA

SEQ ID NO: 46528 - protein, 323 aa, unidentified
MKQTFSHSVGIDVGKRELVACVRCSNGITEPPAAFPNSSIGLNKFVVYLKKHEVAPDAPILLESTGPYHWQAARTLADKGYFVKVANPIHTKQIARLSIRKRKTDKVDAANLAFLASQNYGYQFMETEELARKKALVRHYWKLRSIATNLLIHERYLKEYRNIGSDGVSAFLVRKCKIVKKKIIKDWSKGNDVKYLDSIPGVTPFLAAVILCEILPLNRFQKIEQIIAFSGLDPSVKQTGGKSGRHGAISKRGSATLREALWLAAFGSFQRQPMRKVYLYYKERKLHHNTILCVMGRKILRIAVALLKKRRMFYPKYLVGSGG

SEQ ID NO: 46529 - protein, 319 aa, unidentified
MQGRAGKKEQVGKEYIGIDISKDSLDVAIHGKTKITRYSNDRSGIKKLCDMLVEMKPALVVFEATGGFEIPLYVSLDKAQLPATPVNPRQVRDFARSTGKLAKTDALDAVVIAHFGYAIQPEPHPLPDTQELKILQNRRSQLIDMITAETNRLRGMPKSVKQRIRAHISWLQEELANTDHELHEMIQKDPVWKAKDKLLQSVPGVGPVLSSTLISRLSELGNLNRKEIAALVGVAPFNRDSGGFHGRRSIWGGRAKVRKALYMATISASRFNPVIREFYQRLLAAGKLKKVALTACMRRLLTILNAMVKHDTPWYYSLS

SEQ ID NO: 46530 - protein, 324 aa, unidentified
MITSALGVDISKLKFDVALIRDNGKLRHKVFPNTPAGFSQLSLWLTKHKVERVHACMEATGTYAEALALYLSEAAHLVSLVNPAQIKAYGQSHLSRAKTDKADAALIAQYCQERHPPEWRPLPGEVRNLQALVRRLESLLEMHQMEVNRLEAGTSAEPVRKSLAEHIAFLAAEIKQTETLIRQHIDGHPTLRERRELLISIPGIGETTAAKLLGEILDVKLYSGARQLAAFAGLAPRLHESGSSVKRKARMSKLGAPRLRKALYFPAIAAIKHNPYIRAMSIRLKERGLCPMQIIGAAMRKLVHLAYGVLKSGRPFDPSMLKTA

SEQ ID NO: 46531 - protein, 405 aa, unidentified
MGYVIALDISMGKSYIVVYEGQTCLLEGEILHNQFGFQTLLDEIQLLPEDPTLVFESTGIYSKPVETFCERNQLRYTVLNPLEAKKQLEKGTLRSWKTDKHDAHRLAQTHQDNHRPEKVQQPDIYNDLRDLSRFYQEVEVEIKRIRMYLHNAIQLSFPELEQFFSSRVTPYALTLIELFPHPELVLQSSSTIIKNRLIKSTSKKISENRAKEKAHQIIEYARNSYPAVSSSSIQTQKVRYYARQLLHLLEEKEQLTHQMIKKSEKLSEFELLKSLPGIGGISAALLIGEIGDLSRFSNHKKVNAFIGIDIRRYQSGKYAGQDHINKRGNPKGRKILYLIIRNMIRQQKSGPNHIVDYYYKLKKQPIPKKDKVAVVACMNKLLKCIYSMARNNTKYDYSYAVSMDQ

SEQ ID NO: 46532 - protein, 372 aa, unidentified
MGHHSEAFIGVDTSKLRNAVAVAEAGRGGELRYLGEIDATDAATRKLVAKLAGKYSKLTFCYEAGPTGYALRRLITSLGHECVVIAPSLIPTRPGDRIKTNRRDAENLAKQLRAGELIAVWVPDERHEAMRDLSRAREAAVDDLKRKRQQISSLLLRLGLHFPGKKTWGRAHRNWLAAQKIAHREQRIVFEEALGAERQAQERADRLEAAIRQAAPDWSLAEAVTALQALRGIDLVAAVTVLAEIGDLERFANPRELMGYLGLVPSERSTGDSVKRGGITKAGNRRARRILVECCWSYRHPPRVGRDKQLKVDAAPEAVRDIAWKAQTRLSSRFRALARRGKRPTVVVTAIAREMCGFIWAIDRAMRRPARP

SEQ ID NO: 46533 - protein, 349 aa, unidentified
MSTGYFIGIDLHRTVIQICVLDERGERVAEERLRYTGLQEGLRAIAVVKQYMPRCRVAVEALGLNRWFVNACLEAGVDVLVCDPRKLGLKKLGKKTDRRDAHEIARRLWLGDLDRMARTYYPSEEEYGRRKLLRVRHRLVQMRQQVVNQIRGILSAYQVAAPKGVLYTGPSRARLAEVKLPVEDLQQAYDALRRVLEDLHRQIEDLTRKVRRLTKSDPEVAALVQALPGIGAQSASTLLAELGDPRRFDGPRSVAAHAGLVPRVSQSSDKAHHGRMTKQGNRELRWILSQWAVRLEKNDPTVQAWLQRLRGRVHKNKARMALARRLLVGVWIVLTRGEAFDLRRCLGQA

SEQ ID NO: 46534 - protein, 341 aa, unidentified
MGQAHTIGLDIAKRVFQAHGADASGRVVFRKRLVRAKVLAFFAAQPPCTVAMEACAGAHHWARELGKLGHTVRLIPPAYVKPYVKRHKNDRADAEAICEAAQRPSMRFVPVKPEEQQANGVVFRARDLLVRQCTQCINALRGHLSEYGYVFPQGITHAEAVIAHVEDPDSAVPESARAVLKVLIGTFQALEAQIQALDAEITQRAKADPVARRLMTIPGIGPIAATAITALVPAPEGFRAGRDFAAWLGLTPLQKSTGGKQKLGAISKMGERTIRRLLILGASAVVRWASQRSTPAGSWLARMLARKPKMLVTVALANKTARIVWALLVKGGVYRAPAPAA

SEQ ID NO: 46535 - protein, 402 aa, unidentified
MPMLSIGIDVSKGKSTVCGMTPGGEIVYTPFEVQHTREGMSELVSLLRSSGEEVRAVLESTGSYHCPVVAALLENGIFVSVINSLRMKRFCSQSIRKVKTDRIDAMQIALYGLAYWQELQPARLPEDTYRELQLLARQYYQMTSMLIKAKVDFNALCDQVLPGMQELMNDHAGRHKLSDFVLRYRHTTHILEMGETRFRKDYCKWAEKKGYRNCKRMAALIFATAQNGIPVLPNAPSTQIVITEAIRVLHTVEASRDAILTQMQALAKTLPEYSLVREMPCIGDTLAPRLIAEIGDVRRFHSKRALIAYAGIDAPPYQSGKFCANNRHISKRGNRYLRKTGYEVMQSYVMHKPANDPIFTFIEKKRSEGKCGKLAMVAGLNKFLRIYYGKVTELYRSLPAIE

SEQ ID NO: 46536 - protein, 394 aa, unidentified
MKLIGIDIGKNKHFFCVMDQQTGEIISQPVSFSNDKEGFDFLVQKIKSYPKDSILIGMEDTGHYHFALLKYLLDLQYTVALINPKTTDFNRKMQGGITKNDKLDTINICDVLDTPERKKQYRITKVNSFDLYEQKQLTRHHHNLKEEEKVYKNRLQKCIDIVFPEFNKLFNSKYGIVYMNILKMFGSAENIANTDIRTIRKCFEIEGRGNRISLTPERLKECARSSIGISSSAEVIQIKHLTAQIELIEEQLTEIDKKIEEFSIQNNSPILSIPGISHFSGTSILAELGDISNYSKPSQIIKFAGVAPLHYESSQFNAQHTAITKKGSKYLRKTLYQIILPVIRHNPVFNKYYQLKISQGKGHRCAQGHCVRKLLRIIYHLLKTNQQFDPQLLR

SEQ ID NO: 46537 - protein, 403 aa, unidentified
MNPCITIDVSKESSHIQGFLDFEKQLSKPKKITHTKEGFATILSIYNQIIEKTNIIPIVYFEYTGVYHKTLVAFLKENNIEFHPIPPLVAAKERKSDIRNKKTDTRDCKTLSYVVYKNKTKIYYEPTKEEKKLKDLQKYYMTTEKQYQEITVHLYEMIDIIYPFYKSVLSEFDCNTSLKLLQKYPHPDFVTSHRKATLIKDFKEITGHGDVYATNVITKLLALIETIVPGCSKDDFEVEMLKDYATQALFYKTRLNKTLDEMNEIINADEDKKRSLDCIDSIPGIGTNTASRLLAELYNLERFHSYKALIAFAGTDPNIDQSGKKDGKHLSITKCGNKRLRTILFMMVRSMVRNRIPKNPIKNFYKKKTQLGLPPKVVLIACVNKLLHIIYQLNKNGEIFIYH

SEQ ID NO: 46538 - protein, 361 aa, unidentified
MANSMRFVGLDVHAHQTCLVSLDRETGELRKARLHTPPLGVLGHLHALEPMRAVYEAGPTGLGLARAAAAEGLDVRICTSGSALRKPTDRVKTDLRDAERLARLLAAGELTFARIPTLAEECFRDVVRAREDIRRDLMRARHRLSKFLLRREVRFPGKGRAWTRAHMDWLRALRFEDAASGAVLCDYLAAVELLLQRRSTTDEAIERLWPESPYAATIARLRSFRGIDTLTAAGLCVEVGDFHRFRKPRLLFGYLGIVPSEWTTGEQRRQGRITKAGPTHARRLLVEAAHHCRRTPKVTEQLNRRQRGVDPRVVAIAWRAQRRLHERWVGLRLERKKPAGVVSVALARELAGFVWEAATLD

SEQ ID NO: 46539 - protein, 434 aa, unidentified
MSREQHDQTAIRTHIGAIFVSLELSRSTWQVTSLSPGGGEKMSKHGVDADDVAGLLARFGELKRKAQARTGEAYRIIAIQEAGLDGFWIHRVLEREGVESHVVDAASVAVSRRRRRAKTDRIDGEALVRTLLAFKRGEPRVCAMVRPPTPEDEDRRRVCRERKALIAERVRHVNRIKGLLHSQGVGDFRPLRRDRRRALEALRTGDGRSLGAHMKAQIGRELDRLEMLLDQIAAVEAEREAMLATMDQEQTAARAQTQLASQQARRDAWRRQAAPQARQEAPQGGAGETAPPGPAPAAPPSTIQMLTGLRSVGAEFAATLATELFSRSFDNRRQVGAYAGLAATPWKSGSIDHEQGVSKAGNPRVRTTMVQLAWLWLRHQPASALSRWFQARVANGKGGRKRSIVALARKLLVALWKYVTAGVVIEGALMNNAA

SEQ ID NO: 46540 - protein, 321 aa, unidentified
MNTFYLGIDVAKAKLDCALRLANGKYKNKVIDNNLPGFKHLSEWLVKQQVTTLQVCMEATGVYWEAVAEYLADQGVLVSVVNPAQIKAFGKSHGVRSKTDKIDAQSIALFCAEHHPKAWQAPTPGERALRAMVLRLESLQVMRTQESNRLLVARDAVKPGITSHIEWLDKEIKALAKKISEHLDSDPDLKDKQALLDSIPGLGERTIATYLAFYANPADFGNARRAAAFAGLEPRHHESGSSVKHPPRMSKIGHAFLRKAFYMPAMVTLYKTAWGKRFRERLAAAGKPPKLIIGAMMRKLIHVAFGVLKSGKMFDPALHGC

SEQ ID NO: 46541 - protein, 403 aa, unidentified
MSPEHSIDIFLGLDVGKSEHHACALDRDGNKVFDKPLPQLESELAGVFHQLQKLGTVLVIVDQPNTIGALPIAVARDCGCEVGYLPGLAMRKAADLYPGRAKTDKRDAFIIADTARTMPHTLRAVDRNDEVLSALKMLSGFDDDIARDCTRTVNRLRSVLTQIYPSLERVFAGSTLTRTPILELLIHYKGPQGLKRAGYQRVLNWMIKRTRKDPTPLVDDIFAALKAQTVTVPGSDAAELVIPQLAANIKALKEQRNTIAEQVEEMLADFPLCEVLMSMPGVGIKTAAQILLAIGDGSDFASAGHLAAYAGIAPVTRRSGSSIRGEFPARSGNKRLKNALFYSAFAVIRSHEPSRRYYERKRAEGKRHNAAVICLARRRCNVIYAMLKNKEFFREIPPRPVAA

SEQ ID NO: 46542 - protein, 363 aa, unidentified
MHDSITWIGMDVHKESIVVTAVGNDPERIRARFELPNTDKGIDRLVARLQEFGDVRCVYEAGPCGFELRRVLDSRGIPCDVVAPSLIPKKAGDRVKTDRRDAEKLARLHRMGELTPIHVPSTAQEALRDLVRAREDAKEDVLRRRHRLLKFLLRQGRRHEGKSWTQVHWNWIRSLKFADANTQTVLAEYVLALEQELERVQRLNLRIEEESRHPDVAPAVARLRTLRGVDTITAMTLISELVDMNRFSNPRELMAFAGLVPSEYSSGGRQCRGRITKTGNAHVRRVLVESAWHYRHSPTGAGPTIRKRREGQPPEVLEIARKAEMRLCKKYRKMTARGKSSRIAVVAVARELAGFVWAIGKNI

SEQ ID NO: 46543 - protein, 408 aa, unidentified
MLGWVADGQEVGFTIRNLTSRIKMSKLNLTDTSAAAEYATVYVAFELSKAKWKVGVMLPGSQRVSRFTIDGGDLTALSAWLAKWRARAEAIGKPVRIISCYEAGYDGHWLHRWLTSQGVINYVIDPASIQVNRRARRAKTDNIDLEQLMRTLLAYLRGEPGVCSMVRVPSPEDEDRRRTSRERDRLLKERSSHSNRITGLLHAQGIRDAMPFKRGFIASLDTVRTGDGRALPARLKAEIVREHERLCLVHKQIIALEAKSKAEVRAAVRGSVEEKIKDLIDLKGLGVVSAQKLMHEVFYRSFDNRRQVGSYFGLTNSAYDSGDSHRDQGISKAGNRRGRTLAVELAWLWLRFQPGSELSRWFNERVGSIKGRIRRITIVALARKLMIALWRYVTTGVVPTGAVLRQSV

SEQ ID NO: 46544 - protein, 413 aa, unidentified
MEVIHPRCAGIDCSKRDAKVCVRVQGAGRRGTAKTVTTWGSTTAEVLALREHLVAEQVGAVIIESTSDYWKPFYYLLEDALQVMLVNAKSVRNVPGRKTDVSDAAWLADLGAHGLVRASLVPPPPIRALRDLTRARTVITRERTREIQRLEKLLEDAGIKLSSVASEIVGVSGRAILEALIAGERDPAVLADLAKYGLRKKIPALTEALTGRFTEHHGFMARLYLDCLDDHSAKIARLDERIAEAMTPFAAARELLTSIPGFSTRIAEVFIAETGADMAAFPTAAHLASWAGVAPGCNESAGRVKSAATRPGNRYLKAALGIAALSAARSKNTYYNAKFARIAARRGRMIALVALERTMVTDAYNMLCNGAFYRDPGPDFYTRHQPAKTKNRAVKQLENLGYNVTLEPRTDAA

SEQ ID NO: 46545 - protein, 353 aa, unidentified
MIIIGIDFHPEFQQIASVDTETGEFQEKRLAHREDAETFYRALAGQKVRVGMEASGHARWFERLLAELQFELWIGDAAEIQSKRVRKQKTDRQDAQLILRLMLKDDFPQIWVPSWENRDLRQLLWHRHRMVQVRTRIMNQLQALALNEGLRCKKRLWREHGRRQLESLRLAPWASRRRRDLLELLDRLNPTIAELSQAIEQEAEKCPEAQRLMTHPGVGPLTALAFVLIIGKAERFQCGKQIASYLGLVPLEKSSGNRRRLGHITKQGSSMVRFLLVEAAQVTVRSLPEWRRKYVQLMMRRGRKIAKVAMARRLAVALYWMWRKGWNYEQLKSSVRTRASSEQAMVCSRTPSN

SEQ ID NO: 46546 - protein, 483 aa, unidentified
MKATVSAEAALAEFGRKLRSLLPFRQCRGPLYVRSKQESKGANEMARTENALAGGRPAKRRRASARRSGAGRPPAAKSAPEKAALNQTQRSVSCEALVVRDTNNLNRAFSGTGSTRNKRLAVDRATLGGLHSAAQRDRGQPHELNPNSRSHRARPRASSSPHAQGRDAFMNALTSVGIDVSKATLEVALAPEAKPFSVANERSGIDKLQDKLPAPGTCLITLEGSGGYERLVIAELLDRGHHVALVNPRQVRDFAKGLGILAKTDEIDACVLARFGQVVGPRSLEKPTGSQTELQQLVERRRQLISLRTAELNRRQQATSKRTIRSIDAVLKTLDRQITTLEADIAALVEQHADWKQKADLLTSAPGVGDITAMTLLADLPELGQLNRERIAALVGLAPYAADSGTITGVRSIRGGRADVRNTLYMAALAGLRCNPVLKAFYERLIASGKQAKKALTACARKLLVILNTMLKTNSPWKAPHAL

SEQ ID NO: 46547 - protein, 372 aa, unidentified
MSNATTFVGLDVHARSIKAVSVNVMTGEVASATFGYDAPSVAEWVRSRDPAAKCVYESGPTGFDLQKKLAALGIDCVVGAVSKMIKPPADRGRKNDRNDAEFLARTLAVGNVVEVWVPDGECEAARDLTRALEDARDECTRSKQMLLKFLLRHGLVFDETTPSGRRKGNWTAAHWAWIRGVSFEEKADNDVLSYYVDRVRQACEEKKRLERLVAAEAAKPRWKRRVDSVRCLKGIDTQIAADLVFEAGDFSRFKSARSFAAWVGLTPSEHSSGESVARGGITKAGNRHLRRDLAEAAWHYLSCSPHSKDLAAGQAPDPRARRHAAKGVRRLVERRGALLARGVQKNKANVATARELACWVWAVGTMAEGEGA

SEQ ID NO: 46548 - protein, 358 aa, unidentified
MSNLKYSIGIDVSKKDFHCCLSVIDTEQSVKVKSTHKFTNSTSGFKLLIEWVRRNRKEDLQIFCVMEATGVYHEQLAWYLHDKDFSISILLPNKAKKYLQANGAKSKNDKIDARGLAQIGAEKKLDLWMPPSRKLYDLRSCTRQHQSLSEMHSAINNQLEAITHSQFQSKDIIRQMKKTMRLLEQQINEMDKIIEKIVKEDEVLYFHYKNISEIKGIAMLSFAVIAAETNGFVLFKDAGSLVSYAGYDVVENQSGNHVGRTKISKKGNSRIRRILHMPALCAVREDQPQFKNLYERVYKRTGIKMKGYVAVQKKLLVMAYYLWRKKMKYQADFDYSEKIIAPEKSEATHDKIPEGRFH

SEQ ID NO: 46549 - protein, 321 aa, unidentified
MDKYTEIYGVDISKDVFDVYGQETGHKQFKNEDKGFISFLKSLPKSVLVVMEATGYYHYRLAQYLYKQGIFVSVVNPLSVKRFIQMKLAKVKTDKSDAKAICEYGQINEVPLYTALTDVQSECLQLFRLLDNYLKKRTATKNKLHGEETLGIPSKFAYRSLKRDLKHLNKEVTGIEERLLELVKQEQQHQLTLLRSIPGMGVKTALFLIVVTDGFLKFEKASQLCSYVGITPTIRESGSSVRGRSRISKVGNKKLRNLLFLCAFSACKHNKGCREIYERIVNKGKSKKLALIAVSNKLLKQAFAIAKSGIPYDENFVSKLN

SEQ ID NO: 46550 - protein, 426 aa, unidentified
MNCKQNQKINQVEETSLVVGIDIGSTNHYARAFDWRGIELARIYKFSNSGEGFERLSYWMQGICERNGKSKIIVGIEPTGHYWFTLGRYLREQGIKLVMVNPYAVKQTKELDDNDPTKNDGKDPKVIAKLVLDGRYSIPYVPTGAYADLRILSADRQRIVKEIAQIKNRFARWFAIYFPEYCEVFGSYESKSSMLLLRVANTPESIVALGVEGICRIWKDAKIRAVGVKRATTLYETAKRSIGHNQGMSAAKLEMTLLLEDYEAKAKQLAFVMAALESTLRDIPEAEKLLAIKGIGIISVAGFLAEVGDLRRFESPKQIQKLAGLSLRENSSGNHKGQTTISRRGRSKLRQILFNTVIPLLATNEEFRSLHQYFTTRTVNPLKKKQSAVALCGKLIRVFYAIMVHGVEYDGKKMLADIHRNEPCTA

SEQ ID NO: 46551 - protein, 408 aa, unidentified
MNTTLYVGIDVSSKSNVVYLMLPNGDKHSNFSVANSHDGSIQLVKRILSALTSHSLDTVLIGLEATSVYGDNLVYFLREDATLAPFNRKIHVLNPRQVKQFHDVYNDLPKNDYVDSFVIADCLRFGRINKEVYIGDYHYKALQNLTRARYFAVQNLTKEKQRFINVLFKKYSTMTQEKVFSNTFSTTALAVYDEFESAEALANMDLQELTDFIIEKGKNRFPDPDAVAKAIQKAARSSYRLPKTVNDSVNQVLSISITSMKALDAQIKEFDKAIKAQMELLPNVLISVPGIGPVYSAGIMAEIGDINRFENQAKLAKYAGLAWKQYQSGGFESETTRLIPSGNRFLKYYLCEAALSLVRCDKEYSDFYHLKYKEVNRYQHKRALALTARKLVRLVFRLLKDNRLYRPA

SEQ ID NO: 46552 - protein, 343 aa, unidentified
MQTITTVGLDIAKSVFQVHGIDAEGKVIIRRQLKRRYVLAFFQKLPACLVGIEACASSHHWSRELKALGHTVRLMPPAYVKPYVKRQKNDAADAEAICEAVTRATMRFVATKTPEQQSCLMLHRTRHLFIRQQTAVINAIRAHLAEFGIVAPVGRKGVEELLGVVSDPRDKRLPDVARACLAALGAQLRVLKAQILEFDRMITAWHRSSETSKRLDAIPGVGPALATALVASVADPKAFRSGRDFSAWIGLVPKQHSSGGKERLGSISKQGDRYLRSLFTAGALAVIRYAKIHGTGHRPWLVALLARRPTKVAAIALANKIARMAWAMMAKGERYKEPVALAA

SEQ ID NO: 46553 - protein, 403 aa, unidentified
MNNVAGIDVSKGKSMVSVLRPFGEVVAKPFSVGHTGSELKELADYLKSLDGETRVVMEHTGRYYEPVARFLHEEGVFVSAVNPKLIKDYGNNTLRKVKTDKADARKIARYGLDNWAELRQHTPMDTIRMQLKTLNRQQSLYTKTKTMMKNNLIALLDQTYPGVNALFDSPVREDGSQKWVDFATAFWHVDCVRNMSLTAFAERYRKWCKRHGYNFSQSKAVEVHAGAQDLIAMLPKDALTKTMVRQAIDALNAVSASLERLKAEMQALAAQLPEYPVVMAMHGVGDSLGPQLMAELGDVARFTHRNAITAFAGVDPGADQSGTHEAKSTRVSKSGPPELRRALFLVMDCLLKTQPQDDPVYRFMDKKRAEGKPYLVYMTAGANKFLRIYYGRVKEYLASLEGN

SEQ ID NO: 46554 - protein, 461 aa, unidentified
MKSKTTKQKSKSKKISVDAGWEAINPHAAGVDIGAREHWACVPAKSSPTPVRKFGTFTADLEAMAKWFKECGVTTVAMEATGVYWIALFEILEREGLAVILANARQIKNVSGRKSDVLDCQWIQKWHTFGLLQASFRPADPYCVLRTYLRYRAELVGFRSTQCQHMQKALQQMNLQLTQVLSDVTGVSGMTIIKAILEGERDRSKLAGMVSVRVRATRAQIEGALQGDYRKEHLFVLRQAHDLHVIYEAKIQACDEQIVAEAAKLPEKVDVKLVPPPARKPGRPACLDQMGGQDLRKLLYEKFGVDLTAIEGIGGLTGLVLLTEVGPNLDRFATEGHFTSWLGLCPDNRISGGKVLSSRTRRVVNRVSDALRMAAYTLTHSQSALGGFCRRMKARLGAAEGITATAHKLARIIYAMIKHGEAYVREGQEAAEKKFQENKLNALKKMAKAAGMELTPIKALA

SEQ ID NO: 46555 - protein, 316 aa, unidentified
MSAVSLFVGIDVAKDTLDVAVRPTAETWQVSNDDTGRATLVAQLTALAPTLVILEATGGFEGPLLAALAVATVPVVRANPRQVRAFAQAVGILAKTDRIDARVLAHCAEAVRPTPRPLPDAETRELRALLLRRRQVIEMLTAEHSRLGTAPRRIHEAIQQPIAWLEHQLTGLDDDLTRAVQASAVWQVQEAVLRSIPGVGPVLSRTMLAQVPELGTLGHKQVAALVGVAPFNRDSGPLRGRRMIWGGRAEVRAVLYMGTLVATRHNPMIKAFYERLLAAGKVKKVALTACMHKLLTIMNAMIRDLKPWQLQEVPIA

SEQ ID NO: 46556 - protein, 354 aa, unidentified
MAEKLNSVIAVIGIDIGKNSFHVVGLDERGAIVLRQKWSRGQVETRLANMPPCLIGMEACVGAHHLSRRLKLLGHDARLMPAKYVRPYSKGQKNDFRDAETIAEAVQRPMMKFVATKSADQLDLQALHRVRERLVSQRTGIINQIRAFLLERSVAVRQGLRFLRAELPGILATRCDVLSPRMIRIVEDLACDWRRLDERIEGLSGEIDALARQDAGCERLMSVPGIGPIISSAMVAAIGAGDAFAKGRDFAAWLGLVPKQMSTGDRTILGKISKRGNRYLRVLFVQAAWVVLIKPKSWERYGLKPWIEAARRRLHHNVLAIALANKLARIAWSVLHHGRNFEVGKMSEATSQST

SEQ ID NO: 46557 - protein, 483 aa, unidentified
METASPGDGPGGLTPKRLSSPEDCVSARRGASRGLRRPRLARGTRLSPQVVFRRRGRRAGDVLGVGIDWAEEFHVVALGSPGAGVFEVVRVEHRPQAVSALVERIAGLEADPAEVRVVIETRHGLLVEALVEAGYTVLPVNPELVSRRRGPARKKDDPEDARICCRIALDRHAGLRQLIPHGQIAGELRSIARDDERACRDERRLLNRLRADLIVTFPAALAIAGDDLGATRILRLLERWPTAQALAAASREEIIEFGRAQRTGYLQRFADRIAAALADDHFTAPEHLVRAKVDTIRLTARQLLLIDAQRRAWDKRMGELLLGTSSQPAEGQPGQAFPGGEIYLSFPGLGHRLAARIAGEIGDHIGQFSTPNSLQCYAGRAPVTRRSGKRDLVVAHRLACNRYLADAVHKWAFASLRRSAWAREFYDAQRARNKNHHAALRALGNRWLEVLWHCLTHNVPYDAPAGPLPHGNMNQGSYEEDPE

SEQ ID NO: 46558 - protein, 331 aa, unidentified
MKIKDIVGIDISKLTFDAAIHSNQIASQFENSKKGFKKLVDWTFKNSESSKESVLFVLEHTGLYSHSLSVYLTSNSIPFLLVPGLEIKKSMGMVRGKNDQADAKMIAKYGYRLRDEIKPTVLSCEQEQSIKRLLSLRERLVKQRAGFKASFKEQKRVLIKKENETLFSTQQKMINYLSKQIKEVEKQMNVIIKNNRSMLENYKLMTSIKGIGPQTALFMIAYTANFTRFDNHRKFASYCGIAPFQNQSGTSIRGKTKVSHLANKKIKSLLDLCAKTSIQHNTEMRIYYERRIAEGKNKMSTINIIRNKLVARMFAVVERGENYVDTMKYAA

SEQ ID NO: 46559 - protein, 406 aa, unidentified
MVNNSLIGKSAIRLVDKSGVGEASVASRANTNRRREIVRVQVREAVTEQDPRRHRGTSPNSRLNRQQPTCLASSHLQVREKTMSESVHRMANAIYVGIDVAKDTFSVACCPAVLKTSLPNTPQGHRQLRQNLQKLSIARIVLEATGGYEKPIVAELLDAGLPVVVVNPRQVRDFARGLGQFAKTDSIDAEVLAKFAQLVQPAIRPQKTAQTTDLAELVHRRRQLSDLHTQESNRLSLVHHREVRKSVQKMLKMLDRQIADIDELISKHIRNNNDFRQKDRILRSTPGIGPQTSAMLLAQMPELGSLNRQEIAALAGLAPWDRASGKWLGKGHIWGGRKDVRSILYMAALSARNCNPVIRRFAQRLEQEGKAFKVVITACMRKLLIILNTMIRNQSLWTPKILLKNT

SEQ ID NO: 46560 - protein, 401 aa, unidentified
MVSDFRKGRYNLMKIYVGIDIAKLNHFAAAISSDGEIILEPFKFTNDADGFQLLVSKLDSFDKNSIIIGLESTAHYGDNLVRYLVAEFYQVCVLNPIKTCQMRKNNIRKTKTDKVDTYVIAKTLMMQDDLRFVSFYDLDMMDLKALGRFRQKTIKQRTRLKIQLTTYVDQVFPEIQYFFKSGLHQNAVYALLKEAPSPKEIASMHMTHLANLLKVNSHGHFTKEQAKELRVLTQKSVGANDSAISIQITQTIQQIELLDSQLEKIEAEMTDIIKFNDSVIMTIPGIGYINGGMILGEIGDIHRFSNPNKLLAFAGLDPSVYQSGNFQAKTTRMSKRGSRVLRYALVNAAWNVVRNNATFKAYYDAKRAEGRSHYNALGHCAGKLVRVIWKMLTDKVEFNLE

SEQ ID NO: 46561 - protein, 424 aa, unidentified
MRAEEDYRVWVGIDWATEAHQVCVLDETGAVVGERSVTHAGEAIAAFTVWLAELGAAAADRVAVAIEVPRGAVVETLVERGFHVYALNPKQLDRFRDRHTVAGAKDDRRDAFVLADSLRTDRACFRRVQLDEPHIIQLRELARVDEELAREGRQLANRLREQLHRFFPQLLQLSPAADEPWLWALLEIVPTPAAAQRVRRDRVAALLRAHRIRRLNAAAVVTTLRPPALWVAPGVVDAATEHIALLLPRLRLVHAQRQRCGQRIEALLERGPATEGPDPEPREHRDVEILRSLPGVGRVVAATVLAEASAAVAARDYHRLRAHAGVAPVTKQSGKRRTVHMRRACDGRLRNAFYHWARVATVCDAASRTYYAGLRHRGHSHGRALRSVADRLLRILVALLNTRSLYDPNYPRRVPPDLVLVPGT

SEQ ID NO: 46562 - protein, 354 aa, unidentified
MKAITFSNLHFFVGIDTHLKQWKVTIRNCGIELKTFSMNPSPDELHKYLNKHYPDGTYFVVYEAGFCGFWPQRKFTELGINCIVVNPADVPSSNKEKSAKSDPVDSRKLARELENGSLRSIYIPEQYAEQLRSLMRLRFRLSQGQTRIKNRIKMLLYNYGITIPKEHLTNSRWSGYFIHWLKSVKLSSSAGQFTLDNLIVQLEQIREHIKNVLSQLRQEAKQENISSVINSLTSVPGVAFITAMSLYTEIIDIKRFSTFEQLCSFVGLVPSVYSSGETEYTRGISFRHNKFLRPLLIEAAWTAERKDPALTLRYNELIKQMSKQKAIIRIAKKLLRRIRHVWINQDSYVQALVA

SEQ ID NO: 46563 - protein, 338 aa, unidentified
MSYYVGLGLHGSNTYLGILDEKGERVLKAKVDNFIDLVLDKLKLFRSSIAGVVVESTFNWYWLVDGLMEAGFRVHLAQTSANKQYEGLKHTNDLHDAFHLANLLRLGILKEGHIYPKKERAIRDLLRKRLMLVRHRTAHILSFQSLYNRHKGCRFEANGIKRLREHDIDDLFDGDYLRLSAKANIATIGFLEKRIAEIERVVLNAMKLLPEFEKLKTITGVGDILALTIALETGTISRFPKVGNYASYCRCVSSQRLSNGKKKGQNNRKNGNKYLGWAFVEAANFTKRYCSDARRFYQRKAAKTKEVVAIKAVSHKLARAAYFVMRDRVDYNSKKAFA

SEQ ID NO: 46564 - protein, 341 aa, unidentified
MVTTVGLDIAKSVFQVHGVDATGQVVIRRRLKRRYVQAFFEKLPPCLVGIEACASSHHWSRELKALGHTVRLMPPAYVKPYVKRQKNDAADAEAICEAVTRANMRFVATKTPEQQSCLTLHRTRHLFIRQQTAVINVIRAHLTEFGIVAPVGRKGVEELLNVVTDSSDKRVPVVARMCLAALGAQLRRLKEQILEFDRMIMAWHRSHEASKRLDVIPGVGPILATALVASVADPKAFRSGRSFSAWIGLVPKQHSSGGKDRLGSISKQGDRYLRSLFMAGALAVIRYAKIHGAKHRPWLTALLARRPIKIAAIALANKIARMVWAMMARGERYKEPVALAA

SEQ ID NO: 46565 - protein, 345 aa, unidentified
MTSVATIGLDIAKSVFQVHGVDTAGQVVVRQRLARRRVLVFFEKLAPCLVGIEACSSSHYWARELIARGHEVRLMPAQYVKPYVKRGKNDAADAEAICEAVMRPTMRFVPVKTPEQQSVMMLHRVRLMLNRQRTQLSNAIRAHLSEFGIVAPIGRRGIDQLLALVADEEDTRVPADARVCLQMLAAQLAVVKEQILENDRRVRASARATELGRRLMEVPGVGPLLASALTATIADPAAFKTGRDLAAWIGLVPKQNSSGGKERLGSISKAGNRYLRQMLVVGAMAVIRYAERHGTRRPWLIQLMQRRSTKVAAVALANKTARIIWALMTSGERYREPTVAGALAA

SEQ ID NO: 46566 - protein, 363 aa, unidentified
MEYIAFDAHKHYTLASVVRPNGNLVREERIEHDRGALREFLERCERGSPVAVETIGNWYWIVDEIEAAGCVPKLVHARKAKLMMGEINKTDRLDARGLNRLQRNGTLPTVWIPPGELRDQRDLPRTRMVLVRQRTQLKNRIHATLAKYALHDLEVSDFFGVRGRALLRQRFDLLPPHTAYASQQLLEQVEELDRRVREFEQRIQAVFKPTPAIQLLLTLPGVGLTLGVVIALEVGDVARFASAEKLAAYAGATPRVHASGGKTRFGPSRPDVNRYLKWAFVEAANAICIGRGRAPHCHVSRLYERIARRKGHAKAIGAVARHLAEATFWILRKHEPYREPKASAVSPTGDKRGWPLSSRKLDR

SEQ ID NO: 46567 - protein, 311 aa, unidentified
MARVIGMDVHRDFAQVVVLDGDQLRHFGRVRLDKDSLTTFADRLMADDEVVLEATGNTFAIVRVLRHKVRRVAVANPLQVRLIAHAKIKTDKIDAAALAQLHASGFLPEIWVPDPETEALRRQFTRRSQLVRHRTRLKNEVHAILNANLIGRCPVTDLFAATGRKWLAEQALPIADRDAIDRGFREIDRVGNDLAALDRGLAAQSIDDKRLHHLMTITGIDVVSGLGLLATIGDHTRFASSEKLVSYLGLNPSVRQSGSGPARHGRITKRGANQARAHCAARLRSCSANITRSSSVPARSLTVSRTAAAVS

SEQ ID NO: 46568 - protein, 473 aa, unidentified
MIKSVGIDLAGNSEHKVRCLDEQGQLCDGFNFDSTPVGLAKFEERVFKDGSNPIIVFEPTGLAWLIVAVYIRGQHPDCRLVRTQGRNVVALRKYLHRSSKSDKLDALTLAKMPFVDQERLNDVYIPPAKVNAILRLARQRQRLESDVAGRKKRILSIVNGYIPDIRQAFSNLWSPQGREFLRTHLNPLTVVRSGEKAFDRFLTRTRFRKKEDGEESHMVYLTCKMAATIYEKSRSTGAIDDDFFAALQDEIARELRLMEAEEAESDAIAQRIEELYRELHPSDNLRTIPGVGDQTAPIFLAVVGDPARFHSQSAFANYNGVVPDSRQSANTEAKGLRMTKAGPAIMKLALYQSSQIGRRFDPQLAWVYYHEIMNNGKNHKQAMGAVMSHIGARILAVLRENKPYELRDLQGKPITWENARRLILANYQIPEEIKQERRRCKSDGLPAKVRNRRREMKAHREHEAAIAPQPVVA

SEQ ID NO: 46569 - protein, 349 aa, unidentified
MVVLGIDAHKRTHTAVAVDEHGKRLGSKTVAATSAGNLELVGWAGQFGEHTFAVEDCRHLSRRLERDLLAAGETLVRVHPKLMARVRRSAREQGKSDPIDATSIARAAQREENLPTATLDGPERDVRLLVDHREDLVNERTRSQNRLHWHLHELDPSLELTPGSLDRYKVLDQLTEVCAHHEGTVAEIAAELVERIRALTVRINELERRIGVVVKQLAPTLLDLQGCGALSAAKIIGETARASRFSDRSRFARFNGTAPIPVWSSNNVRVRLNRGGNRQVNAALHRIAVTQLRSGAGKEYVERRMAKGNTKTEAIRALRRRISDEVYRRLISDETARSASHTTCELVAA

SEQ ID NO: 46570 - protein, 344 aa, unidentified
MPATHRAFEDALVWARGLDDADRVWAIEDCRHVSGALERFLLAHGEPVVRVPPKLLAGARNSARERGNSDLLDAVAIARAAIREGPDTLPVAQLAGPELDVRLLVDHRERLVAQRTALINDLRWQLHDLWPEDEVPPRALITSRWQNRVGRRLGRCDQTARVRIARDELRRIRDLARAITELEHELATLVARLAPRLLAERGCGVLTAAKLIGEIAGVSRFQTDAKLARTAAAAPIPASSGRTDRHRLDRGGNRQINCALHRIAVTKARVDPETAAYLTRKQAEGKSRREALRCLKRHLARRVFKLLQPAPPPTPTPLGHRTPTTTTRGVMSHCNTPVGTPALT

SEQ ID NO: 46571 - protein, 421 aa, unidentified
MAVIAVVEGNRLSRGGRIDLTRDAVIKFGRKLRSDDEVVIEATVNTAMIVRLLRPSVRRVVIANPLQVRAIAHAKIKTDKIDAAAVLAKLHASGFLPEVWMPDEATETLRRLVAQRAQVIQQMTRARNRIHSILHANLIPPYQGAMFSVAGRAWLDTQPLALDEKLTIQRHLADLDGRASDLGVIDRELAQRALNDKRVERLMTVSGIDLTVALGLLAAIGDIGRFASPEKLVSYLGLNPSVRQSGNGPAHHGRISKQGRAHARALLVEAAWAAGRAPGPMRAFFVRIQSRRGKQVAAVATARKIAVLAWHLLTKDENYAWARPALLNAKLRKMELRAGQPTAKGRRPGRAHAYNDSAIRERERIWLEQTEQAYTRFVANWQSKPTRRTGAANGTRRSKARDGLTVPGPALCHAVTRARSK

SEQ ID NO: 46572 - protein, 352 aa, unidentified
MTSQLIQAIVIGVDTHKDTHVAVALDSRGATLGSRSVAATLPGYLELEHWALTFGKVEAFGIEGTGSYGTALSRLLLDHGHRVIEVSRPNRLVRGRHGKNDHLDAEGAARSVLNGQATAVPKPHTGAVEMIRQIKIVRDTAVKSRSQAMVTLKSLMITAPAPLREALGQCRGRMALIRLIAAFRIGKERTLISSTKPAMRSLARRWLFLHDEIAALDRELDTLVAGKAAGLHAAHGIATMTLVDMLILIGDDPTRIKSEAALARLCGVCPIPASSGRTNRFRLNRGGNRQANAALYRVAIVRMRNHPPTLAYVAKRTAEGKTKSEIIRCLKRYIVREIFNALCQPKVAGLAT

SEQ ID NO: 46573 - protein, 361 aa, unidentified
MTGTVTWAGLDVHARSTHAAAINVMSGELVRARFGAGLEEPLAWLAGLPGPVKACYEAGPTGYGLYRAAWAVGVEMIVIAPGKTPRGPSDRVKTDQKDAELLARLLLAGSLTAVVVPPPEFEAARDLMRAHDACRRDLMDARHRVSKLLLRYGRVYPEKSTWTARHRGWLGRQQFDQLATELAFVDALACVDAISARKAALAVKLSELALDERWWPTVARLRSFHGVDTLTAFALNLELGGDWKRFARAPQLASWLGLTPTLNQSGESSRQGHITKTGSVLARRLLVEAAWHYARTPGPGVALAARQAGQPAHALQISHRARQRLHRTHRKMRSRGKPGNVCVVAAARELSCFLWAAAVAD

SEQ ID NO: 46574 - protein, 377 aa, unidentified
MIYVDINIAKLNHFAAAISSDGEILIEPFKFTNDYDGFYLLLSKLAPLDQNSIIIGLESTAHYGDNLVRFLISKDFKVCVLNPIQTSSMRKNNVRKTKADKVDTFVIAKPLMMQDSLRFMTLDYIELKEFDRFRQKLVKQRTRLKIQLTSYVDQVFPELQYFFKSGLHQNSVYTLLKEAPTPTAIASMHMTHLAHLLEVASHGHFGKEKARELRILAQKSVGVNDSSLSIQITHTIEQIELLDSQLFHTELEMANLVTCLHSVIMTIPGIGFINGGMILGEIGDIHHFSELKKLLAFTGLDPSVHQSGNFQAQRTRMSKRGSRVLRYALINAAHNVVKNNSTFKAYYDAKRAEGRTTLQCPWTLCWQACQSHLEDAH

SEQ ID NO: 46575 - protein, 318 aa, unidentified
MKQLYVGIDLHSNNNYLAIIDEQDKRIYKHRWPNKPDIILAELEPFKKHIVGIVVESTFNWYWLVDILMDEGYKLHLANPTAIQKYKGLKYSDDNHDAFWLAHLLRLGILPEGYIYPKAERPIRDLLCKRGHLVKLRTSLINSLQGIIYRNYGCKLNVDKIKQSKENHVRPILSGQYNLELSGEVSKDTIDYLIRQIHKIESAILKEIKLRDSFKKLQTVPGIGKILALTIMLETGSIKRFSNVGNFSSYCRKVPTKWTSNDKKKGKGNSKSGNKYLAWAFSEAAEFARRYDKSIRAFTTVRRPRLIVWWLTRHWLTN

SEQ ID NO: 46576 - protein, 312 aa, unidentified
MIPTSVYVGADVAKDQIELACGELSLPRAIANTASGYRSLVKALARAARPVQVICEATGRYHRDFVAALHATGLAVSVINPRCARDFARAQNRLAKTDKIDAAILADYGRRLNPAPTLPPARESAALRELVARRSQLVEERARETNRTGAFTHPRVATSLRRLRRWLDAEIQALEAAIAELIGATPALAAKAARMATVQGVGVVTASVLLAELPELGACHKNEIAALAGLAPFNRDSGAWRGTRSIRGGRHTVRRVLSMAALSAARANPILRPVYQRLRLRGKAHKVALVAVMRKLLIHLNALLKTLPSLPT

SEQ ID NO: 46577 - protein, 383 aa, unidentified
MAKLQNKISKCASKSTQALLERIKLKAAGIDIGSELIFIAIMGQMVKSFTTYTSGIQEAVNCLKENGITTVAMEATGIYWFPVYEAIEEAGIEAYVVNGGHVKNVPGRKTDVLDSEWLRELHTYGLLRSSFIPREDIRKLRYYIRLRNDHIGVGASYIQHIQKNFDAMNLKLHNVISDIMGKSGQRVVRAILAGERCPETLLKLCSPDIQKNKAVQVLKSLEGNYRQEYLFGAKQALEMWEIYQQKIVECDREIEKLLKEMTKDKNELVKLSPPKQIRHHKPEIKDLHLLMMKLTDNKDATQIAGINDYTLLQLVSETGLDLLKWPSEKHFTSWLGLAPSANSSGKQGKKGRKKKRKPNEAGKIFKQIAMNVGNGKYCALAGF

SEQ ID NO: 46578 - protein, 344 aa, unidentified
MNIATIGIDLAKNVFQLHGVNSHGKVVLRRQIHRGQMRGLFVNLPPCLIGMEACASAHYWARTLESYGHTVRLIAPHFVKPYVKTHKTDATDAEAICEAVNRPNMRFVPIKSIEQQSALSLHRVRQGFVRARTAQACQIRGLLAEFGLVMPRGIANIKQVPKLLQVAGEELPAPFCRLIERLLAHLKELDRQTRELEEQIVDWHERSEPSRRLAKIPGIRSDHGQCLVASISEVRSFKNGRELAAWLGLVPRQHSSGGKPTLLGISKRGDRYLRTLLVHGARSVIVRVLKREDEKDGWLKKLLERRHVNIATVALAHKTVRTVWAMLAHDREYRPNYKSLPVAA

SEQ ID NO: 46579 - protein, 379 aa, unidentified
MTLDRFFRQCVGIDISKDKFTACLYMYDRASDAGCCTQSIDFANTKSGFNQLVRWSRKEAVKSHPLTYLMEPTGVYYERLVYHLHKIGQTVYVVLPNKARKFCEAEGIKTKTDAMDARCLALMGCVSRKLKPWSPPAPIYRELRQMTRFHADLCRIRTSVSNRMEALDHMESAEKSVRRNCEKLLDEIDRLMKNNGKTIMQKVAEDKELEQKVKRIATAKGLGETTVVCIIAETQGFHLIENRKQLVGYSGLDVKAEQSGKEDPRHHISKKGNAHIRAALYMPALVAVRHNRQIKQAYGRICQKHPNEKMIGVTAAMRRLLLLIYTLWKNGEEYDENRDKTHMARKEKTEQEYGAEDSIRNEQEPVSWNETDEDGKPPF

SEQ ID NO: 46580 - protein, 340 aa, unidentified
MGNVTTIGLDIAKNVFQVHGVDADGAAVVRQRLTRGRMLKFFAKLPRCLLGIEACATSHFWARELVALGHDVKLMPAQYVKPYVKRGKNDAADAEAICEAVTRPTMRFVGVKSPEQQSAMMLHRVRLILNRQRTQLSNAMRAHLAEFGIAAPIGRNGIEQLLDVIADPTDERVPADARFCLEMLAAQLRIVKEQILENDRRILASARETELGRRLMEIPGVGPLLASAIVATVPDPAIFRSGRNLAAWIGLVPRQNSSGGKERLGSITKAGHQYLRQMLIVGAMAVVRYAERNGAKRPWLVQLLARRKTKVAAVALANKNARMIWAMMASGERYREPQIA

SEQ ID NO: 46581 - protein, 419 aa, unidentified
MDRMIERCAGLDVHQATVVACVLITEGGRRPRKELRVFGTMTHDLEALRDWLACERVTHVGMESTGVYWRPVHAVLEEQVVVIVGNARHIRNVPGRKTDMKDAEWIAELVCCGLIRPSFVPPKPLRELRELLRYRRKLTEAQAAERNRLQKLLEIANIKLGSVATDVLGVSGRAILRALIDNTTSPEQMADLARGRLRRKRDELVHALNGRLSDTQRFLLSMQLRRVEDIETLIEALDRHITEKLVPYQAEMALLMQIPGVDWVVAAVLIAEIGVDMSVFVSAHHLAAWAGLCPGSHESAGKRKSTSARKGNVHLRTMLVGAARPAARTKGSYFKDKYHRLKARRGAMRAAMAIAHKILLAAYHMLARRVGYRELGEAYIDQLDQTRTAANLKRRLERLGYVVSILPKTPDSDTHAAPA

SEQ ID NO: 46582 - protein, 390 aa, unidentified
MQALYPRPDEHAAIRTDLKAIFVSLELSRSTWVITSLSPGGGEKMSKHAVPSGDIPALLARLSQLKEKARARTGQVFPIIVIQEAGLDGFWIHRVLQQEGIESHVVDPASIATSRRRRRAKTDKIDGEALVRALLAYKRGEPRVCAMVQAPTPHEEDRRRISREREVLTAERVQHVNRIKGLLFAQGIGDYEPLHRNRRERLEELITGDGRPLPECLKAQIRRELDRLELLIEQIKAVEAERDAVLAQAQASPGVPAPAAQLLALRGIGPEAAATLWTEGLFRTFSNRKQVAAYAGLAPTPWQSGSVHRDQGVSKAGNPRLRTIMIQIAWLWLRHQPQSALALWYRARIKRTGGRLGKTMIVALARKLLVALWKYATAGVLIEGAALKPA

SEQ ID NO: 46583 - protein, 344 aa, unidentified
MDISVLGIDLGKNVCSVVGLDASGAVVMRRKVRRETLIALAEKLPPCVVGMEACCGAHHLGRVFAAHGHDVRLMSPEYVRPYIKAQKNDDRDAEGIAEAATRPTMRFVELKSQDQLDMQTLHRSRDRLVGERTALINQLRAILLERGMVAPQGKRKLEQVLAVLMDEQGGAGLSPRMIVLVADARTQWAEIDRRIAAFDAEFVRWVKENEEARRLMTIPGVGAIVASALVAAVGQAESFERGRDLAAWLGLVPRQFTTGGKPKLLGISKRGNKYLRRQLIHGARAALPYVAERDTPLGRWAKGLASRAHRNVAIVAFANKLARIAWAVLRRGERFAVTGMPVAA

SEQ ID NO: 46584 - protein, 338 aa, unidentified
MKNVSTIGLDLAKKVFQVHGVDADGKVVVRRSLRRTQVLDWFAKLPPCLIGMEACSAAHYWARELTKLGHTVKLIPPVYAKAYVRRNKNDAADAEAICEAVSRPSMRFVTIKSEEQQAAAGIHKVREMLMKQRTMTMNALRSQMAEFGIVVMEGPRHIAELEAILADPDDTRIPAPLHDGLKLLAETLRGLERRIDGIDKTLVAWGRNNATFRHLITIPGYGPILSSAMTAMTVDPRAFRCARDFAASLGLVPRQDGTGGKVKLGPISKRGNGYLRRLLVNGAMSVLCTKRAKQDPWLVKLGATKKRKVVAVALANKMARIGWAMMMRQEDFRASAAV

SEQ ID NO: 46585 - protein, 765 aa, unidentified
MQSVAQNKILKYVGLDVHAATIVAAVAEQHAYGVGEVRMLGTYPNTPEAVRGLIRKIGRADEIKVCYEAGPTGYGICRQLREMGVACEVIAPTLIPRRSGDRVKTDRRDAVNLAKLLRSGELSSVHVPAPEQESLRDLTRLRTSAKSDEVRHRHQLTKFLLRNGIHAGRAMTATACLTSAGKIHFDDPVRDEVRRQHINELRHSVERVKMLDGAIDEAMLRAPVVLRALVVGLQALRGVSTRIAVALVCELGTLMRFATAKCMMGFSGLVSSEYSSGAAVRRGGITKTGNGHVRTALVEAAWAYRHQPQVSGVIKRRQQHVPDEVKAAAWRAQQRLNKRYRSLIVLHKSKPKAVTAVARELAGFIWEIGQMIEAGLGRGDEKYLQMAEALQLAHDARTQKQSKATKASSASSDSTASSVVARKARRTESGVGQRVVPSVEQRDRPKTSEVLPRLDREDAAVSEVAMPPPPIASLPPPKAGHSIVAMAGRAQVLPTGASAPACSSILQRNDLMGVGSVAEMIDIPPCVDLSSKPATAMRPPCVAERQPCAPRASACKQRTAEPEEDAEDRHGALTVKQMSNPAAVLGEQTDSQQGMASVQRPSKPLRAARSKPVSHQHPHVVPESTRKQRTTKPETRVEDRNDPLAVELERRPASKHATQTVDKEDGACLEHNSKFGPASQTQPIDAHPVPVSVERKRSPTTKAAKQIVDQHRSDDAAEQSLEERAATRSNSPVVPLIHARCGRQTMSAAARRRAQATFDAQAAAV

SEQ ID NO: 46586 - protein, 347 aa, unidentified
MTLVGCDLHSRKQQVAVLDTATGEVFEQELLHDGDAVERFYRALSPPVTIGIETTGYTQWFHALMHRLGHTVLVGEAGRIRAMVVRKTKTDRRDARHLLDLLKHDRFPTVWMPDPETRDLRALVAHRVRLVRMRTMLKNGLQAIALNQRLALRSALWTQRGLSQLRALPLPPHTRRRRDDSLELLTWITNRIDQLDEQIAGAVDADPRARRLLTHPGVGPLTALTTVLVLGPVERFPNGKHVVSYIGLAPAINASADKQHLGKITTQGNALLRWVLGQAAPLAARADDELRRRYFAVLHRRGRPKAKVALARKLLVRLYVMLRDQVDYEEFRRRGRAARTPHTTAVM

SEQ ID NO: 46587 - protein, 368 aa, unidentified
MKNVITYVGVDAHKKDLFVAMLVGSTATPVTWQLANEPNAVRRLVKKLEREAPGAVRVCYEAGPCGYALQRQMTTTRVECQVIAPALIPRKPGERIKTNRRDARKLAELHRAGLLTEVRPPTPEDEAVRDLCRARDDAREDLQRARHRLGKLLLRRGLHFSGRNWTKAHRAWIASVQWIHAPERVVVDDYLLAIDHLEARLIELDARLAEVAETAPYREHVAWLRCFRGIDTLTAMLILAELHAFRRFQSPRALMAYLGLVPGEDSSGEKHRRGRITRTGNTLVRRLLVEAAWHYQHRAGVGVALAKRRKGQPTRVIAIADKAQQRLCRRFRRLAEQHKPAPKIAVAIARELAGFLWAALQPAPTTAT

SEQ ID NO: 46588 - protein, 315 aa, unidentified
MNQFIKYVGLDTHKDTIAVAIADIAGGKPRYYGEIANTPTALTKLMKDVSPNGEIVSYCYEAGPCGYGIYRQISGSGHDCSVVAPSLIPTKPGDRVKTDRRDSENLARLHRAGELTPVWVPDQEQEAMRDLTRAREDMKHLERQARQRLCAFLLRHGQRYESGKSKWTQAYWRWLERIKFSHRVQQTVFQEYIDSVKQQQQRVADLEQAMHEAMADWTLAPVVTGLMALRGCRLITAMTVVAELGDITRFDSPRQLMSYLGLVPSESSSGPKTRRGGITKTGNGHVRRVLVEAAWCYRFPARKTAASLPVRCSSR

SEQ ID NO: 46589 - protein, 411 aa, unidentified
MNQQIAFEQIVRCGCGMDIHRDTVVATVMGEGVKKETRTYSTYTNALCELQQWLTSLSITHIAMESTGIYWKPVFNILEEHFQILLVNAWHIKNVPGHKTDKKDSVWLTKLLLSGLLKARFIPPREIRDLRDLSRYRRKLIQQATAERNRFEKILQDANFKMSAVISDVFGLTGTKLITALLSGNNNFDELLELCHGRIKNKKEQLKEALVGHLTPHHKFMLKTIRKSLDSVLQKIALLDTQTMLLSKPYQRELELLQTIPGINKISSVCLLSEIGADMSQFPTEHHLASWAGLCPSANESAGRIKSTRVTQGNQYLKPVLVECAWSASHVKGCYLRSKYESLIGRRVKKRALIAVGHKILTSSYHILKEKVAYKELGYDYLSTRRKKSQVQSYLDKLKNLGVEVQVTSIA

SEQ ID NO: 46590 - protein, 354 aa, unidentified
MITIGTDFHKRTTTYHVRDQHGQHLKCCKLENRPEVIAEFLQTIQGPKCLAMEATRNWGLFYQTVKGHVDQFLLGHPRKMKQITESETKYDRKDAELISQMVYTGFFPKAYVPNRDIQQMRSLLRFRHALVTQRASISNQVQILIDRNLWPCERPQSFKNLFCRRGISWLKSLSLPVRERFILDRSLQLYETLSQQISALESFVENQSIDHPDLPYLRRIPGFQKSRVNTYVVLFEIADISRFRKAKHFVHYAGLIPSEHSSGDKHFKGRLVKAANHLLRTALIESTFAALRVDQGLKKYYQSVKDRAGSGAAVVACARKLSFAVYYVLKNKMNYQPYRPSATTYHSSSVSVKG

SEQ ID NO: 46591 - protein, 455 aa, unidentified
MYKVKLKKTKAKSLIEMPIVNPYSSGIDISDKEHMVAVPEGVATDRVRRFGAMTCDLEEIVKWLQECEIQTVAIESTGVYWKPLFSALTRHGFEVYLVNANYVKNVTGRKTDETDAMWIQKLHSCGLLRSSYLPDDEQEALRTLVRYRRTLVQDSSRFVNRMQKSLELMNIKFHTVIADIIGKSGRRVIEAILQGEREGKNFLPFIDKRVKADSQTIVKSLEGNWRTEHLFTLRESYEMYQIYKDRIAVCDQEIEKQLQQYEARRNDGVIETDQKPKKKPIQKKKDKNHPHFNVRGYLERIHGVDVLNIYGLSETCGLELLAETGTDLSKWENDNHFVSWLNLCPNNKISGGKLISSTLLKKKSNPASQAFRQAANAVQKSNHWLADYFRRMKAKGGHKYAIVATANKIARIYYKMVRYKQEFNPVDLEHYQQKYKQAKIAYLERKLSQLKKEVA

SEQ ID NO: 46592 - protein, 484 aa, unidentified
MPRCADRAISGGSFFYHLEGVFERMLYVGIDWSSGWLDLAVLDGAGVLLLERRIVYADEADPVAAYLDLLRSLARTWRSASVTGIEEVGLPFARALLAAGLRVVHVDPTLAARHRAALGIAKSDRADARLLADLVRQGIYRRVLESSPQAQALRVVAHAHRAAVEDRMEAVHALRAALERAWPAAITAWPASRGGLSSPQALAVLRAAPGPRAADLLTRARLADLLREAGRTRRLEDEAERLHLAFSRPAMLLHPQLEEAEAIRIADLAETLSSAVARVRRLEVHLACHYRRHRHHHVTTGIPGIGDILGAQLLAEIGDRPGERFGDARALAAYAGVSPVTWSSGTIVRVSLRRASSRLLRSTLHRAAFSWSRHSPGAAAYYRARREAGDPHTTALRKLGRKLIMCLYHCVTTGVGYDDALAFGYTPGPGAPTLARQPLLGEQDVARARDLLALPNASVSAVASTLGVSRQSIGRHVLGRPRSR

SEQ ID NO: 46593 - protein, 347 aa, unidentified
MVTFGGDSHKRSHTLVAVDENGRQLAACTVAATSSGHMEALGWARQWPERRWALENCRHLSRVLERELLSAGEAVVQVSPKLMGSARRTGREQGKSDPIDALAVARAALREPHLPVAQLEGKSREVKLLVDHREDLVGERTRIQNRLLWHLHELEPGYQVVASGLLRTVILGEVRMRLENRTGVVAEIARELVERLSELTRSVKRLQRRIEALMEELAPALLRLPGCAGLSAAKLVAETADVRRFRSSAAFAMHNGTAPIPVWSGNHERHRLNRGGNRQLNVALHRIAITQMRLGGPASAYIARRLAMGNTKTEAIRALRRQISDEVYRRLRQDDSERSTAPIAAAA

SEQ ID NO: 46594 - protein, 415 aa, unidentified
MKRRPSRKHSRSERRPILAGNRAVVGIDIGKRKHAATAVSPQGEVIARLASFPNTREGVDLLERKVLRKVGGPRRTLVAMEATGHYWMCLYHELVRRGYRCVVLNPVQTHASFRARIRKTTTDKIDSLGIARFILTGNAKATRVPDEKTTELRLLVRHRRRLLQARTDMERYAGTLVDRVFPEYEGLFSKPFLPSARAMVREIGIAPEEIASRKDEVRDTLHRASRGRIAPEKVDLLLKRAKRSIGSRQAESLATEQLRSVFDYTETIQRQIGEIEEQLESRIEEMDSPLLSLGINPALAATIHAETDPITDFPGPDQYVAYTGLDPSVHESGDTIRGRSKISKRGSPVLRSALYLTAFSVYRKHDYFHRSYQKHRRQGRSHTSALVVVAHRLARVVWRLLTDNRKFTKRPPKRP

SEQ ID NO: 46595 - protein, 404 aa, unidentified
MSVHVAPVTSSTIVVAVDVGKTSALLSVTDAGHHRLFGPSEFAMNRTGLAAVLARVVTSVPLSGQVKVGVEAAVHYHRPVLDHRWPDGWEVLELNPAHVAEQRRVQGRRRIKTDVIDLEAITELVLAGHGSPVTDRDVVIGEISAWAVHRSRRVATRTATKNQLLGQLDRAFPGLTLALPDVLATKIGRLVAAEFADPTRLAGLGVNRLIRFAATRDLQLRRPVAERLVAAARDALPTRDAVIARRILAADLALLADLDDQIQSAETALGSLLPRSPYATLTSVPGWAVVRVSNYAAALGDPKRWPGPRQIYRASGLSPMQYESAHKRRDGGISREGSVALRRALIDLGIGLWLNEPAAKTYAHGLKDRGKHSGVVACALAHRANRIAYALVRDHATYEAARWA

SEQ ID NO: 46596 - protein, 346 aa, unidentified
MQHYVGLDVSLKQTAVCVVDQAGKIRREGMVTSDPKAIADFIAANAPQVVRIGFESGATSTWLWTELKKFGLPVICIDARHAKAALKMQINKSDRNDAVGIARIMQCGWFKEVRLKDLDSHAIRALLSSRALLVELKRDLENQIRGLLKNLGLVIGRCKLSTFTARANELIHGKPELAAAVEPLLKAREVIGRQIGDLDRKVLRLARSVPQVRRFMTVPGVGPITALCYLATIDDPTRFKKSRSVGAYAGLTTRRYASGETDWTGRISKCGDGMLRSYLYEAANVLLTRVGKWSALKAWGMRIAKRRSLSKARVAVARKLAVILHRMWIDGTEFSWSSEGTAMKPA

SEQ ID NO: 46597 - protein, 343 aa, unidentified
MQTVTTIGLDIAKSVFQVHGVDAEGNVLIRRKLKRRSVLAFFQKLSPCLVGIEACATSHHWSRQLKRLGHTVRLMPPAYVKPYVKRQKNDAADAEAICEAVTRANMRFVETKTPEQQSCLMLHRTRQLFIRQQTSVINAIRAHMAEFGIVAPVGRKGVEQLLAIVTDASDQCVPEVARACLIALAAQLRMLKAQILEFDRRIMAWHRSNETSRRLDAVPGIGPALATALVASVADPKAFRSGRNFSAWIGLVPKQHSSGGKDRLGNITKQGDRYLRSLFTAGALAVIRYAKINGTQHRPWLTALLARRPTKVAAIALANKIARMAWAMMAKGERYKEPVALAA

SEQ ID NO: 46598 - protein, 381 aa, unidentified
MTTLATRNTQETTIEGTLFVAFELSEKTWKLGFTTGHGQKPRERTVPARQQERVLDEIAQAKRRLGLPDTAPVVSCYEAGREGFWLHRFLQAHGITNHVVDSSAIEVNRRRRRAKSDGLDVRKLLSMLMRYEQGERHVWQVVKAPSVEAEDQRHLHRDLETLKQERASTTTRIQGLLSSQGIRVTSLAKLPEQLDTLRLWDASPIPPGLRRRVLRVYAHHQFLSQQIAALEAERRALLHTSQEAPIEKVRQLMQLKGIGINGAWLLVLEFFGWRAFKNRREVGGLAGFTPTPYQSGESAREQGITKSGNRHVRWMTTELAWSWLRFQPDSSLSCWFRERFGGGGKRLRRIGIVAVARKLLIALWRFLETGVIPAGAVLKAG

SEQ ID NO: 46599 - protein, 373 aa, unidentified
MQEFNKFIGLDVHKSTIAISIAPEDGGEVRYFGEIKNTKEALTNFVNKISQGSLKLSFCYEAGGCGYEVYRLLRNIGHDCMVVAPSLIPRKAGQRVKTDRRDSLNLARLHRAGELTGVWVPDAMNEALRDLTRAREDMKHLQRQAKQRLIAFLLRHGWTYSGKSNWTKDHFNWLETVKFQHAAQQIVFQEYVDTVKYCGKRVESVTQQIEICSRESACWPVIESLMALKGIDLITAATIMAEIGDLTRFDSAPKLMSYLGLVPSEHSSGSSVRRGGITKTGNSHVRRVLVEAAWTYRFPARKTAHTQKRAKLTSDAVQEISWNAQKRLCQRYKELNANGKIKVQTCTAIARELAGFVWAIGQTVPLKQSANAQ

SEQ ID NO: 46600 - protein, 308 aa, unidentified
MLSGRAGSNKHKGLYPNALYPDGGFHHEKHTQELSKDLANAKFAGIDFHKRTSVVAIGDTHGGLIQQVTLINEERIIREYFQGFVGLECVIESCRGYEWLVELLEELGHTVHMGDSRSIKLIAVTRCKTDKIDSKILMELLAKQFLPTCYQPSATERLLRELVRHRAQLVRTSVKHKLRVHANLAKENKCIYAPFSLKGRQQLKEVKLSEPRRQKVDDDLEVIDFLELKIAEQDAKVKYVARSNPDVALLKTIPGFDVLTSIAFIAEVGDISRFRKANQVAAFLGLAPRVYSSGDTRRNAVSLNAAPN

SEQ ID NO: 46601 - protein, 415 aa, unidentified
MSERKQWYAGVDWGSQSHCVFLMDETGRKTGEKIFKHGGEGLAEMAAWLMTTSGAAEPSQVLAAIEVPHGPVVETLIERGFKVHALNPKQMDRFRDRFTMSGAKDDSRDAEVMASSLRTDPRCFRALAVADPVIVELREWSRIAEDLSVERNRLANRLRAQFWRYFPALLELESDMGAEWLLDLWESAPTPQKAKRLREATIAKLLKRHRIRRLDATAIMKAVRGAPVHVAEGTVEAASAHVALLIPRIRLLNRQIKDAHRRIETLTSRLMSSGEVEPGQNKQHDAEILASLPGVGRTVLATLLAEAWDALQRRDYAALRSLAGVAPVTKRSGKSCIVVRRQACQNRLANALYHWARVAMQHDLRCRAKYAELRQRGHSHGRALRQVGDRLLNVACAMLKSGTTFNPSLVAQKTA

SEQ ID NO: 46602 - protein, 347 aa, unidentified
MRFYTNQHPFYCGIDLHARTMYVCIVKHDGEIMLHRNMKAAPDLFLKAIAPYREGLVVAVECIFTWYWLADLCAQEGISFVLGHALSMKAIHGGKAKNDKIDSHKIAVLLRGGMLPQAYVYPAQMRATRDLLRRRTHLMRKRAELLAHVQNTNSQYNLPEIGKKIAYKANREGVAERFADPAVQKSIEVDLALSTYYDQLLGDVELAIVKAAKHHDANTLYLLQTVPGIGKILSLVLLYEIHDIDRFPTVQDFVSYCRLVKCAKESAGKRLGTSGKKIGNAHLKWAFSEAAALFLRNNPVGQKYLARLEKKHDKGKALTILAHKLARAVYYMLKRQTAFDMDQFLHS

SEQ ID NO: 46603 - protein, 435 aa, unidentified
MRKIREHAAGIDIGAKKVFVYAEGQKVKSFFTFTEDFQSVCSYLKEHKVETVAMEATGVYWSILYEMLEEAGLDVWLVDGRQTSQVPGRKTDVKDCQWIQELHSLGLLNRCFVAREDIKELRSYHRLREDHIRTSSMHINHMQKALTEMNIRLKEVISQIHGVSGMRIIKAILRGERDENKLLNLCEKSIIKNKKEQVLKSLKGRYTSSGLFALQQACDAYEFYQNQIYQCDKEIERIIHKMGNGSKDKDLLKARKAIRHNKPSVKDLGANMINIFEGRDATVISGITDYTWLQLLSECGTDLSRWKSEKHYTSWLGLAPGQHWSGKMKKNKRKKGHPKAGQIFRQIAQSLIISKKTALGAFGRRIRARKGPAIAIKAMARKLAEMYWRVMVKGSDYAEVGIAKYEEQLLQRKRKSVQKLAKELNIQLSVMTPVT

SEQ ID NO: 46604 - protein, 340 aa, unidentified
MNVTTYGLDVAKRVFQLYWVDATTGEIVNRRFGRDELIAFLAQRPAGRVALEACGSGHWWARQIKSLGHQVVLLHAKYIRPFVQTNKTDAADAKAIWTASRQPGMRTVAAKTEDQQAMLSLHRMRAQLVKFRTMQVNQLCGLLYEFGITFRAGRLAGLAEIRRRMTELEVTLPERVLKSLQDQLKRIDALEQEIDELEKPMGAWQKQEAACRAITEIPGIGRLTATALVAMIGDAKTFKSGREFASYLGLVPRQSGTGGKIRLGSISKRGDPYLRTLLIHGARSVLSHAKAPSDWQKQIQARRPANVAAVAMANKMARTAWAILAHGRAYQQDYVSVKPA

SEQ ID NO: 46605 - protein, 422 aa, unidentified
MRMKKYIRQIEKRQRIGIDTMVIGIDIGKEFNAVCLMDKEGYVLGRYPKIYNSRKGFDYFRAVVEQMKRDRGFSHVLIGMEPTGNYWRKIAFFALDQGYEVRFVRTTALKHQRELDESSSAKSDMRDAFTIANIVREGKYIDTVIEDGVFRDLRTLSHTRERLVRYNTGCAHVLKAVLDDYFPELTGIFWSMKAKGLWALLDRCPFPEDIRNVGPDAVQELLSRITKRKACEKAQAVYRAAMESVGLKVIGSADRMRLGVCLDEVKRSEQRLRDIEHQIADLLHKVPLAEHILSIPGIGVVTCGVFFGELGNPDYFKDPKEIVKYAGYDPKENDSGLHTGRKIISKKGRWLLRKYLYFMAMRVVHRTVFFKKYYENKQRGVLRPLAKKEALCAVVIKLIRVIFALMRDKRMFTEEMSCRRAA

SEQ ID NO: 46606 - protein, 408 aa, unidentified
MNENTTNGPAALVAIDWSDQKHDIALLPAETERVEYLHVAHRPQDLTDWICALRQRFGGKEVAVAIEQKRGALIHALMGYEFLQLYLVNPATLASLRKAFKQSGAKSDLLDRDLLLELLQKHRDRLTQWEPDDVQTRHLALLVQDRREAVNECTRLGEQLLDTLKNYFPAMIDLAGPDLTTQLACKLILRWPDLAALQRAKVQTLRRFFYAHNFRRPKSLDKRLEALQAALPLCEDVAIIGAGRLKAIRLARAILALLPAIKKYDQQIAELFKVHDDAAIFASLPGAGPALAPRLLVAFGSRRDRWRHSLDVATYSGIAPVIEQSGKRSIVHWRWACPKFVRQSLHEFARSSLRFCPWANRFYQTQRARGKNHHGAIRALAFKWIRILFRCWQNRCPYDPTKYAPANL

SEQ ID NO: 46607 - protein, 415 aa, unidentified
MDVLVARCAGLDVHKDTVMAAVRTPDEGGRRGQVVREFRTFTDGLVALRDWLRSEGVTQVAMEATGVYWKPVWYVLEEMPGVELLLVNARHVKNLPGRKTDVADAAWLAQLLECGLLRGSFVPPRAVARLRDLTRYRTKIVGERVRETQRVQKLLEDAGIKLDSVASDVLGKSCREMLEALIAGERDPQVLAGKARTNMRPKIPELRRALVGRFDEHHALLLRMHLDHVDQLSAMEQRLGEEVDRLMARFAEEATRLITIPGVAKRTAEAVVSEIGVDMSRFPTADHLASWAGLCPGNHESAGKRKSGRARKGNAALRSALVEAAWAAAHTNDSYLAAQYRRFKRRFGKKSEGKALFAVAHSMIIIIWHVLAEARSYDDLGPDYFERRTTTASRQRYLVRELEKLGHTVLLEPAA

SEQ ID NO: 46608 - protein, 400 aa, unidentified
MKGFFTYEIIGIDIGKNKHFFCVMDQQTGEIISQPVSFSNDKEGFDFLVQKIKSYPKDSILIGMEDTGHYHFALLKYLLDLQYTVALINPKTTDFNRKMQGGITKNDKLDTINICDVLDTPERKKQYRITKVNSFDLYEQKQLTRHHHNLKEEENVYKNRLQKCIDIVFPEFNKLFNSKYGIVYMNILKMFGSAENIANTDIRTIRKCFEIEGRGNRISLTPERLKECARSSIGISSSAEVIQIKHLTAQIELIEEQLTEIDKKIEEFSIQNNSPILSIPGISHFSGTSILAELGDISNYSKPSQIIKFAGVAPLHYESSQFNAQHTAITKKGSKYLRKTLYQIILPVIRHNPVFNKYYQLKISQGKGHRCAQGHCVRKLLRIIYHLLKTNQQFDPQLLR

SEQ ID NO: 46609 - protein, 341 aa, unidentified
MDKTLFCGIDLHSNNAVYVITDEQDRQLFSKRLPNDLAVVLGALEPYRDRLKAVAVESTYNWYWLVDGLMDYQYPVCLANPAKMEQYDGIKEANDLTDAAFVTHLLRLGVLPTGYIYPRQDRPVRDLLRRRTLLVRYRTSLKQSLQNMVVRQTGRSLGWRKVRDLDNEARAELLGDDDCLPFVADQQVELIELLDERIKRFEQKVLEHAHLRSAYECLLTLPGVGVILGLTIMLETGQIERFKRVGDYTSYCRCVRATRSSNGKKKGSNNSRNGNAYLSWAFVEAVHHAIRCCPAAKKFYDRKMAKRNGALATKALAAKWTKAAYYMMQRQEAFDLKRVFG

SEQ ID NO: 46610 - protein, 355 aa, unidentified
MEYGAIDLHKKESQIRIVTETGEIIDRRIATTRDRFTATFWGRPRMRILIEASTESEWVAQHLETLDHEVIVADPNYAPMYGQRTRRLKTDRRDVAALTEACQRGIYRVAHRRSARQHAVQSQLNVRQELVQARTRAISLARAITRAAGFRVRSGRTETFLTRLDALDLPGPMKATLLPLRSVLEVLDDELASADDRFAAMVANDVVVKRLTTLPSIGPITASAYVAALDDVSRFTGAGQVASYLGLVPREYSSGERQYRGRILRSAHPHVQSLLVQAAWRLSRSSSPDTAGLRTWALAITRRRGKKVAMVALARRLARILFGMWRDESEYHANRIRATPSDLAAITDRAARAAM

SEQ ID NO: 46611 - protein, 354 aa, unidentified
MNSTQVFEKRKIAVAIGIDLAKDHCDVVAYNADNKICFSKANMPYPKLMEWLANTQPAVVLMESCKGCHVRARDIADLGHDTRLVKGADVKALRNVCQKNDIRDADYIARLLYVPGTKFVFVKNQRQQSLQFLQNEYKSLQELRIRVGNQIHAGLEEFGCPGSKSKKFIQSRMMAHLEKNAELIPDEVMASFLRRRDMWLNLFEQEEQAKTRMEEIAMTDDDAKRIMTVPGVGAQTAVGMLVHIGGDIGRFKNSGQFAASIGLVPKQNSTGGNITLNGITKCGPKRLRANLVQCGQVILMYADKLKGNFGDWVRKLRDSGKKRGVIACAIAAKIAKIIYRLMKDKVDYTPVPSR

SEQ ID NO: 46612 - protein, 411 aa, unidentified
MENVFPCCAGLDVHKESVEACVRRIEPDGRLHQQTQHWGTMTCDLLAMADWMTAQGVTHVAMESTGVFWKPIYNILEGRFTMLLVNARHLKQVPGRKSDVRDCQWIAQLLQYGLLKGSFIPPRSQRELRDLTRHRTQLVEEKARAANRIHKVLQDTNIKLSSVATDVLGASGRAMLEALIMGEEDPVKLADLAQRKLRGKIPQLEKALEGHLTEHHRFMLKLLWKQLAQQEELIAELDRKIEEQTRPFEAEIDRLDAVPGVDRRVAEVVLAEVGPDMKAFPTHENLASWAGMCPGNEESAGKRVRKRITPGNRWLKRTLAQATWAASHSKNSYLASQYRRLAGRRGKKRALIAVGHSILVIFYHMLKTGTSYTDLGGDFFDRLEPQRLTRYYVKRLESLGHKVTLESCAAA

SEQ ID NO: 46613 - protein, 363 aa, unidentified
MEQITRGQVVRVGVDLAKRVIQVHAVDADGRVLISRALARDKFVAWCGQLPAGCIVAMETSSSAHHWARKIASLGLSARIIAAQLVSPYRRQGASGKNDANDAAAVCEAASRPGMHFVPVKSIEQQSMLCVHRLREGFKAERTACINRIRGLLAEFGLVFAQSPAALEAVLADVLEDASNEMNALARRVLQRAHEQWRELDAHLAWCDERIAAHAKDNDAVKAAATLIGIGPVTASAAIATVVDFKQFKCGAQFGAWLGLVPSQHSSGGKTRLAGITKRGDVYLRTMLIQGAKSAVMTAHQRNDPISRWALALRERSGWQKAVVALANKNARILWAVMTKGERFDARHVSLKPGALAGAAARH

SEQ ID NO: 46614 - protein, 358 aa, unidentified
MIAAEIERCAGIDVGKEQLDVHVMVGPLAGEPRCEYRQFGTITAELKRLRQWLEAEGVTDVVMESTGSYWKPVFNVLEEGFKVYLANPHEVKNRKGHKTDKKDSWWLAHLLRHAMIRPSFVPPCGLRERRDLTRRRRKIIGVATRERNRVEKILQDCNVKLRSALSDLFGVSGQLMLEALLKGKATAEQIAQFARRKAKRKIPEIIAALEGHRMSDHHRRMIRYSLEHLRFLEEHIQELDKQIVAKIEALGYTGQWQLLQTVQGVKENSAASVLAEVGPDMGQFGSEKKLSSWAGVCPGNNRSAGKNKGSKTTKGNRWLRGTLIESAWGASGKKNCFLKQKFWRLATKKQVSRRRPWP

SEQ ID NO: 46615 - protein, 350 aa, unidentified
MIIIGVDFHPEFQQIALVDKDTGEFQEKRLAHRDEAEKFYRGLAAAGQKVRVGMEASGHARWFERLLAELQIELWIGDAAEIRTKRVRKQKTDRQDARLILQLLLEDRFPQIWVPSWENRDLRQLLWHRHRMVQARTRIMNQLQAVALNEGLRCKKRLWREHGREQLESFRLAPWASRRRRDLLELLDRLNPTIAELSQAIEQEVEKCPEARRLMTYPGVGPLTALAFVLIIGDAERFQCGKQVASYLGLVPLEDSSGNRRRLGHITKQGSSILRFLLVEAAQVTARSLPQWRSKYVHLMMRRGRKTAKVALARRLAVHLYWMMRQGWDYPQWVKFGSHAGQPGHRDGVR

SEQ ID NO: 46616 - protein, 347 aa, unidentified
MTIDWAYREAQWCALSAGGELAGEGRIAADRDGLARLVLELGDEVRACLEMMSGALWVRDELVGCGWQVEVADARKVKTVAPLAAKTDKVDARLLAELSRRELVPALWLPSLDERALRERLRRRMHLVRLRTSAKGRIFGLQTQWGVRVSLARLRRADGLTLLERAGVPELWRRSVSECLAVIDFLDARLQPLDRELKPFAHADPRALLLDTIPGVGELLALTIAVEIGEISRFAGPEKLVSYGRLAPRVHQSGQARPRSGPLSKSGSRLLGWAAVEAAQQAWRESNPWHELYLDVSHRSGNHNSAKAAVARKILIAAWHMLSRNEPFKPAPRVTSVPASSRLALAA

SEQ ID NO: 46617 - protein, 344 aa, unidentified
MMTHFVGLDVSQKMTAICIVDNAGRRLWRGQCPTAPEQIAAMVRRHAGDDSRIGIETGAMTPWLVHELRALGLEVICLDARHARAALKMQINKTDQNDAEGLAQIVRTGWFRSVHVKSFDSHRARALLGARAQLVGMTTRLSNHIRGVLKTFGLLPGAMRGLRFDRKVEVLLEDRSDVAPIVRPMLAAWRQLREQISAFDKAIRVLVRSNSPCRLLMSVPGIGVLSALAYVGTVEDPARFSQSRSVGAHLGLTPRQYQSGDVDRSGRISKCGDTLARTLLYEAAVVIMTRVKKASELKDWALAIAKRSGVGKARVALARKLAVILHSVWRSGKPFRWSEVAIAA

SEQ ID NO: 46618 - protein, 365 aa, unidentified
MVDRVILGYEPDLSEDRHARSADQSPNGYSSWSSDWQGWAESAEMRERTMTGVAIGVDVSKERLDVAVWPGDAVWEVTNDGEGIEGLVAGLRERKPSRVVLEASGGLEVSVVAQLQVAGFPVVVVNPRQVRDFARATGELAKTDRIDARMLARFGAVIQPELRPLATEQEQELKELVRRRRQVVEMLMAEQQRLTRTISREVSRRIEAHIRYLREETDTIDRTLQARVQATPGWKADVDLLQGVPGIGPVLSIGLIAELPELGSLSGRQIAKLVGVAPLARDSGVLRGHRHVWGGRASARKLLYMAALVATRYNPVIRDLYQRLLSRRKAKKVALVACMRRLLTIINAMMRDRTPWTEALAASQP

SEQ ID NO: 46619 - protein, 355 aa, unidentified
MSQEKYIGMDVHQATISVAVMEAGGKLIMECLLETKASTIVQFIQGLQGTLSLTFEEGTSAAWLHDLLKPHVSRLVVCDPRKAALLKEGSKSDRIDARKLAELLRTNQLHPVYHEEHGIRALKELGRSYLTITKDVTRVMNRIKALYRSWAISCAGTSVYAPRHRAEWLAQLVEPGVRVRAEHLYRQLDGLQPLRLEARRELLQESQKHAAVKLLRQIPSIGPIRAALLVALLQTPHRFRTKRQLWAYSGFAVETHDSGEYRNVRGKLQRNRERITVRGLNDNHNKDLKNLFKSAAISASTRSGPLHDFYVARVEKGMRPTMARLTLARKIAAITLTMWKKGVRFDPQNLHRQAA

SEQ ID NO: 46620 - protein, 314 aa, unidentified
MQDVFIGVDVSRDMLDIAGSPGKEHLAIANRQRDIEHWLEGLPGDSCVAMESTGRYHQLLAKLARAAGLHVYVLNPKRVWHAARGDGRRSKTDRIDAQVIAKFLRDHIKDLHEWCPGTSLQSEIAMLERRRHCIERHCTAMNLSLQDVDGLDVEIERFQQSMKAMRHAIDQRIQALLGRDEEMARKSELLTTVPAVGKVGAASLAVLFARVPFKRSDSVVAFVGLDVRVSDSGTHRGRRRLTKLGPAHLRRQVWLMGFAACHTKLYKPLYALLKARGLKPTEAIMILGRRILRIAWAVWRTDKPFDAQLVGKRT

SEQ ID NO: 46621 - protein, 339 aa, unidentified
MKDVSTIGLDIAKRVFEVHGIDRSGSVRVRRTLRRAGVLAWFAKLAPCLVGIEACATAHDWGRELIKLGHDVRLIPPAYAKAYVRRNKNDAADAAAICEAVSRPSMRFVAIKTAEQQAAAGLHKVREMQVKQRTMLMNQLRGLMAEFGIVVGEGPQHIGELLAILADPADARIPAPLHEALLSTASLLGEVQRRVQAIDKQIVAWGRGSKTCRHLRTIHGYGPILSSAMAAMVVNPAAFASGRDFAASLGLVPRQDGTGGKIKLGPISKRGNGYLRRLLVNGAMSVLCSKRARQDPWLVKLLKTKKRKVAAVALANKMARIGWAVMVRQEDFRSMPVAA

SEQ ID NO: 46622 - protein, 323 aa, unidentified
MSSSPQTESSCYVGIDISAERLDVQVWPVEQRHSVVYDSSGVTQLIEVLPPLKPTLIVVEATGKLEISLVAALAAAELPVVVVNPRQIRDFARALGLLAKTDRIDAYVLARFAASVQPPRRAWPTEQQQALQELVNRQRQLVEIRAAESHRLKRTRTSTVRHNVQIHLAWLDQQIQGLDRQIRQLITSSPLWREKDQLLQSVPGVGPKLSSVLVAHLPELGRLNRRQIASLVGLAPFNHDSGQWRGQRFIGGGRAKVRCTLYMSSLAAAYHNPVIRSLRQRLEHQGKPFKVVLTACMRKLLTILNAMVKNGTPWNSALCRNLS

SEQ ID NO: 46623 - protein, 411 aa, unidentified
MQVIYERCCGLDVHKRTITACRLRWLGSEWQKEIRQFGTMTKDLLALSDWLVKEGCTQVAMESTGVYWKPVYNILEGQVELLVVNAQHLKAVPGRKTDVRDAEWIAELLAHGLLRGSFVPPPSVRELRELTRYRSSVVRDRARTVNRLQKVLEAANIKLASVVSDIDGVSARLMLEGLVAGQRDTEQLASLAKGRLKEKHGQLVEALSCRLQPHQSFLIAEHLAQIDYLEGAIERLSGQIEEKLRPFEQQIGWLDTIPGINRRTAEVLWAETGGDMGRFASARHLASWAGMCPGNNESAGKRRSGRTRKGSPWLRHCLVEAAHGAAHTKNKYLRSQYHRIAARRGKKKALLAVGHSILVIAYHLLTRKQAYADLGANYFDERDRQAVTKRCVNRLQKLGYEISLEKLQMAA

SEQ ID NO: 46624 - protein, 337 aa, unidentified
MKVTLIGVDLAKTIFQVCGVNQASQQVFNRQIKRAKLMIFLAQYPGVTIAMEACSGSNYWGRELEARDHQIMLIPPQHVKPFVKGNKNDRNDAFAICEAARRPHICCVRPRSLSQTDTMLAHRILERRINERTALINQLRGLLNEYGIVVARGKEKLRSELPFILEAADNGLTIIGRQYLRQQLEEWQAADEAIASLEKAIRQHVRDSEHATRLMGIKGVGEKISSAAEAYVGNGSGYKNGRHFAANLGLVPKERSSGGKQRLGRITKRGNLYLRRLLIQGAWSVIRYADRGDDRLSRWAQQIIARRGKHKAAIAVANKLARIIWAISYYQTDYKAA

SEQ ID NO: 46625 - protein, 358 aa, unidentified
MKYVGIDVHKKMCQAAILEEDGKILDEIRFLNTPEEIEEFAGKLSTFHDEVRAVVESTGNLWIQIHDRLEKHGFEVALSNPGKTRLIAEAKVKTDKVDARTLAALLRADMLPTCYVPGEELRSRRELLRHRLNLVKTRTEVKNRIHGLLDKHGLRMPGTTAFSKENIEWLRGLSLGFMDDAILRSDLAVLEAVDGQVTLIEEKIAVLAIEDRRVRLLMTMTGVGYFTAMLVVSEVGDIGRFRGDKEFASWMGLVPSIHQSGERTRIGGVSGPGNKRLRWALVESAQTAVRHDARLGGMFERLSRRRGAGCAVVAVAHEMARIMYFMLVREEPYRGENRGLTERKLKSMSKRAFDGLRS

SEQ ID NO: 46626 - protein, 340 aa, unidentified
MEKRYIGIDLHRDRFTCCMRLDNGRTYLTDWKLDKLAAFVKKLRPTDEVAVEITGNTRLFHDTVAPHVARVVVVDSNQFRVISRSVKKTDPNDARLLALYLAKDLLPEVRMKNKQQARVASLTQTRDTLVKQRSALKNKVNNLLSARGLNLPKEALSSEKRLAEVLSLPFDELLLVELRVIVDQIRSLNKSIGELDKAIAEASSELEGHTSLTSIKGIGATTSAILLSVIGDVNDFPDEGRLASYFGIVPRVSNSNQTEHSGRIHKRGTKLGRTALVQSALIAANYSPYLKRFYERVKARRGAGKAIIALARKFLGIIYRTLKNKWVFQDFPNFVLAEGA

SEQ ID NO: 46627 - protein, 350 aa, unidentified
MDIIGLDLHKRESQLCLGAEDGTITERRIVTSRERFTVVLGNRPRAKILLEASTESEWVARHLESLGHEVLVADPNYAPMYATRSRRTKTDRRDARTLMDACQTGAYRLAHRLSDPRRHVRAELAVRDALVRTRTRYVALAKTLVRRDGLRVASSESHLVAQRIGALSLSPVLAAELQPLFTVLAPLNEQIAAADGRIATLAATDPLVARLATAPAIGPVTASAVVATVDDIGRFRSAHQFEAYLGLVPGERSSGEKRRVGPITKAGNSRVRWLLVEAAWRLLRTKSAEAAALRTWAHAVAGRRGKKIAVVALARRLAGILYAMWRDGVPYDASRIRGPRIAAEVTARAS

SEQ ID NO: 46628 - protein, 434 aa, unidentified
MRIVYERCCGLDIHKASIAVCVVITRDGKIEEETRRFGTMTADLLELAAWLKARGIEHVAMESTGVYWKPVWNILEAEGFDLLLANAQEVKIVPGRKTDQKDSQWIADLHQHGLLRKSFVPPRQVRDLRDLTRTRATLAQEHSSTCNRIQKVLEDANIKLGTVASDVFGASGRAMLLAMMKGESDAEALAELSKGRLRSKIPELRRALEGRVTGHHRFLIDRHWRQMESLENQMRQFEEEIAERMKPTAEEIARMRESLPAEAPLPPSPREEAIRLWMELPGVGLTTACSMVAELGVNMEQFPSSAHVASWAALCPGNNESAGKRMSGKTRKGNVWLRRTMCEAAWAAAHSKKTYFAAQFGRIAARRGKKRALLAVAHSLLVAAYEMLKHKEHYREFGADFFEGLNKDQVKRRLVQRLAKLGFQVTVTQTPTAE

SEQ ID NO: 46629 - protein, 328 aa, unidentified
MLLVACDVSKATVDAAWFDEQRQRWLERSKIDNNRRGWRGMLGWLEKSSGKSRAAFTLVVEATGVYHRPFVDFAYGQGLHVIVTNPGRAAENARSHNQLNKNDRLDARSLHGYGQELKKIFEYQPDSPEISGLKAMLSRLRQLDKDLTRERNRLEKCPYIAESQPLAASIRRQIRALEREQKLIQGQIDELIRSQPDLKHLQSLMCSIKGVGKVMSQWLLPLLYRQQFTSARQLAAFLGLTPIHKRSGTSLNKRGRLSGRGNGYVRSRFYMPAVSAITHNPELKRSYDTLIRRGKTDKQALTAVMRKLVHICYGVVKNNEPYRCPATA

SEQ ID NO: 46630 - protein, 354 aa, unidentified
MVASTMVPVVRHMYYIGLDVHKKTISYCVKDASGQVHQEGQIGATRWELDGWMKTLPQPWTVAMEATIFTGWIYDHLLPHAQQVKVAHPLMLRAIAAAKKKNDRIDAGKIADCLRCDFLPECHMASTAIRDRRRTLRYRHLLVRQMVQMKNRISGLLMETGVSHNKRRLHKVGYFRELLSSNEEVNESIRPLLRVSRDTIVRLQKAEYALVSSLQRDPLLAERIKRLRTVPGVGPITALTWALEMGEVSRFPSIREATSYCGLCGDEKSSADKVMRTPLSKQRNKHIQRVLVEAAKLAPRQDHNLALVYEREKQKGNANRATLAVARKMVAYLLAVDRGQRDFVPFADPRSAAA

SEQ ID NO: 46631 - protein, 341 aa, unidentified
MSIVGAFDVHRRQLTFDFLDTVTGEVKRGRVVPADREHLRQWLARFAGCDDVHFALEGCTGWRYAVEELAAAGIIPHLAEPADTAALRGKKRHAKTDKTDSRHLRSHLAAGDLPECWIPPAHVLEARAVVRLYKDLLDERGCWHQRIAATLFHQGVPVTASMSTGQGRAAVADMDLSPAGRQAVETGLRQIDRLTSELEPLRRQLDMLSRRQPGCRALRATQFGVGAVTSVAIWAELGDVRRFGNSDDVIRHTGLDITVYSSDGKRSAGHLSRQGPQLLRWALYEAAKCAARPAAPDHGYYVATRDRRTGGLATLSVARKLARRCYHTLRELGEEAIAPAA

SEQ ID NO: 46632 - protein, 389 aa, unidentified
MEARTVNNLPPAGTHDDAVCCILAIELSKKSWIVAVNTPLSDKISRHTLKPGDGKELLGLCERIRTRVARETKKRVEMVSCYEAGYDGFWLHRLLQAHDIRNHVIDPASLQVDRRARRAKTDRVDAERLLRSLMAYLRGEPKVWSVVRVPSVAEEDDRRLHRERGRLINERIQHVNRIKGLLAIHGIYDYQPLRRDRIQRLEQLHTADGRTLPPRLEAEILRELQRLEIVIGMIKTIEAKRDAIASANTETERGSAKKIQHLAKIKSIGPEFATTLVGEVFYRSFDNRKQVASYVGLTPAHFQSGAMSRDQGISKAGNAKARTVMIELAWLWLRHQPDSDLSAWFRDRVGKLKGRIRRITIVAVARKLLIALWRYLETGLVPKGAALKV

SEQ ID NO: 46633 - protein, 400 aa, unidentified
MLSIGIDVSKGKSTVCGMKPGGEIVYTPFEVQHTREGMSELVSLLRGSGEEVRVVLESTGSYHCPVVAALLENGIFVSVVNSLRMKRFCSQSIRRVKTDQIDAMQIALYGLAYWQELQPTRLPENTYRELQLLARQYYQMTSLLIKAKVDFNALCDQVLPGMQELMNDHAGRHKLSDFVLRYRHTTHILEMGETRFRKDYCKWAEKKGYRNRERMAALIFATAQNGIPVLPNAPSTQIVITEAIRVLHTVEASRDAILTQMQALAKTLPEYSLVREMPCIGDTLAPRLIAEIGDVRRFHSKRALIAYAGIDAPPYQSGKFCANNRHISKRGNRYLRKTGYEVMQSYVMHKPANDPIFTFIEKKRGEGKSGKLAMVAGLNKFLRVYYGKVTELYRSLSAIE

SEQ ID NO: 46634 - protein, 369 aa, unidentified
MRKLSDPVRKVKAQVIGLDVHRRMTAYCILDRAGREIACGEIASRPDALERFVKEHVGRRKTHFAFESSGFSLWVYDWLVERYGAERVHVAQAKKIRAIANSQEKNDANDAFWLAYLTHEGRLPEAYVPPTIYRELRIATRERAQLVKRRTKIFHHIRAHLAHIGRDVPTRSLRAIRARRFLETLAAELPGARGYALKLTLRELDHQDEAIADWEARITEMAEELPEARAIQEHIPGAGPVLSAAVAAESGPIRRFHTPKAYAKYTGLTPSDRSTGGRMIHGKISREGSSHLRWALGEIVMACMRCRRGPGVAVGQWVRVKQKRMSIKGKARCAAARKVAESIWRLFHYGECFDPERPFGGRLAGSRIA

SEQ ID NO: 46635 - protein, 309 aa, unidentified
MTIHPCFIGCDIAKHHLDLFDETSGTSLRIANTSAAIAAWLSALDDPGGSLVAFEATGPYDGVLRQALDQAGLRFVRINPGRARDFARATGRLAKTDAIDARMLAAMARSLALEPDAGTDPARDALAQLHKRRDQLVETRAAERVRHSEGQDPGGSLARHLAWLDAEIATLERLVTQALRADQTLARTQAILRSAPGVGPVTATTLIALMPELGQTSPKAIAALAGLAPFNNDSGRHRGKRSIRGGRARVRRALYMAALSAMRSSPRFRAFYDAILKRSAAPKVALIAVARKLLTILNAMLKTNTAFQP

SEQ ID NO: 46636 - protein, 512 aa, unidentified
MLKIIANNYHFGSIERLGTQGPQDELRTQTLGRFYGELRSETLRLAVKEYSEPFACKCKTWQRRTSISASIQRDCVPNQKQSTKLMNSTTKFAATIGLDWANQKHDLWIQPADGSKAQHVQLEHTPEALHEWVAKLRERFDNRPVAIGIETSRGAVISALMAYDFIVFFPINPKALKDYRAAFSVSGAKTDRVDASLLEEFVRLHSDKLHALEPDTELTRKLAGLVENRRQLVDQRTRLVNQLHATLKTYYPLAESLLGAQMNKSMAAEFLARWPELQSLQKAKVPTLRAFFYKHNSRGAQLMEERLEAVQNAKALTTDPAIIEPARALVSALAAMLKPLHKAIAFLDKQIELAMDQHPDAAIFRSFPSAGPALAPRLLVALGTNRARFASAAEVAQFYALAPVVEQSGNSKTVRMRYRCPKFGRQTFHENAACAIRGEPWAQAYYAQQKARHDDKHHLACRALAFKLIRIYFACWRDRRTYDPAIYLNALEKNGSPLVAKLKTSTTTHDCE

SEQ ID NO: 46637 - protein, 468 aa, unidentified
MPIHPTPKKRQLDDLACVYPNAAGLDIGSAEIVVAVPPGRDPEPVRVFPTFTPDLHALAAWLVACGIDTVVMESTGVFWIPIYELLEQQGIVPFLVNARHVKTVPGRKTDWNDAQWLQKLHALGLLQASFRPDAEIRTLRTLVRYRAELIERRAPHINHMIQALKHMNIQLSLVLTDVTGVTGLAMLRAIVAGERDPERLAQFRQPGCKHSEAEIIKALTGTWDDAQLFVLHQAVDLFDYYTTKIVECDIKLEQQYQAMESRWEQDAPLPDLPPAKPESRSKNALTFNARAQIARVIGVDLVAVMGLSAVTVQTILSEIGTDMERFPTVKHFCSWLGLAPHNDISGGKVLRSRTMKVRNRANQAFRQAAQSVAKSDSSFGAYYRAMRARLGPKQAIVATAHKIARTVYQLLKTGEPYREESAAEYDHKRRERERKHLERRAQKLGYTLAPMLATTPESLPKPGGEGSS

SEQ ID NO: 46638 - protein, 343 aa, unidentified
MTLIGIDSHKDLLAAAWVDDAGRLIEYRPFQNTIEGHAEIVAWSQETVCSKVAIEGSGNYGRPLALALIDAGVDVAEVPPQMTAAARKGQRSNTKNDRVDAILIGQIALRDNDLPKPRPTGEIEDLRVVVGYRRELVQERNRAINRLHSDLEQIRVGYHRQITTRIGSTKSLQRCRDLLAKDRTIPAQIARKRINNILALGREIDALGKQIKTIITATETPLLDIDGIGPFVAADILTEVGDPTRFATKAKFAMCNGTAPLEASSGRLCRHRLNRGGNRQLNKAIHIAAITQIARPDTEGRRYFDKRLADGKTKREAVRALKRQISDRIWTALNNPPTTPPLT

SEQ ID NO: 46639 - protein, 448 aa, unidentified
MSKIKTKNETVKRISQLTVINPTVAGIDVSDKEMMVAYPISSEQLEVRSFGCFTSDLHTIAKTLKKFQITSVAMESTGVYWIPLFLLLQEYGFEVYLVNAKHVKNVTGRKDDESDAEWIQKLHSCGLLKASFQPDNMTRTLRSMVRHRKSMVSTSSTYLNRMQKALELMNIKLHTVISDIDGKTGLLIIEAILAGERNQEVLADLRDRRIKASREDIIKSLEGHWTTEHLFELRQCYQLYCTHREMIDECDKEIEKQLIEQIASKNEGVIPDIPKAKRKVSGKHKVPFNLTSYLKEILGVDVTEVFGISELSALTILSEVGTDMSKWKNEHHFTSWLGLAPNTKISGGKVISSRIKKKKHHAGQAFRMAANGLYNSKSPLGDFYRRVRAKAGAGKAVVATARKLAIIFYKMVANQEAFNPIALENFQEKYKQKKINQLKRKLEILEAA

SEQ ID NO: 46640 - protein, 323 aa, unidentified
MTRMICGVDVSSRWLDASIGRSGTPQRFANTPAGIAQLADYCRAHQVDLVAMEATGGYERQAFALLSEHGLPVAILNPRAVRQFAQSMGRLEKTDAIDAAMIAWFAEVNGAKPSTLSRPGQQQLRALVTRLRQLTDLRTAQKNQQRLIADPLVQASFDELLAVLQRQMRTLADTIATLIAADPLWRELDLAFRTIKGVADRTVARIMAEMPEIGTLSNKAVSKLAGLAPLAQDSGRHQGKRAIRGGRATVRDLLFIVASVAGRYEPDFIAFRERLAGAGKPPKVVRIALAHKLLVRLNAKAREIRHSLQSATQPALESIIPQS

SEQ ID NO: 46641 - protein, 316 aa, unidentified
MSHAATPVSRFLGCDVGKTAVVVFDAMSGRSRAIANEPQALSEFVSGLEATCFVVCEATGGYEDALLTALIAAGVPAHRADARKVKAFIRSFGTLGKTDAIDAKALARYGQDRCAELPRWQARDRERLRLQALVLVRRDMVRDRLAYANRRAAPGAEPAHAYLDALLESLAAQIKAVEADITALTVRCEPVARAVQTLMAIKGVGEKTAAGLIALMPELGSLDRRQAAALAGLAPHPRQSGDTDAYRKTRGGRPEVKRLLFMAALAARKHNPTLKAFYQRLVQAGKKPLVAITAIMRKLVVIANAKLKATHSLQVS

SEQ ID NO: 46642 - protein, 363 aa, unidentified
MKKIAYVGIDYHLHSLSIAVMLEEEKKFYDLIRLRNEDKVISKYMKKLSGKFEIKACYEASCNGYAFQRKMASWGYHCDVIAPSLIPKKSGDRRKNDFRDAKNLAQLYANGLLTVVHLPTEYEESVRSFIRCRLAFKESEKRVKQQINSLLLAQDIYWTHSKWTKQHLDWLGELQMPNEYLQQVLDEYVGHLEYLRTRIRYLDDQIEQLACSEIYAPSVKKLKAFKGISTLTAMVLISEITDFRRFPNPRALMAFLGLIPSENSSGDKQKGGSITKAGNNRCRSVLIESAQHYKKRPHLSLQMRHDLAQVDAQSANIAIKCLKRLHKRYWALTMKGKIHPVAITAIAREFVGFIWAMMQPHAA

SEQ ID NO: 46643 - protein, 358 aa, unidentified
MSKPTRVCRLDKVFDGCGRRRAFIGLDVHKRTINAAVWLDGRIVATWVMPANADKLAAMLAPHRAKIARVVYEAGPTGFGLARVLGRAGLGVEVVAPGRTPRASARENKSDRLDCAKLAEYAAKGLLKPVAVPSETQEADRQLVRLRDQLVKKRRTVKQQIRSFLLQHAIAEPRGLSSWSLAARAALRAQALGPQLRLCLDVLLDLLDELEAHVRRIERALSALAATERHAEAAAIARSHPGVGTVVAMSYLVEVHRGGRFRDPREVASYVGLAPMVRQSGQTRLDGPIVRTGRASMRALLVEAAWRWRMRDPAARRLFARLMRNTGSAKKAIVALARHLAINLWAMLTRREPYRAAA

SEQ ID NO: 46644 - protein, 340 aa, unidentified
MKIRILGIDLAKNVFSVHGVDGRGKTVLHRELRRRQLLPFMRQLQPCLVGMEACGGAHYWAREMAKLGHEVRLMSPQFVRPYVKSNKNDARDAEAICEAVGRPSMRFVAIKSQSQQDMMALHRVRSLLIRERTALMNEMRGLLAECGVITALGASALRRLIATIMAEPDDRVSGLLREILSEMNERLRLFEERLKHYDVRIAELARTDKRAGRLMAVQGVGPLTATALIAAVGDARQFRSGRELSAWLGLVPRQYSSGERVMLLGISKRGDRYLRTLLIHGARTTLRHAGRKRDSRSRWVVRLRERRGPNIAAVALANKNARVLWALLTRGEEYRIPVAA

SEQ ID NO: 46645 - protein, 362 aa, unidentified
MPKSTTIIAFDQHAATTVAAILLPGHRTSALQSLTSDSPTILRFVERVRRQGPVQCCYEAGPCGFELQRALAAHQIPCDVIAPALIPRRPGDRVKTDRRDAGQLAILYRAGALTAIHIPTEQEEAARDLLRCREDIRADLLRARHRLSKFLLRHGRRFTATKRAWTTRHAGWLQAQRWPLAALEQTHRAYVRAVDEAVGRLQAVDAELRDLLTLEPLRSRVERLRCFRGIDDLTALTIAAELGDARRFPSAPRVMAFTGLVPSEHSSGTKQARGAITKTGNAHLRRVLVESAWQYRHHPFLGPALRRRQQGAPTAVIDQAWHAQQRLHRRYRRLAARGKPTQHIVTAIARELSGFLWAALTH

SEQ ID NO: 46646 - protein, 318 aa, unidentified
MESHHFIGVDVSQRTLDIAAGETAQVLQLEHTERAIRGWLKTLPKGCRIGVESTGTLHRLLVRCAIAAGHLVYVLNARDLSHYARSLGRRAKTDRLDARLIARYLANEHMNLHPYRLPTKIQAQIDELVGRRHKVVVAHGALRQSLVGVAQELKAYKKMMRALDSLLEEIDQLLAALIAQDEQLSPIAQRLRTMVGFGPLLSTTMAHALTRHPFKNADAVIAYIGYDPRPRDSGQKRGRRYLSKRGPAEMRRLLFTAAMSASKTKLWRPFYQRYRDRGLPSTAALIVLARKLARIAFSIVKHGTVFDPSRIKNACAQP

SEQ ID NO: 46647 - protein, 342 aa, unidentified
MKITTAGIDLAKNVFQIHGVDAQGKAVLRKKLDRSKMVEYFVKMPPCLIGMEACGSAHYWARKLAAMGHTVKLMAPQFVKPYVKTNKNDAADAEAICEAVTRPNMRFVPIKTDEQQAVLSLHRVRQGFVKARTAQANQIRGLLSEFGEIMPQGIAHITKRLPEIMEKQDLPGTFRDLLQRLYDHLKELDNQADELDAKIQQWHKASDASKKLAEIPGIGPITATALVASIGDAKNFKNGRELAAWLGLVPRQHSSGGKSLLLGISKRGDTYLRTLLIHGARAVIRFAENKPVTSWLNKLLERRNKNVAAVALANKNARIAWALLTHEDRKFRADYAPAVAGA

SEQ ID NO: 46648 - protein, 370 aa, unidentified
MKKHSKTLSDAGKRKMIEQGMNVVAGLDLGDKHSHVCLIDLDGRIVESRKIRTSGPALEKYFSAWAEMRVVFEAGTHANWIYRLLERLGHQPLMADTHRLALITQSLTKDDRNDAERLATLGLRMPEMLNAVTPCSVETQHDRAVIKARDVLVATRTKLINSMRGTLKSIGYRLPACDSDAFVRKAGPDVPDELRDTLRPLLLLVQHVTDEIRRYDKRIEQLCKKYPATRRLRSIRGVGPITALAFVLNLDNDARRLANSRDAGARMGLCPHRRESGARSPELSITKSGDRMLRRLLVQCSQYILGRHGEDSALRRWDLRLAERGGKSAKRKAVVAVARKLSVLLHTLWKRDMDFDPFYGTAMETAAETA

SEQ ID NO: 46649 - protein, 374 aa, unidentified
MKVKTIGIDLAKEVFGVHGVDARGKSLVHKRVSRKHLLGLLAKLEPCLVGMEACGSAHHWAREIEKLGHTVKPMSPQFVAPYRKGNKNDPNDAEAICEAVTRPSMRFVPIKSEAQQDLQALHRVREQLLKSRTALVNQVRGLLAEHGIVAPRGIAHLRRLMVEILAEPASRGLSGLFGETLFEIAERLRFLDERIRTYDLRIGRVFAHDERCQRLAKVEGVGPLVATALVAAVGNANEFKSGRELSAWLGLVPRQHSSGNRNVLLGISKRGDRYLRTLLIHGARSALCRAERRSDRRSIWASKLKLARGFNVAAVALANKNARILWALLTRGENYRPAAIPDQASKAERTAAFRHRPPTSGRRVVAESSLIKRI

SEQ ID NO: 46650 - protein, 343 aa, unidentified
MGEVSTIGLDIAKSVFQIHGVDAGGAVVIRKRISRAKLLEFFATLPTCLVGIEACPSAHYWSRRLQGLGHTVRLMPPSYVKAYVKRGKNDANDAAAICEAVTRPSMRFVATKSEQQQSGLMLHRSRQLLVCQRTMLSNAIRGHMAELGIISAKGRNGTAELLKIIADEQDDRIPAAARFSLNVLARQYAAIREETVAIERRIHAWHRSSEESRRLEEIPGVGPIVATALMAEVGDWKTFSSGRSLAAWIGLVPRQHSSGGKERLGRISKQGNRHLRWLLVAGAMAVIRYARQHGTKRPWLARLMDRRPLKVAAVALANKIARMAWAMMVRGERFKEPKLLPAA

SEQ ID NO: 46651 - protein, 312 aa, unidentified
MDELYLGIDVSKGHLDYAPMGSNETAQVENNGAGIAQLVAEFKQRQPTLVVVEATGSLEMPVVAALLTAGVPTAVVNPRQVRDFAKGMGKLAKTDKIDARTLALFGSTVKPRVFHLPSEEAQALDALLTRRNQILDMLSSEKFRLHTVHATQRASLEGHIEWLKAALEQIDMDLNQSIRSSDIWKAKDSLLQSVPGVGRILSTALLAWLPELGLLSGKQIAALVGVAPYNRDSGQMRGKRMIWGGREQIRSVLYMAALSSSRCNPVISSFYNRLIKAGKPAKVALTACMRKLLTILNAMVKHGSSWNAPSLA

SEQ ID NO: 46652 - protein, 317 aa, unidentified
MPDIINFVGIDMAKNDFYACLNDIIEPSKFNNDTKGIKSFFGYLKKHNFITDNTMLGVESTASYHLKLCIMSTENNYKIKVINPLIVKKQNQTDLRRVKNDKKDSGLIRFCLAGGAGYEFINDPEAIILKSLVRQRDSLVSAKLKFDRQEEDIRRKEKCLTQAISPVYREIINVLEDKIEALKTDLRLYRPKEQYLLQSIPGVGPITAASFISEVGDISRFQKPEQLVAYAGIDPRVHQSGTSINGKGYITKRGNKILRTRLFNAASVAVLYDNMFKTFFQKKKSEGKPYRVALVATMRKMTHVIHAVWTRGTPFVK

SEQ ID NO: 46653 - protein, 317 aa, unidentified
MTKTSTGTAGIDTAKDKLDVAVHGREQRWQVANAAAGWRQLAADLAKAGVTKVGIEATGGYERGVVRYLRAKGLVVLVLQPIQVKNFARLHLRRAKNDALDAVLIAACAALLDPPSIQADERLTDLADHLTFVEQIEEDIARLKTRLEHIDEPRRRRLVLDDIDRLKARRLTELERMAGQLREHADLARRLDLVLSVPGIGKRTALALIIRMPELGQISREKAAALAGLAPFDDDSGKRKGERHIGGGRARLRRSLFAAALPASFRWNKALCALYARLKTRGYAHNYALVACARKLLIYANTVVQRGSPWVENHTAL

SEQ ID NO: 46654 - protein, 363 aa, unidentified
MFGERTSVGLDVHARSVAAAAIDGVTGELTQARLTPSHDHIRSWIADLAGPVAVTYEAGPTGFGLYRALTEAGIRCVVAAPSKLRRPSGDRVKTDAKDAVHLARLLRLGEVSAVVVPSVDQEAARDLVRAREDSRGDLMRARHRLSKLLLRQGIVYSSGNAWTGAHDAWLRRQRFDTRATTLTFESDYDAVLTVSARRDRLDTAITAIAGDSEFTPVVRRLSCLRGVASLTAFGLAVEIGDWSRFTGNSIGSFVGLVPSEHSSGASRVQGSITKTGNTHTRRPLVEAAWHHRARYAPGKTMRQRWELAPPAARARGDQGNRRPHARWIDFNPRRKRPVIANIAIARELAGWCWSLAVLDTAMD

SEQ ID NO: 46655 - protein, 360 aa, unidentified
MIRQRTSVGLDVHARSVLGCALDGDTGEVFQQRLSPDHGEIVAWLGDLPGPVAVADEAGPTGFGLARALAAAGITCEVAAPSKLIRPTGDRVKTDARDAAHLARLLHLGQITAVTIPSASQEAARDLVRAREDCRGDLMTARHRVSKLLLRQGIVYSGGTTWNRDHERWLRAQRFDNPALQLTFEAAFDAMLACRDRRTRLDDAITAMAADSEFTPVVHRLGCIRGIATLTAFGLAVEVGDWHRLTGRSIGAYVGLVPCEYSSGDSRSQGGVTKTGNGHARRLLVEAAWHHRSPYRPSEQLRGRWGLACPAARARGQAANRRLHARWRSFDARKKRSVVANVAIARELAGWCWSLAVMPD

SEQ ID NO: 46656 - protein, 344 aa, unidentified
MSIVGGLDIHRKQITFDWLDLETGEVERGKIAPADREHLAAWLDARMRAGADVHLAFEGCTGWRYVAEELARVGVVGHLAEPADTAALRGPKRRAKTDRADAQHLRRLLADGRIPECWIPPAHVLEGRALLETYRDLRAEHTGWLQRIHAVLFHQGTPCPSRGVCSVEGRAELAVLTARLSPAGQDQVMVALAMLAASEAQLDVVHRKLLLAARQLTGAKVLAANIYGVGPITGLALTCWLGGAGRFSSTRKAVRFAGLDVTVHSSDGKRSSGRLSRQGPAVLRWCLFEAGKTHARTDATDHDYYSAVKDRIDGKRAALSEARKIVRQACHILTELGDDAFAPT

SEQ ID NO: 46657 - protein, 342 aa, unidentified
MEKVSIIGVDPAKRRFQMHGARADGGVAFRKTLSRDRVLAFLAERPRCVVAMEACGSAHHWGRAIGALGHEVRLIAPVYVKPFVRRQKNDAADAEAICEAAVRPTMRYVAVKTEEQQARAMLFRTRDLLVRQRTQLINALRGHLTEHGVVAPQGPANVKGLAEAIESEMTSLPLLVVELSRVLLDQIDGLSKKIAELEKATVQEATRGATMRRLQTMPGVGPITAMAIETFAPPMAVFRRGRDFAAWLGLVPRQHSTGGKPLLGKTSKMGQRDIRRLLIIGAMAVIRGASRRGRAEGSWLHRMLARKPRMLLAIALANKMARAIWAMLTRGEDYRVPAAAAL

SEQ ID NO: 46658 - protein, 420 aa, unidentified
MNEFEQWQQHRAFGAVDWASKKHSVIVVNEVGQVIEQFEIEHSALGWKKFREKLQPYGSIPFAIETSQGTAVEQLLEAGMMVYPLNPKSAQAYRERKAPSGAKDDWLDAWSFADALRVDGQGWKALQPEGPLIKELRLLCRDEVTLIEQRTAFIQQLRHALAEYYPAALEAFEDWTSVSAWMFLQRFATPDALAQAGKRQWQKFLHSRRLWGSDEGLRRMEIFAHASEFAGTPPTVKAKSLLALSLVQMLFAIEKQLALYRQQIEALFARHPDHDLFGSLPGAGPKIAPRLLSEIGDDRQRFGADPQALQCLAGSAPVTKRSGKRRKFWHVHQRRACDKHLRHALHLFADQSLSRCVWAELYYQHHRQKNQSHANALRRLAHRWLKIIYKMWIDRTPYNAELHHRNQLQHGSWIFQLNQS

SEQ ID NO: 46659 - protein, 373 aa, unidentified
MHQVIMIGCDLHDKTMLLKIAAGREVPETWSVKNTGAGRAKMIEALRERARAAGGVRVLFAYEASGQGFGLYDELSEAGIECYVLAPTRIARSQRGTSQKTDEKDAQQLLELLRAHVLAGNELPAVWVPDPTTRDDRELVRMRLDATEKMTMTKSQIQSLLKRNHIRRDPGTGKGWTRLFRGWLKHSLCESADSPLGASTRLALASLLRQLDFLEEEERRLHDQVNALAAAPRWAAAVEEMTSLCGVGVLTALVFLTELGDLSRFANRRQLAAYLGLAPRSHESGERKDCKGHITRQGSSRVRKMLCQATWARVRHDRQEQETYGRLVAKNPKKKKIAVVASMRRLAVRMWHRGQVPPGQRSRAMILAAEAAP

SEQ ID NO: 46660 - protein, 430 aa, unidentified
MDVEDHIRLEEFRQLKKQIRGSQEHLIIGIDVAKDKHTAFFGTTNGKTLLKRLVFENNAEGFNKLLTYVDAVKVKHSLDKEVFALEPTANYHKPLGEYLIERAHSVVLVSGNAVKNNREMLNGRWDKNDTKDPANIADLISQGKFLYYDHPVLPLRDLRNLLSLKRHLKRQEHGLKVRIRNHLLAHYFPELDRYYGKCESVGLSIVRWSLAPCEIASLHYDEFAQLVAPGRRITVGQREYLRAIWQKAAQSIGCQAGASMGFEAKMMVEALNRVREAIGKTDDKIKEVCLHFPEYSYIITIPGFGPDVSSKVLAAIGNPFRFDTEKQVLKMAGWDLSARRSGKRSNTVTPVISKRGKAGLRYALYQAAHIASSRNQYFVMYFTNKLRGREKEKGITTKMKVKLAAKLLVIAWTLMKKEEPFNPDYLNLDE

SEQ ID NO: 46661 - protein, 329 aa, unidentified
MNVCGIDVGKDTLEVVIRKNNKSQKSKTFENSPEGHFKLIEFLIKRKIEYICLEATGSYHFDISILIANNDHLKIMVVNPKAAHNFAKAMMQRTKTDAIDAEILAQYADRMEFVEWQAPDPEVIALRTSGRWLDASSKELTRLKNQLHALESTQGTPDFIIQSVKKRIETLTEDIILLEKEGHKLIKANESLMIKYALLLSIVGIGEKTALKLLGEIMILPSDMTAKQWVAHAGLFPQIIQSGSSVNKKTRIGKAGNRYIRGTLYMPALVAAYRDPNIGGFYWHLVNDNGLKKIQALCAVMRKLLLSIHAMFRTNTPFNGECFYTLKEA

SEQ ID NO: 46662 - protein, 307 aa, unidentified
MPEFIIGCDLSRACLDLHILPDGLASRIDNSPEAIEEWVSSLPPGCRVVFEATSGCDTDLIAGLCANGVAYSRVNPRQAREFARALGVLAKTDQVDARILAEMGLRLDLAITVTPDPSRIQLADYLRRRRQLVDMRKAEKVRRHSAGRRDILKDIDSLIRILDRRIEAMDNKIRTLIEEDEALADDARLLAAVPGIGPTVLATLLGELPELGKLDRRKIASLAGLAPHARESGTWRGQRRIWGGRRKVREALYIAALSASRRIPALIAMRQRMKEKGKAPKTILIAVGRQLLVILNAMIRNRTPIAL

SEQ ID NO: 46663 - protein, 434 aa, unidentified
MRILFERCCGLDIHKVSIAVCVVITRDGKTEEETRRFGTMTADLLELAAWLKARGVQHVAMESTGVYWKPVWNILEAEGFDLLLANAQEVKIVPGRKTDQKDSQWIADLHQHGLLRKSFVPPRQVRDLRDLTRTRATLAQDHSSICNRIQKVLEDANIKLASVASDVFGASGRAILQALMKGESDAEGLAELSKGRLRNKIPELRRALEGRVTGHHRFLIGRHWRQMESLENQLRQFEAEIAERMKPTAEEIVRMRKSLPADAPLPPSPREEAISLWMELPGIGLTTASSMVAELGVNMEQFPTSGHLASWAALCPGNNESAGKRMSGKTRKGNVWLRRTMCEAAWAAAHSKKTYFAAQFGRIAARRGKKRALIAVAHSLLVVAYEMLKHKKHYRELGSDFFEGLNKDQVKRRLVQRLAKLGFQVTVTTTPTAE

SEQ ID NO: 46664 - protein, 386 aa, unidentified
MIFIGIDIAKSTHFASAVNSDGEVLVKPFKFTNDNVGFNLFIDTFKNYDLSNCLVGLESTGIYGDNLTTFLFEKAFKICRINPIQTDSLRSSNIRKTKNDKIDTFIIAQCLMLGHYTLITEKDIQLIKLKTLCRFKFDVKKSQSKAKVQLVTCLDIAFPELANFFNDNLHIKSSYALLSKYPTAKIIANTRIDALTNLLYSASRGHFKMDKALALKELAKNSIAMDNPAIGVQIKMLIEQIQMLEKQIDLLDIEITNIMEQLNSPISSIPGIGDWLGAIIISEIGDITRFSTSTKLLAFAGLDPSVRQSGNFNATNTKISKRGSRYLRYAINRAAQLIIWNDDTFYQYYTTKLAQGKSYLNAIGHVSHKLTRVIFKLLTTNTTFKK

SEQ ID NO: 46665 - protein, 344 aa, unidentified
MDHFAGLDVSVKATSVCIVDDAGKVVREVKVTSEPEALLAVLKNPAYHFKRVGLEAGPLSQWLFSGLAEAELPVVCVETRHMQAVLKAQINKTDRNDARGIAQMMRVGLYRPVHVKTLRSQKLRMLLTHRKLLQSKAIAIENDLRGTLRNFGLKVGMVGKVKFEARIKELVENFPDLAELVEPLLIVRRVLREQIVILHRRLLAIVRDDEVCRRLMTTPGVGPVVALTYRATVDVPARFRKSKSVGAVFGLTCAKYQSGEVDWDGRISRCGDEMMRTMLYEAAQSMLRSKKWSWLKAWAMQIARRRGMKKAIVALARRLAVIMHRIWVDGTEFRWTREQAAAAA

SEQ ID NO: 46666 - protein, 402 aa, unidentified
MTVRPRVWVGIDVGKANHHACALDDAGAVCWSQKVGNDQRSLEQLVERASESAEEVRWAIDLTSPMALMLITVLLAAEQPLVYVPGRVVNTMTHAFRGEGKTDSKDARVIAETARQRSDLSEVTIPDELVIELTQLTGYRSDLMADWVRGVNRLRALLGSIFPALEAAFDYSNRTPLILVAALCTPAEIRAAGIKGVTTHLAENKAWSAGIEKTAATAVGLAQEQSLALPGESGTAALVKRTARKLLDLDREIKDIDKAITERFRTHPHARIIESLPGFGPGLGAEFLVITGGDLASFATPGRLASYAGLVPVPRDSGRISGNLHRPKRYNRRLRRVFYMAALSSIRAAGPSRRFYDRKRGERLIHTQALLALARRLVDVLWALLRDGREFTPETPPITAAA

SEQ ID NO: 46667 - protein, 320 aa, unidentified
MPREAFIGIDVSRDSLEIASRPSGEQWQVANDPQGIAALLLRLRAVRPTLIVLEATGGLEVPALASLGSAGLPVVAVNPRQVRDFAKAIGTLAKTDAIDARVLAHFADAVRPAVRPLPDAATRALSALVTRRRQLVEMLTAEENRRKTALTDIRTDIQAHISWLRKRLKSVDKELSQAVRTSPLWREQEDLLRSVPGIGPVVSVTLLADLPELGTLDRKQIAALVGLAPLNRDSGTWRGKRTIWGGRATVRAALYMAALVGSRRNPVLRDLYTRLLAAGKTKKVALTACMRKLLTIVNALLKHRTTWAAPAPQAAAPSIS

SEQ ID NO: 46668 - protein, 341 aa, unidentified
MQITTIGLDIAKNVFQVHGVDTEENVVVRKRLRRGQVIAFFEALTPCLVGMEACATSHYWARALTKLGHEVRLMPAKDVKADVKRNKNDAADAEAICEAVRRPTIRFVQVKSAEQQGRLMQHRTRDLLMRQRTQVINALRAHLAELGITAAQGREGIKELLAIVADDRDQRLPTDARASLRVLAAQLQAMQTLLSSLEKRIMAQHRANADSRRLETIPGIGIVGATAIAATVTDPKVFRSGRDFAAWVGLVPREGSTGGKRKLGPISKQGDRYLRRILVVGAHSVLRRARQSPEKYPWLTGLLARRPFRVVAIALANKMARIAWALLAKGGTFRAPQLAAA

SEQ ID NO: 46669 - protein, 405 aa, unidentified
MKYTCGIDWASDHHDVSIVNERGMEVKCLRTENNLKGYRELVQTLRSFGGEIPIAIECKEHLLISLLGKEGFPVYSINPKSVERYKDRYNVGGTKTDPVDAFALGDILRTDRHKYHPLAYGSSEVRKLQLLYAEYEKLLKDQNVLCLQLQDVLSKYYPCILTLFCKKNCKILYRTVLEYPTYSQLKEAGYEELKAFLRRCHHNRNRYIEKIYQKIQESDYHHVDEFDEVFSSTAKALSSVLLVLRDHVDEIKKRMIEITKGHALGEIFQSIPGSGDINSARLLAVMGDNKELYSECSGIQSYMGVAPIVRASGKSWRVVFRFSCNKLHRDALTWFAFCTLAHCSWARAFYDRKRKDGKGHFESCRMLAFKWLRIIFTLWKREEKYNEQAHIENQRKYRERRLKIA

SEQ ID NO: 46670 - protein, 351 aa, unidentified
MKEFIALDAHKRYSWMEREEVKSRKVRHARIEHAPGAIREGLEGREKGTPVAVEATGNWYWIVDEIEQAGLEPKLVHPRKAKLMMGLINKTDKLDAHGMNQLQRNGTLPTVWIPPRELRDLREITRARMVLTRHRSRLKNRIQATLSKYGWSGGEASDPFGKKARTELSKAIGGLPPQTAQITEMLLQQLDFVQAQIEAMEQKIRELVKDTVEMNRLRSLPGVGWILSAVIALEVGYMNRFASGERYASYSGTTPRVHASGDKIRYGRLRPDVNRYLRWAYVEAAHSVCLHRKTYPGRHVSQLYERIRERKGHGKAIGAVARHLAEATYHVWIREEPYQDPVLRKGQSREV

SEQ ID NO: 46671 - protein, 421 aa, unidentified
MRSGDKEKERIYIYNKRNICFVGVDMHKEKHCAVVIDCWMEKIGEVNFENRPSKFPAFVEEIRKICGTKDFVFGLEDTRGFGRNLATYLTGRKFEVKHVNPAYTSAVRLSNPIVYKDDSYDAYCVARVLRDMVDTLQDAKHEDIYWAIRQLVKRREIIVKYNVMNKNQLHSQLSYSYPSYKKFFSQIDGKSALCFWENYPSPEHIWSTTPEQIYETIKAVHQAFKIERVHAIIDMIKKDGNTQKGYQEERDTIVRNIVKDIKNNQELLKDIEKQLRKLLPQTGYKLQTMPGIDLITEAKIVSEIGDINRFPDSDKLARFMGLAPVHFSSAGKGRDERCRNGNRELNAIFYFLAIQMVAVSPSGKPRHPVFREYFEQKIKEGKNKPQALICVARTLVRLIYGMMKTKTEYRPYEKKEEEGTN

SEQ ID NO: 46672 - protein, 342 aa, unidentified
MEQVSVVGLDLAKSVFQVHGVNPRGEAVLRRRLSRGQLLKLFEKLPPCLVGMEACASAHHWARELAALGHEVKLMPPQYVKPYVKRGKNDAADAEAICEAVTRPTMRFVGAKSPDQQATMMLHRVRKILTRQRTQISNALRAHMAEFGITAAIGRGGLDRLIAVIADQDDARLPGEARACLAVLSTQLEMVKEQILDNDRRILADARKTEAGRRLMKIPGIGPLLASAIVACVPDPTTFGGGRSLSAWIGLTPRQNSSGGKERLGSITKAGNPYLRELLVVGAMAVVRRAKQGSTKRPWVTQLLSRKKPKVAAVALANKNARIIWAMLASGEAYREPELAAA

SEQ ID NO: 46673 - protein, 387 aa, unidentified
MAKQNDLSRCLVTLEQDATVIAVIEIGQSSWLVAGIVPGLERNPLKKLSPDQDALLQLLHRWQKEAVQAGHTIKRIAVAYEAGRDGFWLARWLRAREIEAYVIHPSSVPVSREHRRAKTDRLDTELLKRAFLGWLRGEPKHCSMAAIPTLADEDAKRPGRERQSLVGERTRIINRLKANLARLGIRSFRPNLAQASSRLEALRTPEGSAVPTNTLAEMQRDMNHLRFIKQQIKEIETSRAKRLAAAPNEQRHAMVRLLARVVGVGIDTADMLAQEVFSRNMRDRKALARYAGLTGAPDESGKKRRERGLAKAGNARVRRGMIELAWGHLVHQKDSALTAWYRKRTSDARGGTRKTMIVALARKLLIALWRLVTTGETPGGLLLRPAA

SEQ ID NO: 46674 - protein, 340 aa, unidentified
MGDITTIGLDLAKNVFQVHAVDVAGSVVLRKRLRRGQVLTFFAGLPPCLIGLEACATAHHWARELIALGHEPRLMSPSYVKAYVKRNKHDVADAEAICEAVRRPSMRFVPLKTAEQQSALMMHRARDLLIRQRTMLVNALRGHLAEFGFVEAQGLHKVARLIAIGMAEMDGRVPDIARQVLKVIVSQIKDIQTRIAGLETQVLAWHKSNPVSQRLATIPGIGPIIATAIAATVVDPNIFRSGREFAAWLGLVPRQNSTGGKARLGGISKRGDSYLRRLLVNSAHTVLLCSKAAKADPWLTSLLSRKPRLVVAVALANKTARMAWAIMSRPDLYRHAAVAA

SEQ ID NO: 46675 - protein, 348 aa, unidentified
MRIIGCDYHPSWQQVCWMDTETGETQERKLEHACGEAERFYRELSAPALIGMESTGNCQWFVEMVEKLGHEVWIGDAAKIRASEVRQQKHDRRDAELILKLLLEGRFPRIWVPSSEEKDLRQLLIHRYKLVRIRAQVKNELQHLAMNQGLTRKRKLWSKAGETMLCALTLRPWASRRREDLLKVKAMLDEQIVPLDQAVVDVALRDEKARLLMTQPGVGPITAMTFVLTMGDVNRFQRGKQVASYLGLIPREYSSGGRQRLGSISKQGNWFMRMLLVEAAQIAVRYDPQMRNEYLHRCHWKAKGVAKVAAARKLAIRLYWMLRTNTSYPEVVRVESSSRVPLVVPQAG

SEQ ID NO: 46676 - protein, 339 aa, unidentified
MNNTKYYIGLDVHKERTTYVVRDKIGNILLEGETATLYQELFTRLKPYLTTSMIGLEASTSYYTLYQQFLKHGHIVKVANTIQLRQLITKNDKLDARRLSEMLRLGNFPSSYIPDDKIQRMRSLIQTRHSLMEEKVRCNNRIQAFLDRNGVLMPSHKAFSKKWRYALMHHMGSGRVSIELRHEYDHYVFLEKKQEQVEQEIQGYAQKHWTTEYVLLQSITGIGPTVACYSIAHILPIERFSSCKKLRRYAGVVPTCKESGNKRSHGHIPKTSSRRQLRWALIQAANTIGKTNTNLGRYYRRKKRQKKNNGIAKVAVASSLIDIIYKVLTTKKPYIPKTC

SEQ ID NO: 46677 - protein, 345 aa, unidentified
MSTSTDHSRTDLPSDPGSPGSRMYAGIDVSKAKLDLARSGSGSGSDAVETFANDAAGVGRVVEVLAALGPALSVVVVESTGGLERPLVEALLDAGLPVALVQPGRVRYFAKGLGILAKTDRIDALVLRRFGELAAPRLLERRSKNQAELRDLVACRRQLVQTRAQQYNRRSSTFSKAALRSIDAVVGALDRQVESLDRQIRRLLEADDDFKHLDGLLRGVPGVGPALSATIAAELRELGRVDRQRACALAGVAPFNDDSGAVKGKRSIRGGRTALRCVLYMAALSAMRSNPVIRAFAARLKAGGKAGKVVVTACMRKLLTLINAMLRDGLTWDQLDIVKKLATNG

SEQ ID NO: 46678 - protein, 356 aa, unidentified
MKDYIYLGIDDHKWFDTIAAINQEGETLKIIPKVRKNAQDFSTFLNSLGTDKSFKAVLEAGRNWGVTYDLLESLPEVEEVILANPFKVKAIASAYLKTDTVDALTLANLLRVNCIPKVHIPAKKTRQLKYLVRQRAFLVVIKTQLKNRIHILLERNHIATPEVTDLFGRRGREFMQTLELSPTERFLLSQHLEFLEYCEAKIKEVGDLIKEELATDESVRLLKTVPGIGEVFASLIALEIDDINRFSEPKKLWSYSGLVPTTYASGKRVYHGRLIRYCNKWLRWAFIEAVHSAIRCSIYFGQYYEFKRWQKGSQAAIVATARRLARVVYWVLKDRREYKEPQYSSRFFNLRGSGQA

SEQ ID NO: 46679 - protein, 371 aa, unidentified
MKSIIYIGMDVHKKTYSLCALLKETGEIIGETKIPADVSLIIKFIENAKKSVGSDDVQIKTGYEAGCLGYSLYWQLAAKGIECDILAPSTMHRSAKNKVVKNDRRDAKNIAANLANGTYKSVYVPTDEDVEIKEYIRMMHDFKIELKKVKQHINAFLLRFGHHYPGKSKWIPAHIKCLKELELSDMYREILDEYLSQLEILSEKIERFKHRLEELSQKETYNEKIGQLRCIKGIDTTAAMTMHAETSDFDRFPTANAFASYCGLTPGEDSSGESYHRLGITKQGNSMIRTTMVEAAQVLVRGTIGKKGKKVKSKQKDQDVKVIDYADKAVVRLQKKYHRMIFRGVKRNIAITAVARELACFVWGIETGHIS

SEQ ID NO: 46680 - protein, 343 aa, unidentified
MKLSRVGIDLAKNVYQLHGVDRHGKTVWKRRLKRHQWLKALLDKTEPGCEIGMEACASAHHWGRQLQSLGYTVKLMPPQFVKPYVKSNKNDAKDAEAICEAMSRPNMRFVTVKTVEQQDIQATHRIRAELITQRTAKANQIRGLVAEYGLVAPKHMSSLRAAIPCWLEDAENGLTGDFRNLLHSVWDDLLILDDRVGEMDKLIKRLAENNDDCVRLQQIRGVGPMISTAMIATVGDARQYRTSRQMAAAIGITPKQHSSGDRDRLLGISKRGDVYLRTLMIHGARSVVASAKHKDDRLSRWVTGIATKRHPNVAAVALANKTARMAWAMLRNKTDYDPDFAIR

SEQ ID NO: 46681 - protein, 422 aa, unidentified
MNESYQFKATIGLDWADQKHDLWIRPADGSKAEHLRLEQSPEALHQWAAKLRKRFDTGPVALGVETSRGPVISALMSYDFIVLFPINPKALKDYRAAFSVSGAKNDRTDAQLIEEFIRLHSEKLKALQPDTELTRKLSGFVQDRRHLVDERTRIVNQLHSKLKTYYPLAETLVGSKMNSLMAAEFLSRWPDLESLVAATAPKIRAFFYQHNSRSAKKMEQRLEAIKTAQALTTDPGIIEPARELVLALAGMLKCLHKSVARLEEAIELAMDQHPDAPIFRSLPGAGPALAPRLLVAFGTQRDRFETAQEVAQFYGVAPVVIQSGNSELVRLRRRCPKFGRQTFHENARCASKTEPWGRAYYKQQKKKHDDKHHQACRALAYKLIRIYFACWKTRTEYKSNTYLDALQKHGSPLHNKLNMIGE

SEQ ID NO: 46682 - protein, 460 aa, unidentified
MNQYYLGIDASKGYSDFVMLNVKKQPVIENFQLDDTFEGHARLYELLRSFNQGHPEATIYAAVESTGGYENNWFQSLLKFQGSLPIKTAHLNPLGVNYNHKADLKRNVTDKISAQNVAEYMIAHPEKVSYQHQDSLASLRKQWGFITMLIKQSTQLLNQLESLVYNANPEILMYCKDGTPQWVLKLLTRYPTALRLSKAKAKSVARIPYVSKDRSQQLVATAKKSVASADDEVTEQLIIATVKQILNLNNTIKAQTKILTDKCAVPEVELLKTFIGISDYSAIGLMLEIQSIQRFLLSKKLASFFGIHPAYKKSGDGTWKYRMSKKGRKEPRRILFMVAMSAIKSNPLIRSIYQQAVQRGMEKKAAVGLCMHKILRIIYGMLKHNQAFDPEIDRKNRQKTPLRQRRVRQDKNRRYQDFDSKAPISSRQKRKRKERKQSQNVNNVECGISEASVPVNNLAN

SEQ ID NO: 46683 - protein, 369 aa, unidentified
MADYTEAFVAFDVAKIKHAVAVADSGRAGEVRFLGEVENRPATIERTIGKLAKRYHRLHVCFEAGPTGYGLYRQVRDLGHDCMVVAPALIPKRSGERIKTNRRDAVTLARLHRAGELSAVWVPDIVHEAVRDLVRARQAVAEDLRGKRQQLLSFLLRHGRIYDAGGHWTLAHRRWLARQAFEHPAAQIVFQEMSDAIEDAAQRLHRFDEQLAAIVETWSMKPVVEAYQAMRGASFLVAVIFAAEIGDVRRFETPSQLMAFLGLVPGERSTGDTVRRSGLTLAGNRRARRALVEAAWTYRYPARVSEPLRARLEGLPKAVRDIAWKAQVRLCARYRRLAAAGKKPPVIAAAIAREMAAFLWAIGREVAPS

SEQ ID NO: 46684 - protein, 367 aa, unidentified
MKEVTTYVGIDAHKKDLFVAMIGTDALPVTWTIANEPNAVRRLMRKLERDAPGPVEVCYEAGPGGYALQRQMTTTRVRCQVIAPALVPRKPGDRIKTNRRDARKLVELLRAGLLTAVRPPTPEEEAVRDLCRARDDARVDLHRCQHRLSKLLLRRGLHYAGRNWTRVHRQWLASLTWTHAAERAVIDDYLLAIDHTEARLRELDARLAEVAAQDPYREPVGWLRCFRGIDTLTAMLILAELHDFRRFASAAALMAYLGLVPSEASTGEKHRRGRITRTGNALVRRLLVEAAWHYQHRTGIGVALARRRKGQPGRVIAIADKAQQRLCRRFRTLAAVHKPAPKIAVAIARELAGFVWAALQPVTVPAR

SEQ ID NO: 46685 - protein, 352 aa, unidentified
MVTVGIDPHKHVHVAVAVGADGRTIGKPVTVKNDALLIPMLLKWIRSITDGVPVTWAIEDGRGFARRLADGLLLAGHQVVWVPTRLTSAHRKLHAATGAKSDAVDAAAAAHAAIATPGLDRHRIDERVRELRVLVDYRTDLIKRRTMVINQLKAQLHVWLDHTPGDLARPKHLGALNTVLDSARLSTNVRQALSDMAGEIADLNRRVTDLDTTIKELVGPLAPTLLHITGISHISAAVLIAEIGDITRFPTSAKLARYTGCAPIPVYSADQERHRLHRGGNRRLNSVLYTAAIVQKRFHPAAQHLLARHEPTKGKRGARRILQRHLVDVIHRAMTTDQATWDHEITRHQLAA

SEQ ID NO: 46686 - protein, 316 aa, unidentified
MTHLPAPIEATLGLDVAKDSVTLYDLVSRQCLTVANTQAALLAALQPFRDRRLAVCEATGGHERVLMEVLLELGIPAHRADGGKISAFARSLHRAKTDRVDARTLALYGRERGAMLPRWSPPPAWQQQLTALVRRRADLVAARKQERTRAKAPGAGAIAASLARTLSFLDAEIKELEAAIFQLIAATPELARRNAILLSLPGVGRIVAADLLAFLPEMGRLSRRQAASLAAVAPHPDQTGTTRNRGRTTGGRRMLRPILFIAALTAVRSDNPFASFYHRLLAAGKPKRLALVALMRKLVVVANARLAAAQTKIQLT

SEQ ID NO: 46687 - protein, 410 aa, unidentified
MFSEKPPPLRFIGLDLHKHYLIAIGVDANLNQVYGPRRVALSDLEAWIRNTLTLQDAVVLEMTTNTWQVYDELLPYAHSVTVVHPPHVALITRVQVMTDRIAAAHLARLHAKGLLMGIWIPPQEVRDQRALIAQRSKMVRLAVQAKNRLHSTLHRLHLSLPADGKPFSASQRTWWQALPLAGVEKTRIACDLDTLEFAERQIKLLEEGLVDVAAQDDRVPLLIQLPGIRLIASLTILAAIGDIARFPDAQHLVGYSGLGARIHSSGLISRSGRITKAGRKDLRFVMVEAAQRAAITHPHWIAELARLEPRLGRNKAIVAIARKLLVAVWHVLTKQQADRFANVDKVARKMLEHGYLLGHRRRPGGQSAAEYARHQLDRLDLGADLCAVRWGQVKRPIPLPPSRRQACPDT

SEQ ID NO: 46688 - protein, 352 aa, unidentified
MKEPSKESLIKFVDIDLAKRSFHLYAVDGEGREVLSRKLTRGRLSAVVAQLPACTIAMQACGSAHHWARLFRPFGHAVRLIAPQFVKPYVKSNKNDAADAEAICEAAQRPNMRFVAVKTVEQQDIQAIHRMRSLAVERRTAQINQIRGLLLEYGVEVAQGRAALQRRLPEILEDADNGLSARFRAELHGLADELRHLNERVTHYDEQIEQIAQGDAQARALMTIPGVAAKGATALLAAVGEDPRLLKNGRGLAAWLGLVPRQHATGGRERLLGISKRGDVYLRNLLIHGARAVLRCVERQEDPTSRWAKALKARRHTNVAVVAMANKIARVAYGVIITGKPYDPARAALAHS

SEQ ID NO: 46689 - protein, 274 aa, unidentified
MKILALDLGKFKSVYVMYLTESKEQSYGKIGTNAREVEALLRRYAPDRLVIEAGTASGWVSDLAESLKLKVQVANGNDERWRWKVVKSKTDRSDALKLAQLSEMGSLPTVHVPSSEVRQWRSLIAYRHGLVDRRTAMKNSIRSIYERQGLHLPSVQRAWTKEGINRLKQEVAAARADQLWLYQVHCEIEQLEMVEKQIKQVEAKLQEIAEQHPSVKRLQEAPCVGPRLSEAVVAVLDDPHRFKNGRQVGCYVGLTPRRWQSGQSDRQGTHKSCR

SEQ ID NO: 46690 - protein, 347 aa, unidentified
MATMAQPRPQVTVGVDTHGDVHVAAALDGVGRLLGTMSVPSTAAGYRRLLQWASAFGEIAAMGIEGTGAYGAGLARHLAGCSIRVVEVDRPDRRTRRAKGKSDPIDAEAAARAVLSGAARGEPKSRDGAVEMIRTLRVCRRSASQARTQTINQMHSLVTTAPEEFRALLRDLNPRQLVAKAAAFRLGGVFTPTSATKLALRELALRHRFLTEQLRRLDAELKPLVALAAPRLVAISGVGTQIAGQLLVTAGDNPERLRSESAFALLCGVAPVPASSGKTTRHRLSRAGDRAANYALWRVVMVRLTSDDRTKAYMARRRSEGLSKREVIRCLKRYVAREVYRSLVDER

SEQ ID NO: 46691 - protein, 343 aa, unidentified
MQAVTTIGLDIAKSVFQIHGVDAAGNVIVRRQLKRRYVLPFFQRLPPCLVGIEACASSHHWSRELKALGHTVRLMPPAYVKPYVKRQKNDAADAEAICEAVTRANMRFVETKTLEQQSCLMLHRTRHLFIRQQTAVINAIRAHLAEYGIVAAVGRNGVEELLGVVADPSDKRVPEIARACLAALGAQLRMLKAQILEFDRMITAWHRSNEKSKRLDAIPGVGPALATALVASVPDPKAFRSGRNFSAWIGLVPKQHSSGGKDKLGSISKQGDRYLRSLFTAGALAVIRYAKIHGTKHRPWLTALLARRPTKVAAIALANKIARMAWAMMARGDRYKEPVALAA

SEQ ID NO: 46692 - protein, 376 aa, unidentified
MITCFIGIDAHTTNYTLSTAIDAEDKPFNTCKYAPKLTYILKYANALCKKYNLKKEDILLGYEAGCLGFKLQRDLNENGFNCVVMAPSTIPGTAINRRKKTKNDIRDAEAIAKALRNDDYSSVATPDEEDEAIREFIRAREDVRMELKRCKQHIMAFCNRHGQHYEETEWTQKHMKWLNNLAFSQPVLKETLNSLLLEYEYLTEKLEEKDRRIEEFAQMDKYRESVHKLTCFKGIKTLTALAVIVEIGDFARFMKAKNFVAYLGLSVGEQSSGNDHNQTGITKQGNRFIRKLLTEAAQCFSRATSKKSKELKKRQEGNVEEVIAYADKANERLRKRYHHLVIHNMKSPNKAKCAITRELACFIWGMMTDNIHTVLV

SEQ ID NO: 46693 - protein, 347 aa, unidentified
MRSIGIDLHKRSLTVCVIDKTTGETFISRFLTNDESRIRAFFEKQQPFEAVVEASGTYEWLWLLLEPLAERLVLAHPSKLRIIAESKKKTDRFDARALAHLLAQDEVPEAYRPSPQQREYQHMVKHRVVLVRQRSRLRVQIRSILAARNLDQPGLFGLPKERFCDLPLPVAEKFRVLELLSLLEVFEKSIDVATRELKAFREAAPEDQKKNHEIAKSVPGVGDLTADVVLASLGPVDRFRSVEKVTAYSGLVPGGRRSDQRHIELGITKEGPRILRWALTEAAWRATRSSPYWKQIFESIAKRRGRKKAIIAVARRLLAVIYTLLRKGELYIEKLNPRSGNPDLERA

SEQ ID NO: 46694 - protein, 311 aa, unidentified
MNTTLCGIDISKDWLDAHIEPMGAASRFANDAAGIADLAAWCRNHDVELVVVEASGGYERLAFLLLWQMGQPCGMANARSVRYFAEAMGFLEKTDKIDAAVIARYGVVKRLKPTLPPSAAQQRLKALVARLSQVGGDLTVQKQRKSTADAETIASLDEVIALLARQSRRLEGEIATLIDDDPLWARLDRAFRSLKGVASRTVARLMAQLPEIGILSNKAIAKLAGLAPIANDSGKRSGRRPVRGGRAGPRGVLFLVASIVAKYDPHLAAFKQRLQAAGKEKMVIRIALARKLLVILNAKARDARNEFANAT

SEQ ID NO: 46695 - protein, 335 aa, unidentified
MEITFFIGTDVSKNELDFAVMNGRQLMFHRKIENNVKAINTFLKELLKLPGFDLKQAVFCMEHTGIYNNHLLVCLHKMKANICLEAAAQIKNSLGNIRGKNDKIDSIRIAEYAHKNRDELRLWTPKRETLVKLSQLASTRSRLIQARKMLTTAINENHDFITKKTAKQNENLCSRTLKAMDADLLKTDKTIDLLVSEDPELKRLFGLITSVCGIGNVTATQIVITTNEFKDINEAKKFACYAGVAPFTKESGIFKGKARVSHMANKKVKTLLHLAAMVAIQHSPEIKTYYERKVNEEKKNKMTVINAVRNKLILRIFACVKQNRMYEKNYSKLVA

SEQ ID NO: 46696 - protein, 466 aa, unidentified
MKQNPKRKQVSKKEQPSVSLLERIQPDATGIDCGQNSHFVAVPPDRDPQPVREFRTFTADLERLADWLVQCRIKTVAMESTGVYWIPLYEILEQRGFEVMLVNARDVHNVRGRKSDVMDCEWLRELHSVGLLRPSFRPAAAMVPLRSFMRQRETLIEEASARILRMQKGLTQMNVMLHVVVTDITGQTGLKIVRGILDGERDPERLAAFRDHRCHASHAEIVAALTGNYRAEHLFALRQNFAAYEFLLKQIAECDSEIEALLTTLAKQQPPPAAPLPDARSKRTPKNAPTFDIRSPLHRLTGGVDLSQIDSIGPHAALQIIAEIGTDMRRWPTEDHFASWLALAPNNKISGGRLLSSRTPPSANRAAVILRRCAMALTRTSTALGAFYRRLAARTGKAKAITATARKLALIVYRVLSGNLLYNDPGAIAYQQHHRTRELNSLRRRARLFGFRLVDQNTGEVLDAVS

SEQ ID NO: 46697 - protein, 366 aa, unidentified
MKKQSSEVISGESLVNYVNRVLNLGLDVHYRQVTVAMQEDGGRIKSAGKMGHGEFLNWVRKKLEEGWEIHSCYEAGASGYWLHRELVKLGVKNLVVVPKAMGRGGKKQKTDKRDAGELCDSLDRYLRGQQKALSVVAVPTEEQEEKRALIRYHRQIMKDRGRCEARGKGLLCAQGIEVRGRWWKGDTWLKLTSDPRLKDWMKEQLVGWRNKILSTDEEQSALRQRIAALAPAILPKGVGAYSAAVLHYELRGFEHFKNRRQVGSITGLCPGVHLSDGRGKEGSINRCGIGIVRWTLVEMVWRLMIWQPQYPPVRRLAAGFVKSKRAKKRLVVQAARRLAIDLWRLSTGQTTSEKLGLVMQHNSAAN

SEQ ID NO: 46698 - protein, 424 aa, unidentified
MNDTQNKKIAQVTDKTLVVGVDVGSDKHYARAILVRGFEVSKKPFEFANTRDGFERFVNWSYHLAAENQLTKIFVALEPTGHYWFNLADYLRGYDVKLVLVAPQHVKHSKEMDDNIQMKNDRKDPLVIAKLVTEGRYMFPYIPEDNYAALRAAFNRRCDLVEALIRNTNRMVRWFDIYFPEYREVYGKADALTGLMILMRAPLPSDILALGVDGICRIWREAKIRGIGINRAKKLVAAAERSIGRKGCAAVRQELWQLLEEHDLLSRQLNDMMQIITDLLGKIPGAERLLNVPGAGVITVAGFLSEVGDISRFTDPKQIQKLAGLAVVENSSGKRKGLPGISRRGRKRLRWVLFQLARTMVKSNKEMKAYHQYYTTRKENPLKKMQSLMAIAGKITRIFFGMLKNGTEYDPAVVMKDLNKAAAA

SEQ ID NO: 46699 - protein, 350 aa, unidentified
MAYLKQCIGIDISKDSFTACLCKREDSEGFSFSKVASFTNEKTGFNQLLRWVKSESESSVELVYLMEATGVYYESLAHHLYKLKKTVHVALPNTTKHYFASLNIKTKTDAIDAKWLSQFGVERDHKLWIPPSPILIELRNLTRYYVQLQEQRTALGNIKHSKDCSHGVQKFILQSNKNLILQLDKQILKCKQEIERLITSDETLHSTVKKLLTIKGVGLLTIATILAETGCFERFQNIKQVVSFAGYDVVQRESGTSVKGKTRISKKGNRYIRNALYFPAMVACRYNPIMKETYIRINQKKASKMIGQVAIQRKLLALIFTLWKNDSIFEPAYKKVVPVKTETTQDSLTS

SEQ ID NO: 46700 - protein, 315 aa, unidentified
MYYLGIDVSKKTIDCCLISDSIFYERRFDNTEDGFRRLDDWIQEYTAEAVHCCCEATGIYHEAIAAHLRQKNIVSIVNPSKIKGFREAEQTRTKTDRQDARLIAEYCRRMQPQAWQPPTEEQEFLQAITDYIARLKQQRAAEQTKHQTAPDTIRHHIQTTIDHLNRLIATVQNELKDFYRQNPAYNEKKNRLKTIDGIGESAASALLAKLTRYDFANQNQFAAYLGLDPKIKDSGTSVKGKPRISKQGQKNARKALYMPALVAYRMNAFPAFTARLKARGKPPKLIIVAIMRKMAVIAYQLYKTGKDYDRSRYRN

SEQ ID NO: 46701 - protein, 411 aa, unidentified
MSSSDKSASVAYAVYCGLDVGKGERHACALDAAGTRLYDKALPNDEVALADVFTRLGEHGTVLVVVDQPASIGALAIAVARSLGTEVAYLPGLAMRRIADLHPGEGKTDARDAYVIADAARTMPHTLRRVGADDETLAGLSVLAGYDDDLAAQSTRLSNRLRDALLHVHPALERLLGKHIDRGGVLDLLAAAGTPAQLRALGADGIATVMRSHSPRLAKTLPAKILTALDTQTVVVPGTAEFGRVITGVAAQLREVTAERAALAADLEARLDAHPLAEVLTSMPGVGFRTAIKILTIVGDGSAFPTAGHLAAYAGLAPVTRRSGSSIKGETRSQRGNHALKSALFLSAFASLADPTSRAYYDRKRSQGKRHNAALICLARRRVDVIFAMLRDREPYQHPDTQSPRPESQAA

SEQ ID NO: 46702 - protein, 356 aa, unidentified
MEQLTTVGLDLAKDVIAACVLDVHGAVIERRVLRRGAFERWAEQLPSCKVAMEACGSAHHWGRWFAAHGHTALLIAAEFVVPFRKGGKNDTADAEAVAIAARQPTMRFIPIKTVDQQAILAWHSVREGWKEERTALLNRVRGLLAEFGIVIGRSSDRLLTELPRLTEDSRLPDAIRAMLLEAREQFVALHARLARCDAQIAAHARNSSAAQRASELLGVGPVTASALAATVPDAKVFKSGRQFGAWLGLTPRQHSSGGRTRLGRISLRGNVYLRTLLIQGARSTLQSAINAEPSRASRLQRWIIELYGRKGYHKTLIAIANKHARILWAMLAKDERYDAAAWQRHPMHELLLAGNA

SEQ ID NO: 46703 - protein, 324 aa, unidentified
MYWVDAQTGEIANRRFGRAELIEFLARRPAGRVALEACGSAHWWARQIRALGHEVVLLHAKFIRPFVQTNKTDAADARAIWTAVQQPEMRTVAAKTEDQQAMLALHRMRSLLVKFRTMQVNQLRGLLYEFGATFRAGRVAGLAEVRARMAELAEALPGTMVCGLQDQLQRIDALEQDIDRLERQIGSWQKQEAACRAIAEVPGIGKLTATALVATMGDAKAFKSGREFASFLGLVPRQSGTGGKIRLGSISKRGDPYLRTLLIHGARSVLCHAKVPTTWQREIQARRPANVAAVALAHKMARTAWAILARGQAYQRNYVSVKPA

SEQ ID NO: 46704 - protein, 274 aa, unidentified
MHYIGVDYHKKYSYMVVKDRDGKVERRGMVNNSKEEFRQFLRPYQPGKAVLEATRNWGLVYHWLEEILDDVALAHPLKVRAIAEARIKTDKISADILCDLLRSNLLPEAYVPGKDTREAKNVLRQRMFFVRVQTMIKNRIHAILDRHPELLSQAPDVSDLFGASGMGWLKHVVLPGQDNRLLASELELLEVLKGKISESNGLIRELASGDKRVKLLKSIPGLGPFFSVLVAKEIDDISRFKDEKKLCAYTGLVPSTYASGGKVFHGRITRTGNK

SEQ ID NO: 46705 - protein, 323 aa, unidentified
MTVYIGIDIASKKFDAASLCDGAYRCKTFENTPAGFTALYNWLKSDSIPDIHVCLEATGSYGTALATFLYEKNLKVSVVNPARIKGFAVSELTRTKTDKADSRLIARFCKAAQPDPWRPVPAPVRKLQALVRRIGALNGMLRMECNRRENADIDAQESVEHMITHLKMELESVRRAIKEHISNVPELKKQNDLLLSIPGIGAVSASLILSFMASKEFTKAKEVTAFLGLTPRLHQSGTSVRGKTRMSKMGDAKLRCALYMPALVALKHNPDIRAFGLRLLTAGKPRMLVVGAIMRKLIHIIFGVLKSGTGFSSRVTVNAGFNQ

SEQ ID NO: 46706 - protein, 387 aa, unidentified
MAQVIIGVDPHKRSATIEIINAREKAIGQGRFGTDRDGYQVMLAAGRKHKDRLWAVEGCNGIGRHVAQRLVADGETVVDVPAKLSARARVFATGQGRKTDPVDARSVAVVALRTEGLRQVVTDDTTVALRLLVDRRDQLGRARTDVVSRLHHLLLELVPGGAKKDLSAQQARALLGSVRPRDVVGKTRRRLASELIGELVVIDKKIKTAKQELTDLVNSTGSRLMDLTGIGPSGAARLIGDIGDIHRFPSRAHFASWNGTAPIDASSGDQNRHRLSRAGNRRINRALHIMAIVQLRRDTEGRRYYRRRLAAGKTPMEALRALKRRLSDIVYRQMVADAKLVGTGPGGHAGATLQSSAADLNPEIDTSEKSLPGPATPQPRTPLLIIT

SEQ ID NO: 46707 - protein, 352 aa, unidentified
MKEFIALDGDKRYSWMEREEIKSCKVWHARIDHAPGAIRQSLEGRAKGTAVAVEATGNWYWIVDEIEQAGLEPKLVHPRKAKLMMGMINKTDKLDAHGLNQLQRNGTLPTVWIPPRELRDLREITRARMVLAGQRTRLKNRIQATLNKYGLVPEGEASDPFGKKARLSLEEAVQKLPLQTAQVTEMLLRQLDFVQKQIEELERKIRALVKDTVEMDRLRSLPGIGWILSAVIALEVGEMTRFASAERYASYSGTTPRVHASGDKTRYGRMRTDVNQYLRWAYMEAAHSVSLHCKTYPERQVSCLYERIRGRKGHGKAIGAVARHLAEATFHVWRKGEIYRDPGLQQGQSREG

SEQ ID NO: 46708 - protein, 341 aa, unidentified
MVRPLEGEPQVERQRFLTIRGDLERLRDWLKQQRVTHVVMESTGSYWKPVFNVLEGSVQVYLANPQEVKNRRGHKTDDKDGWWLAHLLRHAMIHPSFIPPRPIRELRDLTRRRTRLLSAATSEKNRVQKVLEDANLKVGSVLSDVFGVSGQLMLEELLKGQAPPNEVAALAQRRAKKKTPQIIAALDGHQMSAHHRRMIRYSLEHLRFLEEQLGELDTNIAAQIEAAGLGKPWDDLRSIPGIQQTSAATILAETGADMKQFPSEKHFSSWAGVCPGNNQSGGKQNKGGPTTGGNPWLRSALINGMCLGGRQQEGVLSQGQILAHHHQAWWQKSACLGSRGA

SEQ ID NO: 46709 - protein, 354 aa, unidentified
MSNRINSIVATIGIDIGKNAFHVVGLDRRGAIVLRQRWSRGQVQTRFANLPPCLIGMEACVGAHHLSRRLQSQGHDARLMPAKYVRPYSKGQKNDFRDAEAIAEAVQRPTMKFVATKTAEQLDLQALHRVRERLVSQRTGIINQIRAFLLERGVAVRQGLRFLRAELPIILATRSDVLSPRMLRVVEELAGDWRRLDERIAGLSKEIEDLARQDPACERLMTVPGIGPIISSAMVAAIGNGAVFTKGRDFGAWLGLVPKQISTGDRTILGAISRRGNRYLRALFVQSAWVVLIRIKDWDRYGLKTWIDAAKKRLHHNVLAIALANKLARIAWAVLNKERAFECVKTHATARQPA

SEQ ID NO: 46710 - protein, 342 aa, unidentified
MKPNSQMTLDKYFRQCVGIDVSKDKFTACLFMYDMASDVGCCTESVDFPNSKTGFNQMVKWSRKEAQKGFLLTYLMEPTGSYYEPLAYHLHKIGLTLYVVLPNKARSFCEYEGIKTKTDAMDARCLALLGCKNQRLRPWQPPKAIYRELRQLTRLRASLTKMQTQILNHIEAIDHMESVTSEVCKSYKKLLSTIQKQLEQNEQAIAAKVAQDKELETRIKRIATAKGIKSNTITCIVAETQGFHLITNRKQLTSFAGLDVVAKQSGKDDPKHKISKKGNAYIRAALYMPALSAAHCNRRSCRSARTIRCRPGRHTYLNRSFSHQTVSCHICRSRPRGRCPDP

SEQ ID NO: 46711 - protein, 356 aa, unidentified
MEQITRGQAVRVGVDLAKRVIQVHAVDAGGRVVAARALARDKFIEWCVMLPAGCVVAMEASSSAHHWARKLVAVGLDARIISAQLVTPYRSQGTTGKNDANDAAAICEAASRPTMRFIPVKSIEQQSMLCVHRLREGIKEDRTACINRVRGLLAEFGLVFPKGSRELQGVLSDVLEDAGNELGTLARLTLQRAQTQWHELDAHLAWCDERIAAHGQHNAAVKAAASLLGIGPVTASAVVATVADFKQFKNGAQFGAWIGLTPRQHSSGGKSNLGGITKRGDTYLRTLLIQGAKSAVMTAHCRPDKISQWAVALRERSGWQKAVVALANKNARILWAVMTRGEAFDANHLSVKPLGS

SEQ ID NO: 46712 - protein, 363 aa, unidentified
MRIIGCDLHARQQTLAMLDTTTGEIASITLKHEDDSVREFYSSLPRPVRVGIEATGSMHWFLNLMEELGIECLVGHPAQIRAAEPRKQKHDRRDADLILKLLAENRFPAIWLPSKELQDLRSLLRHRHQWVRMRTRIQNALQSIALANGLRRGTALWSRDGQSRIAALPLAPHTAYRRSELQAMYEKFETEIEKLNQRVEQQACQRSGARLLMTHPGVGPITALATEVFLGDPGRFADGKALASYVGMIPREYSSGGMRQRLGGLSKQGNPLLRFLWGEAGAHAVRKDPELQRFYRRKLVQKGLGKASVAVARKLGIRLWIMLRDQIEYNEFCRRGQKQQKSSDACAGMPETTNGANSHRPVD

SEQ ID NO: 46713 - protein, 355 aa, unidentified
MKNIITIGMDLGDKKNFIVGLDVDGKKKVSKMIGNTPKQLDKFFNPLKGNNIKIIMETGTHSPWISEMLKEKKFDVVVVNSNKLPLISRSLQKNDMNDAELLAQIGMFNNKLLNTVEHRSKASRIDLYTVKSREQLIEIRTKLINHVRGSLKSFGIILLSTSTPAFVKKNISHVPENLKDVIIPILEIIDTLTLKIKRYDQQIKHLSETKYKEETGILRQVNGVGPITALTFILTLENSSKFSKSRSVGAFLGLTPKLFQSGNINKQLGISKKGNKYLRSLLVSCAQYILGPFGKESDLRIFGLNKIKQGGKTSKKKIVVAVARKLAVLLHHLWRYKAEYDPLYNNKLKQMKKSA

SEQ ID NO: 46714 - protein, 411 aa, unidentified
MQVIYERCCGLDVHKRTITACRLRWLGSEWQKEIRQFGTMTKDLLALSDWLVKEGCTQVAMESTGVYWKPVYNILEGQVELLVVNAQHLKAVPGRKTDVRDAEWIAELLAHGLLRGSFVPPPGVRELRELTRYRSSVVRDRARTVNRLQKVLEAANIKLASVVSDIDGVSARLMLEGLVAGQRDTEQLASLAKGRLKEKHGQLVEALSCRLQPHQSFLIAEHLAQIDYLEGAIERLSGQIEEKLRPFEQQIGWLDTIPGINRRTAEVLWAETGGDMGRFASARHLASWAGMCPGNNESAGKRRSGRTRKGSPWLRHCLVEAAHGAAHTKNKYLRSQYHRIAARRGKKKALLAVGHSILVIAYHLLTRKQAYADLAANYFDERDRQAVTKRCVNRLQKLGYEISLEKLQMAA

SEQ ID NO: 46715 - protein, 432 aa, unidentified
MNELDVGSGLPFSSNISQGCVPSFQRHSFCNSSPKKVNTMFFVGIDIAKNSHEAAVIDGSGKIVAKPFKFPNSIGGFEKFLAAVKGVSEDLSQFEFGMEATGHYWLNLYTKLMDFNVVVHVINPVQSDALRGLYIRKTKNDAKDAFIIAELIRFGRYSETTLSDSDLLSLRELTRQRFYLVDCVSDAKRKAISFIDKIFPEYQTLFSDTFGATSVELLQTYTSPDVIAELDTELFTRFLKSVSHGRFGKSKAEEIQNAAKNTFGSFLFADSATLAIRQFIQQIKLLEEQIAEIEDFISEKFASFDCKLDTIVGVGTTLAASFLAEIGDITRFESPDKLAAFAGIDPSVKQSGEFNGTRNKMSKRGSPYLRRAFWLAAVSGIRANPALKAVYDKKRAQGKHHAVAVSAVMHKLCNIVFAMLKTNEPYKIILPE

SEQ ID NO: 46716 - protein, 350 aa, unidentified
MKKFIIGIDFSKETVDASIVQKEQPETLIAYKKFRNNLKGVDGLIAWAKSKVAQDGEIIFCGENTGTYSTLFSDELTDRGFIIWIEHSMNIVRGMGDVRGKDDKTDSLRIASYAARFYDKMKPYVRPKDETRVLKTLLAKRDRLKSFLKAEITNTKENPLMLQDSNIASSINEFFKRLEESLRKELKELERMILDVVMSCSEYAKNFNILTSMKGIGLINAVALIVYTDNFTKFNFNHRKIATYWGVVPFKNESGTSVRRGTHVSPKCNSWLKALLTEATLCAIRYNSRIKAYHDRLMARGKAIGIVFNNCKNKMLKILVAMVRDSKIYSDMDVSKDPHTTTTTSSIVVC

SEQ ID NO: 46717 - protein, 333 aa, unidentified
MVDGTQGSHRKEGSTKMTKHSRKVAGIDIAKTTLDVAVNVSKTSLQVPNDASGHRQLVTWLRREGIELVGLEASGGYERRVVACLRAAGFTVRVLQPIQVRAYAVFCLQRAKNDKIDARLIAVCTAAKPADKAAPDPRFDALAEMLTLLEQIEDDMARAKTRQEAFHDQRHRDLLDAEIRRLRAWRAAEIRFLLATLRRHKDLARRLALIQSVPGIGTRTALAVLIRMPEIGTLTREQAAALAGLAPFDQDSGKHQGRRRIAGGRKRLRKSLYAAALPAAFRWNPDLIDLYTRLINAGKTHKAALVACARKLIIYANTVVARGTPWADQKQTI

SEQ ID NO: 46718 - protein, 359 aa, unidentified
MARTSQPDSTRQVVVGVDTHKYIHVAVALDQHGARLGELSVGADSRGYQELHDWARGYGRVKTFGVEGTGSYGVGLSKFLRRAGVRVLEVNRSDRQLRYQHGKSDPLDAESAARSVLNGTATNTPKSAEGACEMIRQIKVARDGARKARSAALIALKSIVINAPSELRESLASLTTVAFVQRCASYRPGDVDSVHASTKYTLRSLARRWITLGEEIVDHDKLLDRLTEETAPTLREAFGIGPDVAAEMLIVFGDNPERIHSEAAFAKLCGVCPIPASSGLTNKHRLYRGGHRQANAALYRTIVVRMQYHAPTIAYVSRRTEEGLTKKDIIRCLKRHLAREIYQRVMADHHARMSNAEAA

SEQ ID NO: 46719 - protein, 345 aa, unidentified
MSKNTVIGIDLAKTSFAVIELGRGGDVRLRKTFRRDGLKRFLAKLEPTTVALEACGSAHYWGRWLEAHGHKPVLLPPQHVKGYLRGQKNDYNDAQAIAEACLHDAIRPVAVKSIEQQDEQAFHAIRRSLKVESTRLVNQMRGLLAEYGLTVPKSVSAFRRRVPELLEDAENGLSARFRMLLNRQWSRLQALLEEQAWYDQQLQQQAKEDETCRRLTGIPGVGPVVASAVKSWMGNGQQFRRGRDASAALGLVPKQYSTGGRQSLYGFTKRGDAYLRSLVVHGARAVVRTAKTKEDALSRWALAVEARRGHNRAVVAVANKIIRMAWVVVARQEYYRPAESQMAVA

SEQ ID NO: 46720 - protein, 416 aa, unidentified
MKIYPITRPIERYIALDIHKEYVLAGGMSAQQEWLLPPRRIEMSKFEEWAQKNLCESDGVVIETTTNVWDIYDIVQPLVGHVVVAHAGAVRQIAEARVKTDKEDVKRLIRLLIADILPEVWVPPVYVRELRGLISYRQRLVKTGAVFRNRLQSLLHSHNLVLPEEGLVSQAWWVRQEKISPLEKLQIGQEIALLEQIEKHKAEVDQELGKQSLGETWGKQALHLMQLPGIGVVIAMTLLSAIGDAHRFENAGKLVGYSGLGAGVHDSGQEHIEKRITKSGRKELRWAMVEAAWRAVRSSPYWKEQYEKFVKRMRRPNQAIVVVARKLLVAVWHVLTKAETDVRASEEDLAYKMLVLSWDVDENVRQGLTYKQFAKYALMKLGVETDITRFVRKNVPRRLAPREEVLARLAELGIVV

SEQ ID NO: 46721 - protein, 444 aa, unidentified
MSRKHRTHLRGERGQAFADRMRGVSLDRMLCVSLDVSKYFHVVMIHNGLGEIITPMFEIDIFQSGFDRLCQATEAAKERTQAQVVLVGMEPTGHYFENIARRLLEANYQVTLLNSFAVKQNRDQHMMQREKTDEIDVAAIGDLLCRGEGTSYRPAEGLYLRLQQLDRVRLSRVKIERMLKNQILGHLDRIFPGLVLIGKEATRRYTPLFVSDFWSCQTLQHLVRVCPDPHRLAQMKPDELVRAFHAQGYPMGVATAERIITYAQKVLLPDPELVPVRCELLRHDLELLEQVEHHIDALEEQLRELLQQTPYQILARLKGLGDIQVASLAAAAGKPEHYSSGSQVFRRSGLVSGRSESGTRQRKGKGKAILKTGDVYLRRILTNMALTLGLHQPVLGCYYQKLKQSKPDGVARVATARKAMGILWAIVRDQRSDMLILREEEAAM

SEQ ID NO: 46722 - protein, 354 aa, unidentified
MVSHDQGGRHESDDRHRPHKASHTAVAIDRDEDQIASVRVRATNRQVEQLLCWAEPFEKRTWAIESVGGMGYLLAQQLVAQGEEVLDVPATLASRIRVLATGRSNKNDPNDAHSIAIAALRASVLRSVEPADHGEVLRLLSKRNSDLGRQRSRVVCRLHSLFAELSPGGIAKEMYVSNAEALLAKVRPETPVQQMRFDLVLELLDDVRRLDDQIKASHRRIRLAVKASGSSVTDLYGVGPVHAAQLIGYSGDVRRFANRDAYASYNGTAPVERSSGGRIVHRLSQRGNRKVNHALHMVAVTQIRNSGTEGRIYFERKVSEGKTKKEALRSLKRQISNAVFRQLLLDAERGPGGR

SEQ ID NO: 46723 - protein, 335 aa, unidentified
MDRQYVGIDLHRRRCVIVRKSAAGEKLSSVRVANDALGIASAVAEAGPNPEVVIEATYGWYWIVDLLQEQGATVHLANPSGLNWGTRRVKNDERDAVDLIDMLRLGRLPEAWIAPPATRELRELVRYRAKLVALRSGLKAQVHAVMAKEGVLPAVTDMFCQAGNAQLDTLELADAYATRVQSLRTLIDAYDHEVARLEAQIRSRLRGHRGYRAIQAINGIGPTMAAILVAEIGDVTRFRSAPALCSWAGLTPKHKESDTTVRRGAVTKQGSRLVRWAVIEGTVRYHGGGKLAADYRQIAERRGKNKATMAIARKVLTLIYYGLRDGEIRCLAHAA

SEQ ID NO: 46724 - protein, 433 aa, unidentified
MKSQTTQTESKAQPLPTLCWVGLDWADQKHCLNVRTDPRGPGQRSFVEQKPETLDEFFLQLHSQHPQGRIAVAIEQSRGPALYALLKYDFLVIYPVNPRTLADYRRAFNVSGAKDDPRDADLLAELVALHADRLRALATEEPITRQLRLLTEQRRDFVADRTQASNRLRATLKCYYPLALDMVGESVSDPLALEFLRRWPNLAALKKVKPEVLRGFFYKHNSRSEEAIDARLQALAKAKPLTEDPALVEPLQFQAQRLVAHLQTLAQTIAAYDQRIRELFAQHSEAWLFKDLPGAGPVMAPRLAAAFGTLRTNFAACADLLCFSGVAPVKKQSGSQQVVHFRYARPIFLHQSIVEFAKCSIGQCEWARLLYDQERKNKKSKWAAIRKVAFKWVRILWRCWQDRQPYDEARYLRRLKEHGVALYDPLYEALSAA

SEQ ID NO: 46725 - protein, 321 aa, unidentified
MQEFYLGIDVAKAKLDCTLRLTTGKFRHKVIQNNQQGFKELRIWLDKQGAAIAHVCMEATGIYWEAVAHYFAEQKFPVSVINPAQIKAFGASRLVRTKTDKVDAQLIAEFGFERRPELWIAPSIAEQTLRALVLRLDALQNMRTQELNRLDVAREAIRQGITDHIDWLDKEIKALIRSINDHTHHDPDLKDKQKLLDSIPGLGERTIAILLSYYADTERFTSVKKAIAFAGLDPRHHESGSSVRGKTRMSKVGHTFIRKALYMPAMVALYRTTWGTAFRQRLTASGKPPMVIIGAMMRKLIHVAFGVLKSGKPFDASLHSA

SEQ ID NO: 46726 - protein, 366 aa, unidentified
MSQKLNAAIAVIGIDIGKNSFHIVGHDQRGAIVLRQKWSRGQVETRFANLPPCLIGMEACVGAHHLSRKLQIFGHDARLMPAKYVRPYSKGQKNDFRDAEAICEAVQRPTMRFVATKTADQLDLQALHRVRDRLVGQRTGVINQIRAFLLERGIAVRQGPHSLRSELPNILATRTDVLSPRMFRIIEALAGDWRRLDERIDGLSSEIETLADHDQACERLMTVPGIGPIISSAMVAAIGTGDVFSKGRDFGAWLGLVPKQISTGDRTILGKISRRGNRYLRALFVQAAWVVLVRVKRWERYGLKSWIEAAKKRLHHNVLAIALANKLARIAWAVLNKGRAFECVKTEEMASGPRRARGRRGAAWQR

SEQ ID NO: 46727 - protein, 337 aa, unidentified
MKVTRIGLDIAKNMFQVHGVDEHGEVVLRKALKRDKVAEFFAHLPPCLIGIEACGSAHHWARTLAQLGHTVRLMAGQFVAPYRKSGKNDGNDAEAICEAVGRPNMRFVPVKSEEQQAVLMVHRARSLMVENRTAQVNQIRGLLAEFGIVVPQGIEKLRCRLPDILEDAENGLPALARETLADLMEQLRHWDERVAHYDRQIEQLAAKSEPAQRLMKVEGIGPITATALVASVGDAKVFHSGRQFAAWLGMVPRQHSSGGKFRLGHITKRGDAYVRRLLIHGARSVIATWSRRDDAKSRWVKSLQERSGTNVAAVALAAKHARIVWALLTTGEAYRAV

SEQ ID NO: 46728 - protein, 348 aa, unidentified
MSQSNQYVGLDVSLKETSICVIDDADKIVWRGRVDSTPKAIASAVKQHAPHAVRIGLESGQLSSWLFHELKEAGLPVICVDARHAKAALSLKVNKTDANDALGLAQIMRVGWYREVTVKGLDCQAVRALLVARAQIVSQITTLKNCGRGILKTFGRVLPKGLRSQFPARVRAAIDGHPVLGAIIEPTLQVLEAARAQLLVYDKAVIQRARSDDTARQLMSAPGVGTVVALAYMTGVEDPARFKRSSSVAAYFGMTPRRYQSGEVDYAGRISKCGDGMVRGLLFEAAKVLLSRSARPSALKTWGEALGKRIGAKKATMAVARKLAVILHRMWTTGTTFQWNAEAGSPAA

SEQ ID NO: 46729 - protein, 343 aa, unidentified
MKKISTIGLDLAKNVFQVHGVDASGAMVLRRQLRRAAVEKFFAQLPPCTVGMEACGSAHHWARVIGRYGHQVRLMPPAYVKPYVKRNKNDGRDAEAICEAVGRPTMRFVPVKSIEQQATIAVHGTRALLVRQRTMIANALRAALSELGIVAAQGYEGLRELMAKLQEPSEEIPEMMRGALLLLAQHWQALDADERVLERQIAKAARCDGDARRLMEVPSVGPIIASTVLAKVPDAKVFRSGRDFAAWIGLTGKDHGTGGKHRPGRISKQGDRMLRALLISGASAHLRQQKARGITDPWLRDLLARRPYKVAMVAFAAKTARIIWAMLVKGEHYRDRASASAAA

SEQ ID NO: 46730 - protein, 343 aa, unidentified
MEHYAGIDVSLESASICIVDDKGNIVREGKAASEPAVLCKWLKDGGIELARVGLEAGPMSQWLYAGMAKAGFPVELLETRHVRAAFQTMPVKTDRKDARGIAQLMRLGWFRSVHCKSLPAQELRALLTARKLMQGKLQDVERSLRGILRGFGLKVGKTSPRTFEGRILELVAGQPVLQEVADALLAARTVLAREFRGLDQRIHKTARQDERVKLLMSVPGVASIVGMAFVAAIDDPARFKFSKNVGAHFGLTPGRYQSGETDLTGRISKCGDAGMRALLFDAAHIVLTKPVKQAGALKRWAMAIEKRAGRRRAKVALARRLAVIMHRMWVSGTPFDATKAAAA

SEQ ID NO: 46731 - protein, 422 aa, unidentified
MLQNTEEHEEIIERVAALDIGKAELVCCVRVPKPERVGQRLQEVATYSTMTRSLGLMADRLRELGVTRVVMEATSDYWKPPFYLLEAAGFETWLVNAKDVKHLPGRPKTDRLDAVWLCKVAERQMLRPSFVPPRPIRRLRDLTRYRVALVSEVGAEKNRVEKLLEDAQIKLSVVATDIFGVSGRAMMAALIAGQRDPKTLAQMARTRLRAKIPQLEEAFIGHFEDHHAFLLGRMLARIDALGADIAQLEERIDAEITPFDQAVTRLDEIPGIGRTAACVIIAEVGVDMSRFPTAAHLCSWARFAPGVKESAGRKKGNGATGHGNPYLARMLGEAAVSAAGTDTFLGERYRRIARRRGKKKAVVAVGRSILVIIWHLLSDPEAHFVDLGSDFYDTRMGTDRAIRNHVRRLQALGYRVTLEPAA

SEQ ID NO: 46732 - protein, 356 aa, unidentified
MSREIKYIGMDVHKEAVVIAVLSSSGKLVMESIVETKASSILQFIHGLRGELHVTWEEGTWASWLYDLLKPQVQEVLVCDPRRNALLKEGNKSDKIDARKLADLLRTGMVRPVYHGEHGLRTLRELGRSYRTISQDLNRVMNRIKALYRGWSIPCAGTQVYAPRYREQWLQKIEHAGVRRRAELLYQQLDGLQALRRTLRPELLAESRKHKAAKLLRQIPCIGPIRAARLLALMQTPHRFRSKRQLWTYSGLGIETRDSAQYRYVGGQLQRTKKPQQIRGLNRNHNHEMKEIFKGAATRASCGVGPLRDFYVALLDKGMKPEMARLTLARKIAAIALTLWKKEERFDAEQLKPQAA

SEQ ID NO: 46733 - protein, 405 aa, unidentified
MTEEEIISWFAGVDWGSERHQVCLLDARGTTVGEREFPHSGEGLAELGDWLLSMASAASTVAVAIEVPHGPVVDALIDRGFVVYAINPKQLDRLRDRFSVAGAKDDRRDAYVQADGLRTDRRLFRRLQVADPRLIELRAWSRLAEELRAERVRLSNRVHHQLWRYYPQMQKLTNDLAAPWFLELWAIASTPAKAGRLRKSTVERLLKQHRIRRMDAETVLRILREPAIKVAQGVAEAASIHMRSLVARLRIVNRELREAERKLDELCTTIGEIEQTSGEGLQRRDVAILRSMPGIGRINLGTLLSEASGPLSRRDYEGLRTLSGAAPVTKRSGKVTYCRQALCCARPIARHGLSLGTCRHPARSQVSRPIYCAAQTWPFARSCSPWCRGQTACLGLCPSAATDAI

SEQ ID NO: 46734 - protein, 388 aa, unidentified
MPKPVDLSKSLAVLDPDSTLIVVIEMSQSSWLVAARAPGLARDPLKKLPPDPEQLFKLIDRWREESRRAGRVVRRVCVAFEAGRDGFWLARLLRQHDIEAYVIHPTSIPVKRDHRRAKTDRLDTELLMRAFLGWLRGEADHCSMAAIPTLAEEDAKRPTRERESRVNARSRLVNRMKGALARLGIRGFNPKLRKAAEKLEELRTGAGEPLPPNTLAELRRDMAQLRFVADQIKQIEKAREARLEKAPREGAHPMVLMLASIKGVGLETAEMLVAEVLSRKLRDRRAVARYGGLTGSPDESGSRSREKGLARSGNARVRRGMIQLAWRFLMFQKESALAKWFEARTANGPRGVRKTMIVALARKLLIDLWRFVEDGTMLVGVELFDSRA

SEQ ID NO: 46735 - protein, 358 aa, unidentified
MTMRLYDQQHRFYCGIDLHARSMHLCVLDQAGAVVFDKNIPARPETFLKALAPFRDDVVVAAECMFAWYWLADLCAQEKIPFALGHALYMKLIYGAKTKNDKIDAAKIARLLRGGNFPLAYVYPKGMRETRDLLRRRTYLVRQRSALFTHLQILNGQYNLPPFPKKLSFAANRAELDIAGRFADKSVRQSAAVDLAVIDVLDAQIGAVELYLTRTAKVDDVQTFHRLQTIPGVGKVLALILLYEVHDIRRFGSEGQFLSYARLVRCAHESAGRSVGSGGKKIGNAHLRWAFAEAACLFLRASDRAKQWQQRQLKRRCEGRVLALLAARLARAVYHLWRKGEAFDEARFWQGEPAGAAR

SEQ ID NO: 46736 - protein, 340 aa, unidentified
MEKRYIGIDLHRNQFTCCIRLENGRCYLSTWRLEDLPRFVKKLRPSDEIAVEITGNTRLFYDAVLPHVARVVVVDTNQFRVISRSVKKTDARDAELLALYLSKGLLPEVRMKDKEHGQLASLTQTRDTLVKLRTALKNKVNNILSARGLNLAKEALSSEKKLEEVLSLPFDEVVRIELRVMVEQIRSLNQSIGELEKTIAEEGAKLEGHKSLTSIKGIGQITSAILLSVIGDVNDFPDESRLASYFGIVPRVANSNETERSGRIHKRGTKLGRTALVQSALIAARYSPYLKSFYERVKARRGAGKAIIALARKFLSIIYRTLKNQWVFEDFPNFVLAEAS

SEQ ID NO: 46737 - protein, 394 aa, unidentified
MLYDHPSVGPTAIRTQFGAIFVSLELSRSKWVLTSLSPGNGEKMSQYSLTAGDIGGLLARFADLKRKAKERTGSDYPIITIHEAGLDGFWVHRVLQNEGIESHVVDAASIATSRRRRRAKTDKIDGEALLRALLAFKRGEPRVCAMVVAPSPEAEDRRRVCRERQTLIEERIIHVNRIKGLLFAQGISDYAPLRRDRRKRLEGLSTGDGRPLPVHLKAQISRELDRLELLIDQIRSVEAEQETLLAVESKAGPEKAGPEAEPRNAVAMLLAVKGIGEHSGAILWSEGLCRQFSNRRQVAAYAGLAATPWRSGAVIHEQGLSKAGNPRLRTLMVQLAWLWLRHQPQSALACWFRARGERGRKGSIVALARKLLVALWKYVTHGVVIEGAAMKPAG

SEQ ID NO: 46738 - protein, 345 aa, unidentified
MSIVGGFDVHRKQITFDYVDTDTGEVSCGQVTCADRRRLAEWLVRFAGRDDVAFAAEACTGWRYVIEELQHAGVVAHLADPAETAAARGRKRRAKTDRADAKLLRCLLDEGRLPECYIPPTEVLEYRALLELYHDLRREHTAWLQRIHAVLFHQGAQQFGEGGLSTNEGRNRLVEIAAGQLSAAGQVQVATGIDMLEATEAQLQQIHRQLVGIARHLRGAKTLSDSIYGVGPITGLALTCWLGGGDRFSSARKAVRFAGLDVTVYSSAGKRSPGHLSRQGPPVLRWCLYEAGKTHARTTARDHGYYTHVKDRIDGKRAALSEARKIVRCACHILTELGDDAYARV

SEQ ID NO: 46739 - protein, 431 aa, unidentified
MNSSLNNDPTQNNYAAFIAIDWADQKHAFSLQVAGQAKKETGTLEQKPEIIGPWVAKLRERFGGRPIALAVEQSRGALIHALLAYDFLVLYPIHPTTVAKFREAFKFSGAKSDPLDTDQILEILTKHLELLKPLNPDTPETRLLGRLVQDRRTTVDLRTSHIQALLASLKEYFPQAIELVSGNLSSRLAGDFLKKWPTLESFQQAKPHTIKRFYYGHNVRSPEVIERALKLAISGQSLTTDSAIIESSQLISEMHSQMIQAFNPVIDAYDQRIEKVFHDHPEFPLFSQLPGAGPVMAPRLSAFFGTDRSRYAKAQNVQTFCGISPVTKSSGKTRVVYFRRACPQFQRQSFHEFARLSVASCQWARNYVDYYTGKGKKYNTIIRALAFKWIRILFRCWKDRTAYDDNKYMEILKKRGSIFATLHLEQKNENA

SEQ ID NO: 46740 - protein, 404 aa, unidentified
MNAVGIDVSKGKSTVAVLRPFGEVVASPFDVAHTGSELKSLADFIKELRGETKVVMEATGNYYEPIARYLHEQNIFVSVVNPVLISDFGGNTLRKPKTDKKDSLKIASYALSYWVDLKEYIPQEDLRKSLKLLNRQYQQASKLKTMMNNNLISLLDLTFPGINKIFTSPSRESDGHEKWVDFVLAFPHCDMISKLTIKAFARKYKKWCDNNSYYFAEASCKKIHDFSKECISSVSSGEASAFAIIQAAKMLNSATENCHVIQLEMNRVAAQLPEYSTVMSMYGVGKAMGPQLMAEIGDPRRFHSRKAITAYFGYDSENNDSGQKVSPSNSMTKKGAGALRRTLFIIIQVLLKTKPVDNPVYDFLIKKQSEGKHYYSYMNAAANKFLRIYYARVKEVLSAPEASA

SEQ ID NO: 46741 - protein, 402 aa, unidentified
MFIVGIDIAKHTHQASVMNTDGSLVGKSIKIPNTSVGFDSFISKLKEIDRDISHFEFGMEATDHYWLNIYTHLADLGCIVHVINPVQSDALRGLYIRQTKNDIKDSEIIADVIRIGIYCETSVSDDKMLALRDLTRQRFYLVDMVSDLKRKSLTLIDRIFPEYPTLFSDTFGTTSLELLANCNTPEDILAIETDKLVEMLSSASKGRFKQDKAEKIKETARNSFGALLCTDSASFMLRQFVEQIRFLENQIDELDEMISESLTELDSLITTITGIGDTLGAAILSEIGDIERFESADKLAAFAGIDPSVSQSGNFLGTRNRMSKRGSPYLRRAIWLAATAAILHDPAIKAFYDRKKAQGKHHYVCVGYICRKLVNIIFSVLKSGQPYQPVFPKNLDYGIDFL

SEQ ID NO: 46742 - protein, 412 aa, unidentified
MEVVYECCGGLDVHAKTVVACLVTKGRKEIRTFATMTDELLQLGDWLSSAGCTHVAIESTGVYWKPVFNMLEGLLTVILVNARHIKAVPGRKTDVRDCEWLADLLRHGLLKASFIPPLEIREVRELVRYRQTVVTEHTAVANRITKLIESANIKLGQVASEVLGLSGRLMLRALAAGETNAEKLAELAQGKLKSKKSELRRALAGHLTPVQRWVLAELLMRVEELETALSRVEARIGEEVAACADPFVPEAVELLESIPGVGIRTAQTIVAEIGVDMERFPSAKHLASWAGVCPGNHESAGKRNSGQPTKGNQSLRTILVEAAWAATHAKGTFLRAKYQRLVKRMPKQKALGAIAHRLLVMSYHLLKRRVPYAELGTVPLDQLQVERQRRRLVEQLKTLGVQVTIEEGALTT

SEQ ID NO: 46743 - protein, 346 aa, unidentified
MLHVGLDLSRKRVDVHVMNDAGETVDTWAVLPDRDGLHALARRLEQHGTPVYAAIESMTGARYVHDELELAGWRVDVADAVRVKGLAPLACKTDKIDARVLAELCRRDLVPAIWLPTPEHRAERERSRWRLHLVRHRVALKGRIHATLLTFGHQCPTSDLFGVTGRRRLEKMRLPEPWLGTVQASLRLIDQLEAEIDSCERELRTLGADHPYVPHLLTVPGIGWVLAYTIASEIGDIDRFASPKKLCGYTGLCPSVYQSGAKDRRGALKKNGPTYLRWALIEAAVHAARHPAYYEHYEATKKRLGKQRGSKVARIDVARRLAEAIWHMLTRNQAFSPAGPPGCLVA

SEQ ID NO: 46744 - protein, 408 aa, unidentified
MNTLYVGIDVSSKSNVVYLMLPNGDKHSNFSVANSHEGSTQLVKRILSALTSHSLDTVLIGLEATSVYGDNLVYFLREDATLAPFNRKIHVLNPKQVKKFHDTYNDLPKNDYVDSFVIADCLRFGRINKEVYLGDYRYKALQNLTRARFFAVQNLIKEKQRFMNVLFKKYSTMTQEKVFSDTFSTTALAVYDEFDSAEALANMDLHELTDFIIEKGKNRFPDPDAVAKAIQKAARSSYRLPKTVNDSVNQVLSISITSMKALESQIKEFDKAIKAQMELLPNVLISIPGIGPVYSAGIMAEIGDINRFDNQAALAKYAGLAWKQHQSGSFEAEVTRLIPSGNRFLKYYLYEAAFSLVRCDKEYSDFYHLKYKEVNRCQHKRALALTARKFVRLVFRLLKDNRLYCPAK

SEQ ID NO: 46745 - protein, 344 aa, unidentified
MDHFAGLDVSVKETSVCILDDAGKIVKEVKVASEPQALLKVLGNPAYRFKRIGLEAGPLSQWLFSALAEAELPVICVETRHMQAVLKAQINKTDRNDARGIAQMMRVGLYRVVHVKTLHSQKLRMLLTHRKLLQSKAIAIENDLRGTLRNFGLKVGMVGTVRFEARIQELVETIPDLAVMVEPLLVVRRALREQIVILHRRLLAIVRDDEVCRRLMTTPGVGPVVALTYRATVDVPARFRKSKSVGAVFGLTCSKYQSGEIDRNGRISRCGDEMMRVMLYEAAQSMLRSKKWSWLKAWAMQIARRRGMKKAIVALARRLAVIMHRIWIDGTEFRWTREATAAAA

SEQ ID NO: 46746 - protein, 373 aa, unidentified
MQSQTKVLKNADFTNQNFYIGLDVHKRQWTVTFRLDGTYIKTFTMEPSPKVLIKHLQAIYPNGNYFSVYEAGFCGTSHHEELCALGIKNIIMNPADLPMTHKHKTNQTDHHDSRALAEYLEAGKLKPIHIFSREQQELRSLCRLRNRNRRDVTRCKNRIKGLLMYYGISVPLEYQEKKCWSKRFVNWLKQQLTTVAGTSSLQFLIEDLEYHRTKLLAVLRKIKQLLKERFKEEWDLLLSIPGIGPLNVVTLLSEIGDIKRFITAARFANYLGLLPSEASSDETIIIKGINPRCNKYLRSMLVEAAWVAIRTSPSLLAYYKKHSYKDSNKAIIKVTRKLAMIIRGVWLNKEPYKEGYISTKSKDLLDNNKPNAA

SEQ ID NO: 46747 - protein, 342 aa, unidentified
MTVIIGVDPHKATHTAVAIDRDERPLARLRLVAERCQTQRLLAWAEPLGTERTWAVESAEGLGKLLAQQLLEAGEHVVDVPPTLAARVRVLGSTRASKNDSNDALATAIAGLRHCGLRAVRVEDHTAVIRMLIDRYDDLVALRTQAACRLHVALRELIAGGAPRRLGASRATKLLRNIHPQGAAGLERKRLAVELLADLRRLDRDIAVAKRRVSDAVTASGTSLLELHGVGPIVAGFILGHVGDPARFLTPERFASYNGTAPIEASSGPRKRHRLNPRGNRKLNHALHLAAVTQVRHDTPGRAYYQRKIAEGKSKKEALRALKRRISDAVWRRQLQVDLGRR

SEQ ID NO: 46748 - protein, 345 aa, unidentified
MTQCNVIAIDLAKDIFQVCIMTTNGKITFNKAMSRAKLKEWLVKQQLSLVAMESCGGAHYWARFAKSLGHKVMPIPPKQVKPFRTGQKTDANDAIAIAVASRAPNIKPARVLTNEEQGLQSVSKMRDLLDKQKLQLSNQVRGLLLEFGIIISKSIKSFKARIPEILEDGENQLPMPMRHSISKMWALYSRLEDDFKTLNNELMHLTEQDDDCKKLMKLEGVGPITSMRLKIQLGCGEHFKSSRQVSACIGLTPKQHSSGGKVQLGSVGKSSCDNPLRSCLFLGARAVVSKLKNRPAKTEKERWLKALIERRGANCASMALANKNARTAYALLKNNTDYNPVLIAA

SEQ ID NO: 46749 - protein, 367 aa, unidentified
MKKISTAGAKQSKNFREQKLTIGLDLGDRSSWYCVLDEAGEVVLEQRLGTTPKAVKEVFGKMPRSRIALEAGMHSPWVSRGLSELGHEVIVAHARNVRLIGESRRKDDRFDARSLARLARIDPQLLAPVQHRSAQAQAHLMVIRARAGLVRARTSLINTARGLTKSYGERLRGCNPRNMNGEKAQGLSPELQAALEPLLGAIESLSERIYEYNQQIEKIATNSYPQVARLKQVKGVGTLIALTYILTLEDAQRFRKSRDVGCYVGLQPGRRNSGQSEPQLHISKEGDPYLRTLLVQGAHHILGPFGADSDLRRWGLKLAERGGKNGKKRAVIATARKLAVLLHRLWVSGEAYEPLRNSRAMRLPAAA

SEQ ID NO: 46750 - protein, 447 aa, unidentified
MGEPISAGKRRARLKVINPRSAGIDVGSRFHVVAVPVELDPNPVRKFSSFTKDLIALAEWLLAVGISTTAMESTGIYWVPLYEILSGKGIDVFLVNARHAKNVPGRKTDINDAQWLQQLHSYGLVRASFRPDQKITELRSYLRQRDQLVRYRSSHQKHIQKALMLMNLQLHHVVRDISGLTGRRIIDAILSGERDPERLASLRDRRCKESAATIAAALEGNYQDDHLFSLKIAVELFDTYSEKIRACELAAQSLMTELAGSDYQDPGSQPGDWKICGHGFAFNPTHLIQALSGHNLLRLPGLGPTTVLTLISECGLDMKRWPSAQHFVSWLGLSPQNRISGGKVLSSRTRQGTTRAGSAFWMAAVPLGRTNTALGAFQRRLAARAGKSKALIATARKLAILYYKTLRDGLVYQDPGAAAYQEESRDRQIRGLQRRAIALGFQLVASA

SEQ ID NO: 46751 - protein, 342 aa, unidentified
MTKIIGCDFHPRFQQIAFVERETGEFGERRLGHPEEAKQFYRSLAGQGARIGVEATGNYRWFLRLMQELGHEVLLGDATQIRASNPRKQKTDKRDARHILTLLVEDRFPVIWQPPVENEEQRQLLLHRCRLVRMRTRIKNQLDSMAKNEGCLSRRVWSPGRREQIEALPLTGWRAERRRDLVALLEELNRRIGPLDEAVRAAAEASHEAQLLMTHPGVGPVVSLAYVLTIGDWRRFPRGKQVGSYLGLIPAEESSGSKRRLGQVSKQGNTLVRWLLVEAATTAQRYDASWHRQYVRLSMTKHHGVAKVAIAHKLAVRLYWMLRSGEDYSKLMERGSHAGQSE

SEQ ID NO: 46752 - protein, 356 aa, unidentified
MAEGTWVGLDVHARKVVAGVLDAETGELRSWRAPTLPAETVEWLRQFAAPVRVAYEAGPTGYGLARACAAAGIVCTVAAPSKIQRAPADRVKTDRRDAERLARLLRLGELVAVRVPEPHEEAARDLIRAREDARGELMRARHRLSKLLLRHGLVYDAAAWTLAHDAWLRRQRFDSRPLQLALEESYAAAMQAKARRDGLDEAIVELAGEPPFAETVGRLCCLRGVGTLTALALTVELGDWTRFRPQSLGPFLGLTPSEDSSGERRRLGAITKTGNTHARRLLVEAAWHQRRPLRESATLTRRRQGQPAAVCARADRSARRLHARWQALERRGKRRTIVAVAVARELAGHCWALATM

SEQ ID NO: 46753 - protein, 331 aa, unidentified
MSQPVHAGVDISAESFAVAYEMPGQPLKETCLDNSAAGHRKLCRLLTRGGRPARVCLEATGIYSLDLASALHRTPGIEVMVVNPRVTKDFMRARMHRTKTDATDAVAILEFVQRMPFTPWQPPAREILALRAIARRITALTLVGAQERNRRHATDRCRELPEALEAESTAHLEFLQASSQRLTHEALAIIQAHPRLRSRYAHLISVKGIATTSAIRLLAELAVLPDDMAARQWVAHAGLDPRHFESGTSVKKPTRISKTGNNYLRAALYLPALVAIQHEPHVKAFYEQLLARAKKPMQAVVAVMRKLLHAIYGMFRHGRDFEGDKFYALPT

SEQ ID NO: 46754 - protein, 394 aa, unidentified
MKLIGIDIGKNKHFFCVMDQQTGEIISQPISFSNDKEGFDFLVQKIKSYPKDSILIGMEDTGHYHFALLKYLLNLQYTVALINPKTTDFNRKMQGGITKNDKLDTINICDVLDTPERKKQYRITKVNSFDLYEQKQLTRHHHNLKEEENVYKNRLQKCIDIVFPEFNKLFNSKYGIVYMNILKMFGSAENIANTDIRTIRKCFEIEGRGNRISLTPERLKECARSSIGISSSAEVIQIKHLTAQIELIEEQLTEIDKKIEEFSIQNNSPILSIPGISHFSGTSILAELGDISNYSKPSQIIKFAGVAPLHYESSQFNAQHTSITKKGSKYLRKTLYQIILPVIRHNPVFNKYYQLKISQGKGHRCAQGHCVRKLLRIIYHLLKTNQQFDPQLLR

SEQ ID NO: 46755 - protein, 509 aa, unidentified
MVSGCPAFYHVAPSRIMAPRSTPYCPLPVTHTDDPAEHQVLHPYGVGIDTHSKFIQVCILFRTPGSDTGGIKRLERTFLTTFSDLQRAHQWTLNVLAGLAEPETLRYCIESTGTYHCPVLIAWGGIPSVVNPLLAGPTRRKTDVLDARLLAHHSITGLWRSSFIAPPDLQQLRVLWAQRREFAREATRCTNRIQNIILRFGHTYAARDPIRSAVGRSITESLLLGTAPNCPGVCPGGLPPEVAQVIAGLLSKYDTAKEAAHRALVAARNFIRSRNWPTGTTPMPGTNLLHLLLSVPAVGEVTAITWLAEVGDPKRFDHAKQVSAFCGCDPSLKTSAGKVTSFTRRAGNIRLHSALAAAAQVLMASPSNPFGQYGRSIAGRHKKGGYKKAVGALARRLAIALWHVHFKAEPFSFAGYKFHEQPPVPSVSITAALGSAVARRLAPHGFQKMPDLVDAYRAGKLAQISGIGGTTLDLIREWLTANARQQPKQKDKQHGKKHTTKHPRSSDRR

SEQ ID NO: 46756 - protein, 392 aa, unidentified
MYIVGIDIGKNHHEASIVSPEGKQIGPSLRFATTHKGADSLMSFIFKNIGNSPCVFGMEATGHYWYPIYSFLKAKGYTIYVINPIQSDSLRKMYIRQTKNDSIDSFLIAEVIRFGQFGTTSMADENILAMRQLCHYRDSVISSRTEIKLRIGTIMEQIFPEYEKQFSSLWVSTSMGILEKYLTPENIENAPIDELFEIIKDKSHNRLTRAKAISIKEAAADTFGIKIAQEAFSFQLKQLIDRMNFLDKQIEALDCQILEYYEKFDCYLHTIPGIGMIAAATILAEIGDINRFKSSSALVAFAGIDPTVRQSGEFSSTHNHMSKRGSPYLRHAIFLAATTCSFHNSPLNAYYKKKRDQGKHHLTATGAVARKLTTVIYAVLRDSKPYEPKSFC

SEQ ID NO: 46757 - protein, 403 aa, unidentified
MNNVAGIDVSKGKSMVSVLRPFGEVVAKPFSVGHTGSELKELADYLKSLDGETRVVMEHTGRYYEPVARFLHDEGVFVSAVNPKLIKDYGNNTLRKVKTDKADSRKIARYGIDNWAELRQHTPMDTIRMQLKTLNRQQSLYAKTKTMMKNNLIALLDQTYPGVNALFDSPVREDGSQKWVDFATTFWHVDCVRNMSLTAFAERYRKWCKRHGYNFSQSKAVEVHAGAQDLIAMLPRDALTKTMVRQAIDALNAISASLERLKAEMQALAAQLPEYPVVMTMHGVGDSLGPQLMAELGDVTRFTHRNAITAFAGVDPGADQSGTHEAKSTRVSKSGPPELRRALFLVMDCLLKTQPQDDPVYRFMDKKRAEGKPYLVYMTAGANKFLRIYYGRVKEYLAQLENS

SEQ ID NO: 46758 - protein, 429 aa, unidentified
MNYTQKRRINQVDEETLVVGIDVSKERNVARAQDFRGIEHGKAIKFLNRTNGFERFKKWAFELMAKEDKEKIIIGLEPTGHYWLPFFKYLTASGFKTVTVNPHHVEKSKELDDNNPTKNDVKDARVIAQLVKDGRYSEPNLPEGKYADLRVAINHRERLNKDLTRIKNRIQRWIDMYFPEFNDVFKSFEGKAALSTLKNIPLPEEVRLREPEEIVALWRKDGIKRGVGIKKARRIKKKSINSVGVETGLELARREIKQLLEQYNLLEEQLEKLEKQIEELLEELPGAKEMLSIPGVGKITVAGFLAECGDLNNYDHPRQIIKLAGLNLKEHSSGKHKGETKITKRGRPKLRALLYRVSLPLVRCNEEFREIHEYYTKRNKNPLKKTQSLIAICCKLIRILYTLGTREIEYDGEKLRNDIKRPKDYERAA

SEQ ID NO: 46759 - protein, 347 aa, unidentified
MDTIGLDLHKRESQLAIKAADGTITERRIVTSRERFTAVLGTRPRARILLEASTESEWVARHLEALGHEVIVADPNYAPMYATRSRRVKTDKRDARALLDACGQGTYRRAHRLSEPRRHVRAELAVREALVRTRTRYVALAKALVRRDGLRVPSSAAERVGAHLQALALAPALAAELAPLLTVLTPLNAAIAAADQRVGTLEASDPIVALLMTAPGIGAVTASALVATIDDITRFHSAHQCEAYLGLVPGERSSGEQRRIGPITKAGNRRTRWLLVEAAWRILRSKDPESAALRTWALTIAARRGKRIAVVALARRLAGIVYAMWRDGVPYDGTRIRPPVARVLQAG

SEQ ID NO: 46760 - protein, 322 aa, unidentified
MSATSVVVGIDVAKAYVDVAVLGGEFVAQRFENEAEGHAALAGALQPLDVALVVMEATGGYEAALACALQATGLPVAVVNPKQARDFAKAMGRLAKTDRIDADMLAELAAVLVRRDDLARYLRPLPDAQQQTLAAVVTRRRQLLTMLGSERQRLQLAIPLVRPSIEAMIQAIRAQLDDVEAQMVSHVREHFAELDTLLRSARGIGPIASATLLATLPELGRLTRRQIAALVGVAPIANDSGTTRGRRRVQGGRFETRRVLYMATLTAAKHNPAICAFYQRLVAAGKLPKVALVACMRKLLTTLNAMVMVRTNKPWDSSPHRA

SEQ ID NO: 46761 - protein, 359 aa, unidentified
MCQSGGVDHHLREASVSKVTTIGLDIAKSSFHAHGADERGEAVFSRKLTRGKLLDFFAAQPACLVAMEACGGAHHWARELTQLGHEVRLIPPAYVKPFVKRHKNDAVDAEAICEAVRRPGMRFVAIKTEEQQAAGMVFRTRDLLVRQRTQLVNALRGHLAEYGWVAPRGKAQMAILADLLDEDEMASSLPEAARAMFRIMTDMLAELDDRIADLDKEIARRAREDEVARRLMTIPGIGPIAATAIVALAPQAASFSKGRDFAAWLGLAPLQHSTGGKQKLGRISKMGERTIRRLLIIGGSAVVRQATIHGARAGSWLEGMLARKPRMLVSVALANKMARIAWALMTRQEDYKAPVVVAA

SEQ ID NO: 46762 - protein, 316 aa, unidentified
MTKTITRTAGIDTSKAKLDIALHGGECWQVANAASGWRSLAKKLTEVGIERVGIEASGGYERGVVGCLREAGFEVLVLQPMQVKAYARVHLRRAKNDVLDAVLIAACAATIDRPRVEPDARLSDLAQHLTFIEQIEEDMARFKVRLEHVEGARLRQVVTNDIARLKMRRAAELVRLAKALRIHEDLGRRFDLVLSVPGIGERTALAIVIRMPELGRISREEVAALAGLAPFDHDSGKHRGERHIAGGRGRLRRSLFAAALPAAFRWNKALIDLYARLIARGKAHKAALVACARKLIVYANTVVERGTPWVERPAAL

SEQ ID NO: 46763 - protein, 361 aa, unidentified
MSVRRILAKTIDTDLEYEAIGIDLAKNCVSAALLTTDGEVVCIDRLDYSELEKSAQVLTTEMNYLVQKLEAWGHRCLVIGGKNVQNYVENHFSGQKTDLNDAQALAFLAQDTQLRTIKAKDVEQQKYASLTTLREQYIKQYRQTIVSLKGICQAWGLNISKGISGKARLKDLIENHAAFPEELKESLVDMVTHAQTAQKALNKITKTLEELAKSDKVCQLIQTIPGLGSICSCRLRATVGDIKRFKSPKDFPAYYGLVPRSIATGHNERKGKITHRGDRTMRSLMVQAAGSLVNMATKGKLKSKQLTKWILKKQKEKMPWGKLVCAVAAKLLRIVRAVLISNKPYNSKIAGVAKCSLPKGS

SEQ ID NO: 46764 - protein, 442 aa, unidentified
MRTLSVINANAAAIDVGSEQLHLSIAGERPVVFGTVTNEVYRLRDYVKGQGVTTVAMEATGVYWLYAYVVLEAAGLEVVVVNGRHVRNLPGRKTDMADCQWLATLHAHGLLRGGFVPPAAIRRLQDYQRLRADHISEAASQVQKMQQALERMNIKFHDVISDLTGVSGLRVVRAILAGQRDPEQLLDLCDVQIQKKKRERVIESLHGVWAPEHLFALQQALAVWEFYQQLLADCDRQIEAVLKDLAGPEPQPPTSTGGPASSTPVKPLGKNAPGIEHLHEMLVRICGGRDATALPGVGDHLLLQLVAETGTDLSAWPTEKHFTAWCGLAPGSRQSGKRRGSIKRQRNRAGRLFCTGSRSLAQSVDKALGAFYRRMRGRKGGLLAMKALARKLAELYYRVLRYGLAYAEKGLRAYEEKYAESQRRLLAKLAAKQGFKLVAVQA

SEQ ID NO: 46765 - protein, 403 aa, unidentified
MRYSMGVDWADTEHAVWVEDESGVKVTALAVKHTAEGLGEFGRWLYERRAQGIELWAAIEKPEGRLVDFLLDHGVVVYPVNPKALDRARDRFRMSGAKSDPFDARVLAAFLRTDHSHLRPLLPNSEPAQELKLLTRDHQRLVRQRTRLVNQLTATLKEYYPRALEVVEDLTTAWGREFLRACPTPAALTARQWEQFARAHRLGKARAAELWATLEQPHLPVPPHVVRAKARLVQVLVGQLDATVPAVDDYRKAVEDFFAAMPAAEWAQTLPGGQSGTTVPTLWAELGDAAGRWESFHHLQGQAGSVPVTERSGKHQIVKFRFACNRHLRAAVHQFAFLSLRHSEWARAYSHRYRQRGHGHHAAVRAVGAKWLKIIFAMWARQNRYDETHHLATIARQQLRQAA

SEQ ID NO: 46766 - protein, 392 aa, unidentified
MYIVGIDIGKNHHEASIVSPEGKQIGRSLRFATTHKGADSLMSFIFKNIGNSPCVFGMEATGHYWYPIYSFLKAKGYTIYVINPIQSDSLRKMYIRQTKNDSIDSFLIAEVIRFGQFGTTSMADENILAMRQLCRYRDSVISSRTEIKLRIGTIMEQIFPEYEKQFSSLWVSTSMGILEKYLTPENIENAPIDELFEIIKDKSHNRLTKAKAISIKEAAADTFGIKIAQDAFSFQLKQLIDRMNFLDKQIEALDIEIMKYYEQFDCYLHTIPGIGMIAAATILAEIGDINRFKSSSALVAFAGIDPTVRQSGEFNSTHNHMSKRGSPYLRHAIFLAATTCSFHNSPLNAYYKKKRDQGKHHLTATGAVARKLTTVIYAVLRDSKPYEPKKFC

SEQ ID NO: 46767 - protein, 342 aa, unidentified
MKITTIGIDLAKTTLSVHGVDDNGKVVLRKSMSRSKLLEFMANREPCLVGMEACGGAHDLARRLIAMGHRARLMAARFVQPYRKSQKNDGNDAEAICEAVARPNMRFVPVKSAEQQALLSVHRVRLQLIETRTALINQLRGLLAEFGILMPKGRYQLRTHATPALEHPDLPELARTVLKELNTRIQALDIEILSQDRRIEAYARDNALAQRLIAICGIGPISASAIVASVGDAKLFKNGRQFCAWLGLVPRQYSTGGKARLGRITKRGDVYLRTLLVHGARSALNVLAKRTDRLSTWIQSLSARRGYKKAIVALAAKNARIAWAVLATGKPYEPRGCAQAAQ

SEQ ID NO: 46768 - protein, 416 aa, unidentified
MNERGTVAAGIDTHKDTHALCVIDLVGRVVATGAYAADGEGYDRIAAAIGDPRDCVVVGVEGTGSYGAGISRRLAELGYDVVEAVGPKREKRMAGRDKNDPADAERAARDALAGKASGAPKAGGGWAGALRFRMVARDAAVSESTRAANSAHALIVTAPAPIRGELGGMKTPALMKALSRRRRARDVVESSLWESLRSLSLSWIGAKKAAAAHEEAMREILLANAPALLDIHCCGTISAARLAVTAGDNPERASGESAFASLCGASPVEASSGKVKRHRLNRGGDRQANRALHTIARQRMKRDSRTKLYVDKRTKEGKSRREIERILVRYIAREVYGALMRPMDAACEPYRASARAAKSERLRAGAAQAQASRALGVASARISEMERGRLVDAPLLQRYRSWLESLSAGERRESPE

SEQ ID NO: 46769 - protein, 354 aa, unidentified
MIIIGADYHPGFQQIGFVDTDTGEFQERRLQHREEAEKFYRDLAAQGMRVRVGMEASGQARWFERLLSELHFELWVGDAAEIRTKRVRKQKTDRQDAQLILRLMLEDRFPKIWVPSWENRDLRQLLWHRHRMVQARTRIMNQLQAVALNEGLRCKKRLWREHGRQQLESFRLAPWASRRRRDLLELMDRLNPTITELSQAIEQEVEKCPEARRLTTHPGVGALTALAFVLIIGQADRFQCGKQIASYLGLVPLEDSSGNRRRLGHITKQGSSMMRFLLVEAAQVTVRSVPEWRSKYLHLMMRRGRKTAKVAMARKLAVRLYWMWRKGWDYAQWSKFGSHAGQPGNRDGVQSITE

SEQ ID NO: 46770 - protein, 457 aa, unidentified
MKVVNTHCAGIDVGSRSHYVAIGQLDSDVREFGVYAGDLQELCRWLKDKEITSAALESTGSYWQNLFVELVNSGIRVVLTSGRFTKSMNRKKTDVRDCQWIQKLHSLGLLPSSFLPDSSTEKLRTLCRHRSNMIDLKADASHKMQKFLKLLNFRLDVVVRDVTGLTGLKIIEDICKGVLDPGKLCKNRHYNCRKSQEEIARALVSNGREDYIFGLTQEFERHRFYLLQIEKCDQKIAEFLDGLLEGVPLEVPDAKPFKRNNKNSISGLDLNKVSYQYFHGVDIYQIPGVSHSTVLSIMSEIGPEGFSMFPSAKHFASWLRLAPNNKISGGKTLSNRIPKGSSRLKIALRNAANAVGNLKESDLGRFFMKIAFKKGRQAAITATARKIAVILWNMVTRKELYLPKSTYVYLDEKRKQLALIRKKIAKFGFDPNELGIFSQDKYRIAYEKRITENQVLT

SEQ ID NO: 46771 - protein, 449 aa, unidentified
MMEQDMATSKAKVAAKLEVVHPDAAGVDVGGSSHHVAIRGDAPGQTVREFGCYTKDLHEMADWLLSSGVKIVALESTGVYWIPVYEVLERRGLEVLLVHARHVKGVSGRKSDVLDCQWLQQLMSYGLLSGAFRPQDQMCELRELNRLRTRLLREQGRSVQHMQKALTVMNVQLTNAISDVAGVTGQKIVRAIVEGERDPQELASYRDARIKASEEEIAASLQGNWRTEHLLALKVALATFDFCGQQIGQCEVEIERAMQELQRFTQEPEKGKKRSKGKNAPKFDVRERLFKMCGVDLTRINGIDVSTAMTIVSEVGTDMSRFPSDKHFASWLGLCPGTNISGGKRLGAASKHSANRATLALKQAAAALRTSQSALGAYFRTLCGRMDKAKAVTAAAHKLARLIYAMLTKGQEYTDLGQLYYEDRYRERAVRQLQRRANKLGMLVVPAGS

SEQ ID NO: 46772 - protein, 420 aa, unidentified
MSFKIFRFNCCGLDVHKTWIYACIGITDSNGRTDYKQARFSSFSKGLKELCDWLAKYNCSEVCMESTGKYWIPVFNVLEKANNSVILAHPKYTKTQKGNKTDRKDAKWICDLFMCEMIKPSFIPPADIRHLRDLVRYRFKLTCMITGEKNRAQNCLTVSNLKLDDVFSDVFGKSSRSITEYMLAHPGEIFDVAPFVDSRCKTPMEEIQAAVDGAISPEQAIKLRQCLNHIDELEKHLEEIEREILRLSDKYQAALDLIRTVPAFDKNPMTAIQILSEIGGDMSVFPSAKHLVSWAGCCPRNDQSNKRIKSTRISRAGNYIKPILVQVANGLLRSKKHPEITGRYKRIKSHRGHKKAIIAICRMLLTAIWHILSDLKPYTAEGFLESRPVNKAKVLTTSQALNLLKQRGYTIKDDIVPAMN

SEQ ID NO: 46773 - protein, 367 aa, unidentified
MEKKIAYIGIDYHSETLSLAVIVDGKKDFFDSITMKNNDKIILKYLKKLSKEFELKACYEASCNGYTFQRKMKNWGFHCDVIAPSLIPKKPGDKRKNDYRDARNLTQLYANGQLTIVHPPTEEQESIRSIIRCRLSLKENEKNVKLQINSFALSHGFRWPQSKWTVKHRTWLSTLKLRDDYSQQVLAEHLGHLEYLSARISSLDEVIREIAGSEIYEPSVKKLRAFKGIGTLSAMILITEITDFRRFPNPRSMMAFLGLIPSEDSSGNKQKGGAITKTGNHRCRTQLIESVQHLMKKPIISYKMKQNLEQADPASANIAIKCMHRLNKRFWALTMKGKSRNKAITAIAREFVGFIWAMMTQPEPATI

SEQ ID NO: 46774 - protein, 317 aa, unidentified
MSKHTTVSAGIDTGKCKLDIALDRCPERLQVDNTDDGHAVLWGWLRQHRVNRVGIEASGGYEQAVVSALRRKGFLVIVFQPAQVRAYAKYRLQLAKNDKIDAALIAACTAEAKKIHPPPDPRLAPFAELLTVIEQLTEDIARLKTRRATSRDEQIRRFWNEEIARLKRLQSQKLKQLVAAIREHRDLADRLELIVSVDGVGLRTAVAILVRMPEIGRITREQAAALVGVAPYDADSGSHIGLRHIEGGRERLRKSLYTAALPAAFNWNPELMAIYKRLTAAGKPHKLALVACARKMIIFVNTVVARGTPWVPRDALI

SEQ ID NO: 46775 - protein, 351 aa, unidentified
MIIIGVDYHPSDQYIAFVDTETGEYVERQLNHSDGEAEKFYRELATRGVSVRVGMEATGYSRWFERLLAELGMELWIGNAAEIKTKRLRKQKTDREDARLLLRLLQEKNFPRIWVPSPENRDLRQLLWHRHRMVQMRTRIMNQLQALAMNEGQRRKKKLWNEAGRAQLEKLALGTWASRRRKDLLELLDRMNPTIEELTRAVEQEVKKWPEALRLMTHPGVGPLTALAFVLIIGTPQRFRRGKQIGSYVGLIPEENSSAGHQRLGHITKQGSSLLRFLLGQAAQAAARCDADWRRRYMHLALRRQRNIAKVAMARRLGVRLYWMWRKGWEYSDWVKFGSHAGQLGTGHGVP

SEQ ID NO: 46776 - protein, 367 aa, unidentified
MKKISTVAVKQSKNISGKKLTIGLDLGDRSSWYCVLDEAGEVLLEQKLGTTPKAMKDVIGAMPRCRIALETGMHSPWVSRLLSDLGHEVIVAHARNVRLIGESRKKDDRVDARTLARLARIDPQLLSPVKHRSAKAQADLTVIRARAGLVRSRTALINTARGLTKSYGERLRGCNPRNMNPEKAQQLSPELQAALEPLLAAIESLSERIHEYNQQIEKIARESYPQVARLEQVKGVGTLIALTYLLTLEDPHRFRKSRDVGCYVGLQPGRRNSGKSEPQLPISKEGDPYLRTLLVQGAHHILGPFGADSDLRRWGLKLAERGGKNGKKRAVIATARKLAVLLHRLWVSGEAYEPLRNSHPSAMPAAA

SEQ ID NO: 46777 - protein, 369 aa, unidentified
MTKVRYIGLDVHKDSISIATADEGRAAAQGYGAIVNDTAILMKTLEILTPEDGRLVVCYEAGPTGYGLHRRLTEAGIECLVVAPSLVPTKAGVHIKTDRRDAKQLAHYLRSGDLTPIYVPDTAVEALRDLERARDDAKKAERTARHQLDKFLLRHDRRWETGKTKWTVRHMQWIHTQKFDHQAQRCVLSDYIKTVEDATVRVKQLEKDIEQAVQQSALAPLITALQAFRGIALVTATVIAAEIGDLRRFRTASEFMSYIGLVPSEESSGQRRRQGRITRAGNGHLRRILVEAAWHYRHLPNMSKEIRRRNQPVAEGVRAIAWNAQKRLNRRMQHLLHRGKHKNKATIAVARELAGFIWAVGQESELLAS

SEQ ID NO: 46778 - protein, 362 aa, unidentified
MTKFTCESVARVGVDLSKHVYQVHALDAQGRIVLAKAMSAERFFAWCSQLPAACIVAMEACGGAHHVARRLQMLGLNARLIAGHFVTPYRMAGKSGKNDANDAAAICEAAGRPHMRFVPIKTAQQQGQLALHRLREGFKEERTALINRIRGLLAEFGLVFAQNPDALRRMLASVIEDASNELPSVARLALQRAHLHWIEIDLQMAWCDERIAAHVRTDARAAKAASLLGIGPTTASALVASVGDFGQFANARQFGAWLGLVPSQNSTGGKARLGGITKRGDDYLRTLLIQGAKSAVMTATKRSDRISQWLVQLKERIGWQKTVVALANKNARILWAMLTRDAVFDPNHVPPIPPARQKHMPV

SEQ ID NO: 46779 - protein, 416 aa, unidentified
MMEVVVERCAALDVHKDTVMACVRRPTAGSRRGHQVREFRTYTATLRELRAWLAAEGVTQVAMEATGVYWRPVWSALEDLDGVELLLVNAHHVKNLPGRKTDVNDAVWLAQLLECGLLRGSFVPSPVIARLRDLTRYRKKLIEDRAREVQRVQKALEIAGVKLDSVVSDVMGKAARRMLDALIVGERDVEVIAEMALTRMRPKIPELQLALESRFDDHNALMVSMHLGHIDHLSAAIERLDQEVERELTPFAEQAQRLCTMPGIGQRTAEVVIAEIGVDMSRFPTAGHLASWAGLCPGHHESAGKQRSGKARKGDAALRTALCEAAWSAAKTRDTYLAAQFRRFSRRFGKKQEGKAIFAVAHTMIVGIWWMLTNSVDYVELGGDYFEQRTDQAAQTRRLVRQLERLGHQVSLTPAA

SEQ ID NO: 46780 - protein, 294 aa, unidentified
MNSTQVFEKRKIAVAIGIDLAKDHCDVVAYNADNKICFTKANMTYPKLMEWLANAQPAVVLMESCKGCHVRARDIADLGHDTRLVKGADVKALRNVCQKNAIRDADYIARLLYVPGTKFVFVKNQRQQSLQFLQNEYKSIQELRIQVGNQIHAGLEEFGCPGPKSKKFIQSRMMAHLEKNAELIPDEVMSSFLRRREMWLNLFKQEEDAKKRMEEIAKTDDDTKRMMTVPGVGAQTAVGMLVHIGGDIGRFKNSGQFAASIGLVPKQNSTGGNTTLNGITKCGPKRLRANLVQC

SEQ ID NO: 46781 - protein, 426 aa, unidentified
MQQEPEQQEFGAYIGLDWADRTHVISLRGTDSGKVEHYQLVHKPEALAEWVSDLQRRFPGQRVAVALEQARGAVVHALMGYDFLVLYPVNPKTLAKYREAFSPSGAKDDPTDADLLLELVTLHRDKLRAWLPDDELTRTITLLVEYRRQLVATQTSLSNRLTSLLKLYYPQALAWAGELTTVQACDFLQRWPTLAQVQQAPPAKLRQFYLAHGCRKADVIEQRLQEIKLAQPLTRDGAVITASVLMVQATTTQLRPLMEAIARMEKQIGELFSQHADHDLFSSFPGAGPVLAPRLLAALGADRGRFAAATEVQQLSGIAPVMERSGKTCWVHRRWACPKFVRQSFHEFAGQSIRWSTWARAFYDQQRQRGHGHHAAVRSLAYRWIRIIYRCWQMRVPYCEQTYCRALQRRQSPLARVLAAPMQNAS

SEQ ID NO: 46782 - protein, 337 aa, unidentified
MTLYCGIDLHCNNSVVAVLDEQDRTVYEKRLPNDLETITEVLCIYQSELAACVVESTYNWYWLVDGLMDAGFPVRLAHTSALPEYSGLKYSNDFSEARHLAHLLRLGLLPTGYIYPKEERDLRDLLRRRLLLVRQRSLHHVSLQSLIARHSGQRLNTLQIKQLKKEQLADYLQGHALLGGEITHQARCWLENAVQRIERELQHHIKPREDYQLLQSMSGVGSVLGTTIALETGTIERFASPGNYASYARCVKSEKISNKKYKGQGNKKNGNKYLAWAFMEAGHYAAIWDPRIKRFYQRKKAKAHILVAKKAVANKLARACYHMLKRGEEFDVTRAFS

SEQ ID NO: 46783 - protein, 487 aa, unidentified
MRSIFRKRNADVEALFQSAGRLEKVMCVPFDYAKKTHTAMVCNGRGDRLRGVFNVENNRAGLDFLLSVITGLCRKHKIATKHVFFGGEDGGAYSFNFIHALVSRGYLVVGINAKHAKKERESDTASTDLIDTIGVAGMMIKMRGRTIGQATAQVHSIKRLRRQRGALLKAHSSAAHRMHRIVDELFPGFLNEDLSGITAFSRASLWLMDENFSAAAIGARQRPALVRRLREFSLRDPEGAVEKLKAMAHNALPAPDEMIEALQRSLCEEMTLYQQLDGALHGLDTDIAKMLARTPGAMLTTIPGIGLRWAPGLFSELGDPLRRRSVHSMAALGGIVPGTKQTGGPEKPAVTGYRRKNCSSFLKNILMSGAVSISQYGHAEMRQIYQQDKAMGRDARTRMAQRLLRASLYLIDTQAFFLPPTLHRGGTREQIRQYYAETWPKVLIKWRDSGAIKEAVAEGAPLRIWRDMAQELYGIELDLRSPQSGRK

SEQ ID NO: 46784 - protein, 424 aa, unidentified
MKNSTAKKLAQVPKGYLLVGTDPHKRQHAAVIMSQDAVIQRKFKFTNSREGFAEVMQRIVAEVTKTDSSGAIFAIEAGSHYWRNLAYYLDQQQVAFRLVSPFTLKRRREGEDLNRRKNDYRDAEMAAELLRTGKFMNNRLLHGVYAEIRAAYTNYQRLIEDKTAQINLLKSRLDNLFPEFTDVFKDTCGKTAMSVLTQCAIPKVIARIKLDDFIKMVRSRFTGKALQVGKLRALQAVAADSIGIDDGATSVSQEIGLIVEHIKLLTAQIDTTTKSLIEWVNSVPESRYMLSIPGLGYLTIAGVLAGLGPLSNYTNGRQLIKMAGMNPTQKESAGKSSRHTPISKQGRSSLRWCLWPAVVSLLRHNTDFRDWAKARQERAANAHPLHRREVIGAAINRLLHLIFALVKKQSFYQMPQQEMTLMAN

SEQ ID NO: 46785 - protein, 421 aa, unidentified
MKESIRIVGFDCGEDGHSAVLLDETGEFERQIDVVNERRQIQEALAELLLEVGPETQLVVVVESKRSHGRIVSDVATELGCELWQVNTVALNHYRDLEGQPRKDDEWDAYLGARMVYLRMGGCREAIETTEEERSLSRLTRIHSRVTEDRKRFVARLRAVLLELAPEMLHAKWKGPRPDSKAMLYLLERWPGFNGLERAQLRSIEKILHQCRYGSKATDVAKLIRKAARGISMAAEERSSLTMELDLLLRQIRLCDESIAKVYAEIADCVERHPLGQKLLEMDGIGPVIAGILVSELYPVARVAAEPRSATYSGVTPLARKSGKSLDRDRLAQGVNKRVLHAMYTSAVVAIKHSAVDRAYYQKKLRGYAGHPKPHVAAFIALSRQRHKVIYKLMTTEARYDKEILVASHLERIERDRIAAA

SEQ ID NO: 46786 - protein, 314 aa, unidentified
MTNLNENTGINIGVDVGKFQLDIYILERDRHFSIENTPAGIKEALKVIGRFKVSRIVLEATGRYELEFATAAFEKGFPICIVNPSQIRQFARASNQLAKTDKLDARLIADFAARMQPKPNPLKNKNLRIIKDLICRRRQLIEMRTRELNRIDIMGHKIERSCQRIIKSLNLEIEWVEKHLAQAVAQQQEWTHRMEVLSSVPGVGNTLVYTLLADLPELGTLTGKQIASLCGLAPVNRDSGTFKGKRRIQGGRATVRTTLYMATLSAIQCNPVLAGFYRHLVDQGKHKKIALIAAMRKFITILNAMIKRDEIWAH

SEQ ID NO: 46787 - protein, 310 aa, unidentified
MDAIFVGIDVSKDRLDVHVCPRGEAFAVSRDGKGLEELIDRLRILAPQLIAIEATGGFETIAAAALAGAALPLAIVNPAQVRHFAQAVGKRAKTDPIDAAVIARFAEAVKPEVRPLPDEQARLLGELVARRRQIVEMTVAERQREQRTAIVRVRKSILRHIKMLEKELAQIDNDVGTLVRGSPAWRDKEDLLVTFPGIGNTLARTLLAEMPELGSLTRREIACLAGVAPFARQSGRWKGKSMIAGGRAPVRSALYMAALSAITCNPPLKRFYQRLLSAGKPKMLALIAVARKILITLNAMLRERKQWQTA

SEQ ID NO: 46788 - protein, 367 aa, unidentified
MKKNSTVSSLTRASFVGLDLADEQSTFIGIDGRGRQVEEGKVATTRTGLKKEFGGRQRCRIAIEVGTHSPWVSFALIEMGHEVIVANPRQVALIYGNKRKSDRVDATTLARLARSDPELLHPIKHRGKQAQVDLALLRARDALVGSRTQLINHVRGVVKSHGGRLPKCSAEASHNKAAPNIPAELKPALDSLIEQIALLTGSIRNYDQEVERLIAERYPEAAVLRQVNGVGPITALVYILTIEDPQRFAVSRDVGAYLGLVPGRNHTGESDPELHITKTGDLFARKVLVQAAHYILGPFGTDCDLRQWGLRLAGISVTAAGGLTKGSKQRKKRAVVAVARKLAVLLHALWTTGEVYDPFRQAKKEAA

SEQ ID NO: 46789 - protein, 333 aa, unidentified
MDHCAIDLGGKKSQVCLRSPDGRVLLEARCDTLSLPDFLRQLPHSRVILETAAEAFRIADAAKTAGHEVRVVPATLVRTLGVGARKTKTDRRDAQVLSELSCRIDLPSVHIPSARSREWKTICGMHDALISSRTKLINNLRGWLRGQGLHLSNGRAETFAGRMAEIESLPKYVASQVAMLALLTENIRTSERRIEDLAKSDELCKRLMTVPGIGPSTSARFVAAIDDITRFESAHKVEAYLGLAPGESSSSERQQRLSITKAGPSTVRWVLVQAAWSLQARCRSMAARPLQLWTTEVAKRRGKRIATIALARKLAGILYALWRDGTTYELRQQ

SEQ ID NO: 46790 - protein, 412 aa, unidentified
MPELWAGTDAGKAEHHCVVIDAEGKRRLSRRVANDETVLLELIADVLSLSEEQSVTWAIDLNAGGAALMIALLTDNGQQVLYIPGRTVHHASGSYRGDGKSDAKDAFIIADQARMRRDIQAMHHGDDIAVDLRILTSRRLDLAADRTRTINRMRAQLLGYFPALARAFDYSTSKASLVLLTGYQTPAELRRTGRNRLAGWLKNRKVRNYRLVAATAIEAAEAQHTVVPGEKLAAAVVARLAKTVVALDEEIAETDALIEGRFRDHPHAEVILSMPGIGAVLGAEFIAHTGGDMSVFGAPDRLAGVAGLAPVPQDSGRISGNMRRPRRYCRRLLRVFYMSAQVAARSCPVSKAFYERKRAEKKTHKQAVIALARRRLNVLWALLRDGRLFESSPPPRAASLGWGRLHPVTSRR

SEQ ID NO: 46791 - protein, 461 aa, unidentified
MPVPSASSVHAHETFVCVHPNAAGLDIGADEIYACVPPDRDPQAVRAFATFTTDLHALADWLAQCGIDTVAMESTCIYWVPIYEILEARGMQVYLVNAQSLKIPPGRKSDWKDCQWIQRLHLLGLLQASFRPDGEMTVLRTYLRHRAELIQHRAPHILHIQKALHQMNIQLDRVLTDITGVTGMAIIRAIVAGERDAVVLAQLRNPACKSSEEKLAKAMQGTWRAEYLFMIEQSLAVYDFYTQHIAACAAVIERYYATLKPRFVSEDGPPPTDLPRAKPHSKSKNAPAFHARAELARVVGVDLVAVTGLSAATVQTIISEIGTDMSKFPTAKHFGSWLGLAPHNDISGGKVLRSKTRKVVNRAAQAFRQAAQSVARSDSAFGAYFRRMRARLGPQQATVATAYKIARTVYTMLKEHKPFDEMGAEAYDQQYRERELKHLQRKAAKFGLQLTPQQPSAPVGN

SEQ ID NO: 46792 - protein, 396 aa, unidentified
MEQDAQRVVIGMDPHKRSVTIEVMTGEETVVGGGRFGTDIAGYRSMLEVVRRWPDRVWAVEGCRGIGRHVALRLLADGQEVVDVPPKLSARARVFSTGQGRKTDATDAHSIALVGTRMAGLRPVVDDQQLTVLRVLGDRRRSLGEDHTRMVSQLHHLLLELIPGGAKKDLSAAQAKALLAKVRPRDAAGKARRRVAAELIADLERIYVRKKAADKELKELVTATGTSLMDLNGIGPSGAARLLVEVGDITRFPDRDHFASWNGTAPIDASSGDQVRHRLSRQGNRQINRTLHIMATVQLRNPTEGRAYYDRRKADGKTSMEAMRALKRRLSNIVYRTMLDDAIAHAANGMRTGPGGQTGHDSDSSATGSHPNAGSSDKPLPGPAKQQPRTPLPAAS

SEQ ID NO: 46793 - protein, 387 aa, unidentified
MYFVGIDISKFKHDCAIVDELGDVITPSWSFQNDREGFSLLKELLDALNGEKKIGLKATGHYGQNLKLFLENNDFSFMEFNPLLINRFVHSKSLRKTKTDSIDALMIAQYLMTVEYKPYPPSFYTLEKLKSLTRFRDSLIRQRSKQLVELTNILDKVFPEFKPFFKGRFSATALYILSHYASPEKISNMNSKSYEPLRRLSRGRFSMVDLVELKTLARNTVGSTCNYLLQEMEIIIDIYNQLQSKVEEIEIQINDCVLGLAPPILTIPGIGVASAAVILSEFGDLSKFNSPSKLLSFAGMEPGYFQSGTSESTGKMVKHGSSHLRYAMMNCAQTVINNEPTFAAYYAKKRAEGKEHRVALTHVAKKLLRVIYTLETKELSYNPDLVR

SEQ ID NO: 46794 - protein, 330 aa, unidentified
MERQYVGIDLHRRRSVIVRIGEDGEELGTVRIENDPIALSLAVAEAGPNPEVALEACYGWYWAADVLQADGAVVHLVHPAGLNWDNRRVKNDKRDAMELANRLRRHDLPEAWIAPPKVRQLRELVRYRAKLVALRTGLKAQVHSVLAKQGLFPPVTYLWGPEGKKFLNDAPLDRGYLHRVESLRDLVAIFDKEVDLLEREIYRWLRDDHGYWAVQQLNGVGHTLAAIFVAEIGDVSRFPGPRELCSWAGMTPKHRESDLKVRRGRITKQGSVLVRWAAVEAISHVRGTEKIKQDYHRIARVAAARQLLTLVYYGLRDGEIRCLASHREAG

SEQ ID NO: 46795 - protein, 410 aa, unidentified
MTMIAITQNTPVLVAIDIAKARHEVLIAVPGKKRRRRLTVLNELADFTRLITALKDYGRPVRAAFEATGNYHRALAYHLATAGFEVKLVSSVALARTREALHNSWDKNDPKDAQVILHMMEIGNEQFYHDPLVRGTNDIQELSKTHDIVSKSKTELWHRILTHYLQLYFPEADRFHRSSRSDWFFAFLERYPSPHFISAMSKDAFTADAWDVVGRKVAKERLLADIYETSKVSVGLPVALDSDAISMFRLVLGEGRSLIAQRNQIEARAVALLKDLPDYQLLTSIPGIGPINALTILAEAGDLRRFGHHRQFLKFCGMDLATIQSGTFRGQTKLSKYGNARLRRTLWMAGQVAILQRTNSFRDKFERYISKDRQNTHLRRKAYTAIAAKMARTVHGIIKNGEPYRPFFEG

SEQ ID NO: 46796 - protein, 346 aa, unidentified
MMIIGCDFHPSWQQVSWLDTETGDCGTGKLEHASGDAKRFYEQLRTPVLIGMEATGNSQWFIELVEDLGHVIWIGDAAQIRASYVRKQKTDKRDAHHILRLMRENRFPRLWAPDREQRDLRQLVLHRHKLVEIRSRVKNELQHLALNKGMQKKRTLWSQAGQQMLRELPLKPWASCRREDLLGLLAMLNQQIGQLDAAVQKAAEENPGSKLLMTQPGVGPNTALAFVLTIGDVSRFRRGKQIASYLGLIPREESSGGRQKLGAISKQGNRMLRSLLVEAAQNAVRVDPGFRKQYLHRCHQKPKGVAKVAAARKLAVRLYWMLRTQTGYPEIVHIESSPRVPLVGAS

SEQ ID NO: 46797 - protein, 342 aa, unidentified
MLIIGCDYHPSFEQIAFCDSGTGECGERRLEHGGEAESFYRSLQGQAVRVGMEATGGTRWFERLLDECGIELWVGHPGKIRAAAPRKQKTDRRDAELLLDLLLAERFPRLAVPSPEQRNLRQLVGHRHRLVQMQTRVKNQLQALAINEGLRLRRGLWSRKGQAQLQALALPYWSEQKRSDLLALLADLQRRGALLDQAVEAAAAASPVVGCLRQQRGVGPVVGLAYELTILDPTRFQTSRQVASYLGLIPAEHSSGGKQRLGHISKQGNALLRGLLVEAAHVAVRWDPEWRRQYVRLAMKKNRSIAAVAMARKLAVRLWWLWKSGLASGQIGGSGSHAEQPV

SEQ ID NO: 46798 - protein, 360 aa, unidentified
MSHRTWKLGNVKSASASEGERMTVGLDVHKATAYAAVRKNGQEIATWVMPMDNQTIVASLKRFGPALKKVVYEAGPTGYGLARALKKAGLPVEVIAPGKVPQAPNADSKTDRLDARKLAEEAEKGSLQKAVIAIPTEQEEADRQLARLRDQLIGKQRRVKQQIKSLLLQHGLPEPAGLAHWSAEGLAALKAMRLRHQLQLSLEVLVGELEHLVVLRKRVERHEVWLMKQRRHRRGARLLQTHPGVGVVTATAFRLEVYQPERFATPEQLAKYVGLAPRVRQTGPKRRGGPLIPAGRGSLRSLLIEASWRWIRDDAAAAKTYRRLVRNTGSGQKAVVAMARRMAVHLWCMLCRGQEYRPAA

SEQ ID NO: 46799 - protein, 340 aa, unidentified
MNVRTLGIDLAKNVFSLHGVDDRGKTVVHRVLRRRQLLPFMAQLPACRVGMEACGSAHYWAREISKCGHEVRLMSPRFVRPYVKSNKNDSKDAEAICEAVSRPSMRFVAVKSRGQQDMMALHRVRSLLIRERTALMNEMRGLLAECGVIAMQGVSALRRLIANVIAGPDERVSDLLREILSEMSERLRLFEERLKRYDRWISELADKDERTGRLMAVPGVGPLTATALIAAVGNARQFRSGRELAAWLGLVPRQHSSGDRVTLLGISKRGDRYLRTLLIHGARTTLRHTARKRDSHSRWVATLRERRGPNIAAVALANKNARVLWALLTRAEEYRIPAAA

SEQ ID NO: 46800 - protein, 370 aa, unidentified
MIAVDPHKASNTAAVLDPVPETVIESARFANTTDGYAQLTAFAGRWAQRRWAVEGCFGAGRSLAQRLVADGEMVLDVPAKLAARVRVYSCGHGRTTGKHDAVSAGLAALDGTGVLPVAGDDALVSLRLLCDRREELTAQRTQAVCRLHRLLAELTPGGMRRELPADKAQALLALIRPADDVGHVRVHIARDHLADIRALDARITYIGIQIAALVTASGTGLTGPSGIGPVIAGRLLAEAGDVARFATKDTFASYNGTAPIDVSSGDQIRHRLSRAGNRRINHALHMMAVTQIRYPATPGRRYYERKRTEGKTPKEALRCLKRRLPRPGLLPAPRRPAGHNRSVRITYDPAADAVYIHLTGDPLTPGRTTL

SEQ ID NO: 46801 - protein, 316 aa, unidentified
MVVVGFDVGKDSLFGARLDRSGKVKEHWELANTPAAILPLLRSLRRKYKHLLIASEATNEYHRPLAQLCLTLNIPFRLLNPITTKQFTRATVRKRKTDKTDAEVIARVAAQGQGTLVTKDTFNDIKPMLRTAVRLIQMSRALTLMQYHLVAVLPKEDTLLQLLATAQEQLEVAAATFRSTARQQVNPNLSKLLQSVPGIGPQTAALLVAELGDITRFKDAKAVIAYVGLDPRVKQSGTMLKRNTHLTKRGSPYLRRAMYLAAAAAQRHDEELMATYDKKRAEGKRYREATIVVARRVITRVYAVWKRGTVYRKKIA

SEQ ID NO: 46802 - protein, 344 aa, unidentified
MDHFAGLDVSVKETSVCILDDAGKIVKEVKVASEPQALLKVLGNPTYRFKRIGLEAGPLSQWLFSALAEAELPVICVETRHMQAVLKAQINKTDRNDARGIAQMMRVGMYRPVHVKTLRSQKLRMLLTHRKLLQSKAIAIENDLRGTLRNFGLKVGMVGTVRFEARIQELVETSPDLAVLVEPLLVVRRALREQIVILHRRLLAIVRDDEVCRRLMTTPGVGPVVALTYRATVDVPARFRKSKSVGAVFGLTCSRYQSGEIDWSGRISRCGDEMMRVMLYEAAQSMLRSKKWSWLKAWAMQIARRRGMKKAIVALARRLAVIMHRIWIDGTEFRWTQGPATAAA

SEQ ID NO: 46803 - protein, 323 aa, unidentified
MSAFVGVDMAKNTFDVATPLDNGKHRTKGKLSNDAKGFAEFESWLQKHATPDALIVIEATGNYHEALADFLFQKGYRLHIANPATTAAHAKSELSRNKTDKTDAKLISDFAMQKHRKLRLWVPEPQSRRSLRALVRRLEDLNEIRQMEKNRLEVASPNVVTSIESVIAHVSEEITETEKAIKQHIDDDPDLRGKSELMTSIDGIGEKTAALILAELGDPLDYEGPKKLSAFAGLSPRQDRSGGYVGATRISRTGSSRLRGGLYMPAIVGIQHNEVLSEFAKRLKANGKAPKQVICAVMRKMLHLIYGVLKSNKPFDPGIALAA

SEQ ID NO: 46804 - protein, 413 aa, unidentified
MEIEVIVERCAFLDVHRDTVMACARTPDGSGGRREEVLEFGTTTSQLLLLADWLAERQVSLVGMEATGVYWKPVHWVLEASVPEVWVINARHMRNVPGRKTDVADSIWGASLLEHGLVRPSFIPPEPFRALRDLTRYRKSVIEERARESQRLHKVLEDAGVKLSSVASSVLTKSGREMIEALIAGERDSEVLAEIAKGVMRKKIPRLVDAMAGRFNEHHALLCQAMLARIDQADATVEILTGRIGDLLDPYDGAVSLLVTIPGVSFRTAQVILAEIGTDMSRFPTAGHLASWAGMCPGNNESAGKHRSGRTRHGSKWLRKALIEAAHAAGRSKDTYLAAQYAQLRTRRGSQRAAVAVGHSILVIAWHLLSTGEPYSDLGGDYFDKHRNNAARQRRLVAQLEAMGHHVTLEPAA

SEQ ID NO: 46805 - protein, 366 aa, unidentified
MTKNIMTKNAVAAAVHAALDAERPVPANPPAARAEEPRPRPDLATAAVSPPPQSECWVGIDVAKAHLDGATWPEIERLRVTRDDAGLGTLTAWLRARAPKLIVLEATGGLETSVVTALVEAGWPVAVINPRQARDFAKATGRLAKTDALDAAVLAHFGHAIRPEPRPWKDEETQELAAVLQRRRQLVEMLTAEKNRLASAHRHVRPDIQTTIDWLEGRLKDLDGDLRRRLQASPVWRERDDLLRGVPGVGPVTAATLLAALPELGTLDRRQISALVGVCPFNRDSGQCRGRRMIFGGRAGVRAVLYMATVAASRCNPVIKTFYQRLRAAGKPAKVALTACMRKLLTILNAMLKAKTPWQPPAECKP

SEQ ID NO: 46806 - protein, 338 aa, unidentified
MPTDQTGQTYALFVGVDIAAQTAMVATQRPGAKASRSFTIEQTPEGYTSLLRQLQATGFVPCQVLVVMEATGSYWISLATRLVHEGFAVSVINPAQAHHFAKALLKRAKTDAIDAQTLAQLAMILQPEPWTPPPQIYYALQQRLAQRDDLLNLRQQVRNQLHALVQHPEVIAEVRARMESLLATFESQLTEVESEITAALSQDSAWAAAATRLQSIKGVGWVTAAWTLVTTLNLTSCDTVDALTAYAGLAPMPRQSGSSVWHRPSIGHTGNGRLRTAFYMATLSAAQHNPVIKAFYTRLREVGKPEKVARCAAARKLLHIAWAVVKKDQPFDPNYALG

SEQ ID NO: 46807 - protein, 348 aa, unidentified
MNNLHYIGFDVHKKTISFCVKTAAGEIVEEGSMLARRAEVRQWAGARSQPWQGAMEATLFSGWIYDTLKPYGEQLEMAHPAKMKAISAGKKKSDTLDARTIADLVRCNLLPACYVAPPRIRELRRLLRYRSLVVSEAVRMKNKMAGLLMETGALYVKEKLHRKKYFASLLEELEEVPDSVIDLLRLSRGALEMFESTQKRLVRELLADPELTQRVERLMTIPAVGEITALTWALEVGDPQRFHSNSDAMSYCGLTAALKSSAGKQQRGPISKQRNRWLQTTLIEAAKLAPRWNLQLAALQARELERGHRNRATLAVARKLVAYLLAVDKSGQPFQVRAAAEAPTQKAA

SEQ ID NO: 46808 - protein, 370 aa, unidentified
MEEGIKFFVGLDVHKDSIAVGVAEAGREPARVLGRIPHDVGKLLKLLARYGEPVAVQVVYEAGPTGYGLQRALAARGYACQVIAPSLIPKRAGDRVKTDRRDCRRLAELARAGELRAVWVPDPADEAIRDLARAREDAVRARTQVRQQLKGFLLRHDVRYGGRTSWSKSYYRWLATLSFERSGAQTAFTEYWQAVTSADERVARLTQALIGSSEGWRFEAVVAALQALRGIDQISAIGLVAEIGDIGRFAHPRQLMAYLGLVPCEYSSGEQVTRGSITKTGNAHARRLFTEAAWNYRFQPRIGRAAQRRAEELPQAIRDIAWKAQLRLSGRFARLRARGVHINKVCVAVARELAGFVWAIASARARLPQS

SEQ ID NO: 46809 - protein, 410 aa, unidentified
MANLMVGIDVSLCSHSVQFMNDSGDTLASFAIPNNVDGAETLLNRMVTSARKHQCSLVQVGMEATSNLGWHLAHFLNAQLHQQSDFQAQVFVLNARKVARFKKGYDTLPKNDRLDAWVIADQLRFGRLPHALTTCVQYEALQRLTRTRFHLMQNIARDKTYFLNQVFLKFSGLRQDNPFSNLFGATCLAVLQELEPEQIAAMSIEELVDFLKDKGKNRFENPVELAAYLQKLARSSYRLDKALADPVNISLSVMLSVIKTMEKEVATLDKEIAKIMKSIPQTLTTVKGIGPVFAAGIIAELGDIARFDNHNSLAKYAGLVWSQYQSGEFESQETHRLRTGNKYLRYYLIQAANLVRHHDSEYKAFYQGKFAQAIKHQHKRALVLTARKLVRLVFMLLKTNQLYTPPEGRG

SEQ ID NO: 46810 - protein, 405 aa, unidentified
MEVIYERCCGIDLHKNMVMACIFVKGKKEIRKYGTFTEELEELMAWIREKACEVVAMESTGVYWKPVYNLLEEAGIKAIVVNAQHIKGVPGRKTDVKDAEWIADLVRHGLVKESYIPNRAQRELREMTRYRQDLIEEKAREINRIQKVLEGANIKLASVISDVSGKTGISILKAIINGTTDTKALSQLAIGRITQKIPLLQKALKGSVGEHQRQMLKHQIRHIEFLIHEIERIDEEVQKKTEYAENEIELLDTMPGIGRRSAERIIAETGIDMNQFKSAAQFASWAGLVPECNKSAGKKKSVKIRKGNKTLKTTLVECACSAIRDKNGFFHARYKKISARRGGKRALIAIAHSMLLSIYAMLRDKQAYRDLGSNYFYEIDKDKIMTKNIKSLQKLGYSVTLNLSA

SEQ ID NO: 46811 - protein, 354 aa, unidentified
MNYVGVDIHKRYSVLVAVDERGRELARGRISGNSVHAFAQFFEALQGPGKVVLEACWNWGRIYDVLSEIEQVEEVVLAHPLKTRLIAEAQIKTDGLDALALATLLRGNLIARAHVPSKATRARKELLRQRLYWARLRTRVRNRVHAVLDRQRELEMPQCSDLFGRKGLNALSKLRLAEPDAILLGEELDLLKLIDSQIKAQEGRIVAFNANEQATQYLQSLPGMGKILAAVAAAEIDAIERFDGAAKLCAYAGLVPTTYGSGGKVHQGHLLKSRNKWLQWAFIEAAWVAVGCSSYFGGIYRYHRARGKKANIAITIVARRMCRIAFTLLKERRNFQEQHRTFPGRSAVRLTAAA

SEQ ID NO: 46812 - protein, 357 aa, unidentified
MKKVAYLAMDVHSGHCVLGHMDFDGTFIGNRRFPTSEQHIIEALKAIKAKEKYLALEESNLAYWAAQVARAYVTEVISSDPKENALIYRSPNKRDKVDTHKLCRLLRLGELKRVYHPENDERAIFKAAVQHYIDLRGQQVVLKNKIKAMYRHWGVIEVGGQFVYGIRTRDDYLQRVKHLQIRNQLHRLYCLMDETESMQKKALKAMKQLGRKYPEIKQFEKMPGIGEILSHTFDAFVQTPHRFADKRKLWRYCRLGITDRSSDGKPLGFKRLDKSGVSELKAVSYRAWLSAMRSDNEVRRFYSRSLRLTVNHVHARLNTQRKIIAVMYGMWKRGEAYRPQLFLDSPQMSVVQVRQHH

SEQ ID NO: 46813 - protein, 412 aa, unidentified
MRVLYPTCAGMDVHKKDIKVCLVTRDNQEQRQEDVRSFRTMTRDILAMRAWLQAHGCTVIAMESTGVYWKPIFNLLEGDFTVLLVNPAHIKQVPGRKTDVKDCRWIAELLEHGLLRGSFIPPIEIRDLRDLTRYRRQLVNTHSAEVNRLQKVLEDANIKLASVATDVMGVSGRAILRALLAGVVSPEALAELAKGRLRKKKPDLQAALQGRFRPHHTQLLTHILAHIEFLEESIAACEAQIEARCRPVAEVITLLDTIPGVSQRTAQDLIAETGVAMAWFPSAKHLCSWAKVSPGNNESAGKRKSGRTGKGNKWLRAVLVECAHAAGHTKGTYLGTKFRRFASRKGKKRAAVMVAHRILEAAYFILRDKVPYRELGDQYLDTHHREHIIRHHVRRLESLGLHIDIRELPLTA

SEQ ID NO: 46814 - protein, 417 aa, unidentified
MKLLFIGDDWAEGHHDVAAQDDAGKTLARRRLPEGADGIARFHEMVGSCRGEDAEPDPARVIVVIETDRGPWVKALAAAGYRVYPANPGQAARHKETVANPGKKDDFFDAGCLADMGRTRRHQMRELAAGSDVAEAVKIAARAHQKLVRERTRHLLRMRPALREYFPAAMEAYADLTLAGKDALELLAKAPNPESAARLTVTQVTAALKRAGRRGDLAQRARDIQAALRAPHLAQPDVIAEAHAASVQAAAAVITALNEQVKIMEAKVSGLFRRHPDAGLYLSQPGIGDITGARIPGEFGDAPGRYATAKARKNYAGTSPLTIQSGKKKTVHARYIRNRHLIDALPAQALTALSVSPGARGSYDDLRARETGHDDAMRRVASRLAGILHGCLKTGREYDEATAWSHRAGNPEATKAA

SEQ ID NO: 46815 - protein, 412 aa, unidentified
MNAVGIDVSKGKSMVSVLRPFGELVAKPFEVRHTSSELSELAKRLKSLEGETRVVLEHTGRYYEPVAQLLHDAGVFVSAVNPLLIKEYGNNSLRKVKTDRADSLKIARYGLDNWTELRQHTPMDTIRYQLKSMNRQYGLYTKNKTAMKNNLIALLDQTYPGVNTLFGSPVREDGSQKWVDFVASFWHVDCVRGIGQAAFVERYRKWCKRHGYNLRSDKAAQIHTEAKELIAMLPKNSLSKVMVQEAIAQLNTVSKTVEVFRAEMNRLAKELPEYETVMSLYGAGKSLGPQLMAEIGDIRRFAHKGSLTAFAGVDPGANQSGTYDAKSTRTSKRGSPELRKTLFVLMTVLLQSAPPDDPVFQFLDKKRGEGKPYYVYMTAGCNKFLRIYYGRVKEFMNTLDTPVDMDSTALSQ

SEQ ID NO: 46816 - protein, 352 aa, unidentified
MHARTVEGCVLDADSGVITHRKLPAATPGIVGWVAALPAPQIATYEAGPTGFGLARQLKAAGITCLVAAPSKLQRPSGDRVKTDARDAEHLTKLLQLDQIVAVHVPTIEQETARDLVRAREDTREVLMSARHRLSKLLLRHGLVYDGGSAWSRPHDRWLREHRTSGTAAFTTAFDAYYESTVQAVARRDGLDKAIEEMAANSEFTPLVTRLGCLRGIAPLTGFSLAVEIPQWDRFTGNTIGAFLGLVPSEHSSGQSRFQGSITKTGNLHVRRLLVEAAWHHRRDYRPTTRSVMQPRWDRAPVAARLRGQAGNVRLHRQWVAFTARKKEPVVANVAIARELAGWCWSLAVMDD

SEQ ID NO: 46817 - protein, 406 aa, unidentified
MELFVGIDVSKAFNVGCGLLSNREVVLKKYHFANSLDGAEALRENLLSLVEKFPVDAVKLGVESTSFYHYHLAHYMVSLQERFPVPITVYCFNPSLIKAFKKTYPKRGKNDAYDAYVIAERVRHGSQLPHPFEVNDMYQPLQRLTRYRFHVVGSLIREKSYFLNMLFLKFNTFETTDLSNVFGQTSLAVLSEFHSPDEIVNTPLADLAAFLREKSRNKLEAPDDLAEQIQKVARNAYRLSPNMNDSLQCVLRMSMLNIQMLEKHIAQTDKIIAKSMQGIQTPLPSIPGFGPVITAGLVAEIGSVERFSDQAKLAKYAGLTWNEHQSGDFVGDETPLNRSGNAYLRYYFVQGAEQVRKRIPEYAQYYQKKHQEATTHAHRRALVLTARKLVRLVYTLMQTNQLYRPS

SEQ ID NO: 46818 - protein, 404 aa, unidentified
MWYAGIDWADQHHDVLVIDENGQQVRSLRVDHNPQGFTKLNTFLEQIIGTAPKEHMACIIETTHGLLIAHLLETGWPVYPVNPRTVDRRRSASGAKTDTIDAYLLAKTGRADFVDLRRLTPDSELVAELKTLTRDQDALIQMQTRLVNQLTACLKAYYPVALELFTKLQQRTTLLFLQAYPTPHVAMGASAEQIARLLKEGRHPNPKATASKIVEQVHRPHLLADSVTTRTKSRLMLALVSQLLPLLEQIAEYEKEIDTLFLTHADQEMWRSLPRAGQRLAPRLLAEIGEDRTRYQDASSLQALAGTSPVLFQSGMYSKAHRRLGCIKPLRNVLHQFAWQTTQSEPWARDYYQRKRSEGKSHTVAVRALANVWVRIIFAMWSHHRCYETSIFEHAQQQHAHKAA

SEQ ID NO: 46819 - protein, 337 aa, unidentified
MMYSGIDLHSNNCVIAIIDDGDRVVAQKRLPNDVTKIVGFLARWQEQLAGVVVESTYNWYWLVDGLQDAGFHMHLANTAAIKQYEGLKHSGDETDAQHLAHLLRLGILPTGTILPREHRAVRDLARKRMQLVQSCTAHVLAVENIMARQLGGRMTSNQIKRLTNDAIDNLPVAADVGLAIKANVAVIATLQSQIELLEKRLQERVKPRPQYGLLTSVPGIGQTLATVILLETGPIDRFAEVGNFASYARCVDSVLTSNRKKKGEGNVKNGNKYLAWAFVEAANFARRFCPEAERFHERKKAKTNNIVATKALAHKLARACYHILKEGKPFDVTRCFA

SEQ ID NO: 46820 - protein, 318 aa, unidentified
MNEAKSNTRIAGVDVSKPRLDVALHGAEPTATLQVANTAQGHAELVAWLSGHGVGRVGLEATGGYERGVVEALAAAGLEVVIHQPLEVRLFARIKRLRAKNDRIDARLIALATAQVDTVKAAADPRLRELAERLTAYEQAADLATLLKTQMEHIRLPDLLEDARAQWVQLKDRKARLAADLLARLRVWPDLARRFDLVRSLPGVGPIVALGLVVRMPELGAMGRGQAAALIGVAPFDRDSGAHKGQRFIAGGRSRPRRLLYIAAMAARRCDPALKAFAQRLIDNGKPPKVALVAVMRKLIEAANLVLKRDQPWTPVIN

SEQ ID NO: 46821 - protein, 432 aa, unidentified
MAVVMIGVDPHKASHTAVAINAAEESPGQLQVRACAAQSERLPGRAQAWPERTWAVEGAGGTGHLLARQLLSAGERVLDVPPKLAARVRLLATGDTSKNDPNDACSVAVAALRSASVRQARRDDHAAVLKVWSKRYGDLGRARTQVACRLHQVLCELVAGGVPGEITAGQAERILASITPAGAVEAARCQLATELAGDLRGVDARIRETRKKAATAVRAAGTSLTGLFGVGPVIAAAVIGDVRTVSRFPDRGHFASYNGTAPTEVSSGGRKVCRLSRRGNRRLNHVIHMAAITQIRYRHSPGRAYYDKKRAEGKTGKEALRCLKRQISDAIFACLQADARRAAATAAKSPGGQPGNHSASRAAGSHPEHRLFGQATPGPATHPMTPAGADTAAPVPAPLPSRASGRPGPGSGAARPRSGARRASSTRPPASR

SEQ ID NO: 46822 - protein, 348 aa, unidentified
MEASEGTPRYRLFVGVDIAATTATVAWQVAGGPAIRPFTIEQSRQGFAALERRLRATKHAPAQILVVMEATGSSWWSLATALADAGCAVSVINAAQAHHFAKALLKRAKTDAIDARTLAQLAALLQPTCWTPPPAIHEELRQRLAQRDALIAVRQQVRNQLHALIQGPLVIANVRARMDSLIATLDGQIAEVEAELAAVVAQDTGWTDAIRRLQTIPGVGLLTAAWLVVGTLNFTLCATAEQATAYAGLAPMPRESGSSLRGRATIGRGGNGRLRTALYMATLSAAQHNPVIKPFYRRLRDAGKPKKVARCAAARKLLHLAWAVGTKHQPFDPAYQQQQHEALSQLAA

SEQ ID NO: 46823 - protein, 365 aa, unidentified
MDQTARGEIVRVGVDLAKRVIQVHAVDSSGRVVVAKALTRERFIAWCAQLPPKVLVAMESCGGAHHWARKLAAMGLQPRLIAGHFVSPYRMEGKRGKNDANDAAAVCEAASRPSMRFVPIKTVDQQALLAVHRLREGYKEERTACVNRIRGLLTEFGFVFAQSPDALRLALPEVMEDAINELPAIARLALQRAQLQWLELDGHIAWCDERIAVHVRNDEQARVAVKLCGIGPVTASALVATVGDFRQFKTGAQFGSWLGLVPTQNSSGGKVSLGCITKRGDNYLRTLLIQGGKSAVMTAHKRQDRTSRWLVQLLARVGWQKAAVAMANKNARILWAVLAKGRRFDPDHISIKPEGPAMVVPTMAG

SEQ ID NO: 46824 - protein, 361 aa, unidentified
MAMTIVESTRLVTGGVDTHADVHVAAAVDGNGGVLGVESFATTSAGFGALHGWLAGFGALARVGVEGTGAYGAGLARYLRARDLEVIEVDRPNRQLRRRAGKSDTIDAIEAARAALSGRASGIAKTADGDVEAIRVLLVARRSGRDVRIKYLNQIRHLGFTAPDELRERLRGVPAEHLARTAASLRPALAAGPVLHATKLAIRTLGRRVLDLEAEAQHLDQLIDELARRTAPSLLDVHGVGTHTAATLLVAAGDNPHRLKSEAAFAHLCGVAPLPASSGKVIRHRLNPGGNRQANHALWRIVFTRMNSDERTRKYVARRLAEGLTTREVMRVLKRYVARELYPHLVRTYKIWSDGPGPRTA

SEQ ID NO: 46825 - protein, 344 aa, unidentified
MEHYAAIDVSLEWSSVGVVDAAGQIVREAKVRSEREALAAFFTESGLAFARIGLEAGPLSQWLHAGLVEAGLPAILIETRHVKAALKAMTVKTDRNDARGMAQLMRMGWFRPVHAKAPMVQEIRALLTARKLLVAKLRDVESSIRGILRGFGLKVGAVSKGKFEARIRELVTGQVMLERVAEPLLRARAALRTEYTTLHRDLLRTVREDAVCGRLMTVPGVGAVVAMTFRSAIDQPERFAKSKAVGAHFGLTPKKYQSGESDVTGGISMVGDAMVRTALFEAANVMLTRAVRFSTLKAWALRVAGRHGMKKAKVALARKLAVVMHRMWVDGTSFCWGEASVSAA

SEQ ID NO: 46826 - protein, 403 aa, unidentified
MQQQRLLVGVDVGCRKHHVAINGPNGIAEQFEFTHDARGFQYFFAQVAAQARCQKLPNVAVGMEGTNGYARPLDQMVKAKGYHLLNVNNLKLARFKEIFASPAKTDCIDAQQIVTLMMMAPFMEQVKETLQEVPVISEIEMQLKRISRRRRQLVQEKVILQNRMQADLQSVCPGFLDIVKQVDSLYVLRFLSFRSDLRKLTRLKPATLRSIPGIGKALAAKLVRWQETAILGGEIAWVGPMISDDAKRILELKKKIDALETQMETLVGQSSLATLLKSIPGFGTVCAAEVSGEIGMIDRFNSESGLAIYLGMAPLDNSSGKYKGTKSPSHVNKRTKAAMMVALGHHIRKVPESKVYYDKKRAEGKKYNQALRSLGRHLTRVIWSMVKNNRNYETQKVVEVKAA

SEQ ID NO: 46827 - protein, 429 aa, unidentified
MTRISAGVDVSKNRSTVCIIDQDGKVIMRPFLVCHSTEELDFLADTLKRLNGEVRVIMESTSIYQYPIALHLKEKGIFISIVNAYKVKKFANTDFRGGKTDKKDSRTIASYGISYWDKLVEWQIPKDTYFNLDLLNRTYMNAKKHRQIILQELQHYIDCAMPGMDKELRSLNLSTKKDFMLDFVERSWHRDEIVNMTEAEFTEVFTAWAKKKGYRPVEGKAAKIYAIAKSCIPYYPANPTVKTILQCIVDKLSGVNRTLVTIVTQMIEEAKKLPEYQIVREMPGVGDPLAARFFGSAGDIRRFKNSKALVAYAGIDSPPDESGDFSSTHRHITKKGSKVFRDTGYEIMMALRAQKRTWEKVRKNPEVYDYMLRKEAEEKPRKVAKIAALNKFLRIVYARIKELYDNMALAERAKAKTKSKTKAKTKATA

SEQ ID NO: 46828 - protein, 342 aa, unidentified
MYYIGLDVHKKTISYCVKDASGQVHREGTIGANRNELDWWTKTLPQPWTVAMEATIFTGWIYDHLLPHAAQVKVAHPVMLRAIALAKKKNDRIDAGKIADCLRCDFLPECHMASTAIRDRRRSLRYRHLLVRQMVQMKNRISGLLLETGVSHNKKRLHKVGYFRELISNNEEVPESIQPLLRLSRETVVRCQKTEYALVSSLQRDPLLAERIKRLRTVPGVGPITALTWALEIGDVARFRSIKQAISYCGLCGDEKSSADKILRTPLSKQRNKHIQHVLVEAAKLAPRLSPELALVHERERQKGNANRATLAVARKMVVYLLAVDRRERDFVPPEERNTAVA

SEQ ID NO: 46829 - protein, 482 aa, unidentified
MKKKNIFQNRSQQLLQLFEKAGNRLKMMCVPIDYAKKDHMVMFCNGYGDILRKPFSVKNTLEGVKYLIDQVMRSCRHRHIKKEYVFFGGEDVNSYAENFANALRTKGFLVANVNAHDAKKQRENLQASTDRIDLMGIALMLLNLRAKCSPAQDGIYRNLRTLVRHRKKLVVMKTEVKNRMHTLVDRLFPGFLNEKNTGINPFSKSSLVLMEDRFSAQQIRRRQKSTFIKILKRCATPNAESIAAKLHSYAAQVITTPDEYAATLQLSLQHHIGHYRCLQENIDQLISEIALLLAQTQGAFLTSIKGVGIVLAAGVSSEIGNPFEQKPLNNLTSYSGIIPRVKQTGGIEGHTHTGRVSRRSNHLLKDYVVQSAFQMGLRGPQPLLQDYKRREAAGQHADFGIARRFLRMAMCLMRSSQVYLPPKLRSPKTQMQERAGYYLTAWPLLRDKWKKAQAHQLAFAKDQPLGQWRQMVQELYDIKLKL

SEQ ID NO: 46830 - protein, 351 aa, unidentified
MSNSIVAFVPCGIEVSHLSLVVALRGHDHDEPLREFPNTRAGHQAVLRFLERGARPVRVAMESTGLYGLDLALTLDQAGVAVMVANPRAVRHFAQALLQRSKNDQLDAAVLCEFAARMPFQAWRPPSAAALKLVAVARRLEALTDLMAAEKNRGHAASLSEALPVIIRRDIQRSIQTQQRAIDRLTRAAQEFILADPELARRYELLLSIPGFGATSALHTLAELTLLPANMEVRQWVAYAGLDPREYTSGTSVHKKVRISKAGNKHLRRALYMPALVAVQHQDHVRAYYEHLLARGKTKMQALVATMRKLLHAVYGMFKHDQLFDGQKVYALTSPVLAPAPSNSEVLCSQP

SEQ ID NO: 46831 - protein, 337 aa, unidentified
MDHYAGIDVSLESSSVCVVDAKGKVVREGKVASEAEALIGWFSALGVPVTRIGLEAGPQSQWLCAALRRAGFAVDLLETRHVRAAFRTMPVKTDRKDARGIAELMRLGWVRPVHCKSVAAQEMRALLTARKLVQSKLNDIAMHLRSVLREFGLKVGRTTERRFAGRIRELVAGQPALELIAESLLSVHAVLLHEFNSFDKRVRTLARSNGVIRRLMSTPGVGPLVGLTYASAVDDPARFKSSKAVGAHFGITPRKYQSGETDYNGAISKIGDGAVRTALFEAAHVIMTRPIKGGWLKSWALKLAKRVGHKRAKVALARRLAVILHRMWVDGTTFRFA

SEQ ID NO: 46832 - protein, 343 aa, unidentified
MKLSRVGVDLAKNVYQLHGVDRHGKAVWKRRLRRGQWLQALIDKVEPGCEIGMEACTGAHHWARELQSRGYIVKLIAPQFVKPYVKSNKNDANDAEAICEAMSRPHMRFVTVKSIEQQDIQATHRVRSELKAHRNAKANQIRGLVAEYGLVAPQTLLALRRAIPAWLEDAENGLTDYFRSLLHGLWDDLLTLEDRLKELDKEIEKIARSNEVAKRLQQLRGVGPIVATALVATVGDGAQYRKGRQMAAALGLTPRQYSSGDKHRLYGISKRGDAYLRTQMIHGARAVVSQAKHRDDPLSRWVTDIAKRRHPNVAAVALANKTARMVWAMLRNETDYDPTVSTC

SEQ ID NO: 46833 - protein, 341 aa, unidentified
MKKISIIGLDLAKNTFQVHGAHADGSVGFRKKLSRNKVLMFFAAQPRCMVAMEACASSHFWAREIGRLGHDVRMIPPIYVKPFVKRQKNDAADAEAISEAASRPTMRFVAVKSEAKQALGMAFRVRDLFVRQKTQTINAVRGHLAEYGVIAPKGTAHLERLNRVVADPDGGLPVEVVSLARLLLDQIAALKEKIDVLEMEIRARVRHDDVASRLTTIPGIGPICAAAMEAFAPPPETFAKGRDFAAWLGITPRQHSSGGKERLGKTSKMGQRDLRRLLIVGAMAVVRWAVRKGAAEGSWLARMLQRKPRMLVAVALANKMARICWALMAKGGIYRDPAAAA

SEQ ID NO: 46834 - protein, 378 aa, unidentified
MHNNNNYFNGSSQDFFVGLDVHKKNWTVCIRNSGLFLRKFSMDPSPEGLYNYMKKNYPGGIYNSVYEAGYCGYWIDRELKKLGINNIIVSPSDVPTSSRDKYEKTDPRDARNLAMHLQNGTIKGIYIPDNLQLHLRSISRLRCQLIKQQTRLKNQIKAYLYFYGINLPENSVMLHWTGKFIEHLRRFEFSHPSGKEQLEIYITSLLEVRKQILNTVRLLRRILKENHLNEIILKLCKIPGIGFTTAATLYTELMDIKRFSSFDKLVSFVGLSPSKRSSAETEKILGISFHYNKYLRSLLVESSWIAVRKDPSLTDLYGQYIRRMSKQEAIIRIAKKLLSRIRYVWINNKEYQNYCDRLEIVNKEQKKILSKRIKLKIK

SEQ ID NO: 46835 - protein, 477 aa, unidentified
MKHAKSSPCARAIPPRGGQLSRKERRELARQIQSDQVTLQIVHANAAGIDVGKNTHYVAVPPDRDAEPVRYFESCTDGLQQMVAWLKKCGITSVALQSTGVYWIALYDLLQEADFEVYLVNARYTKSLPGRKSDVQESQWLMKLHTYGLLPNSFRPPQEIRWLRSYWRQGQNHLRSAASCIHRMDKVLTEMNVRLSSAVTDLSGATGLAIIQAIVDGEQDPHKLAAHRDPRVKATQEEIARQLHGNWQADLLFRLKQELQAYRFYQTLIAECDRELAKLLRAFPDRSAGVELPAETRKGRRKKKRGNSPQFDLRQLLYLMSGVDLARIDSIDVITAMTVVAEAGYDMSPWPTADHFVSWLRLAPDNRISGDKIIGKGRTPTQNRLTQALKMAASSLKSSKTYLGAQYRRLRARRGPAVAVKAMAAKLARLVYNTLRHGMEYVDRGTEFYEQQQQQRRLHALAKNAAQLGFQLVPVVS

SEQ ID NO: 46836 - protein, 324 aa, unidentified
MSDSVTVGIDVSKLTLDVHVSPAQLRQTVSNSDSGFAELKTLLSLQQVSLVLLESTGGYEDAVVCFLQSLGYDVSVINPRQARDFARSMGRLAKTDRIDAELLAQLASVIDSRPDRERFVKKVTDDRRRKLACMVARRRQVVNMISTEQQRKSAASVYSTDSINKVLSFLRSELKNIDADISLHVRSHFADISGLLASFKGIGPATIGVLLGEVPELGRLNRRQISALIGVAPFNRDSGVMRGRRTVWGGRTMVRNALYMPTLSAVRFNPAIREFYMRLISQGKPRKLAQVAAMRKLLCIINAMLSSGTMFNPALHLHSVQEAQ

SEQ ID NO: 46837 - protein, 421 aa, unidentified
MELEPQELEKVFRERACGLDVHFAFVAACLIVPGKGKRLKVLEATFETNVKGLKRLKAWLVENGCEAVGMEATGVYWMPVYAALEGAFELEVANPLQIKTLRGQKTDRKDARWIAEQVRHGRIKRSFVPPPEFRDARRLARFRRQLIQARTTISNEIQRTLAESGITLAAWVSDILGVSGMAILEALAQGRSIQDELPNCLKTKLKQKMAPIAAALEAPLGEVSRSILALHLERLEALEGHIAKVEADLFKVLEPHADKLALLTSIPGLARMSAAIILAEIGVNMAAWPTEKHFSAWAGVAPGSKETGGKAKRAPVRKGNPYLCTILMECAGPAVKKKDCHLIPKYHRLCKQLGSKKKARMAIAHKLALIIYRNLAANSEYKEPAPKPMSKKVQAKIRQKRVADLERLGYKVTLEPLEPAS

SEQ ID NO: 46838 - protein, 345 aa, unidentified
MQTITTVGLDIAKSVFQVHAIDVEGKVIVRRQLKRRYVLAFFKKLPPCLVGIEACASSHHWSRELQALGHTVRLMPPAYVKPYVKRQKNDCADAEAICEAVTRASMRFVATKTVEQQSCLMIHRTRHLLIRQQTAVINAIRAHFAEFGIVAPVGRTGVEELLKVASDGNDKRLPDVARVCIAALGAQLQMLKARILEFDRLIMAWHRSNQVSKRLDELPGVGPALATALVGSIADPKAFRSGRDFSAWIGLVPKQHSSGGREKLGGISKQGDRYLRSLFVAGALAVIRYAKKRGSKHRPWLAALLARKPTKVAAIALANKIARMAWAMMAKGERYKQPVALAAAW

SEQ ID NO: 46839 - protein, 318 aa, unidentified
MEQNTIEFEQVIEIGCGIDVHKETAVATVRGKGVKTETRTFNTFTSSLKKMKAWLKNLGVTHIAMESTGVYWKPVFNILEDAFEVLLINARHLKNVPGRKTDKADSLWISKLLISGLLKGSFVPPENIRELRDLSRYKTKLIQEASSEKNRMQRILEDANIKLSSVVADTSGVVATKLIDGLIAGCKDLDVLINECYHGKLRASKGDLKEALTGRVTAHHMFMLKQIKSHIAYLESQIALIDQEMDKKMEEYNKQLERLQTIPGVGKEGAKGILSEIGTDMDVFPDEQHLSSWAGICPGNNESAGKKKVQGHDTGTNT

SEQ ID NO: 46840 - protein, 406 aa, unidentified
MNIHNLAHLQVAVDIGSHEHYVAIGLSEGGILDEFSITHTPAGFQYFFSRIERQEHLYNRPVDVAMEGYNGWARPLDSQIQSHGYQLYNVNNLKLARFKEIFPAPAKSDLVDTHKMLELFQLQDHLPLAKGVLQAVLPVPDANRRLKRLTRRRRQLINEKVALQNRIQPDLQATCPTLLDMTGSIDNLWFLHFLTCRDDLTKLMRLQTKSLLAIQGVGRKYLNLILDWQKQAEFSNEIEEVGPMIQEDARRLLALMASIKTMDAKIDSQIQKSAYAQHIDSIPGFGLVCSAELAGEIGTLDRFPKQSSFSIYIGMAPLDNQSGGYQGTKSPKHVNTRARKAMMTAVCRHMAYVPESRAYYDKKRSEGKTHNKAVRALGRHISRVIWSMLRHDRDYIELASINEKAA

SEQ ID NO: 46841 - protein, 351 aa, unidentified
MIIVAIDLAISKSVACIYNQENGEHKFVTFPTKPQEIHDLMLEYGPDRVVIEICSIAGWVYDLITSMDIEVQVANPTNAAWKWKNVKRKTDRDDALKLAQLSAMNQLPVVHMADRDVRAWRKFINYRSSVVGRSTLIKNSIRSILAAECIKLSAGKCGWTQKSLRKLDSMAISPEQLGPEPLWKCQLWLELRALADVGKLLEQITSKLDEMAAKNEKVKLLQSIPGVGPRLAEVVVAYIDKAERFDNGKQVGCYAGLTPRQFQSGDMDRRGRISKKGNGLLRKMLISVSWLVLRYNDYFREIYNRVSGPGNRNRKKGIVAVARRLLVCCWAMLRDGSRWRAPATCVPVASK

SEQ ID NO: 46842 - protein, 331 aa, unidentified
MQISHFVGIDISKETLDAALYPSRDRKTDFLHFANSTKGLGEMMSWLKSRGVKSSELLICAEHTGIYTNTLIAFAHKKGIALSLNSPLDIKRSIGLARGKNDAVDAARIAEFAYTRRDKLRLYEKPSEGIIKLQYLLTERRQYVRQRTAIINLHSAMGQYETSAGRSRNESAINHTEKLIKKVEEQMQIVISEDPAIKRNFDLVHSVKGIGLINAINTIVYTNNFKSFESPRKYACYIGVAPFDYTSGTSIRGKTQVSKICRTQQKAELSMAARSAIVHDPGLRRYYQRKMKEKGGDKSAHGIVINAIKFKLILRMFAVVRAGEPYRVLNY

SEQ ID NO: 46843 - protein, 360 aa, unidentified
MQNKVNEKLFEGQSIYVGIDCHKKNWTVTILGEQYEHKTMSQNPDPDILAAYLKRNFPGANYNAVYEAGFNGFYPCRQLRQLGINCNVIHAADVPTMNKEKIQKMDPVDSRKLARSLRSKEFEAIHVPEPFLEADRALVRQRFRVMKDVTRTKSRIRSLLFQFNINVPDRFTTSQTRSWSRVYINWLKGLQVGHESLKLTLDNYIRIGELQRKELLSVNRQVRSLSQTDAYRGSYNLLISIPGIGFLTAMTFLVQIGDIKRFERLDDLCDYIGLVPMMKGSGPKMYTGKMINRGRKELKIMIIESAWDAVRMDPALMAKFNELTRRMNKNKAIIRIARKLVSRMRYVLMAQEPYKMGISE

SEQ ID NO: 46844 - protein, 315 aa, unidentified
MTTKSETYVGIDVSKDRLDLAVLEEKRIEQYTNTERGIKELVDEMKALKPALIVVEVTGGYERAVVKALFEAGLRVARVSGYRARQYARAKGLLAKTDPLDAMNLADYGKHVQPRVYEAKSEEGQYLAGKLARRRQLGEMVQAEKNRLRLTYGDIGPSIERVIKFLQGELKQLEEEIRAYLDANPVWLEQEQLLRSMKAVGPVTAATLLAELPELGKLDGKQIASLVGLAPINQDSGKRSRYRKTGKGRPSVRNVLYMAALTGLRYNPVIKKQYDGLVFRGKVKKVALTACMRKLLTILNAMVRDQKPFGYAAMS

SEQ ID NO: 46845 - protein, 405 aa, unidentified
MADLFHPTRFAGIDWGGEHHQLCVVDHQGLRLTEQWVSHDVGGLSNLQRELGRHGDRLPIAVERAEGLLVDHLQAAGHLVFPVSPRIAARARERYKVASVKDDRFDAFVLADTLRFEHSHWRPLAVPSPLLAEIKALTRDRDRLLETQQTVEHQLRMILEAYHPAAVRLFSSVDRQITLSFVLDYPTPATASRVKTTRMQGFLARHHYTGRVPAQVLAERMRANLLSGAPGTVAGRSFSAQSFARLLQLLNSQIAEYDDAIAAAVAEHPDAPIFASFPGVGSTLTGVLLAEIGEDRARFPEAAVMLAEAGLAPVTQASGRSRSVRFRYAANTRIREAAMWWAFNSIKLSPWAAAAFRQARDQRGQHYHRALRGLAARWMRLLWRCWTDHTIYNPQQHRGAQAVPA

SEQ ID NO: 46846 - protein, 339 aa, unidentified
MSIVMGLDQHRGQITGEWIDTETGEVQRTRVVPADRAAVRKFLDRFRGRKLEVALEATTGWRFVIEELRRVGAVVHLAEPAETADLRGSKKRAKGDRADARHLRELLMVGRLPESWIPPDHMLDLRARVRLRHTLSEQRSEWQQRIQATLYHHGCPQRRGLMVGDGRAWLAAQPLPAAAREQITVAIAMIDALEVQLAPLDKELRAYARRQVGCKALMAHYGIGELTAVTILAELGDCTRFSSSRQAVRYAGLDITVYQSDRHRAPGHISRQGPPALRWALYEAAQVARRGERSPDRAYYLQAKERIGGNRACLSVARKLLKRSYHTLRELGQEALAPA

SEQ ID NO: 46847 - protein, 368 aa, unidentified
MKQVTTFVGIDAHKKDLFVAMLIGNEPKAVTWQLANEPQAVRRLVRTLEREAPGPVRVFYEAGPCGYALQRQVTTSRVSCDVVAPALIPRKPGERVKTNRRDARKLVELGRAGLLTAVQPPTPADEAVRDLARARDDAREDLQRCRHRMGKLLLRRGLHYAGRNWTRGHRQWIDGLAWTHAAERAVVDDYLLAIDHTESRLIELDAQLAKIAETEPYREAVGWLRCFRGIDTLTAMLILAELHDFRRFASAPALMAYLGLVPGEDSSGEKHRRGRITRTGNALVRRLLVEVAWHYQQRPGIGVALARRRKGQPARVIGIADKAQQRLCRRFRKLGAEHKPAPKIAVAIARELAGFLWAALQPAPALAK

SEQ ID NO: 46848 - protein, 350 aa, unidentified
MIIIGCDYHPGFQQIAYVDTETGELQERALQHREEAEKFYRELAAQGLKVRVGMEASGHARWFERLLAELNVELWIGDAAEIRTKRVRKQKTDRQDAQLILKLMLKDDFPQIWVPSWENRDLRQLLWHRHRMVQARTRLMNQLQAVALNEGLRCKKRLWREAGRQQLEGFRLAPWASRRRQDLLELLDRLNPTIAELTQAIEREVEKCPEARRLQTHPGVGPLTALAFVLIIGKADRFRCGKQIASYLGLVPLEDSSGSRRRLGHITKQGNSLLRFLLVEAAQVTVRSDSGWRSKYHHLMMRRGRKIAKVAMARRLAVRMYWMMRKGWNYEQLKKFGSHAGQLVPGDGVK

SEQ ID NO: 46849 - protein, 375 aa, unidentified
MSNLSEAFVGLDTSKLRNSVAIAEGGRTGEVRFLGEIDTTPAAIRKLVKKLATKYERLSFCYEAGPTGYGAYRQITGLGHDCIVAAPSLIPKKPGDRVKTNRRDAVTLAKLHRAGELTAVWVPDCGHEAMRELTRARETAMTDLRRKRQQVSAFLLRQGLHYAAEKKTWTKAHMDWLAGQKLEHVEQRIVFEEMMLAVREAQARLERLADAIRVAVPEWSLAEGVTALMAMRGMDLVAAATFLAEIGDLSRFQGPRELMAYLGLVPSEASTGDTIKRGPITKTGNRRARRMLVECSWSYRHPPRVGRTKQEKVAAAPQAVREIAWKAQCRLHNRYRSLIRRGKLKTVANTAVARELAGFLWAVNRAITKTGAAAG

SEQ ID NO: 46850 - protein, 386 aa, unidentified
MKRNDLSRSLVAFDHVSTMVSVVELSFRTWLVAGLVPGLSRQPLKKQGADAQALLTLLRRWQSQATKAGSTINRIVVAFEAGRDGFWLARWLRARGIEAYVIHPTSIPVSREHRRAKTDRLDAGLLMRALLGWLRGESKHCSMAAIPTIAEEDARRPHREHQTLVKEQTRVVNRIKSTLIRFGIRNFNIKPRKAGDCLEALRGPENESLPPNTVAELRRDTARLHLIREQIKAIEKARLEHLKRAPRTGTHPMLLMLARIIGIGVETADMLVHEVLSRTLRDQRAVARYGGLTGAPDESGTKRREKGLARAGNARVRYGMIQLAWRWLMFQKNSDLAQWYQARTTGAKPSLRKTMIVALARKLLIALWRYVTTGEMPAGMVLRPAA

SEQ ID NO: 46851 - protein, 312 aa, unidentified
MTETNSVVHAGLDIAKAQLQLHLQNQQHVLPNTVTGHQRLIRLLRVVAGVHVVCEATGGYERKVVSALHSANLPVSVVNPAQVRHFALAQGQRAKNDPIDAALLTAYGHALRPNATPVPQAVLAELRELVQWRDHLKEQLVRARQPAEHATLAFVHRQQSKEVTHLEKQMAAVEKELAAALTRHPRWREQVQRLAELDGVGTLTAVSVLSQMPELGQLNRGQAAALAGLAPWTRQSGPWEGQRHIGGGRAVVRRALYMSAVALARQTGSILGKFYARLRAAGKPAKVALTAVMRKLLLQMNQVLKYHVPDPA

SEQ ID NO: 46852 - protein, 365 aa, unidentified
MSQDIKKSAGETRRYVGIDLGDKKSRVCILDERGEIVSQEWVVTTPEAFFKRFRGEARMDITMEVGTHSRWASDLLGRCGHKVVVADPRQLGLITQNDAKSDKRDARTLAQLLRADPRLLSPVEHRAEELQMDLTVIRMRDNLIETRTRLVTSVRGVVKATGGRLPSGETSSFPHQVADLIPEPLRPAVAPVLEVIDRLNEATYEYDCLLEHWARTRYEESGRLTQVKGVGTLTALMFLLTVGDKERFSRTRDIGAFLGLRPRLGQSGDNEPQLRITKAGDGLLRKTLVECAQYMVGPFGQDSDLRRWGLKMIEAGNGSKRARQRAVVGVARRLAVLLMSLWKSGETYDPLRHSRARERSAEVAA

SEQ ID NO: 46853 - protein, 323 aa, unidentified
MTSYVGIDVSKRYLDVAVLLATAEVKRHRVENTKAGHDLLLGWLMDFGVCHIVLEATGSYHQGLVAHLHNQKQAVTVLNPRQANAYAKSLNRRNKTDAVDALLLASYGRERSPQPSLINNNVQQSLAREIEALTEDITRLKNRLEAVGHGESHAEVLASLRPRIETLQEEKKQLEKQLEQDLKDQQSEQLALLESIPGIGRLSACMLLAELGDIQRFESSHRLVAFAGLNPGRFESGTSIHKQAVISRQGSARLRHLLYMPAVTGLRFNPRLKDFFHRLTAKGKPKMVALTACMAKLLRIIFGVLTSGKPFNASQALDIQHGI

SEQ ID NO: 46854 - protein, 358 aa, unidentified
MAVNEGTRRIVGGVDTHKDLHVAAVVDEQDRVIETRSFATTRQGYRQMLAWMRAFGDLHRIGVESTGSYGAGLLRFMQQAGIAVLEVTTPDKQDRRRRGKNDDLDAQNAAHAAFAGQRTVTPRSRDGMIESLRVLMACRKTAVSARRVALQMIHNTIVCAPDGLRDQLRSLTRMQLVRTLASWRPDLTAYRDLDSAYRIGLKSLARRYLELHDEIADLDVMIAAIVDELAPNLVARNSIGHIGAAQLLLTAGDNPERLRSEASFASLCGVSPVPASSGKTVRHRLNRGGDRAANSALHIIAIGRLRTDQRTKDYVTRRIAEGHSKLDAIRALKRYLAREVFTLITQRRREINATRIAA

SEQ ID NO: 46855 - protein, 357 aa, unidentified
MKVTTIGIDLAKDVFGLHGVDGQGRVAFKKRLVRNRLLEFMSQLPPCLVGLEACSSAHYWARKIERLGHRVRLMSPRFVKPYRKSDKNDANDAEAICEAVTRASMRFVPIKSEAQHEVQALHRVREQLLKSRTALVNQVRGLLAEHGIVAPQGIARARRLLLEILADPERHGLSGLFRETLQEIAERLRFFDERVGAYDDRIERRFKEDERCRRLAKIEGVGPLVATAVVAAVGNASEFKSGRELSAWLGLVPRQHSSGNRSQLLGISKRGDRYLRTILIHGARAALRRADHKRDQRSRWAMRIKLARGYNKAAVALANKNARIIWALLTRGENYRPPAISVASPTADRISLTQVQA

SEQ ID NO: 46856 - protein, 326 aa, unidentified
MGKHVVTVGIDVGAEELWVAVEGRKPRSFVHSRSGIQSLHRWTSKRARGTIVHYCLEATGVYSVHAASELTRQRQAQVSIVNPVIIVAYARAERKRSKTDQIDAEVIRRYAAERRLPVWRPEPESLRHLAALVAQGDAIKRLLLQWNNREHAQKYIRDLPTEVRRNQRATRRHLENALARIERAIDALCATDAELAQQTALLETIPGIGRRSATRLLAYGGTRWRRYTANAMTAQAGLAPRHHRSGSSVEKKQRIDKQGDRRLRKALYMPALVGSRHNPTLKKLYRRLCDNGKLKKVALTACMRKLLLIVRAVLTKKAPFNMAYPH

SEQ ID NO: 46857 - protein, 367 aa, unidentified
MKKVSTAVTKQGSNVSPPTLTIGLDLGDRNSWYCVLDEAGQIQLEQRVRTTAQALGEVFGVMPRSRIAVETGTHSPWISRLLRELGHEVIVANARKVRLIGESRKKDDRLDAQTLARLARIDPQLLCPVKHRSAQAQADLTVIRARAGLIRARTGLVNTARSLAKSYGERLRGCNVRNLNPEKAEALSPELQRALEPLLSAIEALSERICEYNDHIEALAETSYPQVALLQQIKGVGTLIALTFLLTLEDPHRFRKSRDVGCYLGLQPGRRNSGQSEPQMHISKEGDPYLRTLLVQGAQHILGPFGTDSDLRRWGLKLAERGGRNAKKRAIVATARKLAVLLHHLWVSGDVYVPLHNSLRATVPAAA

SEQ ID NO: 46858 - protein, 315 aa, unidentified
MAVEMNVGIDVSKGCLDVGVYPVGTCWTTTNDGHGIEELVKRWKEAPPTRIVVEATGGYEMRLVMALAAAGLPVVVVNPRQTRNFAKATGQLAKTDTIDAMLLARFGEAIRPAIRPLPDAQAQALSALLARRRQLIDMRTAEGNRLEATDRPIEREIRTHLCWLNKRIDALDRQLDKAIKASPMWREKDALLQSAPGVGPTLSRTLLAEVPELGELDRRKIAALVGVAPFNRDSGAFRGRRCIWGGRAAVRAVLYMATISATRHNPVIRACYERLMAAGKPFKVALVACMRKLLVILNAMVRQGTHWHNVHTHVV

SEQ ID NO: 46859 - protein, 323 aa, unidentified
MQHDPLKNTQNVIVGIDVSKDNLDTYINSTNDWFKFPNTPEGIEKLVAMLAEIEPALVIFEATGNYEHDMMMAVGKAGIPFHRVNPRWTHSYARSRGILAKTDKLDAKILAEFAAERSPKPHKIPNDREVELDEMLRWQRQLTAQAAKLKTQIQQAKSGFVLEDIKSLLATCREKLDAVNAAIDELIQADPESRQRDEILQSVPGVGPQTSRALNIELRELGKFSAAQIASTTGLAPMNDDTGRHRGLRRIQGGRPFPRTALYQAAVVAATRTNSRNAPLRALYIRLRAAGKPFKVAVIACARKLLVILNAMIRTKTKWQQTS

SEQ ID NO: 46860 - protein, 347 aa, unidentified
MAFIGVDLHTNSFTICRIQADGPEGFETFQLSQADIDRFCLSLDGDDELAVEATGNSAWFCGEVRACVGRIVVVNPRQFQVIRKSVNKTDRNDARALAFFLSKDMLPETRLKTVAEAELASLVQPRDTFVKQRTMLLNRIHALLNRHGIKLKKEGLASRKRLEGLDLSRFTPLERLELAALRDQALSLTGALTRLDKAIETAAANLAGFEEISSIKGIGPRSAAILLAGIGNVNDFESADKLAAYVGIVPRVSQPNETDTRGRITKRGDKLMRTTLVQCTLIAIRYSGHLNAFYRHLKERRGFGKAIIATARKLLTIIYNTLKNSWIFEDFPAFKIKQNQCSAGQPS

SEQ ID NO: 46861 - protein, 430 aa, unidentified
MNNDKVSEKGVDSFAAYIGIDWADKKHAVWLRDRRTGRVTTQDLTQSPEALTEWVQSLQVCYPGQKMAVGLEQARGALIYALMEYDCLVLYPINPKSLARYREAFAPSGTKDDPSDAGLLGEIVEKHRDKLKAWNPDDELTRRLVLLNEGRRKAVDQRTRLVQQLGAVLKGYFPLALELVGRELDSPMACDFLSKWTTLADLQVVKPHTLRKFFYAHNCRSETLLDERCQRIRQAQPLTRDGAIIGTSVLAVKTVVRQLRALTEAIREYDQEVARCFAAHPDAFIFDSFPGAGTALGPRLVAAFGTDRKRYERATEIQSYSGIAPVIERSGKQCWTHWRWACPTFMRQTFHEFAKCSIPRCIWAKAYYQMQIERGKKHHAAIRALAFKWQRIMLRCWQARQPYNEQHYLDSLKKHNNDLWHRVCALSQAA

SEQ ID NO: 46862 - protein, 457 aa, unidentified
MESYYMGIDVSKGYADFVILDAKKDVVEPNFQLDDTFGSHCKLFEILKRFFESHSEAVLFAAVESTGGYENNWLHSLGGFQGALDIRSARLNPLGVRANSKASLRRVITDKISARDVAEYLIAHPEKVTYQQEDSLAGLRRQWGFVRLLVKQKTQILNQFESLLYTANPELIAYCQSGVPVWLLKLLKKYPTAVKLSKARATSVARIPYVTAGRAKELIDQAKKSVASATDETTGSLITAIAEQIIRMEETIRIQSQQMAKRCAIPEVALLKTIPGISDASAIGLMLEIQSVKRFASVKKLAAHFGLHPAFKTSGDGTSGVRMSKQGRKEPRKILFMVAMVSLTINPHIRKIYEEHTEKGMKKMAAIGLCMHKILRIIYGMLKNNQAYDSQVDQKNREIITARKATHTAKNENRRYEMFDQQAPISKRQSNKRKEWKQSQGDNIAQCGIGVPIPSAA

SEQ ID NO: 46863 - protein, 408 aa, unidentified
MKTLHRRCAGVDVHKVEVVACLRLVGKHKTEREVRRFATTTHGLLQLADWLEQAGCTHVAMEATGVYWKPVWHILEGRFALVLANAAQVKNVPGRKSDVNDATWLADLLAHGLIRGSFVPPPAIQELRDLTRTRKQLTREIVQHAQRIQAVLEQANVKLASVITDVLGASGRRILQAMIAGETDAQKLAALGSERLSCSKAELAQALTGHLREHHRFLLDQHLRTIERLEQSIAAFDTRIEAALSPFRDIVERLNDVPGLGPSAVASVIAEIGTDMSQFPSAGHLLSWAGLVPRLDESAGKRRSTAIKKGAPWLKPVLVQSAWAAVRKKGSYLQAQFLRLKGRRGPKKAAVAVAASILTIVYHMMRDGTCYQDLGGEHFARRNPAKTAARLANRIRNLGYHVEIRAAA

SEQ ID NO: 46864 - protein, 343 aa, unidentified
MHVNTIGVDLAKNVFQVHGVDSAGKVVTTRQLRRKQVLEFFSKLPGCLVGMEACGTGHHWAREISKLGHTVRLMPPSYVKGYVKRSKNDAADAAAICEAVTRPSMRFVPIKSTDQQALLMLHRTRDLLIRQRTQLINALRAHLAEFGLVAETGREGLAQLGAIITDESKHEALPSAMKQALQAIVDQLAALELQVGALDRAIHAHHRANDMSCRLETVPGIGVIGATAIASTVADPGGFKSGRDFAAWIGLVPRQHSTGGKERLGGISKQGDRYLRRLLVIGATAVVRQARLHPQKHPWIIRLLAKKPAKLVAVAVANKMARIAWAIMAKGGYYRAPELAAAA

SEQ ID NO: 46865 - protein, 422 aa, unidentified
MEDERNWFVGVDWASETHHVRVSDARGRKLGARAFAHSGEGLAAMAAWILEVTGAPPEAVFVAIEVPYGPVVESLMERGFRVHAINPKQLDRFRDRFSPAGAKDDTRDAEVLGDALRTDPRCFRALQPLDPVVVELREASRMAEDLKQERNRLGNRVRELLWRFYPQMLGLTDDVAAPWFLDLWRLIPIPEKATRVREATVDRLLKRHRIRRLSAADVLEALRRPAILLAPGTVSAAVSHREAIAKRLDLVNRQMLAVDERLDRLTQSLAGAQERAGGQRPEPCDVTILRSLPGVGRIVLATLLAEAVEALQRRDDRALRCLAGVAPVTKRSGKSRIVLMRQAAHVRLRNAVYHWARVAVQHDPRSQAKYAALRARGHGHGRALRSVADRLIGVACAMLKAKTIFDPNLASQRAPNLGKPTC

SEQ ID NO: 46866 - protein, 409 aa, unidentified
MYFVGIDIAKKTHQAAIICSDGKLIGKPFKFSNTIDGFNLFLEKLTAVTTDLSQFEIGMEATGHYWLNLYTWLSDKDFRLHVINPLQSDALRNLYIRKTKTDSVDAKIIADVIRIGQYSETQLADENIIALRDLNRQRFYLVDMAADLKRKIIAMMDRIFPEYQDFFSDMFGKTSIQIMKEYTSPEQILQIPTERLTQLLKKVSRGRFTETKAKELKALAANSFAALLSSEMTTLLIRQMLEQLDLLEKQIADIEHIIAAQFTQFNTKLTTIPGIGTTLGATIFSEIGDINRFDKPKQLIAYAGMDPSVKQSGNFVGTQSHMSKRGSPYLRRALWLAAVVAVNHDDLFKYLFQQKMNAGKTYAQAMGYICHKLLNTIFAILKTGEEYKPVYPPQIDVSKFADQPINSQL

SEQ ID NO: 46867 - protein, 425 aa, unidentified
MKNNFLSTLFVGIDVSSKTNVLCALDFQGNKLLNLKALNNHPGAESILESILDCLNSNSLNFVVIALESTSFYSTHIANFLSSNEVLLAYSPMVYCLNPKTIANYRKSFVDMDKTDPLDAYIIADFARCGRIKSQPWRGAQFLALQRLTRHRLHLVEAIAKEKTYMVSNVYLKFSQLTVLEKADRPFSNTYGATSEAVLTEFLSLEDIAYSSIEDLVAFIKDKGKNRFSNPVGTAELLQKAARDSYRLDKVLYEPLNIAIASSFNVIKALQIEIKEIDKAIERNIKGINTTEYQSLISIPGIGPVFASGILAEIGSITSFSSNDALAKYAGLTWRQKQSGDYSADETNMTKTGNKYLRYYLIEAANSVRNRTPEFNEYYHKKFNEVPNHQHKRALALTSRKLVRLVFGLLTKNQIYSNSKVGEVQ

SEQ ID NO: 46868 - protein, 315 aa, unidentified
MSHVTHFVGIDIAKHSLEVAVRPTGQQLTLTYDEAGLQQLLRTLPAPGTCLSVVEATGGYQRRVVAELLTAGHLVAVVNPRQVRDFARAHNILAKTDSIDARIIARFGEEVELRIVTKRAGKHEELAQLVARRRQLVDLRASEKNRRETITSKSVKKSVQHVIDVLTKEITRLDKQLLAFVESDDDWNQTAAIVSSVPGVGPVVSATLVAELPELGELNRQEISALVGLAPFNRDSGRWSGKRSIWGGRKSVRKVLYMAACTACRCNPVIKAFAHRLRKAGKPYKVMITACMRKLLVILNRMVQTQTHWTPTGVR

SEQ ID NO: 46869 - protein, 386 aa, unidentified
MFSPPAQLTRLFVGMDVHKDNHAAVAANCFGEKIWQEELGNSPADFKKLICRVRLLSVERGLSPVFGLEDTSGSGHFLARHLFASGLEVKTVNPVLVKNLRQYETHPEKSDLADALGVAKVLIEKIDTLPAFSITETTELARDLHALVKDRETIVREQTRLKNQLHKALHTAYGSPYKTMFKNIFAKKALLFWINFPSAKNIFSTKKHIGKPNWIIQAKKEELPATTVPLEHQIQRKAKRLLAIWDELNEIEKETKELVEQTGQQLNTLRGCGTTLSATVLSETKDIARFATPAKFAKYAGIAPKRYESGKKKRCVKTKSGNRRLHKAIYQIALTQISNQGLPKAKDYFKKKVAEGKSKKHALVCLMRQISDIIYSMLKNKRAYYP

SEQ ID NO: 46870 - protein, 362 aa, unidentified
MIVLGADTHKRSHTIAGVGATTGELVGERTVQVGRAGFAALLAWARELDGERVWAIEDCRHVSGSLERFLIARGERVLRIPTNLMAETRKSARQRGKSDGIDAINVARAALREGLATFPTAHLDGPELDLRLLVDHRERLVNHRVELNNTLQWHLHDLWPELELPGGALFSRKWSTRIARRLTRAEQTMRVRIARDELRRLRELTDTIKKLAREITQLVEQIAPQLLAEPGFGPLIAAKLIGEIAGAQRFATDAKLARAAGAAPIPASSGNTRRQRLDRGGNRQINAALHRVIVTRARCHQPTRDYIERRRQEGKTTREAIRCLKRYLARQVWNLLRASPPEHDLDHTIKFLDIGATDPRAR

SEQ ID NO: 46871 - protein, 328 aa, unidentified
MMHFIGIDVSKNKFDVCWLRDTTNNKRKTKVFTNKQEGHKALAEWLLNNIKAAPENIVIILEPTGVYHESMMYSLHDMGFKVYLVNASNAKKYAEAINLTHKTDKSDACMLANYGYAQQSNLKLWLPEAVEVRELKALLRRLDALESDYQRELNRLDSSEFSLSSERVLASLKEMIRALKSEIEKLKKDIDNHINGHPKLKNNRKLLESIPGIGSVLSRELTYLFAAKKFKNAKQVGAYSGLIPKFHESGKLKGRTTLSKTGPSRLRAKLYMAAVVAGRYNKSVMRQKETLLKRGKTMMQVIGANMRKLMQICFGVVKNQTEYQPQVT

SEQ ID NO: 46872 - protein, 324 aa, unidentified
MQGKEASEQETKVQSNVGIDVSKCWLDAHVLPGNDRLHVANNCAGIRQLKRWLSHYRIALVAIEATGKWHRHLHRSLVASAIPAAIVDPYRVRMFAKAQGILAKTDQLDARVLALFAAMMAPPVRPVAPQAMAELAELVGARASAVDAQTALKNQFAAAESAFLKRQLDRRIGRAGKDIAALDREILKRIKADASLARRYAVLTSIPSFGFAVAATLIACLAEIGSATAKQIGMLAGLAPIADQSGDREGTRVIWGGRPAVRRVLYLAALSATRFNADMKAFYERLIDNGKPSKVALIAVARKLVVLANTLVSEDRTWQPSAPI

SEQ ID NO: 46873 - protein, 341 aa, unidentified
MSNANSYIGVDLHKKTCFITVMNQAGKIKKQTEISTDTDKVAKFFAKHTDASVAVESTMNWIPFYENLESLGCSVVLSNPLATKAIASARIKNDKVDSRVLADLLRTNLLPLAYIQPREIRDLKELVRQRVNYVEWRTRVKNKIHSVLFKNNLKHDFTCLYGKAGMVWLRGLELRDIYRQELDRYLETLDLLDKQINEMSDEIMKTAKTDYDCKLLMTIPGISYFTALVIKSEIGDIGRFASAGKLCAYAGLIPSTYASAEKIRFGRITKRGSKWLRRALVDAVTSGSKHPSRLCYFYRKLKKNKGTGKAKVATARKLATIIFAMLTDKQPFREFAPVKQR

SEQ ID NO: 46874 - protein, 398 aa, unidentified
MIGVGIDVAKAKSMVAILSDDGEIIKEPFEIANTESGLEYLCSILGELTDKVYCVVESTGAYHIPVVSYLQENDIFVSVINPLIIKKYASMDIRKVKTDKVDSLKLASYVLDNYRHLVNYSTDDELYSELRILSRQYLHYVKVLANAKVNLTDLLDRTLPGIKPLLKSHIRTTGKNKLCDFVERFWHCDVISSMSEGKFISEYIKWAKKKGYHPNETKAKSLYANALECIPTLPSKSPSTKMLVLEAAKAVSNVETTLATIITQMSELAKTLPEFSVVRAMSGVGDVLAPRIIAEIGDIRRFHSSSALIAYAGIDAPPYQSGSFYGSNRKISKRGSASLRKTGYEIMQALKIVQPQNDNAVYQYLIKKETEGKPLKVAKIAALNKFLRIYYSRVKEVY

SEQ ID NO: 46875 - protein, 310 aa, unidentified
MEQTFVGIDVSKDRLDVHVRLSGAAFAVPRDGKGVEELLDRLRTVAPTLIAVEATGGFETIVAAAIGAAQLPLVVVNPAQVRHYAQAVGKRAKTDPIDAEMIARFAEAVKPEPRQVPDAAARLLGELVARRRQIVEMLVAERQREKRADNVRVRKSLARHIKVLERELQDLTDDISGLIRGSPAWRETEDLLVSVPGVADKTSSSLLAEVPELGRLTRRQIASLVGVAPFTRESGRWKGKSMIAGGRAPARAAIYMAALSASHHNPVLRAFYRRLLAAGKPKMVALIAVARKLLVILNAMIRDKKPWQYA

SEQ ID NO: 46876 - protein, 442 aa, unidentified
MNSRAYRATRVNDVKWDEIATGREGLGIMLGVDVGKLSLWAVCRWADGRFERPWRTDNPMEIPTLVSLIKRMSMGRKLVVAMESSGTYGDSLRQALADSEIKVERVGNKASHDYAEVFDGVPSQHDGKDAAVVAELAALGKSMPWDYRPADAWDEELAYWVEWMVVHRQALTLWQGRLEGLVGRHWPEATQVLKLSSVTLLRALKHYGSPQALAADPQAARQLAHWGGKFLELKKVKQVVENAGSSVGVRAAEWQRRQIQDFAQQALAARAEGQRAERQLRRLAAGHPVLQAQGKVVGVPTACVLWTSTGDPRTFHAAAAYRKAMGLNLVERSSGQYKGRLRISKRGSARSRQWLYFAVLRLIQKSGVRPWYEAKKARNEDDARIAVVAVMRKLAVALYHVGIDNREFKPRRLFGRICKRVGNSTELPSRMKIKRKAADVKA

SEQ ID NO: 46877 - protein, 376 aa, unidentified
MSKLRFVGLDVHAETIAVAVAEVGGEIRAHGVIPNRLESIRKLVHKLGPVQQLRACYEAGPTGYVLYWQLTQLGVTCEVIAPSLVPSKAGDRVKTDRRDAEKLARCYRAGELTAVWVPDAAHEALRDLVRAREAAKKDQLKGRHRLGKFLLRHGRRPEGLKAWTKQYLEWIKTHVHFDQPALEATLADYLEEVEHVAVRILRLEKAIDEAVQKSPPEVRAVIAALQALRGVAQTTAATIVSELGSLSRFQSPRQLMGYSGLVAREHSSGNRVQRGGITKTGNSHLRRVLVEAAWAYQHRPNVTGFLLRRQKNLALSEEVKKIAWKAQQRLHKRYKGFAARGKNKNQIVTALGRELLGFIWAIALEAEKQHRLAQAA

SEQ ID NO: 46878 - protein, 454 aa, unidentified
MAKRPRVLRSKRKIIGDLVVVNPDAAGIDAGSEEHWVSVPEDRSDQPVRSFGTFTADLHALADWLVECRITTVAIEATGVYWIPLFEILEERGLNPKLVDSRSIGSRKKKSDVVDCQWLRQLHTYGLLNGAFRPGADMLPLRALMRQRDMLIRYAADHIRHIQKALDLMNVKLHLAVSDTVGVTGLRIIHAILSGKRDPMELAALREPSCKSSEETFVKALTGNYRAEHLFALKQAVDLFTTYQNKIKECDAQIEAALSKFDKTPATASLAPKPAKRRRKNQPHFDGRTLLFEITGIDLTSVPSLEASTILTIISETGTDMSAWYNGKHFAAWLNLSPNNRITGGKRIFKKMPVIRPNRAAQAFRIAAQTLERAQCALGAFFRRVRSRLGRSGAIKATAHKLALIFYSMLKNKTQYREAGVDYYEARYRERLVNSLKKKAAEFGFNLTPIQEVH

SEQ ID NO: 46879 - protein, 354 aa, unidentified
MSQKLSSEIAVIGIDIGKNSFHLVGQDRRGALVLRQKWSRGQVEARLANLPPCLIGMEACVGAHHLSRKLGSLGHDARLMPAKYVRPYCKGEKNDYRDGEAIAEAVQRPTMKFVATKTAEQLDLQALHRVRERLVSQRTGIINQIRAFLLERGIAVRQGLHFLRVELPGILAKRTDVLSPRMLRVIEDLAGDWRRLDERIESLSAEITRLVEQDPACQRLMTVPGIGPLTSSAMVAAIGTGDVFSKGRDFGAWLGLVPKQMSTGDRTILGSISRRGNRYLRKLFVQAAWVVLVKVKPQQWERYGLKSWIEAAKKRLHRNVLAIALANKLARIAWAVLHNGRAFECVKTNAPRPA

SEQ ID NO: 46880 - protein, 339 aa, unidentified
MDIITIGVDLAKSVFQVHGVDAAGEVVVARTLKRRQVLGFFAGLAPCRVGLEACGSAHYWARELSGLGHEVKLVSPKDVKPYVRRNKTDAADAAAICEAVSRPHMRFVPVKSAERQAVLSMHKARALLVGERTRTMNALRGHLAEYGVVAPVGPKGFAALAERLARGELEEVPAFLARVLRGLAATLAPLQAAIGQIEREILAWLRQAADARRLLDAPGFGPLSASALSAALVDPKAFRSARDFAASLGLTPRIEATGGKARLGPISKRGDRYLRRLLIAGAHSWLQSPRAKADPWIARLLAEKPRGKAAVAYANKMARTAWAMIARSETYRPREAAMA

SEQ ID NO: 46881 - protein, 379 aa, unidentified
MWRKIATSLDLINIYPDRPASPKWLYRLDCDSNNNTQRGDRNGTIRGDRLALQQQRARSARRERPGDHQKRLHNVLADVVAALASCGGAIKGVAVESTYNWYWLVDGLQEAGYTVHLVNTAAVKQYDGLKHSGDFSDARHLAHLLRLGILPEGYIYPREERAVRDLLRKRSQLVRTRTTQILSMQNLLARNLALQASGNLIKRWQDADIEALELLSEQKLALKSNLALMHCVDEQIKLLEEAILAKGKLKPEYKSLRTVSGIGEVLALTIALETGELTRFAEPGNFASYARTVNSRRESNGKKKGEGNTKCGNKFLAWAFVEAAHFAVRYDPVIARFYQKKCAKSLSVVAIKAVAHKLARACFHVMKNGEAFDVKRAFG

SEQ ID NO: 46882 - protein, 456 aa, unidentified
MVLPPDDSGRKKSPRRRKRKAGKRKPQAKKSAGLAPNNVPAALEKLEQVNINAAGIDVGAGVHFVAVPEGRDPEASVRCFRGFTSDLEALADWLESCGVTTVAMESTGVYWIALYELLQRRGFEVLLAEASQVKKIRRKTDVLDCQWIQTLHMFGLLSGSFRPDDKILELRGFMRQRDMLIKYASDHVRHMQKALQQMNVKLTEVVSDITGLTGMSIVKAILAGERNPPTLAALRHENCKNDEATIALALQGNWRTEHLLALRQAVELFEFYQRQLGDLDKQVEAHLQSHPDISSGNTLPPRAKRRRDNREPSFDMRNLLYRMTGVDLTDVDGIGGHSALQIISEIGTDMSAWETEKHFVSWLCLCPEVNFSGGSRKSRKSKTHASRNRVATCLRVCAQSLLKSKSALGAFAQCHLFCFLSILLTARNALERDLRQQLRLFLNCHFGVNGCSTQEN

SEQ ID NO: 46883 - protein, 373 aa, unidentified
MPRYSTAFGMDVHLRSTTVCALDAETGEAVTRRFRGNPWGEVAEWMSGFPGPSLAAYESGYLGFAPQRELSGLGVDCVVAAVSKVPRSAADLSSKNDRNDAARMAKAILSHDVTPVWVPSPEIEGLRDLAAAHDAATARLAAAKQRLLAFLARRGYVYGGTTPAGNPRKYWTYGFLRWLDGIHPADDGGIRALAALRNEVEAADETREALLAEYRAAVAAGPLSAEVEALQSIKGCGFALAAAFASEVGDFSRFRSGRQVTAYFGLDPKQRSSADSVRLGGISGAGDALVRKLAVEGSWCYAQAGHQPKLMPKGSGVPLEVRMHGRKGSERLLRRREEMLERGMPQAKANAATAAELVRWLWALGTMCREAGE

SEQ ID NO: 46884 - protein, 347 aa, unidentified
MRFYTKQHQFYGGIDLHARTMYLCILNRDGEILVHRNMKAAPEPFLKAIAPYREDLVVCVECMFTWYWLADLCAQEGIPFVLGHALYMKAIHGGKAKNDKIDAHKIAVLLRGGMIPQAYVYPAEMRATRDLLRRRMYLTRKRAELLTHVQNTNSQYNLAEIGKKIAYKANRDGVAERFPDPAVQKSIEVDLALLGSYDELLRDLELHLVTAAKQDRANALYLLQTVPGIGKILSLVLLYEIHDIGRFPRVQDFVSYCRLVKCAKESAGKRYGTAGTKIGNAYLKWAFSEAAVLFLRNNAAGQKLLARLEKKHGKGKALTVLAHKLARAVYYMLKRGTAFNLDKFLHN

SEQ ID NO: 46885 - protein, 326 aa, unidentified
MNVIGIDVSKDKLDCLWLRELATGKAKSKVVPNKPSGYQALLTWAEKTVGCPVVEIWFVMEATGVYHEALAAALVAAGAPVAVVNPARIRNYAQALGQHTKNDQRDSYVIAHYGCTQRLQRWQPELPEVRELKALLARLEAVEKDAQRETNRLEKATISQASTVVIDSIRGMLATLSAEKERLEKLIDNHIDGHPTLKQDAALLKSIPGVGAVLSRYLTMTYRSRDFQRASQMAAYLGLVPVEDESGSSVHRRPRMSKAGSSVIRAKLYLPAVVATRCNKQARELYQRLLRNGKTKMSALGAVMRKLVHMCFGVLKHQQAYSPLAT

SEQ ID NO: 46886 - protein, 346 aa, unidentified
MEHYVGLDVSLKLTAICVVDQTGSVTREGVVDSDPETIADFVTSNAPSAVRIGLESGPTATWLWTELKQLGLPVICIDARHAKAVLKMQINKSDRNDAAGIARIMQTGWFKEVRVKDLDSHSVRALLASRALLVKIKRDLENQVRGLLKNLGLVIGRAKLNVFAVRAEELIKSRPELMAAVRPLLDARNAIEQQVDDLDRKVMRLAGNNAQVRRFMTALGVGPITALCFLATIDDPTRFERSRSVGAYTGLTTRRYASGETDWTGRISKCGDKLLRSYLYEAANVLLTRVAKWSTLKAWGIRLAKRSGLRKAKVAVARKLAVILHRMWIEGTEFKWSSKEAANQPA

SEQ ID NO: 46887 - protein, 415 aa, unidentified
MYYVGIDIAKSFHVVSVIDDEETKVINKPFKIKNDAKGFEKLLTIFNSISLDKNEFTIGLEATGIYGENLQEFLKSKGYSVKLLNPFQTTRYREQITLKKVKNDEIDSLVIALLLKSGKFSSGYITDDEYQSLRTLYRNRSTIQADMKDVKKRILTQITVTFPEFEGFTKPFNVTGLALLDKYPTAHHYKHSSVDRIMKLFRHIQGNNFTQSKALQLLELSKESIYSGKAKDARAIAIRSSIRLLQMYLSELDIIEAEILSLLENSSVEITVDEAGQEIQKTDTLLHNLKTIPGVAEKTIAALISECGDLTRFPTIPKFIGYLGLFPTENSSGNSKHIGHLSKRGSPLAKHALYMSAVSCLIHNTQLKQLYDTKRSQGKSKKEALIAVSRKIATIIYSIFKYNVPYDPNRVFAKS

SEQ ID NO: 46888 - protein, 353 aa, unidentified
MTAMSIVAHAHPFVVGVDTHARNHVYAILDATNGALLDTQSFPTTAAGINRVIKWVARRTNADADTLWVIEGSASYGAILAGTVAAHGFPVAEAPRMDAKKSRGVGKSDALDAHRIAMAVLPLPVDKLRRPRLHDGVRQCVRILVTARGSMSKDRTRSVNALNALVRGNDLGIDARQKLTDAQITEVSKWRSREEELSLSIARVEAVRLAKHVLALDEQLTANENQLDDLVKVSEAAPLLEETGFRAISAAKCLAAWSHEGRVRNEAAFASLAGVNPIPASSGNTVRHRLNRGGDRSLNSALHMVAIVRMTHDGETRQYVEKRRAEGRTDKEIRRCIKRYLARRIYRTLSAVR

SEQ ID NO: 46889 - protein, 334 aa, unidentified
MKFSFFIGVDISKKTLDFAARDLNQLLFHLKVENSASGLKEFKAECRTREIDLQQSLICCEHTGIYSQCLLSLISKEAGAIWLESSLRIKRSIGLQRGKNDKVDAIRISEYALRFVDKALLWQPEREVLLELRQLVSLRKRLLKAKNALKVPLGEIEGFQNKKLVKELERLNKKPVEELKKQISEIEKKIRGLIKQDETLSQLFTLVTSVDGVGEVIFWEIITTTNEFKLFSCPRKFACYAGVSPFEHSSGTSIRGKTRVSQFANKKMKKLFHMGAMAAICKEGELADYYYRKVAEGKSKMAVLNAVRNKIIHRIFACVRENRKYEKNYINALA

SEQ ID NO: 46890 - protein, 337 aa, unidentified
MTLYCGIDLHGNNSVVAVLDEGDQTVYEKRLPNDLTTITGVLHPYQAELAGCVVESTYNGYWLVDGLMEAGYPVHLAHTGAMPQYAGLKYTNDFSDARQLAHLLRLGILPTGYIYPKEERALRDLLRRRLLLVRQKTLHHLSLQSLIARHSGQRLTANAIKALTNEQLATYLDAPILLGGQITHQARCWLDEAISRIERELQQRIQPRKDYQLLQSIPGVGPVLGTTIALETGTIQRFSSPGNYTSYARCVKSEKISNGKRKGQGNKKNGNKYLAWAFMEAAHYSAIWNPRIKQYYQRKKAKAHVLVAKKAVANKLARACYHMLKRGEVFDETRAFS

SEQ ID NO: 46891 - protein, 356 aa, unidentified
MSRDIKYIGMDVHKEAIVIAVLNGSGKLVMESIVETKASSILEFIHGLRGELHVTWEEGTWASWLYDLLQPQVEQVLVCNPRRNALLKEGSKSDKVDARKLAELLRTGMLRPVYHGENGLRTLRELGRSYQTISKDLNRVMNRLKALYRGWGIACAGTQVYSLRYREEWLNKIPHAGVRRRAELLYQQLDGLQGLRRTLRPELLAESRKHKAVKLLRQIPCIGPIRAARLMALMQTPHRFRGKRQLWTYSGLGIETHDSAQYRYVGGQLQRSKKPQQIRGLNQNHNHEMKEIFKGAATRASCGRGPFHDFYAALLAKGMKPEMARLTLARKIAAITLTLWKRGQRFDAEQLKPQAA

SEQ ID NO: 46892 - protein, 385 aa, unidentified
MVEGSWVGLDVHARKVVAGVLDAGSGELSTVRVAAGGDATVAWLRTLPGPVRVAYEAGPTGYGLARACAAAGIACTVAAPSKINRPAGDRVKTDRRDAERLARLLRLGELVAVRVPEPHEEAARDLVRAREDLRGDLMRVRHRLSKLLLRHGLVYDARAWTLAHDAWLRRQRFESRPLALAFDDCYAAVVQTRARREALDAAIAELAAEPPFAEVVGRLCCLRGVSTLTALGLTVELGDWTRFRPQSLGPFLGLTPSEDSSGERRRLGGITKTGNTHARRLLVEAAWHQRRPPRPSAALERRRHGQPAAVRARADQSARRLHARWQALERRGRRRARTRRALLGPGDDGIARRRQRLGEGSAAAYRHEERPAAELRAARKDNTRP

SEQ ID NO: 46893 - protein, 341 aa, unidentified
MKKKLFIGIDFSKETIDVSFFEREKEKEFNYSEFENNKDGFTSMLKWIKSLSAVNVQEWIFCGEHTGLYSIELASFLVKKKFFIWLENPLQIKLSSGIKREKTDEIDSLDIALYASRFQDRAKEYQLPDKSFFALQNLLAFRERLVKNKVSLQVSANETRRVHKRDKTASYIYEHSMREIERLDKEIQNAEKQMLEIIEKDEKLAENYYLVKSVKGIGIINTVTILVHTQNFTTFENSRQFASFAGMAPFEDSSGTSRKRGKHIKKLGTNKEMKALLTQAARSAVVYDEELRSYYQRKLAEGKLQKVVINNVRNKLLHRIFAVVAKKQPFQKNYMNPLSVA

SEQ ID NO: 46894 - protein, 383 aa, unidentified
MRKIALDLGARETTYCEVQDGKVVDRGTVREIASLVAVLGPERPPATVAFEAGRQAWFVHDLLVGWHNEVVVVDTTRVKQLGVGQHGRKTNRIDAEVLARALERGGIPVAHVLSPARRELRQVLAVRRTLVETRASLVTTIRGLVREQGGKLPSCSTQHFVRRVREQRLEPKISTRIESLLGLVQHIDEQLGPMEEQLDQLCAREPITKVLTTAPGVGAVVAASFISVVDEADRFRHAHQLESYIGLVPGENSSGSKRRLGAITKEGNSYLRSLLVQAAWNILRTKGDDPLKSWAAKVAVRRGKKVAVVALARRLVGVLWAMWRDGADYAPRELAREGARGLRQAAREMEQQADALVNPKQPSSPAATPKRGTPRMTAATPNA

SEQ ID NO: 46895 - protein, 411 aa, unidentified
MDALRACCAGLDVHQETIVACILKGPLDRKPVSKVRTFGTTTRELLELRDWLEDEECVDVAMESTGVLWKPVWNILQDSCELTLANPGHIRNIPGKKTDVKDAEWIAQLHRCGLIKASFIPPLPIRQLRDYTRYRRKLIQQMTQEKNRVHKLLQDANIKLTTFVSDIFGVSGLRLLNKLIEGEVLEHDDLLQLVKTKLKKKIPQLIDALNGRFNAHHRKMLQLHLNFISTIQRQIETVEQEIEQLARPLEEEIQLLDTIPGIDRSGAIEVLSEIGTDMSAFPTDAHLASWVKVCPGNNESAGVKKKGKTRKGNKWVKGILARGCRAIVYQKKDCRITEFFQRVKRRQGDAKAGVATIHLYLRIIHHMLSNKIPYEELGEEYMQEQSRQQVSKLMKQLNRLGYAVELTPIPA

SEQ ID NO: 46896 - protein, 471 aa, unidentified
MTPASTRAERRRQVRTASKPKVPLPPQLKRVNLNAAGIDIGSEEHWVAVPPGRDPEGQDVRRFGAFTGDLCAVAEWLKRCGIETVAMESTGVYWIPLYELLVERGFEVLLVDARQVRNVPGRKTDALDCQWLQELHTYGLLRGAFRPADQICVLRSYLRQRSMLVAYGSHHIQHMQKALEQMNLKLAHVVSDLTGVTGMGIIKAILSGERDAAKLAKLRDPRCKHSEATVAHALEGHYREEHLFALRQAVELVEFYQRQITACDRQIEACLQQFEDKSAETSVSPRKGKRRRGEVSFDARAYLHRITGVDLTQIDGIEANTALTVVSEIGVDMNRWPTEKHFGSWLGLAPGSKISGGKRLSSRTKPSANRAAAALRLAAQALSHSQSALGAYFRRLKARLGAPKTITAAAYKLARLVYRMLKFGSGYVDQGEAAYEERYRERLFRNLKRRAAELGFELTPMSSTPGQPALT

SEQ ID NO: 46897 - protein, 429 aa, unidentified
MTKTYILKTQTVPADRSAVETYLAPPPPSKGKIIGLDCHPDTFTAALFVGQTPHDARKIGSRENLSLDALLKWAAAELTPQDIILMEAGSNSFELCKRLGNLGLKACVLESCHVGKHAKTYADNDKMAAARFALVYLAGNAPCVWVPDEQSRERRELLHAYRKAVDEHTAATNSIKSYLNGRGLRLCKHSLDEKTTSQWILDQADWSVLQKNILAEHLANITESKERRKRLYRLIAAEIAVDPTMMRCMKVLGVGIVSAFALLAVIGDIGRFHSPEKLVAYIGLNPGQRQSGKGKDIRLGVGRRGRGDIRNLLIQGAHAIMRSGRNTPLGQWGWKLFARKGNRNVAVAAIARKLLVQVWHLLHGNPPLALESDTSFRIKLQKLAVALGSTLRTGIGLGKTLEDSVKTLISRCQTHAEPSASPCETPQPA

SEQ ID NO: 46898 - protein, 355 aa, unidentified
MNSEKYIGLDVHQATISVAVLDSTGKLVMESILETKAATILEFFAGLRGTLSVTFEEGTWAAWLYDLLKPHVAKLVVCNPRKNALLKDGNKSDRIDAHKLAELLYLNKLSSVYHGETGVRMLRELARSYLTITKDLTRVMCRLKAVYRSWAIPCAGRDVYYARHRAEWLGKIKEAGVRRRAERLYQQLDLLQYLRQQARRELLAESRKHAITVKLRQIPSLGPIRSALAVALIQTPHRFRTKRQLWAYSGLALETRTSAEYCYVKGGLRRSRKQISIRGLNKNHNHDLKGLFKGAATRASVLPGPFQDFYQRSLAKGIKPTMARLTLARKIAAITLTLWKKGEHFDADKLKSQAA

SEQ ID NO: 46899 - protein, 353 aa, unidentified
MSQSNESRSSRIIALDVGDRRTELARREGGVIVHEELRTSRDALRARFTDEPPCTVAFEAGSQSAWMAWLLTDLGHRPLVIHPKRLKVITQSFRKTDRTDAEWLLRLAEAEADLLGSVRVRSRAQQVDLALLRTREQLTSMRAAAILSVRSQAKLFGAALPSGGPAAFPRRARAGLPPDVLRACEPLIVQIEQITDSLKRIERTIESLAEQRYPETACLTQVPSIGPLTALTAVLTLQSSDRFTRSREVGPAVGLVPKQRASGSRDPELRITKLGDPELRRLLVLAAHRIARNSAPDSDLKRFGERLMARGGKNARKRAIVAVARKLAVLLVALWKSGEVYQPLRHAETAATV

SEQ ID NO: 46900 - protein, 346 aa, unidentified
MPRNTTKPSAAVAKFAGIDYHKKCFVVTLGDAAGNVICQEKLSSDLESVSKVFGERQGLVCAIENCRGNEWFVDALKACGCEVRVANTYAVRLIAESRSKNDKIDSRILMELVSRNYLPVCYQPTEEERLLRERLRFRTKLMRSRTQYKNVAHALMDKENKGRGIATKKGRKTAYEQGELHPERQERLQESLEIIDYLDRLVDGQDKDLIGIAEKNEAAQRLRTIPGVGALSALLLVAEFGDINRFKRAKNVGSYLGLVPRLYASSDVSRMGRITKQGSGLVRRILVQDAWMAISRSPAFRSRYNSILKRRGKRVAIVAIARMIAEVAYRILRDKTEFREELLTLG

SEQ ID NO: 46901 - protein, 315 aa, unidentified
MSDLPCFVGIDVAKAQLDMALRPSGERWSVPNDPNGVTMLVEWMPTLQPTLIVLEATGGLERLVTSALATAGLPVVVVNPRQARDCARATGQLAKTDALDARALAHVADVIRPTPRPLPDAQTQELRALLGRRQPLLVLRTAEQHRLAGTSERLTKDIVAHIPWRNAAIATLDHDLETTLRASPLWRENDELLQRAKGMGPVSAHTLRLALPEWGTLTRQHIAALVGVAPLPGDRGTFRGRRQIWGGRAQVRTVCYLAPLVATRYNPQIKAFYARLLAAGTVKKVALTACMQQFLTILNAMRKHRTPWQPQEVQS

SEQ ID NO: 46902 - protein, 420 aa, unidentified
MFCHFGFHKRSIPMKYVGVDLHKKSISICVVVLQGRKRKVVARKRFACPDVEGICRFFRELGAFQVVVEATANYEWFVGLVERLAQRVVLAHPKRLRVIAESKYKTDKIDAWMLAEFLALDMIPEAYRPTPRQREHRVLVRYRYYVQKRTVSVRNKMRHILANYNADVQELFTARGLQYLAKQKVSAADRFVLDRLLEEWREHQRRLKEADQALAAFGQKAPVKEKEARRVLETFPLLGPVTADVVLSEVGEAKRLRSLKRAASFAGLAPGFRESAGRRKEGGITKEGPRLLRWAMIQLAWRLVGRTAYWGGIFVQLERRTGKKKAIVAVARRAFCVIVSMLRSGQGYRTPRGGATAGFRRDGKGVQGEEGRRRQTKKPGVSWPRQEAKTQAAVRVEAKPRKKPRASSRRPRRVAPLAHP

SEQ ID NO: 46903 - protein, 413 aa, unidentified
MDVLYRHCAGLDVHKETVVGCVRLVTADKIVTEVKTFATTTTGLLSLSEWLSANECRHVAMEATGIYWKPVWTILSDGEFELTLANPAHVKNVPGRKTDVNDATWLAELHAHGLIRASFVPEPGTQELRTLLRTRKQLVREKVSHTQRVQKTLEDANIKLDVVISNVIGLSGRRMIEAMIAGESDPAKLAALADRRIKASQETLREALRGRVRKHHRFLFRLHLQQIDALDAAIATIDQEVDAGISAFFRAGVELLTSIPGVSTLSAEIILSEIGTDMTRFPTAGHLVAWAGLCPGNDQSAGKRRSNRLRKGAPWLKTILVQCGWAAARVKRGYLPAQFHRLCARRGPKKAVCAVAASILTAIYHMLTSGTLYHDLGSEHFQRRAKHTRTKNLVKRLENLGFSVQLTPLPAAA

SEQ ID NO: 46904 - protein, 374 aa, unidentified
MGCQAGGEAASLTTMITDDKTETNKSYDTIKLGIDAHAKWYYVARQLDGATPQPVQKMTFEALLRFVAKQQALAGEVHTCYEAGAFGYHLHRKLEALGVSNLVVQPQDWDERSKGVKTDRIDALALCQRLDRYVRGNRKAFSVVRVPSEEEERERAFSRQRQQLVRERQRLQAMGRSLLAMQGIHVRGKWWKGQTWAAICREAPAWVVERLEVFMKLIEPVEVEERKLTEGIQKVGRKSRIPKGVGPLSFEVLRREVGDWSRFNNRREVSSYTGLCPREHSSGGKRRGGSVNKSGNPRVRAMLVEMVWRMMRWQPGYHALRKWMAVLGDASRSAAVRKKAIVAVARQLAVDLWRLFTGQTTAEKLGLIYLPEAS

SEQ ID NO: 46905 - protein, 351 aa, unidentified
MRIIGVDLHTRQQSVAMLDTDTGEVIEKTLEHEGDEVREFYSALPGPVLVGIEATGSMPWFLKLMEELKIECRVGHPAKVRAAEARKQKHDRRDARLLLNLLAENRFPAIWMPSTEQRDLRTLLRHRHQWVRMRTRVQHTLQSLALANGLRRGTTLWSQVGQHALQALPLAPFAGQRRAALLALYPVFQKAIDDLDQQVSEQALLHPQARRLMTHPGVGPVTALATEVFLGDPLRFVDGKAVASYIGLIPSERSSGRRQRLGKLSKEGNSLVRYLWGEATIHAVRRDPELKRFYRRKLMQKGLGKAKTAAARKLGIRLWIMLRDQIDYKEFCRRGQLRQKSGDARAGMPGR

SEQ ID NO: 46906 - protein, 379 aa, unidentified
MYIVGLDVHAKRSSMCILDENGKLVKHLEVKGAWARMLQVVDEQVPRPFAVCFEASCGYGYLHDQLAKRAERVTVAHPGQLRLIFRSKKKNDRVDADKLAKLLLLKEVPAVHVPGMDVRAWRGLINYRRKLIGRRAAVKTQVRAFLRGLGIAVGVKGGLWTKKGVAWLTGLALTSPADAVRRDVMVDDLTALEEKVRRVERELNRIGRAHPGVTLLQTIPGVGPRTAEAFVAHVDDVRRFARVKQVGSYFGLVPCQDASADRNRLGHITKDGPAGVRWLVAEAAWQGRRRSAKIRAFFDRVMRNDPGRKKIALVATAHHLVRVMTAMLRSGEVWREQEPQQPQTPPPTPAPPPPPPPPRSNEQDKRETSKAKTKASDKE

SEQ ID NO: 46907 - protein, 343 aa, unidentified
MQTTTTIGLDIAKSVFQVHGVDAAGQVVIRRQLKRRYVLSFFQKLPQCLVGIEACASSHHWSRELQALGHTVRLMPPAYVKPYVKRQKNDATDAEAICEAVTRANMRFVPTKTPEQQSGLVLHRTRHLFIRQQTSVINAIRAHLAEFGIVAPVGRRGVEELLTVVADPNDKRVPEIARACLSAFGAQLRSIKEQVLEFYRLITAWHRSNEMSMRLDEAPGVGPVLATAVVATVADPKVFRSGRNFSAWIGLVPKQHSSGGKDRLGSISKQGDRYLRGLFVAGALAVIRYAKIHGTKHRPWLTALLARRPTKIAAIALANKIARMVWAMMAKGERYKEPIALAA

SEQ ID NO: 46908 - protein, 335 aa, unidentified
MQIYGIDLAKEKFDVSFFDLTSKKVSNHPSHKVVTNNLKGIGKFFKGLPSDAVLVAEHTGVYGDTLLKCCMDSNVKIAFVGGYVIHRYRTTPDRAKTDVLDCALLRDFGERYPDKLKYKTFPEEALYELRQLARHREMLVEQRKQLITADKSEDCRPIRSLAVKRSMDRIKEMLDTEIAETEKEMLKVINGHESIHHNYELVKSVDGVGLITAVELLVKTENFTKITTARQYAAYAGTAPYEKSSGKMDKGAHISKIGNRRSKTLLYICAESARLHNKEIKLYYERRTLIDKKPRHYVLNAIANKLLRIIFTLVEKGEYYDANFIRQDPRVVKYN

SEQ ID NO: 46909 - protein, 399 aa, unidentified
MEPQFFLGIDVGKSDHHVTGVNRDGKVVHDKSLPQSEPKIQQLLKDLAAKYGDLLVVVDQPKTIGALVIAVAQQLGIQVAYLPGLTMRRVADLHPGQAKTDARDAYIIAETARTMPHTLRGITIAEEQIAELSMLCGFDDDLAAQLTQVRNRLRGLLTQIHPSLERVLGPRLAHPAVIDLLSRYPTPAALQRAGRGHVRTRLKKLAPRMAVRLTDELFTALAEQTTVVTGTSAAEHIVGRLAAQLQQLTQQRADIEAEILRVVDAHPLTAVLTSMPGIGARTAARILTEVVGKDFKSAAHLASYAGIAPVTRQSGTSIRGESPSRRGNKVLKRVLFLSAFASIKGDPASRAYYDKKRTEGKRHNQAIIALARRRSDVLFAMLRDGTFYESRPTQLAPAA

SEQ ID NO: 46910 - protein, 357 aa, unidentified
MNSIAQQAPQRKVAIGVDTHKYLHVAVALDELGGRLADLTVSADSGGYALLEAWATGLGRIIAFGIEGTGSYGAGVTSHVRRCGHRVIEVNRPDRRERRLSGKSDLLDAENAARAALSGRATATPKAADGQIEMLRQIKIAKDTAVKARTQAMVTLKTLIVTAPPDLREELQGLPRMALIGRCAGLRPGPLTTPIAATKHALRGLARRWQLLQTEIREHERQLTTITSAVAPAMVGAFGIGADTAAELLIVAGDNPDRVHSEAAWAKLCGVCPIPASSGLRTRYRLNRGGHRQANAALYRTVIVRLRFHQPTIDYVARRTAEGKTKAEIIRCLKRYVAREVWAYLHPERHERPKLVA

SEQ ID NO: 46911 - protein, 349 aa, unidentified
MDATTVAIDLAKDVFQVAVANRAGRILDRQRLTRRQFERFIDTLVEGTDVIMESCGTSHYWGRRMQSRHLRVRLLPVQYVRPYVRRNKTDRADTDALLEAARCGDIRSVPVKTVEQQTLQAIHRVRTQWQTARVARINAIRGLLAEHGYAIPVGVRTVLRRVTAILTDPDAAVPDVLRQTIALVVDEVHALEEKIAGVDRQLKQIAGVHPVATRLQTIPGVGVLTATALVGSVGHIHAFRRGRDFASWLGLTPRESSTGARRYLGRISKRGDIHLRCLLAHGARAVLRVALQLAERAPDRLTRLQQWAVSIATNRGRHKAVIAVANKLARIVWAVWHYDVAFEAQPRVA

SEQ ID NO: 46912 - protein, 401 aa, unidentified
MGYVAGLDWGGGAHALCVIDIDTGRVADRFEVAHDAAGLKGMRRRLARHGAPADLPVAIERPSGLVVDTLVAAGHPVVPIHPNVVKASRPRYRAAGGKDDRGDAYLLADLLRTDGHRFRPLSPVSDEIKALRTLVRGRDDLVATRVGLANQLRSLLESFWPGAAAIFADVDSPIALAFLGRYPTPDAAARLGRKRLAAFLAQHGYCGRRSAEDLLVRLRTAPTGLAEAGEAEAKGEIVRALVAVLAPLVGRILALSARIRHVMAELPDGAIVMSFPRTGQICAAQILAELGDDRARYLTADQLAAEAGLAPVTHQSGKSRGVTFRWACNRRLRKAITCFADGSRHQSAWAAGIYDRARARGCRHPHAIRILGRAWCRILWRAWTERTPYDPARHSALQTIG

SEQ ID NO: 46913 - protein, 354 aa, unidentified
MERIYIGVDFHARQQTICYLKTETGELVTLELRHQDKEKVRTFYAEFHGQVIVGLEASGYSPWFERLLEELGHEVWLGHATEIRRRARWRQKNDRRDAELILDLMLHDEFPRLHRPSVQSREVMRMLRYRQKLIKMRTMSKNSLQALALQAGLAKRSSLFTRDGQQQLATAEMSPAMQWQREHWLQLLAPLNQQVLASMAWLKAAGKDDVCIARLRTHPGIGLLTSLCLAHTLQPVDRFRNTRQVAAYAGFDPVERSSAETKRFLGISKAGSRLLRHLMVEAAHVAVRRDEELKRFYQRLADRRGRPKAKVAAARKLLIRAYIMMRDEIDYAEFRRRAVAARLARLGHGPQCPG

SEQ ID NO: 46914 - protein, 350 aa, unidentified
MKTIVKQVVGIDVAQHELVVQLGRMYDDWSPELYASKTFPNTTKGFQALVAWVSKLTDDQAVVRYVMEATGVYHESLAYYLDENGQPVSIVLPNKISSYARSLDTKTVTDATASNAITLFGLERQLRQWSRPKGIFRKLKQLTRERSQLVEERTALKNQLHAEQAEAQPYKKSIDRMKKRINLLDQQEKEIQDELKILIQTDPEMKRAVELLCSISGIGTLTVATVLGETNGFDLIGNKRQLTSYAGLDIQEKQSGTSVKGKPRISKRGNKHLRKAMHMPALAAIRHDQRYKAVFARLVSKHGIKMKAAVAVQRKLLEMMFTIFKKQEKYDKEYFKRFAADPVDNCLEKN

SEQ ID NO: 46915 - protein, 369 aa, unidentified
MKKDSTLYVGLDVHKDSIVAAYASSEGGDPVHLGAIGTRQCDIDALVRKLQSKGARLVFVYEAGPCGYWLYRYLTGKGLACLVVAPSLIPRKPGDRVKTDKRDALTLARLARSGDLTPVYVPQVADEAIRDLARAREDALGDLNDARFRLKALLLRHDIRYTGRANWGDEHRRWLARFVFPTPAQQIVFQEYVRTVTERTELLGRLEAALLEQAKTWRMYPVVEALQALRGVQFTVAIITVAELGDLTRFERPPELMKYLGLTPSEYTSANRRRLGGITKAGNGHARRALVEAAKAYRHRAKVSEQIQARQQHLPKAICDIAWRAQVRLCGRYRKMLARGKHPNTIAAAVARELIGFMWAIAKEQPVAA

SEQ ID NO: 46916 - protein, 376 aa, unidentified
MLYVGIDQHTRQLTVCVRDEEGEVVLRRQVGTRLDKVVPFLEQIRDDAVANGGFVVIVEVCGFNEWLIELLNQMGCHETVVIQPEKSSNRKTDKRDAARLSELLWVNRQRLLGGRKVQGLRRIELPNDQDAADRQITALRQRLGAQRTQLINRVKRIIHKHNLIHDQPTKTFPTKAVQKWLRTVELPSMDRLEMDLLLTQWELVEEQLTLVNTDIAERVVEKPRALKLMTISGCGAFTALAIASRIGRIERFRSGRSLANFFGLTPTCSSSGESGDRLGHISKQGSSIVRFLLGQLVTRVLRDDTLLRRWYSGIKRRRGAKIARVAVMRRLTTSIWHMLKYNEVYLPVALRDVAQRKPRQPPGTSTPTTAEPATNV

SEQ ID NO: 46917 - protein, 317 aa, unidentified
MTTTSDVYVGIDVGKAWLDVALWGSETAWRVSNDDDGVAKIMARVAEMEPQLIAVEATGGFEQLLVQSMLLNNLPVAVINPTRVRALAKATGKLAKTDVIDARLIAEYAFKIQPEPLSPKEVNEIRLKALVTRRVQLVEMRVAEQNRLGTVQNSMQADIREHIEWLTSRIEALEAQIDELVESVPELREKADRLDSIPGVGRITAVTVLVEMPELGQLDRQKIAALAGLAPFNRDSGHQRGKRRIFGGRKGVRRVLYLACLSAKTHNPVIRSLFERLMKKGKIFKVSITACMRKMLTIMNAMTRDQVNWRAPKPIPA

SEQ ID NO: 46918 - protein, 347 aa, unidentified
MRFYTETHKHSCGIDLHARTMYVCILDPQGQVLLHQNMPTDPERFLRATAPYRDDLVVAVECIFTWYWLADLCADEGIAFVLGHALYMKAIHGAKAKNDKVDAAKIAALLRGGLLPQAYVYPSEMRATRDLLRRRTHFVRHRAQLLAHIQNTHHQYNRVAPGRPIAYRSNRGGVAEGFDDPSTTKSLEADVALIDHYEVVIRELELSVLQRARKHDRDSYERLKTVPGIGKVLALTILYEIHTIARFTKVQEFASYSRLVKCQASSAGKIKGTSGAKIGNAHLKWAFSEAAVLFLAKCPEGKTLLARLEKKHGKGKALSILAHRIGRAVYFMLKNKRAFDLGRFMKR

SEQ ID NO: 46919 - protein, 354 aa, unidentified
MDDAGVPQRNRNLANDLAKLIPVLGALSPGTPVAFEAAYGWGWLVDLLEELELEPHLVHPSRCKAIASARLKNDKVDAASLAQLLRADLLPEAWIAPQATRDLRALLCHRASLVRMGTACKNRVHAVLADRGIPGHSSLWTGPGRAWLADLKLPATPRGIIQDGCGLLDALTTPIGRLEREIAGLAKPDPRVQALMVLPGVGRLTAMTLVAEIGDIARFPTARKLCAWAGLTAQVRNSDRKVGHGHITKQGSPWVRGILQEAAQTAKRHPMFAPAYTQLARRRGTDIATTAIARRLLARSVHILTQLETAPAPEQASTGRACVRMSLPTRPPGLTEQPGSGLTVMPTPPSGPRS

SEQ ID NO: 46920 - protein, 337 aa, unidentified
MYILAEGGELIEQRIRTEPERFAAVLGGRPRARILLEASTDSQWGARCLEQLGHEVIVADPNFAPLDATRTRKVKTDRRDARALAEAGLLGAYRPAHRLSDPQRHVRGRLTVRDAVVRTRTRYISLIRALLRQQGYHVPSGSAEGFLHRVRAMTLPGRLVSTIAPLLAVMRHLNAQLAYSDETIACVTAHDARVQRLRTVPSVGPVTAAAFVATLDDAQRFRHAHQVEAYLGLVPRELSSGETQRRGHITKAGHTRMRWLLIEVAVSILRRRPPQAEVLYAWALHIAVRRGKHIAVVALARRVAGILYALLRDGTTFDSQRSPRPVVAATLRAAATG

SEQ ID NO: 46921 - protein, 355 aa, unidentified
MNQEKYIGMDVHDATISAAVKNAQGKLLMECVLETKAATILDFIQGLRGTLALTFEEGILAAWLHDLLKPHVSRLVVCDPRKNALMRDGNQNDRADARNLAELLRTNQLRAVYHGRHGTRALKELGRSYLTLTKDSTRVMNRIKSVYRSWAIPCAGTSVYSRRHRAEWLAKLVEPAVRIRAEHLYQQLDSLQPVRQAARRELLRESRKHAAVELLHQIPSIGPIRSALLVAILQTPHRFRTKRQLWAYSGFAVQTYDSGEYRIVRGKQQRNRERITVRGLNRNHNHDLKNLLKGAAISAIERPGPLQDFYAALVEKGMRPSMARLTLARKMAAITLTMWKKGVSFDPKQLQRQAA

SEQ ID NO: 46922 - protein, 399 aa, unidentified
MTNQDHRVGGIDSHKDTIHVAVITAIGQPVTDREFPTTVAGYRRAVAWLIEHGPLSAVGVEGTSSYGIGITTELLAAGIRVVEVNRTRAAEKRKQGKTDPLDAYRAARSVLSGEASTEPKNPSIEPLRALTIARRSAVKSQQAAWRQIGSLLVTTRPALRDRFRDLPETKLIATLRDCRPDQIHDVDDADTLYALRTLARRYLALQDEITALEERMLRRATRANPALMAIKGVGPAVGAQLLITAGDNPDRLRTSASFAALCGTAPIPVSSGRTDKHRLSRGGDRQANAALHHIVKVRMSYDQRTRAYRDTRLANGWTTKEVFRALKRAVAREIFHALAGHTLAPDYSDLRPARHAKNLTLTAAAQHLGVWPARIGELELGRRPNDELATRYRAWLAAA

SEQ ID NO: 46923 - protein, 313 aa, unidentified
MANVFGVDVSKVWFDISDGQTVFKLDNERSAILKWLKTLPKDAVIAMEATSNYHALLAELAHQYGVIVFVLNPRHVHHYAKGVGRRAKTDKVDASLIRRYVVQERTYLTTWQPPTPQQKEIDTLTQRRHLLVTKKQSIVMAFKDIADNCEGYKEMLKQVSTVIDNLEKRIVQTIKQEPNTLRDYQLITSIPGIGPLTAAFMCNLLNKHSFSSIDQLTSFLGMDLIHADSGKKHSKRTLSKHGSSESRRLLFNCARAASQGQLKAMYEKFAARMIHTKATVAMMRKLLKLVFGVWKSKTAFDINKYQSPLLQIA

SEQ ID NO: 46924 - protein, 352 aa, unidentified
MNRFIGLDGHSSSCTFAVLSEKGKTLRTDVVETNGQSLVEYLRLIPGRLHLCLEEGTQSQWLFELLAPHTHEIAVVSGEKNQGDKSDEGDALGLAERIRTGALGAKIFKAPITFTSVRDLARAYGMVTGDVVRTKNRIKSFYRSRGVQPGAGNAVYSVGRREEELKRFSGGTRQSVQLLCGELDILEAIKADAQQALVAEAHKHSIAKVLETAPGLGPVRVAQLLSIVVSPHRFRTSRQFWAYCGLAIVMRSSSDWVQQPNSQWMKAPVTRTRGLNRNFNRTAKAVFKGAATTVITQLPKNPLYSNYRRLLQEKVKPNLAKLTIARKIAAITLAIWKNKEAYDPAKYQKKIA

SEQ ID NO: 46925 - protein, 396 aa, unidentified
MFFLGIDIGKNTHVASLLGEDGKPIFRAFSFSNTTDGGESLLTKLEVLGTSPSNLVIGLEATGHYWLSVYSFLHDRSYKLHVINPIQTDGWRKGVEIRQRKTDAIDSVLIAELVRYGDFIETQLPHEEILSLKNLTRFRSYLVDSIADLKRKVICVLDQVFPEYQNVFSDVFGKTSKEILLQFASPAELEDVSADTLAKLLLDLSRKKIGNDTAQKLTSAASNSFGITFCRDSFTFQLRILIEQMKFIESQVHDVEAEIATLMSRLHSPIMSIPGVGKVTGAVILGEIGSIERFDEPSKLVAFAGIDAIVRQSGEFEGTSARMSKRGSPYLRRALFQAALVAATGRNPDPTLRAFYLKKRAEGKHHSVCVGAVSRKLCYIIHAVLKENRPFEVRDS

SEQ ID NO: 46926 - protein, 317 aa, unidentified
MNNQNTTTWIGVDISKKELEIHCYDSAFKLPVTAANTKLGINKIISKLKNCDNPHLVFEATGGYEKRLLVLLQSEGVKASRISPSLARNFAKAKGLLAKTDSIDAQILTDYGIQFSPRETAPLDPIFEEIQALIKYRRHLNDELHRERMHLEHLLPKSVESMVKSRMKSLQKQMEKVISMMINLKEKSSSLDQAVELLTDTKGVGDNSALSLLVAMPELGKISNKEAASLAGLAPFNRDSGKMRGQRKIFGGRREIRQSLYMAALSGSRYNPVLKEFYQRLLEKGKPKKLALTAVMRKLLCHLNSLMKKHLQKPQSA

SEQ ID NO: 46927 - protein, 320 aa, unidentified
MAEELKWVGIDVSGSELAVGVRPSQETSVFVYDADGMTALIAFLEGLKPQLVVLEATGGIEARAAAELYAAGLPVCVVNPRQTRNFAKSLGVLAKTDAIDAIVLARYAEAVKPQVRRLPDEKEQEIKDIVARRRQLIDMLIQEKNRLTRAHGRIRTGIVKHIDWLKKRIEDLDEELGDAVTDSPLWSERSGILRSVPGVGKVLCATLIADLPELGALNRRQIAALAGVAPFNRDSGVSNGQRRVWGGRHGVRRMLYMAVVASLKANPVMKAFYARLRAQGKKPKVAIVACMRKMLVILNTMVRRGQHWDGGMAAKCLCGA

SEQ ID NO: 46928 - protein, 384 aa, unidentified
MNKHSILFIGLDTHKEFNEVAYIEEHRGAQPVHLGRVSSSKMAVQKLVRQFESKYPGATLHFVYEAGPCGYWIYRLITSLGHCCYVVAPSLIPKKPGEKIKTDKRDALKLSKLLKSEDLTPIYVPEPEDEAVRDLSRAREVAMKDLKDAKYQLKALLLRNNINYKGTANWSQKHLRWLTELVLPHPAQHIVLQEFLHTITERISRLERLDNELTHHVHQWRYYPVVKAIQAMRGVRLLVATGVVAELGDLSRFDHPRKLMSYLGLVPSEHSSGGKRHIGAITKCGNGRARRLLVEGAHTYRYAANISTDMQKRQEGLPKDIIDIAWKAQLRLCKRYKKMIAKGKHYNLVVTAIAREMIAYIWAIAKEVVLTPVNTKLRLARVPA

SEQ ID NO: 46929 - protein, 312 aa, unidentified
MSDPVYVGLDVSKHHLDLACEPVGDARRLPHTEEGVTALVAQLHAIQPALLVLEATGGYETQVATAVALAGLPVAVVNPRQVRDFARALGRLAKTDAIDAQVLALFAARVRPEPRLLPDQAHQALAALVTRRRQLVEMLTAEKLRVPLAQGRIRHDLQAHIQWLEQRIHDTDHDLRAALKASPLWRVTDRLLQSVPGIGPTTAAVLIAELPELGRLTRQQLAALVGVAPLNHDSGQHRGLRRIWGGRADVRRALYMATLVATRYNPVIRTFYRHLLTGGKPKLVALVASMRKLLTILNAMIKSQQPWAPAHP

SEQ ID NO: 46930 - protein, 346 aa, unidentified
MMIIGCDFHPSWQQIAWLDNQTGECGERKLAHATGEARQFYQQLAAPARIGLEATGNSQWFVELVEDLGHEVWIGDAAQIRASYVRQQKTDKRDAAHLLKLLVEDRFPRLWTPSREQRDLRQLVVHRHRLVEMRSRVKNQLQHLALNRGVQRQHKLWSQTGQKLLRELPLKPWAACRREDLLGLLAGLDQRIGKLDWAVKQAAEENPQARLLMTQPGVGPNTALAFVLTVGDVQRFGRSKQVASYVGLIPREYSSGGRQHLGGISKQGNRLLRMLLVEAAQTAVRLDEGLRKQYLHRCHRKPKAVAKVAAARQLAVRLYWMLRTQVGYPEIVRIESSPRVPRVGAS

SEQ ID NO: 46931 - protein, 344 aa, unidentified
MMNIQLKTNDVQVNSIHQAGIDVGAEELVMVIRKNGKLFNPQTFTNTRADRARLVMKLVKLPGIIVCMEATGVYHFDLAVALHDAGVLVMVINPKSSHNFAKVLMKNSKTDAVDANTLAEYAARMDFVAWTRPSDETIAVRCFSRRITALTTQKAAAKNHLHALTATQETPKAVLRDAKLAITQLQKRIDRLTTEALLLIGKHPKLERSLTLLISIKGIAETSAISLMGELLLLPPDLTHREWVKFAGLDPKAFDSGKSVHKKSRISKAGNRNIRAALYMPALSAKQHDPHVRAYFQHLVANGKKPLQAVCAIMRKLIHAIHGMLKNDEPFDNTRFYKIPISAV

SEQ ID NO: 46932 - protein, 329 aa, unidentified
MLRPEPTRARHGQVSNLAAHPAARKVGQHVRIALLSIEGTRSYGAGLARAAMAAGISVIEVEQPTRKIRRGRGKSDPMDAHLAVLYAVQLDAGKLPTPRADGDREALRILLCARQELTTTSTAQTNRLKALLRDGDDTDRRLACGELILTTLAELVKRRLPQNASRQQAIRHAEIHGLAVAVRDARQILKANGAELAAIVNDLVPGLTQRPGIGPVSAAQAIVSFSHPGRCRNDAAFAKLGGTSPLEVSSGQTQQHRLNRGGDQALNKALHTIARTRMRSDPATSAYVARRRAEGKSKREIRRCLKRYIARQLYRTLTAVMTPDIAATG

SEQ ID NO: 46933 - protein, 426 aa, unidentified
MKSTQNEKISQIKSWTLVVGIDVAKEIHYARAFDFRGIELARLLKFSNTAEGFRRLEQWMQDICQQHNKTDIIVGFEPTGHYWFTLGDYLKSHGHRLAIVNPFHVKRTKELDDNSPTKNDRKDPKTIAMLVKDGRYRDVYILEDLYQELREAVAERDRLVQRLTTINNQVERWLDIHFPEFQTVFSDWQGKAAFLTLRHFPTPEKIVLAGAEKIEAVWKASMKRSAGVKRARELVKAAEDSIGRKIGLVAAEASLQNLLAEYELYSQQYEQLEQLMMDLLMQVPNAEKLLDIKGVGLITAATFVGEVGNISRFQDPRQIQKLAGFNLVENSSGKHSGKTRISRRGRRRLRHGLFMAMITILATNPEFRMLHQKNLTREKNPLTKMQSIIALCGKLIRVFYGLLRNGTDYSAEKMLGDIELGMRVAA

SEQ ID NO: 46934 - protein, 345 aa, unidentified
MKSVATIGLDIAKSVFQVHGVDAAGQVVIRQRLARRRVLAFFEKLPPCLVGIEACSTSHYWARELIARGHEVRLMPAQYVKPYVKRGKNDAADAEAICEAVTRPTMRFVPVKTPGQQSVMMLHRVRLMLNRQRTQLSNSIRAHLSEFGIVAPIGRRGIDQLLAIVADESDVRVPPDARLCLQMLAAQLIVVKQQILENDRRVRASARATDLGRRLMEIPGVGPLLASALTATISDPSAFKTGRDLAAWIGLVPKQNSSGGKERLGSISKAGNRYLRQMLVVGAMAVIRYAERHGSRRPWLVQLMQRRSAKVAAVALANKMARMIWALMTSGERYREPAMVSAMAA

SEQ ID NO: 46935 - protein, 315 aa, unidentified
MAAEVWVGIDVSKARLDVALGATGELFAVANDARGIAGLSARLVELGPELVVLEPSGGWETALVAELGAAGLPVAVVNPRQVRDFGRAGGQLAKTDTLDARLLARFGDRMRPAVRRLPDAQELELKALVARRRELVEMITAERNRLGTAAKVLRKEITAHIRWLEGRLKERDRELGRMLRSSPLWREREDLLRAVPGVGPVLCATLQANLPELGQLSRHQIAKLVGVAPLNRDSGAMRGRRTVWGRRAQVRAALYMATLAAVRCNPALKTFYLRLRHAGKPAKVALTAAMRKLVTILNAILKNRTPWSSPCAPTT

SEQ ID NO: 46936 - protein, 405 aa, unidentified
MDITPIHRRVIGLDVHQNKITACALIEQADGSVAVAQGEFGGFKRDRRALAGWVHGLAPDIVVMESTGIYWKSPYAALEKVGIAAWVVNARHVKNVPGRKTDISDAQWLATLARAGLVRASFIPPAEIRHLRLIARQRQKLGGMLAAEKNRLHKVLADAGIRLNVLLSDLHGQSARAMVKALLADAPIHAILARAGRLRASREDLFEALQPEELSAKHRFVLNEIMAHIEYLEATMARFEQQLLVGLAPWEPQMRLLETVPGIDRLGAAMLLVEIGTDMDSFGSAERLASWVGICPGNNESAGKRKSGRTRKGNAWVRRLLCEFAQAASRTRCALKDKFSALAIRKGHKRSIVALAHKMLRIVYAMLANTTPYQDRTVDYEALMVGRNAPRWLKMLAKHGYIATA

SEQ ID NO: 46937 - protein, 345 aa, unidentified
MEQVIRIGMDTSKQIFQLHGVNAAEVPVLRRKLRRKEMVAFFEKLAPTVIAIEACGASHHWSRLLQSLGHTVKLIAPQLVKPYVKRGKNDAADAEALCEAMSRPTMRFVPAKSAEQQAALMLVSVRDRLIRNRTQLANAIRGHAAEFGLTAAKGRAHVVALLDRIQADASLPAVARELFAIQAAEYAQLATQIDEVDAKLTAWHRADEGSQRLAKIPGVGPIGASLLTMKTPAPELFRSGRQFAAWIGLTPRDHSTAGKLKTGVITRAGDEGLRCVLVLGATAVIQQARRSGKGSPWLLDLIKRKPPKLAAVALANKMARIAWKMMFTGEAYNANPAGAAVAAAA

SEQ ID NO: 46938 - protein, 354 aa, unidentified
MTPVSYDPTTYDLFIGIDVDKRSFSFTVRAGNQKTHRKMPSNPEQFYQYIQNHHTHRKVVCAYEAGPTGFGLYDYLIQKKISCFVTSPASIPKAPNERVKTNRIDSGKIAEYLMSGDFKPIRVPTGFYRELRDLVKIRERYTYERKAAKQRIKSLLLYKNLHNAIQSVDSRWSKAYLRELERLECSPAERERLNMLLSDLTYARKNLAVIHRKLRHFCREHEEIHNYMGYLESIPGIGFIIAVTILGTIGDPAHLSNSRELAAFLGLAPSEHSTGDTVTKGSITHLGNKVLRSLLVEGAWATIRKDTQLRQFYYRIRNKHHDHAAAKIAITAVARKMTQIIYRVLKDKRPYIEI

SEQ ID NO: 46939 - protein, 341 aa, unidentified
MEEYIGLDVSMKETALSIRREGKRIWRGKCISDPKIIAALIRKRAPAVERVLFETGPLSVWFYHSLRAEGLPAICIDARHAKAALDMAANKTDANDADGLAHLAEVGFFREVRVKGFDSMLTRTLVAARTRLVRITTELSNQIRGLMKTFGLIVPAGKGSTFEKNVRSLLAGQDELAPIVLPMLDAWLSIRIRAAELGRQLVAGARQSPACRILMSIPGIGAITATSFVTAIEDPDNFKKSRSVGAWLGLTTRRYQSGEVNYDGHISRRGDRHLRALLYEAASVILTRSSTDSSLRTWGLKLRERIGFKRAAVAVARKLAVTMHAMLKTGAFFDRAAGAAA

SEQ ID NO: 46940 - protein, 406 aa, unidentified
MSDIFALDVSMGKSYCVWYRGKHCLKEFSLVHTKAGFNALRDMIKKAQKPIIYFEATGIYSRVIEHFCETNGLRFCHLNPLELHLKSESLRRVKTDQKDAHRIALTVQENAFRLTVPWKKDYLQLHELSRFYNQLNADWNYRLNHLHTALEQVFPELKQLFVNRTSKLALNIVELFPHPALVRPYSRVKLKNILMASTDKRISKMKAYKYADRLIDLAQKSYPAVSGDAIQVDEVRYYARQLIALTRKREEVIKRMESIAQRLPEYILYCSFPGIGKQTAAQLMGELGDISRFDNANQLNAFVGIDIRRYQSGTYLGQDHINKRGNPIARKLLYFTVGNMIRQQHANSNHIVDYYYRLKEKRPHPKLNKVAMVACMNKTLKCLLSMIKHHEKYHYRYTDSMVPVKA

SEQ ID NO: 46941 - protein, 353 aa, unidentified
MKNFFGCDAHKKYSMFASINEEGHRAHCIKVKNDRHQFRCFLNTLPPGSPIAVETVGNWYWMIDDMERAGHVPKLANAWKAKLMMGQINKTDKLDANGLALLLRNGTLPSVWIPPKELRDQRELPRMRMALVSVRTKFKNRIHATLAKYSIQITEVSDIFGVRGRTLIKERLSELPPHTRRSVETQLELLDQTVEHIKVCEKQIDEVIKKTPAIKLLMTLPGVGPVLAIVIALEIGEVKRFARAENLASYAGTVPRISESAGRTRYGRVRPDVNRYLKWALIEAANTVVMNQSRWSDQRHVARLYRRIRGRRGHAKAVVAVARHLAEASYWVLKKNESYKEPKRYEPISSTQK

SEQ ID NO: 46942 - protein, 326 aa, unidentified
MNLPAVVLGVDIAKLKFDVCLVKENQKFKHKVFANTKHGFEQLVAWLASHQADSLHICLEATGSYGEALAVYLFDAGHQVSVVNPAAVKAFAASRLTRTKTDKVDAELIARFCLAQQPEAWRPPAPEVQQLQALVRRLESLIEMCVAEENRLSSGITVNAVRQSLEEHIKYLVEQIKQTEKMIREHINNHPDLKKQSDLLDSIPGIAQTTAALLLAEIVNIKQYKSARQVAAYAGLVPRERRSGSSVRGRVQLSKIGNARLRKALYFPAITALRCSDFFKVWADGLQARGKCKMAIIGAAMRKLIHLAFGVLKTGKPFDPNWAKTA

SEQ ID NO: 46943 - protein, 321 aa, unidentified
MVYIGIDISKSSFIAAYPSTNGYRTKTYPNTIAGIRKFIATLSVAEHHCIMEATGNYCFLLLYLLHQSGIVVSLVNPKQIKHFARMMMAVTKTDEKDACMIAMYGEKMNPPVYKMPSQAIILLRQKKTVIRQLRKQLVASKNLRESLVVLPYRDKDCVRALDKTIDFLTRQIEQLEAELADIASSEFDKQLKALTSIKGIGITLATALILTTGGFTYFDNAKQLSRFIGICPTYQQSGTSVNIKGHINRNGDEHLRSLLYVASWSALRSNAACRESYLRLKANGKPSKVALIAVANKLVRQAFAIATTDSTYIDGFVSTKK

SEQ ID NO: 46944 - protein, 342 aa, unidentified
MLYVGIDIAKNKHDVTALNVPGKTVLKPLTFSNNKAGFELLDLSLRQLNQDCLIAFEDTGHYAFNLLNFLHEQGYKVYTYTPLLIKEFTKSLSLRETKTDKKDAHGIALKLLSDPNREQFQHDNRQVELKILARHIHRLKKKQSDWKVQYTRCLDIIFPELDKIVGKHSEYTYQLLTRYPNPQKRLEAGFDKLIEIKRLTASKIQDILSVAPRSIGTTSPAREFEIIEIIKHYKRLIDKAETCVNDLMAEFNSVITTVTGIGNRLGAVILAEIQNIHAFDNPAQLQAFAGLDSSIYQSGQIDLAGRMIKRGSPHLRWALIQAAKACARFSPAFKAYLKTKLE

SEQ ID NO: 46945 - protein, 351 aa, unidentified
MLQKTNAVAVRTIGIDTGKNTFHLIGLDEQGAIVLREKLARGRIGRQLANVSPCLIGIEAGMATHYVARELLALGHDVRQVPPAYAKPFRQGHKNDFRDAYAVAEAVQRPSTRCVPVKTDDQLDLQALHRVRSRLVGQRTAVINQIRSFLLERGIAVRQGPRFLRRQFPEILAKRIDVLSPRMIAIIEDLGSDWRRLDERIERVTEEIEQLAHGSESCRQLMTVPGIGPLIASAMVAAIANGAAFAKGRDFAAWLGLVPKQRSTGDRTILGHISKRGNRYLRTLFIQGARVILLRPANWARHSFGPWLTAAAKRLHHNVLATALANKLARIAWTILAQRRNYETHVVTEAA

SEQ ID NO: 46946 - protein, 347 aa, unidentified
MRDDMYYIGLDVHKRTISYCVKDAAGQVHQEGKIGSTRRELDAWIKTLPQPRTIAMEATIFTGWIYDHLLPHAEKVKVAHPLMLRAIAAAKKKNDKIDAGKIADCLRCDFLPECHMTSTEIRDRRRTLRYRNLVLKQVVQMKNRVSGLLMETGVSYNKQRLHKLGYFTELISSNDEVSEAIRPLLKLSRETIVRSQKLDYALVSSLERDPLLAERLKRLKTIPGVGPITALTWALEIGDVSRFQSIKQAISYCGLCSAERSSADKLVRMPISKQRNKHIQQVLVEAAKLAPRYSHELALVYEREQQRGNKNRATLAVARKMVSYMLAVERRKQDFVLTGKFSGTAAA

SEQ ID NO: 46947 - protein, 355 aa, unidentified
MDSVKYIGMDVHKEAISIAVLNSSAKLVMECVIETKAITILDFLKGLRGSLHVTFEEGTWAAWLYDLIKPHVTELLVCNPRRNALLKEGSKSDRIDARKLAELLHSKMLRSVYHGEHGVRKLKELARSYLAISKDLGRVMSRVKAIYRSWGIPCTGKQVYAPRYRSEWLDKIKEAGVRRRAEFYYQQLDALRPLRQQVRQELLAEAKKHSAWKLLRAIPFIGPIRAALLMALIQTPHRFRTKRQLWSYSGFGIQTHSSAEQRFINGELRRAKKPVSIRGLNRNHNHDLKNLFKGVATVAAAKAGPFQEYYDALVAKGIRPEMARLTLARKIASITLIIWKKGARFDAQHLKPQTA

SEQ ID NO: 46948 - protein, 366 aa, unidentified
MFSLTSPAGAIHLGMDTSKNTIVVAILMPGGEVPVIDRMWNEEGSVRHLVGRFADRAVLRACYEAGPCGFELHRLLTSMGVACDVVAPSLIPRRAGERVKTGRRDAGRLARLHRAGELTAIRVPTQAEEAVRDLVRARAALLADRERARQRITAMLLRHGRVWRCGSYWTQAHEQWIAAQRFSEPALGAALAHYRAALDTRQAELDAIEAELAPRAGREPLAAAVTRLGCYRGIAELTGLVLAAEVAGWRRFPSARAFMCFTGLVPAEYSGGERTRRGSITTAGSEPARTALIEAAWAYRFRPAIGVTLRRRRHDADPQTLARSWRAQRRLHARDKAMTARSKPAGVAVTAMARELAGFLWAEMTS

SEQ ID NO: 46949 - protein, 355 aa, unidentified
MRILSLDLSKYKTVACEYEAETGRHQFATVLTTQKALHDLIVDREPDRVVIEICSIAGWVCDLVRSLGIEMQVASTNDERWQWRKVKRKNDRRDGLKLAQLSARNELDLVHVPQSETRQWRALIAYRHHLVQRRTKIKNHIRELLLREGQLLPRHRSAWTQDGLAALEAMGKPLGEVPMDELWRGELKVELAQFKAVQKQLTEVVAKLDALGAANHNVRLLQTASGVGPRLAEAVVTMFDDPKRFRRGAAVSAYIGMVPKQWDSGETERLGKITRHGNRLVSSLLVEVAWCALRHNPWARETYQRISGGKKSRKKIAIVAVGRKLLVRCWAMLRDQNAWHWEGQSAVVTPPAPTA

SEQ ID NO: 46950 - protein, 364 aa, unidentified
MSESRTVTIGLDVHAASVRVAAVRGDELLEERTLPYGHEGVERALRRWPRVRCCYEAGPTGFGLYRHLVARGIDCDVVAPGLVPQRPGDRIKTDPRDARKLAQLHAAGLLSPIHVPTPELEAARDLIRAREDARIERMRARHRLSKLLLRNDRQLPTTCWGVTRRRWLGQQRFDQTPRQAAFDDYLHALDLVDARIATLEREIAALAADPAFATLVARLRCLRGIDTLTALGLVAEVGDFARFATAEEFMSFVGLVPSEHSSGERRRQGSITKTGNAHVRRLLVEAAWSADRRPQVGERLARRQHEQNPLVRARAWRCQQRLYRRWRRMAARGKPRQKIVVACARELAGFVWAIATDQPLRAEG

SEQ ID NO: 46951 - protein, 433 aa, unidentified
MTRYVGIDLHKHLIVGHVVDAAGKTVDTFRYESVHAVTLEHIGRNRLQPEDHVVMEATTHCWAVVRALEPFAARVTVSNPMATKAIAKAKVKTDKVDAAVLAHLLRLGYLPEVWQPDQTTQVLREWTARRSRIIGQRTAVINRLRSTLAQRLLHCPHDMTSHAARDWIAAQQVDPDTRWLLESDLRLMASLQAELEAMEKLLAKRGHVDPRVKLLMTLPGVSQHTAQALLAAIGDISRFPDADSLASYLGLVPTTRQSASHCYHGHITKQGRGHTRSMLIQASHSMRTNPGPLGYFFRRLQKRKPYSVAVVAVAHKLALLAWHLLTNGEPYRYAIPRATKTKLQKLRVRATGQKHRTGPVPGKKPRTRVAGGSHTTKPLGTVYEIEGVPAASPAPAGERRHLAALKLESFVENLQQEHVTPRHTGKKATANDA

SEQ ID NO: 46952 - protein, 465 aa, unidentified
MTTAKLWRNRKERKDWARRLRSEDPGLEVVHPRAAGIDVGNSAHYVAVRPDRDPEPVRRFECFTADLYRLAEWLESCGVKTVAMQSTGVYWIPLYEILEDRGFEVYLVNARHTKNLPGRKSDVQESQWLLKLHTYGLLNNSFQPPAEIRVLRTYWRQRAEHVSGAATCIQRMQKALTQMNLQLANVISDLSGVTGQAIVRALVAGERNPQKLAQLSNPRIEASREEVAKSLEGNWRPELVFVLRQEVEMYDAYQRRIAECDQQLQKHLASFADTELPQSPKAESKEQRAKSTKNAPRFDLSSELKRITGVDLTRIDGIDVMVAQTLLSEVGMDMSRWNTEAHFSSWLGLCPDNRISGDKLLGKGTRHVVNRAATALRLAARNLIRSRSYLGAQYRRLRTKLGAPKAITAMAHRLARLVYRMLKYGQQYVDKGTEYYENRYRQQQIHLLQKNAAKLGLQITVAAQS

SEQ ID NO: 46953 - protein, 356 aa, unidentified
MVSVGVDIHKRSGFAVFKDDDGRVLGSFRFINNGCGIAELVQKLQVFGDVRVAMESSGNYWVRLYEALEGKGISVVLSNPLKTRAIAEAKIKTDRLDASTLADLLRADLVAESYVPSRQVRDRRALLRYRSCLVRTRSMVKNRVHALLDKYELSHGFTDLFGARGRRWLEGLELPGNDGLILKMALAEIEKLDELVEGVSNVIAKEAVKDPRVELLMGFKGIDYYIAMILVNEIGDINRFNSARKLVGWAGLCPSLHQSGGKCRMGRITKQGNRWVRWALTQAARYDPKLKGFFERVAGRGGTQKAVVAVARKMLVSIYYVLKRGEVYHGEDLELKGRKVNRLYGRVSRGLHAGRG

SEQ ID NO: 46954 - protein, 307 aa, unidentified
MFVGIDVSKDRLDVHIRPTGEAFVVTRDDAGLQDLVDRLCRMRPTLIVLEATGGFETVAACALAAAGLPLAVVNPRRIRDFAKACGRLAKTDPLDAAVIARFAEAVQPPACAIADAALRQLSELVTRRRQIIVMMVAERNRRQQLTQAKLIRTVDRVLAELQRQRSLVEAEIDQTIRATPAWRDTERLLTSAPGVGPTIARVCIAELPELGRLTRRQISALVGVAPFNHDSGRRRGKRAIADGRTSVRAALYMAVMVALRRQLPLAAFYARLRAAGKPAKVAMVASMRKLLTRLNAMMRDGVAWRSA

SEQ ID NO: 46955 - protein, 374 aa, unidentified
MIKTTRFVGLDVHSKLIEVAVAETSGEVRSLGQVPNTPDMVAKLMRKLGSPESLRVCYEAGPLGYELYWQLTKMGIHCEVIAPTLIPQKPGDRVKTDRKDALKLARCYRSGDLTAVWVPDPEHEALRDLVRAREAAKEDQLVARHRLQKFLLRHGLKSPKKVGTVKYVEWVRTLKFAQTAQDATLRDYLAQVVHAAERIKGLERAIDDAVQAAPEQMRDVIAALQALRGVAKLTAVTIVAEVGQLSRFDHPRQLMGYSGAVSSEYSSGGESRRGAITKTGNSHLRRVLVEAAWAYRYRPAVMGKLKQRQEGLPPEIIAISHKAQARLCTRYRRLLARGLPAPKVIVAIARELLGFIWAIGVKTEQSAKVSVQAA

SEQ ID NO: 46956 - protein, 439 aa, unidentified
MFSTTRPLIERRERYRCVRTRRRGRPPGFQPTRPPTEGERVKQLWAGIDAGKAHHHCVVIDSDGTQLLSRRVANDEADLTRLVDNILDLADGGAVTWAVDLNSGGAGLLIALLAERDQKLLYLPGRIVYHAAAGYRGDSKTDAKDAAIIADQARMRRDLHPMRVDDEISVELKILTSRRTDLMRDRTRAINRLRALLTGYFPALERALDVRNSVGGLTLLTTYQTPDGLRKLGRTKLEAWLRKKKAYNASRLADTAIEAANVQLVRVAGQDVAASTVGRLAHQILNLNTELRELDSAIEERFRRHRHAEVIESMPGFGPLLGAELLAATGGDVAAFGTADRLAGISGLAPVPRDSGRVSGNLRRPRRYDRRLLRAFYLSAQLSIQHSAQSQLFYDRKRAEGKRHTQAILALARRRLNVLWAMLRDDAVYRQGPSIASAG

SEQ ID NO: 46957 - protein, 318 aa, unidentified
MNVIGLDVSKDTIDATLITTKGSKDYIKISNNNEGFENLINWIKTKRIRKIAISMEATGIYYEQAAEYLNALYTVYVINPLKIKEYAKSQFSHTKTDKADSKLIAEFANRHLDKLTPFRPSENPILYKLVNLLQQLKEQQKETQNRLHTAKDIYIKSTHEAIIELLEEKIDQTSKRIEGMIKQKESLNIEYQNLQTIPAIGKETAVILLRHLTDKNFETANKFVAFAGLSPKIEQSGTSVNKKGRLSRYGHRQLKRALFMPALVAYRMDAFPQLVRNLEAAKKPKMIIIVALMRKLAKIAFYIHKTKKPFDKARHQTV

SEQ ID NO: 46958 - protein, 321 aa, unidentified
MQTNNTVVYAGVDVAKATLQLHLQGQQTEFNNTPKGLHQLCAQLQKAPTVHVVCEATGGYERALVKALHQEQIPVSVTNPARVRAAAQAQGQRAKTDPIDARMLTDYGQRYQPDPTPPTSATQDRLVALTQWLKQLVHGRALAKTQAEHHQDPFVGRQHAKLMTHLQSQIAAVEKQIEALLEQDAALKRRVDCLDEIEGVGPRTAWMVLAHLPELGRLNRQEVAALAGLAPWTRESGMMKGKSCIGGGRPEVRLALYMAALSAARCNPVLRSLYKRLRAKGKAAKVALTAVMRRLLTYMNHRIKALPSETATATAKESKTP

SEQ ID NO: 46959 - protein, 437 aa, unidentified
MMLESIPYLSVGLDVGADFTWMSIMLPNGILTGKPFKIIHSDPDSRELAVAKIKEAQETYSLESRCFLESTGIYHIPLLYFLRDKGFDCSVINPIITKNSTNMNIRKLHNDKFDSKKAAKVGLDASLKTSIIPDDEVIDLRNLVRDYYYFKDLQSAVVLKLTAELKVSFPAYQKVFSKVTTQTSLKLLEAYPLAADMLAAPKDILVETIRKTARFGEKYAVSKYDAIRAAAKDAAIFGRALQSSALRIRLYIKTYREYQEHLDSILEDLHRAVDKLEGTPVYDRIFLLQTLRGVGFLSAAVLIAEMGSFDLFSSPKKLYAYFGLDPAVKQSGKFNGDKVHMSKRGSSLARRILHMVAINNLKVDKRTKTPVNPVIHGYYTDKCKSKKKNVAVGAVMHKICNIIFAMLRDNKPFEIITPQEHCERYLAAHPDKVRNAA

SEQ ID NO: 46960 - protein, 337 aa, unidentified
MDYFAGLDISMDETRICVLDREGAVVYEGKSASTAEAIADELAKAPSCRRTVFETGRMAPILFHSLSQLGLPVVCVESRQAYQALKSLATHKTDRNDARGLAHLARTGFFKPVHVKSLSAHAVRSLIIARKKLVGQRVTLENQIRGLAVVFGVRLPRALTTAFIDQALKASEGVAGLSAAMRGLIAARTAVITAVAAIDADIRRMTGASEACRRLMTIPGVGQLTALAFVAAIDDPSRIRRSRDVGAYLGLVPKRYQSGEVDYVGGISKRGDRRVWTLLYEAANVMLTRYKGQLKLKDRAFAIARRSTMRKARIALARRLAIIMHAMLRDGTEFEAA

SEQ ID NO: 46961 - protein, 409 aa, unidentified
MEVLYPHCAGLDVHKETVVACVRHMEGQVRTAVKTFSSTTRGLMDLSAWLSEEAVTDVAMEATGVYWKPVWHILSDGEFHLVLANAAHVKNVPGRKTDVNDATWLADLMAHGLIRASFVPDEPTEQMRNLLRTRKQFVRERASQVQRIQKTLEDANIKLESVISDVVGVSGRRMIEALIRGQSEPQELAALADGRIRATGAQLEAALRGRVKAHHRFLLRLHLDHLDAVDAAIARIDKEVDGQIEPFRTAVERLSSIPGVSSLSAEVIVSEVGLDMSRFPTVGHFISWAGLCPKNDQSAGKRRSTRMRKGAPWLKTILIQCAWAATRVKGCYLQAQYLRLRSRRGAKKAAGAVAASILTAAYHMLRDGTSYQELGGSHFDRRSTTQQVDRLLKRLHHLGYDVQIAPVAA

SEQ ID NO: 46962 - protein, 343 aa, unidentified
MYYIGLDVHKKTISYCVKDAAGHVHREGKIGSTRRELDSWIQMLPQPRMMAMEATIFTGWIYDYLLPHAEEVKVAHPLMLRAIAASKKKNDRIDAGKIADCLRCDFLPECHMASTEIRDRRRTLRYRQLVIRQVVQMKNRISGLLMESGVSYDKQRLHKMGYFTELFSTNEEISDSIRPLLRLGREHILRGQRLDRELISSLERDPLLSERLRRLRTIPGVGAITALTWALEIGDYSRFPSVKQAISYCGLCGAEKSSADKMMRTPISKQRNKHIQHVLVEAAKLAPRYSHELALLRDKEIQRGNKNRATLAVARKLMAYMLAVDRRQQDFVSAEDSTANAVA

SEQ ID NO: 46963 - protein, 392 aa, unidentified
MFYVGIDIAKRNHEVAAISESAQVMLAPFSFANSKQGCEKLLVALTQAGITKENSVVAMEATGHYWFAVYFFLADSGFNVTVFNPIQTDAFRDLSIRKVKNDSVDSIVIAQLLRFGQFSPCNVPNENIIALKNLSRFHFSLVDLCSDLKRKVICLLDQVFPEYETLFSDVFGVTSKQLLLSFNTPEDFVEISTTKLANFLHKASRGRLGREKALSIKSAAVHSIGISFALNSFSFQIKQLVEQIDFTEKQIAALDKEISKLLSATDCAVITTITGISSVLGAAIVGEIGDIARFESAPKLVAYAGLDASVKQSGDFTGTKNKISKRGSPYLRRALWLAAFVASRHDPVLSLYYSNLIARGKSPKLALTAVSRKLCNIVWKVLSSKIPYSPKA

SEQ ID NO: 46964 - protein, 319 aa, unidentified
MTTSSVVVGVDVAKDRLDVAMRPSGETWSEANDEAGITALVARLRPLGPALIVCEATGGFERAAIAALAAAGLPVVVANPRQVRDFARATGQLAKTDQLDAGILALFAERVQPTPRPLPDAAAQLLDAVLTRRRQLLEMLVAEKNRLGFAPKPLHRGIQAHVRWLERQLDDVTKELAGLIEASPVWRAKDDLLQSVPGVGPIVSSTLLGELPELGTLSHKQIAALVGVAPLARDSGTLRGKRLVWGGRASVRTALFMAAMCGRRWNPALKRFYDRLKAAGKPTKVALIACARKLLTILNAMVRDNKRWAVPAPSVQYSC

SEQ ID NO: 46965 - protein, 351 aa, unidentified
MRRPKDKLIAGIDLHSNNVMIGVINQDGKRIVHRKLECKLNDVVQFLKPLKPQLQSMAVESTFNWYWLVDGLRAQGYPIDLANPAKIEQYNGLKHADDQDDAFHLADLQRLNILPKAHVYDPERRPVRDLLRRRTNLVHQRTALLLSFKSLYTRTTGQSLALNDVKKLAPKEAAKLYEHPANQLIAQVQTEHIGALDQSMRRLEKAVLACAREIPLYEKLLTIPGIGRVLGLTITMEVGDVKRFRTDGDFASYCRMVDAKRLSNGKCKGENNQKCGNKYLAWAFVEAANFARRYDEPCRRWYDRKAAKTGGIIATKALGCKLAKAAWYVMSQQTDYDPKRMFPQLATRPEK

SEQ ID NO: 46966 - protein, 346 aa, unidentified
MKYIGLDVHSDHINCAVIDEQGNLIYHDCFNTSLKNLINLSEKLKHPLSLVYEEGELADWLYQGLRSSFEEIVVADPIENRLIYGGDQKSDPIDPLKLATLLRGGFINPVHHTWDHHRSQFKQLVFAYHDMAKQVTRTKNKIKAYYRKQGIIIKTDSVYHPDKRTLFIKESRHPEIIEKYYQFLDLFQQEKNRFERTLKKESRHYPIIRRFLKIPGVGIVTATTFFTIIDDPNRFARKQQLWSYAHLGKSVHQSGNYEVTRRQRKGNRLLKYVIKIAAGDAVRQKTNEFTRAYIRMVNIQQKEPKLAYRIIARKLATIMWTMWKNNQSYKPREYDTLTKDIAYDLR

SEQ ID NO: 46967 - protein, 461 aa, unidentified
MARSRARHRPPRPTPPRALPAVNPNAAGIDVGATAHFVAVPADRDAESVREFGPFTNDLHRLAEWLHACGIETVALESTGVYWIPLFQVLEERGFEVKLVDAHQLKRVPGRKSDVLDCQWLQQLHTFGLLAGAFRPDDQICVLRSYMRQRAMLATYAAQHVQHMQQALVQMNLQLQVVLDDITGATGMKIIRAVLAGERDPDRLVALRHGRCKHSEATIAEALRGDWREEHLFALEQAVELVEAYQAKIAACDARIQTHLQRFEDRGTGEPPPPGPKPRADRHDLSFDATAELYRLTGVDLTAIDGLQAHTVLKVLSEIGLDMTRWPSAKHFGAWLGLAPNNRVSGGKVLSRRTRPTANRAATALRVAAQSLHRSKSALGAFLRRKAAHLGMPKAITATAYKLARTIYSMLANGSEFVDPGQDSYERAYTARVVRSLSRRAHDLGYALVKQEPAHALTTSG

SEQ ID NO: 46968 - protein, 316 aa, unidentified
MSDALYVGIDVAKDSFDVASDPAGLTLSLPNDPPGRQRLLDALQNHPVALIVMEATGGYERSLAADLIGAGHKVVVANPRQVRDFARGIGQLAKTDRIDARVLAQFASMVKPEPRQKSSEQAVNLAELVTRRRQLSDLMTQESNRLPHARHPHVQRSLKKSLRMLEKQIDDLDKLIRQNIDSDDGLRRKDEIVQSFKGVGPGTSAMLLSHLPELGRINRQQIAALAGLAPWDFKSGQWAGKSKIWGGRMPVRNMLYMAALSAIRSNAIIRKFYQRLQSQGKLFKVCITACMRKILVILNTLVRNDSLWSPPLPKNA

SEQ ID NO: 46969 - protein, 364 aa, unidentified
MKKNSRRVMKVAADDQQWTAGIDLGDRWSHYWIGNAQGDTIESGKTKMTAESLSAHFPPSRRMRIALETGTHSNWVRTHLESLGHEVIVANARELRALTGSDRKSDPEDARKLALYVRVDRRILRPIQHRSMVAQRDLTILRAREALVRARTLLINAARGLAKTLGHRLPSCHSRHFAARCREALPTALEGSVGKLAEQIESLTQQLEAMKTEIQTVAAERYPETTRLQAVHGVGPITALTYVLTIEDPGRFKKSRDVGSFLGLRPRQSQSGKRDPQLGITKAGDGRLRSLLVECAHLLLRKSAPDCRLKRWGLRLCERGGKNSRKRALVAVARKLGVLLHKLWVTGAAYDPLFGCPEAGRSAA

SEQ ID NO: 46970 - protein, 340 aa, unidentified
MKKFLFIGIDFSKSKFDVTVLKSIDQQDYAQAIFLNEPKGFNDFLKWLYRQSDVPQKDWLFCGEHTGLYSRGLARFLVKKNLFIWLENPLQIKCSWGIKRSKNDRIDSLEIARYALRFQDKAVASKPANKDIESIRILLGYRGRLVKNKVSLEVAANETRRVINRDSVSRFVYESSQRDIERIKKEIEVLEFKMLEIIMASDLKENYQLVVSIKGVGPITAITLIIYTDNFTAFDTARQLACYSGVVPFEKSSGSSIKGANHVSHLANKDLKVLLTQCARSAVQYDKELAAYYTRKIAQGKKYLVVINNVRNKLIHRIFAVVTNKIPYRENYLNPWANYA

SEQ ID NO: 46971 - protein, 312 aa, unidentified
MAKDTISIDVSKDRLDAFWHSRTQACCLPNTPEGFTQLYDWLANEEGVLIVFEATGAYHRGLERYLSLAELPFIKVNPKQARRFAQAIGRLAKTDSVDARMLARMGVVLDLAPQVVEGEDVHDLRELLTGRRALVIDHVTAKTRLATALNPLVREQLGRRIEDIGADIQALDEVIAQIAKQRGTLEERICRLMTIPGIGRLTATTMLIDMPELGHIDGKKIPALAGLAPMTQQSGKWQGKERITGGRPSIRRAIYMPALVAIRFNRDLHDRYQQVLKHGKAKKVAITAIMRRIIILANTLLRERQDWLPDRP

SEQ ID NO: 46972 - protein, 346 aa, unidentified
MNQIIRIGMDTSKYIFQLHGVDASEQVVLRKRLGRSGMLSFFTKLAPTVIVIEACGAAHCLARELGKLGHTVKLIAPQLVKPYVERNKNDGRDAEGLCEASSRPRMRYVPVKTAEQQTALMLLGVRDQLVMRRTQLSNTIRGHAAEFGLIEAKGLDKLASLLAAIEQDDSVPVLARELFAMLARQYAQVQVELKAIEAKLLAWHRANALSRRLAEIPGVGPVTAAALVMKAPDPHAFRSGRLFAAWLGLTPKDHSTAGKTRLGKITRAGDERLRQLLVVGATSVVKQATGKHHRGPRWLLELVKRKTPKLAAVALANKTARIAWKLMTTGESYDGARMPKASAAAA

SEQ ID NO: 46973 - protein, 339 aa, unidentified
MDQYVGLDVSLKQTWISVRQNRKRIWRGKCLSHPRVVAEAIRQHAPNAVLVVFETLSTWFHHELTAAGLPAVCIDARHAKAALDTAPNKTDATDADGLSLLAEAGFFREVRVKSWAAMQVRTLVGGRAQLIGISSDLSNQIRGLMRTFGLVVPAGGGRIFEANVRALLEGQVALAGSILPLLEAWRAVRAQATVLDRQLVAVARQSAACRLLMTVPGVGAVTALSYATMIENPANFGNSRAVGAFVGLTTRGYQSGEVDYDGHISRRGDKHVRALLYEAATVMLSRVRSDSVLRSWGLKLREKVGFKRAAVALARKLAVVMHAMWRDGRVFNPATGAPA

SEQ ID NO: 46974 - protein, 338 aa, unidentified
MNKFSGIDLHSNNSVVVVSDEADRVVYQRRLPNDPVQIRVALAPHREDLVGVVIEATFNWYWLVDELMNDGYCVHLANPAAIRQYEGLKYSGDFTDAAHLAQLLRLGLLPEGYIYPAEDRPVRDLSRKRMQLVQCRTAQILAIENLFSRHTGGQMGGEQVKRLDQTKVSGFGFAPDVALAMQANMAVMQSLQEQIGILEKRLMERVKPNPDYALLNSVPGIGPVLATTIMLETGTISRFTKVGNFSSYCRCVDSRRESNSRKKGQGNTKNGNKYLAWAFVEAANFAIRSCPEARRFYERKKRARNRIVAIKALAHKLARACYHMLREHKPFEITRCFG

SEQ ID NO: 46975 - protein, 370 aa, unidentified
MTSIIYVGMDVHTTNYTLCCYSITTDKIFATTAMMPDYRNILKYLERVDKELGGDNHFQCGYEAGCLGYSLHNQLSSHGIDCVILAPSTMATIKKKGIKTDKRDASNIAKCLAYNTYSPVYVPTDEDNGVKEYIRMRNDAKDMLRRIKQQTLSFCTRHGKQFTEGRSYWTQKHLSWMKKLDFGNAVLQETFREYLTFYHQAVDKVELFDKRIDELACTEKYEEKVNKLTCLIGIKTLTALATIVEIGDFNRFPTAQHYASYLGLVPGEDSSGDTVRRTGITKAGNSQIRKLLVESAQCYGRGAVGAKSKALKKRQAGNDPKIIIYADRAGERLKRKFYRIMFKSKRNIAVTAVARELACFMWGMMTDNIA

SEQ ID NO: 46976 - protein, 368 aa, unidentified
MKHDSTVFVGLDVHKDSIAVACVGSLPDDPVVDVGTIGTQQYAIDRLITKLAGRGALHFVYEAGPCGFWLHRYLVQKQQRCCVAAPSLIPKSPGERIKTDRRDARKLALALRAGVLTPVHVPTPEQEAFRDVVRAWQQAKRDIAAARQRLKAFLLRNDIRYTGRATWNAAHRRWLSELVLPSAPRQIVLQELIDTISQRERRRDRLEAEMDHLAPAWDGYPLACALQAFRGIQKTVAYTVVAETADLSRFNHPARFMAWLGLVPGEHSSGNTRRQGPITRCGNRWARTLLIEAAWAYRYVPKVSVIIERRAQDIDPCIRELAWKAQLRLTHKFRKLKARGKHNNVVVTAVARELAAFIWDADRTLRAA

SEQ ID NO: 46977 - protein, 369 aa, unidentified
MLFQSFSTQKGALTVNSSKYIAMDVHTATISVAVRDAAGKLIMESVIETKTSTILQFIQGLRGDLHVTFEEGTWAAWLYDLLKPYVTNVVVCNPRRNALLKEGSRNDRIDARKLAELLRTNLLRPVYHGEKGLRTLKELARAYLTISKDLTRVMNRVKAIYRSWGIPCGGQSVYNPRHRKEWLSKITQASVRRRAELYYEQLDALVLLRKQARQELLAEGKKHQAWKLLRSIPALGPIRAAVLMAIVQTPHRFRTKRLLWKYSGFGVVTHSSADHRYVKGQLERSKKPVSVRGLDRDHNHQLKDLFKGAAIQASTRKGPFREFYEALVAKGMRPEMARLTLARKIAVIALTVWKKGGAFDAKYLKPQTA

SEQ ID NO: 46978 - protein, 350 aa, unidentified
MIIIGCDYHPGFQQIAFVDTDTGEWNEGKLGHREEAEQFYRQLKVRGKKVRVGMEASGHARWFERLLTEVQFELWIGDAAEIRTKRVRKQKTDRQDAELLLRLLIEDRFPRIWVADGENRDLRQLLWHRHRMVQMRTRIMNQLHVLALNEGVRRKKALWRPAGRAQLQSLVLARWASRRRQDLLELLDQLTPKIQELTRALEQEVEKRPVARRLMTHPGVGPLTALAFELVIGTPERFGCGKQIASYVGLVPSEESSGDRRRLGHISKQGNSLLRFLLVEAAQVTVRTDPDWRRRFLHLAMRRERRIAKVVMARKLAVRLYWMWRKQWDYEQMRKFGSHVGEPGNRQGAS

SEQ ID NO: 46979 - protein, 320 aa, unidentified
MLSFCGIDVSKDRLDVMVLPDEYSSSVPNDPAGWAILVEQLRGFSITAIGIEASGGYERGAVRSLQAAGMPVRQVNPFKLRQFAKASGVLAKNDPLDARMIASFVGIMPTRPAQRTTPAAEQLVEMLAVRRQLSAEKTAAENASRLLEDPMLQRLSRRRIARLAADIELLDKRLVASVATDATLAHRYRLLTSMPGVGPVLACTLIALLPELGGMSRKQVAALVGVAPYAFESGTLKGRRCIWGGRANVRQVLYMAAMSASNWNPVLKLFHDRLKGAGKLPKVVIVAVMRKMITTLNAMVRDDLAWADRLSGRHSVTTAR

SEQ ID NO: 46980 - protein, 357 aa, unidentified
MIIIGADYHPGFQQIAFVDTETGDYRELQLQHSEEAEKFYRELAAHGMKVRVGMEASGHARWFERLLGELKFELWVGDATEIETKRVRKPKTDREDARLLLRLLMEDRFPRIWVPSWDNRDLRQLLWHRHRMVQARTRIMNQLQAVALNEGLRFKKRLWREAGRQQLESFPLAPWANRRRHDVLALLDRLNPTIAELSQAIEQEVEKCPEAQRLMTHPGVGPLTALAFVLIIGTVERFQCGKQIASYLGLVPLEKSSGSRRRLGHITKQGNSMLRFLLVEAAQVTVRSIPEWGNKYFHLVLRRGKKTAKVAMARRLAVRLYWMWRRQWDYEQVKKFGSYAGQLGHRDGVQLEHRVID

SEQ ID NO: 46981 - protein, 323 aa, unidentified
MDKSTGFLGIDISKDVFDVINMRDQHFQFQNSIKGFRDFRKTIGPDSICVMEATGYYHLKLAYFLLENNINVSIVNPLSIKRFVQMKLSKIKTDKADAKMIRLYAQNNELKFWKGNSKNQVEALQIARLLDIYTKQSTALKNKIHGESTLGNPATIVVKSLKRGLKLIQKEKVLLENRLAELVKLEHASMLTNLESIPGLGRKTATMLIVFTDGFERFDSSAALCSYSGITPIIRKSGSSVNGRPRISKMGNQKLRNLLFLCSFTASIHNKACNDIYQRITNKGKSKKLALIAVSNKLLKQAFAVAKSGIPYDENYRSALPIH

SEQ ID NO: 46982 - protein, 386 aa, unidentified
MYFVGIDISKYKHDCFICTETGEVIEENLSFTNTNEGFIQLLNLLKSLDNSQKIRIGFEATGHYGMNLKLFLEKNNYSFMEFNPALVKRFISTQTLRRTKTDKKDAMLITKYLISVDYKPHPKQFYHKYSLKSLSRMREKLVKQRSYYEIQITNVLDIIFPEYKPFFNNDFSKTCLFILNKYKSPDKIKNMKDFDSIRKISRGKFTSANFIKLKELAKNSIGISNDIFETELESLLTLHSQIEIEINKLETKIESIIKELNPPILSIRGIGTISCAGIISEFGDITRFKSADACVAFAGIEPSISQSGTESHTGHMVKHGSGHLRYFLMNAADYVFMHESIFTEFYYKKRSEGKSHRVALTHVAKKLVRIIYKLESENIIFNSNIN

SEQ ID NO: 46983 - protein, 349 aa, unidentified
MDKITAVGLDLAKQIIQVHAIDVTGRVVLRKVVRRERLLSLLAQFPRCVVGMEACSGAHHWARELTQLGHDTRIMAAEFVRPFRKSLAAKNDANDAEAVCTAMLQPNMRFVTNKSVEQQALLCLHRVRQGLIEERTASINRLRGLLAEFGQVAPQSAPALQRTLSLLLATEDARLPALVRRCTQDLREHVRAVEGRIAALDREIAQHAQGSESARRIAALCGVGPNTASAVVATVGNARDYRNGRQFAAWLGLVPKQYSSAGKTKLGRITKRGDAYLRTLLIQGARSALQAALRRAPAKRDRLSAWIVQLAQRVGYHKTLVAIANKHARIIWALLVRDAVFDRAYAGTN

SEQ ID NO: 46984 - protein, 412 aa, unidentified
MQDILTCVMGLDVHRDIIVACLVKGAVDAEPEAETRTFSTLIPEMQKLRDWVIEAECRNIAMESTGIYWQPIYEMLESCFDGEISILVVNARHMKNVPGRKTDMKDAQWIATLLRAGLLKGSFIPDKTFRELRHLTRYRKSVVHDITAQKNRIDKFLQSSGFRFTAFLSDTFGASGRNIIRHLIERGSIDREALDKCLKTKTRNRIDEILVALNGSLSVHQRRFLNIVFLHLEDLEAHKHTIEDEITEEVLKHTDALNLLCSIPGIDVTAAAAIVAEIGTDMSAFPDSQHICSWAGLSPGNNESAGKRKSVHINKGNPYLKSMLCETAWIMASHRKLYLSGWYWKVKQRKGAKRATIALARKILSIIYTMLKTGTPYSEECFEQRRQRCERKRANRMVNELQKLGYTVVAPD

SEQ ID NO: 46985 - protein, 323 aa, unidentified
MDKSTKYLGIDISKDVFDVVNMDDKHFQFQNTLKGFRAFSKTLSADSVCVMEATGYYHFKLAYFLLEKKINVAIVNPLSVKRFIQMKLSKIKTDKADAKMIRLYAQNNELKLWKGNSKSQVEAFQITRLLDNYTKQTTALKNKIHGEDILGNPAPKVLRSLKRVLKNIQKEKKLLEDRLTELVKEQNAAMLTNLESIPGMGRKTATMLIVYTDGFARFDSAAALCSYCGITPIIRKSGSSVNGRPRISKMGNQKIRNLLFLCSFTASIHNKACREIYQRITNKGKSKKLALIAVSNKLLKQAFAIAKSGRPYDERYQSVLPSH

SEQ ID NO: 46986 - protein, 388 aa, unidentified
MHVYVGVDIAKELHYAAIMDSDGVVSKPFSFENNDKGFNLLLSHLAPYDKESILIGFESTAHYQENLAYFLKSLGYRTAEINPLQTAALRKANIRNTKTDSVDARLICLALMNHHIQGDQRDSVRLDDLYQLCKMRMDTMKKRTTCKIQFVAIMDRIFPELASFFDNNLHTNTIYRLIDSFPLPSQIKKTRIDILTKLLHKASRGHFKKEKAQKLKNLADISVGIPSDIFAFQAQQLVHQIEFYTDQIQTIEERINTNPDVMSSPLMTIPGIGTFCVACILSAIKNINDFGAPCKILAYAGLDPVIRQSGKFTASHTRMSKRGNSLLRYALVWSAGNVVKNNHTFAEYYRHKTEDQGKSHYQALGHCAKKLVKSIYHMLKYNESFNLD

SEQ ID NO: 46987 - protein, 413 aa, unidentified
MDVIVERCAGLDVHKATVTACVRYPGPGRARAQALHTFGTTTPDLLALRDWLAAHRVPHVAMESTGVYWKPVYYTLEDGFPEVLLVNATHVAKVPGRKTDVADCVWIAPRLECGLLRGSFVPPPAIRELRDLTRYRKTLIQDRTREVNRLHKVLEDAGLKLASVATDVLGASGRAMLTALVAGTTDPGVLADLARGRLRAKLPALRQALTGRFRGHHAFLLTQLLAHLDYLDEALATLSQAIEGHLAPFAEAAARLQTMPGVKARTLEAIIAEIGVDMRRFPTAGHLASWAGLCPGNNETGGKRRRGRVRKGNRWLKAALVEASLAAIRTKGSYFGAVYRRICRHAGHNVAIVAVAHAILEIAWHLLTQGTTYHELGADYLHRRNTEQTARRHVRFLETLGYRVTLEPVPAAA

SEQ ID NO: 46988 - protein, 335 aa, unidentified
MSKVTYHVGLDYHQHSIQVCVMDEKGSLIQNATRPNDWREVVAVVPKGGTVFAAMEACCGAADFAEELINHAGWSVDLAHPGYVARIKQSPDKTDWADAKLLADLERVGYLPKVWLAPENIRELRRVVRYRQQQVNHRRNVKLRIRALLRDQRAKAPAGINPWTKAWRAWAENCPEIGENSRWILTEHFAEVELLNQKIRNIEKRLASFLADDPVAIKLLEQSGVGLVTAATLRAEIGRFDRFRSGKQLARFCAVTPRNASSGQRQADAGLIKAGNRELRRVLIEAAQRLRRLDERWVEFADRMKERGKPSNVITAAVANRWIRGLYYQMCNLAA

SEQ ID NO: 46989 - protein, 384 aa, unidentified
MSILSQAAVSTQLNAIFVSLELSRSTWLVTSLSPGRGERISRHQVMGGDVPALLERFAQLQAKAREGTGEQYPLVVIQEAGLDGFWIHRCLVREDIESHVVDAASIAASRRSRRAKTDKLDGEALVRTLLAYKRGEPRVCAMVTVPSVEDEDRRRICRERRSLVAERIRHINRVKGLLFAQGVGDYEPLRANRRTRLEELMTGDGRPLPRHVKLEIERELDRLELVMRQIKEVERERDAMLETATDEVADPAGARLLQLRGIGPEFAGVRHAEAFFRNFSNRRQVACYAGLAPSPWQSGNMDREQGVSKAGNKRLRTTMIQVAWLWLRHQLESELTRWYAERVQANGGRVRRVMIVALARKLLIALWQFSSAGVVPKGALLKAV

SEQ ID NO: 46990 - protein, 412 aa, unidentified
MTAIDQFAAHVGLDWADRKHDVCVQFKNGERTFHVIKHTPEALDTWLNELHQKVRGRIAIALELKKGPVVYALQKYPFVTVFPVHALSLARYRQTFWPSGAKDDPQDAELALDLMLRYPQKIKAIEPDNADIRLLLQLVEQRRLLVEDKRSFVNRLINTLKQYYPQPLEWFSHRGSLLLCELIIRWPSLQKLKRARRDTVRHFLNAKGGRATALTEQRVASINNAIPLTADPSVIEANALMATALATQIKVVSEIIKTYDERIETLFDPLPDAELFKSLPGMGPCMGPRMLAALGDNRDRFNSAEEIQNYVGIAPVTERSGQKSWVHWRWQCAKFVRQTFIEWAAKTVNSSYWAKLYYQGMREKGKSHQSAIRALAFKWIRIIYRCWKTRTRYDEAKYLLALEARKSPLLMP

SEQ ID NO: 46991 - protein, 477 aa, unidentified
MSKGSGTTRGDRRRNERRARLRRVLPRDGAVIGIDLAEEKQAIAVIDHDLRVLARKTVRVKVFRLGEALDWAVAQARAKGFGPVSVACEPTGPRWLQVQQLCAERGLPLVCIQPLVSHIAREQQDFTSHKTDEADCVMIARLAVELHCYLPEQLDETWAHLRHLGRRRNQLITAATASVQRIRDFLSVAWPVAAETCVRPFESVTWLAAMQVVMSRCGADPAKLAPCGVEAFAVLVRRAVPCWGGVRPSGRVCQAVFAALTDTQGVVASHRRGLLRRCTDELDDLQRTRARLRAVEADMVTVLAELGLVRLADIPGLTAVGAAAILAEAGDPRRYDSSSSLVKHAGLSPADNASGAFSGQAHISRRGRPGLRLTVWRAVWAVLIHNPVMAAKYQAMTQAADTAAAQAASASADAGSRQVSAAAAAARARRAKARVACAASLLRWIYSMVVHGTGWDPAVASGAAACQHASSSRQQAA

SEQ ID NO: 46992 - protein, 344 aa, unidentified
MDNHTQYSGFAGVDLAKKVMQIHFVTGDGEITDKQVKRAEFLDFFRNRTKCLIGMEACGASQDWARKLEAMGHEVHLMSPKAVKPFVSGQKNDYNDAIGIYKAMFNEVRRVPVKSTEIRDLQTLRRIRSQVTKDKVKEINHVRGLLAEYGIVMGKSITAFNKGISSALESLKERGDVSPLVAEELQTTVESIKTKTERQKRLDREIEQLARGCKNYENFLKTPGVGPFTAAMLCVLLCDPDIFANGRQFAAYIGLAPRSRGSGGKNVVIGIPSKFNCDSESRAVFVECAQALTRYKNKSPWIEGILRRKPKKVAVIAIANKLARQVWAMANKGESFKQMTILTA

SEQ ID NO: 46993 - protein, 373 aa, unidentified
MSDYSAFVGLDVHKDTIAVAVADAGRTGEVRFWGEIANTPDAVAGMLRKLGGRHPLMHFVYEAGPCGYGLHRQIIATQHHCEVVSPAQTPRKPGDRIKTDRRDAIILARLSRAGELTSVWVPDTIHEAMRDLMRLRQAMVKDLRAARQRTKSFLLRHGRVFKGTSWKRSHRIWLGNQSFAHPAQQIAFQSYLNAVDQAQARRDEVDVQIRHFAADWSMAPVVEALQALRGVAFITAVTVVCEVGDIRRFAKPRQLMAFLGLVPGERSSGETRRQGGITKAGNVLARAVLIEAAWSYRTPAKIGAQMMLRQEGIPQAAKDIGWKAQVRLCGRYRRLMARGKKSALAVTAVARELVGFIWAIAHITEPTGAEGAA

SEQ ID NO: 46994 - protein, 369 aa, unidentified
MHMIVIGTDTHKQTHTASAVFAGTGQLVDELTAPARKAGFAELLDWSRELGEQRIWAIEDCRHVSGSFERFLIAAGERSVRVPPKLMGASRKGQRTSGKSDPIDALAIARAALKEGPETLPGAHLDENALETKLLLDHREDLVKARSEDQQRLRWHLHDLWPELEIPAGALDRLIWLDRISRKLARSEQSARVRIARELVRAIRERTRRTAELQREINALVGARAPELLELPGCGTLTAAKLLAETAGVGRFASDAKLARLAGVAPIPASSGKRDRHRLDRGGNRQLNCALHRIAVTQGRVHPPARDYLARKQAEGKSRMEALRCLKRHLARTVWQALRSAEQGRSTTLLAQSAHSPNMSRPAPALALT

SEQ ID NO: 46995 - protein, 462 aa, unidentified
MKGNAVKSKRVRRPRSPLALVNPDAAGIDCGLAEHYVAVPQDRDPEHVRRFRTFTEDLHRLADWLVSCGIKTVAMEATGVFWIPVYEILEARGLQVLLVNARHVKNVPGRKSDVADCEWLQQLHSVGLLRGSFRPAADIAALRSYLRHRESLVQAASTALQRMQKALVQMNLQLQVVITDISGTTGLRIIRDIIAGQTDPRQLAKHRNARCNSSEAEIAAALTGNYRPEHVFVLQQNLEIFDALQRQIESCDKRVEAHLQQLTAKAPHASKPIPAARPRRRSRGEPSFDLRIPLHQLTGADLSQIDGIGPYNAVRLISEIGTDMSRWATERHFTSWLTLAPNNKISGGRLLSSRTQPSTNRAAAILRVAAMSLSRTDTALGAFYRRLAGRIGKAKAITATARKLATLVYRCLKGDIVYKDPGAAAYDRHHRDSILRRLRHRAASLGFTLVNQQTGEILEGVS

SEQ ID NO: 46996 - protein, 418 aa, unidentified
MGRLKIVYPICCGMDVHRDFVIACIATTNAQGVTEYQSRRFSTYTEELRMLKAWLTDNNCKDVCMESTGKYWFPIHNILEDTCNVVVSHPKFVKAIKGKKTDKKDAQWIADLFKHDLVNGSFIPPRDIRQLRDLCRYWVKLSSYTTGEKNRAQNCLTVSNFKLDDVFTNVFGKSASAITTQLLEHPGESFDVTPFVHGRCRTPIDKIQKAVDGVFSYEQAEKLKIIRSHMESLDRQKAELESLILGIAEKYTSQIDLLVTVPGINDVFTAIRIIAEIGVDMSVFETSKKLCSWAGLTPQNNESAGKKKTTRIGKSGAYLKPLLIQIAIASSRSEKHPEIREKYLALKKRRGGQKAKVAIARKLLTAIFNILARNEPYNPTLYHKDESPPSARVISQEQAISILANMGYVLDPLVLPTH

SEQ ID NO: 46997 - protein, 352 aa, unidentified
MGKNNKLDFGGQHIYVGMDVHKKSWSVSIHTEQFEHKTFTQPPEVEKLTYYLERTFPGATYHTVYEAGFSGFWLHDKLREKGIDCMVVNPADVPTKDKERAGKTDRVDCRKLARGLRNGEIKGIYVPPRVKVEDRTLVRTRQSMVRKQTRCKNQITSILFFYGIVIPEDGRWSRRFINWIESIRMERASGDFALKAHLEELKHLRQIIANLNKAILSLSRAEEYRADVLLLKSVPGISTLTAMILLTELADLSRFASLDKLASYAGLVPDIRSSGETEYSAGITFRRNAALRALLIESSWIAVRKDPALTMAFNKLSTRMKKTKAVVHIARKLLNRIRFVLKNRQEYVPAVV

SEQ ID NO: 46998 - protein, 371 aa, unidentified
MKSILSVGMDVHKNSFSLCAYDGYTGEIVSESTFASDVKLVIKFIETLKSRYENDVEIKCGYEAGCLGYSLYKSLTARGVDCVILAPTTMQVSAKNKMVKNDRMDALNIAKNLASGSYKSVYVPDEEDVGIKEYIRMIHDFKKELKRVKQEICAFVLRHGYQYDGKSKWTIRYMNWIRELEMSEIQRETLNEYIAEMENLNDKINRFMNRIDEMYQSERYHEKVSKLRCFKGIETFAAMTIQVETADFERFPSAKAYASYTGLTTGEHSSGDKNNRIGITKQGNTVIRKTLVECAQSLVKGNVYAKKSQGLKSRQKGMDVNIIAYADKATERLKKKYQKLIERNVPRNKAIVAVARELACFIWGMETGNIH

SEQ ID NO: 46999 - protein, 363 aa, unidentified
MPKVLYVGMDVDKLKIVVAELASSASVAEERVIANTPQAVRKYITALTREGHVVAAYEAGCFGFGLYHQLTDLGVAAVVAAPGLIPRKPSDHLKTDRRDARTLAFALRAGQLTAVHVPTHQDESVRDYLRMCEDLRDDLRKCKQRILHLLLRRGIRYEQGGPWTVKHKNWLATLDLGSELDRQTLDSYLARLQELESTCSQLASEVESIAQGDRYRDAVRTLSAFKGIKTLIALSFIVEIGDFRRFSSAAQFMAFLGLVPSERSSGPKHRQGGITKAGNSHLRRLLVEAAWHYRSYHPTSRVLIHRRREVDPRIINYVNRAGRRLNRKYLRLLLRGKRSQLAVTALSRELAGFIWGAMVGQVA

SEQ ID NO: 47000 - protein, 350 aa, unidentified
MKKLSKTQRQMDVETIGIDLGDKISHYAVVDRDGEVVEEGSFRNQASSIEKHFGGERRRIALEAGAQSAWIARELEKLGHEVIVANARQVKWITASDQKNDRIDAKKLALLARADVRLLSPVEHRSAEQQAELCVIRARDAMVRARTLLVNAARGIAKGFGQRLPATVTATFGKRAVAVVPQMLSAALEGILTQIDELGRQIQEYEKRIAEVGALHPELERLVSIPGVGTLTALTFVLTLGRAERFAHSRDVAGYLGLRPKRRQSGGQDPQLGISKSGDKYLRKLLVQCAHHTLGHWGLDSALRQWGLAKTGGAKGATKRAIVAVARKLAVLLHRLWVTGEFYKPFPNMA

SEQ ID NO: 47001 - protein, 380 aa, unidentified
MEHTRFVGLDIHKERISIAVAESRRSCAVEYLGEISNDPVAIGKLCDRLERPSKTLAFCYEAGPCGYGVHRQLISLGHRCDVVAPSLIPTRPGDRVKTNRRDATMLARLHRAGELTPVWVPDADHEAMRDLIRLRSVVRQIVSRARQHLQGCRARQHLQGFLLRHGRKHGRGTAWRMAYRRWLSTLAFEHPAQQIAFQDYVDAVMDAERRLQRVEEQISGLLPEWNLRPVVDALQAMRGIALITAVVLVAEVGDFTRFANPRQLMAYFGLIPGEQSSGETIRRGGITKTGNAHARRALVEGAWAYRMKARIGRHKVDRIEALPKVVRDIAWRAQLRLCTRYRRLSARGKTANVVNVAIAREMVGFIWSIACTVQSAPKTA

SEQ ID NO: 47002 - protein, 320 aa, unidentified
MQGGVRKMSELYVGIDVSKERLDVAFSDGRECQFGNDPSGHSQLRELLSPQPPQLIVMEATGGLERSAAAALAAAGLALRIVNARQVRDFAKASGRLAKTDRLDAQVLVKFGQAMKLESRELPSEQQQGLQALVARRQQLIEMLVMEKNRLGSAHKGVKPGLKKNIDWLEQQIKRSDQDLGSALRECGVWRETVELLESVPGIGRVTSLTLLASLPELGTLNRREISALAGVAPFNCDTGGWSGKRCIYGGRAIVRGALYMSALAGIRHNVVLKVFYQRLRAAGKPAKVALVACMRKLLTIINSMIRHRQCWSPKLMEIA

SEQ ID NO: 47003 - protein, 318 aa, unidentified
MNFIGIDVGKQELVAYDGKSQRSFPNTPELEEFRAFLQDLGEDVTLTFEPKSTYSRFLEMLCAKEGIPSWRLNPRILPHLREMEERRSKNDRTDCQLLFLYGEKKGKGELLSEDALSSTLMAHLSSYFLIQKARVSFHNLREALSYNPLVPGRISEKLRGLEENLRKKEKEEIAQAQEIVSSLEETQSSFRLLLTIKGVGKVLALVFLILFRKYKGASQKQLTALVGLDTTERTSGKSLRGKPRISKRGNHLIRALLYQGTLSAVRYNPQVRGIYQRLKEKGAPEKKARIAAAHKLLIIAHAIYRKGVPYDPSYSREN

SEQ ID NO: 47004 - protein, 365 aa, unidentified
MNNKTITGNGISQASLVNYVNRVLNLGLDVHYRQVTVAMQEDGGRIKSAGKMGHLDFLNWVQKKLQEGWQIYSCYEAGASGYWLHRDLVKLGVKNLVVVPKAMGQGAKKQKTDKRDAGELCDCLDRYLRGQDKALSVVAVPTEEQEEKRALIRYHRQIMADRGRCEARGKGLLCAQGIEVHGRWWHGKAWLEVQSDPRLKDWMKEQLIGWRNKLLSTEEEQGGLRERIAALAPAILPKGVGAYSAAVLEYEMRGFERFTNRRQVGSMTGLCPGIHQSDGRGKEGSINRCGIGIVRWTLVEMVWRLMIWQPQYPPVRRLASGLVKGKRARKRLVVQAARRLAIDLWRLSTGQTTPEKLGLIMHCAS

SEQ ID NO: 47005 - protein, 360 aa, unidentified
MNATTVAVDLAKSVFQLAVADVSWRVTEKHRLTRTQFERWFANREVGLVIMESCGSAHHWARWLTGLGISVKLLPAQYVRAYVRRNKTDAADATALLEAARASDIRPVRVKSIGQQALQGLHRIRSLWMGTRTSRINALRGFCRELGIAIPVGARTGIEMVSRVLADPHTAVPDLIRGTARLLVEEIRLLEARIAQLERELAQAARLSPACTTLLSVPGIGLLTATAMVAATCGDVSHFKDARHFASWFGLTPKEYSSGSTRYLGHISKRGDRYLRMLLTHGARSVLRAAAAARTKGQEVAGIRRWALEVQGRSNHNKATCALANKLARICYATLRDKQRFDEKQPLSKKMNRQVFAMPA

SEQ ID NO: 47006 - protein, 412 aa, unidentified
MEVLYARCCGLDVHKSSITACVLITQAGKPQKQIRRFGATTHELRELVAWLREFGVEHVAMESTGVYWKPVWNVLEGQFQIVLANAQHIKAVPGRKTDTKDCQWIAELLQHGLLRASYIPSVLIRDLRDLTRARTSLSQEHSRIASRIQKVLEDANIKLASVASNTLGKSGRAMLEAIIRGEESSERLADLALGHLRAKIPQLQAALEGQVRDHHRFLLQSLLRRLQFLEAEIALLDARLDQIGREHLDLADALDRWITVPGVDRVAAWSFIAEMGTDVVQFPSAAHLASWAGVCPGNNESAGKRMSSKIRKGSPWLRRMACQSAWAAARTKNTYLSAQFKRLAARRGRKCAIIAVAHSILVIGYHLQRTRCTYADLGSSYFDRLHADGLKKYLVKRLESLGHSVILQPRTA

SEQ ID NO: 47007 - protein, 316 aa, unidentified
MICGVDVSSQSLDVRVGRDGVSAHFDNDAEGIAHLAEFCQLHQVHLVVMEATGGYEQLAFGLLWAHGIEVAIVNARSVRKFAQSMNILEKTDQIDTGVIAWYAETKKVVAMRPASVEQQRLKALVTRLRQLTEMRAVQRNQRLLVIEAGVLAHFHQLLVFLNQQISTLEKAIAGLIGSDPIWQKLDQSFRSIKGVADRTVARLMAELPEIGTLSNKKISKLAGLAPLADDSGKSKGKRRIYGGRHGVRDILYVVATCVSRHNADFSAFQARLTQAGKPKKVIRIALAHKLLVRLNAKAREVRQLHQPAAAISALLP

SEQ ID NO: 47008 - protein, 422 aa, unidentified
MRSVALDVHLDFCEVAIVEDGELRSAGRIETKPEQIELFASSLGPDDRVALEVTGNAWEIARLIEPHVAQVLVVSPSDTGIRQARAKTDRLDARTLARLLAAGSLDGVWMPDRWTWVMRRRLSRRGQLVRARSRSKNQIHAVLMRQLVGRPPVADLFGVGGREWLRGLELAEEERETVDAHIRQIEFLEKELAEVERLIASAALESAEIERLMGVPGVNVIVAASFLAAIGDIRRFQSPRKLVGYLGLDPLVRQSGVGPATHGHISKQGSVRARHALVEACWTTVRQPGPLHAFYERIRARRGHSVAIVAAARKLASLFWCLLTREEDYAYQQPSLTKKKLRRLEITAGAERYTAKAAGIWSANDAVRKAERELARQAEVAYARTVRDWHATQAEKVGASVTPGRASKKPLKGEAARQTTSP

SEQ ID NO: 47009 - protein, 387 aa, unidentified
MPQPNDLSRSLVALDQDSTLVAVIEMGQASWLVAGIVPGVNRHPLKKITTDQEQLLQVLRRWENEAVTAGRMVKRIAVAYEAGRDGFWLARWLRARRIEAYVIHPSSVPVSREHRRAKTDRLDTELLKRAFLGWLRGEPDHCSMAAIPTLTEEDAKRPGRERESLVGERTRITNRIKGALARLGIGNFKPMLRNAPQLLETLRTPEGAALPPNTLAELRRDMARLSFVKQQIKEIERDRIERLQQAPGEPGNAMVRLLTRVVGVGVETADMLVHEVFSRNLRDRRAVARYAGLTGAPDESGKKRRERGLAKSGNARVRRGMLQLAWGFLVHQPDSVLAKWYRARTADARGATRKTMIVALARKLLIALWRLATTGEVPEGLGLRAAA

SEQ ID NO: 47010 - protein, 339 aa, unidentified
MTVKTVGLDLAKDVFQVHGISENGRVIFNKAIKRAKLLAFFEALPPCRVGMEACGSSHHWGRQLRKFGHEVKLMPAGYVKPYVKRGKSDAVDAEAICEAVRRPTMRFVEIKTEDQQAMLSIHRTRDLAVRQRTQLANMIRSLLREFGHILPIGVEAVTAFAKRHLSGDHPDMPDIANGMLGIQCYQFIGLNERISGYSKMIEQHAMLNADARRLMRMPGIGPVTASAIVATIGDAHQFRTGRDLAAWLGLTPLNKSSGGKERLGKITKQGDRYIRKLLVVGMTSRAVMAKRSPEKVDLWTAKIVADKPFRLATVAMANKAARAVWAMLTKKQEYRQPAF

SEQ ID NO: 47011 - protein, 401 aa, unidentified
MATTAGVDWAKEAHELCVVDEGAVIGRRVVPHDEAGIAGLCRELVELGTERVAIERPDGVLVERLLGAGLTVIAIHPNQLKAARARYAVAHGKSDPFDAFVLAELARTDAHRFAAIRPDSDETKALRALTRAREELVGVRVELANQLRAQLEAFWPGALIFADVDSPISLAFLERYPAPADARGLGPKRMSAFLARNAYCGRKRPAELLERLREAPVGTAGELETEARRAAVLGLVAALRPLAAQITEITSQIRGALAEHPDAAIFAPLFRDRKTAICPATLIAELGDSRERYPTDAALAADGGQSPVAVESGKRKVASFRRACDKRLRGAIATLADSTRHWHPWAQEVYLLARARGQDHPHAIRTLGRAWVRVLWRCWQDRVPYDPSLHGNLRRLQTAGG

SEQ ID NO: 47012 - protein, 405 aa, unidentified
MIAAARVGGPPFDMQPSRVAPGLAGAEPHAWRMGLMDDISFVGLDVHKATISVAVADGDRRGEVRHLGVFANRADVVARLVRRLAAKGNRLHFVYEAGPCGYGLHRQLTSLGHACQVVAPSLIPIRSGDRVKTDRRDAAMLARLSRAGELTGVWVPDAAHEAMRDLVRARAGAVRDLSRARQQLSGFLLRHGRIYPGKGGWTLAYRRWLTTVRFDHPAQQLVLQDAIHQVEAAEARVARITGHIEEQLSLWSLAPMVEAIQAMRGVGLIVAVTVAAEVGDFTRFSNPRQLMAYLGLVPSEHSSGASVRRGGITKAGNALARRVLIEGAWTYRMPARVSRKLYDRLETLPQSVREIAWKAQVRLCARYRRLVAAGKPKVVVVTAIAREMAGFIWAIARHVEAPKPA

SEQ ID NO: 47013 - protein, 320 aa, unidentified
MKTSDNVSVTVGIDVSKLNLDLHVSSGLYDSFRNDGSGFSDIKKLLSKFTVSLILLESTGGYENGIVCYLQRLGYDVVVVNPRFARDFARSLGRLAKTDKVDAELLSQFATVINSRVDRARFVRPLTDETRRHLADMVSRRRQLVDLITVERQRKSVSSQYASESIDAVISYLRSQLELVDADISAHVSLYYSDLSDLLTSFKGVGSATVGVLLGEVPELGKLNRRQISALIGVAPFNRDSGQMRGRRRISGGRSLVRNSLYMPTLSAIRFNPVIRDFYERLLKSGKSRKVAQVACMRRMVCILNAMLRDGSRFEPVMGN

SEQ ID NO: 47014 - protein, 346 aa, unidentified
MGEIVRAGLDIAKEVFQVHGVDANGEVVSRRKLRRGELLAYFKKLDPCLIGIESCATSHHWARALSKLGHKVKLVSPSFVKPFVKSQKNDAADAEAICEAIARPGMRFVSIKSEAQQAILTIHRARDLFSRQRTMLINALRAHIAEYGHVARLGELGLKSLLELVETDERDLLPEVARDALVTIAAQIRALGDKIAALERKIEAWHRASPESIRLATIPGIGALAASALTATVPDPRIFRSGRGLAAWLGLVPKQYSSGGTTKLGRITKRGNRYLRRLLVFGARNVLVAFKSGRTRVPRKIAELLSRKPLLVAAVAFANKLARAAWALLTKCEQYRDPSAVAYGEV

SEQ ID NO: 47015 - protein, 408 aa, unidentified
MDLTPMHKRVIALDVHQAKITACAVVEHDDGRLEVIQRDFGAFKRDRRALAQWSLEIRPEVLVMESTGVYWKSPFAALEAVGIIAWVVNARHVKAVPGRKTDMADAQWLATLARAGLLRASFIPPKDFRELRLVARQRQKLVGMCSAEKNRLHKVLVDAGIRINVLVADIHGASARAMVKALVAGQPMDEVLDRKGRLRASREQLCEALSTEQFSATHRFVAEEIMQHIEQIEQRIARLDQYLLDGLKAWQPQLNLLQTIPGIDIQGAAMLLVEIGADMTVFGGAERLASWVGICPGNNESAGKRKSGRIRRGNAWVRRLLCEFAQAAARTRCALKAKFESLAIRKGHKKSVVALAHKMLRTIYAMLAGGTHYQDRSVDYEALSVARNAPRWIKMLRKHGFIATPAAT

SEQ ID NO: 47016 - protein, 369 aa, unidentified
MRLYRLKAAPAASAVELNNNNKSTKAKRILVGCDVHLRGYQGARKIDEGAIGVVDNFRSEEALLLYIEKQRQQAEQVVVVYEAGPLGYTLYRKLRATGVLCYVCAPDSTQQRKKRRKNNQIDARSLTSKLFNYLNGDQHALQLARVPSEAQEQQRMASRQHDQLVEERKRLGAKGNAMLLSQGIGSWSNWWRPKAWSQLSRVAAQWLLERLQIWVDVLKILDEKISLAKAALARACSGPRPKGVGALSQMQLQSEVLDWSLYSNRRKIACLVGMVPSEWSTGDKESRGSITKVGVPALRRIIVEMVWRMVLFQPQYKPVQKWQEVLKGPNPALKKKAVVAIGRQLMVDLWRLQTGRVTAQDLNLIMVEN

SEQ ID NO: 47017 - protein, 349 aa, unidentified
MLADELDYVLGVDTHRDEHVLSIVTAPAGAVVAGSEAPADLRGYRELLRVAARHAPGRRAWAIEGTGSYGAGLARFLAGHGEAVLEVSRIPRTERRLRGKDDALDAARTARAALASETLALPRSGERREALRLLLIARRSAVDVRREALTQLRAVIVTAPEPLRQQLRGLPVGKLLDRCSRLRRSNSASVDEIATRVVLKSLARRVQAATVEADELEQELLAHVRALAPSLLDEPGVGPIVAAQLIVSWSHRGRLRSEACFARLAGVAPVPASSGQTQRHRLSRGGDRQLNRALHTIALHRRQHDQATQDYLAARIAAGKSRRDATRLLKRYLARHLYRLLQQTAAEMT

SEQ ID NO: 47018 - protein, 339 aa, unidentified
MDLHGGLDLHGDNVYCTLMDKEYRPVYEKRLPNDLPTILGALEPYRSRLAGLAIESTFNWYWLVDGLQANAYPTRLANPARMEENIGLKSANDKTDSRFIAKQMVMGVLPQGYIYPKEERPVRDLLRRRMRLVHMRTGEWLSLEGLVARHTGKDIGIQALNKLKEDELNTLLGNDPLLLQAARINRGHIEFLGDRIREMEKTAEEHVKLADGYERLLTVPGIGRILAMTIMLETGPISRFPGPGNYASYCRAVKAEHTSNDRKKGKCNGKSGNRYLAWAYVEAANFAIRYSPELRAWYQRKAAKTKRVLALKAVANKLAKACFFILRDGVDFDVKRLIG

SEQ ID NO: 47019 - protein, 436 aa, unidentified
MRGCRCSMIMGFTKPIEHFNLQRKKVITMNTLYVGIDVSSKSNVIYLMLPNGDKHSNFSVANSHEGSTQLVKRILSALTSHSLDTVLIGLEATSVYGDNLVYFLREDATLAPFNRKIHVLNPKQVKKFHDAYNDLPKNDYVDSFVIADCLRFGRINKEVYMGDYRYKALQNLTRARFFAVQNLVKEKQRFMNVLFKKYSTMTQEKVFSDTFSTTALAVYDEFESAEALANMDLHELTDFIIEKGKNRFPDPDAVAKAIQKAARSSYRLPKTVNDSVNQVLSISITSMKALESQIKEFDKAIKAQMELLPNVLISIPGIGPVYSAGIMAEIGDINRFNSQAALAKYAGLAWKQHQSGGFESEVTRLIPSGNRFLKYYLCEAAFSLVRCDKEYSDFYHLKYKEVNRYQHKRALALTARKFVRLVFRLLKDNRLYTSAE

SEQ ID NO: 47020 - protein, 359 aa, unidentified
MFTVPVFVGLDYHQSTIQVCVMDASGKVLANRACQNRWQAVRDLVAAVGVPVRVAIEACTGASDLAQELVDHAGWSVDLAHTAYVARMKRQPDKTDYSDARMLADLTRVGYLPQVWLPPLYIRDLRRLVSLRNSLVSQRRNLKLRLTSLLRDLRVIIPHARWSKPWLEKVQAPDALPPVGKLIAAEILDQLKDVMGRIDRVKDQMEIFTQGDAIVAYLRTLPCVGPVTSWIMRAFIGEITRFKNGKQLAHYCGLSPGNVSSGKRTADSGLVNSGNTLLRATLIELGQRLARTQDRWKAFRQELKARGKPHCVIIAAIANRFIRAAYYSWKQTQLTGIMPPASDPPALLDTATGEVSSPR

SEQ ID NO: 47021 - protein, 306 aa, unidentified
MEKVTTVGIDLAKNVFSLHGIDRSGAVAFRKTVRRDQLLQTVTALSPCLIGMEACSGAHEWGRRFQELGHTVRLMAPKFVAPYRKSAKNDGNDAEAVCEAVTRPSMRFVPVKSIEQQALLSLHRVRQGFVVEQAATAAEALPELARRVVSDLLEQMRSLDQRIEGYDREIEAQARLSEPARRLMKIRGIGATTALAIVATVGNAREFKNGRQFAAWIGLVPGQYSTGGRPRLGHISKRGDAYLRNLLVQGARSVLQSAGAHQDHMSRWILALLPRRGYYRTLVAIANKNARIAWALLAKNETLRTA

SEQ ID NO: 47022 - protein, 355 aa, unidentified
MDSKKYIGMDVHQATISIAVMDSRGKVVMDSVIETKAATILEFIQGVRGALWVTFEEGTCAAWLYDLLKPHVAKVVVCDPRKNALLKVGNKNDRIDARKLAELLRGGLLSPVYHEGASVRTLKELARSYLTITKDLTRVRNRIKGLYRSWAIPCAGQKVYSPRYRSPWLKQLTEAGVQRRAEWLYQQLDDLQPLRREARRELVTESHKHPANKILCAVPWLGPIRVALLIALIQTPHRFRTKRQLWAYSGLALRTRVSGEYRVTGDQLQRVKRQPSLRGLNENHNHELKALFKSTATRASTAAGPFGDFYAALLATGMRPTMARLTVARKIAAIILTIWKKGDRFDPEHLKRQAA

SEQ ID NO: 47023 - protein, 346 aa, unidentified
MLHVGLDLSRKRIDVCLISDQGELIDRFTATPDRDGLHGLASRVAVYGEPVRGVVESMNGARFVHDELVSHGWEVLVADAQKVKGLAPLACKTDKIDARVLAELSFRDLVPAIWLPTVELRREREISRWRLHLVKHRSTLKNRVHSTLITFGHQRHMSDLFGVAGRRLLKELEMPEPWRSHVDASLQLIDDLEARISAIVKELRRSGADHRYIPLLLTAPGFGWITSFTVACELGDISRFSSPVKLTGYTGLCPRVKQSGQMDQRGPLSKHGPRYLRWGLMEAAIAASSHPLYRERYQQTKRRLGKQRGPKVAQIDLARKLTEAIWYMLTRNQPFAPAGAIFRLAA

SEQ ID NO: 47024 - protein, 310 aa, unidentified
MENVIVGIDISKEQLDIHILPSQDSFSVSRDSEGLGQLITQLSSLQPKLVVMEATGGFETIVAAALAAARLPLAVVNPRRIRAFAQALGYLAKTARLDARIIALFGEAAKIEPQTVPDEAALALGELVARRRQIVETMGVERNRKRSLTQRRLLKGVDRILALLQKELSDLERDIDQAVRGTPAWREKDELLQSVPGVGSKVSSMLIAELPELGTLTRRKIAALAGVAPMADDSGKHHGRRHIQGGRAQVRSGLYMAALVAARHNPILAAFYQRLRAKGKPPKQALTACMRKLLVILNAIIRDNRPWQSA

SEQ ID NO: 47025 - protein, 349 aa, unidentified
MEQNEVILGVDTHLDMHVGAVINDIGRLLGTRSVSTDTAGYLDLLTWANSFGHVCRAGVEGTGTYGAGLARMLHDHEIEVLEVNRPDRAMRRSKGKSDPTDAENAARAVLSGRATAVPKEQSGAAEAMRAVSVARRSAVKAKTQAINQLRALLVSAPQEIRDRLLKVKTAECIKGCIRLRSLGKTPMLQTLTTTLRLLAKRWLTLAEELKSLDTMLDDLTSQHAKRLRERFGVGPQTAAVLVAVAGDNPERLKSEAALAALCGTSPLQASSGKTVRHRLNRGGDRSANNALWTIAMVRMRSDPRTRAYVDRRTKEGMSNKEIHRCLKRYIVRELYPLILADLADSTRVI

SEQ ID NO: 47026 - protein, 380 aa, unidentified
MMLTFSMDALSVRGMRKHHHFGTFDAVRRGHPLHHYAGIDVSLELSSVCIVDAKGKIVREAKVASDPDALVAFFKQLGFRVVRIGLEAGPLSQWLYAGLAQAGFEAVLLETRHVKAALSAMTVKTDRKDARGIAQLIRMGWFRPVHCKSLGSQEVRALLVARKQLLGKLLDVELSIRGILRGFGLKMGVVTRKTFEARARELSSGQTMLETVVGAMLTARAALQSEYAKLHKTMLVIVRDDKICRRLMTAPGVGPVVAITFKTAVDDPTRISKSKAVGPLFGLTPKKYQSGETDVTGGITCVGDTMVRTALYKAANILLSRVTRFSALKRWAVEVAKRRGLKRAKVALARKIGVILHRMWVDGTDFRWTKAELGSGVAAH

SEQ ID NO: 47027 - protein, 399 aa, unidentified
MADLFAGIDAGKSHHHCVVIDTDGNRLLSQKITNDETVITTLIDDVNTLTDPSGSVTWATDLNRGGAALLIALMNAHGQTLLYIPGRTVYNAARTYRGDGKTDAKDAGIIADQARMRRDLQPIRLGDDIATELRLLTAHRTDLTCDRTRAINRMRASLGEFFPGLEAAFDYSTSKAALLLLTGYQTPTAIRRMGAKRLSAWLKKRGARSASRVADIAVEAAGKQHTTVPGQDAGAMIVARLAAEILRLDDDITGIETRIEDRFREHADAEILLSMPGFGPLLGAEFTAATGGGISQFDSANRLAGVAGLAPAPRDSGRISGNHHRPKRYDRRLLRACYLAAQVASRWCPVSKAFYDRKRAEGKNHKQAILALARRRINVLWAMLRDRTMFSQGISPTPG

SEQ ID NO: 47028 - protein, 349 aa, unidentified
MEQNEVILGVDTHLDTHVGAVISDTGRLLGTLSVSTDTAGYLDLLTWANSFGHLRRAGIEGTGTYGAGLARALRDHEIEVLEINRPDRATRRSRGKSDPTDAENAARAVLSGRATAIPKEQSGAAEAMRAVSVARRSAVKAKTQAINQLRALLVSAPQEIRERLLKTKTTECVASCARLRSLGNTPILQTLTATLRLLAKRWLALAEELDTLDAILERLTSQHAKRLRERFGVGPQTAAVLIAVAGDNPERLKSEAALAALCGTSPLQASSGKTVRHRLNRGGDRSANNALWTIAMVRMRSDPRTRAYVDRRTKEGMSNKEIHRCLKRYIVRELYPLILADLADSTPVA

SEQ ID NO: 47029 - protein, 312 aa, unidentified
MTIHPGYVGIDVSKSTLDVFETLSGRSFKISNDLAGFSEHVDAWQRAGVFVLFEATGDYDRPLRKALSAAGVAFDRVNPSRARYFAKSQGHLAKTDKIDAMMLAKMARGWEAEPAVPVSADRERLGRLTRRRDQLVAMRQQEQVRLSECRDDEECSDSLDSHLAWLDEAIKRHDRQLKELVSHSDELAGQSRLLLSIPGIGAVAAAVLMALMPELGTRSSKKLAALAGLAPFNHDSGRLRGQRSIQGGRDRVRRALYMAAVAAMRGRGRLAEKYKALVAAGKKPKVALIALARKILTIANAVIRDRQPFLHA

SEQ ID NO: 47030 - protein, 455 aa, unidentified
MAGQPAKTDERSSVMQIKHERCAGIDVHKKTVVVCCLWVDEQGKDQRETRTYGTTTRELLNLCEWLASLEITHVAMESTGEYWKPVYNILESSFEVMVVNSHHFKQVPGRKTDVKDAEWLAELLCYGLVRGSFIPPLPQRDLRDLTRQRTNLIRERAGVINRVQKVLEWANLKLASVVSDISGVSARAMLRALVNGTEDPAALAELAKGRMRTKHDELVAALSGQVRDHHRFLIRMHLDHLEFLDHQLQPFDQRIEQLIQQHTSLPEAPTPELEETSDSVAVKLPLTWAQALPLLDSIPGIAGQSAELLLAEIGSDMRRFPSAAHLCKWAGVCPGNHESAGKQYSGKTPPANRWLRSILVQMANAAVRCKASYFATVYRRLAPRRGHKRAIVAVAHRLLIAVYHILKQHQPYRDHRTTESGQQRQQQLVQTLQQRIERLGYQVQLTPIATAQSFN

SEQ ID NO: 47031 - protein, 364 aa, unidentified
MHATTKSTAAESSAVTLAIDLAKDVFELAFADANGRIVARKRLQRGPFVSCLDNRSPLHVVMEACGSAHGWARRFQRAGHTVALLPAQHVRPYVRRNKTDRADAAGLLEAARCGDIRPVPVKTPEQQGTQGLHRIREHHKAERTAAINTVRGLLREFGFAIPAGADKVRPAVLAALEDGDNDLPIMLRHALHGLLDRIAACQDAMDVIEKQLADVARRDTRSQRLMAASGVGLITATAVSAGIGDFARFPSGRHFASALGLTPREYSSGGTRRLGRITKHGDTYLRTLLIHGARSALVAAACIRKRGRPLDRTQQWALALAERKGHNKAAVALANKTARRLWAAEHHGTSFDPDHISPREQRIR

SEQ ID NO: 47032 - protein, 419 aa, unidentified
MTPHKDFFLDSGPSVPTPMLPPSPGLSDALQVYHPHAAGIDIGEAEHWVAVPPGCDPQPVRRFGTFTADLDALADWLLDCGVTTVAMESTGVYWIPLFELLEARGLQVLLIDPRQAKRVPGRPKTDRLDCKWLQRLHTYGLLAGAFRPEAHVCVLRSYLRHRQMLLTYAAHHIQHMHKALEQMNLKLTQVVSEITGVTGLAILKAILAGERDPQRLAKLRNPHCHHDEEDIAKALQGTWRAEHLFALRQAVELYAFYHQQITQCDQQIAAHLKTFGDKSAGQPLPPKAHRHKKTNEPRFDARTPLYRLAGVDLTTIEGIEEGTALVILSEIGTDMHRWPSVKHFCSWLGLCPQHKISGGKVLSRRVRPGAHRVTVALRLAARSLHHSQSALGAFFRRMKARLGTPKAITATAHKLARLV

SEQ ID NO: 47033 - protein, 346 aa, unidentified
MAYYVGLDVSVKETSICIMDDKGGVIARTDVSTDPDLIAGFIFKYAPDVERVVHESGILAIWLTRELEKRGVPIICIDARLAHKALSGRINKSDQGDAEGLAQLARTGWFTQVHIRSEASERVRVLIGARERLIRMRKDLEGHVRGVLKVFGVCMTSVGTGKLRRGFRDQLAAAADTDPAIAMLSETFIPLHKTLCIARDALDEEVRMMARKSDLARRLMTVPGVGPIVALAYIATLDDEKRFRKSIDVGAFLGLTPKRHQSGEVDWSGKISKCGDCDMRRLLYSAASTLISCTRKPSRLKEWATKLAERKGHKKAAVAASRKIAVILHSLWRNETVFEPGMEGAN

SEQ ID NO: 47034 - protein, 346 aa, unidentified
MEITTIGLDLAKTVFQVHGINSGSEVVVKKTLRRVQLRRFFEQLNPCLVGIEACGTSHYWAREITKLGHEVRLMPPAYVKPYVKRGKSDAGDAEAICEAVRRPTMRYVAIKSPEQQAALALHRTRDLFVKQRTQLVNMIRGLLAEFGIEIRRGIEQALMLAKRIAAHEVPDIPPLAAKMIAGLAGQVLDLQARLGEIERELLTWHRSNDIATRLATIPGIGTVCATALAASVTDPHQFRSGRQFAAWLGLTPLQHSSGGKERLGRISKMGDKYLRRLLVVGMTSLIRRAKYKPEAVDPWLADLLSRKPARLVTVALANKAARVVWAIMVRGGVYHRSASASVTTSV

SEQ ID NO: 47035 - protein, 356 aa, unidentified
MTKVTARFENQKVYVGLDVHKRSWNAAIYLNDQFIRNIHQPPQPQALHHYLTHTYPGARYSCAYECGKFGYWIQREFDQLCIECLVVNPADIPSTHKDEVYKTDSRDARGIGEALSKGQLRGVYIPYEEQEADRHLVRQRKKIWRDLVRCKNRIKGFLDYKGIEVPPQYDNANWSRNFITWLSKLEFAHSSNRVTLDYQLTEMELLRKELLSISNAIRKLMRSKKYNRLYYLLRSVTGIGPLTAASLLTEIGDMHRFKNFYHLNSFIGLLPMEHSSGERELKGRITVRKHRQLRSDLVECAWTAKRTDPALALYYSEQIKRGKNGKAAIVKVARKLLSRIRYVWVSGEPYQPAVVK

SEQ ID NO: 47036 - protein, 411 aa, unidentified
MDKFYDICCGIDVHKKLIVACLRKGNKNVIREFGATTRELLTLADWLKESDCKMVAMESTASYWKPLYNILESSGLNAMVVNAHHMKTVPGRKTDVKDAEWIADLLQHGLLQASYIPDKDQRELRELVRYRKSLTGERSRELNRLQKMLEGANIKLSGTVRDINGKSARNLLEYIITGAPFDEAKYDELYDQNVIAHNLKATKEQIIDDLHGVMSPLQRRMMKELLMHLDELNAHIKNLDDEIDNFMKPEEKKASETIQSIPGIGNTSAQAIISVIGTDMSRFPTDSHIASWAGLCPGDNESAKKRKSGKTRKGNALLRSTLVICAHSAVRNKQSYFYAQFMRISAHRGKKRAYVAVAHSMLIAIYHILADGIVFKDLGADYYNQFNKERKINAYLKKLKALGWEAPVVAA

SEQ ID NO: 47037 - protein, 440 aa, unidentified
MTGNRGTRPRAPVSDRPAEVLPTEVSLPRNNKGASVFIGIDWAAQQHAVCVLDQAGKRVTAFEIAHTADGFGQLTARLGRLGDPAELPVAIERPDGRLVDRLPEAGHPVVPVSPNAIKAWRDAEVLSGAKTDTTDAQVIAEYLRLCHHRLRVLQPFSPETRALRAVVRARADLVDQRVAAANQLAACLDAFWPGALAIFADVESEIALAFLERYPTPASAAHLGEARMRAFCTKHGYCGRRPAAELVARLRQAPPGLGGGPEAEARRDAVVAMVGVLRALNTAIKDLDRSVAAHLGEHPDAEVFTSLPRSGRTNAAQVLAEWGDCRPGYDGPDAVAALAGAVPVTKQSGKHHAVHFRWACNKRFRQAITTFADNSRHASPWAAKVYADARARGCDHPHAIRILARAWIRVIWRCWIDQVPYDPAKHGAAQKLTEMTASAA

SEQ ID NO: 47038 - protein, 407 aa, unidentified
MLPQKTIPKRFIGLDLHKYYLIATAVDHELNRVYGPRRVELTELQDWIKKTLTLEDAIVLEMTGNTWQVYDELQPFAHSVTVVHPPHVSLIVRAQVMTDKIASFQLARLHAKGLLTGIWVPPQDVRDLRTLVTQRAKMTAIKTQAKNRLQATLHRYHILPPEGKLYDANQFPWWLSLPVSQLELVRIQSDLDTLIFSQQQIAKVESCMAVWATHDERISLLFQLTGVGLVTAVTVLAAIGDITRFPDANHLVGYSGLGARVHVSGLTSRSGGITKAGRKDLRAALVEAAQVAVLHDQRWRNELSRLEPHIGRNKAIVAIARKVLMIIWHILSKHQAAKELDLERLARKYYEFAYTVGKVNWDGCPTAAAFIRQKMDEAGVGSDFTSFIYSRKRVILPPSKLPTAITK

SEQ ID NO: 47039 - protein, 374 aa, unidentified
MSNNTRYLGLDVHAETITAAIAEGRQKIRSLGQFPNRPEAVRKFIEKLGGPNGLKVCYEAGPTGYALYWQLTKMNVECEVVAPSLIPKKSGERIKTDRRDAEKLAQCYQAGTLTAVWVPDGAHEALRDLVRARGAAKDDESRAKHRLIKYLLHYALRHPDNCRAWTLTWWRWLQVLKFEHEAQRETLQAHISEVLHQGERVSRLDCAIERAIESAPADKKAVIEALQALRGVAKLTAVTIVTEVGTFQRFRRPTELMGYTGLVPSEYSSGGKESKGCITRTGNAHLRHVLGETACHCRHKPWLSNRLKQVLPNLTPGVAEIAWKAQERLHRKFTKMTYKSKQPGKVLTAVARELVGFIWAIGSKVELEALAKAA

SEQ ID NO: 47040 - protein, 372 aa, unidentified
MSILRFVGLDVHAETIAVCVAEGSGEVRPLGTIPNRLESIRKLVGKLGPVKQLRTCYEAGPTGYVLYWQLAALGVACDVVAPTLVPVKAGDRVKTDKRDAEKLARCHRAGELTAVWVPDAEHEALRDLIRAREAGKKDQLRARHRLSKVLLRHGRRPPEDTKAWTKKYLEWVKSQVHFEQAALEATLSDYFHEVEHAAARIERLEKAIDGAVEKMPPQLRAVVEGLQALRGIAQITAVTIVSEIGSFSRFEPRKLMGYSGLVSSEHSSGNRIQRGSITKTGNSHLRRVIVEAAWSYQHRPWLGGYLLKRQRDLKLSEETKEIAWKAQNRLHTRYKKLSAGGKNKNQVVTAVGRELLGFIWSIAVQIEAGFKA

SEQ ID NO: 47041 - protein, 362 aa, unidentified
MTDAVLGIDVSKNTFDTNLGAGTKARSKSFANSPAGWHHLIAWLGEHKIGQVHACLEATGRHGLGIALALHEAGHVVSIVNPAQIRDFARTKLGRNKTDQVDAVHIREYAELFKPRPWTPPSPAMRRLCELQTIRAGTVAGLTEWKNRSRSGIMDDLALSLAKTTIQHFTSQLEAVDQAIAETIDNDVELSAKRDLLVSVNGVGEALAGIVLAELPGPDILGSSAAVTAYAGLNPQQHQSGISVNRPVRISKIGNAVLRTALYMPALSAMRYNPAVAALVDRLKAQGRLKGKQIVIAAMRKLLVLCFGVLKTGKEFDPAMAMGKWPGVPRHSLASIAWSAQVGAGGGGQAPQPVGARISARA

SEQ ID NO: 47042 - protein, 313 aa, unidentified
MIIPLRYVGIDVSKQHLDIFDEGLGVPERIANAPQAITQIVARWRCDVLVVFEATGVYDLELREALGQAGIRFARINPARARDFARASGQLAKTDPIDARMLAAFARALKPATEQIANPARNALARLAKRRDQLVLMRAQEKNRRSEADDRAMADRIGRLIEVLDGEIAEIEADISTLIKTEPEISGDAQLIRSLPGVGPVTCMQLIAQMPELGKVGPKQVAALAGLAPFNVDSGAYRGKRKIAGGRKRVRDALYMAALNAVRRADPFKVFYVRLRQAGKPAKLALIAVARKLLTVLKAMMRDRKTYKMAPST

SEQ ID NO: 47043 - protein, 348 aa, unidentified
MIDTSDIDVYLGLDVGKGEHHATVLTPAGKRVFDKRLPNTEPKLRELFGKLQAKHGTVLMVVDQPASIGALPLAVARETGCHIAYLPGLTMRRIADLYAGESKTDARDAAIIADAARAMPHTLRSLAPSDEIVAELEMIAGFDDDLAGEVTRIKNRLRGLLTQIHPPLERVLGPRLDHSAVLTLLERFGSPSQLRKAGRRRLVTLLRPKAPRMAERLVEDIFAALDEQTVVVPGTDAAALIIPSLTSSLSAILDQRKALAARIEELLEAHPLSPVLTSMPGIGVRTAARILIDVGDATAFPTAAHLAAYAGLAPVTRSSGSSIRGEHPSRRGNKQKIKLAERFAWAGH

SEQ ID NO: 47044 - protein, 345 aa, unidentified
MRSMYYIGLDVHKKTISYCVKDGSGQIHSQGAIPATRLDLDRWMKTLPQPWTAAMEATIFTAWIYDHLLPHAAALKVAHPLMLRAIAAAKKKNDRIDAHKIADCLRCDFLPECYMASTEIRERRRTLRYRNLLVRQAVQMKNKIAVLLMEAGVSYNKQKLHKVGYFCELLATNKDIDDGLRPLLRLCRETLVRLGKTESALVRSLGRDPLLVERVERLMTIPAVGPITALTWVLEVGDVRRFSSIKKAISYCGLCGAEKSSAEAIKRTPLSKQRNKHLQSVLIEAAKLAPRRSPDLALVYDQEKQKGNANRATLAVARKLVAYLVALDRRQKEFLPVERENRTAA

SEQ ID NO: 47045 - protein, 348 aa, unidentified
MMKVMAGIDLHSNNVVIGVTEMDGKRVGHRKVPCELKEVVKFLAPFRERLEKVAVESTYNWYWLVDGLRALNYPVVLANPAAMEQYSGIKHADDTNDAFFLAELLRLNILPTGHIYDPQLRPVRDLLRRRMMLVRQRTALMLSFKSLHTRTTGQEMGLSQLKELKIKEAQQLYEHPANQLIAGMQIKHIEQLTESIAKIEKGVLGAARELPYYAKLTSLPGVGKILGMTITLEVGDIKRFVDAGHFASYCRTVEAKCTSNSKKKGANNSKCGNKYLSWAFVEAANFARRSDEQCRRWYERKAAKTSRVLATKALACKLAKAAWYLMAEQSDYDPKRMFGQPSKSEMKH

SEQ ID NO: 47046 - protein, 337 aa, unidentified
MDSQGKLIMESILESKASTILEFLAGLRGTLSLTFEEGTWAAWLYDLLKPHVAHLIVCNARKNAALKQGNKSDKIDARKLADRLRLNDLKPVYHGETGVRMLRELARSYLTVVKDLSRVMNRLKALYRSWAIPCAGRDVDYTRHRSEWLGKIPEAGTRRRAEQLYQQLDMLQHLRQQARRQLLAESRKHTITAQLRQIPSLGPIRSALAVALIQTPHRFRSKRQLWTYSGLGLETRDSGEYHFVKGQVRRRKKQVFIRGLNKDYNHDLKGLFKAAAIRASVQPGPFQDFYQRSLAKGIKPTMVRLTLARKIAAITLTLWKKGARPTPSGWLYDSETV

SEQ ID NO: 47047 - protein, 358 aa, unidentified
MIVIGTDVHKHTHCCAAVEATTSRLLEVREAPAWMPGFRALLEWARGIGDERVWAIEDCRHVSGGLERFLIAAGERIVRLAPKLSVGTRRLERGRGQSDPIDALAIARAAIREGIDALPVAFLDDQARELKLLCDHRDALVGTRTREQNRLRWLLHDRWPELEIPSGALDRERVLDRLGRRLAQAAQTTDIRIARELVREIRAVTRRICEIERELAVLVAAKCPGLLEIPGCGVLTAARIIAETAGQGRFSSDAKLARVAGVAPIPASSGRTTRYRLDRGGNRKLNAALHRIAIVQGRVDPDARAYLARKQAEGKSRREAVRCLKRFIARRVWNVLPKAPSVADANSFPVPLEVLVLT

SEQ ID NO: 47048 - protein, 466 aa, unidentified
MAKSARSARSRTPRVPRPTSPAPPVMHPDAGGIDIGATQVYAALPADRCAEPVRVFETFTDDLYALAAWLKAHHVTTVAMESTGVYWIPVFQVLETAGIEVYLVNAHHAKNVPGRKSDVSDCQWLQYLHSVGLLRGSFRPPDEICAARTLLRHRTTLVAQAATHVQHMQKALVQMNVRLQHVLSDLSGTSGLAIIDALLAGERDPERLAKLRDPRVKASAETVAKALVGDWRTEHLFTLRQAREAYRHCQTQIRECDAEIEQRLAQLRSQVDPAQTPPPPPPPRPPRQHKGDIHLEAADLRTELYRVLGVDATEIPGLGSNSVAGLVFHLGTDLAAFPKVACFCNWQGLCPNPQISGGRVLKRGTRDVKNPVATIFRLAAQSLHHSDSFLGAYYRRMRAKLGAPKAITATAHKLARIYYHLVTTKQAYDESVFAKNEEREAKRRVERLKREASALGFTVSPQAIAA

SEQ ID NO: 47049 - protein, 369 aa, unidentified
MLIIGCDYHPGFQQIAYVDTETGELQEQRLPHPEEAERFYRDLAAREARVRVGMEASGHGRWFERLLAELNFELWVGDAAAIRAKRVRKQRTDRQDAQHILNLLVEDRFPRIWVANWENRDLGQLLWHRHRMVQARTRVMNQLQAVALNEGLRCKKRLWREQGRQQLESLTLAPWTSRRRRELLELLDRLNPTIAELNQVIEQEAEKNPEAQQLMTHPGVGALTALAYVLIIGDANRFSRGKQIASYLGLVPTEESSGDRRRLGHISKQGNCLLRFLLVEAAQVTVRTDAEWRSKYFHLAMRRGRKIRQGGDGQTVGSGFVLDVASKMELRAVAKVRFARGTAWKSLWCAVNHRRNDWASRSSSRRSLK

SEQ ID NO: 47050 - protein, 397 aa, unidentified
MYIVGIDIAKRKHEAAVIDGEGTVIIKPFSFTNNCSGYNRLLAMLAKAKLPLDEVSFAMEATGHYWLALFTRLQKEGFRVQVINPVQTNSIRSFYIRQAKTDPRDALLIAEVIRFGHFSESTLHPENIYELRELCRGRHAIVSMQADVKRKVVALLDQVFPEYETAFTNLFSDTSMAILQNCPTPKELSEMPLEELCHLIEVSSHKRFRMAKAQELQALARNSFGFAMAGDVFSTMIRLYAKHLDFLKQQVREMDRKIAEIMDTLDTPITTITGIGPTLGAYILSEIGDISRFSSAAKLAAYAGIDPTMRQSGEYNGVRNRMSKRGSPYLRHAIWLAASSAVLHDPALKLYFQKKRDEGKPYMASVGHACRKMVSIIYAVMRDNKAYTPCIPNEISA

SEQ ID NO: 47051 - protein, 359 aa, unidentified
MEYFAGLDVAMEETSLCVVDQEGKVVLETSVTTDPDAIFKALRKHAPKLRRVGHEAGSLSPWLQVELKQRGLPAICVEAWHARAAMSAMRNKTDKADARGIAHIMRTGWFREVHVKSEESYRLRLLLTQRRNLKRKFLDIENAIRHSLKTFGLKVGQVSRGRFEARVRELVADDPLIAGLTNCMLRARAALWQEYLQLHKVVLAVVRRDELCLRFMRIPGVGPISALAFKTAVDDPHRFRHSKTVGAYFGLTSRRWQSGTSIDIQGHISRAGDGDVRHPLYEAANIMLIRYRGFSSLKAWGLKIAKKRGHKRACVAVARKLAVIMHAMWRDGTEFRFKQADEPVVGIVRGCPTVEGVAA

SEQ ID NO: 47052 - protein, 387 aa, unidentified
MTEQRRSYAGECVYVGVDVHKETYTVTCVCHKQIVKTATVQAEPASLAASLRRWFPGATLASAYEAGFSAFVLHRALTQAGISNIVVNPASLAVAANDKVKTDRRDSKRLAVDLADGRLRGIYVPTEEEELARLLPRTRAQLVEHRATLARQIKAKLHQFGLIAPSSRRLLSHRYLREIESWTLPPELRASLQMLAEQWRFVTRQLIEMRRLLREQATAQAAIDKVYRSVPGIGEVVARTLATELGDMTRFANERALFSYTGLTPSEYSSGAAVRRGPISRQGSSRVRHLLVETAWRALPYDAVLQTMFERIAATRGKKRAIVAIARRLIGRIRACFRQGTMYAVGTLASVPRHPWQEAWLKMSHALVARPHAEQLPTIMNRIEQEE

SEQ ID NO: 47053 - protein, 463 aa, unidentified
MARKARRASQSHQLPAPLQHVHLNAAGIDVGAESHYVAVPVDRDPQPVRSFSAFTHDLYRIADWLKACGVDTVAMESTGVYWIPLYEVLVRRGFKVYLVSPQHLKRVPGRKTDVLDCQWLQELHTYGLLAGAFRPEDHEVVLRSYMRQRAMLVSYAAQHIQHMQKALVQMNVLVHHAVDDITGATGMRIIRAIIAGERDPNTLAALRDPGCKKDAATIAQALEGNWREEHLFALRQAVELFDSYQEKIHACDQQMLAHLRSFEDRSQSGRGAPPTPGEGRPRKNELTFDAATEAYRITGVDLTKVTGIKGHTAFKLLSEIGTDVVHWPTAQHFVSWLTLAPRNRISGGKRLPHHWAPANAHRAAQALRVAAYSLHNSHSYLGAFYRRMAARLGKVKAIQATARKLAILIYYALKYGNDYVERGERYYDTTYRNRVLKNLTRRAKDLGYRLVKEDPNTPAPQPA

SEQ ID NO: 47054 - protein, 355 aa, unidentified
MNQEKYIGMDVHQATISVAVMDAGGKLIMECLLETKASRIVEFIQGLQGTLSLAFEEGTSAAWLHDLLKPHVSRRVVCDPRKAARLKEGNQSDRIDARKLAELLRTNQLKPVYHEEHGIRALRELGRSYLTITKDVTGVMNRIKALYRSWGIPCSRTSIYAPRPRAEWLAKLVEPGVRVRGEHLYQQLDSLQPLRLQARRELLQESHKHSGAKLLRQIPSIGPIRAALLVALLQTPQRFRTKRQLWAYSGFAVETHDSGEYRCVRGKLQRNRERITVRGLNDNHNKDVKNLFKSAAISASTRPGPLHDFYGARVEKGMRPTMARLTLARKIATITLTMWKKGVGFDPQNLYRQAA

SEQ ID NO: 47055 - protein, 449 aa, unidentified
MSKPILAVGIDPAKRVHRAVGVLFPDEVVFDSELPNALDAIQSLDLRLAELAATHAAELVYGLEDHRRYGRLLCQVLTERGRDVRVVNPLWTNRQRAFYGQDKDDAIDGRSIAAVVLRRRDQLPLANDFGHLAQAIREAERAVEDLGKKRTELVNRLHLQLSDVYTSVYETYFGKLKSPIALRFFRRFPLPQDLGGQDAVLLSSVILSLSNGKIGPHKGRDRERFLQAKAEKILETSASLGQTPRTLALELKAELIRQLCDELLVNHDRVTRLERMLRKQMLPATGQTITTIPGIGTILAATIVGETASITRFRSRAAYAVYNGTAPARYSTGGRERHKARRDCNHRLKRAFWLAARTAAAHDPLAKAYFNQCKSRGLSYSECIKRVARRMSDIVYSLLKSGRDYDRTIVEQAIRKRQEQVANADDNRVKAALPLPDQKRLSRHSHDSN

SEQ ID NO: 47056 - protein, 349 aa, unidentified
MVTIGIDPHKLTHSAVAVDRVGLELSRRTERAVREGFGVLLGWARKLDPERVWVLEDCRHVSGPFERFLIDHGESVVRLAPNLMAGARQSVRERGKSDPIDALAVARAALREGIENLPAARLAGPELEIRLLCVHRERLVGARTRLINELRWQLHDLWPDWQIAPRSLTGPVLQQQITRRLSRARPTVRVRIARDMIRRIRELTATINQLHQELAQLVAQVAPQLLAERGVGVLIAAKLIGEIAGAQRFTSDAQLARLAGCAPIPVSSGRTDRHRLDRGGNRQLNHAIHMIALAKLSHDPQTAQYIAKQRARGKTSREAIRCLKRHLARRIYHLLRDPNTVPIAIHCNT

SEQ ID NO: 47057 - protein, 413 aa, unidentified
MERLIERCCGLDVHKATVSACVRVTPRPGGEVKQEVRTFATTTAELLALREWLTERAVTQVAMEATGVYWKPVYYLLENDFELLLVNPAHFKQVPGRKTDVADCVWLAQLLEHGLLRSSFVPPAPIRELRDLTRYRKSLTEERTRAANRLHKVLQDAGIKLSSVATDLLGVSGHAMLIALVAGTTDPALLANLARGKLRKKLPELRRALIGRFGPHHRFMVSRLLADIDYLEEASTELSKRIEELLAPFAAAVERLITIPGVQRRTAEVMVAEIGADMSRFPSAAHLASWAGMCPGNHESAGKRRSGKTRRGNRWLRTALVEAGGAAGRTKHTALGALYRRLRGHVGHGRAVLAVGRHVLEIAYHLLAEPTTYRDLGTDYFDRHRAERLKRRSLAQLQSLGYQVTLAPLFTAA

SEQ ID NO: 47058 - protein, 372 aa, unidentified
MSANAITWVGMDAHQNSIKLTALFPDRPQGVEWTEATTPEAIRRLARKLRREAPGEVRCCYEAGPTGYALHRMLEAEGVICEVVAPSLTPVKPGARIKTDRRDARKLAELFRAGLLTEVHPPSESEEALRDLCRCRDDARTDLLRARHRLSKFLLRRHCLYRQTKHHWGTRHLAWLEELRFDDPVSQSTFDSYFLAVQQLDERLRQLDERLAEYGGHEPYRGPVAWLRCFKGIDTVTAVCLVAELHDFRRFRSARELMSYVGLVPSEHSSGERERRGSITKTGNRHVRRLLVEAAWHHRHRPALSAPLRRRREGQPARVLAIADRSQERLCARFRRMTSRGISQPKTIVAMARELTGYLWAVLHPAAAATHN

SEQ ID NO: 47059 - protein, 412 aa, unidentified
MQDILTCVMGLDVHRDIIVACLVKGAVDAEPEAETRTFSTLIPEMQKLRDWVIEAECRNIAMESTGIYWQPIYEMLESCFDGEVSILVVNARHMKNVPGRKTDMKDAQWIATLLRAGLLKGSFIPDKTFRELRHLTRYRKSVVHDITAQKNRIDKFLQSSGFRFTAFLSDTFGASGRNIIRHLIERGSIDREALDKCLKTKTRNRIDEILVALNGSLSVHQRRFLNIVFLHLEDLEAHKHTIEDEITEEVLKHTDALNLLCSIPGIDVTAAAAIVAEIGTDMSAFPDSQHICSWAGLSPGNNESAGKRKSVHINKGNPYLKSMLCETAWIMASHRKLYLSGWYWKVKQRKGAKRATIALARKILSIIYTMLKTGTPYNEECFEQRRQRCERKRANRMVNELQKLGYTVVAPD

SEQ ID NO: 47060 - protein, 318 aa, unidentified
MSDSVFIGIDVSSQTLEVASSLENKTWQVANQATGIGQLEEQLRALKPAMVVLEATGGYEFEAACALQAAGLLVAVVNPRAARDFARSMGALAKTDALDARMLAAFARVLYQHPQRERFVKPLASQELQRLQALVLRRRQIVQMLASERQRLRISHVATRPSIERVIAFLKAELDDSDGEVARDVRQHHGELAAALSSVPGVGPASVAVLVAELPELGQLDRRRISALVGVAPMNRDSGQMRGQRTIWGGRADVRRTLYMAALVATRHNPVLRVFYERLLAAGKPKKVALVAAMRKLLGMLNAIAKRRSSWNPALHSA

SEQ ID NO: 47061 - protein, 467 aa, unidentified
MAHKKKNIKKMNRKPQPRSLKTVQPNAAGIDLGSREHWVAGPPLADESPNVERFGTTTPELLRLADWLDQQQIVTVAMESTGVYWIPLFEILDSRGFKVFLVNARHVRNVPGRKTDMIDCQWLQLLHACGLLRGSFRPSDDICRLRALFRERNTMVDQRSDWVRRMQKSLDQMNVCVHHAVSDITGVTGMSIIRAIVDGERDPQVLAGLRDRRCRKTKKQIAEELTGNWRPEHLFTFEQSLKMYDQLCNVIAAYDTEILNYIDSLQPPDAQNSLAPPSSSKTKARNFVKRGKEPLRQALYRMSGFDLTTIDGIGVDTAAVFISELGLDYSAFPDESHFVSYLRLAPNISISAGKRVPGKFKAVTCTRVSNALRMAATTLRNSKTALGAYYRRISWRKGASIAVFATARKLAQIIYRLVRYGQDYVDAGTEAYEARFTQRRLSSYTKALKEMGYKIEPLTDQEAVAVS

SEQ ID NO: 47062 - protein, 387 aa, unidentified
MAQVNDLSRSLTAFDPISTLVVVVEMSKASWLVSGAVPGVERQPLKKLEPDATALLRLIERWRNEAMRSGRPISRIALAYEAGRDGFWLARWLIARGIEAHVIHSASVAVSRERKRAKTDRLDAAMLMRVFLGWLRGERGHCGMVVIPTMEEEAARRPSRERESLVNERSRITNRMKSALARLGIRGFKPHLRKAPERLADLRTAEGTGLPANVIEEFRRDMARLALVREQISSIEKTRAERLERAPDTGPHAMVRLLARVIGIGIETADMLVREILSRKLRDRRAVARYAGLTGSPDESGLKRREKGLAKAGNARVRRGLIQLAWRFLMFQKDSALARWYRTRTEGPSGARKTTMIVALARKLLIALWRLVTTGEVPDGVELRRAA

SEQ ID NO: 47063 - protein, 418 aa, unidentified
MDIVHERAAGMDISKRDAKVCVRIPGTRAGTSSRTVATYGATTNEILRLRRDLEAAAVTVVVMEATGDYWKPFYFLLAESLNVQLVNAKAARNIPGRKSDVSDATWLAELAAHNLLRASFVPPEPIRQLRDLTRTRSNLTHERTREFSRMEKALEDSGIKLSSVVSTLTTQSARSILNALVSGERDPQALASLAHSSMGRKSAALVEALTGRFTDHHAFMVHLHLNRIDQIEATLAALDTRIDLVMEPFSLARELLMTVPGISKNVANVIIAEAGVDMNVFDTAGHLASWAGVCPSQNESAGRVKSTQTRPGDHYLKAALGIAALAVSRSKTTYLAVKYRRIQSHAGALRAVVALQHTLLVIVWNMLHDGVAYDELGIDHYDKTNPERARKRLQRRMVALGFEPNLTPLSAGSSPSFS

SEQ ID NO: 47064 - protein, 334 aa, unidentified
MQNVTLIGIDLGKNSFHIHCQEKHGNTLLRKRFSRIQLTQFLATCPPCIVAMESCAGAHFMARHISQLGHQVKLISPQFVRPFVKSNKNDFIDAEAICEATSRPSMHFVTPRTEDQQAMSALHRVRDALVRERVKATNQMHAFLLEFGISMPRGIAVIKRLATVLEEHELPPYLVRLLTRLHQHYGYLCEQIEEIERELKNHLADDETAQRLLTIPGIGTITASLLATKLGDGKNYLSSRDFATSTGLVPRQYSTGGKSTLMGISKRGDKNLRRLLVQCARVYMQRLEYQSGRLAEWVNGQLTRHHSNVVACALANKLARIAWAVTTQGTVFSK

SEQ ID NO: 47065 - protein, 310 aa, unidentified
MDAIVIGIDVSKDKLDVHVLPAAQAFAVARNGAGIEELAARLAALAPAVVAIEATGGFETIVAAGLAGAGLPVVVVNPAQIRAYAKAIKQRAKTDPIDAAVIAKFARATRPEVRPLPDEATRQLADLVARRRQIVEMMAAEGQRGRRVDHKRVARSIARVKKTLEAELAELDQEIGDQVRGSPLWREKEDLLVSVPGVGPVVARTLLAELPELGRLDRREIAALAGLAPFTRQSGRWRGKSFIGGGRASVRTVLFLAAMTAARYNPQLKAFRDRLVQAGKPKMVALVAVARKLLTILNAIIRDNRPWQNA

SEQ ID NO: 47066 - protein, 339 aa, unidentified
MERVYGGIDLHSNNNVVVVVDEEDRVLHRKRLRNELGEVVDALSPFAKDLRGVVVESTYNWYWLVDGLMEQGYKVHLANTVAIQQYSGLKYTDDASDAHWLATLLRLDILPEGYIYPKEERPVRDLFRKRSCLVDQHTSNILSIQNLVARNTGRRLSAVAVRRLEDQQVNEMLPNAELALAVQSSLEVVRCLEIQIKNLEKVVLQRARLRKEFKNLLTVDGIGKILGLTIMLEVGDIGRFPSVGDFASYARCVKSTRLSNGKKKGSGNPKNGNRYLGWAFMEAAGYACRYNDTIQRYYQRKLAKAHVMVARKTVAHKLARASYYILRDQTVFDVDRAFA

SEQ ID NO: 47067 - protein, 399 aa, unidentified
MNAVGIDVSKGTSTVCVMRSFGEVVASPFEVTHTVSELGKLAGLLKSLNGETKVVMECTGSYHLPVARALHAAGFFVSAVNPVLIHGFGNNTIRKRHNDRADSVKIANYGLSSWLELPKYAPEEEIRQSLKSFSRQYTKYNKVKTMLTNNLISLIDQTFPGLKELFTSPARESDGHEKWLDFAARFWHCECVGGVSLNAFTEAYRKWCKRAGYYCVGADEIHALSRQCAAVMPKNETTKSLITLAVAQVNAVVESLAAVAKEMKRLAESLPEYPVVLAFRGVGEILGPQLMAEIGDVRRFQKKSSLVCFAGLEPTDNQSGKFQGNEPISKKGSPHLRKTLFQVMGCLLQHSPVGDPVYQLLDRKRAESKHYYSYMNAGAAKFLRIYYARVKACLDTLEA

SEQ ID NO: 47068 - protein, 351 aa, unidentified
MERYIGLDAHRDSCTVAVIGPSGKRLKSFVVETNGSALVEAIRCISGRRHICLEEGTQSAWLHEILSPHAEEVVVVVPEKRRGTKSDKRDAWTPAEELRTGAIVTRVYRAPTHLAALKNAVRGHLMAVRDVVRAKNRLKAIWRSRGIHSTAGVYEAETRGRWIRRLPKAYRPLAEGLGQQLDVLEPLRDQAERSLLEEAKTHPTVRMISTAPGMGRIRSAQVVAVVATPHRFRTRQQFWRYCGLAIVTRSSADWVYVNGQRERRDVWQTRGLTRKRNPLLKQVFKGAATTVITQLADHPLHEDYLRMIDSGIKPNLARITLARRLSAIVLSMWKHQEVYDPSRHRVVDDQQ

SEQ ID NO: 47069 - protein, 394 aa, unidentified
MKLVGIDIGKNSHHFCVMDKETGEFNVTPSSFSNNKEGFDFLINSLKPYSKKSILLGMEDTGHYHVALLKFLLSNGYTVALINPKTTDLTRKMEGGITKNDKLDTITICDVLDTPERKKQYRITKVDRFDLYEQRQLTRHHHNLKEELNIYCNRLQKSINLVFPEFNTLFGSKYGVVYMNLLKTFGSAEAIASTDIRTIRKCFEIKGRGGRISLTAEKLKECAKNSIGISSEVETIQIKHLVSQIMLIKEQIAEIDKKIEEFSIKNNSPILSIPGISHFSGTSILAELGDIGNYSKPSRIIKFAGVAPYHYESSQYNAQHTAITKKGSKYLRKTLYQVILPVINNNPVFKKYYRLKISQGKGHRCAQGHCIRKLLRVIYHLLETGQSFDPALLR

SEQ ID NO: 47070 - protein, 358 aa, unidentified
MKHYIGCDAHKKYSVFAGISEAGEIIPSQRVEHDRESYRSFLKGLPPASKIAVESVGNWYWLIDEMEKAGHIPTLVNAGKAKLMMGNINKTDKLDARGLAVLSLNGTLPAVWIPPGELRDQRELARMRIFLVHIRTGLKNRIHATFAKYAITFQEVSDLFGVRGRNLVENRLVELPPETRHSMKEQLKLLDQLQKQITEVEKRIWQIVKITPEMQLLMSLPGVGPILAILIAFEIGDVARFGDGAHLASYCGAVPRVKSSGGKTYYGKTRPDVNHYLKCAFTEAGNAIVANQHRMTGRHVVALYQRISRTKGHAKAIGALRRHLAEAVYVVLKSGQPYHEPVPSRKSLVAKEVCARLA

SEQ ID NO: 47071 - protein, 373 aa, unidentified
MFHFTTLFIGMDVHKESFSLCYYDMMANQFKHSTKVGPNVSYIVNYVNELRRLYGQDAEVLCGYEAGCLGFTLYHQLQAYGIPCIVMAPTTVMKEAPKRVKTDKKDAAQLAKALAFRSYRPVHIPTAEDEQVKEYIRMRTDHKVALKKIKQQVLAFCLRHDFRYTEGSSNWTQKHVRWLHSLNPEGLYAEILTEYLLTYEKLVDQIERYDARIEQLAQSDCYQEKVSQLSCFIGVKTLTALSIVTEIGDFNRFATAQHFASYLRLTPSENSSGDKERRGAITKAGNSHVRRLLIEAAQSLAKGTIGYKSKELKRRQSGNRVEVIAYADKANERLRRRYRTLVLGKNKKQNVAKTAIARELSGFIWGMMTGRVA

SEQ ID NO: 47072 - protein, 312 aa, unidentified
MYTYVGIDISRSTLDIAVYGDDKLRQFKNNPDDIKKICSLMNKIQPALIVFESTGGYEMPLYIALNQAGLPAAPVNPRQVRDFARATGKLAKTDALDARIIARFASAIRPMPHKIPESQEIKEIVARRNQLVQMIVAEKNRLHNTHGKIGERIQAHIQWLEEELDSINKELSQAIEANPEWRRKNNLLQSAPGVGPVLATTLLADLPELGELSRKQITALAGVAPLNRDSGTLRGRRTIWGGRATVRAALYMATLVATRFNPVIRQFYQRLLDAGKRKKVAIVACMRKLLIILNSMVRYNTKWLYVPVELTV

SEQ ID NO: 47073 - protein, 391 aa, unidentified
MDNSSRVVIGMDPHKRSATIEAMGPREQVLGGGRFGTDPAGFEAMLAAAAAWPDRVWAVEGCEGIGKHLVLRLLDAGEQVVDVPAKLSARMRVYATGQGRKTDETDAHSIALVGVRMGGLREVVNDQSLEVLRLLVDRRRRIGADHTRMVCQLHQLLLELLPGGAKKDLSAAQARKLLAGVRPKDVAGKIRKRVAMEFVVDLERVYRRKKEANKELVELVKATGTGLLDLHGVGPSGAARLLVEVGDITRFPTKGHFASWTGTAPIDASSGDNVRHRLSRGGNRQINKALHMMAVVQLRNATEGRSYYDRKVAAGKTPNEAMRCLKRRLSDIVYKTMLNDLVTSTRTGPGGHRGNGSDSSAASSHPHTSSSEKSLPGPAKRQPRTTLPVAS

SEQ ID NO: 47074 - protein, 402 aa, unidentified
MNSVGIDVSKGKSTVTIMRPFGEVVISPFEVTHTISELSELSASLMKLKGETKVVMECTGSYYQPIAHALNEAGLFVSTVHAKLIHDYGNNSIRKVKTDKADSIKIANYGLSHWMELPQFVPEEDTRIMLKTFSRQYSKYQKVKTMLKNNFIALTDRTFPGVNELFTSPPRKSDGHEKWIDFSIKFWHCECVCGLTPKAFADRYQKWCKKEGYRFSQEKVDDIYTSSCGHCSVMPKNESTKLLVTQAISQITSVSENIAVIAREMKLLAESLPEYPVVSQFYGFGDILGPQLMAEIGDVARYRSKGALVAFAGLEAPPYQSGKFESVDRSISKKGSPHLRKTLFQLMQVYLQNAPADDPLYQFIDRKRAEGKHYYSYMTAASAKFLRIYYARVNEFLSKLDD

SEQ ID NO: 47075 - protein, 343 aa, unidentified
MKLSRVGVDLAKNVYQLHGVDRSGKTVWKRRLKRHQWFKVLLDTAGPECEIGMEACAGAHHWGRELQSRGYTVKLIPPQFVKPYVKSNKSDAKDAEAICEAMSRPNMRFVTVKRVEQQDIQATHRVRAELMTQRTAKANQIRGLVAEYGLVAPKHLSSLRAAIPCWLEDAANGLTGDFRALLQGVWTDLLLLDDRVGEMDQKIKQLADNNEDCVRLQQLRGVGPMTSTAMIATVGDARQYPKSRQMAAAIGITPKQHSSGDRDRLLGISKRGDVYLRTLMIHGARAVVARAKHKDDRLSRWVMNIANKKHPNVAAVALANKTARMAWAMLRNETDYDPDFAIR

SEQ ID NO: 47076 - protein, 346 aa, unidentified
MKLIKKVIGVDISKDSFTVRFGTLDQDLQQKTSKPFTFKNNPAGFNQLLKTISKVHYFNCEDLSSKDIPVWFIMEATGVYYENLAYFLTENKFSVSVLLANKVKNFSKTLENKSKTDDIDAAIQTQYGLEKTLKAWTPPSGIFRELKELTREYRSIKESITIIKNQMHAKSCAYNANKETVKRLNQHKKFLQQQLKQINAQITALLKSDKELYEKIKTVSSIKGVGIMTVTKVVAETAGFALIKNKNQITSYSGYDIIHDQSGTHNGKTKISKKGNSQIRSALYMPALTAIRCNKELKKVYIRLCKTKINKKIAIIAVARKLLILIYCLWKKNEKYIENYQNLKAA

SEQ ID NO: 47077 - protein, 391 aa, unidentified
MQKLNDLSRSLTPLESDGTLIAVIEMSLSSWLVAGIVPGVERQPLKKLEGDESALLKLLNRWREEAKKAGHRIERIAVAFEAGRDGFWLARWLRARGIEAHVIHASSVAVSREHRRAKTDRLDTELLKRAFLGWLRGERDHCKMVAIPTIKDEDAKRPNRERESLVGEQSRIVNRMKAALIRLGIRGFNPKLKKAAGRLEDLRTPEDEPIPPNTLAELRRDMERRRLVSDQIRQIEEARRERLKQAPYDGPHAMVRLLARVIGIGIETADTLVQEVLSRNMRDRRAVARYAGLTGSPDESGRKRREKGLARSGNARVRRGMIQLAWRFLMFQKDSALAQWFRARTENARGTRKTMIVALARKLLIALWRLVREGIVPEGIVLASGTMNGGR

SEQ ID NO: 47078 - protein, 373 aa, unidentified
MGKHKLGFVAFDSAKEKHAVAIADDGRDGEVRYLGEIDNSPDAVKKLVTKLSRQYERLHFCYEAGPTGYGLHRQLTDLGHVCDVVAPTMIPKRSGDRVKTNRRDSVTLVKLLRAGELRAIWVPDTVHEAVRDLTRAREVAMIDLKKKRQQLLSFLLRHSRIFPGGKNWTKMHERWLAKQTFNHPAQQIVFQDQLEVINAAQVRLAALEQQMREIVSTWTMAPVVAAYQALRGVSFLVAVTFVAEVGDVRRFATPQQLMAFLGLVPSERTTGDTVRRGSITKTGNHRARRVLIEGAWTYRFSARVGETLRARLKDLPLNIRNIAWKAQVRLCARYRRLIANGKKTPVATTAIARELAAFLWAIGQQVAPQTPAA

SEQ ID NO: 47079 - protein, 320 aa, unidentified
MQTPSEVLNIGADVAKDEIVVACSEGSFPVRKIANQRAAVTAFLRELPAGSRIGLESTGIYHELLAEAAHKLGFIVFVLNPKDARHYAKGVGLRGKTDRVDAELIARMIAHEHTKLHVWIPPTPEQREMGRLLKRRAKLSSLRQALAMSLSGLDGFGADLKALRARFDLVIARIDQRVKTLVEASPDRKEHVTHLRTIYGVGPVVSAALVNILERVPLNSADAFVAFTGLDPRPDESGKHRGKRRLSKRGPADLRRLLYLAAMSAIKTQAWKPLYEHYRAKGLSSTATFVILARRIARTAWSMYTYKTEFDPTRLTKALT

SEQ ID NO: 47080 - protein, 361 aa, unidentified
MKKPAQHLIVEVPRRQAKVEITIGIDLGDVWSHYCTLNQDGLVVDRGRFRTTPKAIEKWFTDVPPARVAMEAGTHSIWISAQLQELGHEVIVANVRELRAISHSDRKSDQVDAEKLARYARLDPNILRPIAHRTVAQQEALTLIRARALLVRLRTAAVNAVRGLTKSCGYRMPASATTCFAQRSLAVMPPGLAQALGPVLQQIAEMTIKIKQYDRQIQQLGQTEYPETQALLKVHGVGHLTALTFVLTLGSKERFGRSRDVGCYLGLRPRRSQSGDHDPQLGITHAGNAYLRSLLIECSNHILRPHGRDSALRQWGLRLAAKGGKQAKSKAVVAVARKLAVLLHRLWSTQEPYMPFYEQAA

SEQ ID NO: 47081 - protein, 457 aa, unidentified
MAMLRAGVVEEIDSDDTEQILSVAAAVDVAKASGMVCVRHPHPTVEGRRTSKVWEVDSTTNSILELGDRLVALGVERVVLESTSDYWRPFFYLLETAGLTVWLINARDVKQVTGRPKTDKLDAVWLAKLNERGMLRPSFVPPREIRALRDYTRLRTELVEERSRHKQRLEKLLEDALIKLSSVATDLLGVSSRAMIEALIAGERDPKVLAGLARGRMTKKRAELTEALTGRFDDHHADLARVLLDQIDTCTDKIDRLTSRIEILVAELPEPPPPADREPVSSNDVPVEHDPDARRLTTVERLDEIPGIAERAAQIIIAEIGLDMAQFPTPAHLVSWAKLSPQTIQSGPKTKAGKTGKGNRYLKGVLGEVATAAAKTDTFLGERYRRLVRRRGKQRALVAVARSILVIVWHLLNDPDARYVDLGSDYYTKRLDPDRKTRDLVRQLQALGHNVSLAPAA

SEQ ID NO: 47082 - protein, 346 aa, unidentified
MKIKRVGVDLAKNVFQVHGVDSKENPVWRRRLSREKWLKTLLTKVEPGCEVGMEACSGAHHWARELQAHGLTVKLVAPQFVKPYIKSNKNDANDAEAICEAMSRPTMRFVTVKSVEQQDIQAVHRIRSELVSQRTAKGNQIRGLVAEYGLVAPQRLSHLRRAIPMWLEDAENGLSGRLRRLVDGLRGDLVELGRRVEELDEEVEAIAKAHPVAQRLQQLRGVGPLTATALIATVGNGEQFAKGRDLAVSLGLTPKQHSTGGKERLLGISKRGDPYLRSLLVHGGRAALYAARNKDDRLSVWVTNLAARSHPNVAAVAWANKTARMAWSMIRHGTDYQPERAASRAA

SEQ ID NO: 47083 - protein, 320 aa, unidentified
MESKAAVVYAGIDVAKATLQLHLQNHQSEFINSPAGLGQLLKQLQTVPEVHVICEATGGYEQAMVKVLHAANIPVSIINPARVRAAARARGQRAKSDPIDAQGLSDYGQRYQPAPTSPTSATQDQLVALTQWLKQLVQGQAIAKTQAEHHQHPFVRRHHAKLLAHLQSQIQAVEKQIEALLEQDAALQQRVNCLDNIEGVGPRTAWLVLAHMPELGQLNRRQVAALAGLAPWNRDRGTMKGMRCIGGGRPEVRVALYMAALSATRSNQVLRALYQRLRAKGKLAKVALTAVMRRLLIYMNHQLKDLLSKTKSQNIAEVTA

SEQ ID NO: 47084 - protein, 428 aa, unidentified
MPSQAFLGCDLARYGTHWAVLVNDRGQQVSKPQRFRTRPADLEQLYQWVTTQITPETELRVIVEPTGPATEPVQRFWRDRRVRVDCVIPLRVKRFRESYHGHTKTDRLDAFILAKYAHTYADLLYPVIEPSDPRFGTLKEGIKDSWRLARDLGTVEKRATALIDRWIPEFGTVAPSLRTPDGPAIFQEVWQTFEEHPVWTVCPSAVQDHCLVIRPRTAAERAALRERLPAARQQLQRLLDQHQLLREQKACVEADLTTLYDILDPAQLVRSLPGVGVTLAPFFLALWPAIQAVRSRKALKAYVGLDIATNQSNRTLHTHGHVTKTGPSWARWALYLAADIGRHWDPQLAAVYYRAMTAKGKCHQQAVIEVAIHLLWRLARIVRTGQPYEFRDPDGHPMPSGRERQQLIATQYTVPDAVRNRTRSHRPT

SEQ ID NO: 47085 - protein, 344 aa, unidentified
MLTIGIDAHKRTHTAVACDESGRELARRTIGTSSADHLALLAWARRHGEQRLWAVEDCRHLSRRLERDLLGAGECIVRVSPKLMAHARDSARSYGKSDAIDALAVARAALREPHLPLARLEGQERELRLLVDHREDLVQERTRVCNRLRWHLHELDPELEPARGSLRRLSTLARLREILAAMDGLLARLARELVERALELTLQIKELGNEIAALVEALAPSLLAIHGCSFLTAAKIVAETAGIERFRSPAAYARHNGTAPLPVSSAGSVHHRLSRAGNRQLNAALYRIALTQSQWHPEAKALLLRRREQGDSSREALRVLKRRLSDVVYRALSADVEVGLRVAA

SEQ ID NO: 47086 - protein, 375 aa, unidentified
MTIGKEQSERQQTLYAAIELSKKSWVLSVAHPDRTKPSIYRLAGGDFEALVARLRAAAGAVVRIVVCYEAGYDGFWLARRLGGAGIECRVLDPASLQVNRRARRVKTDRIDALMLLRAVIAIDRGDHHVCAVVRVPTIEEEDARRSHRERQRLVRERTGHINRIKGLLFGQGIRGIEPKLRLTRIDFAALVTAEGHSLPDRLRRELEREYARLAVVEDQIRSVEKERDLADAQDPSVEKKRQMLMLIPGIGGTTAAVMAREIFARSFNSRSHLGSYLGLTPSAFDSGSSTRCQGISKAGNSWARRILIEIAWIWQSRHPESPLSRWYKARTKAQSPRIRRIMLVAMARKLAITLWRYVETGTVPEGVELDAKAFA

SEQ ID NO: 47087 - protein, 351 aa, unidentified
MNRTTYGLDIAKNVMQLHWVEIETGEIGRKKLGRAKLSDYFARMQPVRVAMEACGSAHHWARVLGALGHEVQLLPAGQVRAFVRGNKDDAADARAIWLAAQQSDIRRVPVKSVDQQAVLALHRTRQHWSKVSTATVNALRGLLYEFGVVLPQGRHAGLKALREQRARIDAQLPQPMQRLVDLQLQALHEVEQHIVQFEAQIAAQHKQLHNSARLDRVPGIGLLGATALAATLGDGSGWRSGREFSACLGLVPEHSGTGGKTRVGHLSKRGDGYLRTLLIHGARSVITHSKQKPKWLEQLLARRPLNVAIVALANKMARTAWALVAHGHEYQRDWKSTKPDIQCGAAQAVAA

SEQ ID NO: 47088 - protein, 404 aa, unidentified
MWYTGIDWADEHHDALTIDEKGHQMGSIRVDHTPQGFAKLDTFLMQIIGSASKEQMACIIETTHGLLIVHLLEAGWPVYPVNPRTVDRRRAASGAKTDTIDAYLLAKTGRADFADLHRLTPDSDKVAELKQLTRDQDSLIRTQTRLVNQLTACLKAYYPVALDLFSKLQQKSTLGFLRAYPTLETARAASLQEVQQQLKHTRHPHPADAAASIVELLHHPQLQADVVLTRTKSRLMLALVSQLLPLMEQIATYDKEIHTLFLTHEDHAIFESLPRAGQHLAPRRLSEIGDDRQRYQDASSLQALAGTSPVLYQSGMYSKAHRRLGCIKPLRNALYQFAWQSTQSEAWAQDYYQRKRTEGKSHTVAIRALANVWVRIIFAMWTHRECYQTATFELAQQHHARRAA

SEQ ID NO: 47089 - protein, 423 aa, unidentified
MRAIGMDVHRDFCEVAVAADGEVRSGRRIATSPAALELFGQSLAPDDRVALEVSGGAWEIARILEPHVARVVVVSPADTTIRQARAKTDRLDARALARLLAAGSLDHVWVPDEQTWMLRRRLSRRAQLVRERTRSKNEIHAIVIRRLIGRPPATDLFGVRGRKWLSELELPIEERETLESCLRQIAFFDAEIAAVDRLIAQTALASGQARRLMTVPGVNVICAATFLATIGDIGRFRSPRKLVGYLGLDPRVRQSGSGPATHGHISRQGSRPARQALVEACWSAVRQPGPLRAFYQRVRARRGHQVAVVASARKLACLFWCLLTREQDYAFAQPSLTRKKLRGLEHVAGTTERRRDARTASKSRCQAERELAEQAETAYARTVRDWQAAATHKTGASATQGRASSGRQSGKQRGKASVPNPAL

SEQ ID NO: 47090 - protein, 322 aa, unidentified
MTEEAVCIGVDVAKSTLDVAVSDSGETRQFTNDDEGISQAVRYIAGLKPAGIILEATGNLEMPLAAALQAGRLPVVIINPRQVRDFARATGALAKTDTIDARILALFGARVKPEIRTLPDQKAREMRNLLTRRRQLIEMLTAEYNRLFQADDGTRPSIETHIKWLEEALSNINNDLERQIQSSPSWREKDNLLKSVPGVGKVVSSTLLIELPELGKLNRRKIAALVGVAPLNRDSGTMRGRRTVWGGRAKLRAILYMAALVASRRNTIIAAFYQRLVDAGKAKKVALVACMRKLLTILNAMMRTMTIWQPAIMLRRVSAEVS

SEQ ID NO: 47091 - protein, 366 aa, unidentified
MKKTSTVQALKSKLFKEQKLTIGLDLGDCWSFYCVLDEAGQIILEQKLPTTPEAMKQTFGKIPRSLIALETGTHSPWVSRVLTELGHEVIVAHAQKVQWITKSNRKDDRHDARTLARLARVDPQLLGPVRHRSAKAQIHLTVIRARAELVSARTALVNAARGLVKSYGQRLPKCGTYQVNEKLAEGLSAELREVLVPLFREIESLNERVKEYDERMEKIAKEVYPEVSLLKQVKGVGTQIALSYVLTIEDPYRFPKSREVGCFLGLRPGRRNSGESEPQKGISKEGDRYLRTMMVQGAHYILGPFGEDSDLRRWGLKLAERGGKNAKKRAVVAVARKLAVLLHRLWVGGEVYEPLRNSQKAMREVA

SEQ ID NO: 47092 - protein, 387 aa, unidentified
MARKRTLSTLDTSIAYEAVGLDLAKTDVALAAFDSDHKEPYLIDRIPYDKLYELLANMAPTLVAMEPCSGAHQIAEQIQELGHEVMMISGRHVQAWVKDHCNGQKTDLNDAFAILNLAYDRWLTPIRGKTREECRLLALQASYRQLKGQRTKTMVHVKATLHAWGFPIRAGSFNQKVLHELIDANREAFGDEVAETLHLMINRVRDLDHDIATVLKLLTEATKRDPRASLLRSIPGFGVLTTSRWCAVIGDIARFDFPKQTMAFIGLVPNNRITGHHTETSSGREARGQGRMSKRGDKMLRSLCIMGAGSLCLMVRNDRLPDCPFVASIKERLASPRPWFKVLVYVAAKLVRIATALLKYGETFSFEKAGISKAVLKQWELEQAKAA

SEQ ID NO: 47093 - protein, 339 aa, unidentified
MNNVSTIGLDLAKKVFQVHGVDQAGEVLVRRTLRRSQVLAYFGKLAPCLVGMEACATAHYWARELSKLGHTVRLIPPAYAKAYVRRNKNDPADAAAICEAVARPAMRFVTIKTAEQQAAAGVHKVRELLMKQRTMLMNSLRGLMAEFGNVVAEGPRHIGELVAILADPGDRRIPAPLHGGLARMADALRHLERQIEVVDKQILDWGRGNETSRHLITIPGFGPILSTAMAAIVVNPATFRSGRDFSASLGLVPRQDGTGGKVKLGPISKRGNGYLRRLLVSGAMSVLSGKRAKQNPWLVKLLATKARKVAAVALANKMARIAWAMMMRQEDFRTVPAAA

SEQ ID NO: 47094 - protein, 347 aa, unidentified
MTLGIDAHKRTHTVVAVDEAGRQLGTKTVSSTTTDDHLELVRWAARFGPERSWAVEDCRHLSRRLEADMLAVGERIVRVPPKLMAQARDSARTYGKSDPIDALAVARAALRYPDLPAAQLDGPSRELRLLVDHREDLVAERTRCINRLRWHLHELDPTWDPPARSLIRYVNLDAVAARLAGLEGMVARLAAEITAHIRDLTVRERALEREIGERVTALAPTLLAVVGVGALTAAKIVAETADIRRFRSKDAFARHNGTAPLPVWSGNRERHRLSRTGNRQLNAAIHRIALTQARCHPDAIAYLERRSALHNTPTEARRALKRRLSDIVYRALLADATPTQACISKAA

SEQ ID NO: 47095 - protein, 393 aa, unidentified
MGRVVIGMDPHKRSATIEVIDGREQVLTTGRYATDTEGYRLMVAAGREFPDRVWAVEGSAGIGRHIAQRLVADGEIVIDVPAKLSARVRVFDTGQGRKTDPVDAHSVAVAGLRRPGLRRVVADDASVALRLVVDRRDELGRIRTQTLNRIHRLLLELIPAGAKKGLTRGHAGQLLRTMPPPADIVTQTRYHLACELVEDLTTIDEKIKAANRHLSQLLAATGTSLCDLNGIGPSGAARLVGDIGGIHRFASAGHFASWNGTAPIDVSSGDQQRHRLSRAGNRRINRVLHIMAIAQLRHDSPGQTYYRRRLAEGKTSMEAMRALKRRLSDVVYRQMINDARRAAAAQPRTSPGGHSGATLQSSAASLIPTADTSDKSQPGPATRKPKRTLAPTT

SEQ ID NO: 47096 - protein, 472 aa, unidentified
MPYKRVNLPKTNRHGATLKLKFRTMSKSTTKSENVKRISQLPVIRTMAAGIDVSDTEMMVAYPISEEHLEVKAFGCFTSDLHCIAKCLKSNGITTVAMESTGVYWVALFLLLEEYGFEVCLVNAKHVKNVTGRKDDESDAEWIQKLHSCGLLRASFQPDVTIRTLREMVRHRKNMVQVSSSYINRMQKAMELMNLKLHTVISDIDGKTGTAIIEAILSGERDPEVLVELRDKRIKASKEEIIKSLEGHYTREHLFELKQCYQLYCYHRQSIVECDIEIEGLLIEHIASKNDGILPVIPKVKRKVAGKHKVQFDAASYLKEILGVDVTEVCGISELSALTVLSEVGTDMTKWKTEHHFTSWLGLAPNTKISGGKIISSRIMKKKNHAGQAFRTAANSLYRSENALGNYYRRIKAKAGAGKAVVATARKLAIIYYMMVLQKKAFDLKAMEAYQEKYKEKKIMQLKRKLAILEAA

SEQ ID NO: 47097 - protein, 281 aa, unidentified
MYHIGLDIHKKHTQACVMDESGRVLSNERFPSTPEGLDEFLSGFEQAKFVLESTGIWEFIYEGIERRGFEVVLAHPMKVRVIAEAKVKTDKVDAEILAHLLRADLVPRSYVPSRDIRDLRQLVRQRAYLVQRATSFKNRIHAELLRRGIRRPEKYVKPFTQKSAEWMRSLGISTIDANLDCLETLQQQIGQLNDELLREFDRRREAQLIATIPGIGYYGALLIFAEIADIRRFRDPENLCSYAGLTPTVNQSASSVHYGGVSREGSKYLRWILTESAHIHV

SEQ ID NO: 47098 - protein, 309 aa, unidentified
MSQTAQTAVAVIGIDIGKNSFHIVGHDERGAIVLRQKWSRGQMEARFANLPPCLIGMEACVGAHHLSRKLNGLGHDARLMPAKYVRPYSKGQKNDFRDAEAIAEAVQRPTMKFVATKTADQLDLQALHRVRERLVSQRTGIINQIRAFLLERGIAVRQGQRFLRAELPRILATPPDVLSPRMVRVIEGLAGDWRRLDERIEGLSGEIEAIARQEPGCERLMSVPGIGPIISSAMVAAIGTGDAFSKGRDFAAWLGLVPKQMSTGDRTILGKISKRGNRYLRVLFVQAAWVVLIKPMSWARHGLKPWLGG

SEQ ID NO: 47099 - protein, 347 aa, unidentified
MDQQCHYVGLDVSLETTSICVIDDAGAIIWRGKCSSDPDTITAIVRQHAPGAARVGLETGQLSNWLTLSLRRRGVPVVCMDARHAKAALSLQINKTDANDAFGLAQVVRTGWYREVAVKSMDAHTLRMLLVARSRLVSQRQATANTIRGLLKTFGLVVAKGSKGLFPVRVREQIVGNPALIAIIEPLLAVWYAIGDQVVMLDRQMLARARNDQVARRLMTIPGVGVVIALAYTAVIDDPARFRRSVSVGAYLGLTPRRYQSGEVDTTGHISKCGDSLLRGYLYEAAAVLLYRDGRASVLKSWGLGLAKRIGMRRAKVAVARKLAVIMHRIWSDQSEYRWMAIPSTTA

SEQ ID NO: 47100 - protein, 340 aa, unidentified
MTSYVGFDVSLAETSVCVLDAGGDVRFEGKVKSRPDDLIACVREHARDAERIGLETGQTSALLFRAMEAAELPVVCIETRHAHKVLSARSNKTDRNDARGLAELVRVGWYREAWVRGAPAHAIRSLLLGRRMLLATRRTLENTLRGAVKRFGLIITKTAGRTFKHRAAAAMERDPAYAAFATPIFAVLRTVLDQIASYDRQLRAIARSNETVSRLMTVPGIGHLTALAYYSTIEDPSRFKRSEDVGAYLGLTPRVHQSGEMDRTGRITKTGDGMTRSYLFEAANVILTRVTKPTPLRAWGLRLTERTGPKKAQVAVARKLAVMMHAIWSDGTEFEWRAAA

SEQ ID NO: 47101 - protein, 413 aa, unidentified
MRTDQTFTTDSEEPVLAVSLELAAAKWKVALHDGRREKPAVHAVAQPQAAARLQAVLDLIERLKEKWLLPADVRVVVSYEAGQDAFWICRALQARGIECYVVDPASIPVERHKRRVKTDRLDVIKLVINLRAWLRGERDRMHVVHVPSPQDEASRQLMRDRGQLQKEVLQHRDRMCKLLVTLGCWDLVNHKDFAGRLARNEVKCHDGTPLPPELRERLLRECERQALAEQQLAALEKTRKASVPAPARKRSEDLARLKGIGEVGASRLALELFWREFSNRRQVGACVGLVPQPYDSGESRLDVAALPARQRTHPVVQPAHPGHGMEPPRATHCDRRGSATSRDCSVAVSEERRHPRRRRAEASLSHSGIAHQGKHERAQLMDGRFEVNMPVKVQGYQRNRLYRWGLFPDKVPA

SEQ ID NO: 47102 - protein, 354 aa, unidentified
MIIIGCDYHPAFQQIAFVDRETGELQERRLEHPDRAEKFYRELAAQEKKVRVGMEASGHARWFERLLADLNFEMWIGDAAEIHRKRERKQKTDRQDAQHILRLLLKDDFPRIWVPSWENRDLRQLLWHRHRMVQARTRMMNQLQAVALNEGLRCKKKLWREGGRKQLEGFRLAPWASRRRQDLLELLDRLNPTIAALSQAIEQEVEKCPAAQRLMTHPGVGPLTALAFVLMIGKADRFQCGKQIASYLGLVPLEDSSGNRRRLGHITKQGNSLLRFLLVEAAQVTARSVPEWRSKYVHLTMRRGRKIAKVAMARRLAVRLYWMMRKEWDYEQLRTFGSHAGQPGYRHGVKSNIE

SEQ ID NO: 47103 - protein, 388 aa, unidentified
MFQTIDQSKKCLNAFEQGSTLVAVVELSQKSWLVAGIVPGVDRHPLKKFDADENRLLALIQRWKQEAIKAGREIKRIVVAFEAGRDGFWLARWLQARGIEAYVIHSTSVSVPREHRRAKTDRLDTELLKRATLGWLRGEPDHCRMVAIPTLEEEDAKRSNREHQYLVGERTRLINRLKAALARLGVRNFNPKLRKASERLRGLVTPESMPLPPNTLAEMERDMQRLQFVRQQIKAIEQTRFERIKKTPKTRLNMMVLLVARVLGMGIETADMLVHEVLSRDLRDRRAVARYAGLTGAPDESGAPRREKGLARAGNARVRRGMIEFAWRFVRFRKDSTLAQWFRARTADARGPTRKTMIVALARKLLIALWRLVTTGEIPTSLTLRPVA

SEQ ID NO: 47104 - protein, 353 aa, unidentified
MHCIGMDVHSKATNFCGMDPNGKKVREFLVRGPLQEVVASVQTLQKELGPLRICDEASTGAGWLYDQLQGAGRQIRVAHPGKVRMIFRAKRKNDRIDARKLAFLAFVGQVPLAHIPSADRRQGRSLIEYRRRLIEKRSGVKNRVRTILRSNAIQAPRGLWSQKGQEGLSRVELGMCQALQRDQLMMELQEVRQKIAQGEEVLQKLAAREPAVGLLRTIPDVGIRTAEAGVAYLDEPSRFRRNKSVGCYFGLVPCEDRSMKARFGPITKEGPSTVRKYVTEAAWQGIRRDPTLGAFFERVCRRDPPRRKIALVATAHPLLRVMLTMLQTGECWNPQYSTPKPTATTKDQTELAA

SEQ ID NO: 47105 - protein, 501 aa, unidentified
MWTVSRAEHGTFHNEREYAMAKRRFSTFERLQRGRLNRVERKELERRLNSADPGLQVVNSDAAGIDVGNESHFVSVPEGRDAQPVREFGSWTADLEAMAEWLKACGIRTAVMQSTGVYWIAVYDVLQRHGLEVNLVDARATKNVPGRKSDVQECQWLRRLHTYGLLRRCFQPTEAIRAVRTVWRLRDQEVKEAGRAVQHMQRALIQMNVQLHNAISDLSGVTGQAIVRAIVAGQRDPVQLAALRDRRIQASEQEIVNSLRGDWKEDVLFELQQAVEAYDFHRRQIERCDVQLQKYLAALPGREVDTTEINEPQDTMPEKKRRKKERQKPKGNQPAFNLEAELHRILGVNARCIDGLDVMTIQTVLAEVGPDLSAWKTERHWASWLNLAPQRDVSGGKVIRHVRQRRTNRVGNAFRMAGQSLRRSQSYLGAKFRYLLAKLGPAKAAKAMGRTLACLFYRLLTQGQAWIDRGTEAFEQKRQQRELAALQRRARSLGLRLVAAA

SEQ ID NO: 47106 - protein, 416 aa, unidentified
MNNESPVVAGMDVHKRMLAVVVAKVDGNRIEYLSERFGTTRQDLDQLAHWLHQQQVTEVAMESTAQYWMPVWLALEEQFTLYLAQPRSTAAPKGRKSDWADAQRIVRRLLAQDLTLSYVPGREQREWRTMTRTRVEMSAQQVRLRNQMEGLLEQAQIKLSSVLSDLLGVSGRRILREMVKGETNPACLASLADKAVKASEKTLQEALGGKLTATHRLLLKMYLEQWDLLASQIDQLNTRMAQALSQHQAAVHRLVEIPGVSLTAAQQIIAEVGPEARAFAAPQKLASWVGVCPGQHQSAGTEYSHRSPKGNRMMRRVLVQCAWASVKVKGSIFHQKFRALVPRLGPRQAIWAIAHRLLRIIWKLLHDQVNYVERGLDTNPAAVQLRIKRHLKELQRLGYAVNLSALAAIRPQEASV

SEQ ID NO: 47107 - protein, 357 aa, unidentified
MDGEMMVTVGVDTHTDVHVAAVLDPAGRLLETASFPATTRGYAKLAMWAESFGLVDKVGMEGTGSFGAGLLRFLADYGLTVVEVDCPDRAGRRRNGKSDPLDAESAARAVQSGRATGTPKSRDAQVEMIRVLRVARRGAMKARIQAGAQLDALVLTAPEPVRASLRKLTSKQRIRACAAPRPGSVSDPASAVMTALRALARRWQALQAEIDELDIQLTPLVTAAAPELLALPGVGVETAGQLLVTAGDNRDRLRSEASFARLCGAAPIPVSSGRTDRHRLHRGGDRQANSALWRIALVRMGCHQPTKEYVARRTAEGKTKTEIMRCLKRYIAREVFPHLLTATPGTGSVRSRLGQTG

SEQ ID NO: 47108 - protein, 458 aa, unidentified
MDQATRFIGMDVHKDTIVVAVTATGDVGKATPYGTFPNTAVTLEKLVGRLRQAGSGPLKFCYEAGPCGYGVHRTLTRLGEDCIVVAPSMIPRKSGDRQKNDKRDAASLAVLHRGGLLTAVWVPDAAHEAMRDLIRTRLAAVRAVRTARQQLSAFLLRHERIYPSGGKAWTKAHRGWLAGQSFAQPAQQIVLEESIEAVRLGEQRRDRVDGYLRAQIPTWSLFPLVQNLGALRGLDAIASAGLAAAIGDPSRFASAPDFMAYLGLVPSEHSSGPRRRIGGITKSGDIHARTLLIEAAHSYRFPARIARHKLAAVDAVPEAVRTIAWKAQTRLCQRYRQMMAKGKPKPVVVTAIARELAGFVWSIACITSDPPAKTSAAATTADEVCPTKSTGHPRVLRRQPLKAATPHAARPEQTGAPIELRYVTVDRPYPEADNPKESTPASPMRGSAAASGLNKAPA

SEQ ID NO: 47109 - protein, 341 aa, unidentified
MGQASTIGLDIAKWVFQAHGADATGRVVFRKRLVRAKVLEFFAGQPPCLVALEACGGAHYWARELGKLGHTVRLIPPAYVKPFVKRQKNDVADAEAICEAAQRPGMRFVPVKDEAQQANTVVFRARDLLVRQRTQCINALRGHLAEYGHVVPQGPAHVDSLVALVEDPKSSVPESARGILQVLIRMLNALEEQLKELDGEIARRAKADPVARRLMTIPGIGPIAATAITALVPAPEGFRAGRDFAAWLGLTPLQRSTGGKHKLGAISKMGERTIRRLLILGASAVVGWASRRGAAAGSWLARMLARKPRMLVTTALANKMARIVWALLVKGGTYRAPAVAA

SEQ ID NO: 47110 - protein, 401 aa, unidentified
MEGPIVSIDVSNGNSHYMCFIKNNKRFGKVKKIDHDIEGFKRLLEDIQKLEAETNEKVCAVFEATGVYTKPLERFLSKNSIKTYIINPLESARKRKEEIHNKKTDKLDPISISKVYYDKEEMMELKKKDETYNWLRKKNRLYEDQLNHLRKYKVTFQNQLSICFPGYLDLFKDGYSDIPMTILKKYPHPDLLKNKKAETVARYLEKNTCHTHKVSLEYALKIIEFAKKTYPGCEKDDVEVEIFKILLDKVIETQRECEKTLNEMITVASTLEEYRYILSIDGIGTNLAAKIIAEIGDIEEFKSREALVAYAGLDPHIYQSGDQDGKHLKISKKGNKYLRCLLFLAVGCSIRGAKDNPVNRFYQKKKQQSNPLNSKAAKTACTAKLLKIIYGICKNKTTYER

SEQ ID NO: 47111 - protein, 315 aa, unidentified
MTQTNITTAGIDTSKLKLDIAVHERTQRWQVANALPGWRALATNLAKAGVTRVGIEATGGYERGVVEHLRAAGFTVLVLQPIQVKAFGRVHLRRAKNDALDAALIAACAATLEQPRIAPDPRLAELAGYLTFLEQTEEDIARFKTRLEHIDEPRLQRIVTSDIKRLKARKAAQIRDIAKRLRAHNDLAERLDLVLSIPGIGERTALALIIRMPELGRISREEAAALAGLAPFDDDSGKYKGQRHIAGGRGRLRRSLFAAALPAAFRWNKALIALYTRLMARGKAHNAALIACARKLLIYANTVVQRGTPWTEKTA

SEQ ID NO: 47112 - protein, 381 aa, unidentified
MTTTATHNAHDTTPGRALFVAFELSEKTWKLGFTTGHGQKPRERSIAARNQTRVLQEVAQAKRRFGRPETAPVFSCYEAGREGFWLHRFLEAQGIPNHVVDSSSIEVNRRKRRAKSDALDVRKLLSMLMRYAHGERDVWRVVRVPSVEAEDQRHLHRDLETLKQERASTTTRIKGLLSSQGVRLTSVNKLPEQLEALRLWDGSPLPSGLRRRVLRVYAHHQFLSEQIAALEAERRARLQSAHDASIEKVHQLMQLRGIGINGAWLLVMEFFGWRALKPRREVGGLAGLTPTPYQSGESARAQGITKSGNRHVRWMTTELAWSWLRYQPESALSCWFRERFGGGGKRMRRIGIVAVARKLLIALWRFLETGVIPQGAELKAA

SEQ ID NO: 47113 - protein, 339 aa, unidentified
MKQVCGLDVHKDSVFVCILNENGVVFQEKYGVLTPELEQMLAKMLEYHVEEVCMESTSIYWMPVWRVLENYVSLKLVNPYFIKQLPGKKSDVKDAEWIATCLLKDLIKGSYVPDDLIQQLRQYDRRISDLNAECVRKLGKLDAALQRCNIRISNYVSTTDSKSYKEVVRLISEGTRDPAELTKVIHGRTVNRVGKDVILASLTGVISNTDIDVIRQLREEVALAEKHKDECQSKMDAICQQYFPEQLKNLQTIPGIKGRSATAIIAEVGTDMSSFEDAAHLVSWCGLKPRNEESAGKIKARSITHGNKYLRKTLIECAWADATSINSAITKSLFVGRTR

SEQ ID NO: 47114 - protein, 357 aa, unidentified
MLALGDSAPRKGADAMTFVGCDLHTRMQQVAVLDTETGEISERQLPHDGMAVEEFYAALPRPVTIGIESTGYATWFHTLIQRLGHTLLVGDAAKIRAMVVRKTKTDRRDALHLLDLLRHDRFPTVWVPDPATRDLRALLAHRMRLVRIRTMVKNGLHAIALNYRLARGSKLLRQAGLVQLHALALPPHTAQRRDQSLELLAGLTTQIRTLDDAITTAALAHPDGPRLITHPGVGALTALATIVVLGPVARFHDSKHVVSYVGLAPALNASADKHHFGHITKQGSPLLRFALGQAAAHAARMDADLKRTYFTLVHRRGRPKAKVAVARKLLVRLFIMLRDQIDYDEFCRRGRPAPVSA

SEQ ID NO: 47115 - protein, 441 aa, unidentified
MSDRLPIAESEPEWAAFAAIDWADQKHAWRLVPADSAVHEQGTLENTPEAVDLWAANLCVRFGGRPIAVCLEQSRGPLVYMLSKYAQLVLFPVHPSTAARYRQVFFPSGAKDDPRDAASLLDLLLHHRSQLRPWQPDTVETRHLQRLVEQRRLMVNEKTRQSNRLTACLKMYFPQILQWFDDVSAPVVGALLERWPSLQQLQRAHPGTLKKFFLQHNVRSQKRIEERIQSIYQAVPATADQAALQGEAAAAHGFLALLKTLGENIALLDQQIEQLVASHPDHALFASLPGAGPVMVPRLMVAFGTRRERYDTAFQMQCYSGIAPVKERSGNREWIHFRRSCPKFLRQTFQEFAFLSTRSSVWAKAYYDRQRDRQQSHPAAIRALAYKWIRIIFRCWKEGQLYDEQIYLQSLQKRRSPLGPPITAPGWKPVAGFQKFSGNPS

SEQ ID NO: 47116 - protein, 318 aa, unidentified
MSKYKHDVVLVSKGRRYHLVISNDLKGFKHLERWLKSHQVNQVHACLEATGQYGEAIAEWLYEQGHKVSVVNPARIKRYGESKLHRNKTDKADADLIAEFCLKEEPNPWEPLSPEVKHLRALIRRLQALKDNLQQEKNRLKSGESDSWVTKDLAIHIEFLEERIKATENEIQELIDQTPGLKSQHDLLKSIPGIGDLTANTLLAEIGNFSAFENAPQLAAFAGLNPKGHRSGSSVFKKTQVSKQGRSELRRCLYMPAISALKSNPVIQSLAERMTKTNHQKMEIVVAAMRKLLHLAYGVLKTQVPFDPNYGAQFDFSS

SEQ ID NO: 47117 - protein, 397 aa, unidentified
MYIVGIDIAKRKHEAAVIDGEGAVIIKPFSFTNNCSGYNRLLTMLAKAKLPLDEVSFAMEATGHYWLALFTRLQKEGFRVQVINPVQTNSIRSFYIRQAKTDPRDALLIAEVIRFGHFSESTLHPENIYELRELCRGRHAIVSMQADIKRKVVALLDQVFPEYETAFTNLFGDTSMAILQACPTPKELSEMPLEEFCHLIEVPSRKRFRTEKAQELQALARNSFGFAMAGGVFSTMIRLYAKHLDFLKQQVREMDRKIAEIMETLDTPITTITGIGPTLGAYILSEIGDISRFSSAAKLAAYAGIDPTMRQSGEYNGVRNRMSKRGSPYLRHAIWLAASSAVLHDPALKLYFQKKRDEGKPYMASVGHACRKMVSIIYAVMRDNKEYVPCIPSEISA

SEQ ID NO: 47118 - protein, 359 aa, unidentified
MQRKEISFNGQSIYVGIDVHKATWSVTVLTEHSNLSKTFSQEASARKLFDFLKKNFPDGRYLAVYEAGFSGYSTYYELKSFGIDCIIVNPADVPTKDSERKTKTDAVDSAKLARCLKNGDLTPNYIPSKEYLDDKDVVRTRSMFQKQLSGYKSRVKHLLYRNGVEYPERFERLGTHWSKAFIKWLREDVSLLSDGRMSLDLLLDQVESLRRSVLVATKAMRTLGQTARHKENLEHLLTIPGIGEVTAMTLLTELCEVGRFSNERQFTKYIGFVPNVHSSGEREGVGEMTRRGNTRLRTMLIESAWKSIAKDVTLAAAFGRYRQRMTPNEAIVRIARTLSHIAFAVVKNNTVYDPGRHLE

SEQ ID NO: 47119 - protein, 399 aa, unidentified
MKRNTKYVGLDVHQTTTVASVREEGGRVLARAVFPTEESAITEFFGGMRGAVHVALEEGTRAQWLHELLTPRVNRVVVCDKRGQSRRGNKGDRSDADGLSELLRRGGLRAVYHGDMHTTTLKELTRNYQSVVADSTRVMQRIKALYRARGIKTTGTAVYNPRHRAEWLAQLPEGGARFRAETLYTQLDVLRELHPKAKAAMLAEARKDPAWSILQTIPSLGPVRVALILATMQTPWRFRTKRNLWAYSGLAVVTRSSADYVMVEDRAVRRQRAPMTRGLNRNHNHVLKDVFKGAATSATGRAGPLQDFYLGMVARGMREELARVTLARKIAAITLRLWKRGESFDPTKLTTQASQGPDLRGNGEGGILLAAGTRIRDEGARGSLEQDVHPAGSLAEVLA

SEQ ID NO: 47120 - protein, 342 aa, unidentified
MKITTVGIDLAKNVLQVHGVNGRGKKVFNKQLRRKQVLPFFAQIPSCLIGLEACASAHHWARQLQALGHNVKLMAPQFVKPYVKTNKNDAADAEAICEAVSRPNMRFVPIKNGDQQAILSIHRARQGFVKARTAQGNQIRGLLMEYGITLPQGLSHIAKRLPAILEDVENELPEVFRQLLQRLVDHLKELDRQVQELEVQIQVWHQQNEASRKLAGIPGIGPITASALVASIGDASSFKNGRQLAAWLGLVPRQHSSGGKQILQGISKRGDTYLRTLLIHGGRSVIRVAAGKTSQTNLWLVNLIERRHKNVAAVALANKNARIVWALLVHQREYQSNFMLAA

SEQ ID NO: 47121 - protein, 337 aa, unidentified
MNTNIYDHYIAIDWAASNMAIARMTKKSNKISVVDVPADIKELQLYLGNLKGSKILAIEETSTSQWLYTELINHVDEIFICDPFRNRLLSEGPKTDKIDASKLVQLLKADLLKEVYHSTNKFLYLRRLVSGYDDLIKAGVRLKTQKYSLLRVCGKNGYEKGRVKLHSMNEEFVLNGLNRQIASFEEEKKGYEKEFRKLAQKYQEIRQQKSLPGIGDIHAVKIVARVVTPWRFANKGHYLSYAGLVKLVKVSGGRKYGNKNSRYCRQLKNVYKTGVMAAIGGNNPLNDYYDYLINEEGCQPHIARHKACRRLAVLSYGVFKSGKTYQPYARELKTVNN

SEQ ID NO: 47122 - protein, 346 aa, unidentified
MKNTIVGVDLAKKVIQVCKTINRTVRSNEEMTPDEFILFLANSKPMTVVFEACGTSSYWKQQALLYGHDAKLISAKLVASVRQSQKTDKNDALAIVQAALLPDVNFISGKSIEQQQLQSTMRLRELCSKQKTALSNQLIALLAEFNINSSNRNGGLRGAIESTLEDASNGFSHEFRKALDEAWKLYLTVAETLVTYDECLEASIETHPECKKLLKLEGVGPINAINLYIALGCAELGCFARGKDASACIGLTPLQYSSGGKSKLGSIGKHVKNTVIRSQLITGAAASVRHVIKREAKTCKEKWIQDLVDRRGIKCAAVALANKTVRTAFAMLTQGTEYRANMILTS

SEQ ID NO: 47123 - protein, 356 aa, unidentified
MHKISRLDFKGQQIYVGMDIHKKSWSISILTETLEHKTFTQPPHVEALVKYLKRNFPGGTYKLVYEAGYSGFWIHDRLQEHGVQCLVVNPADVPTKDKERRHKTDRVDCRKLARSLRSGEIGSIYVPSRPKVEDRSLIRTRHNMVKKQTRCKNQIKSLLHFYGIQIPEEVTKGHWSKRFVRWIESIRLQRTSGTIALKAHLEELNNMRNIIVDITRSIRSLANTEEYRDNVRLLRSLPGISTLTAMTLLTELYDIRRFKNLDKLCSYIGLIPDTDCSGETERKTGITKRRNAHLRGILIESSWIAVRKDPALLMTFNLLCRKMPKTNAIVRIARKLLNRIRYVLRTQQEYVPAVLQ

SEQ ID NO: 47124 - protein, 373 aa, unidentified
MIPHFWGMDIHKNYVIVAAVDHMQQVITPPTRVEMAQLTHWAQRHLQACDEAVLEAGATAWAVADLLQVHVSRVVVANPYKTKLIAEAQIKNDKVDASVLARLLAARFICDVWIPDVPVREQRALAGHRATLQKQCTRIKNRLHNLLQRRNLRCPQPSLFSPAGQHWLHTLQLPSLDRLQVRHLLTQLAVLQQELDETDRLIAQVASQDPRVPRLMQASGIGYYTAFAILAAIGQIQRFPSPDKLTAYAGLVPRQYQSGQHAFNGHITKTGSPLLRWLMVETAHVAVRWDPHWRQLYQRIATRRGSNIAAVAVARELLVVIWYLLTRQTIYYHLQPQTFHKTAAVGLPHWACSSARKLLEGVCSATSFGSRTR

SEQ ID NO: 47125 - protein, 429 aa, unidentified
MNLRPIAGIDVGKFFSEMAILSPSNEVVARMRIHHDSNADVKRAIRLLRKMEKDFASRPFVVMESTGHYHKILFHSLCKAGFEVSVTNPIQTDSIKNIGIRKVKNDKVDAHKIALLHRFQELKSTNIPNEDIECLRSLCRQYYKLNDELTVYKNRLTGIIDQVMLNFKDVFPSIFSKTAIAVLEKYPTPEHILKANKGHLVSLIRKNSRKSPEWSSAKYELLVSKAREFAPLSINNPSNVAMMGVYISMIKTLDENLAKILKAIRRLITEDMAKDTPMLSLTLELLQSIPGIGLLTAATILAEVGDFSAFSKPGKLVAYFGIDPSVMQSGEFIGTRNKMSKRGSKLLRRVLFTVALANIRTKRDKKPCNPVMMEFYKRKCQSKPKKVALGAVMRKLVCIIFAVLRDRKPFELRSPQKHAQMLAAKRKAA

SEQ ID NO: 47126 - protein, 402 aa, unidentified
MNAVGIDVSKGKSMVAIMRPFGEIVSAPFEIKHTASGINSLVELINSVEGESRIVMEHTGRYYEVLAHQLSKANLFVSAINPKLIKDFDNDSLRKVKSDKADAVKIARYTIDKWQNLKQYSVMDELRNQLKTMNRQFGFYMKHKTAMKNNLIGILDQTYPGVNTYFDSPARSDGSQKWVDFASTYWHVDCVRKMSQNAFIDHYQNWCKRKKYNFSQSKAEEIYGKAKELVPVLPKDAITKLIIKQAVDQLNSASTTVESLRTLMNETASKLPEYPVVMAMKGVGTSLGPQLIAEIGDVSRFTHKSAITAFAGVDPGVNESGSYEQKSVPTSKRGSSDLRKTLFQVMDVLIKTHPQDDPVYQFLDKKRAQGKPYYVYMTAGANKFLRIYYGRVKEYLSSLPES

SEQ ID NO: 47127 - protein, 334 aa, unidentified
MEKITTVGIDLAKSVFSLHGVDGAGRVVLRRTLRRDQLVQAVAGLPPCLIGMEACSGAHEWGRRFQELGHTVRLMAPKFVAPYRKSGKNDGNDAEAICEAVTRPNMRFVPVKSAEQQALLAMHRVRQGFVVERTATINRLRGLLTEFGVVLPLRSITVRRQAAAAAENLPELARRAIGDLLEQLRMLDERIGGYDREIEAQAKLCEPAQRLMKIRGIGPTTALAIVATVGNAREFKNGRQFAAWIGLTPSQYSTGGKPRLGHISKRGDAYLRNLLVQGARSVLNSAGRHPDRMSRWILELQPRRGYYRTLVAIANKNARIAWALLAKNESLRRA

SEQ ID NO: 47128 - protein, 416 aa, unidentified
MNRLHYELLVGIDLGQWLHQACVLDANGELLEERGFEHSVDGLSATLDWLLNLASKAERIAVAIEKPHGAVVETLLGRGIAVFAINPKQVDRFRDRHSMSGAKDDRRDAFVLADALRTDGHRFQRLQMPPPEIVALRELLRTRNQLVKNHVALSSQIRDLLARCWPHLSTLAPKEKALDSFFCELLQLFLDRPTEIGSTSIQQLVHKHHIRRVQPDFILEALKLNPLRVAPATIHATADHLRLLVMQVLLVRQHRRDADQFLERWFHGLQRTTQQPYSDAAILASFPGVGAFVLASLLSFAHDPIRLRKLEAFRCLGGIAPVTKQSGKRRQVLLRRARSQPLNNALHHWATIAVLRDPHAKDHYHRLRQRGHSHARALRGVMDRILSIAVAMLRDRTLYDPARRRSSYDGRKKVSP

SEQ ID NO: 47129 - protein, 424 aa, unidentified
MLGVGIDWAEEFHLVALGRPENGVFDVSRVEHNPRAVTALLTRIVGLEPDPAEVRVVIETSHGMLVEQLLDAGFTVVPVNPDLIARRRGPARKKDDAEDARIACLLALDRFAALRPMIPHGAVAAELRAIARDDERANRDERRLLNRLRADLIATFPAAMQIAGDDLGRPTFLRMLERWPTAQALRDVPREDIVNLARSGHHGWPDRFADQVTAALTGETFTARDYLVRAKADTIRLTAVQLLAIGAQRRVWEKRMGQLLLGSPRPRRTTTDQDNHPGQTFPGGEIYLSFPGLGDRLAARVAGEIGDHIEQFDSPNALACYAGKAPVTRRSGKSEYVVACRQACNRHLRDAVQQWAFCSLQRSGWAREFYDRHIADHHSHHAALRALGNRWLEVLWHCLTRGVRYDEAVHTGNRNRATAHPRAA

SEQ ID NO: 47130 - protein, 351 aa, unidentified
MPSQTDAVVARTIGIDPGKNTLHLIGLDEKGAIVLREKVSRGRIVARLANAPRCLIGIEAGMATHYVARELIALGHEVRQVPPAYAKPFRQGHKNDFRDAHAVAEAVQRPSTRCVPVKTDDQLDLQALHRVRSRLIGERTAVTNQIRSFLLERGIPVRQGLRFLRQQLPDILAKRIDVLSPRMIRIIEDLIGEWRRFDERIDHVTTEIEVLARSNEGCRQLMTVPGIGPIIASAMVAAIGNGTAFATGRDFAAWLGLVPKQMSTGDRTILGRITKRGNRYLRTLFMQGARVILLRPANWAQHSFGPWLTAAAQRLHHNVLATALANKLARIALTVLVQGRAYETRVISEVA

SEQ ID NO: 47131 - protein, 423 aa, unidentified
MNDPQNEFAAFVAIDWADCKHMFSLVAAGQNKKESGTFEHKPEVIGPWVAGLRERFGGRPVAVALEQSRGALIHALLGYDFLVLFPIHPTTVARFREAFKFSGAKSDPLDTEQILEILIKHLDLLKPLQPDTEQTRLLGRLVEDRRKAVNLRTMHVQAALAALKEYFPQAIEALSGNLCSRLAGNFLKKWPTLAAFQQAKAQTLKKFLIGHNIRSPKLIKKVLALAEQACPLTSDPAIVESGWRLAQMHVELIQTLNPLIQEYERRIEELFNEHPERKIFAGLPGAGPALAPRLLAFFGTDRGRFQAADNAQCFSGIAPVSKKSGKMRVALFRQACPKFARQTFHEFAGLSVVKCQWARNYYDYYKARGKKHHAILRELAFKWIRVLFACWKSRQAYDETEYMAALQKRGSLFATLHLKEAAK

SEQ ID NO: 47132 - protein, 350 aa, unidentified
MNATTVAVDLAKNVFQLAIADHSWRTVHTARLSRAQFARWFENRQVGTVILEACGSAHHWGRMLQERGIQVKLLPASYVRAYVKRNKTDAADAAALLEAARCADIVPVKVKSIEQQCLQGLHRIRSGWMATRTARINALRGLCREFGVAVPVGASAGIQRISALLGDSQLPQLLRPALQELLDEVRELEQRIATIERQLATLAEHSAPCQALLSVPGIGLLSATAMVAATGGSVSHFKSARHFASWFGLTPKEHSSGGSRHLGRISKRGDCYLRMLLTHGARSVLNAARLAQRKSRALDPLRTWALGIALRSHHNKATCALANKLARICFAVLRSLEPYAPGKLVQLSPA

SEQ ID NO: 47133 - protein, 342 aa, unidentified
MNYYAGIDVSLKCSSIAVVNANGEIVREAKVATDPMVVIEWFRSYGLQMERIGLEAGPFSQWLYAGMKEAGLAVELLETRHVRNAFKTMAVKTDRKDARGIAELVRVGWYRPVHCKSMDAQETRTMLSARKLIDQKLRDVEMSLRGLLRGFGLKVGKTTPTRFADRIKELVSGNATLQVIAESLLAVHQVLLREFKGFEKRVRTMARDSAEARLLMTTTGVGPIIALTYAAGIDDPGRFKKSKSVGSYFGLAQRKYQSGETDITGRISKAGDAEVRTALYQAAHIMLTKPVKASALKSWALRLAKRVGMSKAKVALARKLAVVMHRMLVDGKPFNPAAGAAA

SEQ ID NO: 47134 - protein, 365 aa, unidentified
MRKIAYLGMDVHSKHCVLGDMDFKGNFKGTQTFPTSEQNIMKALDAIKAKNKYLTLEEGNLAYWAAQVAAPYVTEVIPCDPKENALIYRGPRKSDKVDTRKLCRLLRLGELKRVYHPETDERAIFKASAQHYMDLRDQQIALKQKIKAMYHHWGVIDVAGEAVYSKAKRDHYFRQIKHIEIRNQVSRLYYVMDQTESMQASALKAMKQLGRKYPEIKQFKEIPGIGDILAHFFDAFIQTPHRFANKHRLWRYCRLGVTDRTSDGKPLGFKRLDRSGVAELKSLSYRAWMSALRGDNEVRRFYTTSLQHTFSRVHARLNTQRKIIATMYGMWKRGEPYNPKLFFGFASEWRCLNDTLPLTGLKCAA

SEQ ID NO: 47135 - protein, 343 aa, unidentified
MEAHTIGIDLAKNLFQVHGVDRHGQLALCKKLRRSEMAAFFAKLPPALIGMEACGGAHHWARKLAAFGHQVRLMPAEFVKPYVKSNKSDMRDAEAICEAVARPTMRFVAVKSIEQQAILSLHRAREGAVKARTAQANQIRGLLTEYGMVLPQGIVHIEKMLPSMLADMHNALPGFLIQLFQILLDNFRHLDQLAQEIENAIRRWHLANEESRRLEQIPGVGPLTATALVATIGEAKTFHNGRQFAAWLGLVPRQHSSGGRERLLGISKRGDTYLRKLLIHGGRAVVRYADRHPSQYNGWLANLLARRHKNVVAVALANKNARIAWALLAKGRVFCPDPVLVEA

SEQ ID NO: 47136 - protein, 411 aa, unidentified
MSRFEKRQRAQRAAAVAGVDAGKRKHAIAVRPRGGEDSRPVEFSTTRAGFETAVRTILENAPGARPEDILVGIEFAGNYGFTFAHFVRERGFRVVNVLGAHSRRWKEVVHNQGLKSDRKDALTITDMVAQGAFVSFPFLEPVYADLRCLVSMRERLTKLRSATIARTKDVLQVVWPEFEHHFPSFGKKTPLAILHAFPGPEAFLAAPKRRVLRVIREASRGHLGESAYEELRAAARESVALPGAQGVLAQEIRLQLELLAAYERQIAEVDRLMTERLEHAPEAPALLSIPKLGPVTAAVFLGSIGDPRAYDSSRQALKVGGLSLVVSESGMQRGKPRLSKRGRPELRRQAYLFAVRSVRRGGLFRADYERALAANPGTPKKKILVAIARKAVRLMFSLARERRLYSVEPPR

SEQ ID NO: 47137 - protein, 376 aa, unidentified
MHTSPFEFHHTQPELDAFIKYILNSKQSATILMENTGHYHYPVLKAFQEAGLPVCMVNAYQIKKFGDMDLRKAKTDKKDAVRIARYALEKSYSLVPYTSMEQKYEDLRFLARQYNQRMLTLKTNKVFLLNLLDETMPGITNILPLTTRTPETSLSVLFINRFKSYDRIKKMGKSRFLDAFEKIARKSRNRQTKTYGLAIYEAALRNITTRGENEYTLAAQDQCLELVCESQKAADSIILKMKTLAETLPEYAVLRSMAGVGNRLGPLILAEIGDIRRFHSGKALNAYAGNDAPPYQSGTFESHNRHISKRGNAALRKYCFEVMQALKLTRPQNDPVYLFLLKKEQEGKPYNVAKMAGVNKFLRIYYARAMETLKQQ

SEQ ID NO: 47138 - protein, 347 aa, unidentified
MGYFAGLDVSLEETAICIVDDAGQIVHEARAASEPEALVAFFRTAGMAMERVGLEACSLTAWLHQGLTEAGIAAICIEARQAKAAMGAMPNKTDRNDARGIAQMMRTGWYRAVHVKSPTCRSWRALLTARRMVLNKRRDVENGVRALLREAGLKVGTPSRKNFAARVGELVADDPVLAGLAQSLLSVIDVMTREVDSLTKRVLDEVRVEPTCRRLMTVQGVGPLTALAFRATIDRPNRFRRSRDVGAHLGLTPRRYQSGETDVQGRISRCGDELARTALYEAAHSLLIRSTKWSVLRAWGMNVAKRRGMARARVAVARKLAVILHRIWSDGSEFRWGKQAATPAAAA

SEQ ID NO: 47139 - protein, 417 aa, unidentified
MPPTEYVFYVGVDWGSERHQVCVLDAERRVCEERAVEHSGPGRAALAEWLGALAPGHPERIAVALEVPRGAIVDTLLSRGLHLFAVNPKQLDRFRDRHSIAGAKDDRRDAFVAAEALYTDRWAFRRLEPEHPLILQLREVTRLDQDLQQELTRLANRLRDQLLRYYPALLRLAPAANAPWLWTLLELAPTPAAGAQLPRARVVRLLQRHHIRRHTPEAVLAALRAPAVWLTPGTVEAAARHVALLLPRLQLVHAQRAQCTAEIDRLLAALSAAAPAPGPQREHRDVEILRSLPGVGRLVAAPMLAEAAHLLAARAYHGLRAHAGIAPVTKQSGKYRGVQMRYDCNHWLQQAVYHWARVSAQCDPHSRAHYTALRERGHSHPRALRGIADRLLAILVALLKTGTLSDAARLRRRELAV

SEQ ID NO: 47140 - protein, 309 aa, unidentified
MDVVVGIDVSKDRLDVHVLSSGESFAVANDDEGLDGLAARLLSLKAGIVALEATGGYEKLAAAALSGAGLAVIVINPAQVRAYANALGKRAKTDPIDAAVIAAFVAATRPQIRPLRDEQSRALAALLSRRRQIIAMITAEEQRMDPALAKEAQKSIKRLLAALRRELDSLDADLDDHIRKSPLWRVREALLTSVPGVGRVTARTLLAEMPELGSLDRRQVAALAGLAPWTRQSGKWKGKSLIGGGRATVRTVLFMATLVACRHNPVLKAFRDRLVASGKSKIVATVAAMRKLLTILNAMIRDQKSWQND

SEQ ID NO: 47141 - protein, 375 aa, unidentified
MKEKLRFLGLDVHAETIAVAIAEPDGEVRGLGTIPNRADSLRKLIKKLGPAEKLRVCYEAGPTGYVTYWQLAELGVKGEVIAPTLVPVKAGDRVKTDRRDAEKLARCYRSGDLTAVWVPDAGSGALRDLVRAREAAKQDQLRARHRLSKFLLRSGQRPPSGIRPWTRPYLIWVAQLRFPQMAQEATRIDYLHEVEHMRERVARLEQAIAEAVKLASPALQQVINDLQALRGIADISAVTIAAELGQVSRFDGARQLMGYCGAVPSEDSSGKRTRRGSITKTGNAHLRRIVIEAAWSYHRPPCIWYGLRKRQESISEEAKEIAWKAQHRLHKRYMRLAAAGKDKRKITTAVARELLGFIWAIGTRAETVARQRIAA

SEQ ID NO: 47142 - protein, 321 aa, unidentified
MKQIGVDISKKSFHIAVLTGGKQINKVFENNANGHQALQSWLLKKGVSQAESHVCMEATSTYYEALALTLADAGWRVSVVNPLQIKAFAESRLIRQKTDRADAHTIALFCAQQEPPLWQPPSPEVRELQALLARLEAVQGMRVQELNRLHEAQGSTRGSVERLLETLDEELRLLKQQIDDHIDRHPGLKQQTDLLKSIPSVGDSLSAYMTAWLPVARLDDARSAVAFVGLSPKARESGTSLRGKTVLCKMGHRRLRKLLYMPAMNAMRFNPAAKALATRLREAGKPGKLIIGAVMRKLVHWIYGVLKSGKAFDVKLALART

SEQ ID NO: 47143 - protein, 436 aa, unidentified
MLREVASLLLESSFEGRSLRLDTSSDQATALCGDLLEVTKTADPSTTPDWMNRKAPVSPAVDFGLETEAYAREQRSLMKIVGCDFHPSYRQIAVLDTETGEVEEKKLMHAGGEAEKFYRELQGPALIGMEATGNSRWFELLVEKLGHTLWIGDAAKIRASYVRKQKTDKRDAGHILKLLEEDRFPRLWLPDAQQRDMRQLLTHRHKLVGVRTRLKTELQHLALNQGVQKKRKLWNEQGRALLASLPLQGWTQQRRKDLLALLGVVEPQIEQLDKAVEQAAEADPQAVLLMSQPGVGPITALAFSVTIGDVSRFERSKQVSSYLGLIPTEHSSGSKRRLGSISKQGNVFLRSLLVEAAQSVVRHDSGFRKEYQHRCHHKQKGIAKVAAARKLAVRLYWMLKSNQPYSELVLNGGSPRHPVAAKANAVHLNGHPRISQ

SEQ ID NO: 47144 - protein, 349 aa, unidentified
MVIVGIDAHKRTHTAVVIDEAGRRLGEKTTRATTSEANLELVRWVHAFGPDRRFAVEDCRHLSRRLEADLLAAGEVLVRVPPKMMAHARDAARTYGKSDPIDALAVARAALREPNLPVARLDGPSRELRLLVDHREDLVRDRTAQVNRLRWHLHELDPSWDPAPRSLVRFKQLDALAARLHGVEGTLAWVAQDLVGRIRELTVAVNELERRISEVVSRLAPALLELAGVGSLTAAKILAEVADVRRFHSKDAFARHNGTAPLPVWSGNRVRHRLSRTGNRQLNAAIHRIAVTQMRIHDGAKAYLERRIAIGNTKTEAIRALKRKLSDVVYRRLLADAEATPVAPLGEAA

SEQ ID NO: 47145 - protein, 392 aa, unidentified
MYIVGIDIGKNHHEASIVSPEGKQIGRSLRFATTHKGADSLMSFIFKNIGNSPCVFGMEATGHYWYPIYSFLKAKGYTIYVINPIQSDSLRKMYIRQTKNDSIDSFLIAEVIRFGQFGTTSMADENILAMRQLCRYRDSVISSRTEIKLRIGTIMEQIFPEYEKQFSSLCVSTSMGILEKYLTTENIENAPIDELFEIIKDKSHNRLTKAKAISIKEAAADTFGIKIAQDAFSFQLKQLIDRMNFLDKQIEALDIEIMKYYEQFDCYLHTIPGIGIIGAATILAEIGDISRFKNSSALVAFAGIDPTVRQSGEFNSTHNHMSKRGSPYLRHAIFLAATTCSFHNSPLNAYYKKKRDQGKHHLTATGAVARKLTTVIYAVLRDSKPYEPKRFC

SEQ ID NO: 47146 - protein, 418 aa, unidentified
MSADENTRAPRRYLALDIHKHYCVVAGVDREGQILLQPVRVEHADLEEWLKKRLLSSDHVVIESTTNAWHVYDLLEPLVERAVVANPIKVKQIATARVKTDVRDTLILARLLAANLVPSVWVPPIHIRQMRQLLSQRRRLVETHTQILNRMHSVAHRHHLKHERGKRFNEKNTGWQKDGRLSQMEQFQLSLEMENKVYIEKQIERMSGVVRKLCHQKPWADDMTYLMQLPGFGVITAMTVLAAIGEIGRFETPKHLASYSGLTPGLEQSGTKYRGKGITKEGRRELRWALVEAAQMAVKSNPLLKMRFEALQRRMHRNQAIVAIARHLLEVVWYVLTRRQPYRGFTHERIAYKYLTWSWRMDEASRDGLTRQQFARYYLMKLGIGHDLTRIALDPKHPRRLASETEVLALRPELKQIE

SEQ ID NO: 47147 - protein, 349 aa, unidentified
MVTLGIDAHKRTHTVVVVDEAGRELATKTVVATTSSDHLGLVRWAGQFGPERGWAVEDCRHLSRRLEADLLAAGEQIVRVPPKLMAHARDAARTYGKSDPIDALAVARAALRHPDLPTARLDGPDRELRLLVDHRDDLVGERTRAINRLRWHLHELDPTWDPQPRSLIRYRTLDAAAGRLDGFDTMVARIAGEIVAQVRDLTVRERALAREITTRVTVVAPTLLGLPGVGALSAAKIVGEVADVRRFKSKDAFARHNGTAPLPVWSSNHERHRLSRTGNRQLNAAIHRIAITQARCHPQAITYLERRAAMHNTPTEARRALKRRLSDVVYRALLADAQAPSTACLGKAA

SEQ ID NO: 47148 - protein, 366 aa, unidentified
MRDYTGKKVYLGIDVHKKTYAVTAICEGALAKKDTLPAEPIGLIHYCKKYFPGAQIESAYETGFCGFSLHRQLEAVGINNKIVHAAGIEIAAGDKVKTDKKDSLKIATHLSLGRLKGIHVPSKEKEDRRALTRVRETFVRHRRRFACQLKAILFQQGLIPHDHTKVVSIKWIESLATLPMSEEIRYVVNEYASMWLHLTAKIKELEQQISIQAKNDESLEVVYRSVPGIGATSARVLANELGDTLQFNNERQLFSYVGLTPSEHSSGEHIRQGHITKQGKPIVRKILVQAAWKAIGKDPALGAVYDRISHKSGGKRAIVAVARRLIGRIRSCFRLGTLYVIGVGGGVCDPKIPDIGDVKETTAVTL

SEQ ID NO: 47149 - protein, 384 aa, unidentified
MHKHNIVFIGFDTHKTFTEVAHIEDFYGAKPVHHGKIKTTKAAITKLARQYQSKYPQATLHFVYEAGPCGYWIYRLLTSLGHCCYVVAPSLIPKKSGDKVKTDKRDALKLAKLLKSEDLTPIYVPEPEDEAIRDLSRARETAMKDLKDAKYQLKGLFLRNNISCKVNDNWSNQHLRWLTELVLPHPCQQIVLQEMIQTITERIKRVERLVNELTHQVKQWRYYPVVQALQAMRGIRFLVAIGTIAELGDLRRFDHPRKLMAYLGLVPKENSSGDNRKQGALTKCGNTRARRLLIEGAQTYKYKANISTEIQKRQEGLPKTVTDIAWQAQLRLCRRYQRLMQRGKHRNVVVAAIAREMIAFIWAISRDVVVAPINPKARLSRVPA

SEQ ID NO: 47150 - protein, 326 aa, unidentified
MAIIGIDVSKEKLDCFWLKDAERRTGRAKVFKNTPGEFPALMNWMVAQTGEPPAQLHFVMEATGIYHEALALHLHAAGSKVSVVNPAWVRDYAKSLGVRTKTDKQDSVVLARLGAREPLRRWQPEPVEIRILKALLTRYEAVKQDHQRELNRLEKAEITQVSEVVLESIHTLLAELEKERVRLEKCIRQHIDQNPNLLADRRLLESIPGVGPVVSALMLAVLRSRSFNSASQCAAFLGLVPVQHESGSSVCGPARLSKAGDATVRAKLYMAAVVAIQHNPDIKRHYQRLLKNGKSKMAALGAAMRKLVHICFGVLKHQTAYQARIA

SEQ ID NO: 47151 - protein, 332 aa, unidentified
MTGAARAVSKAALDWAVIVSNKLLFHHQSNNDKAGIEGFIKQLKVYCPNANFENSLYCMEHTGIYNNHLLNFLHSKQANIWLEHPIHIKDSLGMIRGKNDKVDAQRIATYAYKNRDEVRLWVPKRDVIQKLDRLTALRNRLIKVRKMMQSPLTDCKDFISKKDLNEAKKSCENTLKSLDKDIKKVNQDIQSTIQNDPYLKELYEFIESVKGVGPAIATEILIVTNEFKTINDPKKFACHAGVVPFSYSSGQYKGKSKTSNKANKQLKALLHNGAMSAIQHSPEIRQYYLRKTAEGKNEMLVVNNVCNKIIHRVFSCVHRKEKYKDFYTPSVA

SEQ ID NO: 47152 - protein, 429 aa, unidentified
MNLIPVAGIDVGKRFSEMAVLSPSNEVFARIRINHDSFKNFEKAFDLLKKAEKEFAAKPVVVMESTGHYHKILFHALNNVGYEVSVINPIQSDSIKNIGIRKVKNDKVDARKLALLYRFEQLKGTKIPNEDIDCLRSLCRHYYKLSDQLTAYKNKLLGIVDQLFLSFTDVFEDVTSVTALAILDKYPTPEDILNADRDELITLIKKSSRKNLKWATAKYELLCSKARDFKPLSINSIANTAMLKANLSMIKTLSQLLENALDAIHELIEQDSQKDMPLLSLTIDILCSIPGIGILTAVTIIAEIGDFSAFSKPDKLVAYFGIDPSVKQSGQFEGTKNKMSKRGSRLLRRVLFTTALANIRKKSNGKEHNPVLYEYYRKKCVSKPKKVALVAVMHKLVLIIFAVVRDRKPFVLRKPEEHAEMLKTKNSAA

SEQ ID NO: 47153 - protein, 421 aa, unidentified
MTRERARSMDQRAFGRSCTAEAAGEAALAAHGFHATRLNASVRTVPRAHLLVWTAPRRHQACQNEVVTDLRQRGPSVEHISRIGMDTSKHIFQLHGVNAAEEPVLRKKLRRKEMVTFFEKLAPTVIAIEACAASHHWARLLQSLGHSVKLIAPQLVKPYVKRGKNDAADAEALCEATSRPTMRFVPVKTAEQQAALMLVGVRDRLIRNRTQLVNAIRGHAAEFGVTAAKGKAHLDALLERIQADESLPALARELFVAQAKQYAQLRAQIAEVDARLMSWHRADECSRRLAKIPGVGPIGAVLLKMKTPEPELFRSVRQFAAWIGLTPKDHSTAGKVRLGVITRAGDEGLRSVLVVGATAVIQHVRRGGRSSPWLTELLKRKSPKLVAVAQANKMARIAWKLMVTGENYAAKSAPAALAGAA

SEQ ID NO: 47154 - protein, 345 aa, unidentified
MQPMYYIGLDVHKRIISYCVKDGSGQIYAEGSIPATRFDLDRWMKALPRPWTAAMEATMFTGWIYDHLKPHAAVLKVAHPLMLRAIAAAKKKNDRIDANKICDCLRCDFLPECYIASTAIRERRRTLRYRNLLVRQMVQMKIKISSLLMEAGVNYNKQRLHQAGYFRELLATNPHIDEGLRALLRQCRETVVRLGKTESALVRSLRQDRMLVERVERLMSIPAIGPITALTWALEIGEVQRFSSIKKAVSYCGLCGAEKSTGNTVQRTPLSKQRNKHLQTTLIEAAKMAPRYSPTLALLYDRERQKGNANRATLAVARKLVAYLIAVDRGQTHFLVLDHEVRTAA

SEQ ID NO: 47155 - protein, 352 aa, unidentified
MKRDKCMGLDVHQATTVVSVIDAEGKIVWETIVVTETGAIRRLIESISGPIHVTFEETTQAAEWLDDLLQGLVAEVVVCDPRRNKLLVEGSKGDKADARKLADLLRTGMVGSVWHARQTTRGLKELVRAYETFVVDTSRTMLRIKALYRSRGIATKGSAVYQKRERDHWLKQLTEVGMQQRAAWLYEQLDQVRELRKRAKAAVLNEGKRHKAVQLLRTIPQVGPIRAAQIVASAGTPHRFRTKRQFWSYSGLAVVTHTSAEYEMRDGRVVRRNKPVATRGLNTNCNRRLKSVFISAATSGGASWQPYLNHLQEKGMKADMARLTLARKIAALALAIWKKGESLDPKKLNWTK

SEQ ID NO: 47156 - protein, 391 aa, unidentified
MIYVGIDVAKDKHDCFIINSDGEVLFKAFSIANNRNGFNDLYQKIESVMEDVTKVKVGLEATGHYSYNLLGYLIDKGLPTYVINPLHTNLYRKSLSLRQTKTDKVDARTIASMLMSDVNLKSYSDTSYHNEELKSLTRYRFDKVKQRAKLKSSVSRLVCILFPELEKLVPTLHMASVYTMLSEFPDAKQVANAHLTRLTNLLSESSKGRYGKETAITFRNATRTSIGSNMPAKSLELKHTIKLIQELTSEIDEIENEIKLIMDEINSPILSIPGINYRMGAMIIAEIGDFNRFDSPDKILAYAGFSPSTYQSGQLDGAYSHMEKRGSRYLRYALYNAAKYVCNWDPTFAEYLAKKRAEGKHYNVAISHAVKKLIRVIYHLEKTNQQYIKAV

SEQ ID NO: 47157 - protein, 326 aa, unidentified
MQGKVLSEQATRMQSSAGIDVGKSWLDAHILPAGQRRRVANNPEGIRQLKRWLLGFDCTIVVLEATGKWHRPLYRSLHADGLPVAVSDPYRVRMFAKAHGVAAKTDRLDARVLAQFGAVMNPAIRPPAPEAFEELGELLAARRSAVDTQTALKNQAGITTSKFLVRQIKRRLSALAKDIDALEGEIQRHIAAEEPLAKRYAILISIPSFGFVVAATLLASLAELGICSAKQIGMLAGLAPIADDSGQRQGIRFIGRGRSAVRNVLYLAALAATRFNPDMKAFYRRLIANGKPPKLAIIAVARKLAVLANTLITEGRNWLPQHPKHA

SEQ ID NO: 47158 - protein, 340 aa, unidentified
MKNGLKLLGIDIGKNSFHLIGHDAGGHQVLRKCFNRNRLLQFAAQIEPCTIAMESCGGSHWLARKLASLGHRVKLIAPQHVKPYVTGNKNDFIDAEAICEAASRPSTHYVAVKTVEQQVLSVQHRLRQSLVCHRTEAINRVHGFLLEFGIALPATKAAIAKVPELIDDSRSDLPLQFKRVMEHLLEDIHRLDTEIKACDAQIKQQLAQDDAGTRLMTIPGIGPITASAFVADLGDASNFRASRDLSAFLGLVPRQFSTGGRPVLLGISKRGDRHLRTLLVQGSRALMIRIERRDDALGQWVRDLLARKHPNKVACALANKLARIVWAVLRRGSTYNASMI

SEQ ID NO: 47159 - protein, 518 aa, unidentified
MKRRATSSGKAKRISTGKHPARIRKINKHAGAVDVGAEEHYAAVPPESVPKGQPAVRSFSAFTTGIDALVEWFKECGVTTVAMESTGIYWIPLFQKLEAAGIKVVLVNARYARNVPGRKTDVQDSQWLQELHSCGLLEGSFRPADDICRLRSLMRHRENIIESAAKEIQHMQKAFQQMNLHLHHVLSDINGVTGMRIIDAILSGQRDPKELVKLRERGTRYKSTQEQMEAALTGDYRPEHVFVLKQSVETYRFHQAQLDDCDNEIEAVVKDLVDKCDEKPVDSATPRDDEDTNGTDGSPSEVNEASSNEDSKMETGSSQPEAQEAGQSNTDAKRKQPRRKQAKGNAPTIDFHDYLVEICGVDLTAISGIGIVTVLILISEIGVDMSRWRNAKAFCSWLGLCPGNKISGGKVLDSRTRKVVSRPARALRMSVQSLANSDTCLGHFYRRKKAHLGPGKATTATARKLACVVYHMLKKKSAYQPMDPIEYARKIEKHRFSKLQKQATELGYQLVEVQAQAA

SEQ ID NO: 47160 - protein, 339 aa, unidentified
MENFVGVDLHKKVSQLATLREPKPASQVRFPNHTVTVEKVLKKLPQGSKIALEATGSWWWFVDLAQRTGHEVVMSHPKQTKAIASARLKSDKVDALMLAKLLKADLLPTVWIPPAAQRYVRELLTHRARLVRQRTSVINELHALYAKRNIDAGMIFHRVRPPAFRAEDLSGYGPRIVEEDVALLGFLNRQVQGLDKELKAIAEKDLESKRLMTIPGVGPVNAVAGSCWIGTIERFSNSKKLSSYFGLAPRVRQSGERERHGHITKEGNRMVRSLLIQAALWHIRRGPMSSRRHYLGVCKRRGKPIARVAAANKLLGIIFQMMKEKIDYEEFLRRGGNAQ

SEQ ID NO: 47161 - protein, 454 aa, unidentified
MAPRHQKTKQKVPAPLPTLHPQAAGIDIGAREIWVAVPPGSDPKPVRGFDTFTDDLLKLRDWLVQCGVRTVAMESTGVYWIPLFQILEAAGLEVCLVNARHCKNLPGRKTDIQDCQWLQYLHAVGLLRGSFRPLEHVCAVRTILRHRNRLVRCAADQVRLMHKALTQMNVQLQHVISDLVGVTGEAIVQAILAGERDPLKLAALKDHRIKASRDTIARSLRGDWRAEHLFTLSQSYQTWQHYQKQLTTCDEHIEQQLAHWNARVDVKAHPLPAPKTTHRTAQRNEPRFDARTECYRVLGVDLTAVPAFQTPTVLVLLTELGPDFADKFPTAKHLSSWLGVCPDNRITGGKIMSSATRDVKSRVAEALRLAAQSLWHAQNYFGELYRRWKAKLGTPKAITAMAHKLARILWHLLKYRQPFNPDVFRKEEEKLRRKKLARLQNTAAALGYRLIESQ

SEQ ID NO: 47162 - protein, 347 aa, unidentified
MEFFVGIDVSLDSSSICIVDERGVIIKEGKCPSEPEAIARFIRHKGRRVEHVGLETGGLSQWLHAGLTREGFRVTVMEARHVRASLATMRVKTDRNDTRGIAQLVRLGWFKAVHVKTPTAQETRALLGARQFLVDKVTGVENSMRAALRNFGLKMGPVTRSKWAARARELAAGNQALEIVVEALLRVRDALLEELRALDRKLLETARADPVVRTLMTAPGVGAIVALTFRSAVDDPDRFPRARDVGPWLGLTPSRYQSGQIDRMGRTTQAGDAGLRAALYEAAATLLGRVTKWSALKAWGVRLARRSGTKKARVAVARKLAVVLLSMWKADEPFRWSTRTGEEAAMA

SEQ ID NO: 47163 - protein, 445 aa, unidentified
MARKTKKQRLRIVHPHCAGIDIGSREHWVAVDPEQDDTPVRRFTTFSDDLYRLADWLQSLQVQVVAMEATGVYWIPLYEILDARGFQVYLVNSRATRQVSGRKSDVLDCQWIWQLMSHGLLTGAFRPGDAVCAMRAFVRQRAGKVHEQSRCIAHMQKALTQMNVQLDNVVGDLMGKTGAAILRRIVAGERDPHQLAKLRDGRVRADEETVARSLHGNWREEHLFALAQALAHYDFLTQQLVACDQAISQALTALPTLSTEPAPEPHKPFRKAHRTTAQQKQLHQALHAVMGVDLCAIPTIGIDTALVLASEIGPDLSRFPTQGHFCSWLGLAPPTHISGGKPLPGRKPKTFNRASQALRQAASNARRSDSFIGACHRARLARMDSAKAIKATAHQLARLIYSMLTNGQAYVEQGVVAFEARSKDRQLRSLQRKAHKLGLALVEAA

SEQ ID NO: 47164 - protein, 364 aa, unidentified
MAEQYVGIDLHRRRLVVVRMTGEGQVLETVRIDNDPVALSLELAKAGPDPEVVLEATYGWYWAADLLQACGATVHLAHPLGVKMFGYQRVKTDARDSTNLAELLRMGRLPEAWLAPPQVRELRELVRYRAKLVALRSGLKAQVHAVLAKQGVRVPMSDLFGVAGSRLLEQLRLERAYALGVASLRRLLAAYDQEIAMLGREVGQALAGDVGYLAIQAIPGVGPVLAAIFVAEIGDVDRFASAPRLCSWAGLTPRHRESDTTVRRGPSPNRAPGWCAGPRSRPPSGYPEQASRPPTSTASPTGAARASAASRPPASCSRWSTTACATARYAAWPRRPRRRGERLGRSPARARVCHDPRIAAWSPA

SEQ ID NO: 47165 - protein, 416 aa, unidentified
MKSTMITAVGIDISKNKSTVAVRRPGGEIVIRPFEVRHTSSDLKRLTAKLKQLGGDIRVVMEHTGNYWRPVALTLKKAGFFVSVVNAMLIHDFSDNSIRKLKTDRADALKIANYALTFWDELPPFNDEEEIRLLLKTQSRMCERITTTVTALRNGLIDLTDQTFAGINQAFDRAAKSAEGHEKWVDFFQHYWHRDCVCKFSLEAFTESYRRWCRQKNYKFRTDTAHKVYELAKECVATLPKCESTKVLITQACKSLNAVCEAKLASQHEMQRLASLLPEYDIVMGMEGAGPITGPALMAEIGDVRRFKNKKALVAFAGVDAPPFQSGTFEAKSRHVSKRGSPHLRRTLFIISSVILQLSHEDNPVFCFMDKKRSEGKHFYVYMVAGAAKFLRIYYATVTGHFKASKYINSLPAIAG

SEQ ID NO: 47166 - protein, 401 aa, unidentified
MPELWAGIDAGKAEHHCTVIDTGGAKILSRRVPNGEPELLDLVRDVLKLAEDSPVTWAVDLNAGGAALLIALLLGHGQRLLYLPGRTVHHASASYRGEGKTDAKDAFIIADQARMRRDLQPMHQGDEIAVDLRILTARRYDLTSDRTRTINRLCAQMLEYFPALERAFDYATSKAALTLLTGYQSPAALRRIGQARLATWLANRKVRSARTVASAAVEAAHAQHTAVPGERTAAAVVQTLAKELLALGEEIERTDAAIEARFREHRHAEAITSMPGIGTLLGAEFIACTGGDLEAFGSAGRLAGVAGLAPVPKDSGRISGNVRRPRRYHRRRLRVFYLSAQVAARCCPVSRAFYDRKRAEGKTHKQAVLALARRRLDVLWALIRDQRTFTPEPPQRDLTTA

SEQ ID NO: 47167 - protein, 322 aa, unidentified
MIIIGCDFHTRYQQIAMMDTETGELVERRLEHENGEARAFYASLPKPVVVGMEATGYAQWFERMLAEFGDELWIGHASEIRAGVVRKQKTDARDALHLLHLLLEKRFPRIWIPSPAERDTRQLLRHRHKLVCFRVSVKNQLHALAMSQGVCRKKRLFTARGREVLEKLSLGPWARRRCQELLGMLDQLNTVIDELDRAVQQQAESHAEAARLMRHPGVGPVTALAFVLTLGPVTRFRRSKHVVSYLGLNPKERSSGGKQRTSTISKQGNTMMRWLLVEAAQTAARYDPELLRTFLAVAQSLSFTQAAASLLGPSAAFPVVLW

SEQ ID NO: 47168 - protein, 401 aa, unidentified
MTRLWAGLDAGKTHHYCVVIDEDGTRLLSRKVANVEDEILGLLADVTALADDGEVVWETDLNQGGAALLIAVLAANGQGLLYIPGRTVHHAARTYRGDGKTDAKDAGIIADQARMRRDLTPVRGADEAAVELRMLASHRADLVADRTRAINRMRATLLEYFPGLEAAFDYAQRKAAVLLLTEYQIPEQLRRAGVTRVTARLRKAGARLPEQVAQVAVDAAHAQHTVVPGQDAAAMIVRRLAGEVLRLREEVEEVESQLEARFRRHRHAESLLSMPGFGPLLAAEFIAYTGGTLAVFESADRLAGIAGVAPVPRDSGRVSGNLHRPKRYSRPLLRTCYLSAEAAARSHPESRVYYDRKRREGKNHKQAVLTLARRRINVIWALLRDDTTFHQQSPASTPIAA

SEQ ID NO: 47169 - protein, 324 aa, unidentified
MNPVPTLGADMALRTFTAALYFDARRFLKKEFSNNPAGFRALLVWLRQHFVTRLRVGIESTNVYGEALAEALHAAGCQVYVLNPHRVACYARCRGQRNKTDPADAVTVAAFVAAHEDLTLWQPLSVEQKSLRSLTRTRYQLVQSAGVLANQLRTASGPGRLHLEAAHRALLHQLRQIQRDIAAFIRTSPQLHEAVQRLMTCKGIALITAATVMAELPPITQDTDPRAICTWAGLTPRRRQSGLTELPAHIGRAGNAYLRHALYMPALVAKRWNPCLATFAARLKANGKSTPAILGAISHKMLRILVGMLRSKANFDPNWSPQKT

SEQ ID NO: 47170 - protein, 409 aa, unidentified
MLYCGIDWAWEELTLMVLDEKGNSIKEDFKIQNSLDGFFFALSTIRQLCGEQEIIFGIETSNHRIVEFLLSYGYKLYLINPISMDKFRKRYKTSGVKSDCLDAFVIANVLRTDLSTLKIITPKDELTEELGIVLRDRESLVELKTRLTNQLRASLREYFPQALKLFSDISCGGSLEFLEAFPTHGEALKVTKKRIESVLRRSNSYSHDKVQEIYEALREQQFPPSKAVIRAKRGLTLALVSQIKPLIKQIEAYDKRINSLLEQHPDSQLFLSLPGVGNTLAAGMIALIGDERARFHSPRQIQALGGTAPITKSSGNYSHTQFRFSCNKDLRNTLSQFAFTSITKSIWARSYYNKKRREGKTKSHALRCLANAWVKVIFAIWRDNSLYDENLHLASVSRHLINQDSLPLA

SEQ ID NO: 47171 - protein, 365 aa, unidentified
MPTTTKFTDFSGQSFYVGIDVHKKSWTVTVRALNMELSHFSQAPDAIQLAHYLHKRFPGGRFFSAYEAGFCGTSHHDALCSAGIDNIIIHPADLPESDKEKKNKTDLHDSRAVAKYLESGVLTGIYVMPVDQQEQRSLYRCRQATVRSVTCCTNRLRSLLDYYGVKLPDNLRDKEYISKYFLDWLGKLQLSTDQGTETLHHYLEDLQYHRKQLLLVTRKLKKEFAEHYQQRYTCLLSVPGIGPVTAIALLAETGDLSRFKNPDEFCSYLGLIPSERSSGERVYSSHIQPRCNTHLRPLLIEAAWTAIRRCPVFLTYYRKHAGKNNKKAIVKVARKLALTAKAVALKKEVYQADYYIYQMSATAIG

SEQ ID NO: 47172 - protein, 313 aa, unidentified
MAEVSPVAGIDCSAERLDVHIYPLEQAFSVANDELGWRELRRRLDQAQVRVVGLEATGGLERGVTRYLVGKGCEVRVLNPARVRQFAKAAGRLAKNDSIDAQMIARFLVAVPTRPWVCDPQREKLAQLVAARAQLLDHLTAEQNQARWHDDPVLRRIDKRRQSSLQADIQTLDRRIAELIAADPQMAAKFDILRSMKGVGPILAATLMAFLPELGQLSRKQIAALAGVAPFDDQSGKRQGVRYIQGGRPVVRAPLYMAALTAARYNPVLNAFHQKLRQAGKKPKVAIVAVMRRMLTILNALLRDRVLWENRLA

SEQ ID NO: 47173 - protein, 418 aa, unidentified
MHIRKKGVFHYGREGPIITVDVSKGSCHYQPFIENGHPMRKPKQLSATNDGFQKLGQTIKDLEAKTEREDIPVIFEATGVYHRPLQKYLEDHKIRYYIISPLLSATYRKTDLHSNKTDALDCAHIAKAYYCEKELRQYQTQPQEYKRLYQLSRLYESELVHLRKRKVSLRSMLDIIYPRIDRTFKGNQNLYDPILMEILKRYPHPSLLLSHREDTIVKTVRHRTGHLKGYTERIVHKIYEKAKECYSGCEINDIEVVKLPSLIENVQEQKKKCDSLLKEMIEIARTCPYFASVVSIVGIGENLAARIIAELGDVNRFDNRAAIVAYAGLNPKIQQSGDIDGLYLKISKKGNKHLRCLLYLGAQCNYRLRKEDPLYEFTKKKRQQTQFPLSSKAAYTASAHKLLVIIYSLCKNGTLYHS

SEQ ID NO: 47174 - protein, 431 aa, unidentified
MTEQEQQVVANQAAEPVFAAFVAIDWADKKHYWSLQVANSGKIERGCLENSPEAVEVWVAELSQRFEQRPIAVALEQRRGALAVMLSKYGQLHLYPVHPLTLSKYREAWYPSRSKDDIKDADLLLEIVTQHRERLRRLDPDTEEMRLLQFQVENRRKLIDERTALSNRMTDSLKIYFPQLLQWFDDVTAPVAANLLNKWPTLEALQKAKPSSLEKFFRENHCKTEKIPERLQQIKSAIPATYDAAVISGMVPMVQVWANQIAVLCKAIRELEIRIERNAKSQADWAIFDSLPGAGDVMAPRLLAAMGTRRERFEAADQLQCFTGIAPVKEASGKTEWVHMRWACPKFLRQTFHEWAACSIPFCGWAKGYYDQQKAKGNSHHTAVRALAFKWMRILYACWRDRQPYQEEVYLASLAKRRISIPALAKAVKMP

SEQ ID NO: 47175 - protein, 355 aa, unidentified
MNQEKYIGMDVHQATISVAVMDSSGKLIMECILETKAATILEFIDGLRGTLSVTFEEGTSAAWLHDLLKPHVSHLVVCDPRRNALLKDGSKSDRIDARKLAELLHGNKLHAVYHGEHGLRTLKELGRSYLTITKDLTRVMSRIKALYRSWAIPCSGATVYAPRHRAEWLAKILEPGVRLRAERLYQQLDLLQPVRQEARRDLLAESHKHHAVKLLRQIPSIGPIRAALLVALLQTPHRFRTKRQLWAYSGFAVEIHDSGEYRYVRGKLQRNRERITVRGLNHNHNHDLKNLFKGAAQSASTRPGPLCDFYVALVEKGMRPTMARLTLARKMAAITLIIWKKGVDFDAKQLNRQAA

SEQ ID NO: 47176 - protein, 330 aa, unidentified
MKQWEFTLGVDVSKNTLDISCSELSEHIKIKNGTEGFVLFLKWCRDFKIDLQRSFLVMEYTGGYEYKLLQFCEAQKILYTRIPGLAIKNSLGIARGKNDKVDSARIAQYGEEKHKSLKASKPLNAAIASLKELLSFRKRLVRENAGYQASIKEREHMYDVNKKDIVVKTLQQKQKANIKSIEAVEVEMMKIVAKDEKIHTNYKLITSIRGIGKVNGLMTIAYTENFTSFDNPRSYAVYVGVVPFDHSSGTSIKGRKRVSHIANKELKQELNQAARSAMQWDKELNTYGQRKLQTKCYKIVLNNIKFKLILRMFAVVKKGEMYVDNYNKAA

SEQ ID NO: 47177 - protein, 341 aa, unidentified
MKDSITVVGLDVHKNSIQIVTADTDGAMEVRPFGRIGGTMDALDRAVRKLVSRGSTLRFVYEAGPCGYEIYRHLTGKGFSCKVVAPSKTPKKSGDRIKNDRRDAETLARLERAGELTAIYVPREEDEAMRDLTRAREDAVKALKTARHQLNAFLLRYGQRYPGKASWTPSHMRWLSDIALPHPSQQIVLQEYINTVTVGTERTTRLTDQIAKLLPEWRMFPVVKALQALRGVAPIVAATTIAEIGDMSRFETPRQLMAYLGLVPSEDSSGESTHRGSITKTGNGHVRRALIEAAHAYGFPARVSRHLLKRQEGLPQPVLAIAWKAQVRLCGRFAGLWQGGS

SEQ ID NO: 47178 - protein, 322 aa, unidentified
MKKSKNYVGIDISKLSFDVAICNFESKYKYFKFANNEGGFVSFLKHLDTSESICVMEASGPYYLKLATFLSEREIAVCVVNPLIIRRFSQMRMSRTKTDKKDAMLIAEYGKTEKPNLWQPEEDYVLELKQMQAYLEQLNKNRTGFIVQKEAFIQNPIKSETIEKSITTVLETIEQEIKQIENRMELIIKTHHQEMFNQLKSIPGMGAKTSLFLIVISGGFSKFDNHKQLASYVGISPRIFESGTSVKGRSKICKMGMSKVRAMLYVCAWSAKRYNKSCKDLYDRLVEKGKPKKLALIAVVNKLLKQAFAIATKKEYYSLKIN

SEQ ID NO: 47179 - protein, 409 aa, unidentified
MRIISKRCLGLDLHKKQITAHLRVQRRSNQLPKGEDLQFGTMPDELERLRQWIIDQKVEDVVMESTSVYWMHLYELIEDVTRALVVNASHVKKVPGRKTDVGDAQWLAELGAHGLLRPSFVPPKEIRALRSVARYRTRCVAMQTAIRNRTIKLLEMAGIKLSSVVSDCFGVTGRAILDALTKDKPVDVVKLAKMSLRKKTDELQQCLGNGLLSALQRRLLKMHLDAYDAIDAQIARSELELTTLAEPYSKAIAALDAIPGINQLGAITLIAETGVDMKAYRSHAQLTALAGLAPGNAISADKRRRISVRKGNHHLKRICVQIAWAASRKKGSFLRVRFLRLQNRIGRNKAVVALARQMLVLVYHVLSGKPYTDLGATFYDERDKARAVDRYAQKLAALGYIVQLVKKST

SEQ ID NO: 47180 - protein, 315 aa, unidentified
MPSARIYVGVDVGKDWLDVAQRPEEATWRVSNDDGGVAALVERLVQLRPALIVLEATGGIEMPLVGALVGAHLPTVVVNPRQARQFARATGRLAKTDVIDAQVLAQFGEAVKPEIRSLPDAATQQLSALLLRRRQLVDMLTAEKNRLRTAAPSVRPDIQGHIRWLERRLSELDGQLAQTIRSSPSWRERDNLLKSTPGVGPVLSVTLLAELPELGTLDRKEIAALVGVAPLNWDSGHFRGKRSVWGGRSKVRAALYMAALVAARHNPVIQAFYQRLVAAGKPKKVALTACMRKLLTILNAMIRHQTPWSLDHHAS

SEQ ID NO: 47181 - protein, 450 aa, unidentified
MNLYIGVDVGKEFNYASFLNEKGLEINKRFKFKNNYLGFLKLKDNIDKLTYDYNFNYNDILIGFESTGHYWINVDWFLTEKLNIKTVMVRNDAVRHTRALNSQGKGKNDSLDSRTIAECLKNGYYFDVQGRKEDYIVLRRLTRERSELEKEIARYKNRFRAWLDVNNPIFLENFSNVFSAGALALLKVYPSPLDIIKDSYLEVREKLREVGYSRTNKTLKIYYEEVETYKNVINGISYADRLEISEYIEALEMYINKKENLDERIEALMNFLEGKVYTSLSEIKGMPKAQVASLISEIGNINNFKSARHLLSYAGLNLQGEGSGKNKGHSWISKTGNRKIRKELYVITFNLVRHNDYFRGLYCYYKSYKRPNEKSSKEMLIALMCKLLRVVYGMLKYNVEFNLNEMLKNYDFRNINKEKFIDEFLGNSEKKQKIIPQEIEDIFLNNRKSN

SEQ ID NO: 47182 - protein, 363 aa, unidentified
MLYAGLDLSRKRLDVCLLDEQGARVAVTAAPPDADGLRGLAERLAGHGEPIYAALESMNGARFVRDELAQLGWEVALADAQKVKGLAPLAAKTDRIDAYVLAELARRDLVPAIWLPSPGVRAERERARFRLHLVRHRAALKARIHASLIAHGHPCPVADLFGTRGRALLDSFALPEAWRASTAASLRLIEHLDDEIGACEAELRRLGADHRYVPLLMSTPGIAWILAYTIASEIGEIERFATPKKLVGYTGLCPRVYQSGASDRRGPLAKNGLWVPALGLDRGRHARRPPPRLRRALRGHQAPPRPPARRQGGARRGGAQARRGDLVHAHPLRDVCSGRSHCRSGRVDDPLLRWTARASSHPT

SEQ ID NO: 47183 - protein, 416 aa, unidentified
MLFIGDDWAGDHHDVEIEDQDGHRLARARLPEGLEGITGLHVLVAQHAAAVWADLPPDQVCGQVIVGIETDRGPWVTALCAAGYQVFAINPLSAARYRQRHSTSGAKSDAGDAHVLAEIVRLDRDHHRVVAGDSDLAEAVKLLARAHQTAVWERTRQVLRMRSTLLEYFPAAVQAFEDLAAPDARSVLGRAPDPDRAAKLTRGQLVAALRTAGRHHVEAKAGALLTVLRAPALRQPATLQGAYAAVVLGQVGIITALNEQIAGLHEVMAEHFGRHPDADIYLSQPGFAAVLAARTLGEFGDDKDRFASSRARKNYSGQSPITRASGKKSVVLARYATNRRLGAALHLQAFAALGASPGARAYYDALRRRDIGHHAALRQLANRLVGILHGCLKAGAVYDENIAWQHHQITTGTIAA

SEQ ID NO: 47184 - protein, 431 aa, unidentified
MKNRTNEKLEAITPGTLVVGVDVAKSLQWARFVDYRGMEIGKALSFQNNRQGFEAIVARIVRTCNMKVLREPVNRVVIGMEPTGHYWKPLANYLMKASYRVVGVNPYHTKKSKELDDNSQTKSDKKDALTIARLVKDGRYFDPYLPQEVYGELRGLTNARFSILKRNSAVKNTITAILDEYFPEIWTVFKKPLKGKASRQILRCCPFPALILELGEAGVLTEVRKAVKRTVGLKKVRQLIGAAETSIGVEYGLEAAKMRLGWLLDELELIEKQLAEVERAMGKMLHATGYADQILGIKGIGVVTAASFLGEVGDPLRFHDARQIANYAGYNLVEDSSGKSKSGTCISKRGRKQLRSVLYQMAFTMVGKNTEMKALYKHLTTRKSNPLKKKQALVVISKKIITVIYSLLKKKEAYKPELVLGTVRKELMAAA

SEQ ID NO: 47185 - protein, 345 aa, unidentified
MNHYAGLDVSVKETSVCIVDEAGDICREVKVASHPEDLAQLLKDPAWRFARVGLEAGPLSQWLFSGLVEAGLPAICIETRHTKAFLKAQVNKSDRNDARGIAQMMRVNLFRPVHVKTLASQKHRALLTARNLLQEKAHSIENDIRGLLRNFGLKVGAVGAVKFDERIRELVEDMPELADIMGPLLTSRKQLRGAFMTLHRKLLSIVRDHAVCRRLMTIPGVGPVVSLAFSSTIDVPARFKKSKAVGPALGLTPVLNQSGESHRVGRISLCGDDMMRHLLYEAAQVMLTRVLKWSWLKAWAMNIARRRGRQKAIVALARRLAVIMHRMWIDGTEFRWTREAAPAAV

SEQ ID NO: 47186 - protein, 341 aa, unidentified
MGEVVTIGLDIAKSVFQVHGIDAEGGVVLRRQLRRAHLLRFFAKQPACLIGIEACASAHHWGRELTKLGHQIRLMPPSYVKPYVKRQKNDAADAEAICEAVTRPSMRFVEVKSDEQQSVMVLHRVRLILMRQRVQLSNAIRGHMAEFGIVAPIGREGLRSLIRMIVGGDERVPQQAQFCLQLLGKQLELISRQILETDRQVRASARATEIGRRLMDVPGVGPLLASALVATIADPKAFRSGRNLAAWIGLVPRQSSSGGKERLGGITKQGDRYLRQLLVVGALAVVRYADRHGTRRPWLVQLLARRTTKVAAVALANKTARIVWAMMVSGESYREPVAQST

SEQ ID NO: 47187 - protein, 344 aa, unidentified
MKNRNVLALDLAKTVIQICKISNDGELIYNKAVSPNKLRQILAKEKESIVAMEGCGSCHYWSRLSEQYGHDTRVIAPKKVKAFLQGHKTDANDAVAIAIAATQFGMKFSQIKSEEQQTLQTLEVSRKLISNELTSLGNHIRAYMYEYGITSSKGKKGLRECVTDVLDTEDKRLPICLKGTLNMLWQRYKQTAEQLKMAEKEKAALVKQLEPCKRLLDLESVGVVSAALLYASIGNGKSFKNGRDASVYVGVTPKQYSSGGKTYLMGIDKRGGDKALRAALFQGAFSVIHKLPEKPRTTKQAWLIKLVARVGVKRACIALANKTVRTAWALLSKEQVYKATPIAI

SEQ ID NO: 47188 - protein, 283 aa, unidentified
MHRTKVGVDLAKNIIQVCTLHGKKVTSNVEMSTDEFSLWLAQSKPVTVAFEACSTSNYWYQQAIKSGHDARLISAKLVKAVRQNQKTDKNDALAIAQTLFLPEVSFINGKSIEQQQLQSIQRLRELAIKSQNASQKQIVSLLLELNIRLPNTQAGLLNGLEGVLEDGENNLSDTFRATLLVAKVQLENMISAIGEYDKYLEQSIQSLPDCKKLLKLEGVGPVNAVNLYIALGASQSQPFKSGKNASACIGLTPVQHSSGGKEVMGTIGKYCKNGSLRLLAATY

SEQ ID NO: 47189 - protein, 350 aa, unidentified
MSTVTIAVDLAKNVFEIAVAGRAGTIRQRKRLSRPQFEQYWGKQAACRVVMEACSSSHFWARYLIGRGFEVVLLPPHYVKPYRRRSKTDRVDCEAILEADRCAGIHPVAIKSEDQQALVSLHRVRSQWLQTRTARINAMRGLLREFGVIAPTGSKSFMNNLHLMLAEKRERLPARVQRTVDVLWQEVRDLEERIETIETELEQVAHEEPVVLALLKIPGIGILTATALFATVADIHAFSSGRQLACWFGLTPRESSSGNRRRLGRISKQGDPYVRMLLIHGARAALNAARRTHDANRPLTQLQAWALKRASEGHSNRAAVALANKLARIAWAVWRHDRDFDGNHVVRIAA

SEQ ID NO: 47190 - protein, 316 aa, unidentified
MEGTPIFVGIDVSKAGLDVAVRPMGSREFVANDAAGIEILVERLRELQPALIVLEATGGVERAVTRALASAEFPVVVINPRQVRDFAKATGQLAKTDTIDAAVLARFGEAVRPALRPLPDEVTWELRAVVTRRRQLTEMIVAETNRLSGASKAVRKRINAHLRWLETELKRADKDLDQSIRQSPIWRENEDLLRSVPGMGPVISRTLLAELPELGRLNRKQIAALVGVAPLNRDSGTLRGRRSIWGGRATVRAALYMGALVASRRNAVIQAFYRRLRNAGKAPKIALVACMRKLLTILNAMIKHKTHWSEIISQTT

SEQ ID NO: 47191 - protein, 373 aa, unidentified
MFFVGIDIAKNSHEAAVIDGSGKIVVKPFKFPNSIGGFEKFLAAVKGVSEDLSQFEFGMEATGHYWLNLYTKLMDFNVVVHVINPVQSDALRGLYIRKTKNDAKDAFIIAELIRFGRYSETTLSDSDLLSLRELTRQRFYLVDCVSDAKRKAISFIDKIFPEYQTLFSDTFGATSVELLQTYTSPDVIAELDTELFTHFLKSVSHGRFGRSKAEEIQSVAKNTFGSFLFADSATLAIRQFIQQIKLLEEQIAEIEDFISEKFASFDCKLDTIVGVGTTLAASFLAEIGDITRFESPDKLAAFAGIDPSVKQSGEFNGTRNKMSKRGSPYLRRTFWLAAISGIRFNPALKSIYDKKCAQGKHHAVAVSISCLLC

SEQ ID NO: 47192 - protein, 327 aa, unidentified
MFYLGIDVSKAKLHTCLLLGDEGKYKTKVVENTPAGIATLLGWTTRQGVEAGQLHVVLEATGVYHESAAQTLVDAGVTVSIVNPAQVKDFARGLAVRTKTDGVDGVVLARFGALLKPPAWRPPPAEVRELQALLARREALAQDLRREHNRREKALATAIPVRILQSIEDTIAFLDQELAKLQQDINDHIDRHPGLKDDLALLTSIPAVGPQVGSQLLAILQGHTFHSAEQLAAYLGLVPVERQSGTSVLGRARLSKTGPARVRAMLYMAAIVAIRYNPHVKSLYDRLLTRGKTKMAALGAAMRKLVHLCFGVIKTRTPYQADYALSA

SEQ ID NO: 47193 - protein, 376 aa, unidentified
MKGRPYSGSLDSLENQISPKESPMTNDKYVGMDAHVATITAEVLNGNGRVVSRSIMEANPEQIKDYFRGMSGVVHVTFEEGTQAAWLYEIIRPLVAEVIVCNPRDNKLVQSGNKSDKIDAHKLASLLRMGELKPVYQGEARTRELKDTVRSYSTLSKDTRRVMNRIKAIYRGRGIVCKGTHVYEPEMREQWAMRLADSNTRNRLELLYRELDCLSCLRKEARAELARQVRRQPAWKILKQVPGLGPIRIAYIIGIVSTPFRFRTKRQFWPYCGLAVVTCSSSDYEVAGGKFRRSKKPIGTRGLNRNYNRDLKYVFKSAALHASTREPFKPYYDRLIANKMKPELARVTLARKMAAITLAIWKKGEGFDADRLIQEA

SEQ ID NO: 47194 - protein, 351 aa, unidentified
MKVSTVGIDLGKTSFHVVGLDQPGKVVLKRRPSWSQLLRQFANAPTCLIGMEACCGAHHLGAALAAQGHQVRLIPPQFVRPFVKSNKNDYNDAEAIAEAVQRPTMRFVPLKSQEQLDLQALHRVRDRLVSRRTAVINQMRAFLLERGLTFRRGRNHLEQQIPFLLEDAEINLSPRLRQLLDELWRECKALTSQIETASQQIERIASEDVDCQRLQEIPGVGPLTATALVAAIGNGSAFCKGRDLAAWLGLVPRQHSTGGKAKLLGISKRGNPYLRRLFIHGARAVLTQGKRERLSFGSWIGELEQRMHRNVAVVAVANKLARIAWAVLATGAPYRWPAERSSEKAGPREAA

SEQ ID NO: 47195 - protein, 433 aa, unidentified
MSNNVQVVYERCCGLDIHKRKIEACALIGEKMRRNSFGTTSEQLHKLADWLKKHEVEIVAMESTGVYWKPVINVLEAEGIKAIIVNAQHIKNVPGRKTDVKDAEWIASLLRHGLLKPSFIPERRQREMREITRLRTAKIQERAREIQRLQKFLEGCNIKLSSVVSDINGVTAKEIIKAIAAGVNDPKKLAELSRGRLSASQEELETALDGIVSPDIRTLIQIQLEAIEALDKQIASLDLMMERIEQEDENFKEALELIDTIPGIGKRIAQVILAEIGLDMSRFPSDKHIAAWSGLAPGNNESAGKRRSGKAKPGNPQLRSQLVQAAHTIARMKNCYLSSLYHRIAARRGKKRAAVAVAHAIIVIIYHMLIRKEPYKDLGENYLSEQMRRSKIKNLVNLVKNIKKLDDDVQFIISDQSIRIVIGEEVKEFSMTG

SEQ ID NO: 47196 - protein, 402 aa, unidentified
MHIHILQKGYIFMRYFIGIDVAKFKHTACVIDTYGTVLVESFDFTNDIIGFQSLLKNIKPFLKKKHLVGMEDTGHYGDNLRNFLLEKQYKVVMLNPIVTSHIRKASNKAKNDRIDCFVIANTMMNPNFYRDQHAQSIDYATVRQLTRMHHTHTEEINRYKCQLQKSIDIVFPEFNSLLNTKYSKTYLEILDTYHSAYTIANTDIRLLRNTLKNVGVGRSVSISAEQLKKSAKESIGQHNLAIEMDIPFLISLIRRLTSILGEIDKKIEEFSHQLNSPILDISGISHFSAMSIISELGDITYFSSEKKLIKFAGINPCVYESGTYSMTHTRLEKKGSKYLRKTLYQIIDSVIRFNPIFQAFYQKKISQGKSYRCAQGHCIRKLLRVIYKIISTGEGFDSAKLK

SEQ ID NO: 47197 - protein, 512 aa, unidentified
MIGYHIVGSRNEEAVSPLVLCARYLAWFGSWRFFTGEAVAIPFRREPIRQLPFPVMPNSFSEDGLMKQKKPSKKRSTKLPKHLQHLNQNAAGIDVGSRSHFAAVPEGADEQPVREFSTFTDDLERLAKWLRSCGVTAVAMESTGIYWIPVFELLERHGFEVRLVNARHVKNVPGRKSDVLDCQWLQQLHTYGLLRGAFRPTDQICTLRAYVRQRATLVRSSASHIQRMQKALAQMNLQLHNVVTDITGVTGIGIIKAIIAGERNPKTLAGLRDKRCKNTEETIARSLHGNYRAEHLFSLQQAVELYEFYLQKIADCDQQILAQLKSFDSSDDSDPDSKPPRSIEEALQQMSGVDLSSINGINTNTALKIIAEIGTDMNRWKTVKHFTSWLGLCPGSKISGGKVLSSATKPVANRASAALRMAAMTLFNSKSALGAYLRRQRSRLGAPKAITATAHKLARLVYSMLKNGTDFVDAGQEQYEERYRSRVIQNLKRKAQEMGYILVSIQEEPQTT

SEQ ID NO: 47198 - protein, 420 aa, unidentified
MKEPVVKDFAALIGIDWANQKHDVCEIPLDSKKPKYSVISSKPQAIYEWAINFKKKYPNQKIAVACELKKGPLIYALEKHSHLVIFPINPSTVAKYRKAFTQSGAKDDPSDALIQAEILDRHMDKLRPIFPEDCDIRALKQLVENRRKLVQNRVGLSNLITATLKNYYPQVLDWFNEKDTVIFCNFIIKWPTLADAKKARKQTLINFFQQNKSRYTHVNERRIEEIKMAFPLTDDGGVIEPNKIMVEVLIPQLKLLIEGIEHFDKEIKQRYKNQRDKYIFDSFPGAGPQLSPRLLVAFGVNRCRYTTASEIQKMSGIAPVLERSGQKSWTHWRYSCPKFLRQTFVEWAGQSVRYSFWAKAYYEQQIEKGKPHNTAIRSLAFKWIRIAFRCWKTRTPYDESKYLEALKERGSPLLKYAVNM

SEQ ID NO: 47199 - protein, 402 aa, unidentified
MYNAVGIDVSKGKSTVAVLQPAGVIIRKPFNVNHTSSELDELAKYIGSLEGETRVVLECTGRYHEPVVKALSEAGLFVSAVNPHLIKNFGNNSIRKVKSDPADAKKIARYTLDNWIELRQYSSMDNTRTQLKTLNSQFSFFMKQKVAAKANLIALLDNTYPGVNKLFDSPVRDDGSEKWVDYAYSFWHVDCVRKIGLKTFTERYQAFCKKHHYNFQPAKPAELFLASKGLIAVFPKEASYKLLIQQSIQQLNLASSHVEELRSKMNELASTLPEYATVMGMYGVGKTFGPQLIAEIGDISNFSHREALTAFAGVDPGVDQSGTHNSKSNKASKCGSNRLRKTLFQIMSTLLQTAPENDKVYQFLAKKRAEGKPYYVYMTAGANKFLRIYYGKVKECIRNLEQ

SEQ ID NO: 47200 - protein, 343 aa, unidentified
MARFVGLDVSQKLTSICVVDDTGRRLWRGQCATDPEQIARVSSRHAGDDARIGIETGPMTPWLVHEFRARGLNVTCLDARHASAALKMQMNKTDQNDAEGLAQIMRTGWYRSVHVKSLDAHRARALLGARAQLVGMTTRLSNHIRGVLKTFGLLPGAMRGLPFDRRVEAMLADRDDLASIARPMLVAWRQLREQIAAFDKEVRALAKKDPTCRLLMSVPGIGVVSVLAYVSTVEDPKRFARSRSVGAHMGLTPRQYQSGEIDRSGRISRCGDTLARTLMYEAAVVILTRVKRASNLKDWAQAIAKRSGLGKARVALARKLSVILHSIWRSGEAFRWSEKPAVG

SEQ ID NO: 47201 - protein, 366 aa, unidentified
MTSMTDQDLEVTGGVDTHGETHHAAVTDRIGRHLADREFPATGTGYRQLLAWLRSFGTVTAVGVEGTGAYGAGLARTLRRAGLKVVEVDRPDRRTRRMKGKSDPIDAYAAAEAVVSGRATGTPKARDGIVEAVRTLRVVRRSAVKSRTQAVNQARQLLVTAPESLRAQLRGLPVAALARACARLRPGTDLTDPAQAAKAALRRLGKRVLALTGEIDGLEADLTALTTQAAPELLALKGVGPDVAGQLLATAGDNPGRLNSEAAFAHLCGVAPIPASSGRRDRHRLNRGGDRAANHALHTIVLSRMRWDERTRAYVGRRTTEGLAKKDIMRCLKRHVAREVYRVLMRSIRTTDTSNDTAQGDLTEAA

SEQ ID NO: 47202 - protein, 350 aa, unidentified
MLHAGLDLSRTRLDVCLLDEQGGAVQVVQAPPDADGLRGLARQVAMLGGPVRAAVESMNGARFVHDQLELCGWEVAIADAAKVKGLAPLACKTDRIDARVLAELSRRDLVPEIWLPTPGVRAERERARFRLHLVRHRTSLKNRIHATLLAFGHPCPVADLFGTDGRALLARLGLPQPWAGSVAASLALIDDLEAQIEGCEHDLRRLGADHPYIRLLVTAPGIAWVLGYTIAAEIGDIGRFPSPKRLCGYTGLCPRVYQSGSRDHRGPLAKNGPTWLRWALIEAATHAARHPVYHDHYQRTKARLGTQRGSKVARVEVARKLAEAIWHMLTRSQPFAPTASAKPPAHPLVA

SEQ ID NO: 47203 - protein, 357 aa, unidentified
MKKYFLGIDVSKKELAYCLSKGPEGIVSTGSVDNNSKDISSFLKKTLKSNAIPKEQLLVCAEFTGVYSNILAWTCVEEGITLWLEHPSRMKSGFKDLGRGKDDMMDAKRIAEYSWRYLDKMVEYKPKSPSILKLKTLLGLKKNLMKSLHTFSVRLGEDSRFIVQECYLLEKEILDPAVEALAKAIEDLEDQIANVIEADVVLANQDRRIQSIPGVGPAISHNMICLTEGFTKFKDAHSFQSYCGMVPVKYESGTSVRKKTSTSNVCSHVMKPIMYMPCIRFVSGSKSPEGDTELHDYYIRKTEDEGKHHNSVTNVLMAKLVARMFAVVRDDRDYLPEMKYDEKYHPERITKEEAATS

SEQ ID NO: 47204 - protein, 345 aa, unidentified
MKKYAGLDVSMEETSICVIDEQGKVVAEAKVASDPAAIAGYLARWRHELVVVGLEAGGLSPWLWHGLRELKLPAVCIETRRMKAYAKASPVKTDRRDARLIALALRAGLYREVHVKSEEAQKLRLALTARQTVLRQARQLQGKVRGDLKPFGIRLGKVGSGGFSRRVKQLLAERADLWALVAPLLELRARLLDQVRAYERMLRGFAKADAVCRHLMTAPGVGVLNAVGFRATIETPARFRRAADVPVALGLTPRIDQSGERERCGAITKAGDQLMRGLLFEAANALLTRTRRWCALKGWGLAVAKRRGLNRARVAVARKLAIVLYRMWCDGAAFRFGAATAKQAA

SEQ ID NO: 47205 - protein, 344 aa, unidentified
MDHSTQVDSGRQVFVGLDYATAFVQVCALAPSGRVLANRRCENHWLALDAFVRQFGSVIRASIESCTGAANLADELIHRAGWSIDLAHPGYVHRMKQSPDKTDFSDARMLADLVRVGYLPRVWLAPESIRDLRRLVRHRQDLVDRRRVLKLKVAGWLRDLRIKEPKGTRWSIAWRNWLQTVELPPETRWVIDDACDEFDTIVRRMQRVESHMDDVTRDDPMVSKLRTLRGLGLITACVIRAEIGDATRFRTGKQLANYCALSPRNVSSGLRQADAGLIHAGNRYLRATLMEAAHRLRRFDPRWIRFSADMEARGKKRCVVVAAIANRWIRGLYHELKLVSHIAA

SEQ ID NO: 47206 - protein, 422 aa, unidentified
MIEAVIERCAGIDVGRKFVVVCVMVGKADSVPQHEIRKFLTLNQELEKLRVWLHEKQCTHVVMESTGSYWKPIFHVLDDGELKVVLANSQQVKNLRGHKTDRNDSRWLAHLLRHDMIRPSFIPRREVRELRDLTRRRKQLIGHAVDERNRVQRVLQEANVQLGTVLSDLFGTSGLDMLEALVNQDASPEEIAQLARQQARKKIPQIQTALEGHHMTEHHRGLIRHSMRHLAFLEEEIAELDQEIARKVEEDEELRSAVKLVVTIPGVQKTAAAAIVAETGTDMRQFPEAPQLASWIGVCPGNNESAGKRKSGRTTKGNPWARRTLVECGWSATRKKDSATQRLYTRLKPRIQHKRALVAVARWIALQVHETLSRGEPYRADKASDLTPSKVVRLARHHTRRLRHLHKWLKTRVEKKAAECAG

SEQ ID NO: 47207 - protein, 276 aa, unidentified
MDTAPRFVGIDVSKAHLDVASRPDGQQFQVPNTSPGIADLIARLRDHPPALLEATGGLERAAAVALAEAKLPARIVEHGRARHFARSIGQHSKTDARVLAHHAEAVRPEARELPDEQTRELQALLDRRRQLVAMRVSERNRLPRGPTAKDQADLEAHLLYLSEQLGAMDLEIGRLIEAKEDWKLRDEVLRSIPGIGTQTSRALLGLLPELGKLSGKQVAALAGLAPQARDSGTVRGARTIFGGRAEVRAALGHGLGLGGSPQPRPQGVLPAPPQGR

SEQ ID NO: 47208 - protein, 434 aa, unidentified
MSREQHDQTAIRTHIGAIFVSLELSRSTWQVTSLSPGGGEKMSKHGVDADDVAGLLARFGELKRKAQARTGEAYRIIAIQEAGLDGFWIHRVLEREGVESHVVDAASVAVSRRRRRAKTDRIDGEALVRTLLAFKRGEPRVCAMVRPPTPEDEDRRRVCRERKTLIAERVRHVNRIKGLLHSQGVGDFKPLRRDRRRALEALRTGDGRSLGAHMKAQIGRELDRLEMLLDQIGAVEAEREAMLAAMDREQTAARAQTQLASQQARRDAWRRQAAPQARQEAPQGGAGETAPPGPAQAAPPSTIQMLMGLRSVGAEFAATLATELFSRSFDNRRQVGAYAGLAATPWKSGSIDHEQGVSKAGNPRVRTTMVQLAWLWLRHQPASALSRWFQARVANGKGGRKRSIVALARKLLVALWKYVTAGVVIEGALMNNAA

SEQ ID NO: 47209 - protein, 407 aa, unidentified
MELATIYKRVIGLDIHQAQITACALIEMPDGTTRAEQRQFGGFKRDRRELAEWAAAIAPEEVVMESTGIYWKSPYAALEEAGIRAKVVNARHVKNVPGRKTDIGDAQWLAMLARAGLLRRSFVPPSQLRELRLIARQRQKLISQLVGEKNRLHKILADGGVRLGVVVSDLHGQSARAMVKAIIKGDSPQDVLDYASRRLRASREELFDAVQGELTDSHRFVLGETMQHIEEIEARISRFDARLLDALKSEHNTLALLQTVPGIDLIGAAMLLVEIGSDMGAFGSADRLASWIGICPGNNESAGKRKPARARKGNPYVRRLLCEFAHAACRTKCVFKPKFESLMPRRGYKRSIVAIAHSIMRTIFFMLLRREHYKDRTVDYEAMAVERNAPRWIKALTKFGYIHPASA

SEQ ID NO: 47210 - protein, 352 aa, unidentified
MIVLGADMHKSSHTMAAIAAATGEMLGDMTARVGARGFDDVLQWARSLGRERVWALEDCRHVSGSFERFLIARGERVVRVPTRLMANSRRSSRERGKSDRIDALAVARAALAEGIETLPTAELAGPELDIRLLVDHRERLVRTRCALNNTLQWHLHDLWPELELPGSALFYGKWSPRIARRLARAEQTMRVRIARDELRRLRELTQAINALQTEIAELVGQVAPQLLNEPGFGPLTAAKLVGEIAGADRFSSDAKLARSAGLAPIPVSSGRTDRHRLDRGGNRQINAAIHRVAVTRARCHRETIEFVARKKAEGKTHREAIRCLKRHLARRIWHLLRAPNPPSETAPHPSVS

SEQ ID NO: 47211 - protein, 418 aa, unidentified
MKSNKTEKIKTINEKTLIVALDIGKKVHHVYFRTPTNQDIKPFPIYNTGQSFNKFWERLCRFKEKHMLDEVIVGFESTGSYAEPISNYLRKRSVRLVQINPMHTKRIKELTDNSPNKTDKKDPRVIADVISLGHSLTVVVPEGAAAQLRRLTQARERATERRKAMTNQLQGLVFVIFPELVSIIKPSTKTGMYLIKNYLDPESIVSIGIETLGNIVRKISRGKIGIDRAEKLYHAAKASVGITGGKESVLLETSHLVSNIENENRYIEGLEEQMIVYLEQIPYSHSILSVKGIGNITVAGLIGEVADFRRFKTISEIMKLAGLDLFEVSSGKHKGGHHISKRGRSLIRKLLFLAAINTVRSNGIMHGRYQKMLKNGTPKIKALVAVSRKLLRIIFALARDNAQYDENYNREHEYKLAA

SEQ ID NO: 47212 - protein, 423 aa, unidentified
MRFIGLDIHRDFCEVAIAEGGELRLAGRVQTEPEALALFAQSLGGDDEVALEATGNALEIARIIEPHVGRVVLANPKAVKGITRAGPKTDKIDARTLAQLLAGGFLPAVWLPDEQTRILRRRISARAQLVRQRTRAKNQVHATLMRNLKGKPPVSDLFGARGRRWLAAQDLPADEQETVAACLRQIGFLDGEIGLVERTLAEQVLASAEMRRLLTLPGVNFVTAAALLAAIGDIRRFPSARQLVSYLGLDPRVSQSGVEPARHGRISKQGPGETRHVLVEAAWHAARTAGPLRAFHQRVAARRGGNVATVAVARKLAVIAWHMLSRGQDYAFARPSLTREKIRKLELATGAERQKGKRIGVWVTKEQHRLDKELAAQAEIAYRRLVQDWQPAIKGTGAAPGRASCGPSSGQAARQETAPTPAL

SEQ ID NO: 47213 - protein, 345 aa, unidentified
MSKKLIVGVDVGVDMAKKDFAAALRVDDIVVELDKCENDESGRQLLNEQVKALCEQQRVEQVHLVIEATGGYEAALVAYAYEQQWLVSMPNPKQVRDWAQGVGYRAKTDRVDPRILAHYGAERQPPTRPPLAVEVSHLDSLLKRRLDLEQALQKERTRLTESAHRPGIAPKVQESFQQVIDALEQALAEIEQTIDELCQRHEPFQQNLKRMLALPGVGTKVVLPLIVKLFQWQSLTHGQGNAKGLTSFVGFVGLDPQPYESGRSVRKQLAISKMGDKEMRRLLYMGALGGVRGQNPLKPFYDRLVGRGKAKKVALVAAARKILTWAWTIFSRQTEWNPAFHAIAP

SEQ ID NO: 47214 - protein, 364 aa, unidentified
MQYLNDTELSSQEETRCQFNGGKACIKLGIDVHQDFYVVVMQEGGSNPKPPQRFPKEAFLYWAARLKQKSGAQIYAVYEACGFGFSLQRRLSALSIRCYVVCPQKLDEANKRVKTDSLDAKALCLRLDRFVQGNKAALALVRVPTEEEERSRAIHRQREQLVKARKQLEAQGRSLLVNQGLEPVQQWWKQRAFLNLPVPEWMKELLGNTQPILIALQQKIAKLTFQLQNAAAADQPRGLGKMTSVVIDREIADWHRFNNRRQIASYTGLCPGEYSSGNTRLQSCVTKHGNPRLRAALVELAWRLVRFQPNYKAVSKWRRILAKGALATGAARKKAIVAVARQLAIDLWRIRTGRCSAQQLGLII

SEQ ID NO: 47215 - protein, 376 aa, unidentified
MNESTVYVGLDVHKDTIAVAVAHAGRGEPEYHGEVPHTAQGLAKLLKQLSPAGEVLDVCYEAGPCGYGLYRELVGRGHRCTVVAPALIPRQAGVRLKTDRRDALRLARLHRAGELTAVWVPDAAQEAVRDLSRAREDMKAIELKARQRLGAFLLRHGQVYREGASRWTQAHWRWLEAVKMPSAVQQLVLQEYLEAVREAQRRVAGLEEQLRQVLANWSWRPVVEGLMALRGVSVMAAVTILAELGDLSRFDSPRELMGYLGLIPSEHSSGGSRRQGGITRTGNGHVRRVLVEAAWNYRFPARKTRIIEQRAERTSVAVQAIAWAAQKRLCARYQALLQAGKQKQQVTTAVARELAGFLWAIACEVMGKAHGSKALA

SEQ ID NO: 47216 - protein, 315 aa, unidentified
MSPNTVNTLNPPAPLVHTGLDIAKASLQLDLHGRAHTLPNTPAGHDQLLTLLRAVPGAHVVCEATGGYERAVVAALQAAAVPVSVLNPAQVRHFALAQGQRAKNDPLDAGVLSAYGQALKPAATPLPDAALAELRALVQWRNQLLEQRTALRNHAEHADLPYVTKDQAKFAAQLDKRIAAAEAEMTAALQRAPQWQSPVAKLEALDGVGRLTAVSVLSQMPELGQLNRGEAAALAGLAPWTRQSGPWEGQRHIGGGRAAVRRALYMSAVGLARMKESTLGKFYARLRAAGKPAKVALTAVMRKLLLQMNHGLKPA

SEQ ID NO: 47217 - protein, 341 aa, unidentified
MVEVSIIGLDLAKNVFQAHVAARDGRVLAREKLPRSRVLAFFAEQPKCLVAMEACASAHHWAREIQALGHDVRLIPPIYVKPFVKRQKNDSADAEAIAEAASRPTMRFVAVKSRERQAAGMAFRTRDLFVRQRTQTINALRGHLAEYGTVAPKGIAHLGRLRLVVEDPDGGLPEPVVDLAMLLLDQIGHLEEKIGHLDREVRTRARQDELARRLMTIPGIGPVCASAMLAFAPPPESFSKGRDFSAWLGLVPRQFSSGGKERLGRTSKMGQRDLRRLLITGAMAVVRWARRRGAPEGSWLHRMLMKKPPMLVAVALANRMGRIAWALMAKGGVYRDPAVAV

SEQ ID NO: 47218 - protein, 342 aa, unidentified
MMIIGCDFHPGFQQIAYVELETGEYGERRLNHPTEAEQFYRSLAGKQVRIGVEATGGLRWFRKLMHELGHELLLGDASAIRASSPRKQKTDMRDARHMLRLLVENRFPAIWQPPMENEDLRQLLLHRCRMVRMQTRIKNQLDMMAKNEGLVSSRSWSKKRRQQIEALPLSGWHVQRRKDLFELMEELDKRIEPLDKAVLEASKQSPEAVLLMTHPGVGPVVSLAYVLILGDWRRFPRGKQVGSYLGLIPAEASSGKRQQRLGHISKQGNTLLRWLLVQAATKAQRHDPSWHRQYLRLSIQKHHGVAKVAIAHKLAVRLYWMLRSGQDYKQVKERGSHAGQSV

SEQ ID NO: 47219 - protein, 485 aa, unidentified
MKGPPKKKQRKPAKSPAVTKPRRAPQPTNRKQRRELARKIQADDISLEVVHPDAAGIDIGNEAHYVAVPPSRDSESVRRFGCVTAELKGMAEWLEQCGIRTVAMQSTGVYWIPVYDILEAAGLEVYLVNARETKNLPGKKTDVQESQWLMKLHTYGLLRNSFRPSEQIRRMRTYWRQRNDLVQSAARHIQRMQKVLTQMNLQLANVISDLSGVTGQAILKAILDGERDPRQLAVYRDGRIKASVDEIAHSLEGNWQEDLMFVLQQEQTSYEFCQKQIAECDTRLQQYLRQQEDRSAGAPLPKETRKGRNKRKRGNAPLFNMREGLFRMTGVDLTRIDGIDVLTAATVVSEAGWDMSKWQTENHFVSWLRLCPDNRISGDRVIGKGRLPTQNRLNAAFRMAASGLRQSDSYLGAQFRRLRGRLGTPIATKAMAAKLARLVYRMLRYGMKYVDKGAAYYEAQHRQRQIYSLKHKAAELGFRVVEAAA

SEQ ID NO: 47220 - protein, 366 aa, unidentified
MLIHVPPDVRVLAMDVHKNTISIGLLEPRSESPLMDKCSTDDESVRRLLARFAEPARVWACYEAGPTGYELARMLRNAGMRCEVIAPSLIPTRPGDRVKTDKRDARRLALLFRAGQLSAVRVPTVAEEAARDLCRARADMVIDRTRARHRLGKFLLRHGRVWRGGDNWTLKHQAWIRQQRFDERALNETLAHYQATLSARDAAVEAIEADLLPWCARAPFTDPVHRMAAYRGVTELGALTLASEVFDWRRFPTAGMFMGFTGLVPSESSSGEHTSRGGITHAGNTHLRTQLVEAAWAYKSKAQVGATLKKRQDGLDPAVVARAWTAQLRLCGKFRRLDARKTNRKVVVTAIARELAGFVWAEMTAN

SEQ ID NO: 47221 - protein, 326 aa, unidentified
MQIVVTVGLDIAKNVFQAHGVDAEGGVVFRKRITRAKVRDFFASLPQCLVGIEACASAHHWAREIGGLGHTVKLMPPAYVKAYVKSQKNDSADAEAICEAVTRPNMRFAEVKSVEQQSVLAMHKLRATLIRHRTRVGNSIRAHMAEFGVIAPVGRVGLESLVRIICDGQDERITSMVRRALGYLVNQYDQLQAQILDCDRQVLAWHRSNETSRRLATIPGIGPLAASALVAAIGDASTFKSGRALSAWLGLVPKQNSTGGKERLGGISKRGDKYLRWLLVAGSLSVIRYAQRHGTKRPWLVKVLERRTSKIAAVALANKIARVVGH

SEQ ID NO: 47222 - protein, 340 aa, unidentified
MSEITTIGLDLAKHVFQIHGIDAQGTTVLRKRLRRGQVLAFFSRLPRCLVGLEACATAHYWARELRALGHEVRVMPAQYVKAYIKRNKHDAADAEAICEAVQRPTMRFVSVKTAEQQATALLHRGREQLVRQRTMLVNALRAHLAEFGIVAAQGLRNVGELIAIVRDDGDTRLPDMARQVLQVLANQIEQIETAVAALERQLLAWHKTNPVSQRLASIPGIGPIIATAIAATVADPKVFRSGREFAAWLGLVPRQNSTGGKIRLGGITKRGNRYLRRLLINGASANLLRSKATKADPWVIGLRRRRPPLVVAVALANKTARIAWAVMLREKEYQPRAMAA

SEQ ID NO: 47223 - protein, 375 aa, unidentified
MNEITGARIARVGVDLAKQVIQVHAVDASGRRVMARAFKREQFFAWCTQLPAGCVVAMEACSSAHHWARKLRVQGLEPRLIAAHFVTPYRMEGKGGKNDATDAAAICEAASRPSMRFVPVKTCEQQGVMSLHRVREGLKEERTACINQIRGVLTEFGLVFGKSPKVLRAVLADIIEDASNELSTTARLVVQRAFDHWRELDDHLRWCDRQVGQHVRASPAARRAAKVIGIGELGASALTAGVGDFTQFKSGHQFGAWLGVVPRQASSGGTIRLGRITKRGDDYLRTLLIQGAKAAVMSAEKRDDPISRWLVQLIARVGWQKACVAMANKNARILWAVMTRDDGFDSKHVSVKPQAKQPDRQAVVDPASISAACVA

SEQ ID NO: 47224 - protein, 424 aa, unidentified
MSKIEISTPAIAAWIGLDWADQTHVYALEVSGSEKIETGQLQQTPEAIHQWAQQLEQRFAGQPVAIALEQSRGALIFALMAHPFLLIYPVNPHAMAQYRKAFKVSGAKSDEADARLQLDFLLKHRDQLRLWQPDTVETRLLRLLCEDRRQAVDQRTALHNQLTSQLKICFPQALDWIQSWDYPLACAFLKRWPSLHSLQNSKPNTLRRFLAQQGCRKLQRYEPLIGQIRSSQPLTTDPALLRAGLMKVTWLVDQIRCLTEAIENYNQQISQLFSQHQDHDLFCSLPGAGPALGPRLLCALGTDRSRFQDAQEVQTLFGIAPVMESSGQSRWVHWRWPCPKFIRQTFHEFAGASIPLCSWAAAFYQKMRGRGKRHHAAVRALAFKWIRIIYACWKNRTPYSESQYLTALEKRQQPLLAAGAINAR

SEQ ID NO: 47225 - protein, 292 aa, unidentified
MAGTEPHAWGTGRMDDITYVGLDVHKATVCVAIAEDGRGGEVRQIGVFENRPDILCKLAARLGKGNRRLSFCYEAGPCGYGLQRLLTSRGHDCIVVAPSLIPMKSGDRVKTDRRDAVMLAKLHRAGELTAVWVPDAAHEAMRDLVRARATAGQVLAKARQHLQGFLLRHERIYHGPRAWTLAYRRWLTTVRFDHPAQQIVLQDYIHAVEDGEARRDRLTRQIEELLPSWSMAPVVEALQAMRGDALAVEVTVVAEVGYFRRFANLRRLMVYLGLAPSEHSSGSTIRRGGITN

SEQ ID NO: 47226 - protein, 333 aa, unidentified
MSLKDTAVSIRRNGKRIWRSKCASDPQALAALICKHAPDVERVVFETGPLSIWFDHALSAEGLPAVCIDARHAKAALDMAPNKTDANDADGLAHLAEVGFYRVVRVKGFDSMLTRTLVAARGQLLKTVVQLSNPIRGRMKTFGLVVPKGAGRVFDGHVRRLLADQPALARIMLPLLEAWRSLRTRAADLERQLLASSRGNAASVLLMSIPGVGAVAASSYVAAVEDPANFKSSRSVGAWLGLTTRRDQSGEVDYDGHISRRGDAHLRALLYEAATTILTRVHADSALRTWGLALRGKVGFKRATIAVARKLAVIMHSMFKSGQPFDRQASPAA

SEQ ID NO: 47227 - protein, 455 aa, unidentified
MSSKKGFSEFPVVHPNAAGIDIGATFHIVAVSPGQDSVPVRQFQSFTTDLHKLSQWLQGVGVKSVAMESTGVYWIPVFEILEADGFEVILVNAREVKQVPGRKTDYNDAQWLQKLHQFGLLRASFRPSEHIASLRAYLRHRERLIEYSAAHIQHMQKSLMQMNLQLHHVVSDITGATGMKILRDIINGERCAAKLATYRDIRCKESEKTITAALTGNYRDVHIFTLKQAVELWDFYQKRIRECDARIEKAMEKLNQKKVAPDIPLPKARHRTKQHNEPDFAVRSALYTLTGVDLTQINGFGPYTALRLIGECGDDMSKWATEKHFVSWLSLSPGNKVSGGKILSSKTRRTKNRATTLLRIAAVNVGKTETALGAFYRRLAGRVGKAKAVTATARKLAVLFYSIMKYGKNYVEPGAEYYETQYRNRVLLTLKKRAKRLGYELIANPNPKTLCAEVS

SEQ ID NO: 47228 - protein, 357 aa, unidentified
MTIVETRAETRAITGGVDTHADVHVAAALDSVGGLLGVEEFPVSPAGYARLLGWLGGFGTVCLVGIEGTGSYGAGLARHVAAAGIRVVEVDRSDRQDRRRQGKSDPLDAVSAARAAQSGRARGAPKGRDGAVEAIRALMVAKRSAVGERTRTINQARALILTGPDDLRARFTRHTPAALVAGIASLRPRPGDVPGYAVRVALRELGRRAVFLDGQLERLDELIVPLVTARAPGLLALYGIGPNTAALLLIAAGDHLIAAGDHPGRLRSEAAWAHLCAAAPIPASSGKVTRHRLNPGGDRQASHALWRIVFTRMGSDAATRAYVERRTKEGKSKAEIIRCLKRYVARQVYPHLRPDAG

SEQ ID NO: 47229 - protein, 343 aa, unidentified
MDKLDTAGVEVSVEVLVVALKSNGQMRTSEFPNTPSGHQQLIGYLRGHSQRLRICLESTGLCGLDLALALQTQKGMEIMVANPRSVRHFAEAMMQRSKTDPLDAKLLAEYAERMPFLAWQPPSLPARRLCAMARAIHQLTEMNTMQKNRLHAAASTETTPKIVMTELRRSLAQQQRSIARLLREAIQLIQSDPVLQKRFQLLLGIRGIREMSALQLLGELVLVPADCDVRQWVAYAGLDPRQYKSGNSVEKKVRISKVGNRHLRRALYMPALVAVRHQPHFRAYYQHLRAKGKLKMVALVAVMRKLLHGIYGVFKSLEPFDATKLFSSIAPAFEPKITKEIAC

SEQ ID NO: 47230 - protein, 341 aa, unidentified
MPTPRHIGIDLHRNQFTCCVRVENGRNYLTNWKLEDLPRFVKKLRPNDEIAVEVTGNTRLFRDAVAPHVARVVAVDPNQFKVISHSVKKTDPNDARNLALYLEKDLLPEVRMKDKTQAQLASLTQTRDTLVKLRTALKNKVNNILSAHGVNLEKEALSSEKKLNEILAMKFDPMVKLELEVIIEEIRSLNQRIAKIEKVIADEGSKLEGHKNLTSIKGIGPLTGSILLSVIGDINDFADEGKLAAYFGIVPRISNSNETERSGRITKRGSKLGRTALVQCALIAQRYSPYLKRYYEQVKARRGTGKAIIALARKLLGIIYRTLKNKWVFEDFPNFVLAEAA

SEQ ID NO: 47231 - protein, 358 aa, unidentified
MYPFYLGIDLHLKRTYMVLMDQTGEVIDERRISNNDIDEYLIERVPKNTHAVMEATRNWAFMYDQLSQHVDRVDLAHPKELKAISTAAVKADHIDAKVLANLARMDFLPTAYAAPKDIRDLRMYIRHRDQLVRMCTQVKNRTHAVLASYNIAYPVSDIFGVEGREHLEEVMETKLRTSAKKVLHDHLYLIDELSKQIEIIEAEIKLSPEQKQMVRLLKTVPGIGKVTATTIIAEIGDIHRFHSAKALCNWAGLTPKIHSSDVIVRHGRISKQGSSLLRGAMTRAATVASRSSKRWYAVHENLATRCGKKAAKVAIARRLLTVVYYMLKRNEPYQDDYGRNPSETGEPDAQHGSLKPTG

SEQ ID NO: 47232 - protein, 421 aa, unidentified
MKKRRYRATNVKQANWEKIASVAAGQQMVFSVDVAKDDFFGALMTTDRSVIATIKWVHPQQTREVGEHLRDLDTQNLEVVMEPSGTYGDALRGYLTGLGFAVYRVSPKRVHDAAEVYDGVPSLHDAKSAYLIGRVHLDGASAPWEEFSASRRDHHALIAELDLHQGQHQANLNRLEAALNRHWPEVVRILDLSTVSLHTLIGEYGDPSQVSRHRDEAEQLLLRTGRGLLSAEKVRHVLDSSEASLGLPCTEGERHLLQVLAQELLRAHEALKAIEHQIAKVVKDDLVLRRMATVVGKTTSLVLETTQGTPLDYENPHSYLKGLGLNLKERSSGKHAGHLKITKRGPGKARKYLYFTALRWSNKDPVIAAWYQKKVKRDGGIKGKAIIAVMRKLALSLWHVARGEAFDSRKLFNTRALGIAA

SEQ ID NO: 47233 - protein, 390 aa, unidentified
MLYLGIDIGKFHHAAALMDQRGKVIATLPSFSQTQNGFQKLLALISSQLPPTEELRIGMEATGPYWIPLAEWLKTHGWSPVILNPIKTASLRNYGVRGSKTDNIDSVLIANTLRIEGEQPQPASPKHSDELRHFTRLRADMVKDRTRIALRVTSLLDRLFPELLSSFSKTLSPSCLALLSEASTPSNVLALGEEKLTTLLHKASGGKLGATRAKEIMDKAAVSVGVTSQALEEVLALLLEQINLIDSQLRTLVHRITELYEQANLYFTSIVGVGTLSAATILGEFGSVSKFAQPKQMVAFAGIDPKLRNSGQHQGQVHISKRGSRYLRRALYLACQVAVRNDDYFHSIYQRHRDKGKSHKEAIIAVMNRFIHVLYAIWRDNRPYYPLTSA

SEQ ID NO: 47234 - protein, 338 aa, unidentified
MTYYAGIDVSLESASVCVVDAAGKIIREGKLASEPQALTDWLKKTGSSLERVGLEAGPLSQWLYAGLQQAGIAAELLETRHVRTAFQIMPVKTDRKDAHGIADLMRLGWFRPVHCKSIDAQETRAMLTARKLVQKQVQEVESSLRGILRGFGLKVGKTTPVKFEGRVKELVAGNPSLERIADALLATRAVLRREFNGFERQLRTMARNDTRARLLMSTPGVGTIVSLTYASAIDDPSRFKSSKTVGAHFGLTPKRYQSGETDYTGRISKLGDASVRAALYEAAHVILTKPLKGCTALKSWAMRIARRAGMSKAKVALARKLAVIMHRMLANGTTFHAA

SEQ ID NO: 47235 - protein, 358 aa, unidentified
MTSLAPAGERIYLGMDVSGDKIAVAVLRPGEDVPAVEVISHDHEMVRRLIGKFADRSVLAACYEAGPGGYELYRQLAAAGVACDVVAPALIPKAAADRVKTDRRDSVRLALSHRAGLLTAIRVPSEPEEAVRDLVRTRADLVDDRKRMMQRIGALLQRHGRVWRAPRWTCEHRAWLDRQSFTEPALQAALRTYLAALDARDAELAVLESQLRGCWASVDPLASMVRRLACYRGIAELTALTLAAEVADFRRFASAPAFMGFTGLTPSEYSSGARTRRGGITKAGPQLIRGALVEAAWSCRHRPAIGATLHAGFRAVARRGWRVGSGRFTGAWLLCGGGRRERRSIRRVRWWSCGAGCR

SEQ ID NO: 47236 - protein, 346 aa, unidentified
MMIIGCDFHPGWQQVSWVDVETGETGEAKLVHATGEAERFYRGMPVPSLIGMEATGNAQWFVELVEDLGHALWIGDAAQIRASYVRQQKTDRRDAGHIRKLVEEGRFPKLWTPDREQRDQRQLVIHRHKLVQIRSRVKNELQHLSLNKGMQKQSKLWSAAGQQALRELPMKPWAACRREDLLQLLAMLDQQIGRLDAAVAQAAKRNPQAQLLMTQPGVGPVTSLAFVLTLGNVSRFQRGKQVASYLGLIPREHSSGGRQRLGSISKQGNRLLRSLLVEAAQTAVRYDPGMKKEYLHRCHQKPKGVAKVAAARKLAVRLYWMLRTRKPYPEIVRIESSPRVALVSAS

SEQ ID NO: 47237 - protein, 355 aa, unidentified
MNSVRYIGLDVHRDTISATVLDGDGKLLMQSVLATRAAALLDFLHGIKGTLHVTFEEGTHSAWLYDLLVRRVARLVVCNPRKNALLKSGNKSDAIDARKLAELLRAGLLSPVYHGETSALAVQHLARSYGMLTEDTTRVMGRLKAVFRSQGVSCAGKKLYGKRHREHYLAQLGMGSLRRRAECLYQELDALQPLRRQAKRELIAACRQHAAARWLQSVPFLGPIRAALLIGRVQTPHRFRTKRQFWAYCGLALETRDSAEYRVVNGQVQRRQKPTLIRGLNWNHNHELKNVFKGAATTASTCQGVFREFYLGLLAKGMQPGMARLTLARKIAAIALKLWKKGETFDAQQLKPQAA

SEQ ID NO: 47238 - protein, 354 aa, unidentified
MATAESAEVLITLGVDTHQDHHVAVALDQFGRRLGVLMFPTTPAGHGQLETWARGFGALRQVGMEGTSSLGAGLARWLRSRGHSVLEVNRPDRQTRRRAGKSDPVDAEAAARAVQAGTSLGSPKTGDGRVEMIRALRVARRSAVKARTQAANQLHALVVTAPDELRSTVRRLGIAALVATVSQWRPGTCPDTPLAATRFAMKSIALRYKQLSAEILTLDVQLDRLVAEAAPSLLALKGVGTEIAASLLIAAGDNPERLRGEAAFAHLCGVAPIPASSGRTNRHRLNRGGNREANSALYLLAITRMAWEVRTREYVARRTAAARPRPRSSAASNATSHERFTAPSRTCHRYRCLR

SEQ ID NO: 47239 - protein, 451 aa, unidentified
MTNSSTPSFKGQDVYCGIDVHKSTWAISARCNGVEMFHGTVAASPRVAVQTLQHRFPEARFHCAYEAGFCGFGIHRELVAAGFDSIVVNPADIPTNGKERVFKNDSIDSGKIARHLEHGELVAIDVPSVDLERMRCLVRRETQIRDAATRENNQLKAALYFHGEPVPKYLSNAVLQRLWRHSCEANDFEMASHIRLLLFLRGERQRIIKDEKKLQAMLGYADDVERLQGIPGIAFRTASVLQCELGDVSRFPTHSRLAAYVGLAPRLVGSGDEQKVKGGVSRKKGQLHYLLIQSAWAAVRTSTEFGSIFARLAKSKGNRKRAIVAVAKKLLFIAYAVLRDKVPYAPGMPGKARKGLEKEEVRRPSPVSPPQKPAPEGRTPENDAARRMTEKGMEILKQLASEGLLNEEDMLCGEYGVMPPEDAPDDFPAVPWQPPHARRRSGRTKQAGSQE

SEQ ID NO: 47240 - protein, 346 aa, unidentified
MGFDLGDRNSWYCVLDEAGQIQLEQRVRTSAKALQEVFGAMPCSRIALEIGTHSPWISRLLSALGHEVIVANARKVRLIGESRKKDDRLDAQTLARLARIDPQLLYPVKHRSAQAQADLMMIRARAALVRGRTALVNAARGLAKSYGERLRGCNVRNMDAEKAEGLSPELQRALEPLLATIEELSERICEYNDRIAALAEASYPQVALLKQIKGVGTLIALTFLLTLEDPHRFGKSRDVGGYLGLQPGRRQSGQRDPQLHISKAGDPYLRTLLVQGAQHILGPFGIDCDLRRWGLKLAERGGRNGKKRAIVATARKLAVLLHHLWVSGEVYEPLHNSSRVTVAVAA

SEQ ID NO: 47241 - protein, 334 aa, unidentified
MWHVGIDLHRATVVLAAVNDLGEAVNPVTIPCADGTTIVGTVKALGTFRAVIEATATYRWLYDLLRPYGTVLLAHPTRLRAMIQRRSKTDKLDAQLLANLLRINQIPLAYIPPEPYQQLRDLTRCRARLGRHLAEVKIQLRALLAWQNRQSPYRTPFGPRGLRWFRGQDFGPIEGMVRDELLERFRHYAKQMTLFDQRLEEMQPAFPQAEALADIHGIGLYSALLIIAEIGEAERFRTAKQVGAYTGLTSRVHQSGGHCYQGSITRQGSPWLRWVLVQAAMKAVHRDAALKNFYSRIRKRSGAKIARVAAARKLAEICWKRLRRWQREHASQAA

SEQ ID NO: 47242 - protein, 357 aa, unidentified
MKIIGVDLHTRQQTIAMLDDQTGELLEKELPHEGEQVREFYSALPKPVLVGLEATGSMHWFLRLLEELGIEFRVGHPAKIRAAEPRKQKNDRRDARLLLTLLVEKRFPAIWMPSREQHDLQILLRHRDQLVRLRTRIQLSLQAVALSHGLRRGHTLWTCGGQHTLRALPLAAHASAQRDTLLALYPQLQAPIDDLDGQVESAAQQRVQARRLMTHPGVGPITALATEVFLGDPQRFADGKAVASYIGMIPSEHSSGGRQRFGRISKQGNSLLRFLWGEAVIHAVRRDPELRRFYRRKLVQKGMGKARVAAARKLGIRLWVMLRDEIDYAEFCRRGHQRRQSSGAACAGMLHGDSGPN

SEQ ID NO: 47243 - protein, 349 aa, unidentified
MIVGVDVHRRAHCAALIDERGVVLDTLSFPNTAAGVRKLRMWLNARDAGDALVGIENGAGYGQMLCASLAVAGHVVLNVPAWRTKRDRSKQGPGKSDPGDAVAIARVVLCDRECLGPALEPELVRALAIVETLRRQTVTRRTDAIQRLRALWTQFDPEAEVAVGNVLAARTIGRLRRVRLGSGVLGDAATSCLHRIAGEIARLDAAVRDLDKQLAELVAQSGNPLEDVCGAGLHVTATLIAQSGDVRRFRDRAAYARYGGVAPIPCGSGASAGRHRLHRGGNRQVNAALHRIAIVQAQWDPAARAYLERKIAEGKTPREARRALKRHLANLVYRRLCRWAESTLPAMTS

SEQ ID NO: 47244 - protein, 341 aa, unidentified
MQITTIGFDIAKNVFQIHGIDAAEKVVIRKQLRRGQVLKFFAALPPCLVGMEACATAHYWARELTKLGHEVRLMPAKDVKAYVKRNKNDAADAEATCEAVRRPTMRFVPVKSAEQQAQLMQHRARDLLIRQRTQVINALRAHLAELGITAAQGRDGIRDLLAIIADEADARLPIDARASLMVLAAQLQALQTLIGSIEKRIVARHRSSEASKRLQTIPGVGILGASAIATIVTEPKAFRSGRDFAAWVGLVPRQDSTGGKCKLGPISKQGDRYLRRILVVGAHAVLKRARLHPQKYPWLTQLLARRPFKVVAIALANKMARIAWALLAKGETYRMPRLAAV

SEQ ID NO: 47245 - protein, 379 aa, unidentified
MKKNTIVNLQVTKSQIRRMAAKQRLTVGLDLGDRTSRYCILDEAGEKANEDQLPTTKTGLEVLFGKMPRCRIALEVGTHSPWVSRHLKAMGHEVIVANPRKVKLITESVKKNDRMDAEQLARLARVDPKLLSPIQHRGAEAQADLAVVRARMALVDARTELVNSARGLAKPMGERLKKCDTDYVKESLADGLSEAAQNAIRPLLKSVEEINKQIGVYDQRIEEIAKRYPEMKLLKQVHGVGTLIALTYILTIEDAERFAHSREVGPYLGLTRKLRDSGDSRPELGISKAGDELLRRLLVQGAHCILRDGAPDSDLKVWGKAMLQSGGKKVSKARKKKAVVAVARKLAVLLHRLWVTGEVYDPQYNRKAAQAAKGKGKAA

SEQ ID NO: 47246 - protein, 354 aa, unidentified
MVHVGIDLHQKTCFLNALDDQTGEICLDQEVPSERQALLDCLEPLRERGPMRLIIEACGFAGYWWDQLDPLGEVVAVHPKHVKDYRGNKRKNDRRDAAFLVALSQLNRLPCAYLGSTAERDLKDLLRYRVGLVRIQTRLRVRLRNVAQRYGTVLAASDVDSAKARQLWQEWPLRETHRLIVDQLLLVLEEGGRKLSVVDERILAAARPDRRVQLLDTLPGLDYFGALLVAVEIGDWQRFHSGDAVACFAGLVPRESASGGHIQRGRITKDGSPYLRWIMVQAALHADQSPRLKRLQERVTKRRSPMQARVAVAREMLVIAWHMLRDDKPYEERAPRESGGRPPSSGKPESPLTR

SEQ ID NO: 47247 - protein, 339 aa, unidentified
MTVKTVGLDLAKDVFQVHGISENGRVIFNKAIKRAKLLAFFETLPPCTVGMEACGSSHHWGRQLRKLGHDVKLMPAGYVKPYVKRGKNDAVDAEAICEAVRRPTMRFVEIKTEEQQAILSIHRTRDLAVRQRTQLANMIRSLLREFGHILPIGIEAVTAFARRHLDGYHPDMPEIANGMLGIQCYQFIGLNERIDGYSKMIEQHALLNADARRLMRMPGIGPITASAIVTTIGDAKQFRTGRDLAAWLGLTPLNKSSGGKERLGKITKQGDRYIRKLLVVGMTSRAVMAKRSPEKVDLWTAKIIADKPFRLATTAMANKAARAIWAMLTKKQEYRQPAY

SEQ ID NO: 47248 - protein, 370 aa, unidentified
MRETITPTLYLAIELSMGKWVLAFGDGQQKRQWTIPARDLGSLLQKIVEARAYFKMEEPTRLVSCYEAGRDGFWLHRFLGAHGIDNLVMDAASIEVPRRHRRRKTDCLDAAGLLRVLIRYDRGEHEVLSTVVVPSEAHEDRRRLHRERERLLKERTQHVNRMKGDLITIGLMIRIDRHFARRLEEAQTWDGKPLPGQLKQTLLREYQRWVLVCEQIKELETQQRQAVHHESSACMEKLRALIRLKSINIAGGWPLVMEVFGWRQFRNRKELGGFSGLTPTPYNSGGSEREQGISKAGNRRIRTLMVELAWMWLRWQPHSQLSRWYENRFGGGGKRMRKLGIVALARKLLIALWHYLEHGVVPQGAEFKRA

SEQ ID NO: 47249 - protein, 400 aa, unidentified
MRSIGMDVHRSFAQVAVLDRGKVTEEFRVELDYDAVVAFEQKLRKDDEVILEATGNTSAIVRLLTPFVAKVVIANPLQVKAIAHARVKTDKVDARVLAQLHAAGFLPEVWAADDDTLNLRRLVSERAALVRSVRRVKSRVQAVLHANLVPKYSGHLFGKDGRDWLSKAPLPKAERDLLARHLDELDWLKGKLEKLDGAMARIALDDTRTRKLMTIAGINSVVATAVIAAIGDISRFPTPDRLASYFGLTPRVRQSGDRGAIHGRISKQGNAIARTMLIEAAWSAASVPGPLRAFFLRIKDRKGLNVAAVATARKIANLIWQLLTKEAPYRWARPAFVAMKMRKLELRAGAPKAHGPAGPARDYWIKEIRHREMELVAQAEAAYAAMVEAWRDRPPKPQKG

SEQ ID NO: 47250 - protein, 363 aa, unidentified
MDKITHIGLDVHKETIAVATLRPGATLCEERVIPNTPEALRKLFARMGDPSALRACYEAGPTGYDTQRLLDSLGIACDVIAPALIPRRPGVRVKTDRTDARNLARLHRAGELIPIRIPTVFEEALRELIRTREDLKNDRRIARQRVKSFLLKHGRQYPRTTAARWSGAFAEWARSQKFSEPTAQAAFHYLLAAEETRRAQLVAIEAEIMKAAEEPELAPGVARLRCFRGIDTLSAVTFLAEVGDFRRFASAASFMAFTGLVPSEHSSGHSIHHGPITKTGNAHLRRVLVEAAWAYRHRPAVGETLAKRLQGQPPVVVAYAWQAQCRLSARYRVLAQKKAHNKAVVAVARELAGFIWGMMTDRM

SEQ ID NO: 47251 - protein, 350 aa, unidentified
MVVVGADVHKRTHTFVAVDGVGRKVGEKVVAATRCGHAEAVMWARERYGSAVVWAVEDCRHLSARLERDLLGAGQQVVRVPPKLMAQVRASARTRGKSDPIDALAVARAFLREPDLPIASHDEVSRELKLLVDRREDLVGQRTSTINRLLWRVHELDPEHAPKPRSLDLAKHRRLLGEWLATQPGLVAELARDELADITRLTDAINALATRIGDRVRTIAPTLLAMPGCGELTAAKLVGEAAGVPRFKNEAAFARHAGVAPIPVWSGNTAGRVRMTRSGNRQINTALHRIAVTQIRLAGLGQAYYRKRLETGDSPTEALRCLKRRLARVVFHHLHTDHLNRIQPCQTAAA

SEQ ID NO: 47252 - protein, 317 aa, unidentified
MSKSFIGIDVSKNNLDVHILPEAMSLSYRYETKPMKALIKKLKTYAPELVVLEATGGYEITIGIALADAGLPVAIVNPRQVRDYARALGILAKTDKIDAYVIARFAQDVKPEARGQLTFKEQELKSLVVRRQQLVEMRSAEVNRLSRTTIPQVKNGIQKVVRVLDAQIKAIDDDLDNEIKKNPIWSQKLEVITSFTGVGDHTANTLLFGLPELGTLNRQEIAALVGVAPFNRDSGMLRGKRTISGGRANIRKALHMPTLSAATRWNKDLMVFYQRLIARGKKHKVALTACMRKLLITLNAMVKNNEPYNPKFREVRP

SEQ ID NO: 47253 - protein, 345 aa, unidentified
MLKIDHAGIEVSSKELIVALRRDGKLKPWKSFPNTPGGHQAIVRYLARQGHQVQVCLESTGIYGLDLALALHAAPGIEVMVANPRAVRHFAQALMQRSKNDRLDALVILEFATRMPFQAWQPPSPAARHLCALARRLEALTELCAAEKNRLHAARATEALPSIIRRDLEGSLRFHERAMQRLEEEALKVIAQEPELQREFDLLLSIRGIKETSALQVLAGLAVMSPDLDVRQWVAYSGLDPREYSSGSSVHKKTRISKAGNRHLRRALYMPALVAARREPHFRAYYEHLLARGKAKMQALVAVMRKLLHAIYGMFRHQLPFDGSKVYRLPQAVAASSASCTKEVA

SEQ ID NO: 47254 - protein, 341 aa, unidentified
MKNLFIGVDFSKEKVDVAILFADGLAETAARVFNEFKTTVSGYRQLVKWVEQNSCGIDSSLWLFCGENTGDYSKGLCNFLYGKGYDMWLENAKSIKDASGLRRLKSDRADASMIAEYAMRNYDKAVMYEPLSESLTQLRELFLYRQMIVRHRCSFQVRRGVKRLTMEKSPVKTMISQSGRHIVSELNKEIEKIDKRIADLIKSDEELTEVFTIVTSVPGIGTQNAVCLMVYTDNFRRFNYDSRKIACYYGLAPFGKDSGTSVHSDPHVHYMANRQIKAMLTQAALAAVNFNPIMARYYMRLVERGKKKQVALNNVKNKLVHLVTAMVRNRQTFTPEYKISA

SEQ ID NO: 47255 - protein, 346 aa, unidentified
MMLIGCDFHPSWQQVSWLDVETGETGEQKLVHARGEAKQFYEQLAAPVLIGMEATGNSQWFIELVEDLGHQIWIGDAAQIRASYVRKQKTDKRDAAHILKLLVEGRFPRLWTPDREQRDLRQLVLHRHKLVLIRSRVKNELQHLSLNKGMQRKRRLWSQAGQQLLRELPLKKWAACRREDLLGLLTMLDEQIGKLDGAVEHAAEENPQSKLLMTQPGVGPNTALAFVLTLGDVGRFPRGKQVASYLGLIPREESSGGRQKLGVITKQGNRMLRMLLVEAAQAAVRYDPQFRKEYLHRCHKKPKAVAKVAAARKLAVRLYWMLRTNVAYPEIVRIESSSGLPLVGAS

SEQ ID NO: 47256 - protein, 468 aa, unidentified
MPSAPTHRKRALDELACVHPNAAALDIGSEEIVVAVPPDRDPEPVRVFQTFTADLQALVAWLVACGIDTVDMESTGVFWIPIYELLEAAGIVPYLVNARHIKTVPGRKSDWNDAQWLQKLHALGLLQGSFRPDVEIRTLRTLVRYRSEMIERRAPHINHMIQALKHMNIQLNLVLTDITGVSGLAMLRAIIAGERDAERLAEFRQPGCKHSFAEIVKALTGTWDDAQIFILTQSVELFDYYSTKIEACDRQLEQQYQAMESRWEKDAPLPDLPPAKGESKSKNAMSFNARAQIARVIGVDLVAVMGLSAITVQTIISEIGTDMERFPTVKHFCSWLGLAPHNDISGGKVLRSRTMKVHSRANQAFRQAAHSVARSHSSIGAYYRAMRARLGPKQAIVATAHKIARIVYHLLKTGEPYREESDVEYERKRQEREIKHLARRAQKLGYTLTAVSATASESPPKPRGDGSF

SEQ ID NO: 47257 - protein, 361 aa, unidentified
MHDSTTWVGMDVHKESIVVAAVNGAGTVAARWETPNTSKGKDRLATRLSEFGTVRCAYEAGPCGYDLRRFLEGKGIPCDVIAPSLIPKKSGDRVKTDKKDAEKIARAHRMGDLTAIHVPTPAQEALRDLLRAREDANEDLVRRRHRLQKFLLRQGRRHEGKNWTRDHWRWIRAQKFDDRNSETVLSEYIAAIDQEIERIGRLDAQIEQESINPDIVPAIARLKALRGVDTLTAMTILSELIDLNRFPSARKLMDFVGLVPGEYSSGGKQWRGSITKSGNVHVRRVLVEAAWHYRHSPRSTGAAIKKRREGQPPEVIETARKAELRLYKKFTRMVMRGKKTTVAAIAVARELAGFVWAIGRI

SEQ ID NO: 47258 - protein, 425 aa, unidentified
MNQDNQSFAAFIGLDKSDKKINVTLQRCSTARSERSIIQGSAEALHAWVAALCARFPDQRVAICVEQPAAGLIHALMGYDFVVLFPINPVTLARYREAFTPSRAKYDPTDADLLCELVAQHREQLKVWQPDDICTRKLRHLTQARRSSVNMRTRLSNQLKALLKGYFPQALELCGEDLTTPLACAFLQKWSSLQQLKKARPETIRRFYYAQNARRGDVIEKRLTLIAQAIALTNDPALIESSIVTLQALTLGLRAAHTAIARFDREIARTFTQHPDASLFAALPGSGTVYSARLLAAFGSRRERFESAEALLNFSGIAPVLKRSGQTTIVHRRYARPLFLHQSFIEYANESIRHSLWARAFYQMHKSAQKSHWVIVRALAYKWIRILFRCWQQRTPYDELRYLKSLQKSRSPLLQYLAQPNTQPV

SEQ ID NO: 47259 - protein, 333 aa, unidentified
MLPPNCGTATPYILRNTVGLDISKLTFDATAIVGKTEHSAKFDNDSKGLNQFSDRLKSLGCQNLHICMEATGNYYEEVADYFAQYYSVYVVNPLKISKYAESRFKRTKTDKQDAKLIAQYCRSAKESELVKRQKPTDEQYRLSRMTAAYAQIKSECAAMKNRHHAAKDEEAAKAYAQIIKAMNEQLEVLKEKIKEQTEKPNCKEGVKRLETIPAIGRMTAAVLFHHLTSSKFETSNKFAAFAGLSPQQKESGTSVRGKGKLTKFGNRKLRAVLFMPTMVAYRIRAFPDFIKRLEEKKKPKKVIIAALMRKLAVIAYHVHKKGGDYDPSRYKSA

SEQ ID NO: 47260 - protein, 288 aa, unidentified
MDPDDKHGISEKMSNGVPQTIGIDISKASLDCHAYPAGAERQFANTAKGHKALIAWLRQWPVERIAFEATATYHRALEAALADWPCVKLNPERARRFAQATGTLAKTDRIDAMLLARMAATLQPPIRPTRSPQQVQMAELINARDGLVRDRTALKNREKNLTITLLKRQCRQRLEQIDRHIEALDAEIASLIAADAALARRHQILTSIAGVGTLTANQLIATMPELGSLENKQAAALASLAPIARQSGQWKGKRFITGGRANVRQALYMPALVAARYNPDLQAELLTG

SEQ ID NO: 47261 - protein, 340 aa, unidentified
MGEVTTIGLDLAKHVFQVHGVDASGATVLRKQLRRSQVVAFFAGLPRCLVGLEACATAHYWARELQAVGHEVRLMPAQYVKAYVKRNKNDAADAEAICEAVRRPSMRFVAIKTAEQQAALLLHRGRERLVRQRTTLVNALRAHLAEFGVIAPQGLRNVGKLIAIVRDEGDARLPDLARQVLQVLAAQIEQLEAAVAAIEKQLMAWHKSNPVSQRLASVPGIGPIIATAIAATVVEPSGFRSGREFAAWLGLVPRQNSTGGKHRLGGISKRGNQYLRRLLINGASANLLRSKATNADPWVIGLRRRRPPLVVAVALANKTARIAWAVMHRHENYQRVAAAA

SEQ ID NO: 47262 - protein, 343 aa, unidentified
MDHFAGLDVSVKETSLCIVDDTGKIAREVKVASGPDALLAVLTNPAYCFKRIGLEAGPLSQWLFSALAEAGLPVICVETRHMRAALKAQINKTDRNDARGIAQMMRAGLYRPVHVKTLRSQKLRMLLTHRKLLQSKAIAIENDLRATLRNFGLKVGVVGTVKFEARIKELVENLPDLVVLVEPLLIVRQVLREQLSILHRRLLAIVRDDDVCRRLMTIPGVGPVVALTYRATVDVPARFRNSKAVGAVFGLTPSKYQSGENDRTGGISRCGDEMMRAMLYEAAQILLVRSVKWSWLKAWAMKIARHRGLKKAIVALARRLAVIMHRIWVDGTEFRWTREAAAA

SEQ ID NO: 47263 - protein, 378 aa, unidentified
MDRATNSTAPADRLLCAVELSKNSWLLGIQFPDRQKASVYPLKGGDSEGLMAKLVAACDRWTKVSGKKPSIILCYEAGYDAFWLARFLQARGIECLVVDSASMQVNRRSRRAKTDRIDLAKLLRALIAWCGGERHVWSVVRIPSVDEEDLRRSHRERSRLITERTAHINRIKGLLFAQGIRGINVKACYKTLQIDKLLTGEGRPLPPRLAREIKREIDRLALVQQQIAAIEEERDESPTTCKETEKKRAQLLLLKGIGPTGSAVMAREVYYRQFSNRRQIAGFLGLATSPYDSGQMERSQGISRAGSGPVRATMIQIAWLWIKHQPKSAIAQWFVQRTEGQSGRIKRIMIVAVARKLTIALWRYLEQGLVPQGATLTR

SEQ ID NO: 47264 - protein, 328 aa, unidentified
MMVSVGIDVSKDKHDCFIVNSEGEVLADVFTIPNNMDGFHCLLQRVRECTTPQDKIKVGLEATGHYSYNLLGFLLDNGLATYVLNPLRTNLYRKSLSLRKTKTDRVDARTIAIMLLSDAGLKPYTNTAYHNEELKSLTRYRFDKVKERAKLKSSIARLVCILFPELEKLVPSLHIASVYALLEEFPGAKQVANAHLTRLKALLETASNGHYKRDMALGIRNAAKNSIGSQMPAKSLELQHAIRLIRELDREIDEIEEQIQSIMDELHSPITTIPGLGFRMAAMILAEVGDFTRFDSPDKLLAYAGMSPSTYQSGQLKNCYPCCGQAFL

SEQ ID NO: 47265 - protein, 343 aa, unidentified
MTKYAGLDVSLEETAICIVDETGGIVREASVATEVEAIEAYLSALGVELARVGLEAGPLSGWLYAGLRAAGWSAICIETRRMRAVTRTMPVKNDRKDAAAIAQAMRTGWFRAVHVKSPESQRLRVLLRYRRLLQAKRLDLENELRGTLKAFGLKLGKVSPRGFAARIAELVAGDDFLASLVAPMLAARTQLIAGFNELHVRLLAIVKEDAVCRRLMTVPGVGAVTALAFKTGVDDPHRFAHSADVGPHFGLTPRRYQSGEVDRSGRISKCGDALVRSLLFEAGMVLLHRVRAASSLKRWARTLAKRVGTRKAATALARKLAVVLHRLWVDGTTFDPQHRHEVA

SEQ ID NO: 47266 - protein, 362 aa, unidentified
MMKLKYSICCGLDVHKNVIVATIVTTNKDGISEYLQKSFSTINSDIQRFHNWLIENNCYHVCMESTGKYWIPIFNYLENDIDVCLTHPKYVKAIKGKKTDKKDSKWIADLYKFDLVRCSFIPPKDFRQLRELSRYRFKLVCMKSSEKNRIQNCMTVSNVGIASVLSDPFGKTATEIISYLLEHTADSMDEKAVRKLIKKGAKSKSDEIIEAIKGYTIETDQAKKLELARGHLEYLDDMITQTEVELYVRIKPYYEFVEFVSTMPGMTELSSTIVLAETGVDMDIFDDAKHLCSWCGLSPANNESAGKKKSVRIAKAGDYLKPMMVQCALAAIKSKKSLILQSNMVESKSDVDTKRQSLPLQE

SEQ ID NO: 47267 - protein, 417 aa, unidentified
MRAVALDVHRDFCEVAIVEGGELRSAGRIETKPEALELFAQSLDVHDHVALEVTGNAWEIARIIEPHVARVIVVSPSDTGIRQARAKTDRLDARALAKLLWAGSLDAVWMPDERIRAMRRRLARRTQLVRARTRAKNEIHAVLMRCLKGRPPASDLFGVKGRRWLAEQELPIPERETVDAAMRQVEFLDAEIAAVEALIAAEALSWPEVKRLMTVPGVNVIVAATFMAAVGDIARFPDRRKLTGYLGLDPRVRQSGVGPASHGHISKQGSASARHALVEASWSTVRQPGPIAGFYVLIKARRGHSIAIVAAARKLACLFWCLLTRGEDYAFAQPSLTKKKLRRLELQAGAPRFQGGRGVWSTNDGMRTAERELALQAQRAYERTVKDWQQNKGAGTTAGRASSGSSKDQVARQTTSP

SEQ ID NO: 47268 - protein, 402 aa, unidentified
MAGRTAGIDWASEAHEVCISEGGRVAERFSVAHEERGLRELARRLRARGVERVAIERPDGILVERLLAAGLEVLAIHPNQVKAARPRFAVAHGKSARFDAYVLAELARTDSHRFRSLVPDGDETKALRALTRAREDLVGARVELANQLRAQLAAFWPGALIFSDLDSPISLAFLRRYLGPADARGLGPKRLAGFLARQRYCGRRSPEELLERMRSAPSGRAGEFEGEARRAVVLGLVHALEPIVAEIRELTFQIRGALAAHPDAAIFGPLFREAKTAICPATLIAELGAARGRYPTEAGLAADAGMSPVALESGKLRVATFRRACDKRLRLAVATLADSTRHWHPWAREIYRRARARGQDHPHAIRTPGRAWIRVLWRCWQDRVPYDPARHGNFSRLQPVRG

SEQ ID NO: 47269 - protein, 339 aa, unidentified
MITLTVCVGLDYHSDSIRVCVMTMEGEELLNRSVRNEVGEVIEAVQGCGRKFQVVVHVVAIEACSGAADFATRLSEITEWTVRLAHAGAVRRLKQGPDKTDCGDAWHLANLARVNYLPEVWLADDTTRQLRRLIRHRQALMADARDIKLRIRSLLKEERIPETAGAGSWTKTWRAWLLTVALGEHSRWILEQELMRLTQLEAYLEAVDKRMEEATQADPVVQRLLDQAGVGLVTAVLLRAVIGRFDRFRSGKQLSRYCGLTPCNASSGKRQADAGLIQAGHDDLRAVLIQLAKRLPRHVPRWKQVHAQLRKTKPPNVASAAIANRWVRCLFHEMRTPAA

SEQ ID NO: 47270 - protein, 403 aa, unidentified
MNAVGIDVSKGKSMVTILRPFGEIVSSPFEIKHTSSDILSLIKLIHSIEGESRIVMEHTGHYYEVLAQQFSAAGLFVSAVNPKLVKNFNNDSLRKVKSDKADSIKIARYALDKWQNLKPYSIVDELRTQLKAMNRQFHFYVKQKTAMKNNLINLIDQTYPNANTYFNSPPRSDGSQKWVDFVYTYWHVDCVRKMSLNSFVKHYQNWCKQKKYIFNKSKAEEIYTKATELVPVFPKNEITKRIIRQAIAQLNSTSATVETIRILMNETASKLPEYPIVMQFKGIGPSIGPQLMAEIGDITRFTHKGALTAFAGVDPGVNESGSYAQKSVPTSKRGSSNLRKTLFQVMDVLIKTMPQDDPVYQFMDRKRAQGKPYYVYMTAGANKFLRIYYGRVKEYLCILSESS

SEQ ID NO: 47271 - protein, 325 aa, unidentified
MQFLGIDVSKAKLDCLWLRDPETQKIKTKIFQNTPDGHKALIKWIKITIKAEPENVHIIMEATGVYHESLAHYLFEQGFSVSVVNPARPKAFAKGLGSVHKNDKKDSYILALYGCRIAPSFWKPEAPEIRELKALTSRLEAIECDLRREMNRLEKSEFSPVSELVIDSLNKMIKELKAEKKRLENEINDHIDKFPQLKKDRLLLESIPGIGPVVSRLMLMVIHSRDFKKASEVAAYLGVIPVHNESGVFKGCSRLSKAGSGKIRSKLYMAAIVAWKYNPDMISQKNRLIMNGKTKMQALGACMRKLVHICFGVIKNQTEYQPQVV

SEQ ID NO: 47272 - protein, 365 aa, unidentified
MQNISTIEKIGESIFKGQLTIGLDLGDRSSAYCVLNEAGEIIWEHKVATTPEAMKQVFGRMPRSRIAMETGTHSPWVSRLLTELGHEVIVAHAQRVRLIVKSRRKDDRLDARTLGRLARIDPELMSPVKHRSAQAQLHLTEIRARAVLVSARTALVNAARGLVKSYGERLRKCGTEQFRRETTSELSAGLREALDPLLREVESLNERIKEYDRRLAKIAKQRYPETALLKQVKGVGDLIATAYVLTIEDPHRFRKSRDAGCFVGLQPGRRNSGESEPQMHISKEGDEYLRTLLVQGAHYILGPFGEDSDLRRWGQKLSARGGKNAKKRAVVAVARKLAVLLHRLWVSGEVYEPLRNSQKAMSAAA

SEQ ID NO: 47273 - protein, 410 aa, unidentified
MELISLHRRVIGLDVHQAQITACALIEGEDGVHIERRAFETFKRGLRALTDWCVGLRAEVVVMESTGIYWKSPHAWLERAGLNCLVVNAHHVKNVPGRKTDIADPEWLAMLARAGLLRPSFIPPEKLRRLRLVSRQRQKMVGTLAAEKNRLGKVLSDAGVRLGVVVSDLHGKSARAMIAALIAGATPEQALRFASPQLKAPREEIAAALEGEISAEHCFVLQEILSHIAFLEQSIGKFDAHLLAGLDSPEEKNALALLQTVPGIDLIGAAMLLVEIGTNMVLFAGSDHLASWAGMCPGNNRSAGKRKNERQRKGNSYVRRLLCEFVQAARKTPSIFQAKHKAVAIRRGFKRAIMACAHKMLRIIWAMLLRNQPYRDATVDYEALSVRRNAPRWIRALKRFGYLRASAATR

SEQ ID NO: 47274 - protein, 387 aa, unidentified
MIVIGADTHKGSHALAAVDDGTGKVRGSRQIKAEEPGHLAAVRWARELDEERVWAIEDCRSCSRRLEQALLAAGERVVRVPPNRMGASRKGEREPGKSDEIDALAVARAVVKDGVERFPVAYLNEQAMEIRLLVEHRNDLVAERTRTVNRLRWHLLELCPELEASLKRKALNQPRTLNWVERQLRKLPTGARVRIAREQISDLRGLNRGIERLAAELAELVTAHRPRLLAEHGCGALTAAILIGHTAGNERFRSEAAFAQQTGTAPIPCSSGKRTQHRLNRGGDRQLNHALHIIAVTRAQHDTATKQYLARKEAEGKTKKGALRSLKRHLARRFHQLLSEPPADQQPTSEPASIIEPEPPCIPDHRSKPRREVEQIAAAPSPMVCIS

SEQ ID NO: 47275 - protein, 356 aa, unidentified
MNHVSKLDFTGQQIYVGMDVHKKSWSVSIFTDQFEHKTFSQPPEVGVLVNYLRRNFPGAAYTSVYEAGYSGFWIHDRLQEQGVQCLVVNPADVPTKDKERAGKTDRVDCRKLARSLRNGEIEGIYVPSRPKAEDRSLLRTRHSMVKKQTRCKNQIKSILCFYGIHIPDELATGYWSKRFINWIESVRMERASGNMALKVHLAELTHIRQSVAELNRAIRALASTDDYRNNVRILKTVPGVSIMTAMTLLTELYDISRFKTLDKLCSYVGLIPNTDSSGETDRKTGMTGRRNAQLRVILIESAWTAVRKDPALMMAFTELCKHMTKTKAIVRIARKLLNRIRYVLKNQQEYVPAVVQ

SEQ ID NO: 47276 - protein, 318 aa, unidentified
MEAQNIEFKQIVSRGCGIDVHKSVLVATIDGEGLKRETREFSAFTSSITEMKEWLLENKITHVAMESTGVYWKPIFNILEDSPLKVWVVNARHIKYVPGHKTDKKDSAWIAKLLLAGLLKGSFVPPVEIRQLRDMTRYRRKLQGAITAEKNRMIKMLEDSNMKLSTVLSKVHGVSGTRIVDALLEGQTDPVYLASLCHGKVKAEQEDIILALEGNLKEHHKLMIRIIRKDIHQTESLIKELDVEIEKQLLPYAQEIALLSQIPGVGEQTAGELISEIGVDMEVFATDKHISSWAGVSPGNNESAGKKKVDELLMETNK

SEQ ID NO: 47277 - protein, 388 aa, unidentified
MRPISQTTTQKLSYCRPDDATLYASLELSQATWLVTALSPGSEKMSKYSTRGGDGAALLGLLRRLQARAERLTGGPVDIVVIQEAGLDGFWVHRLLSAHGIQSHVVDPASIAVPRRRRRAKTDAIDGETLLRTLLAWQRGEPRVCAMVVPPTPEQEDRRRTSRERAVLLQERVRHVNRIKGLLASQGITDYEPLHKDRRARLATLKTGDGQPLPMRLKAELLREIELIELLIRQIAEVEAERDTAVELDVEGHQSPVALLARLKAIGPQIAAVLYLEGLYRSFANRREVAAYAGLVPTPWRSGTIDREQGISKAGNRRLRHIMIELAWLWVRHQPASALSHWFRARVGTERGRIRRIAIVALARKLLIALWRYVTHGEVPEGAVFKAA

SEQ ID NO: 47278 - protein, 401 aa, unidentified
MNAVGIDVSKGRSTVAVARPFGETIVKPFEVLHTKSGIDNLINILNALEGECRVVLEHTGRYYEPMANWLSGAGLFVSAVNPWLIKNFSTNSLRKVKTDKADAKKIARYALDKWCELRQYTPMDKKRAQLKTMNRQFNFYMKQKTAYKNNLVALVDQTFPGANKFFASPAREDGSQKWVDFIDTFWHVDCVCGISLAAFTDRYQKWCKRNNYDFQPAKPADIYNISQDLIATLPKDNMTKMFVKQAVDQLNAISKAVEELRIQMDELASELPEYDIVLGMKGVGPTLGPQLMAEIGDVSRFNKRSALTAFAGVEPGNNQSGDYEQHSVPTSKRGSPSLRKTLFQVMDVLIKACPQDDPVYAFMDKKRSEGKPYYVYMTAGANKFLRIYYGCVKAHLGDTDT

SEQ ID NO: 47279 - protein, 341 aa, unidentified
MKHSVIGMDIAKKVFQLHTVDQCTGRIERIKLRRDEVLAFFANYPTSLVAIEACGSAHWWARQLQQQGHEVRLLAPRSVRPFVLRNKTDAADAQAIWTAVQQPGACLVAIKQADQQAILSLHRIRSQLLKFRIMQSNSLRGLLYEFGIVLPEGYTQLSKAVPEAFANAEHQVPSMLLDSLRDQWTRIIQLDEEIRKIELRLKQCLRENSNCQKIAEIPGIGLLTATAAVASLGDAKTFHSGRQFAAWLGLVPRQTGTGGRVRQLGLSKRGDTYLRTLLMHGARSILNRGHRSEWVERLLTRRPYNVAVAAVANKLARTLWAVLAKGSTYRAELFTACPTGH

SEQ ID NO: 47280 - protein, 410 aa, unidentified
MGYETLIRRAHVMTRKNTLKSLPTDTEFRVVGLDLAKSDVSVAAIPVDDNTPSLVDRMTYADLLDWAGKISPTLFAMEPCNGYSLLCLQLENLGHEIKVISGWTVSMWINTHLSGQKTDLNDAIALARLAVSDAELTPIRHKSITEIRIQTVQAVRQQLMSQRSKSIVSFKALAQQWGIPCAAGHRNLKKLRESIEAKVDLITRPVANAMLFLLDAVKSLDRQIGQLNQTLQELVMSDERGRLLQSVLGVGTQISARVITVVGNIERFNSPRSLVAYVGVAPRNFITGHKNLTKKKHGNCPDLSHKGQGKISRRGDKLLRSLFIQGAACLYMQFCKDQLPECQLKRWILKQLAMQKPYGKLIVSLAAKLIRIVWAVLTYGEKFNIQKAGMTRSMWSEMALETPLNKEVPA

SEQ ID NO: 47281 - protein, 358 aa, unidentified
MRFYTQQHKHYCGIDLHARAMYVCILDQHGAKLVHKNLPTTPEAFLRVIAPYRDDVVVGVECIFTWYWLADLCQQEGIAFVLGHALYMKAIHGGKAKNDKIDAHKIAVLLRGGMLPQAYVYPAEMRATRDLLRRRCHLVQKRAELLAHIQNTNSQYNLPEIGKRLAYKTNREGVAEHFPDPSVRKTIEVDISLIDHYDKLLGEVELYITRTAKTHDVQTFARLQSVPGIGQILALVILYELQDITRFPRVQDFVSYCRLVKCAKESNGKRLGTSGKKIGNVHLRWAFAEAAVLFLRQSQPGKAYFAKLEHKHGKAKALTVLAHKLGRAVYYLLTREQAFALRRFVTASPLRGETQPTA

SEQ ID NO: 47282 - protein, 396 aa, unidentified
MHKEKHCAVVIDCWMERIGEVNFENKPSKFPAFVEDIRKICGTKEFVFGLEDTRGYGRNLASYLTGRKFEVKHVNPAYTNAVRLSNPIVYKDDSYDAYCVARVLRDMMDTLQDAKHEDIYWAIRQLVKRREIIVKYNVMNKNQLHSQLSYSYPSYKKFFSQIDGKSALCFWENYPSPVHVWNSTPEKIYETIKAVHRAFKIERVYAIIDMIKKDGNTQKGYQEERDSIVKNIVKDIKNNQELLKDIDEQLSKLLPQTGYKLQTMPGIDLITEAKIVSEIGDINRFPDSDKLARFMGLAPVHFSSAGKGKDERCRNGNRELNAIFHFLAIQMVAVSPSGKPRHPVFREYFEQKVKEGKNKPQALICIARTLVRLIYGMMKTKTEYRPYEKKEKEGTN

SEQ ID NO: 47283 - protein, 342 aa, unidentified
MTIIRIGLDTSKHVFQIHGVDENEKPVLRRQIRRSEVENVFAKLPPTRIGLEACGASHHWARVLRGLGHEVMLIPPQYIKPYVKRGKNDAIDAEAICEAMSRPTMRFVPIKTAEQQAALVLGLDPRMLGVRDLLVKQRTMLINALRGHAAEFGVTAAKGPQQVGELLRRLTTGEGVPALAREMLAMLAGQIEAVNAKLKAIEARLMAWHRRDQTSQCLATVPGIGPIGGVSFALKMPHAKAFRSGRHFAAWVGITPREDSTAGKHRPGRISRAGDEDLRRRLVLGATAVIQQAKAGRAAPWLLELLARKPKKLAAVALANKMARIIWAMMVSGETYRRPTVA

SEQ ID NO: 47284 - protein, 425 aa, unidentified
MTNCLFIGVDVALKGNQFCVMNFDQYIFFNLKFPNTPEGNEMVINKIKDIEDKFFFEKIIFVMESTGMYSFHPACYFSSNEYLNNFHAEVYQINAFEFDKYKKSFHDLEKEDGIDAYVLADFARVGRTKGLYPFKGAQYIALQRLTRQRYHICRELIREKTYILTNLYLSFSGLISANKSDLPFSNLFGATSSAFLEEFVSPDQIAESSVEELIEFISKKSKNHYSNIDDKITSLNKAMRASYRLDQTAYEPINMAIASSLNTIKFYQAQLKNIDKAITTTALGLDSNTYNILLSIRGIGKVYAAGIMAEIGNIDRFSHNSKLAKYSGLYWKRNQSGEYDSQDKKSSKKSNKYLRYYLVEATSSCVMHKFPFIKDFYDIKYNEVSKHQHKRALVLSARKLERLIFGLLRKNQYYIPINSVQNSKN

SEQ ID NO: 47285 - protein, 425 aa, unidentified
MNYKQNEKINQVKESTLVVGIDIGSTTQYARAFDWRGIELGKVFTFSNSREGFESFKAWMQHLQDKYRKSDVIVGIEPTGHYWFDLGAYLEDEGILLVMVNPYAVKQTKELDDNSQSKNDRKDPKVIAKLVTEGRYSAPYTPDGVYADLRIMVANRKRLIREMTQIKNRFARWFAIYFPEYTDVFGDYEAQSSMLLLKKVCTPEAIVELGAEKINQIWRDAKLRAVGMKRATTLCETAKRSIGLKKGSSAARYEMKLLLEDYEYKKAQLDAVMEEIEKLCRKIPESEQMLAIKGIGVITVAGFLAEVGDVRRFESPRQIQKLAGLSLRENSSGKHKGQTTISKRGRSKLRAVLFNAAIPLIAKNPEFKSLHEYYTTRANNPLKKKQSVIAISCKLIRVFYAILANGVTYDAQKMLSDIHRQPQAA

SEQ ID NO: 47286 - protein, 325 aa, unidentified
MEKLYAGLDIHKEKFAGCIMDKDGNITREHIFPSSKKALERFLNGIPSPDITIAIEACGLWRGAHKILTEMGYQVKLANPKKTHDIACKKKTDKVDARILADLLRTNYLPEVWIPDEQTLQFRDLTRHKATLTRLKTQVQGKIRGYLLRKGAKYGKLSKEETLSTLAEEDPDIKNLIQVYHSLKQEEQEVMRRIKRIAQNMKQTTMLMSMPGIAEFSSLMILAEIGDIRRFSSPKELVSYSGLCRGIYQTGSTERTVPNTAVNKWLKWIIYECSGRASMLDSRFQDYYYKIQQRKGFKTARRATARKMLTIIWYMLTYEEPYRAS

SEQ ID NO: 47287 - protein, 401 aa, unidentified
MESPIVSIDVSNGNSHYMCFIKNNKRFGKVKKIDHDIEGFKRLLEDIQKLEAETNEKVCAVFEATGVYTKPLERFLSKNSIKTYMINPLESARKRKEEIHNKKTDKLDPISISKVYYDKEEMMELKKKDETHNWLRKKNRLYEDQLNHLRKYKVTFQNQLSICFPGYLDLFKDGYSDIPMTILKKYPHPDLLKNKKAETVARYLEKNTCHTHKVSLEYALKIIEFAKKTYPGCEKDDVEVEIFKILLDKVIETQRECEKTLNEMITVASTLEEYRYISSIDGIGPNLAARIIAEIGDIEEFKSREALVAYAGLDPHIYQSGDQDGKHLKISKKGNKYLRCLLFLAVGCSIRGAKDNPVNRFYQKKKQQSNPLNSKAAKTACTAKLLKIIYGICKNKTTYER

SEQ ID NO: 47288 - protein, 396 aa, unidentified
MEVVAESVAGIDVHQKEITVTVLIGSAESAKPKKVHARFQTVTFDLKACGAWLKQQDVKQVLMESTGQYWRPVWQILEPFGFNMILCNPRIIKNIPGKKTDQKDSEWLSELARYGLVSASYVPPRQIQELRESTRLSKSITQQMTRLKNQVHDILQRSNIKLTTYVSDIFSGSGRRILALLENGEVINLASIEQAGTGKRGYRLKATPKQILASLDGALSYNDRFLMAMNMNLLASYQRELINLESRIYEQLEAFSELYHRLQAIPGVGEGTAQIIIAEIGSDVSPFPDAHHLASWAGLCPGSYESAGKKHGAHTLHGNKYLKTAMITAAMAAKSTKQTGLRDFYWRLCSRMGKQKANVALAHKLLRIIYVMIQTGATYQEYKKSQRTEDTLTPKI

SEQ ID NO: 47289 - protein, 495 aa, unidentified
MSDFKIPRRNVRTRPTPAPAPAANDLSRAARHAEKTRRHAEECAKLVSMPVQHAHAAGIDAGDISHWACVESTPDDTDAVREFPAHTAGLRQLVDWLRQCGVTTVALEATGVYAHVLFLTLLEAGFVVVMTAPQFARQIKGRPKTDKRDCQWIQRLHKHGLLPAVFQPDEATQTLRDYVRQRANLVRLSGQHIQRMQKALQLMNLKLTRVLADVTGVTGLMIIRAILAGQRDPQQLAKLRDRRCRHSVADIAQALDGRYRPEHVTELRCCLTLWEKYQEVIGELDEAIDAHLRTMRRQTELPPLPPKPRLRGHKPHDPRFDVRQALYFATGVDLTAIEGIEEMHALTLVSELGTDFTKWPTVKQFTCWLGLCPNWQKTGGKVKSSQTRRVKNRAAYALRLAAWSLQRSKSYLGAYLRRQRSRLGAPKAITALAHKLARIVYHLVRYGLAYVKQTEAAYAEQVRERLERQLRRRALELGFELKKIEPPVMPTVTEA

SEQ ID NO: 47290 - protein, 344 aa, unidentified
MEISTIGLDLAKNVFQVHGIDADGNVVVRRTLRRAQLLPFFASLPPCLVGMEACGTAHHWARELIKLGHDIRQMPAAYVKPYVKRGKTDAADAEAICEAVTRPTMRFVPVKSPEQQAALSMHRARDLLVKQRTQLVNMVRALLAEFGINIPQGIRLALEMARKIIDGEAPPVPREAAKIAGRLSQQALDTHAQLREIDLDLLAWQRTNDTARRLMSIPGIGPIGATALAASVTDASQFRSGREFAAWLGLTPRQHSSGGKERFGRISKMGDKYLRTLLVVGMTSLIKGVKRKPETADPRLVALLARKPVRVATVAMANHTARVAWAIMARGETYRAGHQPRLAA

SEQ ID NO: 47291 - protein, 341 aa, unidentified
MDKIASQPMAWCGIDVSAQQLVVALQRGDRPVQQRTFPNRPVGHQALIRWLERTTGMVRVCLEATGLYSLDLALSVHDAPGIALAVLNPKAVCRFAETLRRSKTDPADALVLLDYARRMPWQSWQPPSATALVLRSITRRFAALTKQHTMEANRLHAAEASKTVPRCVRQDLKQSLRQIERRLKRLQSEARELVTRDAELEQRYTLLRSIPGIGESSALQILGELEVLAPDLDVRQWVAHSGLDPMHHTSGSSVHRAARISRAGNRHLRRVLYMPAVVGVRFDPYLRAFYEHLLERHKTKLQAIIAAARKILHAIYGMFRSRSRYDGSKLFPLLQLATQAA

SEQ ID NO: 47292 - protein, 354 aa, unidentified
MPRKTTSLEAVATIGIDIGKNTFHLIGLDKKGAIVLRQKLSRGQVDNRLANMPLCLIGMEACVGAHHLSRQLKALGHDARLMPARYVRPYSRGQKNDFRDAEAIAEAVLRPTMKFVAIKTVEQLDLQALHRVRERLVCQRTSAINQIRAFLLERDIAVRQGLRALRTEMPIVLAMTDKLSPRMIHMIEDLCTDWRYLDGRIATVSNEIEMLSEQDDGAKRLMTVPGIGPIISTATVAAIGSGDVFSKGRDFGAWLGLVPRQMSTGGRTILGPISKRGNRYLRMLFVQAARAVLLRPQSWEKHGLKSWIEAAARRLNRFKLAIALANKLARIAWGVLHGGRNFEVRPLRPAPQAS

SEQ ID NO: 47293 - protein, 352 aa, unidentified
MQAISVGCDAHKHYSQLELQDASGQVLNRVRIDHSPGAVSSFFSRLPGGTPVALESVGNWYWIADEIEAAGCLPLLTNPAKAKLMMGHVNKTDKLDANGLATLLRIGSLPTVWLPPAALRDQRELPRTRMALTALRTSIKNRIHSLLAKYNLSPEDGSQLFSKKGRSWLESSLSRLPPETGRCLAQQLELLDFLSLQIDTLEQRIHNLIALTPTMQLLKSLPGVGDMLAIVIEREVGTISRFPSAPQFSSYCGTTPRVSSSGGKTRYGKLRTESNQYLKWAFIEAANAISAHHAQRGWTARHVSKLYLRIRSRKGSSVAIGAVARHLAESTFWVLTKNEPYRESSKVSPRQG

SEQ ID NO: 47294 - protein, 318 aa, unidentified
MNTNTLQNINVGVDTGKSQLDIYIRLLDIYFTVPNTDKGITDAIKTIKKHKPQRVVIEATGRLEMPFILACDKAKLPYVVANPLRIKRFAEAIGQRAKNDRLDAELIAHYAERVQPELTTLKSENIRLMSDLVTRRNQLLAMQTMERNRLQILPKNISSTITPILTALKNQLEKVEAKIAKLIESCPEYQAKSTILQSMPGVGKILAASLISNVPELGFITNKQASSLIGVAPITRESGRFKGKRMIKGGRPQVRTVMYMAMMSAIQCNPVFKATYERLLAAGKPKKVAIVACMRKMVVILNSMLRDGAMWDKDSVKN

SEQ ID NO: 47295 - protein, 444 aa, unidentified
MVAVKKRKFRTFTRDLKQMRTWLKNCRVTDIAMESTGQYWRPLWNLLEGEFVRLLLVNPQHIKGLNGYKTDPKDAQWIADLLEGGKLRGSWVPPREIRELRDLTRQRVNLLEDLNRVKNRVEQWCQTGNIKVSSVATDLFGVSGRKMLKAIIEGQRDAGWMADYARGTLRGKRRELQFALEGTFTAEQRWLLDRGVRQVEWLETQVQILEQEIERRVADFEGPMQRLLTIPGIDRKTGWTIIAEVGADMSAFADARHLTSWAGLCPGNRESGGKRFSGRVRKSNRYVKRAMCQAAWAASHTKNTYLSAFYRRMCIRKGAPKAIMALAHHMMVVVYQVISRSEEYVEFGGDYYDRRSKPKAVASLVARLAKLGYQVDLKPMEEMPSDGPLPYEIMPAPDPKEEARPDASTPTKRKRGRPCKCIERGIDCKHRTLNPAELADLATT

SEQ ID NO: 47296 - protein, 269 aa, unidentified
MDHFAGLDVSVKETSICIVDDTGGIVREVKVASAPEALLSVLASGVYGFKRIGLEAGPLSQWLCSSLAEANLPVICVETRHMRAVLQAQINKTDRNDARGIARMMRAGLYRPVHVKTLRSQKLRMLLTHRKLLQSKAIAVENDLRGTLRNFGLKVGVAGAVKFEARIKELVADIPDLAGMVEPLLIVRRVLREQIAVLHRRLLAIVKDDVVCRRLMTVPGVGPVVALTYRATVDVPARFRNSRAVGAVFGLTPSRYQSGEIDRTGGISR

SEQ ID NO: 47297 - protein, 358 aa, unidentified
MQSVTRVGIDLAKMFIQVHAVDAVGKLVCNKQLSRDKFIAWCNQLPAGCLVAMEACSGSHAWARKLIALGLDAKIIAANHVAPYRLEGKGGKNDANDAAAICEAASRPSMRFVPVKTLSQQGMLCVHRYREGVKEERTANINRIRGLLAEFGIIAPQSPNKLRERLAEIIEDADNDLCGIARMVIQEAFSHWDEIDKQLEWCAQRISAHVKENQQAQTAVQLMGVGPVTASAAVVTVGDFKQFKNGAQFGAWLGLTPRQNSSGGKTKLGRITKRGDVYLRMLLIQAAKAAVMTAHKRDDSISRWLLQLREKSGWQKAAVAMANKNARILWAVMTKGCDFDPRYVSVKPSGGGSIAAAI

SEQ ID NO: 47298 - protein, 370 aa, unidentified
MGKSALYVGLDVHKMSVDVAVAEPGPGAEVRFYGRIGGDLEALDKVTRKLQAKGAELRFAYEAGPCGYQVYRHLTAQGHSCLVAAPALIPRRPGDRLKNDRRDALALARLLRAGELTPVKVPDADDEAMRDLTRAREDAICVERRARQRTVAFLLRHGRVYPGKTTWGRGHWAWLLQQVMDHPAQQIVLQEYLDAVREASARVLRLTGQIRDLVPQWHQAPFVAAYQALRGVSFIVAATVVAEVGDLDRFNNPKELMAYLGLVPSEHSSGASVRRGRITKTGNSHARRVLVEAAWAYRLQARVTRHLLKRQEGLPECVRQLAWKAQLRLCTRYRRLLARGKARQTIVIALARELAAFLWAIGRAVAPATA

SEQ ID NO: 47299 - protein, 450 aa, unidentified
MDLFLYFDSFDWYEVTQTTAFRLLLVISLLTLDVSIHVITQPDSLWKTTAPNFFKEVSLMPLFFVGIDISKYKHDCCILSAADQTVVSRFVFPNNADGFHELLSRLNSLSTPEDIRIGFESTAHYALNLELFLEKAQHSFMEVNPVLISKYKESTTLRRTKTDRVDCESIARWLMTVEYKPHSRGFYHSYSLKSLTRLRDRLVRQRSFYLVKLTNVLDLTFPEFKPFFGERFSKTALYLLETYGSAERMARMNSSSYEKLCSLSRGKFSPQQFLKLKQLAVNTVGVSNEILEAELTCLLSLYKSLEKQISSMEAQILTLINDIHPCYMSIPGIGPISAAVIYAEYGDISNFSSPAQMLAYAGLEPGVNDSGTESHGGRMVKRGSSQLRYALMNCALPLIRFDMTFAAYYAKKRAEGKPHRVALSHVVKKLVRVIFALERQRTAFNVQALR

SEQ ID NO: 47300 - protein, 350 aa, unidentified
MMIIGADYHPSFQQIAFVDTETGELQERRLDHPAAAEKFYGDLAAQGKKVRVGMEASGHARWFERLLAELNFEVWIGDAAEIHRKRERKQKTDRQDAQHILRLLLKDDFPRIWVPSWENRDLRQLLWHRHRMVQARTRIMNQLQAVALNEGLRSKKRLWREHGRQQLESFRLARWASRRRHDLLELLDRLNPTIAELSQAIEQEVEKCPAAQRLMTHPGVGPLTALAFVLIIERPDRFQCGKQIASYLGLVPLEDSSGNRRRLGHITKQGNSLLRFLLVEAAQVTVRSLPEWRSKYVHLTMRRGRKIAKVAMARKLAVRLYWMMRKEWDYEQVKKFGSHAGQPGHRYGVQ

SEQ ID NO: 47301 - protein, 428 aa, unidentified
MSRSVGRAIGLDVHRDFCEVAICESGRVRSAGRVETAPEVLELFARSLGPEDRVALEVTGGAWEIARILEPHVRRVVVVSPDDTGIRQARAKTDRLDARTLARLLWTGELDAVWMPDERCRLMRRRLARREQLVRSRSRAKNEIHAVLMRRLKGKPPFSDLFGVKGRRWLGELELPVEEAETVASALRHIEFLDQEIAAVERLIAREALVWADARRLLTVPGVNVICAASFLAAIGDIRRFRTSRQLVAYLGLDPKVRQSGEQPAKSGRISKRGSASARWALVEAAWSVVRQPGPLHAFYERIRARRGHGRAVVASARKLAILFWCLLARGEDYAHQQPSLTAKKLRLLEITAGAPTLKGKRTGLWATRQRMRQAERELAQQAEASYKRTVSDWQSARPAKGGRERDTGARIVKSLKRGQAARQTTSS

SEQ ID NO: 47302 - protein, 335 aa, unidentified
MQVYGIDLSKEKFDVNFIDAKGKEKKQEVKNAVASISRFLSSVSEDSILCAEHTGVYGDILVYLCNQMNISIALVPGYTIKHSLGLLKGKSDPLDSKRIREYGERFSDKLEYAEYAEENIAEIKQLYTLRNQLVKQRRALRTVDTGRGHLPMQSISVHNHIHAVFSSLDNEITSIEDEIEALIKANQDLNENYELAKSVFGIGPVIATDLLIKTGNFKTIDTHRKAASYAGVCPFPNKSGKMVGKSKTSPHADKKLKSLLYMGAKAVVKNNKEFRLYYQKKQLEGKPHYLIMNNVSNKLLRIVFSVVRNKTPYTSDHVCLDPREKNNNSSTKKVA

SEQ ID NO: 47303 - protein, 429 aa, unidentified
MNSTQNKKIEQVKETTMIVGIDVGSEKHYFRAFNWRGIELTRKPVAFSNSMEGFNSFYNTIVELMQKSELEEALVGIEPTGHYWFDLGQFMGGKNIKFVMVNPHHVHKTKELDDNSPSKNDRKDPRVIAGLVRDGRYFYSYMPTGVYAELRNASNRRFVLVEEQTRAKNRLQKWIAVYFPEYKGIYTHIDAKGGLMVLKQAPTPEEITKLGEEGIIKIWKDAKLRGNGHKKAMKILNAAMRSIGLKAGLTEARMEMQDLIEDYELQTKRLERVNDLIKELCQQIRYADKLLEIKGIGITTVAGFIAEVGDITRFDSTKELQKLAGLELVADSSGKHNGRTKISKRGRKRLRYLLFEAAISVVGKNEEFKEIHRYYTTREKNPLKKMQSLIAVACKLIRVFHVILTKGVSYDASKMLEDIRHPKEQLKAA

SEQ ID NO: 47304 - protein, 370 aa, unidentified
MGEYSGAFVAFDVAKAKHAVAVAESGRAGEIRFVGEIENTPATIARTIKKLAARHGRLQVCYEAGPTGYGLYRQIRELGHDCMVVAPALIPQRPGERVKTNRRDAVTLARLYRAGELSGVWVPDASHEAIRDLVRAREAAGDDLRRKRQQLLSFLLRHGRLYTAGRDHWTQTHRRWLARQCFEHPAQQIVFQEGVDAIEDAARRLRRVDEHLASIVPSWSMAPVVEAYQAMRGASFLVAVTFAAEIGDVRRFDTARQLMAFLGLVPGERSTGNTVRRTGLTLAGNRRARRVLIEAAWTYRFPARVSEALRTRLEGLPKAVRDIAWKAQIRLCGRYRRLSAGGKKPPVVVAAIAREIAAFLWAIGREVAPA

SEQ ID NO: 47305 - protein, 267 aa, unidentified
MHAITIGLDIAKFVFQVHAEDAEGRIIIQKRLRRSQVEAFFARLPPSLVGIEACGSSHHWGRTLRAHGHEVRLIPAAYVKPFVRRNKTDARDAAAICAALSRPDMRFVAIKSVEQQAARGLERSRELLVKQHTQLRNCVRSQLAEFGIVAAQGQRGFAALKSMLDAGDAPVPAVLVTAMRALVEQIESLRTAIAALEEQILAVAREHPVMRLLAGIPGVGGITAHAVVAAIGDGRQFRSARDFAAWAGLTPRQHSSAGKRRDQGISR

SEQ ID NO: 47306 - protein, 320 aa, unidentified
MNAEIFVGVDVCKAWLDVAQVSSPLKDAPGELTSRVSNDEAGRAVLVKQLQRLAPTLVVLEATGGFEAAMASELCAAGVAVAVVNPKKVRDFARSIGVLAKTDRLDAQVLAKFAQATRPQVYALPDETQQEIIELVDRRAQLVSMRAQEKNRLATVKHVARTSVRHHIEWLDKRIKEIDKDLDGRLKDSTIYQPKYELLDSVPGIGRVTISMLLGRLPELGSLDRKRLAALVGVAPFADDSGRRRGQRYIQGGRADVRSTLYMAVFTARRCNGPIKALYDRLKAAGRAYKVAMTACMRKLLIILNAILKSGQPWRQIESA

SEQ ID NO: 47307 - protein, 437 aa, unidentified
MEEVDEQELHVERVAALDLGKAALEACVRVPHETKPGRRLQEVRGYATTTRALLGLADWLHSWGVTRVVMESTSAYWKGVFYLLEAEGFDCWLVNARDVKNVPGRPKTDKADAVWLAKVAERGMCRPSLVQPRPIRQLRDLTRYRRALIQDRTREMQRVEKLLEDAQIKLSSVASDIFGVSGRAMLEALIGGQRDPKVLAQLARRRLRVKIAALEEALRGFFTDHHAVILRMMLDNIDRLSEQIAALDATIEQAIAPFAAQVAQLDEVTGVGVTAAQELIAEVGGDMGCFPSAAHLVSWAKFCPQVHESAGRKKPKGRGKGNPWLAGTLGNIVATAARTDSFLGARYRRIAKRRGKQKAMVAVGNSVLVIVYHLLSDPEARFTDLGAEHHEARIDKQRRARNLAAQLQAVTGQRIVIRDERIVIRDGKAVIVQPEAA

SEQ ID NO: 47308 - protein, 347 aa, unidentified
MRFYTQQHPFYCGIDLHARTMYLCILDQAGETLLHRNMPATPEALLKAITPYRDQIVLAAECMFTWYWLADLCADHGIPFVLGHALYMKAIHGGKAKNDKIDAHKIAVLLRGGMLPQAYVYPAEMRATRDLLRRRMHLARKRGALLAHVHNTNSQYNLPAIGKKITYKANRDGVAERFADPAVQKSIEVDLALITYYDALLRDVELTIGKTAKHHDAQTLYLLQTVPGIGKILSLVLLYEIHDIERFPRVQDFASYCRLVKCAKESAGKRSGTSGSKIGHAHLTWAFSEAAVLFLRDHPAAQKFLARLEHKHSKGKALTILAHTLARAVYYLLKRQTAFDLDTFLRG

SEQ ID NO: 47309 - protein, 370 aa, unidentified
MKKKVLYVGLDVHKKTTDVAIASGRSNGKVRSYGKIDSTVDALNKLIKKLEDGDKQLQFVYEAGPCGYQIYRHLDALGIACSVVAPSLIPRRSGDRIKTDRRDAVNLARLLRAGELTSIYVPTVEDEAIRDLVRCRDDIKRFERKARQRLLSFLLRHGYQYSGKRNWTKGFYNWLATVKFSHSAQQVTLQEYIEATNECSERIKRITEQIQVHVEEWSRARFVKAYQALRGVSLIVATTVVSEIGDMRRFPTPKQLMAYLGLIPSEHSSGKTVRRGPITKTGNSHVRRSLIEAAWTYKMQARVSTILLKRQQGLPKTVCDISWKAQTRLCARYRRLMARGKTKQTVITAIARELSAFIWAIDKEMQVAHE

SEQ ID NO: 47310 - protein, 354 aa, unidentified
MKYFAGLDVSLEETAICVVDETGQIMKEARAASEPEALDALLSKLGLPLEGLGLEACSLTAWLHGELKAAGWPAICIESRHAKAAMGAMPNKTDRNDARAIAQIMRTGWFRAVHVKTSTCRSWRSLLVARRTVLNEMRSIENVVRAILRETGLKLGTPARKDFVVRVRELIGGTDGLALMVEPLLEILGVMLREFARLTKQVLDIVRDEPICRRLMSTPGVGPLTALAFRATIDQPERFRKSRDVGAHLGLTPRRYQSGETDIQGRVSRCGDELARTALYEAAHSLLVCSKKWSALRAWGMKIAKRRGMARARVAVARKLATILHRMWIDDSAFRFGSEKAAPAGVPKLIAATA

SEQ ID NO: 47311 - protein, 349 aa, unidentified
MNKFSKAKSDGNVCTDMFVGMDLHKNYLQVAVLDGKGKVLKNSRIDNDLSKVGRFFDRIGGSGNSSDVKVVMESSCVWYNIYEYLSEERQLDVSLSNPFKTRAIASAKIKTDTLDAVKLADLLRGGYIAKCYVPDRKIMDLRQLVRHRIVLVRMRTKLKNKIHGITLMQGIRITDTSAFSNNYVQKLKQLNDYRIDAYLRLIDSLDSEIKKVSKEIQSRAEKEDMTKLLVTIPGIGYYSALLILSEIGDINRFPNSYHLCSYAGLVPTTHSSGGITYHGAITKTGSKHLRWIMVECVYTHMRISKNSNITRFYTRLANRKGNSKAVVAAASKLLKVVYWVMKEKREYHV

SEQ ID NO: 47312 - protein, 315 aa, unidentified
MMNAPVFVGIDVSQAQLDIALRPAGRFTAPNDDAGIAKVVDQLRAVTPTVVLLEATGGLELPLVGALAAAALPVVVVNPRQVRDFAKAAGQLAKTDVLDAQILAHFAEVMRPAPRPLPDEQTHALAALLARRRQLVEMLTAEKNRLASARKLVRTSLQAHITWLERELTRTDTDLAHAIRESPVWREKDELLRSAPGVGPVLTTTLLANLPELGTLTGKQIAALVGVAPLNRDSGTLRGKRTVWGGRAQVRAVLYMGALVAARYNPVIRAFYHRLCAAGKAKKVALTACMRKLLIILNAMLKHRTPWHANVAACA

SEQ ID NO: 47313 - protein, 389 aa, unidentified
MKIFVGIDIAKLNHFASAISSDGEIILEPFKFTNDADGFQLLVSKLESFDKNSIIIDLESTAHYGDNLVRYLVTEFYQVCVLNPIKTCQMRKNSIRKTKTDKVDTYVITKTLMMQDDLRFVSFYDLDMMDLKALGRFRQKTIKQRTRLKIQLTTYVDQVFPEIQYFFKSGLHQNAVYALLKETPSPKEIAPRHMTHLANLLKVNSHGHFTKEQAKELRILAQKSVGANDSAISIQITQTIQQIELPDSQLEKIEAEMTDIMKFNDSVIMTIPSIGYINGGMILGEIGDIHRFSNPNKLLAFAGLDPSVYQSGNFQAKTTRMFKRSSRVLRYALVNAAWNVVRNNSTFKAYYDAKRAEGRSHYNALGHCVGKLVRVIFKLLTDEVEFNLE

SEQ ID NO: 47314 - protein, 344 aa, unidentified
MANLNQFCDFTKLIGIDIAKSVFQIYSCDTQTGEITNVQIKRDKVLESLANCGKCLIGMEACGSSQYWARKLQALGHTVRLMDPKLVKPFVRHNKSDKADAEGVYHALVSGVRAVAVKTETERDIQTLLTMRALLVKQRTARINHVRGLLAEYGHVMPKSVDQFDKKVDECINSLEGDAVQLVIDMLRDTVKSIRDEHDRIKTLQREISRLANQTRNAKHFLTVPGIGETIMAYMCVLFADPAQFSSGRQFAAYLGLVPMHTGSGGKTVTTKIPGRWDKALRALLVQGAHAEARSKYRTDWVKNILAKKPKKVAMVAIANRMARQCWAVASKGQDWRRMPVTAA

SEQ ID NO: 47315 - protein, 411 aa, unidentified
MRIVGFDVSRSVAEIAYLEDGTLHAGGRTGLRRDELERFAEKLRATDHVVLEATGNTAAIVNVLRRHVARVAIANPLQVRLIAEARVKTDKIETAVLAQLYASGFLPEVWMPDEHTLALRRQISRRSQLVGQRTRLKNEIHAVLAAHLIERCPATDLFGKKGRAWLGVQPLPLDERLGVEQRLRELDRLGEDLREVEQALAQATIDDARLRVMLTITGVNTTVAIGLLSAIGDIERFPNPEKLVSYFGLNPSVYQSGPTPARHGHITKRGRSYARAMLVEAAWGATQAPGPLRAFFLRVRDRRGQQIAVVATARKLAVIVWYVLTRDEPFAWDRPALTAHKLRALELQAGMPAQHGSRKGPAAAYSLKSVRQQERAVAEQSERTYQRLFNRWKQSRPKSDSAPIRWPETRT

SEQ ID NO: 47316 - protein, 521 aa, unidentified
MPRPRTSRPRKVRKAFVLQKPCGQLTPRVQAVGAEHFGIVAVDCAKARSRYFLADFYGRTLLEPATVAHNRGDFQAAIDRVRQAMRQHQLADLVVAIERTGEYHRPVQHAFRQADFETRLVHPFTSKQYRQPADPGNKTDDTDLAAIWRATTHGFGLLEPTWPDNYLTIQLLRRHRRDLVDKNTILQCQIREVLHAAMPGYAELFCHFWDDSPAPLVFARHTTSADAVRQQGIAGLQQIANQAGLRCRTETLHKILAWAEQAAPASGNVLDRCRILIGLDDDRLAKTRQILELERDLAHRVVHTPYLLLMVIPGINVVSVADLAGELGPISLYVNANAITGRAGLMPSRYQSDQVDCANGPLRRRGNRRLRAVLMQTADNLVQCNHYFHARADQWTRAGKDARWVRVKVAKIFSRLAFAMVAGEQLFPHPCCQKRHYIIGKLLSFHSGHGTELQAMRHDLEVAAAQLPAKQRALEAEPLQKQLDDLANRRGPQPLAEIIPLVLARLAGRVVQSTPSESAGP

SEQ ID NO: 47317 - protein, 460 aa, unidentified
MSQRRKKQKRVGQGGGAVPSLSCIEPHAAGIDVGATEIFVAVPQDRDPSPVRSFETFTEDLHRLKSWLQQRGITTVAMESTGVYWIPLFQILEKAGMEVCLVNAQHVKHVPGRKSDVIDCQWLQYLHSVGLLRASFRPEERICAIRSLLRHRDSLVQMAAAHVQHMQKALTQMNLQLHHVLSDITGQSGLAILDAILAGERNPAVLAQLRHARVQASEEVITKSLVGDYQREHLFTLRQSLQAYRYYQSLLTACDQEIEEQLQNLDSRTPPDGSPLPPERYPHRPRKNEFRFDMRSELYRIYGTDLTAIPSINALTGYTVLAEVGTDWSKFRNGDAFASWTCLCPQNKKSGGKILSAHTRRSANRVNRALRLAAQTLERSTSYLGAYYRKMRARHGAPAAITAAAHKLARIIFHLVTTGEAYDESLFAAEEQRQRKRMENKLKRSAQQLGYQLIPLGQTA

SEQ ID NO: 47318 - protein, 341 aa, unidentified
MKPELSVVGIDLAKSVFHLVGMDERGTIILRKRLARGEVMPFMAKLPRVLVGMEACGGAHYWARQLREQGHEVKLMAPQYVKPYVKTNKNDLRDAEAIAEAVTRPSMRFVPIKNVAQQDLQALHRVRERLMGARTALVNEMRGLLAEYGIVLPAGINVFRNALAAKLEAEQAKLTPLSQELFGKLREEFKKVEAEVAYYDEKLQAMAITHPESQRLLTIPGIGPITATALIAAVGDVGGFTNGRQFAAWLGLVPKQYSTGGQTRLLGISKRGDRYLRKLLIHGARATLRWARTKTDSRSRWIRGLLERRGWNRTAVAVANKNARIVWALLSRGGVYAESTH

SEQ ID NO: 47319 - protein, 347 aa, unidentified
MERYIGLDVHSTTCTFVVLGPSGRVAKAAVVETRAKDLRDLVRRVPRPSVLVMEEGNQSDWLFEVLSPHATNTLVVQPEGTKRRQKSDRADAERLARLARRGEPGSLIYKAPNRLTGLRHATKAYATAQKDLIRCRARLKLMMQSRGLHAPTVELLDPAKRTRWVEQLPEGMRERAKILGLMVDGMHEANTEARKLLLAESRPVKAIRWVKSVPGFGPIRAAQVVSTIISPHRFRTKRQLWAYSRLAVLARSSNDWIPNGRGGFERRQHELVLGLNRNGSGVLKQAFVGAAQQIITHMADHPLHDGYARRIQGGMKPSSARLTLARKLAAITLAVWKKEELYEPTRS

SEQ ID NO: 47320 - protein, 412 aa, unidentified
MLFVGDDWAEDHHDIEIVDDDGKVLVRRRLPEGLEGVTRLHSLVAAQLPDDGVDRDPSEAAALVKVGIETDRGSWVGSLVAAGYEVFAINPLSVARYRERHSTSGAKSDAADAHLLAEIVRLDRAHHRPVAEDTDQGEGIKLTARTHQSLIWDRSRHVARLRSTLREYFPAALLAFDDLDAPDALELLGRAPDPDQAARLSLSVITAALKRAHRRHVEDRSQKIRTVLRAHELRQPPVLQSAYAVVVASEVAIIGALNIQIDRLGEVVAEHFGRHRDAEIYASLPGLGAILGARVLGEFGDAPNKYADAKARKNYAGTSPITRASGTKKVVLARYARNRRLGDALQQWAFCSMRGSPGAKAYYQQLRARKIGHQAALRQLANRLVGILHGCLKTHTTYDEHTAWAHILADNA

SEQ ID NO: 47321 - protein, 310 aa, unidentified
MEHFAGIDISRDHLDLAIWPSSEVTRFSNTDDGIAQLVASLESLEPTIVAYEPMGPMSRPLVDALAGAGLTAAAVNPYRIRSFARAVSRLSKTDRLDAITIAEFAGTIRPTPTVAPNKEEKELHDLVGRRRQLTEILRDEKIRIAHADSEDAVSSIERHQEWVVSEMRQIDELIDQTIESRLDWSEKRALLMTFNGVGPVVSAALVADLPELGLLDRGKIASLVGLAPIASESGTKIGTRRIKGGRRRVRNALFMCSVATMRSNEKLKTYYWKLRDSGKPPKVARVAVMRKMLVMLNAMVRDHATWDPGK

SEQ ID NO: 47322 - protein, 345 aa, unidentified
MIIGCDFHPSWQQIAWLDSETGETGEGKLVHASGDAKSFYARVPRPALIGMEATGNSQWFMEMVQDLGHEIWIGDAAQIRARYVRQQKTDKRDAAHILKLLVEGRFPRLWAPDGEQRDLRQLVLHRHKLVEIRSRVKNELQPLSLNQGMQRKHKLWSQAGQKLLRELPLKPWAACRREDLLGLLAMLDEQIGKLDRAVQLAAAEHPQAQLLMTQPGVGPNTALAYVLTIGDVTRFPRGKQVASYLGLIPREESSGGRQKLGAITKQGNRLVRSLLVEAAQIAVRFDPGFRKQYLHRCHQKPKGVAKMAAARKLAVRLYWMLRTQKPYPEIVRIESSPRVPLVGAS

SEQ ID NO: 47323 - protein, 411 aa, unidentified
MYYVGIDIAKKTNVSSIINDKDVFIKKSFKFNNDEKGFKEFTNLLSSIDKNIDNFIIAMEATGLLFENLYLYLKGKGYNVILLNPYQTSKFREMNTMKKVKNDNIDAIMIASLIKSGRYSKAYVSEEVYASLRALHRHRASLEEELKKHKRQVSSLLAVVFPEFEQVVKNPFSVSGLALLEKYPTAKHYKHASPQRILNLFRKIKGNNFNIQKAEKLLELAKSSIYSGNAYDERAFVIQSHIRMIKTLQKEIESIDNEMLKLFNASPSFTKEEEQEVIDIIDNLRTIPGVSDKTLFTIMGECGNLDRFKNINAFIGYLGLYPTLEQSGNKTSYGKLAKRGSKLAKKALYQAAVAAIRHNDEMKKLYCDKVSQGKAKKEALVIVARKLAAIILAIYKNNTPYNPARVFNQNT

SEQ ID NO: 47324 - protein, 367 aa, unidentified
MKKVSTAAVKATKNFSQPKLTIGLDLGDRSSWYCLLDEVGEVLLEQKLGTTPKAMREVFGSMPGCRIALETGMHSPWVSRLLSELGHEVIVAHARNVRLIGESRKKDDRLDARTLARLARIDPQLLCPVKHRSAKAQADLSLIRARAGLVRARTALVNTARGLAKSYGERLRGCNVRNMNPEKAEGLSPELPRALEPLLAGIESLSEGIREYNERIEKLAQQSYPQVALLKQVKGVGTLIALTFLLTLEDAHRFRKSRDVGCYLGLQPGRRNSGQSEPQMHISKEGDPYLRTLLVQGAHHMLGPFGADSDLRRWGLKLAERGGKNGKKRAIVATARKLAVLLHRLWVSGEVYEPLRNGKQTAMPAAA

SEQ ID NO: 47325 - protein, 341 aa, unidentified
MDHYVGLDVSVRSTSICILSASGQVVREGKVESEPEAIVAFLGGRGLAYGRVGIEAGPLCQWLYAGLAKAGLPVVCIETRHAKAVLSAQVNKTDRNDARGIAQMMRVGLYKPVHVKTLASQEIRALLGGRRALQAKLMDIENSIRGLLRNFGLKVGTVTRARYEERIRELTDGRAGLIAVIEPMLTVRRVVREQYVLLHKRMLALARADEPCRLLMSAPGVGPFVALTYRAAVDEPARFRQSRAVGAHFGLAPRTHQSGELDRRGPITKNGDETLRAALFEAALVLLRPGSKPSPLKAWGLKLAKRRGTAKARVAVARRLAVILHRMWVDGTPFRIEAAMA

SEQ ID NO: 47326 - protein, 426 aa, unidentified
MRVMYDRVAAIDVHKDMVKVAIRVPGARRGTRKTDVLEFRTFYGVLQAMARELRGRGVTHVVMEASGVYTDPVYYALRELDFEEVMVINPAHAKALKGHKTDAKDAIRLLDLYECGLLSGSYIPDPDLREVRDLARYRMKTVQARTSEIQRLQKTLETAGIKLSSVVSDVTGSSATAMIEALISGERRGTVMAGLAQTRMRTAGKMADLSMALTGRFTDHHALMCRLHVDRIKIFDDAVKDLDAKIAPRVARYAREADLLKTLPGFGDVIVAGWLGAIGPAPHQHFATASRLASWATICPGNYMSAKKSKGGRTGDGGAYIKPLLIQAAWAAVRVPGRLQARFHRLVRKFGGPRNKGAQKRAITAIAHTLLKIAYSVLKTGQPYADLGADFYTRRESPDARQDYLMRQLQKLNPGCVIAITPTEAA

SEQ ID NO: 47327 - protein, 461 aa, unidentified
MANQDRRSLPGRGEGVEGFPVLRADVAGIDVGSEEHWVCAPARTGVGREVAVFAATTPGVEQLAAWLKERGVAAVALESTGVYWIAPHEILERHGFDVVLVDTRELGRVPGRKKTDRHDCEWIQRLHSCGLLRGAFRPVEQVCMLRTLVRDKGTLVAERGDWVRRMQKNLDQMNVRIHRAVADVDGATGMAILRAIVAGERDPRQLATLRDPRCRKSEAEIAEQLSGHWREDYLFSLKQALKMYDAITETIQESEQEILRHLEEMAGADRRGEQAPIPKNPEKVKAIKKRGEDPLRHALYRMSGVDLTAIDAVGVQTVSVVLSEYGPDLSQFPTEKHFVSHVRLAPHKPISGGKVVKNKKKPGSGSARVGAALRMAALSLRHSQTALGGYYRQVARRAGADVAVFATARKLAQLIYRLLRWGQPYVDEGAAAYEKRYQLARVKRLTATAKDLGYKLVSVEA

SEQ ID NO: 47328 - protein, 418 aa, unidentified
MSTVPFDQVILRGCGIDVHKDVVVATISGEGLKTETRSYKTFSSSLTEWKEWLLSNGITHVAMESTGVYWKSVYKVLECPVMKVWIVNARHIKYVPGHKTDKKDSAWICKLLLTGLLKPSYIPEREQRELRDLPRYRNKLIQHVSSEKNRIVRILEDCNIKLSSVMSHLDGVVATKLIEILIEKGHVTKDDIACVYHKRLGASPELLYQACEGFIEPHHTYMLQTIRKDIEQTEVIIADLTSRIKVVLSPYENVIELLQKVPGLSRKTVEDLIAEIGVDMEAFPTEKQLASWPGICPGNNESAGKKSGRTTHGNKQLKAVITEAAWAVTRTKNTFYSARYHRLAARRGKKRALIAVGHSILKSVWHILKGTCEYKELGAEYLTQRMEQKRKNYLKKELEALGYKVIISRGGGAIPDAS

SEQ ID NO: 47329 - protein, 348 aa, unidentified
MKRTTIGLDLAKRVFQVHAVDVNTGEMVRVALKRSQVSRFFANREPAVVAMEACGSAQHWARELLKLGHEVRLIAPQFVRPFVKTNKTDAADAEGIWEAAQRPGMRYVALKSEEQQAVLGLHRLREQRVKMRSMLVNQLHGLMSEYGVALPKGWAVMLKQAGELLADYDRCPIPAILRPALLQQIEQVRTLTDQVKSLERQIGAWQRRAEDCQRIAAIPGVGLLTATAAVATIGDARSFRSGRELAAFLGLVPRQSGTGGRVKLLGISKRGDRYLRTLLIHGARTVLSWQRRPGREIDPWLKGLLARRAPNIVIVALANKMARMIWALLAHGRTFQRNFGQAPACTAA

SEQ ID NO: 47330 - protein, 345 aa, unidentified
MNITTVGIDLAKNVFQVHGVDARAKVVLRRQLRREQVALYFVNLPPCLIGMEACASAHHWGRTLERFGHTVRLMAPQFVKPYVKTNKNDAADAEAICEAVSRPNMRFVPIKSIEQQAILSVHRVRQGFVKARTAQANQIRGLLGEFGLVIPKGIRHVAQRVPTLLEDASNELPLAFRQLIDRLTCHLKELDQQVRELERHIIAWHRSSELSRRLEKIPGIGPLAATALVASIADARSFDNGRQVSAWLGLVPRQNSSGGKATLLRISKRGDVYLRTLLIHGARSAILAAQRKSASQNVWLASLLARRHKNIAAVALANKNARTVWALLAHGRDFKPDYVPVRAAA

SEQ ID NO: 47331 - protein, 337 aa, unidentified
MLIIGCDFHPSFQQIAMLEQESGEYVEKRLGHRAEAEGFYRALAGQAVRVGMEACGHYPWFERLLGELGHELWLGDAGQIRATVVRAQKTDRRDAAHLLKLLQEDRFPRIWVPSLEERDVRQLLVHRHKQVQARTRVKNQLHALALSQGVQRKRKLWTAAGRAELEQLLLLPYAAGRRAGLLHALEELQREIGELDGRVEEEARRRPAAVKLMTHPGVGPVTALAMVLTVGPVERFQHADQLSSYLGLIPREHSSGGRQQLGRISKQGNPFLRFLLVEAAQSAVRYDAELGRFYRRLAMRRHRALAKVAVARKLATRLYWMLRDDQTYAQLGKAVCR

SEQ ID NO: 47332 - protein, 402 aa, unidentified
MTYDYVIGMDACKYFHHACVLDIDGTQVLSKRINQNEQSLRALFSALSAYDHKVLVVVDQPNNIGRLTVAVAQDIGIDVRYLPGLAMRQLSRIHAGNAKTDIRDAYIIAHAAKNLPESLRSVDRVEEAFLQLKVLNGIDEDLARSYTRLINQIRSALVGCYPQFEQALRGQIIHRKWVLHLLARYGGPTKIKRLGKAKAAAFARRYKARNPEPVLDAIFAAISEQTVTIAGAHYAEMGVAMSAKDALLKLEHRQQIEKEVIKLINDIPHTQFLLSMPGIGPKTAAQILMTAGDMSDFPSAGHLASYAGLSPRTNQSGTSIMSNSLNRAGNKKLKNALWQSSFASIRFHERSRQFYERKRREGKRHNAAVVALARRRLNVLYAMMRNHEHYHDPAPSQEDLAA

SEQ ID NO: 47333 - protein, 373 aa, unidentified
MPKYSTAFGMDVHLRSTTVCALDADTGEAVTRRFPGNPWGEIAGWMDGFPGPSLAAYESGYLGFAPQRELAGLGVECVVAAVSKIPRSAADSASKNDRNDAARMAKAILAHDISPVWVPSPEVEGIRDLAGAYDGATARLATAKQRLLAFLAKRGFAYGGTTPAGNPRKYWTYDFLRWLDKVRPEDDGGVRALAALRNEVEAAAEARADLLSEYRAAVDASPIAAEVAALQSIKGCAFALAAAFSAEVGDFTRFRSGRQVTAYFGLAPSQRSSGDSVRLGGISGAGNALVRKLAVEGSWCYAAARHQPKLMPRDTGVPLEIRMHGRKGSERLLRRREEMLARGMPAAKANAATAAELVRWLWALGMMCREGAE

SEQ ID NO: 47334 - protein, 385 aa, unidentified
MKGKTFIPTDYDIFAGLDVDKRSISVTFSNHQGFIRSLRMPYNVEHLLNHVRKHFADQKVAFAYEAGPTGYGLYDGLVAQAYPCLIAAPSMIPKAPGQRVKTNRLDSRNLSENLRGGQLKSIHVPSAAYRELRHLTQLRDTFVGEMVAMKLRIKSLLLFEGIEFPPAPPGSQWSFIVKAKLRKLACSKTVRFKLDQLLDSLEFCEKQAFKTTKEIRRFCQNDPELSHCIELLMTIPGIGWIVASQLLARIGDWREIKNVRQLAGFLGLVPTENSTGDKTDRGSITHTGDGRLRSKLIQGSWSAIRQDGELREFFRAVCRTHPRHLAPRVAIVAVARKLSVRISVVLMQQRPYVVREKVHSAPLTQEETSPQWGTTRRLREPETNS

SEQ ID NO: 47335 - protein, 355 aa, unidentified
MNQEKYIGMDVHAATISAAVKNAEGKLLMECVLETKAATILEFIQGLRGTLALTFEEGTLATWLHDLLKPHVNRLVVCDPRKNALMREGNQNDRVDARNLAELLRTNQVKAVYHGKHGTRALKELGRSYLTLTKDTTRVMNRIKSVYRSWAIACAGTSVYSRRHRAEWLAKLVEPGVRIRAEHLYQQLDSLEPVRQAARRELLREGRQHAAVKLLRQIPAIGPIRSALLVAILQTPHRFRTKRQLWAYSGFAVQTYDSGEYRVVRGKLHRNRERITVRGLNHNHNHDLKNLLKGAAISAIERPGPLQDFYAARVEKGMRPSLARLTLARKIAAITLIIWKKGASFDPKQLQRQAA

SEQ ID NO: 47336 - protein, 456 aa, unidentified
MDTLHRVCAGLDVHKDTVVACVRRLDDRGRPHQEVKTFGTTTADLLELLDWLLGQQVPIVAMESTGVYWKPIFNLLEGPVEVLLVNPEHIKKVPGRKTDVKDCEWIAQLLQHGLLKASFVPPRLIRDLRDLTRQRSQLVGEKASVSNRIQKVLEDANLKLGSVASDVLGVSGRDMLRALIAGVDSGEALANLARGRLRDKLPQLRKALTGRVTEHHRFLLGMHLDHLTHLEALIGRLDQRIGKEMEKDRPPEPPEPKPPGVSPEPASAEKPGTPVDVQGSSAQAAKDSGGLGLWQSLWLLVTIPGINRRTAEVVLAEIGTDMSRFATPQHLASWAGLCPGNNESAGKRRSGRTTHGDKWLRSILVQAAWAASHTKATYLSSQYRRLARRRGKKKALVAVAHTLLVMCYEVLKKGEAYHELGADYLDKLEPDRRTNQLVRQLEKLGHKVTLEPKAVA

SEQ ID NO: 47337 - protein, 462 aa, unidentified
MTNPDGRSKRKKKTRSTPAALPVIQPLVAGIDIGSTQHWVCGPPQGETPNVRVFGTTTVELNALADWLAEQGVKSVAMESTYIYWIPIYELLESRGVEVVLVNARTLHNVPGRKTDFSDCQWIQLLHSCGLLRGSFRPNESIARMRALHRQMANFVVERSRCVQWMQKSLDQMNVQVHRAVTDLTGTTGMAIVRAIVAGDRDPANLAKHRDHRCHKSVEQIAQYLTGTWREEHLFNLAAALRHYDSLQETIVSYEARLLEELTTLQPAERAQEPVPRHPNPTKERAIRHRGEQEARTTLWRFAGVDLTRIDGIATGAAQIVLTEIGPNLGAFPTEDHFVSWLRLCPRTPISGGKPVKKRRNGLGANRVATALRMAAVTVQRSKTAIGAAYRRIARHKGAAVAVFATARQLARLIYRMLRYGQDYVDIGEKAYEDQFNARRLVALAENAKSLGFTLIKEVATG

SEQ ID NO: 47338 - protein, 371 aa, unidentified
MRHHIMAGCDVHEKSLVLAWAVDREAPRRRCFSNDAAGRERLLGSLQEQAAGDGAETTIWLVYEASSQGYGLYDELRAAGIAAFVLAPTRLNRSVKARAQKTDTKDAELLLAILRGHVLAGNELPHIWAPDAATREHRELVRARLAVGQKASAVKAEVQMLLKRQGRRRPAALKRPWTGAHRAWLRGLASGTELPTGARLALGTLLRQLALAEEEVALLDQEVAALALTDRYRAPVAAITDFAGVGLLTAMVLLSELGDLSRFANRRRLAAYVGLAPRSAESGEATDRKGRITRQGSSRLRAVLCQCAWSRLRVDPEARARYERIKRRNPKAAKKAVVALMRTLLIRLWHAGQAAQAASGVFIDPQTGEAA

SEQ ID NO: 47339 - protein, 418 aa, unidentified
MKNIKTKKLKTVNGKTLIVTVDVSKDKHSGYCRCPDGTEMKPFEFFNNGRGFGEFWNRISKTKKDHNLEEIVFGFESTGPYAEPLLQYLRKRAVRIVQVNPMHTKRLKELQGNSPNKTDYKDPKVIADIIELGHALTVVVPKGVAAELRRLTQARERSMQRRIVLLNQLHDLAYLLFPEFLQVMKDIKTKTAQYLLRHYPTPQRLVQYGLGELTKTLKKVSRGKLGKGRAEALYEAGRTSVGIIEGQRSMVLEAKEILTHIEASEQFIDSIEKEMAHNLKQIPYSRFILSLKGIGDVTAAGLIGEVGDFSKFTTLAEIEKLAGLDLFEISSGRHKGTRRISKRGRSLMRKLLFFASLNVVRKGGVLHEAYQRLLKGGKPKLKALIAMARKLLRIIFALVRNHSVYVTDYCKPHLKMAA

SEQ ID NO: 47340 - protein, 358 aa, unidentified
MASASMAYRRASKVVVGVDTHNDLHVAKAKDELGQELGELTISASPKGYRQLLTWSRRLGEVRTFGVEGTGCYGAGLARHLRAHGEVVMEVMRPNRQARRRRGKSDSADAGAAASAVLSGEASGIPKAGDATVEMIRALRVARSTANRARTQAINALHALIVTAPEQLREDLRALSGSRLVRTCASFRPGELTDPLAATKTALRSLARRHEALSAEVRELDRELCRLTARTCPALVDVFGVGADTAGALLLAAGDNPQRLRSEAAFAKLCGVSPVEASSGKTNRHRLNRGGDRHANAALHRIVIVRLRQRHSPTIEYLARRTAEGKSKREVIRCLKRYVAREVYRTLTEIDPATSVEL

SEQ ID NO: 47341 - protein, 375 aa, unidentified
MKDVQKFVGLDVSKDSIAVAIADSGRGEPRFHGTIQNKPEDIRKLMKKLGKPESLLVCYEAGSSGYGIYRFLLSMDIDCMVVAPSLIPKRSGDRVKTDKRDSIRLAQLLRAGELTSVWVPDEDHEALRDLIRARHDAREDLQSSRQRLVHFLLRHGIRPPQGVRNWSVKHREWLKRLTFERASQRIVFQEYLHAINEVEDRMKRIEAQIHEEALQSEHAPVIQALQTLRGVAEVTAVTLVAEIGQFSRFSNPRQLMSYAGLVPKEYSSGASRWQGSITKTGNSQIRRSIVEVCWSYRHRPSLKGELLKRQEGQDPEAKRIAWKAQHRLHLKYHRISAKGKGGKVAVVAVARELLGFIWAIGCAIEDKQVSVSNVA

SEQ ID NO: 47342 - protein, 416 aa, unidentified
MVNDKNPPALSIVHPICCGLDVHKREISACVIETLGDGTIRNHIKQFGTFTDELVRLRNWLCDLECPIVAMESTGVYWRPVHNVLEGYVEVVLVNARHIKNVPGRKTDIEDSRWLAGLLRHGLVRASFIPPKDVRQWRELVRLRRAYVETLADFKRRTQKLFECANIKIDSVASDLFGQTGRNLMKLLTQQDSISLEDVKNCAKGQLIGKADELFRSIQGFFESHHRFLLAGLLETIENLEKQVNILQDRLTEITSEQNEVVKKLDEIPGIDQYSARAILSEIGPTLDSFPTAQQLCSWAGVCPGNNESAGKRHSGKSPVKKHPLKTLLVDVAWAAVKKKDSYYRAKYHRLKARRGPKKAILAIAHRILKAIYAIIKFGTSYKELGEHYLDRQTRARKLAKIRIEARQLGYNLVPA

SEQ ID NO: 47343 - protein, 344 aa, unidentified
MDHFAGLDVSVKETSVCIVDDTGKIVREVKVASEPEALLAVLKSPAYHFKRIGLEAGPLSQWLFSALAEADLPVVCVETRHMQAVLKAQINKTDRNDARGIAQMMRVGLYRPVHVKTLRSQKLRMLLTHRKLLQSKAIAIENDLRGTLRNFGLKVGMVGTVKFEARIKELVENQPDLAGLVEPLLVVRRVLREQFVVLHRRLLAIVRDDEVCRRLITTPGVGPVVALTYRATVDVPARFRKSKSVGAVFGLTCSKYQSGEIDRNGRISRCGDEMMRVMLYEAAQSMRRTKKWSWLKAWAMQVAKRRGMKKAIVALARRLAVIMHRIWVDGTEFRWTREPATAAA

SEQ ID NO: 47344 - protein, 413 aa, unidentified
MKLFVGIDVSSEKLDVCFLDSSDTMLKEVTLPNNINGASSIKEDVLQFHQSFNYEKIVIGMESTSIYSFHPATFLSEDLELKSLGLVEVVIQNPKSIHRYKGLFEEDKNDRIDAFRIADFLRIERFNKTVLKEERYVALQRLTRSRYQMVHQLTECKQHFLENLYYKCNTLSKELDTSVFGATMLDLLSDALTLDEMAEMELEDLANLLQEKGRGRFSDPQKLAKTIKKAIRDSYRLGKVVQESVDMVLATYARLIQTLKKQIKDLEKSIVALFEIVTEAQCLKSIPGIGIVYAAGIVAEIGQIERFENEAQLAKYCGLYWKKNQSGNFESERTPLTRTGNQYLRYYMVEAANSIRRHEDTYRLYYQKKYDEVPKFKHKRALVLTARKLVRLVDTLLRNHQLYTPERSVSLKS

SEQ ID NO: 47345 - protein, 418 aa, unidentified
MKVVYAVCCGVDVHKTFLVATIITSQGITPHYSKKRFSTFNNSILQFKQWLIENNCFDICMESTGKYYIPILNLLEDTIHITIANPKWVKAVKGNKDDVKDSKWIGDIFRLGLVPGSYIPNKPIRILREYTRYRSKLISCKSSEKNRFQNAFTVCNVALDAVVSDMFGKSASSITDYLISSESFDPEHCSSLLQKSLKKKAATVIESIEGYQITKEQKERMIMVRSHLDFVQQSLVELDEKLDKMVAPYESAITLLCTIPGVDRTSAITIISEIGTDMSQFANSKRLCCWAGLTPGNNESAGKKKSVRITRAGVYLKPALVQVAHAAVKSNRSPYYKNKYERICKRRGKKRAIIAIARMILTAIYHMFITGEAFNPSDLYKIDAPQEMLEKQKEKAIKQAMKLLISNGLIKPTDISVA

SEQ ID NO: 47346 - protein, 310 aa, unidentified
MSQEKYIGMDVHQASISVAVMDARGKLIMECLLETKAATILEFMQGLRGTLALTFEEGTSAAWLHDLLKPHVSRLVVCDPRKNALLKDGNKSDRVDARKLAELLRTNQVKPVYHGKHGTRALKELRRSYLTITKDVTRVMNRIKAVYRSWAIPCAGTSVYTPRHRAEWLAKLVEPGVRIRAEHLYQQLDSLQPVRLEARGELLLESRKHAAVKLLRQIPSIGPIRAALLVALLQTPHRFRTKRQLWAYSGFAVEIHDSGEYRSVRGKLQRNRERITVRGLNDNHNKDVKSLFKVLLYLPAHAPVPGMIFM

SEQ ID NO: 47347 - protein, 339 aa, unidentified
MNTTTVGLDLAKNVFHVVCLNEHNKEVRKKMLRRNQVRQFFAQLPVCTVAMEACATSHYWGRELIALGHEVKLIPPQQVKPMVQGNKNDYNDALAIAETVNRPKTTFVAVKTVEEHDIQAIHRMRSQCIRDRTALSNSTRGLLGEYGISFSKGLATLRKKIPELLEDADNGLSFRFRNLLARRYDQLVELDEHIAFYTKELEILSRQDEACQRLQTIPGFGPIVASAFRSTVGDGSAYARGRHAAASLGLVPRQHSSGGNNFLLGISKRGDRYLRKLLVHGARTVVRHAVDRDDPFSRWINRVSERRGKNRAAVAVANKLARVGWAVLRYNTEYDPAMA

SEQ ID NO: 47348 - protein, 341 aa, unidentified
MVEPALYKAGRERHCPLRGGLEMVIGIDVAKREIVVASRPGGQKWSVENDERGVRSLVERLKVEAPELVVLEATGGYELLSVAALVAEGLPVVVVNPRQVRDFARSTGQLAKTDRIDADILALFAERVRPEQREIPGAEIQELDALLTRRRQLLEMLSAERNRLGQLFGAKRKQVKKSLKTHISFLERELSITTTELGNMVQSSPAWRAKDDLLQSVPGVGPVVSFTLLAELPELGRLSRREIAKLAGVAPMSRDSGNYRGKRFIKGGRSSVRRVLYMGALVATKRNVLIRGFYERLVAAGKAKKLAIVACMRKLLTILNSILRTGQPWSIDQGSLAELHA

SEQ ID NO: 47349 - protein, 406 aa, unidentified
MEEKRTRYIGLDVHKHYLIALGVDGRLDVVMTARRVELSNLESWMKKNLTKQDEVVLEMTTNTWQLYDELVEYAGSVTVVHPPHVALITRSQVMNDKIAASILARLLAKGLLVGIWVPPQEVRELRGLVAQRQKMTRLATQAKNRLHAVIQRHHLKVPEGNPFAKTNNGWWASLSLGRLEKMNLQSDLETLQFAEQQETRIQKEMTGIAAENEEIGRLLHIAGFGVITAVTVYAAIGDIHRFEDAKHLVGYAGMGTRVHDSGMTTRTGKITKAGRRDLRVALVEAAHVVANSHPHWKAELARLQPRIGYNRAIVAIARKLLVTVWYVLARKVADRFAEEEKVSKKMLHIAYEVGKENRAGKSAAQFVRERLDALGMGQELTSIPWGSKKPIPLPPSRLKEKERRPK

SEQ ID NO: 47350 - protein, 408 aa, unidentified
MNAVGIDVSKGKSMVAALRPMGEVALLPQEFLHTEVGLEQMAYAIIALGEDTRVIMEATGRYHEPVAAALHEYGIYVCVLNPLFIKQSGGGSIRKVKTDKADAMKIAKYGLDNWVDLREYTPMDTVRQQLKLCSRQYNLYMKTVVSLQNNLISLTDKTFPGVNELFSSPERADGHQKWVDFVMTFYHCDCICRVSENAFAERYQKWCKRKGYHFSAEKAQDVYLGSCGHFTTLPKNDNTKLLITTAAQQLLAGKMTLAALRTEMTRLAKQLPEYDIVRAMYGVGETTAVQLMAEIGDVRRFPRRSSIVGFAGVDPAVDQSGKHSAKSVPTTKRGSPHLRKTLYQIVCTYLKKSPVDEPVYQFLNKKRSEGKPYFVYMTAAQNKFLRIYYARVKECLEAFDAQQDTSQR

SEQ ID NO: 47351 - protein, 315 aa, unidentified
MVSYLGIDVSSLSLDAAVRPQGTRLHVSNDPAGFEALLDGLCGLSIKRVLLEATGGYERNILRFLQDAGYKVIRVNPRRARAFAESIGVKAKTDAIDAEVLAHYAEVIPDQPTLRIRPERALLRELLQQRDRLVQQRDDDRRRLKQAQFSAVSDFLKANLEHFKSQIKLIEQAISQQTEALKDERVTQLVQVKGIGLVTAGKLITLLPELGRVESKEIASLVGVAPFNHDSGKSVGKRSISGGRFEARRSLYMSCLVAIKYNPALKARYEALRGRGKVAKVALVACMRVLIVRLNAMLRTGKPWLDLVLPQPMRT

SEQ ID NO: 47352 - protein, 409 aa, unidentified
MLFGGIDWSDRLLDFHLRTADGHVLAQGQVESSVEGLTELFVALESHGPAAEIGIAIETCHGAWIQPLLDRGYQIYPVNPKMVERFREALSAAGDKSDKIDRKVLAMFLVTFHQNCIPLRPDAPEIVSLRIACQDRVRMVEERSAKLSELQSILKCYYPAFLGLFGKPKSTIALQFLEKFPTQEQMKGLTKRRLQNWLKRHHYTWSRRIDYMIDVLKQPVLPVADHLQQAKAPLISYLAASIQILNSEIAKRDQWIAEHLDQLPEANWVRSLPGAGDVLAPALLACLGRDPQRFVTIAGARALMGTAPVTKASGTVRVVQFRRGCWKFARRTLQLFADQSRHQCPWAQAFYSKQRNSGHNHHAALRALAHKWLKIILAMRRDGTIYNERIFANSQRRYLLRIPVLHKAI

SEQ ID NO: 47353 - protein, 465 aa, unidentified
MRTDKTLWRNRNARKELTRRLQSENPGLEVVHPHAAGIDVGNSAHYVAVRPDRDPQPVRRFECFTADLHRLANWLQNCGVKSVALQSTGVYWIPLYDILEEHGFEVYLVNARHTKNLPGRKSDVQESQWLLKLHTYGLLNNSFQPLSKIRILRTYWRQRLLHVTGAGTCVQRMQKALTQMNIQLANVISDLSGVTGQLIVRAIVAGERDPHKLAELSHPRIQASRAEIAKSLEGNWRQELIFVLQQEMEMYDTYQRRVAECDQELQKHLRAFAATVPTPVKEALPPKKKKKQNKNNPHFHLADELQRITGVDLTRIDGVDVIVAQTLVSEVGLDMSRWKTEAHFASWLGLCPDNRISGDKVLSRGTRHVLNRAANALRLGASTLLKSQTYLGAQYRRLRSKLGAPKAITAMAHRLARLVYRMLKYGQHYVDKGAEYYEQRNRQQQIEFLRKKAAQLGLQVTAPHA

SEQ ID NO: 47354 - protein, 481 aa, unidentified
MATTRPSGLNRKQRRELARRLQAADPGLEVMHPHAAGIDVGNSTHYVAVRPDRDPDPVRRFDCFTADLHRLADWLQHCGVTTVALQSTGVYWIPIYEILEARGFEVYLVNARHTKNLPGRKTDVQESQWLLKLHTYGLLRNSFHPSAEIRVVRTYWRQRGDHVRAVSTCIQRMQKGLTQMNIQLANVISDLSGWTGQRIVRAILAGERDPETLAALSHPGIHATHAEIAKSLEGTWQPDLLFVLKQEVDLYDTYQLRIAECDQELERHLKSFADKTPDPLADPEPSPMLAPSDTRAHQHHPKRRRKAGSHAPQFDLGRELHRISGVDLTRIDGIDVGVAQTVISEVGLDMSRWEDEDHFASWLGLCPDNRITGGKVLRRGTRHVINRAATALRLGASTLLRSQSYLGAQYRRFRGKLGAPKAITAMAHKLAVLVYRMLRWGHAYVDKGLQYYEERHRQQQIHLLKKRAAKLGLQIVEPQVA

SEQ ID NO: 47355 - protein, 457 aa, unidentified
MVEKSQAQAMDWDSLPPLNVNAAGLDIGATEIYACVPVGRDPQPVRRFDAFTVDLQSLAAWLAACQIDTVAMEATGVYWIPVYEILEASGFEVYLVNARHVKNVAARKSDVSDCQWIQRLHTYGLLRASFRPPEEIAALRSLVRHRDTLIHYRAAHIQHMQKALQLMNVKLTHVISDITGVTGMTIIRAIIAGERNPKVLAQYRDPACKKSQAEITKALEGHYKAEHVFVLRQALELYDFYDQQIQACDREIESRYQASAPRDPEGQPPTTAPNPRQRRPRKGQAHFDLTSSLYQMVGVDLTRIDGIDALTAQTLISEIGLDMGKWRTVKHFTSWLGLAPNPKKSGGKVLATHIRRTQNRAAQALRIAAQTLARNKSALGGFYRRMRAKHGAAQAVVATAHKLARIVYHMLKYRQDYHDLGTDYYEQQYKERVVRTLKRKAADLGFRLEPVLTPQVS

SEQ ID NO: 47356 - protein, 338 aa, unidentified
MNKITTVGLDLAKQVFHLVCCDERGKVVGKRMLRRAQVLGYFANLAPARVGMEACAGAHGWARELEQLGHAVKLLPPRFVKAFVRGNKNDFNDALAIAEAVVRPEVRGVAVKTVAQQDIQALHRLRSECADSRTALCNQLRGLLAEYGVVLPRGVSSLRRRLPALLEDGENGLSALFRRLLAQGYQRLCELDAHIAAYNAEVARHSRQDDACRRLQTIPAYGPVVASVFHSQVGDGRAYRRGRDVSAALGLVPRQHSSGGKTVLLGISKRGDCYLRSLLIHGARSVVRQAAHKDDRLSRWINRIKAQRGHNKAVVALANKLARIGWAVLRYQRDYQPA

SEQ ID NO: 47357 - protein, 335 aa, unidentified
MHYLYYVGLDVSKETFDASLVAFEDANEMAHRKFANSRKGICSCLHWVEKRHGIRLDDVIFCAEDMGSYISEMAVCASDRTLNFNFSLISPLVIKYSMGIARGKTDRVDARRIAEYAITHYRKIALYLPAEKELCQLRTWLILRAHLAKQRVAKLVLLEKLDYKEKFADVSIQRSMLQEEIAYAETHMKTIEREMKELIAADSNICRNYKLLTSIKGVGPITAIVMLCSTLNFTKITDHRKFACYCGLAPFEHSSGTSGRGGCHTSSMANRDIKVQLNRSALIAIRCDPQLKAYYERKVAEGKHKFSVLNAVRAKIAARCFAVVRRGTPYVALQI

SEQ ID NO: 47358 - protein, 416 aa, unidentified
MKQWQELTHYAGLDWAKDHHSVVIVDHGGTVVADFEFEHSAEGWKSFGDKTVAWPNLAVSIETSQGAVVDQLLQREYTVYPVHPVAAQSYRQRKAPTGTKTDHLDAWGLADALRVDGQGWKALEPMDPLTQELRLLCRDELALIEQRTALENQLQQALLEYYPAALEAFEDWTKPYAWEFVLGFPTPEALVLAGKRKREKFLHSHKLWRPGTVEKRLEVFARADQFKASRAIVQAKSQLAVSLCKVLITLNHQLEVYRKQIEALFEKHPDHDLFGSLPGAKKVLAPRLLAALGSDPNRYGSHQVLQRMAGTAPVSYQSGKIDKVHLRWACDKFMRCTVHLWANCFRRSSGWGQAYYLKKRQQGMSHACALRCLGQRLLKIVFRMISDKAPYDAELHSRNQQKHGSWVLKLVTKPAI

SEQ ID NO: 47359 - protein, 476 aa, unidentified
MKKTKRPATGTQDGGNRKDGQAASPKQVPGSQLAALRPNVAGIDIGSSEMFVCGPEQPDGTRELRAFATTTQQIHDCVDWLRQQNVESAAMESTGVYWIPVLEILESGGIETLLVDTRPLSRVPGRKTDVVDAQWIQTLHSHGLLQGSYRPDEEISELRTIVRQKAALVREQADWVRRMQKSLDQMNVRVHHAVKDLQGVTGMRIIRAIVDGERNPLVLAGLRAPNCSRSEREIAEFLTGHWRSNHLFNLGQSLLMYDAIGQRIEAHEREIQRRLESLTPPGRDSLDAPPLANPGKQAAMKRRDQEEKRQKLYRMAGVDLTTIDGVGVETAEVVISEYGVDLSTFATEKEFVSHVKLAPHRPVSGGKVLKKKRGRQKGTRTAEALRNAATAVRLSRSALGAYYRRMARRKDAAIAVFATARKIGSLIYRMLRWGQAYVDAGQEAYDRHYDAVRLRTLSSTAAQMGYQLIKTEAVSA

SEQ ID NO: 47360 - protein, 415 aa, unidentified
MPNPVLVGVDVHRQTNTVCLMDQAGHVLGPRFSIDNNRPGAEAFVHQVAHQVVTGDFDAIQIAAEATGYYWWHFFQTLSRDPLLQQWPLQLYPLNPRLTANFAKTYLDRDHTDLGDAFVIADRLRMGRDLPPPYQLDARYLAVRLLTRYRFHIVHALVREKAYALAILYLKASEYARRKPFGNLFGAASRALLQEFSSLEAIAALPFDELVEWLDVRGKRRFADPQDNARTLQQVACDSYVLPTALQLPIHQTLGWSLQHVTFLEGQIKRLDSAIADQLTSIPHTLETIPGVGPVFAGGIVAELGDIARFEYQQATVAKFAGFKWRKHQSGDFTAEETHLTRTGNRYLRYYFCEAANAVRMHDAEYAAYYDRKYREVRQHQHKRAIVLTARKLVRLVVRLLTTNQPYQPRRPATS

SEQ ID NO: 47361 - protein, 435 aa, unidentified
MRQRKASTKVDVESGFPLLRPNAASIDIGSREHYVAVPEGRGTPSVRSFGCTTSELKEMAAWLHSCGVDTVAMEATGVYWVPVYEVLEDAGLEPFLFDGRQTRHVSGRKSDVLDCQWSQKLHSYGLLTRAFRPAKDIASLRSYWRQREGIVDSCSRQVLLMHKALEQMNVQLHKAVSDLTGQTGMRILRAIVAGERDVHALARLRDRRVKATEEEVARALEGTYREEHMFALTQALEAFDFFQQQLVVCDQALERYLAQLPSAPDPASVPPPPQRRRKNQPHFDLRKELVRIAGVDVCQIEGIAALTAQTLISECGTDMTPFPTEKNFTSWLGLCPNNRKTGGRIRSRRTRRVNNRAASALRVAAQALHHSNSALGSYARQMKARLGAGKAITATAHKLARLYYRLMKHGEAYFTQTQAQYEALSYCQVLWIGHS

SEQ ID NO: 47362 - protein, 310 aa, unidentified
MTIAHRLIGIDISKAHLDIHDDVTGKSERIANASAAIAAALARWPHAGLRVIFEATGSYDRVLRSALEAANVVYVRVNPARARDFARATSVLAKTDAIDARLLAAMGRALALTPNQATDPLRERLTGLQRRRDQLVATRADDKKRLATAEDDEVRASIMAHIAWIDAEIARLQDVIDRLVAGSAELATLRKRLQTAPGVGPVTALTLIALMPELGQRSGKTIAALAGLAPFNNDSGALRGQRHIKGGRGRVRRALYMAALAAIRKVPRLAAHYRNVVARSGHAKVGIIAVARKLLVALNAMVKKGEPFRV

SEQ ID NO: 47363 - protein, 427 aa, unidentified
MEYNQNRKIEQVLESTLIIGIDIAKTNHVGRAQDFRGIELGKALTFKNSQKGFTKVLDWTHKLMAKHGKTQAIFGMEPTGQYWLPLAQFLCQNGIKVVLVNPMHVKKSKELDDNSPTKNDIKDARVIAQLVKDGRYSEPNIPTGIYAELRVGMNLRDRLTEDLRRAQGRIDNWLDRFFPEFLNVFNEWTGKAALLVLEYAPLPQEIVDKGADGIMECWRQGMKRSAGKKKALQLVEAATESIGLNQGSIMGRQEILTLLNQYKFIQQEIEQLLQQLENLLGEIPGAKEMMTVPGVGMVTIAGFIAEVGNLDHYSHPRQIQKLAGLNLKENSSGKHKGQTKISKRGRARLRALLYKCIMPLVAKNEEFKALHHYYTTRAQNPLKKKQSLIALCCKLIRILFAIGKKKTPYDGSELIKNSTVLSLQDAA

SEQ ID NO: 47364 - protein, 429 aa, unidentified
MKRESRIDKNLKAITPQTVIMGVDIAKTEQWARFVDYRGVEIGKALKFRNDRNGFEIIVAEIIRRCKEKSAEKIIVGMEPTGHYWKAFANYLIKKGITVVLVNPYHTKKSKELDDNSPTKSDVKDALTIAKLVKDGRYYETYLPHDVYAELRVLTANRISLNRRKSAIENTLTAILDEYFPEYETVFKNPYKGKASMQILRVCPLPIDILALGEEGVLTEVKKAVKKTVGRKKVTALVEAAKTSVGVEYGESAARFRIQKLVEELELVDRQLAETEERMKDALDKLEIGQYLLSIKGLGIVSLGMLLGETGDPLRFEDPKQMARLAGYNLIEDSSGRNKSGTSISKRGRKNLRCVLYQISLTMVATNPEMRQLYDYLKTRKENPLKKMQALVVIGKKVLTLIFTLAKKKENYEPSKIFGEVRRNQLQAA

SEQ ID NO: 47365 - protein, 464 aa, unidentified
MEVLNIGVDLGVTAKHHAEVVNSEGTKICSSVSFPGTKEGFDMLRENVAKQGGQGTKLRFICEPTSMSWFPLAVYARRHGDEIMRVKAQKSHALRKYYSRHSKSDKLDARVLAMMPVVDKGSVEELYLPDRLTNALDRRCRQREKISKEIASLKTRIKSLYQWLMPGLTDCFEDAYGQRAKAFYKRYTNPFKIKRLGISRLGKVLDKVGRQHAAEGLAKRLYEAAVRGCELYDRSDEYIDFDELQEEINCELNLLESYEKVQRKVDQDIKRLYENVHPSKNIETIPGIGETLAAVFLGIIGDSARFPSQSKARSYSGMIPKQDDSGESSKKGLNITKDGPARYRRALYLASDTARQCDPQLAKVYYEQMVYKGNCHTQAVCAVSTHMVGRIIRVLKDKRPYELRDIEGKPITRREAKIIIANEYTVPQDVRKRTRSRRIKKGYKSDQIQSVAQMQSSRSLQYTG

SEQ ID NO: 47366 - protein, 325 aa, unidentified
MQITTIGLDLAKHWFQVHGVDVYGRVVVRRRLWRSGVIAYFRSLEPCLVGMEACATAHYWARELMALGHTVKLMPPAYVKAYVKRNKNDAADAEAICEAVTRPSMRFVPIKEAEQQAVLMLHRARSLLVRQRTMLVNALRAHLAEFGIVAPQGLRYVEILTKTIAHQQARLPELARSILQTIVDQLNGTMARIREIEGRLARWHRQSRVSRLLATVPGVGIMGASAIAATVTDPSLFRSGREFAAWLGMTPRQNSSGGKERLGRTSKRGDKYIRSLLTAGAVAVLRHARNRPTRDGEWVRALVARKPTKLAAVALPTKPPASSGQ

SEQ ID NO: 47367 - protein, 338 aa, unidentified
MNYVGIDHHRQYSHMTLMDQEGQVLRSGRVPNLRAEIEKFLEGGEAMEAVIETGRSSYTMVDVLEEMGVAVKIAHPNEVKAIARAKIKTDKRDSEVLAHLLRMNMIPEVYRRSTENRQAQRVLRQRAFYVSAMTALKNRVHAFLAQQREEIREVVARETNIFSEKGQKVLLGLDLAPREKKLLEALLKTYRHLETRIGESKAFVEKLYEESREAQFIRTIPGFGKYLSVLVAVEIADLTRFTDAAHLHAYAGVIPSIHSSGDRTHYGKIIKAGNRWLRWAAVEAVWPAIRADFDLRCFYERLARGKGANKAKVAMARRLLTIIYKVWKEGRNYIAYPR

SEQ ID NO: 47368 - protein, 339 aa, unidentified
MDKCRVFVGIDVSAKQLVVVRQQDGKNEVARSFANTAAGHKELKRYLTRAASRVRVGLESTGLYGLDVALFLQADSRIEVMVANPRAVKDFAKALLQRSKSDPVDAWVLAEYAARMPFQPWQPPSSSALAVTALARRIHALTESATREKNRLHALSATGTSLKVLVADLKRSLQAIARSQARLTRECRKIIAADGLLEGRFRLLLSLPGVGETSALQLLGELALLPADAEVRQWVAYAGLDPCTCSSGSSLAKRPRISKVGNRHLRRALYMPALTAAYHHAAFASYYRRLQQRGKCKMVALVAVMRKLLHATFGMFKHGARFDASRAFPATAAAAGAAA

SEQ ID NO: 47369 - protein, 482 aa, unidentified
MKKRNIFQNRSQQLLQLFEKAGNRLKMMCVPIDYAKKDHIVMFCNGYGDILRKPFSVKNTLEGVKYLIDQVMRSCRQRHIKKEYVFFGGEDVNSYAENFANALRTKGFLVANVNAHDAKKQRETLQASTDRIDLMGIATMLLNLRAKCSPAQDGIYRNLRTLVRHRKKLVVMKTEVKNRVHTLVDRLFPGFLNEKNTGINPFSESSLALMQDRFSAQQIRRRQQRTLIKILKRCATPNAESLAAKLHSYASQVITTPEEYAATLQLSLQHHIKHYRCLQENIDQLLSEIALLLAQTQAVFLTSIKGVGIVLAAGVSSEIGNPFVQKPLNNLTSYSGIIPRVKQSGGIEGHTHTGRVSKRSNHLLKDYVVQSAFQMGLRGPQPLLQDYKRRDAAGQHADFGIGRRFLRMAMCLMRSSQVYLPPKLRSPKIQMQERAGYYLTAWPLLRDKWKKAHAHQVAFAMDQPLGQWRKMVQVLYDIKLKL

SEQ ID NO: 47370 - protein, 350 aa, unidentified
MSQTLKTSVAVIGVDIGKNSFHLVGQDRRGAIVLRQKWSRGQVEARLANLPPCLIGMEACVGAHHLSRKLQMLGHDARLMPAKYVRPYSKGQKNDFRDAEAIAEAVQRPTMKFVATKTADQLDLQALHRVRERVVGQRTSIINQIRAFLLERGIAVRQGLRFLRAELPGILATRNDVLSPRMLRIVEDLATDWRRLDERIEGLSGEIERLARQDKGCERLMTVPGIGPIISSAMVAAIGTGDAFSKGRDFGAWLGLVPKQISTGDRTILGSISRRGNRYLRSLFVQLPGSCWSRSGRSVGTAMGSSRGSMPPESASTTTCWRLRSRTSSPASPGQFSTRGAPSSASGQVR

SEQ ID NO: 47371 - protein, 343 aa, unidentified
MATISTIGLDLAKNVFQVHGVDVDGAVVVRRQLRRSQVEKFFAELPPARVGMEACGSAHHWARVIGGHGHEVRLMPPSYVKPYVKRNKNDGRDAEAICEAMSRPTMRLVPVKSVEQQAVLSVHTTRALLVRQRTMAGNALRAMLSEIGIVAAQGIKGLRELMSKLDEPSAAIPELMRGALQMLARQWQALDEAERVLERQIKRAAMADQDARRLMEVPCVGPIIASAVLAKVPDPRVFRSGRDFAAWIGLTARDRGTGGKSRPGPISKQGDRMLRALLICGASAYLRQARRRGITDPWLRELLARRPYKVVMVALAAKIARILWAMLAKGQHYRDRARVPAQA

SEQ ID NO: 47372 - protein, 336 aa, unidentified
MQISTVGIDLAKRVFQIHGVDRDGNIVLRRQLRRAQVLGFFAKLPPCLVGMEACGTSHYWAREIGALGHEVRLMPLQYVKPYVKRNKHDPADAEACCEAVGRPSMRFVPVKTEAQQAVLIMHRSRELLVRQRTQVVNALRGHFAEFGIIEPQGIWHVGRLRARIEDESTIPEPGRTILGILVGQLDQLDGRIAQVEAEILAWHRANPVSQRLAKIPGIGPLIASTIVATVPDPSVFRSGRAFAAWLGLTPRQHSTGGKERLGRISRQGNRAIRQLLILGAHSALLRSKEIRANAWVQGLLGRCARLKVAVALANKMARIAWVVMAKGASYRRTVPA

SEQ ID NO: 47373 - protein, 342 aa, unidentified
MPLYCGIDLHARDSVICIIDETERIYLREKIPNRLEVFLSHLNTFTPKPSIVVESTINWYWLVDGLMDAGFEVTLAHTLGLSMITGAKVKTDKRDAFVLARLLRLGAVPKGYIYPKEQRPVRDLLRYRNSLVRRRAAEYGSLWKMLAQYGIVCPTPDFHRHLTEEQLAEHLDHPVLRKQGAMTIERIHAYTRQIKEIEDTLLATVKDRPEFNLLQTIPGVGTILALTIYYETGDIGRFAGPKQFSSYCRVVPGVAQSGGVSKRGRGSKQGNPHLKWAFCQAAVLATRFYQPVRKFRQKHLQRRKTKGNKLVSLGIVAHKMAVAAFYVLRDRVPFRGELMFQT

SEQ ID NO: 47374 - protein, 459 aa, unidentified
MGEGSGSGTTRGDRRRNVRREQLRSMLPRAGAVIGIDLAEDKQAIAVVDHDVRVLARKTVRVKAFRLGEGLDWAVAQARAKGFAAVAVACEPTGPRWLQVQRLCGERGLPLVCIQPLVSHIAREQQDYTAHKTDESDCVMIARLAIELHCYVPEELDETWAELRHLGRRRGQLITAATASVLRIRDFLSVAWPTVTETCAQPFVSGTWLAALQVVTGRCGGDPARLAGMGLEEFTGQVRSAVPGWGRQRPCRRICGQIFTALTDTEGVVISCRRGLLRRVADELGDLARTRAQLRAVEGEMVAVLAGLGLSRLAGIPGLSAVGAAAILAETGDPRRYNSSSSLVKHAGLAPAENASGAFAGQPRISRRGRPGLRLTVWRAVWPMLQFNPVLAAKYQALAGTAGDGAGTRPAAAARTRRAKARVACAASLLRWIYSMTVHGTSWDPAAAGRGQHLPAEAA

SEQ ID NO: 47375 - protein, 370 aa, unidentified
MNKMSAVNTQTIVVGVDVHKYSHTAVALDCFGSQIGLHEFTNDFLPEYVSWLDAFGNRNNPIVALEDVNGYGVHIVRKLADEGITMRYVPGILTERKRKQSIHREKSDPVDAMRVAKVILTNYEETLPAKESIANREERTTAITLDFFLNERRSLVAEKTILKNQLHAMLHQHMGDHYTDCFPKAFTPKAIGYYLKTVNPKAIHDSEASALVASIRRRLTRLKLLLGQIAEIDKAMKKAAKDSSPVAALKKNISGCGDVTACTLIAEVTSIKRFKTKSQFARYAGIAPVHKSSGNHKRLYTSPYGNRKVNRALHTIALYQISRVDDNNPGRIYFEKKLNEGKTKLWALRCLKRQISNRVFQTLKHEYNTC

SEQ ID NO: 47376 - protein, 347 aa, unidentified
MTIVEAPPGITGGVDTHADVHVAAALDPLGRLVGSESFTTDAKGYRELLEWLRSFGDVTKVGVEGTGSYGAGLARFLRRERVHVVEVNRPNRQARRNKGKTDALDAIEAARAALSGNAKGHAKTRDGTAEAIRVLVVAKRSARQSRVKALVQMRHLVVSAPEELHQRFKGLKVPALVEMAASLRPDRSPDPVTAATKSSLSSLARRIKSLEVELAALDEQIAALVAAAAPELLALFGLGPDTAASLLVAAGDNPERLKSEAAWARLCGVAPKPADSGKVTGHRRLDDGGDRQANSALWRIVMVRIAHDPETRAYFERRVKEGRTKRDVIRILKRYVAREVYRHLPRG

SEQ ID NO: 47377 - protein, 340 aa, unidentified
MKKLYVGIDLHSTNNVLGISDEDDQKIYSKRLPNKPELVLAELEPFKDAIVGVVVESTFNWYWLVDLLMENGYRVHLANPPAIQKYKGLKHADDRYDSFWLAHLLRLGILPEGYIYPKEQRPIRDLLRKRLHLVQLRTSMINSLQAVLHRNCGTRLSTSKIKATGENHVLASLPMQEDLQFCGAVSKETIDYLTSQIKKIEKMILEKITLQERFHQLQTIPGVGIVLALTIMLETGSIERFSKVGNFTSYCRKVPTDWTSNNKSKGKGNKKNGNKYLSWAFAEAAEIGRRFDERVRAFYNHKAAKSNRMIAHSTLAHKIARAAFFIMRDNVAFDHDKLFA

SEQ ID NO: 47378 - protein, 311 aa, unidentified
MDDTMGIDISKDTLDAYWLSKRKHKQFANTKMGLSALIRWIRQTGRLLIVFEATGVYHRLLETGLATHNIPFARVNPRQARRFCEGTGQLAKTDRVDAAMLAKMGALLELEADQPKSETLHDLKQLATARLALIKDRTAAKARLAATTHSLLSRQIKRRLKQVERDLSQVGEAIDAIVAADNELRVRADILKSIPGIAKITAYAILTEMPELGHLSGKQAAALAGLAPISRQSGKWRGKERIQGGRASVRRAVYLPAVVATRFNPDMKAKYEQLVSIGKCKKLAITAVMRKLIVMANALLRDQRKWGEYPA

SEQ ID NO: 47379 - protein, 419 aa, unidentified
MKIVHPTCCGVDVHKSFLVATIIKTTGGIEPDYSKKRFSTFNNSILQFKQWLIENDCYDVCLESTGKYWVPVYNLLEDTIRVTVANPKWVKAVNGYKDDEKDSKWIGDLFRIGIVPGSFIPDKPIRILREFTRYRYKLVSCKSSEKNRFQNAFTVCNVALDSVVSDMFGKSATLITDYLIKTDEYDSDYCASLLQKSLKKKSETVNESIVGYQITPEQKFRMLMVRAHLNYVEKSIEQLDQKLDEMVKPHEDAISFLCTIPGVDRTSAVTIISEIGTDMSQFSSSKRLCNWAGLTPGNNKSAGKKKSVRITRAGVYLKPALVQVAHAAVKSKTSPYYKTKYESISRRRGKKRAIIAIARMILTAVYNMFKTGEVWNPCDLYKIDMPEQLQDKQKQKAIKQALKLLVSQGIICESELAVS

SEQ ID NO: 47380 - protein, 339 aa, unidentified
MTEISRIGLDLAKSVFEVHAVNAQEQVVLRRSLRRSQLLRWFGRLPPCLIGLEACGTAYHWSRELSALGHTVRLMPPSYCKPYVRRNKNDAADAAAICEAVGRPSMRFVPIKTLQQQSDAVTHKARELLMKQRTMAMNSLRGLMAEFGVVVPEGAHHISKLLLVLADPEDTSLPEVARAALNAMAEILSALNKQINALDQTIKATVRDNATARRLDTIPGFGPILSSAIAVIVSDPRHFNSGRDFAASLGLVPRQDGTGGKVKLGPISKRGNGYLRRLLVNGATAVLNGKNARNDPWRARMLDSKPKKLAAVALANKMARIAWAVMTRQEDFRPRAMAA

SEQ ID NO: 47381 - protein, 326 aa, unidentified
MVDDDGKIQCEGTVISQPEALAAFIKTNAVKAKRIGLETGPTSTWLWHELRALGLPVICIDARHAKAALSMQINKSDRNDAVGLARVMQCGWYKEVQVKSLSCHEIRAVLSSRAQLVKIKRDLENQIRGLLKNHGLVIGKAGGNVFHRRAEELLGEQGLLAAAVRPLLDIREKVSREIAVLYRKLLSLARNDEDSRRSMTVPGIGPITAMAFHSAIDEPCRFKRSRSVGAYFGMTPRRHASGEVDWSGRISKCGDGMVRTYLFEAAGVLLTRVPQWCKLKAWGHRLWKRIGFKKAKIAVARKLAVILHRMWRDGTDFQWSSKEAAA

SEQ ID NO: 47382 - protein, 404 aa, unidentified
MIFVGVDWAEAHHDICVLDERGTVLGRRRVDDGVAGVAELHALVAEHAEDPGKVAVGIELDRGLLVGALVAAGYDVYAVNPLAAARYRERHGVSGAKSDRGDAKVLADLVRTDRHNHRRLAGDSELVEAIKVLARAHQSAIWSRQRQLNGLRSALREFYPAALAAFGTDLASSDAVAVLAIAPTPELGRQLSRPKIGSALRRAGRQRNIETRAAQIQAALRSEQLAAPRRLSDAYGAVARSAVAVIVALNHEIARLEEALGEGFDEHPDAKIVRSLPGLGTVLGARVLGEFGDDRTRFATAKCRKNFAGSAPITKASGRSLVVLARIARPRRLADALDQWAFCSLTQSPGARRYYDQLRARNKTHRQALRQLANRWVGILHTCLERTELYNEHLAWGHLTAIAA

SEQ ID NO: 47383 - protein, 413 aa, unidentified
MLFGGIDVAKHNHEVCVLNESGDSILQMPIANSNQGFGKLMKAISRLITGPAEIVFCMEATGHYWLPLFCHLADVGYRVSVVNPIQSDSLRNLYIRKSKTDKKDSFILADLVRLGRARETRLSSETTVKLQNLSRMRFEFVTKVGVLKQQVLGILDRIFPEYSKCFSDVFIRTSRELLKQYPDPSELAEVDLTELSSFLSEQSRGRLGMERAEKIRTLANNTFGINLAMDSFTLELRLLLEQIDFISEQIKVIEEAIVQVMEELKRQDPQTQLPSGCRHVLETIPGIGTTLAAAIIGEVGDIKRFPNARALVAFAGLDATVKASGQFEGTRNRMSKRGSPVLRNSLWLAAVSARRHIPEMRAFYETKLSEGKHVNVATGAVARKLVHMIYTLWKTNRIYEPNHQWSPPGSIQG

SEQ ID NO: 47384 - protein, 350 aa, unidentified
MIAINKDIIATIGVDLGKNIFHICAMNDKGTILLRERLTRAALPKRLANIPPCRIGMEACAGSHHIGRQLTALGHDVRLMPAKYVKPFLKSHKNDYRDAEAIAEAVQRPTMRFVPFKSDEQLDLQALHRVRSRLVGQRTAVINQIRAFLLEHGVAVRQGPGALRLALPSILAQRTDVLSPRIIHLIEGLTGDWRRFDERIADVTREIEQLAKQDQYCKGLMGVPGVGPMTASAMVAAIGDGAAFSRGRDFAAWLGLVPKQISTGDRTILGGISRRGNRYLRTLFIQGARSVLQRSDGWEKKSFGRWLIAASKRLHKNVLAAALANKLARIAWAVLYNAREYDTALAPKAT

SEQ ID NO: 47385 - protein, 343 aa, unidentified
MLKFNVIGIDLAKNVLQICVISKHGELVSNKIVSRQKLKEILAKSSPSIVGIEGCGSSHYWGRLAESFGHDVRIISPKKVKAFLTGHKTDANDALAIANAAMQIGLKYSKPKNEEQQSLQSLEASRVFLSRNITSLSNHIRAMLYEYGIVSAKGAAGLRKVVQDTIEENNELPTCLISTLHQLWAQYRNLKVEFTKLEKSKNSVVRQLKPCKQLMALEGVAEVCAGMLYSSIGNGKQFKNGREAAAFVGLTPKQHSSGGKVFMVGIDKKGGVKELRAALYQGAMSIVTHLPDEPKTVKQAWLIQLVKRVGIKRTCIALANKTVRTAWAMLRHESKYEQQLIAA

SEQ ID NO: 47386 - protein, 348 aa, unidentified
MSQSKQYVGLDVSLKETSICVIDDADKILWRGQVDSTPEAIGSAIKQHAPHAVRIGLESGQLSSWLFHELKQAGLPVICVDARHAKAALSLKVNKTDANDAFGLAQIMRVGWYREVTVKGLDCQAVRALLVARAQIVSQITTLKNCVRGILKTFGRVLPKGLRSQFPARVRAAIDGHQVLGTIIEPTLRVLEAMRVQLRVYDKAVIQRARSDDTARQLMSAPGVGTVVALAYITGVEDPARFKRSSSVAAYFGMTPRRYQSGEVDHAGRISKCGDGMVRGLLFEAAKVLLSRSARPSALKTWGEALGKRIGAKKATVAVARKLAVILHRMWTTGTTFQWNAEAASSAA

SEQ ID NO: 47387 - protein, 491 aa, unidentified
MEAEYRRCCVIDVHQKVLSVCVLPPVGSVGREVKEERFRTFTRDLKRLRNWLKQCGVTDIVMESTGQYWRPVWNILEGGFVNLVLVNPVQVKALAGRKTDRLDANWLATRLERDNLKGSFIPPLEIRELRELTRLRVSLLQDSNRVKNRIGQLCETGNIKVSSVASDLFGTSGRRMLAALERGDRDAGWMADYAQGKLRNKKGELEMALQGTFSDHQRHMLGRMLKQLNGLDQEVADLTEQIEQRVACWPDVMARLTTIPGLDRITAWTVLAEIGTDMDVFGDARHLASWAGLCPGLRESGGKRMSGKTRKGNRYVRRALCQSAWAASRTKDSHLASMFRRIRGRRGTQKANMAVAHHLLTIIFHVIKDGTVYQELGAGYFDQQNKPKVTRKLVERLERLGFAVQLEPIAEPETVLIPEPAAPGVAEAIDAAGIGQPPPSPALQSQPATAPSRRRGRPCKCAERGIDCPHKKPPANRINSPGTETSKKLSH

SEQ ID NO: 47388 - protein, 310 aa, unidentified
MMGTYVGIDVSKDRLDVHVLPQDEAFFVERNGKGLAALVDRLRPLAPSLVAVEATGGFETTTAAAVAGAGLPLAVVNPAQVRHYAQALGKRAKTDPIDAKVIARFAADIRPEPRLLADEMTQLLADLVSRRRQIVEMLQAERQRQKRAIVKRLKKSIARLIAALEKELAELDRDIDDAVRGSPLWREKEDLLASVPGVGSTTARTLIAELPELGTLDRKQIASLAGLAPYTRQSGAWKGKSMIAGGRKTVRCSLFMAAMVAGRFNPVLKAFRDRLLAAGKPKMVALIAVARKLLTILNAILRDKTPWQIA

SEQ ID NO: 47389 - protein, 415 aa, unidentified
MEGLSPLHRRVAGIDVHRMLHVVTVLIEQPDGSISKHCREFGGFKRDCRALATWLAELQVQLVVMESTGIYWKSVYAHLENAGITAWVVNAHFIKHVPGRKTDMLDSEWLAVLARFGLVRGSFIPPKDLRELRLVSRYRRKLNSMCSSQINRLHKMLDDAGIKLGAVVSDIHGVSARAMVRGLIEGQSEAVLLSHARGALKRKTEELAASLDGDLSERHLFVLRHLSESIDALPRQLADIDAYLMRAMQPYAWAHRLLQTIPGIDATAAALILIEIGQDMARFGSPERLACWAALSPGNHESAGKRKSGRTRHGNNTIRFILCECANAARMTKSTLASKYRSLMVRKSHKKAIVAVAHKMIRLIYIRLSRRQPYLDQTIDYAAMSAKKNAPRWIKQLKAIGKWPETGATAAHATT

SEQ ID NO: 47390 - protein, 402 aa, unidentified
MNSVGIDISKGKSMVAIMRPFGEVVASPYEISHSAKDLRGLIDFINGLDGETRVVMEYTGAYYTPVAHVLYEAGIFVSVVNAILIHNYNGNSIRRVKTDKKDAIKIATYGLERWVDLVRYVPEDDLRRTLKIYNRQYDKYLKMKTTLSNNLIALLDQTFPDIKDLLTSAPRKSDGHVKWIDFISTFWHCECVCGLSPKAFKIRYLKWCKKNGYLYNESKAEKIYIEACGNVGMLPKNEFTKNLIVQAAAQVTSIAGALMVLTQEMNRLASQLPEYSIVMDMFGVGEKLGPQLIAEIGDVRRFMRKQSLVAYAGIDAPPYQSGTFESHSRKISKRGSPRLRKALFQVMICTLQQSKMDDPIFQFLDKKRKEGKHYYVYMTAGSNKFLRIYYARVKAYLEQIVA

SEQ ID NO: 47391 - protein, 335 aa, unidentified
MEFEFFIGIDVSKNELDFAIQQGSHFLFHREIANNPIAINSFIKELGKLPGFSLGKAVFCMEHTGIYNNHSINCLYKRKANMCLEAATQIKNSLGNIRGKNDKIDSKRIAGYAYDQRNKLLLWVPKREVIQQLAHLAATRLRLVSVKKQLKVPLKEHENFSSSKVSRQSLKVCSHSLKAIEEDLNRAEKAIEELINSDAELHRLFSLVTSVVGIGKVTAVQVIIATNEFKDINNPKKFACYSGVAPFTDDSGKVVKKARVSHMANKRVKTLLHLSAIVAIQYNPDLKLFYERKVTQDRKNKMSVINAVRNKLILRIFACVNQNRPYEKNYQKLVA

SEQ ID NO: 47392 - protein, 322 aa, unidentified
MTEEAACVGVDVAKNTLDVAVSNSKETRQFDNDHEGIDSAVRYIADLKPARIVLEATGRLEMPLAASLQTSRLPVVIVNPRQVRDFARATGVLAKTDRIDACVLALFGLQIKPEIRLLPDQKAREMGSLLARRRQLIEMLTAEHNRLPQADDSIRSGIEIHIQWLEEAISTINDDLDHQIRNSPSWCEKDNLLKSVPGVGKIVSTTLLIELPELGQLNRRKIAALVGVAPLNRDSGTMRGRRTVWGGRSKLRAVLYMAALVGVRRNPVIAAFYQRLLKAGKVKKVALVACMRKLLTILNAMIRSKTFWSSDNITQCVTVEAK

SEQ ID NO: 47393 - protein, 333 aa, unidentified
MLSIGVDHHSTSSHLTICDQEGSVVLSKRIPSNREELARIISRYDEPKQAVLEAGYNWGRMYDWLDELVDEVFLAHPQKLRAIAEARIKNDKIDSEILAQLLRSNLIPPAFAFSRENRAVKRVLRQRMFLVKLRTMLKNRIHALLMQHEIEKPKLTDLFGTRGMAWLQALELPYPDDAIFREDLVLLHEVTSRIGNTESLLEEIARKDPVVFRLRSIPGIGKYFSILIRYEVEDMSRFPTPKKFASYAGLIPSTHSSGERTYHGRITKQGNKYLRWALVEAVTGAIRVSPQLRTFYEKLKKRKGVKEAQIATARKLAEIIWHVWNEDRLYEIR

SEQ ID NO: 47394 - protein, 316 aa, unidentified
MTSKPEVFVGIDVSKHRLDIAVRPSGETWSVANAPEAFGPLLKRLKALHPTLIVLEATGGLEAAVVAELAHAQLPVAVVNPKRVREFGRASGQLAKTDPLDANLLAHFAEAIRPPVRPLPTAESERLASLVTRRRQVLNMLTAERNRQQTVLGAMRERIATHITWLEGEAQALDEELRQFIKQTPAWQATDELLQSVPGVGPVLSMTLIADLPELGQLDRQEIAALVGVAPMNRDSGHKRGKRRTQGGRASVRNVLYMAALSASRFNPRIRAFYENLIKRGKEQKVALTACMRKLLVILNALVKKQEPWRRTEKTA

SEQ ID NO: 47395 - protein, 344 aa, unidentified
MEHFAGLDVSVKETSVCIVDDAGRIVREAKVASEPEALLAVLNNPSYRFRRIGLEAGPLSQWLYSALGEANLPVICVETRHMRAVLKAQINKTDRNDARGIAQMMRAGLYRPVHVKTLRSQKLRMLLTHRKLLQSKAIAIENDLRGTLRNFGLKVGVVGAAKFEARIKQLVDNLPDLALLVEPLLVVRRVLREQIAILHRRLLDIVRDDEVCRRLMTIPGVGPVVALTFRATVDVPARFRNSRAVGAVLGLTPCRHQSGESDRTGAISKCGDEMMRVMLYEAAQILLVRSTRWSWLKAWAMQIARRRGLKKAIVALARRLAVIMHRIWVDGTEFRWARQEAAAA

SEQ ID NO: 47396 - protein, 340 aa, unidentified
MDEIETIGLDLAKHVFQVHGVDASGATVLRKRLGRGQVVTFFTGLPRCLVGLEACATAHYWARELRAVGHEVRLMPAQYVKAYVKRNKNDAADAEAICEAVRRPTMRFVPIKTAEQQAALLVHRCRERLVRQRTALVNALRAHLAEFGVIAPQGLRNVAGLIAIIRDRSDARLPAAARRVLEVLATQIEQLEGAVAALEKQLMAWHKSNPVSQRLATIPGIGPIIATALAATVVEASGFRSGREFAAWLGLVPRQHSTGGKARLGGISKRGNRYLRRLLINGASANLLRSKATNADPWVIGLRRRRPSLVVAVALANKTARIAWAVMHRQENYQPMAAAA

SEQ ID NO: 47397 - protein, 452 aa, unidentified
MPAGKDITMHYQKVLKMPESIPYLSVGFDVGADFTWMSIMLPNGILIGKPFKIIHSDPQSRELAISKIKEAQEMYSLESRCFLESTGIYHIPLLCFLRDKGFDCAVINPIITKNSTNMNVRKLHNDKFDSKKAAKVGLDASLKASIVPDDAIIDLRNLVRDYYYFKDLQSAIVLKLHAELKVSFPAYLNVFSKVTTQTSLKLLEAYPLAADMLAAPKDELVETIRSTARFGETYALARYDAICTAAKDAAVFGRALPSNALRIRLYIKMYREYQAHLDSILEELHQAVGKLEGTPDYDRISFIQTLHGVGFLSAVVLIAEMGSFDLFSSPKKLYAYFGLDPGVNDSGKFHGDRVHMSKRGSSLARRILHMVAINNLKVDKATKTPVNPVIYDYYTRKCASKKKSVAVGAVMHKICNIIFAMLRDNKPFELITPEEHRERYAAEHPESVNPAA

SEQ ID NO: 47398 - protein, 329 aa, unidentified
MKQINSPVTFYCGIDISGDTLDICYQEEGGTLCFEKCLNTLEGFKQIWRLTGNKYHFVMESTGVYQLPFCFFLESKKARYSVVNALQIKRYIQMKLERNKTDKKDAQHICMYGLENKPECYQMPDRLYFECRALNNAIETVTKEITAFKNKMHSLNKLEIDTKVISAAYKKILRDLAGELKKLEAELYKKLEAWQPEMVKQVRSVVGIGKRATAILIVNTQGFKHTESYQQLISYAGLSPKEYSSGSSIRGRVRICKQGGGMLRHTLYMCALNAKTTNAGCKALFERLVEKGKNKKLAVIAVANKLLKQVFGVVKNECLFDRNYYGKTA

SEQ ID NO: 47399 - protein, 371 aa, unidentified
MSELPAETRPARLRVEASPRRPGARKPETELGAVSTTAVPHPDSRSGPSPHLQGRVMDEQRTVFVGIDVSKDRLDVHLRPSGEAFCVPREGKGMDDLVIRLQGLSVALVVLEATGGFEATVAAALAGVGLPLCVVNPRQIRDFARAMGRLAKTDTLDAEVIALFAERVRPQARPLREPERVHLAELVGRRRQIIEMIGMETNRGRQAIDKPLARRLARHVAYLQKELDAIDHDIGDAIKHSPAWREAEALLKSVPCIGDVTARTLLAELPELGTVSRHQVAALVGVAPINRDSGLMRGRRAIAGGRTSVRAVLYMAALTATRRRSPFRAFYDQLTARGRPKKVALVAVMRKLLTILNAILRDHAPWRPLNA

SEQ ID NO: 47400 - protein, 424 aa, unidentified
MKTNCDYAAYVGLDWADRVHQVCLRAAGSTRDEQSELKHTPEALHAWANGLRARFPAGQIAVAVEQSRGPVIYALSRHAHLTLFPLNPAMAAKYREAAKAASGTKHDPLDASLQCELVRLHRDWLRPLAPLPAETRELLLLVEARRGLVEQRTALGHQLKAALKGYYPQALELVGHDVSTPLAWAFLRRWPTLAAVQRARPQTLRDFYHAQHVRAADRIEQRLAAVRHATALTNDAAVLATQPVLVAALVAQLEALQPAIDDYDQRIAECFRRQADATLFASFPGAGPQLAPRLLVAFGPDRSRYASAQQLQQYSGIAPVMVASGQTCVTHWRWHCPKFLRQSFHEFARCSIGQSAWARAYYTLQLHRGKTDQQAFRALAYKWQRVLFKCWQDRTPYHEAVYLAALRKHGSSLVPLIEALETAA

SEQ ID NO: 47401 - protein, 366 aa, unidentified
MQKISTMRMSGKNIFEGQLTIGLDLGDRSSAYCVLNEAGEIVLEHKLATTPEAMKQVFGSMPRCRIAMETGTHSPWVSRLLTALGHEVIVGHAQKVRLITKSRRKDDRLDARTLARLARIDPELLSPVKHRSAQAQLHLTEIRARAGLVSARTALVNAARGLVKSYGERLRKCGTQQFTREITSGLSAGLREALQPLLREVESLNEGIKEYDRRIDKMAKQTYPETALLKQVKGVGDLIATAYVLTVEDPHRFRKSRDAGCFVGLQPGRRNSGDSEPQMHISKEGDPYMRTLLVQGAQHILGPFGVDCDLRRWGLNLAERGGRNAKKRAIVATARKLAVLLHHLWVSGEVYEPLHNSCRTTIPAAA

SEQ ID NO: 47402 - protein, 416 aa, unidentified
MIGQKEKNEMKHVIALDVSKGKSTVAIYDGHRQCEFEGVLLHTRGDFERLHERMEEMTKQDGQAPAIVFEATGIYSKPVETFFKDYGYAYCRMNPLEANLQMATMRRNKTDISDAHELAKTHFKMEREITYIQDDYYEQMRALTRYYDEIDEEIILLKSRMHAILQLSFPELEKLITPSSALFLNIVQLYPHPALLQAHSKTMIKNRLKINTRKNLSLVRAEAKAITLLEAAENSYPAIKPTDIRCDQARDYAARIADLLGKKDTLVKQMVELSEGRKEYLVFRSIPGIGDSTACRLIGEIGDIRRFQNAKQLNAYTGIDIMRYQSGNTQYRDRINKRGNKHLRKILYFMVCAMLMAKGKPNHFVDYYYKLKKQPQRKPHKVAIIACINKFLKVTFQLLTRGILYDYESALPAQKS

SEQ ID NO: 47403 - protein, 422 aa, unidentified
MKIIYRRCAGLDVHEKSVFVCARILRGNQLEIVEATFPTFTEDLEALRDWLIRHRIQRVAMESTGVYWRPVWNVLEQCGKLDLILLNPQHVKALPGHKTDRVDAARIAELAQYDLVRASFVPSAEIRELRDLVRRRVHLTEDRNRVSNRIHRLLELQNVKLSSVLGKVTGTTARSIPEGLATATTIKPEALALLATHKRVRAKREQLAKALRCRPTDHFRFLLRELLEELDRLTGKIALMESRIEERMLPYRELIGRLCEIPGVDRLTVWTLISEIGVDMGRFPDSGHLASWCGLCPGNANSAGKRHSGRTSKGNRYVRRALVQSAWAAARIVRKRNFFTALFYRVSSRGGMKKAAVAVAHRILVIVYSMIRSGEAYREQGPDYFDRLHPERTKNRLTARLDRLGFLVHVEPEISCQNQLNR

SEQ ID NO: 47404 - protein, 344 aa, unidentified
MGEVITIGLDIAKSIFQVHGVDEAGAILIRKRISRAKMLEFFANLKPCLVGIEACPAAHHWGRELQALGHAVKLMPPSYVKAYLKRSKNDANDAAAICEAVTRPTMRFVPIKTKEQQAALLLHRARQLLVRQRTMLSNAIRGHLAELGIVSAKGRSGTGALLEIIADAEDSRVPPVARGVLDVLARQYSALGAEIGSIDRTILAWHRSSEASRRLEEIPGIGPIVATALVAEIGDWKAFGSGRSLAAWIGLVPKQQSTGGKDKLGSITKQGNRYLRWLLVVGAMAVIRYAQKHGTLKRPWLGRLMARRPTKVAAVALANKIARMAWAIIVHGDRYREPRPSLAA

SEQ ID NO: 47405 - protein, 372 aa, unidentified
MGHHTEAFVGIDTSKLRNAVAIADSGRGGEVRYLGEFPATEAAIRKLVAKLAAKCCRLTFCYEAGPTGYGLYRLLKSLGHDCLVVAPSLVPKKAGDRVKTNRRDALSLAKLLRAGELTAVWVPDERHEAMRDLSRARLAVKKDLQGKRQQISSLMLRLGRIYPGKTTWGPAHMRWLMEQKFEHREQRIAFEELLEGIRQESERMERLEDAIREVVPEWSLAEVVAALQAMRGIDLIAAVGVLAEIGDLSRFQNPRELMGYLGLVPTEDSTGDKVKRGGITKAGNGRARRILVEAAWSYRYPPRVSRDKQPKVEAAPRRAREIAWKAQTRLCGRFRSLERKGKRRTVIVTAIARELSAFIWAINRELMPPRQA

SEQ ID NO: 47406 - protein, 411 aa, unidentified
MEVVHGRCAGLDVSKRDAKVCVRVAGVGRRKTVETVTTWGSTTNQVLALREHLIAEQVTCAVMEATGDYWKPFYYLLEDAGFEVMLVNARHVKNLPGRKSDVADATWLAQLGAHGLVRGSFVPPEPIRQLRDLTRARTAITRERGREIQRLEKLLEDASIKLSSVASDITGVSGRAMLEAMIAGQDEPAALADLAKRRLRSKIPALTEALTGRFTEHHGFLARVHLDLIDRHTRAVEDITARIEVVIAPFQGFRDLIATIPGIGPLVADVVVAETGADMTRFATAGHLASWAGTTPGHNESAGRVKSTRTRPGNPYLQGALGAAAVACAQNPGTYLGARYRRIASRRGPMKANVAIQHTMLIAIWHMGRYGTLYEDPGADFFTRLHPERAKNRALHQLEAMGYQVTLDRTG

SEQ ID NO: 47407 - protein, 387 aa, unidentified
MFYVGIDIAKNTHWASIISSDGEIVKEPFSFSNDNSGFQKFISNLDSLDKTKILIGLESTAHYGENIISYLFNLNYKIGLINPIQTAHLRKSNIRKTKNDKVDTYIIIKALTLGNYSLITSRDINNLKLKGLCRSRRNLVTIRSKSKIQLVSYLDQIFPELSQFFKGNIHLNVSYQLLKEYSSPKQISSLHLTKLSNILHDNSHGRYGKQDAIRLRELAKSSVGVDNPSLSLQIKHAILQIELYNEQIAEIEALYKSILDEMDSPILTIPGMSYNQAAVIVGCIGDINRFQHSCQLLAYAGLDPSVIQSGNFQARSTKMSKRGSGMLRYSLVYSAHNVVKNNKTFRDYYELKRSQGKSHYCALGHVAHKLVRVIFKLLKDNVTFNLD

SEQ ID NO: 47408 - protein, 394 aa, unidentified
MEDVLRSCCAGLDIHQKVIVACIIRSAEGKKRPEKFFGSFDTTTRGLFDLSDWLTSYEVTHISMESTGVYWKCVWRILQNHFDLQLANPRHIKNIPGKKTDMKDAEWIARLTRLGVVPTSFVPPEPIQELRDLTRYRKHLVEDLNREKNRGHMVLQNAGIKLTSVIKDIYGKSGRALLYALIENIPITESLILECVYTTLRRKVPQLLESLEGFMTPHYRKMLALHLTQIECLEKQLVEVEETINDYLVPYEEYVERLEEIPGINRRTAAVVLAEVGIDMSVFPTSGHLASWAGASPGNNQSAGKNRSKRVGKGNSYLKKVLAQGALAVSQGKPNRIQAFFFRVRRNAGHKKSVVATVHLLIRIIYRMFSDQSRYNELGESYLQNRKNTLTNNC

SEQ ID NO: 47409 - protein, 436 aa, unidentified
MTLINFVAANQKYYAFNLLSVFIMVFWSVQYLLQHLLVQTQVSHQLLQPLILILQLPQTPQFRHARPGKFFLPVNGMDYFLPLRLTVRNVLTRRITMNIVFLGIDLAKNVFQLCGLNQAGKPVYTKRTGRKELLQTLANIPACLIGIEASTGAFYWQREFEKLGHKVKVISPQYVRPFVRGQKNDGNDAQAIAVALMQPTMQFVPPKSPEQQDIQALHRARQRIVNHRTATVCQIRGLLLDRGIPIGSAVSRARRAIPLILEDAENGLSSRMRRTIAELYDLFNDLGRRIHFFDKEIETVFRQSEACPRIAKVKGIGPKTATAAVAAIGKGTEFKNGRHFAAWLGLVPRQHSSGDRQVLMNMTKKGDKHLRTLFIHGARAVVRVATNNNDGHMNQWVNQLKERRGFNKTTVAVANKNARIIWSMLRNDTGYQVVCN

SEQ ID NO: 47410 - protein, 389 aa, unidentified
MYENGKKVIYVGIDVHDETFTCCFYDPDDKQTKKGLRTVKIFSSAAQVRRCLADFCKDNPFNISEFTFRCAYEACGYGYELARSLHSSGIDCVLLAPSTINEYHNNQRIKTDKRDAFTIAKSYANGEASPVHIPDKHDEEVDNLIRVRDMYKDTAKRYKQQIIAFVKRLGYKYEKHGYYWTQRYMKWLADLPLSTVNRYVLDNLLNSLTQAMDSLADFDGQIAFIAANDTRYTERVQRLKGLFGIDTYTAMAIVVKTGDFIRFARAKAYMAYLGLIPGEASSGGTVHKKALTKTGNSRLRQLLTESAQCYLRKPNLLKSKAFKKRQEGLPEEFITYADRGLMYMVRKGKKMLYNKKNWNVIVSALARTLAGFIWGAMTNHLDRNPRAAA

SEQ ID NO: 47411 - protein, 344 aa, unidentified
MSKITMIGLDLAKNVFQVHAVDAAGAVVLRRQLRRAQVEKFFAGLPAAVAGMEACAGAHHWARVIGKYGHEVRLMPPAYVKPYVKRNKNDGRDAEGTCEAAGRPTMRFVAVKSVEQQAVLIVHSTRTLLVRQRTMAANALRAALSEFGIVAAQGVNGLRTLIEQLKAPSEATVSEVARGALLLLVRQWEALDADVRALERAIVRTARGDEAARRLMEVPGIGPITASATVAKVPDARVFRRARDFAAWIGLTGRGRGTGGKHRCGPISKQGDRTLRSLFITGASAHLRHQRARGVKDPWLRELLARRPYKVAMVALAAKNARIVWALLAKGERYRERALVPAVA

SEQ ID NO: 47412 - protein, 428 aa, unidentified
MNYNQNKKIAQITSQTLIIGVDIAKFKHVARAQDFRGLEFGAPIHFENTKCSFESFLEWIKELQSQNDLDKVIIGMEPTGHYWLNLAHYLKENNLKFVVVNPMHVKKTKELDDNSPTKNDVKDARVIAQLVKDGRYAEPNIPEGVYADLRVARKIRDLLSVDLQAVQGQIHNWIDRYFPEFLNVFKDWEGQSALQMLKLNLLPHELVKLSDQEILTHLRKAVTRAVGISRIQKLKQAASESIGIREGSELARLELSTLLDKYELIIQKFEQLEAKRDELLEQIPGVQQMLAITGIGKDTIAGFFAEVGDLSFYSHPRQIIKLAGLSLKENTSGKHKGQTKITKRGRKNLRALLFRVVMPLVAKNSAFKALHEYYTKRPGNPLKKMQSLIALCNKLIRVLFAIGKKQFEFSEERMLKDIPHMEGLQKAS

SEQ ID NO: 47413 - protein, 338 aa, unidentified
MHYVGIDHHRQYSHLTVMDHEGQVLRSGRVPNLRAEIEKFLEGLEAVEGVIETGRSSYTMVDVLDEMGVAVKIAHPNEVKAIARAKIKTDKRDSEVLAHLLRMNMVPEVYRRSVENRQAQRVLRQRAFYVRAMTALKNRVYAFLAQQREEIREEVAREINIFSEKGQRVLLGLELAPREKRLLEALLKTYRHLETRIGESTVFVEKLYEESREAQLIRTIPGFGKYLAVLVAVEVADIARFTDAAHLHAYAGVIPSTHSSGDRTHHGKIVRAGNRWLRWAAVEAVWPGIRADFDLRYFFERLTRNKGANKAKVATARRLLTIIYKVLKEGRNYIAYRR

SEQ ID NO: 47414 - protein, 434 aa, unidentified
MQTPSVPSAPAPAGDFAALGHFAGFDWAKDKHHVAVVDPSGRRVLELGIEDTAEGWAALRQKLAAFPRLAVAIETSCGPAVERLLEMGLAVYPLNPMAAQRYRDRKSPAGAKDDALDAWSFADALRTDGHGWRRLSPLDQATHELRILCRDEITLIGQRTALVNQLRAALHEYYPVALEAFDEWTTPPAWKFLLAFPTPAELAAAGKRKWEKFLHANKLYHPRTQQTRLELFARALQFVNPNAAVTAAKSLLAGALAEQLLTLQRQMDKYRQRIQKLFADHPDHDLFGSLPGAGEKLAPRLLAEIGPDRDTFATAQGLQCYAGTAPVTRQSGHRRGVFVRRACNKVLRATVHLWADLSRPKCAWAQAYYQKKREHGPRGGAAVPGAAVAQHPVADVARPGRLRRGPPHPRPGQARVMGRATTAPARARDRRLTP

SEQ ID NO: 47415 - protein, 456 aa, unidentified
MNERSKKQRRRKSSPKHFPIVHRNAAGIDLGSRSHFVAVPEDRCQESVREFGCYTPELHRMARWLRDCGVETVAMESTGVYWVPVLELLEDYGFEVLLVDARQVKSLSGKKTDVVDCQWIQRLHCYGLLKGAFRPQAEITSMRAYWRQRSGLVKECARHIQLMQKALEQMNVQLHKAVSDISGKTGMNIIRSIVKGERDPKVLALHRDRRLKASYDELVQALTGNYREEHVFALTQAVQGYDFFQQQMENCDRQLESYMQRLPTKKPSQAPSPTRRGTRRKNQPYFDLRSEVVRIAGFDASLIPGIDALSAQELICECDIDMKSFPSAKNFASWTTLCPNNRKTGGRIRSRNTRSGANRAATVFRRAAQSLHRSQTALGAFHRRQRARHSGPEAVTATAHKLARMYYRLAKYGDEYVEQGQRAYEEQYKRQSISALKRRARHMGFQLLQPETGEVL

SEQ ID NO: 47416 - protein, 316 aa, unidentified
MTDTPNFVGIDVSKAQLDVALRPSNERDTLVHDAAGIDTLVARLRPVAPTLIVLEATGGWERPLVRALVAAALPVIVANPRHVRDFAKATGQLAKTDQLDAMVLARFAEAVRPTLRPHPDAATDALAALLARRRQLLDMLTAEKNRLSTAPTRVQRRIRAHVTWLTAELARLNEDLDEAIRQSPVWCEQEDLLQSTPGVGPVMSRTLLADLPELGTLNSKQIAALVGVAPLNRDSGTLRGKRQVWGGRAPVRAALYMATLVATKCNPVIRSFYLRLRGVGKAPKVALVACMRKLLTILNAMMKHRTPWRALVVQQA

SEQ ID NO: 47417 - protein, 346 aa, unidentified
MHYIGMDCHITTLDFAVVNEAGRLVKANSVATSVRGFMEFVKQVPAPRTIYMEEGTLAAWALETCVQYGEKLVITDPKENHWIGSSGQKDDPLDSFKLAQLARGGYIKEIHHPVGQRRRFRELMEAYHDTVRMTTRLKNKIKAKFRQNGIPCTGDTVYSETYREEWKGKLPQDATLLLILEGLWRQLEQSERTEEELLIAAKVQAKHYPEIKLFKGIPGIGFIHAATISAVLETPHRFANKRKVWMYAGLGLMKRSSGGKIYSEKLSTDYNRLLKYTIKQAVGAAIQAADNPFRRKYLDMTLLHGIAPNLAKLTIARGMLATMWAIWKKGEKYNPEIREKESHKQG

SEQ ID NO: 47418 - protein, 387 aa, unidentified
MLQTIAAPIPAAVDYERTLVLAIEVSNKSWVLAAQVPGLPHTKAKRTINPEAEALLAAITGYRIRAAAAGRSIERVVAVYEAGWSGFWLARRLMSCGVEVYVVQPSSVPIDRRMRRAKSDGIDSELLLRTLLAWLRGEPRVCSMVPVPDEADEDARRCVRERTELISERIGLTNRIGAVLATLGVSDYNPLLRNRYRRLAELRTGLGEPLPANAHAKIKRLLARLELVLTQIAELERERDAVMETEASDKASRMIRQLAGLRGIGVQSATVLVREAFVRRFANGKALGSYAGLASSPYSSGGIDREQGIGKAGNRRVRTVMVELAWLWTRYQPAAAQVCWFRDRVGSTGPRVRKIMVVALARKLLIALWRFVIDGVVPEGAVLKPAA

SEQ ID NO: 47419 - protein, 424 aa, unidentified
MKNCNKQNEKIELVDEKTLVIGVDIGSYDEYARAFTCRKQELSKKPLHFHNTAEGFKTFKDWAVNIMKANGLEKIIVGMEPTSIYWEALATYCKDNGMILVHVNPAAVHKSKELDDNDSSKNDRKDPKVIAGLVADGRYQFPYMPEEEYAELRELSNLRIRTQKNLTQCKNRLSRWYSRYFPEFKGAYKNVVSKTAMMILDLYPLPEDIVTLGVEGILQIWRSKKVRGAGERKARKLYEAARNSIGRKEAASIARIEFKSIKEDLDRYQERLDEIEKKADEILPKIKNVDKLFEIKGVGKATVLTFLSEVGEISRFDNPKEIQKLAGYAIVTNESCKHQGEKRISYRGRKRLRWVLYQTALSVIAKNAEFRQIHAYYTTRTNNPLKGIQSVVAVACKMIRIFYKILTDGVSYDGTKMTQDIVHA

SEQ ID NO: 47420 - protein, 381 aa, unidentified
MTTAATHHEQSTTTEATLFLAFELSEKTWKLGFTTGQGQKPRERTVTARQQERVLDEIAQAKRRLGLPDTAPVVSCYEAGREGFWLHRFLQGHGITNHVVDSSAIEVNRRRRRAKSDGLDVRKLLSMLMRYHHGERQVWQVVKVPSGEAEDQRHLHRDLETLKRERASTTTRIKGLLSSQGLRVTSLTQLPEHLEALRLWDGSPIPPGLRRRVLRVYAHYTFLSEQIAEVEAERRALLQTSPEASIAKVRQLMQRKGIGINGAWLLVLEFFGWRAFKNRREVGGLAGFTPTPYQSGESAREQGITKSGNRHVRWMTTELAWSWLRFQPDSALSCWFRERFGGGGKRLRRIGIVAVARKLLMALWRFLETGVLPEGAVLKEA

SEQ ID NO: 47421 - protein, 366 aa, unidentified
MSKSSTAVSNRVEIFKEDKLTIGVDLGDRFSHYCVLNGAGEVIWEDRLPTTPKGIDEVFSKIPANRVALETGTHSPWVSRQLARLGHEVIVAHARNVRLIGGSSRKDDRLDARTLARLARIDPGLLGPVRHRSAKAQIHLTVIRARAGLVSTRTALVNAARGLTKSYGERLQKCGTQQMNRESAKGLSQELRDALDPLLAEIESLNARIAEYDRRIEQVAKEVYPQVALLKQVKGVGTLIALTYVLTLDDPHRFRRSRDAGCFVGLRPGRRNSGMSQPQLHISKEGDRYLRTMLVQGAHYILGPFGEDSDLRRWGMRLAERGGKNAKKRAVVAVARKLAVLLHKLWVSGEVYEPLRNNHKVVGRVA

SEQ ID NO: 47422 - protein, 337 aa, unidentified
MSDVHVLAIDLARLSFQVCATDPGGAVLFNRTTSRAKLVQLLISQPPCIVAMEACATSHYWGRVAQGFGHTVRLVPPIYVKPFVKRQKNDAADAAAIAEAALRPNMHWVAVKSAEHQARAVAFRTHQCFIRQRTQLINALRGHLAEFGLVVAQGPAHLKQVTELMEAGTEEVPDTVKEIVHLYLDQIEHLTQKIEELTRQLQDATRESAEMRRLCSAPGVGPVTAGAIMAFAPDLHAFSSGRNFAAWLGLVPRQRSTWGKTRLGGVSKMGQTDIRKLLIGGAMSRIRWIFRKGVMPDNWLGRLLARKPRMVAAVALANKMARSIWAMMTKEQNYRMA

SEQ ID NO: 47423 - protein, 412 aa, unidentified
MKRIYQRCCGIDVHKATLTACVRVHGPGGKLSQEIRSFGTTSDELLSLHDWLTTHRVSHIAMEATGVYWKPVFYVLEQGFTLLLVNPADVQRMPGRKTDVSDSAWLAQLLENGLLRPSFIPPRAIRELRDLVRYRSELKHDHTRVANRLHKVLQDADLKLSSVMSDILGVSGRQILRQLAAGHSDPVALAELARGSLRAKRPALRQALTGRFSEHHAFLIGHALTELDNLEESMSALAARVEQHLVPFAQQIEQLTTIPGIKRVAAAVILSEIGADMSCFPDTAHLASWAGMAPGNHESAGKRRRAKARHGNRWLRTILVECGHAAGKTRNTALAAIYRRMIIRAGRKHAAFVTGRHILNIAYHLLTQHNTYRELDPSFFEQRRSEHLKRRCLDQLRNLGFQATLTPLPKAA

SEQ ID NO: 47424 - protein, 339 aa, unidentified
MELYAAFDLHANSSFLGIVDEQGKRVFKKKLCNDRELILEVLRPRKEAIVGITVESTYNWYWMVDALMEEGYRLHLANPSQIQKYEGLKHSDDKDDAFWLADMLRLGILPEGYIYPKAERPVRDLLRKRGHLVKLRTSLILSLQNIISRNCGLRLNVNDVKRLRENRVSPLLEQNDDLALAGMVSKETIDFLTHKIRKIEGAIEGKVQLKQPYRYLRTLPGVGTVLALTIMLETGPISRFAKVGNYVSYCRKVSTQWTSNGKKKGGGNKKNGNRYLAWAYSEAAELARRYDSQARAYYNRKMQKTNFMVAHSALSHKLARAAYYIMRDQVIFKPENLFR

SEQ ID NO: 47425 - protein, 355 aa, unidentified
MNSIKYVGLDVHRDTISVAVLNADGKLVMQSVIATRATTILDFLRGLRGTLHVTFEEGTHSAWLYDLLVRRVAHLVVCNPRKNALLKAGNKSDAIDARKLAELLRAGLLSPVYHGQNSTAAVKHLGRSYAALTEDTTRIMGRLKALYRGQAIACAGKKPYGSRHREEWLAQLADSGLQRRARRLYQELDLLQQLRREARRDLILECCKHSETKLLRTVPWLGPIRVALLIGRVQTPHRFRTKRQFWAYCGLALETRSSADYGFVDGQLERRKKPVFIRGLNRNHNHDLKNLFKSAATTASGSEGVFGAFYENLLKKGMRPEMARLTLARKIAAITLHVWKKGEAFDAEYLKSQAA

SEQ ID NO: 47426 - protein, 318 aa, unidentified
MRIKERDLQARQQTLAMLDTGTGEVVNRTLPHEGESVREFYSTLPGPVRVGIEATGSMKWFLQLMQELGIDCQVGHPATIRAAEPRRQKHDQRDAGLLLKLLVENRFPSIWQPSQELLDLRGLLLHRHQWVRLRTRIQNALQAIALANGLRRGSSLWSESGQRAIASLPLATHTAQRRSELQAMYAGFEAEIEQLKQQVLQQAGPRPTAGLLMTHPGVGPITALATDVFLGDPKRFSNGKALASYIGIIPREHSSGGRQRLGGLSKQGNPLLRLLWCEAAAHAVRRDPELRRFYRRKLVQKGLGKARVAAARKLGPGN

SEQ ID NO: 47427 - protein, 440 aa, unidentified
MKKEKTTKAFPIIYPNAAGIDISSKEHYVAVNPKNKEPIRSFGCFTENLKEIAMWLKQCKVNTVAMEATGIYWVSLFLILEQEGFDVVLVNAKHVKNVHGKKTDMSDAEWIRQLHSCGLLSASFQPDAFTRKLRTYMRHRKNLIEMAATHIRMMHKALEQMNIKLQHVITDITGKSGQDIIQAIILGEQNPEKLASFCDGRIRANKKEMIIKSLEGIWKEEHIFELEQSFSLYHFYQRKIKECDAQIEQHLRDKTGIPKDPNEKLKVQSNKNNINFQAKEILKQITGTDLPEIFGITESNALEIISEIGLNMKKWPTEKHFTSWLNLAPNNKISGGRILSSRIPKKKNIAGQVFKMAAFSVQRSENWLAMFFHRIKVKKGTAKAVVATARKIAVIFYKMMQDKVLFTPIPIEKYNEAFKDNQIKKLKRQAQRLGYLIIGE

SEQ ID NO: 47428 - protein, 357 aa, unidentified
MKSQEIKYVGIDCGKKTLEVIRIGDNSLHQRQQFSTTEIGISKLINWLNPNDVVGLEAGSQSFRIAKSILNKGIQVIVLNPGDLATIYQSLKKTDKEDSLKIARLIQRFPIEELPVVPIPNDEEEDNRRLCTEQENWTRQLTQSKNRLHSLFTQAGLTHITKKHLRTKANREISVALLPSRYQKEAERILKVLDLVEQNLKLIEEEIKEALKKNKAYAQTIMSMPGIGMITSLAIMSYMGNCKRFSSAKQAAYYVGLVPRVDISGDSAYYGRIVNRGCHSIRRVIVQAAWSLVRCQYGGKIKEFYQRLYPKKGAKKSIIATSRKMIEILYTMIKTGELFDSMPEKVLNRKLTQYGLM

SEQ ID NO: 47429 - protein, 401 aa, unidentified
MQRENKRACIAIDVSKGSSHFQGFYSAGVSASEVTYFEHTKSGFAKVTDLFNFLNNHNNQKPYIIFENTGTYSKPVEVYCQSNNFSYMAIPPLLSAKMRKSDIRPTKTDKIDCATIANVYYLKRLKVMKSGSHIYSDLKTLCSYYNFKMQLMVQMKVKYREHLDMVYPRIDTLFGVYTGTFLDLMTRYPNPHKLKQKSKKQLTDFFIKRDYCGLPKAQRLAIMVKEYFKDVEIPVTEDDVLITIFSNHLKELRTMMDDLENHLERIITLGMKTKEYPYLMSIPGIQKNTAARIAAEIQGIERFESASKLCAYAGIDPTVHSSGKYLGKHLSITKKGNHRLRSLLYLVVAGTSKSQAPNNPVRDFVQKKKSDGLAPKAAIIAGCTKLTRIIFAVCSKEEFFV

SEQ ID NO: 47430 - protein, 309 aa, unidentified
MDLFIGIDVSKDRLDVCVRPSGETFVVTRDDEGLERLVERLRALAPALVALEATGGYETVVASALATAHLPLAVINPRQIRDFARSTGKLAKTDRLDAAAIAHFAEAVRPPARPIADAEAQALGELTARRRQVIEMIVAEKNRRRLAGQPRVLKAIDRHVDLLQAELSELDRDIDGAIRKSPAWQADADLLASVPGVGKATLRTLIAELPELGRLDRRKIAALVGVAPINRDSRVWRGRKAIAGGRAPVRTALYMAALVASRANPVIAPYYQKLRASGKPAKQALTACIRKLLVILNAILRDRKPWLPA

SEQ ID NO: 47431 - protein, 483 aa, unidentified
MAERKKNTFQRLKKGQLNRKERRDLERQLNTEDPGLEIVNRNVAGIDVGNESHYVAVPPGRDPQPVQEFGSWTADLERMADWLKTCGIETVVMQSTGVYWIALYDVLETRGFKMCLANARHTKNLPGRKSDVQESQWLLKLHTYGLLRNSFRPPDEIRALRSLWRLRDRHVREAARTVQHMQKSMITMNVQLSNTISDLSGTTGLAIIRAILTGERNPEKLAKLRDWRIKASEEEVARSLEGNWREDMLFELRQAVDAYDFIQKQVAECDQRLQTLMAELPMREAPAAAPAVEDGAKLPGRKKKSTRNKKNLPRFDLKAELQRVCGVDLTSIDGIDVMTAQTVVAELGTNFSRWKDEAHLTSWLGLAPCRDISGGKVLKQATLRVKNRVATALRGAANSLLHSDSYLGARFRSLRTRRGAPKAIKAMARYLACIIYRMFTRGQAWVDRGVQEYENGRAQRELAALQLKAAAHGFRLVNLQNPA

SEQ ID NO: 47432 - protein, 464 aa, unidentified
MKSKTSKHKRANQKTTINPAWEPVNVHAAGVDIGSREHWACVPAGGSDRPVRKFGTFTADLEALADWFKACGITSVAMEATGVYWIALFQILERRGFQVVLVNARQTKNVAGRKSDVQDCQWIQRLHSYGLLQGSFRPEDAYCVLRTYLRYRDELVSARGRQCQHMQKAMQQMNIQLTQVLSDVTGLSGLAIIGAILAGERDPVKLASLVDHRVRATAAAIQQALRGDYREEHLFVLGQAYELHRTYEAKIHECDQQIARETATLPDKVDAKLKPLPPGKPGRRPSADQLDGQDMRLRLYEKFGVDLTAIEGIGIHTGLILLTEVGPDLSRFKSEKHFCSWLGLCPDNRISGGKVLSSKTRRVINRVADALRIAASSLERSQSALGGFYRRMKARLGAAEGVTATAHKLARTLFRLIKHGEAYVRQGLEDYEKKFQARKLNALQKTATAMGFELISKPISHPVS

SEQ ID NO: 47433 - protein, 393 aa, unidentified
MICVGIDVAKDKHDCFILSSEGEVLADVFTIQNNAEGFDMLLQTIRRCARPEDKIKVGLEATGHYSYNILGFLLDKGLDTYVINPLHTNLYRKSLSLRKTKTDRVDARTIAAMLMSDVDLKPYTDTAYHNEELKSLTRYRFDKVRERAKLKQSVSRLVTILFPELEKLVPSLHLASVYALLIEFPGAKQVAGAHLTHLKAILSDASKGRYGRDMAVTLRDAARCSVGSVMPAKSLELQHTIRLIRELDAEIEDIETAIQSMMDEMQSPITTIPGIGVRMGAMILAEIGDFSRFDSPDKILAYAGMSPSTYQSGQLSLSGPYSHMEKRGSRYLRYALYNATKYVCLWDPAFAAYLAKKRGEGKHYNVALSHAAKKLVRLICALEKSQQSYRNAA

SEQ ID NO: 47434 - protein, 383 aa, unidentified
MKYVGVDLHKQIIVLCVVMVVAGKRQVVARRKLACRDVAGVDEFFGRLGPFQVAVEATAAYEWFLKRIEPWADRIVLVHPRKMRIIAESRRKTDRLDAQILAEFLAADELPEAWRPTPRVREHRGLVRQRDHLRRRISGVKCRLRNLLAHYNADVANLFTLAGQEHLTAAPLSASDRFVANQLQAELAAHQELRRAIDQQLCRFAADAPLAEREARAVLESVPCVGPVTIEVVLSELGDVRRFRSQNRVVQYAGLAPGRRQSAGRCVDLGITKEGSRLLRWAMIELAWRLVGKTRYWGLLYEQLKQGRGAKKAIVAVARRVLCVLVSLLKSGQPYRLARDSRAPALRAHTRGRNQGPQVPPPDPHLLPSSLSPAKRKERTTTN

SEQ ID NO: 47435 - protein, 387 aa, unidentified
MAQPNDLSRSLVALDQDSTIIAVVEMSQSSWLVAGMLPGIERQPRKKLEPSAERLLGLLHRWRDEAVKAGRKITRIALAFEAGRDGFWLARWLEARGVEAHVIHASSVAVSREHRRAKTDRLDTELLKRGFLGWLRGERGHCSMARVPTIAEEDAKRPNRERECLVGERTRIVNRIKSTLARLGIRNFKPTLRKAAERLATLHTPEGSALPPNVSAELQRDIARLGFVISQIKDIEEARQERLEQEPETGPHAMVRHLARVVGVGVETADMLVNEVLSRPMRDRKAVARYAGLTGSPDESGAKRREQGLARAGNARVRRGMIQLAWRFLRFQKESALAHWYRARTADSRLGTRKTMIVALARKLLIGLWRFVTTGETLEGVILRPAG

SEQ ID NO: 47436 - protein, 501 aa, unidentified
MRTKRRKAKLQAGIRSISVTSNEAEQKLEILRPDAAGIDCGAQEHYIAVPVDRVSAGQPTVRSFSAFTEGLDAAVDWLKECRVTTVAMESTGVYWIPLHQKLEAAGIEVYLVNARHVRCVPGRKTDVKDSQWLRQLHRFGLLNASFRPEDITCRLRSLHRHRDNLVSSSASEIQHMQKALQQMNLHLHHVVSDITGLTGLRIIDAILSGQRDPKELIKLRDKRVSKSTPQQMQAALVGDYRAEHLFVLSQSLQAYRFHQARIEECDRQTQPLLEKLAQQVEAASARLKPLKGAPQEETLPVPRNEPKTGTSASSPLNKAKRKHKPIANEPKIELAGLLERICGIDLTQVVGLNVLSVLLIVSEIGIDMSKWRSAKAFCSWLGLCPGNKISGGKVLDSRTRQVANRVADALRLAAQSAGRTETCLGIFYRRKQAHLGAPKATTATARKLACLIYHLLKYKQPYQKLDPAIYQLRLQKSALRKLQNQATTLGYKLIPTANVPA

SEQ ID NO: 47437 - protein, 483 aa, unidentified
MVLKGGGDDVVTKAPEVILDEANEQIVERVCAIDVAKDSGKVCVRVPAESGSGRRVSKVWDVPARTKAVIELGDHLACQGIEKVTLESTSDYWRIWFYLLEARGLDVQLVNARDVKNVPGRPKTDKLDSMWLAKLTEKGLLRPSFVPPRQIRVLRDYTRLRVDLTAERTRHWQRLEKLLEDALIKITSVASRIDLLSVREMIEALIGGQRNPRVLAGMARGRMRLKHADLVEALTGQFDDHHAELARMLLDQIDALTVQIDTLTERIDVVLADIPVPAPQPEPDPDDHGPGTSDDAEVTAVIRPSHGGAPRPRTAAPAVTALDLVDILDEIPGVGRHNAHEIIAEIGLEMTRFPTAGHLVSWAKLCPRTIQSGAKSSAGKTGKGNRYLRAVLGDAAAGAAKTQTFLGDRYRRLIKRRGKLKALVAVARSILVIIWNLLANPGMRYHDLGVDFHTKRMDTERRTRNHIRQLEALGYTVTLTTAA

SEQ ID NO: 47438 - protein, 435 aa, unidentified
MRREQVSVFRERGLRTGVSRNAEPQCLVANSNTERKTDTMKSYILLPSEPVQSQITTVAARTQASVLFVGLDVHNESIAVSLAPSDTTEVRRYGIIGGEHDDVLKLVKKLQGAHPGTLLKFCYEAGPRGFALCRCLRAHGLDCILVCPSKVPRKPGERVKTDRRDADQLARLYRAGELTGIYVPEPEDEAMRDLIRARYQVGKAQHRARQQLKMYLLRHNLRYGGQTSWSAAHLRYLAEIKMPFPVQQIVFQEMLEVISEATGRLERYDQEIERAVPGWRWEPVVRALMALRGLALLHAATLGAELGDFHRFEHPGQLMGYLGLVPSEHTTGTDRQQGGITKMGNGPARRALVEAAWQYCVPARISPHLKKRQEGLPKAVTDIAWKAQLRLHHRYQHLTRVGKKKSQVAVTAVARELAGFVWAIGCQVQPSPAMP

SEQ ID NO: 47439 - protein, 422 aa, unidentified
MRLIYPICCGLDVHKNVIVATIVTTNKNGISEYNQKSFSTINSDIQKFHDWLIENNCKNVCMESTGKYWIPIFNYLEADIEVCLTHPKYVKAIKGKKTDKKDSKWIAELYKFDLVRCSFIPPRNFRQLRELARYRFKLVCMKSSEKNRIQNCMTVSNIGIASILSDPFGKTATEIMTYLLSNTSDTIEEKAVRKLIKKGAKAKSDTIIEAIKGYNIGTDQAKKLELARGHLDYLDDMISQSEVELYVRIKPYYEFVDYISSLPGVSELSATIILAEIGVDMKIFDDDKHLCSWCGLAPSNNESAGKKKSVRIAKAGAYLKPMMVQCALAAIKSKKEPYFAIKYGRIRKRRGHKKAIIAVARMMMMCIYHMISEKQPFNPTDYTELMDPHFQESKVVLNDVNVFAYLKSQGYDTSLLVNCNDN

SEQ ID NO: 47440 - protein, 407 aa, unidentified
MIFVGVDWAEAHHDVHIQSEDGRRLSGGRLPEGVEGIARFHEMVGVHAQEPDEVVIGMETDRGLFVGALVAAGYQVFAVNPMSTSRYRDRHSTSGAKSDPGDAKVLADMVRTDRHNHRPVAGDSELAEAIKVLARAHQSMIWSRGRQTNFLRSTLREFYPAALVAFDNLTSGDALEVLRVAPTPTLGAGLSRSKIAAALKRGGRLRRVEQRAEEIQEALRTPQLQGSAIVATAMGTSVSATAAVIVTMNVQIAELTKELDAGFEQHPDAEVVRSLPGLGTILGARVLGEFGDEPNRYATAKCRKNYAGTSPITRASGTKRVVLARYARNMRLADAIYQWAFTSLTASPGARTFYDYRRAAGDTHHAALRHLGNRLVGILHGCLIHHTSYDENTAWGHRAEIELARAA

SEQ ID NO: 47441 - protein, 477 aa, unidentified
MTSRRTSTSENKVTQKQKRKLQRQIWTDNPGLDVVHPDAAGIDVGNSEHYVAIAPEKSDEPVQRFGCFTSDLRNLARVLKAHGIRSIAMQSTGVYWIPLYDVLEEEGFEVYLVNARDTRNLPGRKSDVQESQWLLKLHTYGLLRNSFRPTSEIRTLRTYWRQRAEHVQAASECVNRMQKCLTQMNLQLANVITDIMGQTGQKILRSILTGERNPEKLADMRDYRIQASREEIVASLTGNWRPELLFVLKQEMDRYDFCQQQLTECDLQIQPHLETLSSRPKVSQAPVQLAVAPRKKKKAQGNSPAFPLDKELVRISGVDFTRIDGINVMTAQTIISEVGLDMTRWKTESHFASWLGLCPHNAVSGGKVLRRETRKIVNRAATAFRIAASTLRLSDSYLGAQFRRFRGKLGAPKAITAMAHKLAVLFYRMLRLGQEYVDRGQKFYEDRYRQQQVSLLNKRAAQLGFSVVPTSTSPGTA

SEQ ID NO: 47442 - protein, 354 aa, unidentified
MKLYVGLDVGLEETSLCIVDGEGLTVREFKVSTEPAAIRSAVEGYADRLERVGVEASSLGIWLYRELQPAGLPIIVVEARHMRVSLSTMRNKTDRNDARGIAQMIRLGWYRAVHVKNIEMQKMRTLLTSRKLLKRKLIDLENHIRGALRAYGLLVGGVARGAFEARARELIERSDPIFVMTIEAMLDVRRAILEGYDRLHRVLLQVVQHDAVCRRLMTVPGVGPVAALSFKAGVDDPHRFARSRTVGAHFGLAPRRHQSGTSIDYEGRISKQGDVAVREALCEAAASLLLRVRKWSALRAWGLRIAKRSSVLCAITAVARKLASILHRMWVSETDFHVGFGAKVTQRLRLKPSR

SEQ ID NO: 47443 - protein, 403 aa, unidentified
MNAVGIDVSKGKSTVAVLRPFGEIVLSPFDVFHNPKELGELVTLLKSLDGETKVVMEYTGNYYLPIAQFLQNNGFFVSVINPLLLRNYGSKSIRKAKTDKKDALKLASYALDSWLDLPSFSLSSDTRNLLKSYNRQYNQYNKLKVMLKNNLISLLDQTFPNANTLFTSPTRKDNGHEKWIDFVLKYPHAECISKKSLSAFSKSYLSWCRKNGYNFTERKAQHIHEFACNCSPSLPLDESTALLISSAISQLNCIAETLATLANEMNRLASSLPEYNVVMSMFGVGSVLGSQLIAEIGDVSRFHNKRALVAFAGLDAPPFQSGNFNAQSRSISKRGSASLRKTLFQIMSVILQQAPVNNAVFQFMDKKRFEGKHFYVYMTAAANKFLRIYYARVTEYLNSLQVA

SEQ ID NO: 47444 - protein, 394 aa, unidentified
MATIGIDIGKRQHIAAIHHDGEREARKAVLRFGADRAGLASLSAWMAQQGEISRAVLESSGHYHLNLAAALQRQGLPVAVINPLESKYFGKRRLQRTKSDPADARTLATLAMVDEPEVRDVLGGTALREAARFAMGLVDELGRVDQKICRLVELGFPELEQAYDDPTCVSALAVLRTAPTAQAVARKRTATLAQAARPGGGRRIGPKKAVQLSTLAKDTIAAPELADQIGFQMRLLIAQHDLLEAQIAEAEAHLGTLLDGELVRRLRTIPGAGPAIVATLIAEIGDIHRFSEFDKLVAYIGVHPAEKSSGETGRNPETSWRMSKAGNTYLRTALYRMAVVGIQHNPVIRAHYARKRAQGKSKMNAVGHCMKKALAIVWGVWRSGTDFAAPPSLS

SEQ ID NO: 47445 - protein, 341 aa, unidentified
MKQAIRIGLDIAKHVFQAHGADAAGHVLFRKRLTRAKLRGFLAAQASCVVAMEACAGSHYWGREISKLGHTVRLIPPAYVKPFVKRQKNDAADAEAICEATQRPSMRFVPVKDEEQQANGVVFRARDLLVRQRTQCINALRGHLSEYGYVFRQGITHAATLIAHVEDPNSFLPESARVILRLLVDTFSALQAQIKELDAEINRRSRADPVAQRLMTIPGVGPIAATAITALVPAAGSFRAGRDFAAWLGLTPLQKSTGGKQKLGAISKRGERTIRRLLILGASAVIRQACRRGAPAGSWLAQMLPRKPKMLVTVALANKMARVVWALLVKGGVYRAPAAAA

SEQ ID NO: 47446 - protein, 346 aa, unidentified
MRHFGLDVHQAKTTVVWVDDETGEVSRAHELSNADVPAHLLAVGEVLRVVLESGLHSKFLARQLLSCGFDVWVLDARKVAAQMPAYKTGKTDQLDARALAKMSFENAVEKLRVWVADEHTEELRALTRTREKLVEQTTALRNEWRAQLAAFGLICPANDVLSPKSKRWLAEHLERLPQWGQFCLQRLHESLLALREQIKLLDREIERHAAQDPACQKVRSLPGCGALLAVTIVAELGDVTRFASLARTCSYAGLTPAVRQSAERTYIGPLSRRGNPHLRRALVLLAQHFAWQKDLGETSLKKLYYRTLHKHGPNAAKVALARGLCRVIVAMLRADQAFAPPHKQAA

SEQ ID NO: 47447 - protein, 414 aa, unidentified
MDILVERCAGLDVHRDTVVATVRVPPDSSGRKRRAQYTQTFATTTAGITKLGDWLAEHRVTRAGIESTGVYWKPVYYLLEDQLEVWLINAEHLHNVPGRKTDVADSAWIAQMVEHGLVRPSFVPPPPIRALRDLTRHRRTLVEERTRVVQRLEKVMQDAGIKLTSVASALLTKSGRAMLEGLLAGQSDPEHLAELARGRLRSKIPALREALAGRFRVEHHGLLVAQMLAHIDFLEAAIAELDKSLDTAAAPFAATVKRVCTIPGVSVRTAIMLLAECGADMSVFRTAAHLASWAGICPGNNISGGKSRTGRTRHGSTALRTALTEAAHAAARTKGTYLAAHHAHIRGRRGRLKAIGATRHDLLIAYWHIVHDHIDYTDLGPDWAQRRRSTEQRTRRLVHQLEQLGHTVTIAPAT

SEQ ID NO: 47448 - protein, 312 aa, unidentified
MNKTICGVDVSKEWLDAHVEPSGAAGRFRNDAAGLADLASWCQGHGAELAVMEASGGCERLAFLLLWELGLPCAVVNARSVRRFAEAMGFLEKTDRIDAAMIARYAQAKRVQPTPPPSAAQQRLKALVARLGQVTGDLTVQKQRKSAVADAETIASLDEVIALLVRQSRRLEGEIASLIDDDPLWACLDRAFRSLKGVASRSVARLMAELPEIGTLSNKAIVKLAGLAPIANDSGKRSGRRPVRGGRAGPRSLLFLIARIVAKYDPHLAAFHQRLQAAGKEKMVIRIALARKLLVILNAKARDARIEFANAT

SEQ ID NO: 47449 - protein, 402 aa, unidentified
MRRCIGLDVHREFAQVAIWEDGVIWQAGRIQTTPEALRAFADSLCATDEVALEATGNTYAIARLLERHVGRVVVSNPQKTRAIAEAKVKTDKVDAAVLAGLLAANYLPTVWLPDDQTHALRRQVTRRAHIVRQRTRLKNQVQSILHRNLIGRCPAADLFGNKGRAWLATQDLPPDEHQAVQALLRQLDFHGQELRIVDAELGRVALERAEVRRLLTIPGVDATVALAIVAAVGDFGRFSSPQRLVSYLGLNPRVRQSGGQPAQHGRITKQGRAHARGMLVEAAWAAAKTPGPLRAFYERVRARRGMQVAVVATARKLATLCWHLVVGEQDYAFARPSLTDKKLRALELRAGMPPRRGRKGTAAAYSLKEVRRRERALTEQAEVAYRQLVAGWQPKRPASKPR

SEQ ID NO: 47450 - protein, 495 aa, unidentified
MSSQEKSVQERLQHLESHYTGRVAAFRQHLAQVGYERTLVVLLDIGKNVHWLTVLTAASRELIRPRKLPATRTGLRRFFGLVEPLIHSSDFDLVLLGHEPTGVYHEPWARTFMNRYAPYFDQTDPQLRYIFFNPYQVKLARLQTHLRHRKTDPRDLAAMFDLMTRGLGQPAFLPTGTELHVRNEIGFIRAQSRLLGRLQRQLFQQLDRLWPGAVVNVAKFTRAHPELDPPTPIVQTHPFQRKRLRVLLQHCPDPYDLRAMSDREILALYRKHVGRAGAALVNVLRTWADNAVLLPPQVSVSLAEQLHRLFAQYLYVETLIEDAHGRLEPLIPHTAARHIPAIPGLNENDAARYLAGIGSANRFQRAAEVWALAGFDPVTDGSGDAPDRVGHISKHGDPAFRDTLYQMGYRAALHYAPIGLTFLDAYDRGLSEVEATIHAAHRVNRICFHLVHQDEPFHSQSTPELERERAHRWKLFQAAKKRRRSRRKRGKKRRR

SEQ ID NO: 47451 - protein, 355 aa, unidentified
MKRGSSAVPKLTTGLDVGDRWTALCAVDETGAAIERGRIATTPAGVERRFRQGPVQRIVLEAGKQSPWMSRLLASWGHEVIVANPRRVRLIAAAANKDDPRDAETLARLGRLDPQLLQPITHRSAEAQQDLAVVRARDALVRSRTLLINHVRGVVKSLGSRVPRCSAHAFARQADRVVPDALRPALAPMIAIIEQLTGEIRRQTRAIEALVQTRYPEALPLQQVKGVGPITALAYVLVLEDPTRFATARSVGPYLGLVPRRRQSSRADPQLRITKTGDGLLRRLLVQSAHYVLGPFGPECDLRGYGERISARGGKNAKKRAVVAVARKLSAVLYHLWVTGEAYEPGHGAAPKVAA

SEQ ID NO: 47452 - protein, 357 aa, unidentified
MENLTTSTTNVTIGIDLGDRYCRFCVLDESGEIVEEGRISTTKTALRRRFQNTEPVRIVLEVGTHSPWVSRLLDDLGHEVIIANPRKLRLIYENDSKNDQVDAQYLARIGRLDPRLLAPIQHRQLDTQADLAIIRSRDMLVRTRARLVNHVRGSVKSVGGRIPKCSTRSFAEKASSSIPEEVESPLSPILDLIEIIGQQIKNYDDRIDELADEKYPETELLRQVTGVGPVTALTYMLTIEDPYRFKKSREVGSYLGLRPRQGDSGDMQPQLRITKAGDGMTRRLLVQSAHYILGPFGPDCDLRLWGLALAQRGGKNAKRRAVVAVARKLAVLLHRLWITGEVYEPLFNTQRKVDKAA

SEQ ID NO: 47453 - protein, 318 aa, unidentified
MKTQQATEFVGVDVASVHLDVAVYGQPTVRRFANTVQGIAQLLRMVPPSSVLGLESTGRYHTQLALAAHAAGLRVYVLNPLDARRYAQSVGQRGKTDRMDALVLARYVCHEHAHLRQWQPPTACQAALRELLAHRATLVRQRSALAQAGCHSKTLARLDEPVLAALQLAIERIDEQLASTVQADPASQEAFKCITSVPGLGLVCGSLLVMLFGRMQGGSADAVIAFTGLDPRPNDSGKKTGQRRLSKRGWPEIRRLMYAAAMSAARTKTWNGYYRAQRDKGLSTTAALVVLARKLLRVAFSLFKKQVNFDAKLVAMSA

SEQ ID NO: 47454 - protein, 419 aa, unidentified
MSKSMFCGCDVSLENNTIWLMLDDGSQPVKLFNVDNNQLGAEVLVERICTIAKEHCVSDILIGTEATSMYDWHLLEYLAESKLALEFNLKLYRFNAKWIKNFKKSLAPRGKTDPIDSFAIAERLRIGRLPKEYIPDTKYQPLRKLTRFRFHLMQQIAREKDFFLANLFLKASAYSRVSPFASTFSATSLAVINDFFSVDELSAMPIEELTEFILEKGKAHFSKPGEIVDNLKRVARESYRLKPELAPTVNLILASTFNNIRCYKDQVKLVDSAIAENLKAFKHTLDSIPGIGPVYAAGILAEIGDVNRFSNDSALAQFAGLTWPKHQSGKFQAEETRMSHTGNQYLRYYLVEAANSVKRCDATYKAFYEKKYAEATKHHHKRALVLTARKLVRLVWTLLTRGVLYQPGYCSFEELSKIS

SEQ ID NO: 47455 - protein, 343 aa, unidentified
MQRVTTIGLDIAKSVFQIHGVDAAGNVVIRRQLKRRHVLGFFQKLARCVVGIEACASSHHWSRELKALGHTVRLMPPAYVKPYVKRQKNDAADAEAICEAVTRANMRFVETKTPEQQSCLMLHRTRHLFIRQQTAVINSIRAHLAEFGIVARVGRNGIADLLEVVADSSDRRLPEVARACLSALGCQLEMLKARILEFDRRIMAWHRSNETSKRLDEIPGVGPALATALVASVANPKAFRSGRNFSAWVGLVPKQHSSGGKDRLGSISKQGDRYLRSLFTTGALAVIRYAKIHGTKHRPWLTALLARRPTKVAAIALANKIARMAWAMMAKGERYKEPAALAT

SEQ ID NO: 47456 - protein, 341 aa, unidentified
MHDVTLVGIDLGKHSFHLHGQDRHGKAVFRKKVNRKQLIEFFAKFHPCIVVMEACAGAHYMARQLAGWGHQVKLISPQFVRPFVKSNKNDFVDAEAICEAASRPSMRFVTPKTESQQILSALHRVRDSLVRDRVKTANQLHGFLLEFGISLPVGQAVIKRLPAVLAEHALPPRLVAILERLHGHFKYLSEQISEIDAEMARQLADDELGQCLLSIPCVGPITASVLAAEMGDGKQYGCSRDFAASVGLVPRQYSTGGKSNLLGISKRGDKNIRRLLVQCARVYMQHLERQSGRLADWVRTMLARRHSNVVACALANKLARTAWALVTSRTTFDARSAGMPA

SEQ ID NO: 47457 - protein, 449 aa, unidentified
MNILTPTSCIYVGIDVSKASHVAGFLSAELLAKHSRFEKCPTLKVKNSRSGFESLAAAMKAMGPLDAFAVLMEVTGHYHRALLDFCLEQGITCYLVNAQERMAETKTDKLDSLYLANKLYSQLHLGVQYADPSEAARLCVAPSEAASILRCLVRHRYELSQEATRRKNKLTSILDEVFPEFTEVFIDPNVETALNVRERFLTAQAIAEADLDALKACRTWRRPSTSDLIHLKELAASSIGCRDQARLRGLCLEQGQLIAELRMLGRHLQDLDAEITSVLADSREGQILTSIDGIGPVHAAEIIAYIGCIANFASKGHLRRYFGWSPRKEQSGTSLDTDSQTRSGNRLMKHALWLTACTAVSQDTEWRRVYQDLLPRLCRYDASKSDYIGKNKVIGRIAGQLTGVMYSLLKKDYDVLLETPAGTDPPPPILYSREVHRAALKGAAGKRHS

SEQ ID NO: 47458 - protein, 318 aa, unidentified
MKIDLVYLGIDISKRTLHLATPEKFLREFDNTPTGCRSLLKRIQSLDYAGVVLEASGGYERRIVELLQDHDIPISVAQPACVRHYAKSIKVLAKTDAIDAQVIARYAQAVQPGPTAKTPANVRKIRAFRDRRDQIVQDRVREENRLEACDDREIAESIQAQVERLRKIEKNLDRQILDFLKSDPTFQRKLKIMTGVIGVAHKTAATLLAHFPELGTLTRGQVAALAGVAPHANESGTYIGKRRIYGGRAAIRKAMYMAARTAVRYCPVMSEFYERLRSKGKPFKVAIIACARKMLIRLNTLLSQLEAGTKMRNEAPTT

SEQ ID NO: 47459 - protein, 358 aa, unidentified
MADKVTEAAVVGGVDTHKDLHVAAVVEQNNKVQGTQYFATTRQGYRQMLAWMTSFGALKRIGVECIGTYGLGLLRYLQNAGLEVLEVTAPDRMERRKRGKSDTIDAECAAHAAFSGIRTVTPKTRNGMIESLRVLKTCRKTAISARRVALQIIHSNIISAPDELREQLRNMTRMQPIRTLGSWRPDASKYRNVTSVYRISLKSLARRYLELHDEIADLDVMIAAIVDELAPELIKRNAIGYESASQLLITAGDNPQRLRSESGFAALCGVSPVPVSSGKTNRYRLNQGGDRAVNSALHIIAIGRLRTDDKTKEYIAKQVAEGHTKMEAIRCLKRYISREVYTLLRNQNKRVNSIPIMA

SEQ ID NO: 47460 - protein, 337 aa, unidentified
MEYFAGLDVSMEETHVCVVDRDGKIILEARTPTAPKIIAAALAKGPAVERVLFETGRMAPTLFHGLMALGLPVVCVESRQAYQALRSLAAHKTDRNDARGLAHLARTGFFKPVHVKSLPSHAVRALIIARKKLVGQRVTLENQVRGLAVAFGVRLPRGLSSGFAEKAMAAGHGIPGLDGAMQGLLAARDAILKAIVAINADMKSLERSSAACRRLMTIPGVGRLTALAFAAAIDDPNRFCRSRDVGAYLGLVPRRYQSGEIDYTGGISKCGDGRLRTLLYEAANVMLTRYRGSLALKNWALDIARRSTMRKARVALARRLAVIMFAMLKHGAEFEPV

SEQ ID NO: 47461 - protein, 341 aa, unidentified
MDRELYFGVDVSKKTLDLAYYDGETIDWKNAHIQVSNDKAGFKKIGSWVAKVGKDFDTFLFCMEYTGLYNQNFRLWLESKEYIYGMVDPRKMHHFEPDLDDDQRSLDRIKTDELDAFRIAIYCEQNHKKILRNPSKLPSPVYLKLKRLLVERKQNTKQSTLCKQQLHDTCAYDTDFSVERKKLLLKNMQENQKAIDKEIDSYIQEDASISKNYELLTSIPGIGRIIALETIVLTENFTAISNPRKYACYIGIAPFKKESGTSVRKKTGVSKKGFSEAKADLSIAVLSAITYNPAIRDYWIRKKKEKCGGIVLNAIKFKLVLRMFAVIKRGTPYVETDAYKN

SEQ ID NO: 47462 - protein, 318 aa, unidentified
MAPTPSLVVGIDVSAEQLAIALNPRGEHWQTATSEAALQLLVERLLPLAPARIILEATGGLETPVVVALGLAGLPVSVVNPRQVRHFARASGQLAKTDRLDAHVLARFGQVMAPEARPLPDALTRALADLIGRRRQINTLIVAESNRLRTAGRVVRPAIAQHLAYLRGELATQDQHMRELLETSLVWLAKAALLERVPGVGPVIASTLLAELPEVGTLSGKEIAALVGVAPYAADSGKQRGSRHIRGGRMGVRGALYVGTLSAIRYNPVLQVFYARLVAAGKPKKVALSAVARKLVVILNALVAHGALWDPADVPHTT

SEQ ID NO: 47463 - protein, 322 aa, unidentified
MYLGIDLAKATFTITALRTPQDVRVYGLTLPNAPGGFAELLTHITPETVVVMESTGVYGDKLRHFLHAHGVTQAVEPAIFIRRAFRLKAKTDPVDSRMIAEYGYRYADQLHFWTPKPELVEQAAAYLVSRELLVKQKTAHRNIERSLAHKARPLTHSHTDIIEVLNAHIEDIETALADIFRPHETLRAHLHNLNTLPGCGTLFAYNFFVLSDGFERLDFRSLGNYLGIVPHEYSSGERIFRRPKTDHKGPERIRKVLYLCAMASIRRTGRLQTYFARKRAEGKEGKLILNNLMNKLLKMACAVVRDGQPYADGHKPVNPNIK

SEQ ID NO: 47464 - protein, 445 aa, unidentified
MLQAIFRLVAGLDVHKKTVVATRMRVTKDDRLEWETETFGTTTPELLALLDWLLEWDITHVAMESTGDFWKPVYNVLEGTFELLVVNAKHVKHVPGRKTDAKDSEWLAELMLHGLLKASFIPPKPQRALRDLTRYRRTVIEERTRLVNRVQKLLEGANIKLSSVASDVMGVSARAMLAEIAAGQTDAALMADLARGRLRNKIPQLEKALTGFVQPHHRFLLAQQLAHIDFLNEEIEHLNVEIGRQLGTMSQPSDKTGNSSNTSEPEETANEAEQEPPLSFEEAVALLDTAPGIDVRAAQDILAEIGIDMSRFPTADHLVSWAGRAPGNNQSGGKRFSGRMPKGNQTLSSILTQVSHAAAHTKDTYLNARYRRIATRRGKKRAIAAVGRSILISIWHILTNREPYEDLGSDYFDQRKKDSKVNYYVRQLEKLTGGAVSIALQPVAA

SEQ ID NO: 47465 - protein, 356 aa, unidentified
MSEKLNSKIAVIGIDIGKNSFHIVGQDRRGALVLRQKWSRGQVEARLANLPPCLIGMEACTGAHHLSRKLQALGHDARLMPAKYVRPYCKGDKNDYRDAEAIAEAVQRPTMKFVATKTADQLDLQALHRVRERLVSQRTGIINQIRAFLLERGIAVRQGLRFLRAELPDILAKRTDVLSPRMLRIVEDLSRDWRRLDERIEGLSSEIEALARQDQGCARLMSVPGIGPLISTAIVAAIGTGDPFSKGRDFGAWLGLVPKQMSTGDRTILGNISRRGNRYLRTLFVQAAWVVLVKVGPKQWERYGLKSWIEAAKKRLHHNVLAIALANKLARIAWAVLHNGRAFEYVKTNATVSRSA

SEQ ID NO: 47466 - protein, 316 aa, unidentified
MSQSECTIGIDVSKAQVDLAVRPSGERWSGPNDEPGIRATVARVLELRPTLVVLEATGGLEVPLVGALAAEGLPVVVVNPRQVRDFAKATGQLAKTDALDAAILARFGAAVRPTPRPLPDAATQALAALLARRRQLLEMLVAEQNRLGTAPRPIRTEIQTHIRWLERRVAQVDTDLTHTIRTSPVWREKDRLLQSVPGVGPVLSTTLLAALPELGTLTQRQLAALVGVAPLNRDSGTLRGKRTIWGGRAVVRQALYMGALVAARYNPVIRAFYQRLCATGKPKKVALVACMHKLLTILNAMLKHHTPWRIHDVQPS

SEQ ID NO: 47467 - protein, 393 aa, unidentified
MICVGIDVAKDKHDCVILNSEGKVLAGVFTIPNNADGFDTLLQKIHGCTSPDDKIKVGLEATGHYSYNILGFLLNQGLPTYVINPLHTNLFRKSMSLRKTKTDRVDAKTIAAMLMSNVDLKSYTDTAYHNEELKSLTRYRFDKVRERAQLKQSVSRLVTILFPELEKLVSTLHMSSVYALLIEFPGAKQIAEAHLTHLKSLLKDASKGRYGRDMATEIRDAAKRSIGSVMPAKSLELRHTIRLIRELDSEIKDIEAAIEAIMEELQSPITTIPGMGFRMAAMILAEIGDFSFFDSPDKILAYAGMSPSTYQSGHLSLAGTYSHMEKRGSRYLRYALYNATKYVCHWDPGFAAYLAKKRAEGKHYNVALSHAAKKLVRLIYALEKSRQPYRRAA

SEQ ID NO: 47468 - protein, 347 aa, unidentified
MRFYTQSHSHYCGVDLHARSMYLCVIDHDAQVLLHRNLPAGTEPFLKAIEPYRHDLVVGAECVFTWYWLADLCAAEDMHFVLGHALYMKAIHGAKAKNDRIDSRKIAALLRGGTFPLAYVYPPKMRATRDLLRRRMYFSRKRAELLAHIQNSNSQYNMLPFGKKIAYKANRTGITDQFQDPSIRKSIEVNLELIDHYERLLKDIELHILHNARRHDPNAFHLLRSIDGIGDILALVILYEIHDIRRFPRVQNFLSYARLVKCQRESAGKRSGTSGNKIGNPHLKWAFSEAAVLFLRNNPEAKKYMDRLRSKHGKAKALSILAQRLGRAVYYMLLRQKAFDIEKFLRT

SEQ ID NO: 47469 - protein, 419 aa, unidentified
MSFKILKNNCCGLDVHKTWIFACIGITDSNNRTEYKQARFSSFTKGLQELCDWLAKYSCNDVCMEFTGKYWIPVFNVLEKNNIWVTLSHPKYTKPQKGNKTDRKDAKWICDLYMCGMVKPSFIPPADIRELRELVRYRFKLTCMITGEKNRVHNCLTVSNLKLDDVFSDIFGKSSRSITEQILQHPGETFDVTPFVDSRCKTPIEQIQAAVDGAVSAQQAVKLRQCLNHIDELEMHKAEIEREIFRLSDKYEDILTLIRTVPGFNKNPMTAIQVLSEIGGDMSVFPTAKNLASWAGCCPRNDQSNQKIKSTRISRAGSYFKPVLVQIANALVKSKKHPEFTTRYRRIKARRGHKKAIIAICRMILTAIWHILTDLKPYTPEGFLEPRPVNEAKTLTTSQALNMLKQRGYIIKDEAVPVA

SEQ ID NO: 47470 - protein, 414 aa, unidentified
MIKVWAGVDTGKAHHHCVVIDAEGRRLLSRRVANDEPELEILIADVVALGQEVTWTTDMAGGGAALLIGLLAAAGQQLLYLPGHTLAHAAGGYRGEGKTDARDAAVIADQARMRRDLQPLRPGDEITAELKILTERRKDLSCDRTRVVNRMRGLLTGIFPALERELSLTSTGPLVLLTGYQAPAAIRRMGAGRLEAWLRTRHVRGAAGLAGAACAAAARQHIVLPGEALTASLIAGLAKEAITLSERLREIDKLIEERFRRHRCAHVIISMPGIGPLLGAEFLAATGGDMTWFANADRLAGFAGLAPAPRDSGRIRGNLHRPRRYHRGLNRVFYYSAMISIRTCPESKDFYDRKRAEGKKHTQAVLALARRRVNVLWALIRDNRAYQPRTARSHEPQQPGAAARHDPHRPAPAA

SEQ ID NO: 47471 - protein, 346 aa, unidentified
MDTGYAGQQVVGLDLHRRRTVMVRMTEAGERLEAVRFVSDPAVLAEQIAKAGPAPRVVVEATYAWYWVADVLDAAGAQLHLAHPLGVRGFAYRRVKNDFRDAADLADLLRMGRLPEAWIAPPPVRAQRELVRHRHKLRQLCSGIKAGAHAVLAKNALFIPRSDMFGLDGRRRLSALNLPEVFRLRLDSQLRLIDTIEQEIDELDKRIRVMFADDLGYRALLRLPGVGPVFAAILRAEIGEITRFPSPGQLSSWAGLTPRHRESDTTIHRGRITKQGSRLVRWACVEAVQRARPGTPMRNRYDQIVARRGGNAKHLAKVAAARELCECVFYALRDGHVRRLGEHGAA

SEQ ID NO: 47472 - protein, 409 aa, unidentified
MDFQDHLFVGVDTHKNQHTAVVINCFHNSLGFTQTANDPAAYEKFIENLKSLDFNDQTLVFGLEDTQGLGSSLAQWLLDQGFTVKEVNPTITKRERKHSPNPDKSDKEDAKAIANALLSNWDDLPNVTPNSNFMAIRHLNNHRDSLVKQRTEFKNRLHNLLKKQYPNYKKFFSDPFGKTALAFWEKFPHPSELKHYGEKRLNKFLKNQAKSIPNDKAKTILSWIDKNSKQDKATEARNNLIPMIIKEYKMLQKHIEKIDEKIVTAVDNSEYKLTTMPGINYVLAAKIVSNIKNIDRFDSADELARYAGIAPSEYSSGKRNNTIGKKYGNRDLNHAFYMLAIQQIGANGSNPNPVAYQYYQKKLKEGKSKETAITCLQRRLVDIIYAMMRDRSAYEIPEIPEYEVLNKTG

SEQ ID NO: 47473 - protein, 332 aa, unidentified
MFIGIDVHKRYSQIAVLDKNGEIVEEVRVENANLDDFAQRYAGSKAALEATSNYYHIHDTLSEYLDVTVANPGELKLISDSDKKTDRVDAKQLARMVRLGSVPESYVPTDEVRQARALVRGRQKLVENRTEYANKIHGLLSDHGITREVKPLSVEGREFLAELSLPAPWDALLESYLELIQVLTEQIESLEAEIEERAGSLKETQLLMTIPGVSYFTALTIYAELGEINRFDRAKEVVSYVGLNPIIRESGDSRFEGSISKRGSGRVRWLLVQASYSAVHTCEDEYLSQFYNRLARKKNSKTAIVATARKLLVSMYHMLDREEVYDPPGVSA

SEQ ID NO: 47474 - protein, 415 aa, unidentified
MSGKMEKACGADIHRDFLVATILSTDGSKLQNRFDTSLESLLKFKSWLKNNGCHKLAVESTGTYWISIYNVLYDSVNFILANAYQIKHIPGRKTDTLDSEWIAEVCLKNLISPSRILPKESRDLRSLTRARERLVKIRTALKNQVHQELEAASIKLTSVLSDAFGKTGRHIVDGLLNGWNIDKILDSIPSSRLKAKKDEIRATIQANISQEQAFLIRSLLSSIDAVAGQIAEIDVKVSELFSRKDDLRIAMSMPGMGAISASSILAEIGDYNNFDSPNKLAAYFGIVPSVYQSAGKQINGHITKHGSPHIRRMLVEVAHAIARTKSNSKLKRFFLRIKARRGSKIALVALARKILCILYHLLIKKETYREDGPFKPKSVKAVKGATQPSMSLDEMIQVICKAGYEVRSLTNLERG

SEQ ID NO: 47475 - protein, 391 aa, unidentified
MIYIGIDVAKDKHDCFITNSEGEVLFNAFTIPNNADGFHDLFQKISSLTNDFSNVKVGLEATGHYNYNLLGFLIDKGLPTFVINPLHTNLFRKSLSLRQTKTDKVDAHTIALMMMSGVNLQSYSDTSYHNEELKSLTRYRFDKVQERAKLKTSISRLVNILFPELEKLVPSLHMVSIYALLAEFPSSAQIASCHLTRLTNLPANASKGHYNKEKAIEIRNAAKHSIGSNMPAKSLELKHTIRLIQELTSEIDEIECFIKSIMDEIRSPILSIPGINYRMGAMIIAEIGDFNRFSSPDKILAYAGLSPSTYQSGQLDGCYSHMEKRGSRYLRYALFNATKFVCIWDNQFSAYLAKKRSEGKHYNVAISHAAKKLVRVIYQLEKSGQLYHRAA

SEQ ID NO: 47476 - protein, 349 aa, unidentified
MVRKSKKQRLEIIHSHCAGIDIGNREHWVAIDPGQDDEPVRCFSAFSDDLYALADWLESLNVDMVAMEATGVYWIPLYEVLDARGLQVHIVNSRATRQVSGRKSDVLDCQWIWQLMSYGLLRGAFRPSDQVCVLRSLVRQRASKVQEQARCVLHMQKALTQMNVQLSNVVSDLTGKTGLAILRSIVAGERDPRQLAKLRDGRLHADAVTVARSLYGNWRKEHLFALTQALTHYDFVIEQIHECDQAIGQTLIDLPTRSPAETPKPLKPLRSPQRTRAEQTALHQALYAVLGVDLTAVPTLGIETVLVIASEIGPDLSRFPSTGHFCSWLSLAPPTRISNGIHIKTKILK

SEQ ID NO: 47477 - protein, 412 aa, unidentified
MEGETVIAGVDTHKDVHVLCLLDGLGRKIWSGSFGADPEGYDRLAEAIGDPGSCMVVGVEGTASYGAGLTRRLVELGYNVVEVLRPKRDKVRPGEGKSDPLDAERAARKAASGKGCSVPKSQDGWVEAVRQLYVARRLAVATSTSCVACAKSMLTTAPSALRERFRGRERPKDLMPLLARGRKAGDALEESVLASLRSVAAVWKEARSQVESLDERIRALLEANAPALLGVEGCGTTTAAALVVAAGDNPGRLKGEAAFSMMCGASPIPASSGKTDRHRLNRGGNRQANWALYEIAIKRMAYDERTRRYVARRTSEGKSRREAVRCLKRYIAREVYHVLMDPNPDGAAPEGPELAKMRKAMRVTQKKAAAELGLSAATLGHLERGKRRSTKLERRYYELLCELERALPQTAS

SEQ ID NO: 47478 - protein, 408 aa, unidentified
MTVVGIDVSKGKSMVAAMKPGGELVTTPYEVKHSDIELSRFALDVLCMEPDTRVVMEATGRYHEPVAALLHSEGIFVSVLNPLLIKQSGAGSLRKVKSDPKDALKIAKYGLDNWSTLREYTPMEAIRQQLKLCARQCDLYSKNIVMLTNNLISLSDKTFPGVNELFSSPEKENGHLKWVDFYRTFWHCDCINRMSPDAFEERYKKWCKRKGYHFSADAADALYAASCGLYTTLPRDNNAKLLVTVAADQLIALRENQSKLETEMLNLCKQLPEYETVMDMYGVGKSTGPHLMAELGDIRRFPHRSSIVAFAGVDPGVVGSGKMQLSSVATSKRGSPQLRKALFQVVSTYVKCKPENEAVYQFYAKKRDEGKPYYVCTTAAANKFLRIYYARVKECLNAAESTTQAEEG

SEQ ID NO: 47479 - protein, 343 aa, unidentified
MQRDLGMVVGVDTHKDSHSAALVDAMGALVAATDVGANRKGYRRLLEWARCRGPQRTWVVEGTGSYGAGLASFLAAAEEVVFEGDRPQRRKPGAAGKSDQLDAVKVAREALAREHHAVPRQRGNREAIRVLLSTREGAVSAHRQALNQLYALVVSAPDPIRERLIRLRGEHLVTACLRLRSATGDIETRVTNRVLRQVARRIRTLQAEAADHLALLEQLVAETAPSLLAQPGVGAITAAQLLVSWSHAGRIRNENAFAAMAGVAPVPASSGKVVRHRLNRQGDRRLNRALHVVAICRSSFHAPTKLYIARRTAEGKSTREIRRCLKRYLARRLFRLLQRLDNL

SEQ ID NO: 47480 - protein, 570 aa, unidentified
MVVVGTDAHKYSHTFVATDEVGRQLGEKTVKATTAGHATAIMWAREQFGLELIWGIEDCRNMSARLERDLLAAGQQVVRVPTKLMAQTRKSARSRGKSDPIDALAVARAVLRETDLPLATHDETSRELKLLTDRRDVLVAQRTSAINRLRWLVHELDPERAPAARSLDAAKHQQALRTWLDTQPGLVAELARAELTDIIRLTGEINTLAQRISARVHQVAPALLEIPGCAELTAAKIVGEAAGVTRFKSEAAFACHAAVAPIPVWSGNTAGQMRLSRSGNRQLNAALHRIALTQIRMTDSRGQAYYQRLQDAGKTKRAALRCLKRRLARTVFQALRTVHQPSSEHTQPAAACHRSYCSSHLGEPPRLTDMTQKTRIQPLPPKRAGLLIRVLYRIAKRRFGEVPEPFTVTAHHRRLLIANVVHEALLQRASRKLPPSVRELAVFWTARSIGCSWCVDFGAMLQRLDGLDVDRLTDIDNYATSSKFSDDERAAIAYAEAMTADPHSVTDEQVADLRARFGEAGVIELTYQIGVENMRARMNSALGITEQGFNSGDACRVPWAAPDVPSAESR

SEQ ID NO: 47481 - protein, 349 aa, unidentified
MNRPKNYVGIDIASETFTVSIGQFGEQSGWKIVAKPTTFKNDYDTFSQYRYWLETNQALPINSIVCMEATGVYGEALAYFLVSNGYQLVIEAPLKVKRAFDPEGHKSDPVDSRQIAEYAYRFYDQLREWQPKEVAIDQIKTLLTLREQLVVQKTGHKNANRAIKRKVVRTPLAEDVHQKAIKELEKHIKEIEEEIQRLMDEDPAAKELQKLLESIPGIGNILATFLVVTMHSAPEPHNPKALAAYIGICPYEDWSGSSRHKKATSRHYGPSAMRRLIHLAAMSVRQHCPMYTHYFARKVAEGKEKQLVINNIANKLLKMVCAVARTKTPYIAGYRSIHPQRMKQPIKVS

SEQ ID NO: 47482 - protein, 340 aa, unidentified
MEQQRQYVGIDLHRRRSVIVRLDGDGQVLAQARIDNDAVALAAQLALAGPSPEVAMEATLGWYWAADVIAECGARLHLAHPLGIKAFAYQRVKKDESDARLLADLLRMGRLPEAWIAPPEVREVRELVRYRHKLVEARANAKAQVHAVLAKQGVAVPMSDLFGLAGTKLLNQVGLDAAYLIRVESLRDLIQLQGREIGMLDRLIHTRLAGHPGYEAIQAIPGVGKTLAAIFVAEIGDVSRFERPEQLASWAGMTPKHHESDTTVRRGRITKQGSRLVRWAAVEAAKAPRSSSWLKSDYRRIAAHRGVKIAAVAVGRKIITLVFYGLRDGEIRCLADQDAA

SEQ ID NO: 47483 - protein, 444 aa, unidentified
MVCFGLILICEGADAPVIMGISEPADLYSPLREVIDLNSLFVGIDVSSRTHFAYLMRPDGDKYSSFSLMNSPKDAKLLSEKIVSALQSLHLSRVSIGLEATSIYGDGLVYALREDGALGSFERKIHVLNPKQVEGFKKAYPDLPKNDEVDAFVIADHLRFGRINKEVYMEDYRYRALRTLTRMRFEVVQNLSREKNRFANYLFLKCSGIAQDPSIPNASATTLALMEHFETVDELAYADLDDLTAFISKAGRGRFSDPEKTAKTVQAAARASYRLPKTINDSINQAMAVSIASMKALQDQIKTLDGAIEKHIEIIPNTLTSIPGIGKAYSAGIIAEIGDIRRFHSHAAVAKYAGLVWTQHQSGPFESENSRLIKSGNRYLRYYLLEAANSVRRCDSEFRRYYDLKYHEVNKYQHKRALALTARKLVRLIFRLLKDNRLYIPPED

SEQ ID NO: 47484 - protein, 414 aa, unidentified
MLKIVYPICCGMDVHKSFVVACIASTNDHGVTTYKSKRFSTFTGDLRRCAAWLAENNCKDVCMESTGKYWIPIYNILEHTCRIVLAHPKYVKAIRGKKTDKRDAKWIADIFKHDLVAGSFIPPADIRQLRDLVRYRWKLTNFTTGEKNRAQNCLTVSNFKLDDVFSDVFGKAASAITTRILENPTEKITDVSGFRTKGMKATNAQVLAAVDGEMCAEQAEKLRIIRSHMDSLELCKLNLESLILSTAEKYLPQLNLVMTVPGIQSFAAIGIISEIGVDMSVFPTSKHLCSWAGLTPQNNESAGKKKTTRIGRAGAYIKPLLVQCALNAIRAKKFPEIRNRYLTLKKRRGHKKAIIAIARMLLTAIYNILKKNELYNPELYRSADRPPKNREVSVEEAVFILQRQGYLVTAPPTA

SEQ ID NO: 47485 - protein, 388 aa, unidentified
MIYVGIDIAKTNHYASIVNYSTGEVIENPFLVTNNKQGFNLLYSKIKDFDKEKVLIGLESTAHYANNLIFYFHEKQFKLGIINPLQTANLRKTRIRKVKNDKVDSILICEALSLGYYNLLSDCDIELLEIKSLCRFRKELKDKASDAKIQLKTYVDQLFPELNGFFKDNIDIKTAHKLLKLYQSPQDISKVNLTKLSNLLIKSSRGRYDKNRAIELKQLASNSVGINNNALCIQIKMTIDLIELLESQIKDIESQVGDFIKKSDNVITSIPGIADTTAAIIISEIGDINRFNNSGQVLAFAGLDPSVKQSGTFNASSTRMSKRGSSLLRYALILAANNVQLNTKTFNSYYSTKRLQGKLHYNALGHCAGKLVRIIFYMLKNNVTFNLD

SEQ ID NO: 47486 - protein, 416 aa, unidentified
MNAVGIDVSSRKSTVAVLRPFGEVVRFPFDVRHSAEDLTVLAQQLKAIKGETRIVMEHTGRYYEGIAKVLHEAGLFVSGVNPLLIKEYGNNSLRKVKTDKADAIKIARYALDNWAELRDYTPMDTIRYDLKTLNRQFQLASKQKTATANNLIALQEQSFPGIRKLFDSPVRSDGTQKWVDFTHDFWHADCVRGSSQNAFTERYRKWCKRNRYQFSMQKAAEVYALAKSAVVLVQKTSVTKTLVQEAANQLTAISRSVETYRTEMNKLASQLPEYPVVMQMYGVGESLGPQLMAEIGDVRRFQRKQSLVAFAGIDPAPNESGDYRSRRNKTTKRGSPYLRKTLFNIMTIHLQRAPLDEPVFQFLDKKRAEGKPYYVYMTAAGNKFLRRYYAKVMTYLATLENLPPVDMESTGLQHTE

SEQ ID NO: 47487 - protein, 390 aa, unidentified
MITFGVDIGKFRHQAIVVDSNGQPLNSSFSFDNTEDGFKLFLKQIDIFQQQDCICVGMEATGHYWLNLYCALMELGIELHVVNPILTDAMRRMSVRKTKTDTVDCRYIADVIRMGNYSDISVQTSDIQELRQLCRFRYNLVDEAGMIKNRVIGILDRIFPEYSKLFSNVFGTTSMALLSKYQSPDALLKLGTKRLVEFLKKHSRGRLGEKKAKEIREACKHSVGINMANNALSFQLRMMVEHIQFIEEQIDELQKQIESIYSRCECYLDTIIGVGVVSGAVIFSEIGNIENFNNSKKLTAFAGIDPSIKQSGNFTSTKNTMSKRGSVYLRRALWNAATVAAQQDPALSAFYQKKRAEGKDYMTAIGAVSHKLCNIVFAVLRDKKAYVPRV

SEQ ID NO: 47488 - protein, 456 aa, unidentified
MREKATNQSSRNLPIVGEVEPHAAGLDVGSRKVYVAVPGDRDAQPVRSFDTFTEDLERMADWLLECGITSVAMESTGVYWIPVFDILERKGLRVCLVNAHHVKHVPGRKSDVQDCQWLQYLHAVGLLRGSFHPEDQVRALRALMRHRDSLIEMAAAHTQHMHKALTQMNLQIHHVLSDITGVSGLAIIDAILQGERDPQVLAKLRDGRVKASEEIIRKSLVGSYRREHLFTLKQSLKAFRHYQALITACDQELAQYVDDFPSRTADHRPPLAKQPNRHRPRKNELRLELRSELYRLFGTDLTAVPGISTLTWFTLLTELGPELGKFPSSAAFTSWLCLCPNNRQSGQRILSTRTRKSKNRINHALRVAAQTLHHSNSSLGAFYRRLRARLGAPKAITATAHKLARIIFHLITTRQPYDQTVFALADQQQQQRHERYLRKQAESMGFSLVRAEVQPA

SEQ ID NO: 47489 - protein, 409 aa, unidentified
MRIIGLDIHRAFAEAVVWDDGKLKRMGRVDMRRPLLEAFAKKLSKEDVVVVEATGNASSVAAVIAPHVKKVVIANPKQVRIIAHAKIKTDTIDASVLAQLYASGFLPEVWIPDEPTQALRRQVTRRNQIVRQRSRLKNIIQSILHSHLIPSCPHADLCGASGRAWLFHQILPEDERLAVERHLREFDRLGEDLKVIERDLARSALGDEGVKRLMTIPGVDMVVGLAIVAAIGDAGRFEQSQKLVSYLGLNPSVRQSGPGPAYHGRITKQGRGHARGMLVEAAWAAARAPGPLRAFFLRVRARRGQHVAAVATARKLAVLIWHLLRKGESYAWARPALHARKLRDLELKAGYKAERGQRGAAHAYNIKSHRDEERRWVEQAETAYARFVAGWNPRGPKRARTGAANEGRQ

SEQ ID NO: 47490 - protein, 464 aa, unidentified
MTDKKLWRNRKERKEWARRLQSDDPGLEVVHPHAAGIDVGNGAHYVAVRPDRDPEPVRRFECFTADLHRLADWLQSCRVKTVAMQSTGVYWIPIYEILEQRGFQVYLVNARHTKNLPGRKSDVQESQWLLKLHTYGLLNNSFQPPSEIRVLRTYWRQRGEHVHGAATCIQRMQKALTQMNVQLANVISDVSGLTGQTIIRAIVTGERDPRKLAELRDPRIHASREEIAKSLEGNWRPELLFVLQQEVEMFDTYQRRIAECDQQLQKHLASFVDIIPSPTSQVEPKRKKAKPAKNAPRFELSSELQRITGVDLTRIDGIDIMVAQTLVSEIGLDMSRWKTEAHFASWLGLCPDNRVSGDKVLGRATRRVINRAATALRMAAVTLMRSRTYLGAQYRRLRTKLGAPKAITAMAHRLARLVYRMLKYGQGYVDKGAEYYEQRYRRQQIEFLTKRATKLGLQITVAHA

SEQ ID NO: 47491 - protein, 435 aa, unidentified
MEEVTDEPLYRDRVCGIDIGKAGLVATIRVPSERDPARRMAETRSFGTTRKQVLALADWLRCWQVPAVVMEATSDYWKGPFYRLEAEGFDCVLADAKQVKNLPGRPKRDPADSRWLAACFERGAVTSCFVATPEFRIIRLHTRYRRDLTEERTREKQRAEKLLESAAIKISSVLTDLHGVTGRDIMDHLIAGERNPKVLAQLARAAARRKISHLEEAVEGAEFFTADHSALLAKVLARIDRLSADIDDLSQVIERLLAPYEEQLQQAESMPGWQRRAAQDAVAETGVDMSRFRTGPHLVSWAGRAPQDHQSGKRKGRAKAKKGNRYLGAITGETAVAAGRTQTREGARHRRLARRRGAAKACVATGNTQLKVYHKLLSNPGMRYEDLGPDYYERQRDTRRQVAHHVGKLGSLGFEVTLCRIPEPDPDGTDPAQAA

SEQ ID NO: 47492 - protein, 404 aa, unidentified
MTSAVMDNTADQDVVGGVDSHTDTLHVAVISDNGGHLADAEFTTTAAGYAAALAFLTAHGHVIAIGVEGTASYGAGFTRAAREAGLHVVEVNRPDRAERRRIGKSDPIDAYAAARAALSGRASSAPKDDTVAGIRALHNAARSAVKARTAALNQIGSLLITAPDTIRAKYGRLKGTDRTDALARLRPAGDAVHTAVLTALKSLARRVKKLTVEHETLVKALDSVVSVHNPGLRAAHGVGPDTAAQLLVTAGGNPDRMRTEASFAALCGAAPVPASSGRTNRHRLSRGGDRQANAALYRVALVRMSSDSRTREYVARQTAAGRTKKEIIRLLKRAIAREMFRCLTTTVTVPGIDDLRPLRRSKNITLTAAARHFALWPATISTLERGTRRDDDLAHAYRNWLQAV

SEQ ID NO: 47493 - protein, 351 aa, unidentified
MPATASTAIAVIGIDIGKNSFHIVGLDDRGAIVLRQKWSRGQVETRLANMPPCLIGMEACVGAHHLSRKLKALGHDARLMPARYVRPYSKGQKNDFRDAEAIAEAVQRPTMKFVATKTADQLDLQALHRVRERLVSQRTGIINQIRAFLLERGIAVRQGQRFLRVELPRILAAPPDVLSPRMVHVIEGLASDWRRLDERIEGLSGEIEELAKRDAGCERLMSVPGIGPIISSAMVAAIGTGDGFAKGRDFAAWLGLVPRQISTGDRTILGKISKRGNRYLRVLFVQAAWVVLVKVKPNRWEGHGLKPWIEAAKKRLHHNVLAVALANKLARIAWSVLARGRAFEASKIQAA

SEQ ID NO: 47494 - protein, 419 aa, unidentified
MEHSKTKNVKTVNERMLIVAIDIGKSIHHGYFRGPNGQDIKPFPFYNGQKNYQEFWLKILKFKQEKSLKQIVVGFESTGPYAEPLMNFLATKPVKLVQINPMHTKRLKELTGNSPNKTDTKDPRVIADIISLGHALTVVVPKGPAAELRRLSQARQRASKNRTALVNQLHHCMYVVFPEYTQVMKKITSKSSLYLLNNHTSPEEIVELGFANLQVILKKVSLGRMNHSKAKALFEAARNTTGIDEGRESLITEIRHLVSCIKRESQFMDHLEDQMSQYLKQIPYSRSILSIKGIGEVTAAGLIGEVGDFRQFKTISEIMKLAGLNLYEISSGKHSGQRHISKRGRAYLRKLLFFIAINTIRTSGIMHETYIRMVNRGMPKVKAVVAISRKLLRIIFALARNHTTYIENYNSLNYFKLAA

SEQ ID NO: 47495 - protein, 418 aa, unidentified
MEELHPRCAGIDIGKKYAKVCVRTPGVNPGGRRKAERVSEVVTTWGSMTNQIFALREHLIAERITCAVMEATSDYWKPYFYLLEDLPGCEVMLVNARHVKNVPGRKSDVNDATWLAQLGAHGLVRASFVPPPPIRELRDLTRTRTAVTRERSREVMRLEKLLEGAGIKLSSVVSDLSGVSARRMLLALAAGERDPHELAALAHWSMRGKTGALVQALTGAFTEHHGFLVRTHFDLIDKHDEVIAEITARIEVVIEPFRGFRDLICSIPGISTLVADVITAETGADITRFATADRLASWAGVCPGINESAGKTKSTRTRHGNAHLKGALGIAALAATRTKNTYYAARFQRVKTRRGGKRALVAIQRDMLVAIWHMAGTGELYNDPGPDYYTRLYPDRARRRAIAQLQALGYEVTLDKAS

SEQ ID NO: 47496 - protein, 321 aa, unidentified
MSSFLGIDVSKEDFHASLIMGDRTWSKSFANNKTGMAQLAIWLKNRKVIDELHACLESTGGFEEALALDLHERGITVSVVNPSRIKAFAQSELLRTKNDAVDAALIARFCKAHLPEVWVPLAPEIRALQALVRRHANIQDMLVTEKNRLGAANIDSAVERSLREHITFLESDLERVVAEIDELINRHPPLREQRDLLKSIPGIAGLTASRILGEMPNIAEYRDARAVAAFAGLSPREHQSGTSRGRTQLAKTGNSRLRKMLYFPAISATRFNPVIKALYDRLIAAGKPKMLALAAAMRKLLILAYGVLKSQQPFNPAHANA

SEQ ID NO: 47497 - protein, 419 aa, unidentified
MAFKIFRKNCSGLDVHKTWIFACIGFTDANGRTEYKEKRFSSFSRGLRDLAAWLASYNCTDVCMESTGKYWIPVFNVLEKTCNVVLAHPKYTKPQKGNKTDRKDAKWICDLFMCDMIRPSFIPPAEIRHLRDLVRYRFKLTNMLTGEKNRAQNCLTVSNLKLDDVFSDVFGKSSRSITEYILAHPGETFDVTPFVDKRCKTPIEEIQAAVDGAISPEQAIKLRQCLDHIDELEKHKAEMEREILRVSDPYFDALNLIRTVPGFDKNLFTAIQILSEIGGDMSVFPTDQHLVSWAGCCPRNDQSNFKIKSTRISRAGSYLKPVLVQVANALIKSKKHPEITERYRRIKSHRGHKKAIIAICRMLLTAIWHILTDLKPYTAEGYLAPRPVKEEKILTTSQALSLLKLRGYVIKDALPATAS

SEQ ID NO: 47498 - protein, 310 aa, unidentified
MDTIAIGIDVSKDRLDVAVRPSGEAFAVERNASGLDRLVERLRALSPQFVALEATGGFETIAAAALGAAGLPVVVVNPVQVRAFAKAIGQRAKSDPIDAAVIAHFAEATRPEVRPLPDAATRLLADLVARRRQIVEMIRAERQREKRITVPRLRKSIARVVTMLEKELSSLDTDIDDAVRGSPVWREKEDLLASVPGVGPTIARTLLADLPELGTLSGRQIAALAGLAPFSRQSGRWEGKSFIGGGRAPVRTALFMGALVAARHNPVLKAFFDRLRAAGKPKMVALIAVARKLPIILNAIARDHRPWQTA

SEQ ID NO: 47499 - protein, 367 aa, unidentified
MKKHTPMAVGLTLNRKCERLTIGLDLGDRSSCYCVLDEAGDVLLEQKVSTTPKAMREVFGSMPRCRIALETGTHSPWVSRLLIELGHEAIVAHARNVRLIGESKRKDDRLDAFTLARLVRIDPQLLCPVKHRSAEAQADLIVIRARAALVRNRTTLVNAARGLTKSYGERLGRGNARSMKPKAAEDLSPELKNALGPLMREIQSVSERIRDYDELLESMAQNKYPEAERLKQIKGVGTLIALTYMLTLEDPSRFRKSRDAACYVGLQPGRRNSGQSEPQMRISKEGDPYLRALLVQAAHHILGPWGVDSDLRRWGMKLAERGGKRGKKRATIAVARKLAVLLHRLWVSGDVYVPLRRIGQAAVPAVA

SEQ ID NO: 47500 - protein, 355 aa, unidentified
MNSVRYVGLDVHRDTISAAVLNESGRMIQQSILATRAAAILDFIGGMRGTLHVTFEEGTHSAWLYDLLQRRVARLVVCNPRMNSLLKSGNKSDAIDARKLAELLRADMLSPVYHGEKSAMEVQHLARSYALLTEDTTRVMARIKAIFRGQAISCAGQKLYGHKHRHEYLEQLGACALRRRAELLYEELEAVRQLRRQAKREMIVECRKYPETKLLCSVPFLGPVRAAVLIGRVQTPHRFRTKRQFWAYCGLALEMRDSGEYRVVDGQVERRKKPAQIRGLNWNHNHELKNLFKAAATTASFSNGVFREFYLGLLKKNMQPEMARLTLARKIAAITLKIWKKGEAFDAEPMKLQAA

SEQ ID NO: 47501 - protein, 342 aa, unidentified
MFYIGCDVSEKSSYVYVTDGKGRKVESQEIPTDKDGYRQYFKQWINKPVKVAVEAGGHSRWIHDTLKKLGISVYIVNPNKVKLIAKNKKKTDKVDAVFLAKLLRIDELPERVYVAEGDSRELRDLLRSRHQLVTSATCLMNHLRGMLRQEGIKLKAKAFNDESTFSRLLTNKSVPKHLHPIITSYEKTITELRKQRGALDEVIAEYENKDIELLKSVPGIGEVASKTTYAAISTVKRFKRAKQLTSYCGLVPSVFSSGERADYGHITREGRSEVRHVAVQSVRAILRSTNSESKPLRKWYERIAKRRGSKTAVVALARKLIEIIFYVLRDRRPYNAQLLHVH

SEQ ID NO: 47502 - protein, 309 aa, unidentified
MASLDVFVGIDVSKDRLDVHVRPLGVGFSVSNETTGHAALIARLRPLRAKRIVLEATGGYERALWLALSEAGLVAAVVNPRQVREFARAAGRLAKTDRLDAAVIAHFAETFVPRPGKPDAVADRLGEHVRYRRSLQEEIVALEHQRRRLETPALRERAERRHAALRAEVKEIEREMRAIVDGDPGKKALFACLTALKGVGLVLACTLIANMRELGTLTRHQAAALIGVAPLNHDSGVRRGYRAIAGGRRRVRNVLYVATLSAVRSNPVIREFYRRLSADGKPAKVALVVCMRKMLVMLNGRVRDHLATA

SEQ ID NO: 47503 - protein, 337 aa, unidentified
MKYSGIDLHSNNSVVVVSDEADRVLVRRRVPNDAVAILALLAGHRAELVGVVVESTYNWYWLVDALQADGYRVHLANPAAIKRYEGLKHSGDEDDAAYLAQLLRLEILPRGYICPPAARAVRDLARKRVQLVRSRTAQVLSVENMLSRQTGAGMRSYAVQRLTAQAVASFGFHPDVERALCANVAVIQTLNREIDKLEQRLHQCVRLRPEFRLLTSVPGIGQTLATLIMLEVGTIERFAAVGNFASYARCVDSARMSNGKKKGQGNVKNGNAYLAWAFVEAANFARRYCVEAQHFYERKKARTNGVVATKALAHKLARACYHMLKENQPFDVKRCFA

SEQ ID NO: 47504 - protein, 344 aa, unidentified
MKISTLSIDLAKNVFQVAGFNSNYKSECNKRLNRAKLNAFMANTPPCRVVMEACYSSHYWGRVFSSYGHTVDLIPAQHVTPFVRGNKNDSNDALAIYEASLRPHIKFVPIKTEAQQEILMLHKIRERLLQNRIAATNQLRGLLVDFGYVFPVGMKALEQGIIALESDSELRPQLRIMVSDIYTEYKTLVKRIKAIEAMLTAHVERDTNAKILHSIPGVGVLNASAYAASIGNGQAFKNAKELGVWLGLTPKQYASGDKSKMSGITKRGNSYLRKQLIHGARALIARSHHKTDALSQWINQLREKKHFNCVVVATAHRLARLMWILLTKQTLYSPQYVQNTQKDA

SEQ ID NO: 47505 - protein, 390 aa, unidentified
MELHTIGIDLGKTVFHLVGLNLRGEVVVRKKFSRIQLLRFTANMHVELIGMEACGGAHFLGRALREQGHEVRLIPAQYVKPYVKTNKSDYIDAEAIAEAVARPTMRFVPIKTDDQLDLQSLHRVRERWVMRRTAVINQIRGLLLERGITLRKGRHHVHAALPLILEDADAKLSGAVRMLLAQLKLDLDQLAVRIDEADAVIRKTAYENEACRRLVAIPGIGPVTATALIAAIGNGGAFHKGREFAAWMGVVPGEHTTGGQQKLLGISKRGNSYLRRLFVQGARAVLQQRTKQSSGLSAWLAQLTSRTHRNVAAVALANKLARIAWAVLAKNEQYRPSVLADVAAVGKRAQRIPSWPGVIHSNKGRIHLRRPTCGILKISLAAKRRTIHSD

SEQ ID NO: 47506 - protein, 407 aa, unidentified
MRYYIGVDWADEEDAVWVTNDAGDKMLSRRFAHTVAARSEWARWLRERQAEGIELWAAIERPHGRIVDFLLDHGVVVYPINPKSLDRARDRFRVGGSKSDPFDAKVLALFLRSDHLQLRPLRPNSEAAQELQGLTRDYRRQVHLQTRLLNQLTATLKEYYPRALELGEDLTAGWAQAFLARYPTPAAAAALTEPDWQAFAHAHRLSPTRTAALWETLQQPQLPLPAHVVRLKARLLQALLRELAPTLATIAEYRQAIDDFFATMPTAEIARSLPVGKSGTTVPTVWAELGDHADRWGSFRHLQAYAGSVPETDCSGKHHVVKFRFACNTALRDALHQLAFLSLPHSLWARAYYDRYRERGHTHHQALRALGAKWLKIIFVMWKRQVPYSETHHLATMARQHLHQTAA

SEQ ID NO: 47507 - protein, 411 aa, unidentified
MEKVYDKCCGIDVHKKLIVACFKCGRKQEIREFGATTRELLEMADWLKDGGCMMVAMESTASYWKPLYNILESCGLDAMVVNARHMKAVPGRKTDVKDAEWIADLLQHGLLQASYIPDKDQRELRELVRYRKSLVGERNRELNRLQKMLEGANIKISGTITDINGKSARNILEHILSGKEIDSAEYDVLYEKKIIAHNLKATKEQIIDDLNGVMSALQRKMMRVLLNHLDELNRHIRELDDDIDCFMKPEEKQAVDAIQDIPGIGETSAQAVISVIGTNMDRFPTDRHIASWAGLCPGNNESANKRRSGKTRKGNALLRDTLVVCAHSAVKNKSSYFCAQFARVSAHRGKKRAYVAVAHSMLIAIYHIIKDGVVFKDLGADYYNQFNKERKINAYLKKLKALGWEAPVVAA

SEQ ID NO: 47508 - protein, 343 aa, unidentified
MQAPRHIGIDLHRNQFTCCVRLENGRNYLTEWKLEDLPRFVKKLRPNDEIAVEMTGNTRLFRDAIARHVARVVVVDPNQFRVISHSVKKTDPNDARNLALYLEKDLLPEVRMKDKTQAQLASLTQTRDTMVKLRTALKNKINNILSAHGINLEKEALSSEKKLNEVLALPFDPMVRIELKVIVEQIRSLNQSIAELEKTIADEGSKLEGHKNLTSIKGIGPLTGSILLSVIGDIHDFADEGKLAAYLGIVPRVSKSNETERTGRITKRGSKLGRTALVQCALIAQRYSPYLQRYYQRMKAQTHSTGKAIIALARKLLGIIYRTLKNNWVFEDFPNFVLAEAAQ

SEQ ID NO: 47509 - protein, 426 aa, unidentified
MKNVHVLNTLFVGIDISLKTNVCIAINFDSEILFKLDVPNNQVGADQLKQTLMETIQGNGFKATIVALESTSFYGIHIANFLSSDKDLLAKNIYVYCLNPKVISNYKKSFIGLGKTDPIDAFVIADFARVGRIKTKPWRGTQYLALQRLTRHRLHLVELITREKTYMISNIFLKFSELAVLKKEDHPFCNNYISTAEAVLTEMLSLEDISNRSLEELLLFVCQYGKNHFTNPEKVSFLLKKAARDSYRIDKVMYEPLTISIASSYNCISAYQTEIKTINKAIEKTLKGLQPNAFKILQSIPGIGSVFASGILSEIGDINAFHSPDALAKYAGIYWNKKQSGDFTAEDAKMSKAGNKYLRYYLIEATDSIRKHDPTFANYYRKKFDESTTHKHKRALALTSRKTLRLIYGLLTKNQLYSTNRVSITS

SEQ ID NO: 47510 - protein, 337 aa, unidentified
MEQQTQYVGIDLHRRRSVIVRRNGAGETLDTVRIDNDPVVLAAELAKAGEHPEVILEATYGWYWAADVIQECGGTVHLAHPLGNNWGNRRVKNDERDATDLVDLLRLGRLAEAWIAPPPLRELREHIRYRAKLVHLRTNLKSQVHAVLAKEGVAVPMTDLFGVGGQVLLDEVHLGDAYRVRVESLRDLIEHVSREIAMLEEQTAPYFAGDLGYHAVQAIPGVGPVLASVFVAEIGDIARFKSARHLCSWAGLTPTHKESDVTVRRGHITKQGSRLVRWAAVEAVAHQRGDTPIRAHHRRVGERRGTQIGRVAAARKLLILVYYGLRDGEIRCLAGTG

SEQ ID NO: 47511 - protein, 457 aa, unidentified
MQQYYLGGDVSKGYSDFVILDSQKRRVEENFQLDDTIVGHSFLYDRLLIFFEEHPDAELCAAVESTGGYENNWYNTLRKFQSSLNIKTARLNPAGVCKNNEAGLKRVITDKISAQGVAEYLIAHPEKVMYQQQDYWASLRKQWSFIKMLTKQSTQLLNQLESLLYSTNPEILKYCQDGMPAWVFKLLKQYPTAAKLSKARATSVARIPYISISRAKELVASAKTSVASTTDTITGQLISATVGQIQHLQKTIRAQTKIMAAECTLQEVELLKTFTGIGDYSAIGLMLEIQAVERFTTTKKLASFFGLHPVYKISGDGAGGFRMSKKGRKEPRRILFMVAMSAINSNSLIRDLYQKHVENGMKKMTAIGLCMHKILRIIYGMLKNNTPFNPEIDLKNRERTSEQPQKERKDKSRRYQDFDANAPISGRQRKKRAERKLSQNAVSVECGICTPVPQLSS

SEQ ID NO: 47512 - protein, 385 aa, unidentified
MQASNVRTPIVGHIGTIFVAIELSQRSWLVTVHSPERDRISRHKLCGGDHAGLLGLIERVRARAGSALGSVPAVASCYEAGYDGFWLHRRLTAAGIENFVFDPASIAVEQRARRVKTDRIDGELLLRTLMAHWRGEPRVVRIVRVPSPEQEDARRDSRERERLITEQTAHTNRIKALLRLVGIAAGTPRRRDWAAWLEAHRDEQGQPVPPRLLAELKREHARLKLVREQLEALAQARPSPDAPAAAAEMARRSAILQRLKGLGPVFAATLTNEVLYKDFRDRREVAGYCGLAPSPWRSGGTNREQGISKAGNPRARQKAIELAWLWLKHQPDSALSRWFRQRTSDAGGRIRRIAIVALARKLIVALWRFLTTGLVPDHAVLKAAA

SEQ ID NO: 47513 - protein, 345 aa, unidentified
MKYYAGLDVSLEETSLCVVDGEGAIVAERKVASEPRAIAESLRALGFDFERVGLEAGPLSPWLHDGLRAEGLPAICIETRQMKAALQAMRNKTDRNDARGIAQVMRTGWFRFVHVKSLESQELRLLLTHRRTLQRKALDIENEIRGTLKAFGLKIGKASRGRFAARVRELVADRARLRAVTEPMLKARASVRAEFDRLHRMVLEVVRGDPLCRRLMTIPGVGEITALAFKTGVDVPERFAKSKTVGAHFGLTSRKFNSGEIDYNGRISKCGDAMVRTLLHEAANALLTRCARNSALKAWAMRIAKTRGKKRAKVALARKLAVIMHRMWLDGSEFYWSHKASAGAP

SEQ ID NO: 47514 - protein, 344 aa, unidentified
MEAIGTIGLDIAKSVFQVHGVDADGAVVVRRRLTRAKVLPFFERLPPCLVGLEACATAHYWGRELRKLGHDVRLMPPSYVKPYVKRQKNDAADAEAICEAVTRPSMHFVEIKSPEQQSIMSLHRVRQMLMRQRTQISNAIRGHLGEFGRVAPIGRNGLAQLIAIVADENDNTLPDDVRAAVAMLAVQLRIVNDQILELDRRVRASARATDVGRRLLEVPGVGPVLASALVATVPDASAFKSGRNLAAWIGLVPRQNSSGGKERLGGITKQGNRYLRQMLVVGALAVIRYAQRHGTRRPWLVHLLARRTTKIAAVALANKTARMIWAIMATGERYREPSPASVAV

SEQ ID NO: 47515 - protein, 382 aa, unidentified
MGYQPVEVGLSTVELWRPQLIKHRSFVGLDVHARTVEGCVLDADSGVITHRKLPAATPGIVGWVAALPAPQIATYEAGPTGFGLARQLKAAGITCLVAAPSKLQRPSGDRVKTDARDAEHLTKLLQLDQIVAVHVPTIEQETARDLVRAREDTREVLMSARHRLSKLLLRHGLVYDGGSAWSRPHDRWLREHRTSGTAAFTTAFDAYYESTVQAVARRDGLDKAIEEMAANSEFTPLVTRLGCLRGIAPLTGFSLAVEIPQWDRFTGNTIGAFLGLVPSEHSSGQSRFQGSITKTGNLHVRRLLVEAAWHHRRDYRPTTRSVMQPRWDRAPVAARLRGQAGNVRLHRQWVAFTARKKKPVVANVAIARELAGWCWSLAVMDD

SEQ ID NO: 47516 - protein, 428 aa, unidentified
MSNQEIIRRKQYCQIVQEITGSDQYLVVGIDVGKDKHHAFMGSATGKALFRKLIFENNLDGFSRLLKTVEAIKSQNGLSKIVYGLEPTGNYHKPLARHLIRCDCNVALVSGVAVKRNRELLDGRWDKNDTKDAANIADLVSRARCLYYDSPSPSIMELRALLSLRRRLKREEHGLRMRIRNNLLAQYFPELDRFYNACESESLAIVQWFLNPDTIAAMEFGEFFHLVTKTRRGIAQTLRLRKIHGLATKSVGCPMGPAAEYEADLLVEKLKQVRQQIQKTADLIEDFCLEFDEYSYLLTIPGFGPYISARVLASIGDPFRFENRKQLIKLAGYDLCAKRSGKTSDKAVPVISKKGNGELRYALYQAASVAAARVDLFRTYFTRLLRGRERERGIKTKMRVKLAVKMLAIAWTLMKKREVFDPAHLNIE

SEQ ID NO: 47517 - protein, 342 aa, unidentified
MKKCNVIGLDLAKNVIQVCKISADGELIYNKAVSPKKLRELLAKEKASIVALEGCGSCHYWGRFAQQYEHDVRIISPKKVKAFLQGQKTDANDALAIAVASIQVGMIFSQLKSEEQQIIQTVEKTRKFLDKSVTALSNHIRAFMYEYGITSPQGKKGLRETVTLVVSDEDHRLPANLQGMLALLWERYKITLDHLTANEKIRESLVNSIEPCRRLLDLESVGPVGAARLYAALGNGKTFQKGRDASVYIGVTPKQHSSGGNVYMRGINKGGGDKELRAVLFQGAFSVIYKLPMQARTKKQAWLINLVARVGVKRAAIALANKTVRTAWALLVSGEKYKAELV

SEQ ID NO: 47518 - protein, 342 aa, unidentified
MYYIGLDVHKKTISYCVKDAAGCVHREGKIGATRRELDAWVRTLPQPRSIAMEATMFTGWIYDHLLAHAAAVKVAHPLMLRAIALAKKKNDKPDAGKIADCLRCDFLPECHMASTEIRNRRRVLRYRHLLVKQMVQTKNRVSGLLMETGVEHTKSRLHKVGYFRRLMTMNGEIDDSIRPLLRLSRETIERCQKAEYALVSSLEHDPLLKERVRRLRTVPGVGPITALNWALEMGDISRFRSIKQAVSYCGLCGDEHSSADKVMRMPLSKQRNKHIQHVLIEAAKLAPRQSAELALIHQKAMEKGNRNRATLAVARKMVAWLLAVDRENREFIPAEQRETRAA

SEQ ID NO: 47519 - protein, 424 aa, unidentified
MKVTYQTCCGVDVHKSFLVATIVKTTGGIEPSYQKKRFSTFNNSILEFKQWLLDNDCHDVCMESTGKYWVPVFNLLEDDINVVIANPKWVKAVKGNKDDTKDSKWIGDLFRLGLVRGSYVPCKKIRILREYTRYRYKLISCRSSEKNRYQNALTVCNVALDSVVSDIFGKSSTSIIDYLLEQSGTSINHEEIASKLLRSLKSKEDAVIESVEGYQMTDAQKYRMRLVRAHMDYITAEINDVDKMIENMISSNPDFENAVQFLCTIPGVKRDSAITIISEIGTDMSQFSSSKRLCCWAGLTPGSNESAGKKKSVRITRAGVYLKPALVQCAHAAVKSDKSPYYKKKYDSLVKRRGKKRAIIAIARMILTAIYQMMSTGEQWNPSDLYKIDMPVALVEKQKAKAIKQAKKLLQREGLLPPDEPLAS

SEQ ID NO: 47520 - protein, 378 aa, unidentified
MHSMTQNDALVVGGVDAHADAHHAAVLDQRGALLSTKSFPTTTPGYRQLLDWLSSHGKVDVDAVESTGSYAAALVRYLRQYGVTIVEVNQPHAHTRRRVGKSDPIDAEMAARLFQAGKAKAVPKQTDGIVESIRLLRVARNSAVKSRSAALVQVRDLIITAPQELRDQLSDRKTLRGKVTVCSRFRPSGNDLRPPSQAAKFALRSTAQRIQALDEEIAALDRELDQLVAAAAPRTVQLLGISTGHAGQLLVTAGQNIERLRSESSFSMLCGASPLPASSGKTTRHRLNYGGDRQANRALHLIAVCRLRYCERTRAYAKRRTAEGKTQRDIMRCLKRYIAREVFNSLRADLADTAQPRPAVSTTIMCGNPGFGINRIRT

SEQ ID NO: 47521 - protein, 338 aa, unidentified
MIPSPVYVGLDYHTNFIQVCVLDASGRVLANRRCPNDARTLARWVQRHGRLHRAAIEVCAGAADLAEELIAHHHWSIDLAHPGYVHRMKGSPDKTDFTDARMLADLTRVGYLPKVWLAPESIRELRRLVRYRQQLVDERRAIKLRMRGLLRDLRITAPRELRPWTKAWLAWLETCDALPTHGRWIMDRHLENLRRLNAAIDEAARRLDEVTTDDVMVNRLREQPGVGPVTAWTLRAELGRFDRFNSGKQLSRFCGLSPRNASSGERQADAGLIRAGNRKLRAVIIEAAWRLIRYDQRWHDLALSLRDRGKPGSVVAAAVGNRWIRTLYHEMKPLGLAA

SEQ ID NO: 47522 - protein, 398 aa, unidentified
MSSNTPLEIRVGVDVGCYQHNVAIGLPNGDFLEEFEISHTSDGFREFFLRIGAYEKKYNCGVAVAMEGFNGHARPLDTMICVRDYRLYNVNNLKLARFKEIFPAAAKTDVIDARKALELFQLRDHLPSARDVLQEVKAVPQENAILKRLTRRRRFLVNERVRIINSLQTDLRAVCPGLLDITNDAGNLWFLRFLTSTDSLKKLARLRLATLLKIPGVGKKYANSIRHWQEKAIYSPEVDWVGDMIQEDALRVLELRDKIKTLEKRCEDIGRHSRTAALISSIPGYGPVCSATLAGEIGTIDRFRSEASLALYLGMATLDNSSGKHRSSKNPRHVNARAKAAMMIAIDRHRKVVPESQKYYVKKRSEGKAHNQAIRALGRHLSRVIYKMLKEDRPYQMR

SEQ ID NO: 47523 - protein, 340 aa, unidentified
MGDIITIGLDLAKNVFQVHGVDEAGSVVVRKWLRRGQVLAFFAGIPPCLIGLEACATAHHWARELIALGHEARLMPPNYVKAYVKRNKHDVADAEAICEAVKRPSMRFVPLKTAEQQSVLMMHRARDLLIRQRTMLVNALRGHLAEFGLIEAQGLHKVARLITIVMDEMDGRVPDIARQVLKVIVSQIEDIRRGIAELETQVLAWHKNNPVSQRLATIPGLGPIIATAIAATVADPNTFRSGREFAAWLGLVPRQNSTGGKARLGGISKRGDSYLRRLLVNSAHTVLLCSKAAKTDPWLISLLRRKPRLVAAVALANKTARVAWAIMSRRETYRHVAAAA

SEQ ID NO: 47524 - protein, 342 aa, unidentified
MQVTVIGLDIAKHVFQVHGIDDAGQVLIRRQLRRGELISFFRRLPPCLIGMEACSTAHFWARELVALGHEVRLMPAAYVKPYVKRGKSDALDAEGVCEAVTRPTMRYVAIKSPEQQAVLMLHRTRELLVRQRTMLVNALRGHLAEYGIIAPQGLPSIPKLMELAERARGTAMPELAWRCLRLIFAPLEEAHARITEVEQEIMTWHRTNELSQRLETIPGIGIITASALAATITDPGSFRSGRHLAAWIGLVPRQSGTGGKVRLGHISKQGDRYLRRLLVLGAATLLRHARGKASVAAGWINALLARRPAGIVKIAIANKLARIAWAVLQDNQGYRTPAAAAA

SEQ ID NO: 47525 - protein, 404 aa, unidentified
MKGPIVSIDVSKGKSDYQAFKNLNVKYTGSRSIKHTKEGFDEIVNLVREMEKKLETEVCVVYEATGVYHRVLKKVLEDNNIKQFIINPLLSAKTRKNDSLRCPKTDKLDPKSIAKTYYSHSLHNSHKPETIYHELRELSRYYEDILVHIRKDKVAFRAQLDVVFPGYDTLFDDLYSPVSLTVIEKYPHPEMLQKKKINTVSKVIQSKTCHRQAASDTMADKAIEYSKTIYSGCDKDDIEVLILQRFIKKLKEDMAEAERTIGEMIKLAQELPNFSIIKSIPGIGDNLAARIIAELGDMTRFKKKNELVAFAGLDPRISESGQDDGDHMHITKKGNKRLRCLLYLAVTCSIRLKRDDNSIKDFYIKKKQQSNPMCSKAAKTACASKLVRIIYSMCKTGELYQYNK

SEQ ID NO: 47526 - protein, 340 aa, unidentified
MRQLYAGCDLHGNNNLIGIIDGEGKRVFKKKLSNDLALVRDTLKPFKEELVGIAVESTYNWYWMVDGLMETGYRVHLANPSAIQQYSGLKHSDDRHDAFWLAEMLRLGILPEGYIYPKEERPLRDLLRKRGHLVRLRTSLIISLQNILSRNLGRKVNVNDVKALKEDRISLLLEMNEDLALAGQVSKEAIDHLTRQIRKIEWVVQKRITLKQPYRYLLTLPGVGKILSLTIMLETGPINRFETVGDYVSYCRKVPSQWVSNGKWKGAGNRKNGNKYLAWAYSEASEFARQLHPEPRAYYNRKMQKTNAAVAHSALANKLSRAGYYVMRDQVPFRAEKLFG

SEQ ID NO: 47527 - protein, 372 aa, unidentified
MTSIIYVGMDVHTTNYTLCCYSMEDDRFFVEVQVEPDAKNILKYLARIEKQQSRDCRIVCGYEAGCLGYSLYHQLHAHGIDCVILAPTTMMTKPGKRIKTERRDARLISKCLAFHTYSPVYIPTEVDDAVKEYIRMRDDANSALARVKQQIIAFCIRHGKIHDGKSYWTNKHLEWLSSLDLGNKILSEVLQEYLIRYYQLREQVDMYDMRINELAQAEPYRQKVEKLGCFRGIAAHTALSFCVEVGDFRRFATAQQFASYLGLVPGECSSGDKQQYTGITKAGNSHLRKLLVETAQVFGRSATKSRKSVALKERQARCDSLTVAYADKANARLKKKYFKIAMRSKVNIAKTAVAREMACFIWGMMTDNISCA

SEQ ID NO: 47528 - protein, 345 aa, unidentified
MFDCNVIAIDLAKNLFQVCKTDKNGHVIYNKAITRAKLKELLIKEKQSLVAMESCGGTHYWARFAKQAGHQVKAINARQVKAFRQGQKTDANDALAISVAARQPHIKGSRLLSAHEQCLQGIECMRDLLVKQKVSLSNQLRGLLLELGYPIAQGDTPLIHAIPEILEEAENSLTASFRFSIHLLFQRFKETIEEAKLIEKQLHEIIKKDKTCNRLQALEGVGPVCAILIKIALGNATHFKSGREAAACFGLTPVQHSSGGKEKIGAISKVIGNKKLRSALFKGALAVVSQLEKRESRSEKDVWLKALTARRGKKVAAIALANKTIRTAFAMQKHDKEYQPQLLAA

SEQ ID NO: 47529 - protein, 438 aa, unidentified
MAQRIVAFRREVEEHVKESQFFTSVLRSRRKEINVTLIYRRCAGMDVHQKSISVCARIRVARDRFHTETAVFATFTQDLERMATWLRERKIRHVAMESTGVYWKPIWNVLETSKRGFSLVLVNPQHIKALPGRKTDKQDAERIATYLQEGLLRGSFVPPQPIRELRELTLRRTHLQGDRNRTINRIGRLLETANIKLSSVLSNIVGQSGRAILNAIVAGETAARDLATYTSSRVRHSREEFELALEGRYSDHLCWLLGQLLDELDHLDRRVALLDLRIGQLMQPHTDLIARLCTLPGVDITTAHIIVAEIGTDMSRFPDARHLASWAGLCPGNSESAGKRFSGRTRKGDRYLRRVLIQNAWAVAHRKDCALTAFFHRIAGRAGLKKAAVAVAHRILMLAYYIIRDGSIYQEAGGDVYDRRKSRTHRQTPRTQTAAHRF

SEQ ID NO: 47530 - protein, 360 aa, unidentified
MNATTVAVDLAKSVFQLAVADEHWRIIETQRLTRIQFERWFTNRSVSLVIMEACGSAHHWARWLNGLGIEVRLLPAQYVRAYVRRNKTDASDAAALLEAARASDMRPVRVKSLEQQALQGLHRIRSLWMGTRTSRINALRGFLREFGIAVPVGARTGLEAISRVLADPSSVVPELIRGSARLLVEEIRLLEARIAQLERELAALARLSPACTTLLSIPGIGLLTATALVAATSGDVTHFKDARHFASWFGLTPREHSSGSSRFLGKISKRGDRYLRMLLTHGARSVLRAAKVADSAGREVCGVRRWALDVQHRSNHNKAACALANKLARICYATLRDKTPFGETQRLNRKITRETFVMPA

SEQ ID NO: 47531 - protein, 349 aa, unidentified
MAYFAGLDVSVKETAVCVVDDVGKVVCEQKVPTEPDDIVTLLFSIGEDYGRIGIEAGPLSQWLVNELTTAGLPMVCVETRHMKALLTAQQINKSDRNDARGIAQMMRVGLFKPVHVKTQLAQEQRMLLTSRKLLQRKLLDVECDLRGTLRNFGLKVGVVSTGKFEARIRELVTGSPRLALIVEPLLTVRQVLRQQFIVLDKMLLDTVRHDPVCRRLMTAPGVGVVVALTYRATIDQPQRFVHSRAVGAHVGLTPRRHQSGEIDYDGSVSKSGDTMLRTMLYEAAQSLLIHPGKWSWLKAWGLRVAQRRGMRRAIVAVARRLAVVLHRMWVDGTEFRWSNSTTAVAPQAV

SEQ ID NO: 47532 - protein, 386 aa, unidentified
MPQPNDLSRSLAALEQDSTLVAVIELSQSSWLVAGIVPGVDRHPLKKLAPDEEALLRLLRCWRDGAAKAGCTITRIAVAFEAGRDGFWLARWLRARGIEAYVIHPTSVAVTREHRRAKTDRLDTALLKRVFIGWLRGEPDHCHMAAIPTIEEEDAKRPCRERESLVGERTRIVNRMKASLARLGIRNFQPALHKAPQRLEALRTPERVPLPPNTLSELRRDMARLRFVMDQIREIEVARLGRLEQAPQEGSHPMVRLLARVVGVGIETADMLVHDVLSRKLRDRRAVARYAGLTGSPDESGSRRREKGLAKAGNARVRRAMIQLAWRFLMFQKDSALAQWYRARTEGARGGVRKTLVVALARKLLVGLWRFVTIGEVPAGVALRPA

SEQ ID NO: 47533 - protein, 404 aa, unidentified
MKNDRSLFAGLDWASKTHAVCVVDDHGQIVVRFEIPNTGKTFAGLIKRLIKLNVLAVAIERCDGPLVEALLDSGMRVVVITPRQVKGLRSRYTGSGAKSDAGDAYLLADVPRTDGHRLAALARDSEATAVLRALSRTRKELVEARVALVNQLQAELERVFPAAIGLFSRLDSDVAIAFLRRYPTQHAAATLTRSRFAAFLRRISYCGRKPVEELFARVQDAPPAGLSPGEAQGRAACVLALLRTIDAVRHEEHELEADIIEHLDAHADAHIFTSLPRAGHGVRAAALLSEIGDVRSRFPDEQSLAALAGVAPVTRASGKMHTVGFRYACDKKLRNAIIDFADDSRHASPWAAKIYQDAIARGKRHPHAVRILARAWIRIIWRCWHDGVAYDPQLHRGAVMLAAA

SEQ ID NO: 47534 - protein, 354 aa, unidentified
MLYAGIDYHKRYSQVHVIDHIGRTRATARLANDGLTVEKFFKSLGEPCAAVLEAGWNWGVMFDWLAAIDTVEQVELAHPFRVRAIAAAQVKTDAIDAHTLAQLLRSNLIPRAYIPGVETRRLREIVRQRVFLVRVRTMVKNRIHALLDRYHVPAPAVSDMFGKRGRDYLAKVELPAGAQELLRQDLALLEALTREVRGTEQWLRDSVRGDHRVELLRTVPGLGDLLATVVALEIDCIERFASAAKLAAYAGLVPTTYSSGGHTFHGKLMPQTNRWLRWALVEAAWVAVRLDPYFRTHFANRRAHKPAQSAIIATARRLLEVVWHILKEDRPYQTRPPAGSQRTLKTSSAALATA

SEQ ID NO: 47535 - protein, 425 aa, unidentified
MTKRKYRSVSVKDVRPEVLAERGGMGLVVGIDIAKETQFAAVTSRELEIVTTIRWEHPAETRAFVDVLKCVRAEVGDIDVVMEPSGVYGDAIRYTLETAGFDVHRVSPKRTHDAAEVYDGVPSLHDAKAAAIVAKLHLDGASSPWPIRPEAERDLVAQLRVVELHHKQARKGRNRIEALTARHWPELTHILDLKTATLLELLMVFGSAQGVAARPEEARKLMRSVSRGKIAAEKIERVVESAANTVGMPPSSGEVSAIRSIAGETRRNQHATREALKVLKELTADDPAVRAMAPAVGVKTAATVVAAIGDPRSFASSKALLKAVGLNLRIHSSGKRKPGRLHITKRGNGMVRMMLWLAALRYIKSDPVVRAWYDAKVARDGGKKPRAIVAIMRKLVQGLWHVARGEALDSRLLFDTSRLDLAEVG

SEQ ID NO: 47536 - protein, 458 aa, unidentified
MSRKRNKQTASGQPEWSLNLEVVHPNAAGIDIGNESHYVAVAPNRDPNPVRQFACFTEDLHRLADWLKSCGIDTVAMQSTGVYWLPVYEILAEKGLEVYLVNARHTKNLPGRKSDVQECQWLLQLHTFGLLNNSFRPPEEICVLRAYWRQRGEHVAAAGACIQRMQKVLTEMNVQLANVISDISGLTGMAIIQAILNGERDRYKLADLADPRIHATREEIARSLEGNWRKELLFILQQERNLYQIYQLQIAECDTALAAHLQTLDDKVEPGSQPPAAKPSKRAGSNAPTGFDVRGELYRISGTDLTQIDGINIMTAQTVIAEVGVDMSRFPSEAHFASFLGLCPDNQITGGKVRHRGTKHIQNRAATALRMAASTLWRSKTYLGAKFRRLRARLGAPKAITAMAHMLARLVYRMLKYGEQYVDKGMNYYEEKYREHEIQSIQKKAKQLGLEVTLSPAA

SEQ ID NO: 47537 - protein, 384 aa, unidentified
MKNDNILFIGLDTHKEQTQVAYTLDHRTSETNDLGRIQTTKTGFVKLARQLQSKYPHATLHFVYEAGPCGYWIYRLLTSLGHCCFLVAPSLIPKKPGDRVKTDKRDAQNLARLLKNNDLDPIYVPEPEDEAVRDLSRAREVGMRDLNDAKHQLKSMFLRNNIRYNGSDSWSLKHLRWLTEIVLPHPCQQIVLQEMIQTISERMARLKRLDNELTHQVKLWRYYPVVKAIQAMRGVRLLIATGLITELGDLSRFDTPRKLMKYVGLTPSEHSSGDKRKLGGITKCGNGRARRLLVEGAHSYRHTAKVSKEMQVRQEGLPKEIIDKAWEAQLRLCRRYQRLMQRGKPRNVVITAIAREMIAFIWSISREVVLPRVDPKTRLSRVPA

SEQ ID NO: 47538 - protein, 283 aa, unidentified
MKSTPSFVGIDISAKKLDIAVLPGGNHFTMPHSEPGLASLVRRLQDLGPQIVVLEATGGYETQLAYALWEAGLPVVIMNPKVLRHFAKSTGKLAKTDKLDAQVLAHYAQAIQPPVRALKDREQAELATLMSRRRQLRDMIVMEGNRSRTSTPRVRVNIDQHLAYLRQLLKDLDREIHAAIRRSPLWHEKSEILQSFNGIGPQVSASLIADFSELGTAKGTQLSALAGLAPMNRDSGQWRGKRTIQGGPSRGAPGPLYGGSGSLSPQPGDPGVLSTAPPGGQAG

SEQ ID NO: 47539 - protein, 400 aa, unidentified
MQQQHLLVGVDVGCRKHHVAIGGPGGITEQFEITHDAGGFSYFFRRVSEQERRQRLPVIVGMEGTNGYARPLDQLVKDKGYTLLNVNNLKLARFKEIFSSPAKTDSIDAQQIVTLMMMAPFMEQVKESLQPVLAVSMIERQLKRLSRRRRQLVQEKVNVQNRMQADLQSVCPGFLDIIHKVDSLYVLRFLSFRSDLRQLARLKTATIRSIPGIGAAKATTLARWQSSAIFGAEIAWVGPMIVEDAKRLLQLKESIDVLEAQLEYLVKQSSVATLLDSIPGFGTISAAEVSGEIGTIARFASEASLAIYLGMAPLDNSSGKHKGTKSPQQVNKRAKTAMMVGMGHHIRKVAESKAYYEKKRAEGKKHNQALRSLGRHITRVFWNMVKNNRLYEEKKQSPAT

SEQ ID NO: 47540 - protein, 387 aa, unidentified
MDVLYQSCAGIDVHQANIVVCILHGPLTSTRPKREMATFDTTTKGLRACHDFLSQFHVEAVGMESTGVYWRPVWHALCDDFELILAQPAHMKAIPGQKTDKKDAHWIAKLTRIGLLPRSFVPDETIQELRELTRQRKHYVESRNRETNRIHIFLQSGGIKLTTYIEDIMGLSGRNLLQLLVDGTPITPRIVHQSVYTSLKKKVPQLLEALDGYFSDHHRFMLKQSLEIYDFYQKQIELLEERITVYLSQYENHVETLDSIPGIDVITASVIISEVGVDMSQFPTSGHLASWAGLCPGNNESAGKKRSTKIRHGNSYLKKCLCQAAFAARNQKGSTLADRFYQIQSRRGSQKATIALAHQLLKIAYILLKEQMTYPEFLAQKRLLGTS

SEQ ID NO: 47541 - protein, 370 aa, unidentified
MAKRSMFVGMDVHKESIDISLAEEGRDGEVRHYGGIPGDLEALAKVVKALRAPTRRLRFVYEAGPCGFGIHRYLTAQGEDCVVVNPSSMPKRSGDRIKTDRRDGDALARLHRAGELTAIYIPTDDDEAVRDLVRAREDAVGLSTQAKHRLKAFLLRQGRRYPGRAGWTRPYRRWLADLSFPRAPQHVALQEYRDTIDETERRVERLTDQLQQLTPTWRWAPVVDALQALRGVSFVTAVGLVAEIGDIRRFDHPRQLMAFLGLVPSEYSSGPSVRRGGITKAGNPHARRLLAEAAWAYQGIPRIGRQMLYRQEALPQSICAIAWKAQLRLTSRFRKLVARGKAKPKVATAVARELTGFIWAIAREVPAPPA

SEQ ID NO: 47542 - protein, 371 aa, unidentified
MTEAVKYVGLDVHKETIAVAVADGERGGEVRFVGTVANEDDAIRKLVKRLTGPGVTLNVCYEAGPCGYGLHRLLSKLGQNCIVIAPSMMPRRPGDHVKTDRRDAMTLARLLRAGELTAIWVPDEAHEAVRDLIRARRSAQDDAIGAKQTVRSFLLRHDRRFGGKAAWTKMYWRWLSEQRFEFPHQQLAFEEMQKRVLEAQARVARLEAALAEAVDAWCFAPLVRNLQVLRGIRLVSAATLVAEVGDLTRFDNPKQLMAYVGLVPSEHSSGAKTKRGRITRAGNAQARTMLIEAGWSYRLPAREERRYRERVIDLPEDIQAIGWKAQVRLCQRYRRLAATGKPQPKVTTAIARELVGYAWDIARRVSPAIAG

SEQ ID NO: 47543 - protein, 334 aa, unidentified
MEQVTTVGIDLAKRVFALHGADGAGRAVLRRTLRRDQVMEAVAALPPCVIGMEAGSGAHEWARRFRTLGHTPKLMAAKFVAPYRRNGKNDGNDAEAICEAVSRPGMRFVPIKSLEQQALLSLHRVRQGFIAERTGTINRLRGLLTEFGVVLPLRSVIVRRDASKAAEALPGLARRAIDDLLAHLRVLDERIAAYDRELEAQARGCEPAQRLMKIRGVGTLSALAIVATVGDARDFKSGRQFAAWLGLTPRQHSSGGKSRLGHITKRGDAYLRCLLVQGARSVLHTATRHADRMSRWVQGVETRRGYHRALVAIASKNARIAWALLSRNEELRIE

SEQ ID NO: 47544 - protein, 415 aa, unidentified
MALKIVYKICCGIDVHKTFVVACIASTNAKGVTTYESHRFSTYTKGLRDLLQWLLARNCKDVCMESTGKYWIPIYNILENDCTIVLAHPKYVKAIRGKKTDKKDAKWIADLFKHDLVAGSFMPPADIRQLRDLMRYRFKLTCFRSSEKNRLQNCLTVSNIQLGNVVSDTFGKSAQAILDKLLENPADTSFDLEPLVFKSLKKKLPELRDAIDGFITPEQAGKLKVIKGHFEDLESRKAELEELILALAAPYQQELAILQTAPGISSVFTAIGIISEIGTNMEAFPSAKHLCSWAGLTPTNNESAGKKKSVRVSKAGCYIKPLLVQCANAVVTSKKHPEIRNRYLRLKKRRGHKKAIIAIARMLLTALYHMLKNGENYNAELYRKSNLPPVDREITVEQAIIIARNQGYKIKSATA

SEQ ID NO: 47545 - protein, 388 aa, unidentified
MDRPTELTASRIIGLDLSKKTLVGCSLSREDGFQKKKHFDGLMNEKGRAHLASMIGKGDAVFMEGGSSSFTLARYLMNHTEADVFVLNPMQLHIIFESMCKSDRQDAAKLAKYGRDAHPENWCLIPIPTEQESAERSVINLHIAYSQYHTKVTNKLHAVFNGQGHPDLKKSDLKDPKLRRIHAENLLRDVTALFSAVLLTDMLDFLELQIEAIHEKIHQICLNHPQQALSWLSIPGIGDITAATLIAYIGDGQRFGTASQLRNYIGLIPRKDQSGTVDKQLGITKFGCMPVRRHIMQGAWGIKKFSRDCSLTRYWEELEARRKLGQKAAVAIANKMISIGFALLKTGGLYEMPDGAQYLKRKLKSYKLEALIEHHSAKIDSDKSSIDC

SEQ ID NO: 47546 - protein, 373 aa, unidentified
MKNSITYVAMDTHKKQHRVAIAYPNDEVIVEFSVKNTPSEIRKMVRKIKRNAPGEVKFCYEAGVCGFTLQRRIEALKCKCSVIAPSLIPRKPGERRKTDRRDAKKLLGLFMADMLTEVYPPDEQQEAARELTRCRGAAQENLKRIRHQLQKMLVRHGYVFIDGQHWTQKHYRWLEAIQFDQPLLQDVFECYFTEMRHCLQRVNTLDKELEKLAQSEDYREAVGILCCFYGIKTLTAISIIAEVFDFGRFASARDLMSYLGLTPSESSSGEKEHKGPITKTGNVRVRRLLTEVAWHHRHAYGVSKVLRKRREGQPQWAIDIADRAGIRLRRRYRRLVHKGKLPCRAVTAVARELAGFIWSAMIEYEARKKRKAA

SEQ ID NO: 47547 - protein, 412 aa, unidentified
MTQAIRYVGLDVHKHYVMVGAVDQSQQTVLPPRKVALADLQSWAEKYLQPTDHVVLEATTNAWYVHDLLEPLVERVVVAHPPQVKLIAAAMVKTDKKDTMTLARLLAANLIPTVWVPPVHVRDLRALLAHRRRLVSQQTQCKNRLQSILHRNHILPPASGKLYHPNQRDWWLGLELAAGDKLRVRQELVMLDQLDTLIDETSDELYRLSLSDPWREQLPWLIQLPGIGVMTAMVILSAVGDIQRFPSAKKLVGYAGLGARIHASGLTFHTGGITKQGRRELRAALVETAWVTVRVDPGWREQFERLEQRIGRRKAIVAIARKLLVVAWHLLYHRRVDRQADPERVVRYFLAWGRQAKAFTRLGLKASEFARQQLDILGIGQDLPTLITFGVTYRLPPSSLPLPAEAHPPACP

SEQ ID NO: 47548 - protein, 462 aa, unidentified
MQDSDKRKDKAGSSRPIAGLPIVRHRVAGIDLGSERHWVCAPTVEGSGREVADFGATTSELMRMAKWLKERKVESVAMESTGVYWIAPHEVLEAEGLEVMLVDTRQLARVPGRDKKSDPYDCEWIQQLHSCGLFLGSFRPKEAVCMLRTLVRDKGNLVAEVGDWLRRMQKSLDQMNVRVHRAVSDIDGVTGMAILRAIVDGERDAKKLAELRDPRCRKSEKEIAEQLRGHWREDHLFSLRQGLKMYDSIQERIIDYEQEILRKLAEMEREECREQEVPQVKNPKKRQAIKRHGEEPMRQALYRMSGVDLTGIDAIGVETVQIVLSEYGPDLSRFASEKQFVKHLTLAPHNPTSAGKPVKKKKRNSASSRVGAALRMAATSLRHSETALGAYYRQIARRIGGDVAVFATARKLATIIYRLLRWGQPYVDEGVEAYEQHYHQGRIKSLTAKAKEMGYQLTPITA

SEQ ID NO: 47549 - protein, 331 aa, unidentified
MFPVGIDVSKNTLDLCMLYDGIKGRIKTRNIQNNRHSVENILRWLRLQHCGPEDVHVVMEATGVYHERLATELHDAGFYVSLANPHRSREFARGMGIMTKTDKVDAYMLACYAFLKNPHRWEPPAPEIRYLGALLRRRDVLLGDALREENRLEKYLSTDTPADIISSCMHMAQLLRDEVSNIERQIKAHIKASPALRRDYTLLTSIKSVGPQLGMHMLVVLRSHDFSSAEQAAAFLGVVPIEKRSGTSVRSRPRMSKIGPPQLRAKLYMSALCGKIYNKRMRNIYDEMCLRGKPKMVAIGALMRKLVHWCYGVLKTGTVFNDEGLKQVLST

SEQ ID NO: 47550 - protein, 315 aa, unidentified
MGKNTAQGINVGVDVGKHQLDVFIHERNIHFTEENTPEGVRRVVSRLNRYTLARIVAEATGRYERLLVDEALRRSAPIVVVNPLQVRRFAGAIGQIAKTDRIDAAVIAQYAALVQPEVRPINQNTRKIKDMLVRRRQLIEMATMEKNRLLIMPKNQRTDIRRHVLHLQKQIEKVDVLLDALIESETAWQDKRTVMLSMPGVGPGVVNTLLGDLPELGDLSNKQIAALTGVAPFNRDSGSMRGKRRIRGGRHSVRTVLFMAVMSAVQHNPVMRHFYQRLVKEGKHKKVALTACIRKMIIILNAMVRDGAMWKPNMA

SEQ ID NO: 47551 - protein, 348 aa, unidentified
MVHFVGLDVSVKATSVCVVDDAGKVILEQKVPTDPADIIAILTSLGATYGRIGIEAGPLSQWLVNALTAANLPVICVETRHMKALLTAQQISKTDRNDARGIAQMMRVGLFKPVHVKTLVAQEQRMLLTSRKLLQRKLLDVEADLRGTLRNFGLKVGVVGSSRYEARVRELVEGFPRLAAIVEPLLSVRRVMRQQFAVLHKMLLDMVRDDLVCRRLMTAPGVGAVVALTYRATVDQPQRFVHSRAVGAHVGLTPKRYQSGETDYDGGVSKCGDALLRTMLYEAAHSLLIHGRQWSWLKAWGIRVAQRRGMRRAIVAVARRLAVILHRMWVDGSEFRWRKDSAAVPAVA

SEQ ID NO: 47552 - protein, 468 aa, unidentified
MPKKKKPQPQPQPPNDLSLLDRLTHPHAAGIDVGAEELVVAVPPDRAVKFVRTFGSFTSDLHALRTWLEQCGIQTVALESTGNYWVPIYQLLEEAGLEVCLINPRDVKGIGGRKTDVADAQWLQQLHAAGLLRKSFRPVKEIAALRYLMRHRSNLIQSAARELQHMQKTLNECNLQVHHVFSDLDGASAQRIIKAILAGERDPQKLAALRDKRCRTALPKVLQALEGDYRAEYLFVLGQNLACWQQTQTTLTALDAQIKTLVAAIQVEPAAPAQGAEGATAAALPKRPGHKNSPAFDVFAEAHRFYGVDLAQIPGIASSTLSVFMSELGTGAQLRTAFKSAKAFCAWLGVCPENQISGGKILLAKTRKTTNRVAAALRLSAQALGHAKGRLGDFSRRMKGRLGKAEGITATAHKLARIVYAMLTTKQNYDEAKAFALTPAKQARRIKQLLAQAAALGLQLAPATSPAI

SEQ ID NO: 47553 - protein, 342 aa, unidentified
MQVTTIGLDIAKNVFQVHGIDAAEKVVVRKQLRRRQVLEFFKALPPCLVGMEACATAHYWARELTKLGHQVRLMPAKDVKAYVKRNKNDAADAEAICEAVRRPTMRFVQIKSTEQQGRLMLHRARDLLMRQRTQVINAMRAHLAELGIVAAQGRDGIKELLKIIASEADARLPVDAHTSLIVLAAELQAMQTLIGSIEKRIMVQHRLSEASKRLKSIPGIGLIGATAIAATVPDPKVFGSGRDFAAWIGLVPREDSTGGKQKLGPISKRGDRYLRRILVVGACAVLRYARHKPEKYPWLTKLLERKPFKVVAVALANKMARIAWALLAKGDTYRVPALAAAA

SEQ ID NO: 47554 - protein, 371 aa, unidentified
MNDFSKYVGLDVHKETIAVGIADAQGGEVRYYGEIANTSEEVLKLVRRLRKEGANLSFCYEAGPCGYGLHRQLKDLHQDCQVVAPSLIPKKPGDRVKTDRRDSLSLARLHRAGDLTSVWVPDEVQEALRDLTRARDDMKHLQRVAKQRLSAFLLRQGRRYPGKKNWSQAHFRWLETLKFEQPVQQIVFQEYIDTVQALTRRVAAFDAQIETAGTESVFSKQIEGYMALRGIDRLTATTIAAEIGDLKRFPDAPGLMKYVGLIPSEHSSGPTKSRGGITKTGNGHVRRVLVEAAWTYRHPARKSPLLQRRAERTSEAVQEIAWAAQKRLCARYRMYESRGKKKVQACTAIARELTGFIWAIGQVLPQPAVKA

SEQ ID NO: 47555 - protein, 529 aa, unidentified
MTPQRESMRPRNGLRWRQPWTRAVKADLNNGVLLSPLYSLAPGPVIKAVVTFGGSSIESAAIPFKRVPVFRDAGLRLRLKEMTMAKKITKKKKSGKSTTALPVMRSNAAGIDIGATEIYVAVPADRDTEPVRSFPTFTQDLYALAEWLKACGVATVAMESTGVYWIPLFQILEDRGFEVYLVNARHVKNVPGRRTDVSDCQWLQFLHSVGLLRPSHRPEQDVCAVRSLLRHRESLVQLSTTHVQHMQKALDQMNLQLHHVISDITGTTGLNIVNAILAGERDTQTLANLRDGRVKASADVIAKSLVGDYRAEHLFTLKQSLTAYRSYQQMIGDCDREIRAKLQSFEPDDAPVCDPAPETNLRAELQRVFGIDLTKIPGIQVGIAQTLFGEVGPDFGKFRSASAFASWMGLCPDNDISGGKVLWVSTRNVKCRAATALRRAAYALHNSKSALGDFYRRMRAKLGAPKAITAVAHKLARIIYHLVTTKQEYDESRFEGDQIRYRQRQEGKLRAKAHALGFQLIPQNTGIVP

SEQ ID NO: 47556 - protein, 372 aa, unidentified
MAQDVHQKTVVACVMITQANGKVDKSIRTFATTTAALLALADWLASLQVSYVAMESTGVLWRPIYNVLEDQFELILANAHEIKALPGRKTDVRDCEWIADLLRHGLIRPSFIPAKPVRVLRDLMRYRKSLVYQHTQQINRLHKVLETANLKLTSVVSDVWGKSGQSMIKAIIQGESDAQALTELARGTLRGKLPQLQEALEGRIQPHHRVLLQQIFAHLQFLESSMQQVLKEIEAQMDPYQEVVELLMTHPGVQAVAAMGVVWEVGIDLSRFPSAKHFASWIGVCPGNHGSRRQTQTWENHQGQCVSARVIGRNRLGDKSYQRQLLIGEVTSVSSSHWQNQSDRGGLSHRCRELLSYDHQASSVSGAGSELF

SEQ ID NO: 47557 - protein, 330 aa, unidentified
MKNLFCGIDISKDFLDYAICFDENKTISSTSKTENNKKGIISLIKHLKKEAGGGNIWVCFEHTGHYGLLLASLLAERNIIFSMVPSLDILKSSGVTRGKTDAVDAKRIALYLATNNYKLKPSTLPSDEIFRIKTLLTIRQQYVKIRTQLKNAVKSLKIASKIVSMNSEIKQYEAEIRRYDNKIKGLETQIKKIICNNNQLLVNFNKITAILGIGLITAAQFIVTTNNFTAFDNPRKFNCYCGLAPFEYTSGTSIKRPTKTSHYRNKELKAALFKAANTAITHDMQIRTYFNRKIDEGKHKMSVINAVACKLVYRVFAVVKRDEPFVRMAM

SEQ ID NO: 47558 - protein, 361 aa, unidentified
MAKVRSWAGLDVHARSVLAVTLDAESGELRSARLSGETAKVVEFLAKLPGPTRAAYEAGPTGYGLARALIAAGIGCVVAAPGKIERAAQDKLKTDQRDAERVLRLLMIDALHPVRVPTVEEEALRDLIRAREDVRGDLMRARQRLSKLLLRHDILYEDSASTWTQRHRSWLRAQQLGGGAQATLLDYLGAIDTLELRRGTLEKTIGELVPASSYAQAVARLRCLRGIDTLSAAGLCAEIGDFTRFERPGKLMSYVGLMPSENSSGESRRQGPITKTGSRHARRLLVEASWHYRKTPSRGITLQRRQDGQPANIIAISWQAQQRLHRVWQRLAEQRGKRRTIVAVAVARELTGFCWALARAD

SEQ ID NO: 47559 - protein, 335 aa, unidentified
MQVYGIDLSKEKFDVNFINAKGNEEKKEVKNRVTSISKFLSTVPDDGILCAEHTGIYGDLLVYLCNKVEIPIALVPGYTIKHSLGLLKGKDDPLDAARIREYGERFTDKLKFSEYGDENISELKQLYALRSQLVRARKILLTSDNGRDHLPMQSISTHNHLQPVLCGLDAEIEALEEDIEALIKANEDLYENYEFAKSVTGIGPVIATDLLIKTGNFKKIDTARKAASYAGVCPFPNKSGKMEGKSKTSPFADKKLKSLLYMGAKSAVKHNKEYKLYYQKKQLEGKPHYLIMNNISNKMLRTIYSVVKNKTPYSQDYICLDPRERNINSSTKKVA

SEQ ID NO: 47560 - protein, 392 aa, unidentified
MEVMIETCCGIDVHQKTIVCCVLDGPLDTNKPKKSYKIFGTRTSELRKALEWLVENEVTDIFMESTGQYWVPVFNIFSEGNFNMVLANPEHIKNVPGRKTDMKDAEWIAQLGRVGLIQNSYIPEPEVMELRLLTRRRLSYTQKRTQSKNELHNILQRSNIKLTSYLSNIFGKTGQALLQLFITGEVLTLESVEACLHARVRASTKDIFQAMDGKISLTDRRLLDDSLDEYQFYTRKIKKIEHDIEQYILSHFPLEYELLQSIPGVKQHSAAIILAEIGLSIEAFRTASHLASWAGLSPGSYESAGKKKSSRVTRGNKYLKTALITSGGMAGRSRDPAFKLLYHRVSNRGTKMKAVVACGHKLLRIIYKILGDKVQYDEKRALGLRQQKLALN

SEQ ID NO: 47561 - protein, 332 aa, unidentified
MTAVSTLGIDLAKNTFSVHGVDAQGVVTVRRTVSRAKLGELVARLPPCLIGMEACSGAHEWARRFSEAGHTAKLMAPKFVTPYRKSGKNDGNDAEAICEAVGRPNMRFVPIKSVQQQCDLSLHRVRLGFVEERTATLNRIRGLIAEFGYVVPLGTERLRREVRDLLERLPARAASCVRDLLEHAERLRSKALEYEREIRSSLQHNELALRAHTRPGIGPITASALVATVGNGHDFRNGRQFSAWLGLVPRQYSTGGKTRLGHITKRGDPYLRTLLVMGARSVLQRAYRETDPLSRWALALQQRRGYHRACVAIAAKNARVAWALLAKGAAAA

SEQ ID NO: 47562 - protein, 317 aa, unidentified
MAENKEIFVGIDVGKTWLDIAVWDEKEVIRIQNDEAGIEELLALLGTINPELIAVEASGGYEQASAQAMILKGYQVAVVNPTRVRALAKALGLLAKTDRIDARLIATYAKKIRPAAKEIQEEKEIRLKALVTRREQLVEMRAAEQCRLGTTHNSMKACVQEHIQWINAQIEVLEIEIKQCLDSLPKWQAQVERLDSIPGVGFITAITVVVEMPELGQLNRQKIAALAGLAPFNCDSGKKRGKRRIFGGRKEVRRVLYMACLSAMIHNPVIRSQHNRLIERGKLFKVAMTASMRKMLTIMNAMARDEVYWKTPVPASA

SEQ ID NO: 47563 - protein, 326 aa, unidentified
MKNIIGIDVSKDRFDVYCKTTKEYTSYSSDASDIDKLAEYCQKQEPELVVMEATGGYEFKMASVLMAKGLPVSIVNPGRVKEFAKSLGILAKTDKICARKISLFAEAVKPRQHSQIDEQRREIKELTVRREQLVKMRTAEKNRLDKAFEKTTLNSIKSTIDFLERQINDLDKTISELIEKVPRLKKKAEILTSIPGVGEKTASMLVAAMPELGTLNRRQIAMLVGVAPINRDSGKMRGKRATGGGRKGVRDKLFMPALTIVRFNPALKCFYERLVEKGKPKKVALTATMRKLVCIMNTMLQNETFWQNKLLRGEAGFGAEPQEKSI

SEQ ID NO: 47564 - protein, 383 aa, unidentified
MTGTEPQAWETGLMDDITYVGLDVHKATVCIALAESGRGGEVRQIGVFANRSEILVKLAARLSKGGRRLSFCYEAGPCGYGLHRLLTGCGHDCVVVAPSLIPIKAGDRVKTDRRDALMLAKLHRAGELTPIWIPDAAHEAMRDLVRARATAGRVLSKARQHLQSFLLRHDQIYRGARAWTLAYRRWLTTVRFAHPAQQIVLQDYIHAVEDAEARVDRLTRQIQELLPNWSMSPVVTALQAMRGVALVVAVTVVAEVGDFRRFANARQLMAYLGLVPSEHSSGATVRRGGITKAGNVLARRVLIEGAWTYRMQARVSRKLHDRNEKLPPAVRDIAWKAQLRLCARYRRLAAVGKPKVVVTTAIAREMVGFIWAIAGIAQPTLQA

SEQ ID NO: 47565 - protein, 416 aa, unidentified
MKSWQELTHYAGFDWAKDHHALVVVDRQGRIVADFEFAHTLEGWKGFADKLSAWPNLAIAIETSQGAAVDQLLQQECLVYPVHPVAAQSYRERKAPSGTKTDHLDAWGLADALRGDGHGWKALRPMDPLTQQLRLLCRDEVSLIEQRTALVNQLQQALAEYCPIALQAFDDWTRPFTWEFVLAFPTPQELVGAGKRRWEKFLHTHKLWRPETAEKRLRLFAQADQFKASEPVVRAKSQLAVSLCKLLCTLEQQLKLYRKQIEALFREHPDHDLFGSLPGAKQVLAPRLLGAVGNDPDRYGSQEVLQCIAGTAPVSYQSGQINKVRVRWLCDKFMRHTVHLWANCFRKASVWGQTYYRKKRREGMSHAAALRCLGQRLLKILFRMLQTKMPYDAELHARSQQKHGSWVLKLVNQSPA

SEQ ID NO: 47566 - protein, 335 aa, unidentified
MTSLPNRQTETSTITVGIDVAKATFETAFSDRGSTSSHCNDEAGHAALLAQLEQLEQMRTQGARIGLIVLEATGGLEAELAWALQLAGWPVVVINPRQARDFARSMGKLAKTDSIDAMLLAQFGQTLLQRDDLAKLVKPLPDERQRMLQAMVTRRRQLLAMRVAEQQRASGPDRRMRKSLNIMLKALDRELARMEEEMHAFIGEHHAELLALLGEVKGVGKATISTLLAEVPELGELSGREISALVGVAPINRDSGSLRGKRTTFGGRPQVRKVLFMAAMVATRFNPVIKAFYDRLVAAGKPKKLAITACARKLLTILNAMAKARKPFNAGLHMA

SEQ ID NO: 47567 - protein, 345 aa, unidentified
MEIHTVGIDLGKTVFNLVGLSVQGEVVVRKKFSRKQLLHFTANLRVGLIGMEACGGAHFLGRALREQGHDVRLMPAQYVRPYVKTNKNDYIDAEAIAEAVRRPRMRFVPIKTDEQLDMQSLHRVREGWVGRRTAVINQLRGLLLERGITVRKGRRHIEDALPGILEDADNKLSAALRLLLFQLCSEMRHLQSQIDEADAVILRMASEDEACQRLDEVPGIGPVIATATISAIGNGAAFKKGRGFAAWLGLVPGEYSTGGKQKLLGISKRGNSYLRRLFVHGAHAVMQQRAKQSSGLRQWLEQLSARVHRNVAVVALANKLARIAWAVLAKGERYRPSLLAEGVCA

SEQ ID NO: 47568 - protein, 401 aa, unidentified
MPEQLIIQRWIGLDIHKAYFVAVGVNAEKSTVFGPHKIPNEQLEDWIAKHLLPTDAVVLEMSTNTYLFYDTLLPHVGSVIAVHPPHVLLVTGVKVKTDKKAALTLAQLHAAGLLTGVWIPPVEVRELRAVIAQRSKMVRLQTQAKNRLTSLLHRTHRERPAQPFRPEQKAWWEALPLSTIEKYIVASDLETLAFAEKQIKAIEEVLRLEAARDERVPLLTQLPGIAMLTALTILAAIGPIERFEDASHLVGYAGLGASVHDSGQIHATGHITKAGRRDLRGAMVDAANAAVRHHPYWKKEFERLEYRLGRSKAIVAIARRLLVAVWHILTNGVADRHANETSVATSMFKLAYEIKVSNLPKGTSARAFTRQQLDRLGIGQNLDVLPWGGKKVKLPPSQLKT

SEQ ID NO: 47569 - protein, 480 aa, unidentified
MSQTLTRKDVLLSKGSGVSRTDRRRNARKARLRSLVPRGGVVLGIDLGDVKQALALADHDGLVLWRKSPRVKAHELGTWIDLAVSAARAKGLGPVTAACEPTGPRWMQVQRLCRERGLPLVCIQPLVSHASRRQQDLTGHKRDESDAVMIARLAAELHCYVPEELDEAWALLRDLGRRRAQLAAAETASVLRIRDFLSVAWPSATSAAAVPFRSATWLAAVGAVTGRGPEALAALGEEELTALVREAVPGWGARRPDMRIVRNVRACAGDPDAVAWARRGKFRRIAAELEDLQRCRARLAGTEDEMEALARELGLARLGEIPGLTLQGAAVILAEAGDPRRYDTSKSLVKHAGLSPADNASGASEGGSRISRRGRPGLRLAAWRAVLPLLRYNPVTAAKYRSLTAAADEAARTAKDRAKPGSAQAAQAARNARAARAKARVACAAALLRWIYFMTVHGAGWDPAAASGGRLAPAIFQEAA

SEQ ID NO: 47570 - protein, 342 aa, unidentified
MEQVSVVGLDLAKSVFQVHGVNAQGEAVLRRKLSRGQLLKLFEKLPPCLVGMEACASAHHWARELAALGHQVKLMPPQYVKPYVKRGKNDAADAEAICEAVTRPTMRFVGVKSPDQQATIMLHRVRKILTRQRTQLSNALRAHMAEFGVTAAIGRGGLDRLIAVIAGQHDARLPDEARACLFVLSTQLEMVKNQILDNDRRILADARRTEAGRRLMKIPGIGPLLASAIVACVPDPSTFGGGRSLSAWIGLTPRQNSSGGKERLGSITKAGNTYLRELLVVGAMAVVRRAKQGSAKWPWVAQLLERKKPKVAAVALANKNARIIWAMMATGEPYREPELAAA

SEQ ID NO: 47571 - protein, 345 aa, unidentified
MTTMNYIGLDVHKKTISYCVKDVSGRIQQEGKIGSTRRELDCWMKTLPQPWTVAMEATIFSGWIYDHLLPHATQIKVAHPLMLRAIAAAKKKNDQIDASKLADCLRCDFLPECHMMPAAIRDRRRTLRYRHLLVRQMVQMKNRVSGLLMETGVEYNKQRLHKVSYFRELLSANEEVPPSIRPLLKLSRETIERYQKTEYALVSSLQRDPVLADRIKRLRTVPGVGPITALTWALEIGDVSRFRSIKQAISYCGLCGDERSSADKAMRMPLSKQRNKHIQRALVEAAKLAPRQSHELAVIYDHERQKGNSNRATLAVARKMVAYLLAVDRQQRDFVPAEERRTAAA

SEQ ID NO: 47572 - protein, 455 aa, unidentified
MRIVYQRCCGMDVHKDSVTACVLLIDEYGEWRSEKRKFRTMTRDLREMSAWLASLDVEAIAMEATGVYWKPVWNILEAEKKFHLLLVNAHHIKQVPGRKTDQKDSEWIADLLQHGLLKASFVPPPVIRRLRDLTRMRVKIRQMLATFANRIQKVLEDANIKLGSVASDVLGVSGRHMLHAVVEGQQDPKQLAELAQGRLREKLGELQLALEGHITDHHRFQLKFLLEFVQFGEKQLSQLEAEIRCLLAQVEPASVPPEDTVTAELAAPGAGAEAPATAQKSPLQTVVELWDTIPGVDELTATTLVAEMGANMDQFPSAGHAAKWAGICPGNKESAGKRLSGKTPKGSVWLRRALCQAAWSASRTKDTYLAAQYHHLIVRKGKKKTIVAVAHTMLTIAYYIAKRRCPYQELGGDYFDRLNADTMQHRLVKKLKSLGYEVTLTPITPIVREPIAQSC

SEQ ID NO: 47573 - protein, 399 aa, unidentified
MDIHKETHTAVLLNYLEEKQGEITITNTLQGFHQLEKYVLKQKGELIPLFGLEDVTHYGRNLSIFLLDKGYPVKEVNPSLSFMERMSYASTKKNDSWDAQCISAVLMRRSHLLPDATPQDYYWTMRHIVNRRNALVKNLGGLTRQFHEQLQVAYPSYKQFFHEVTCATSLAFYEEFPSSKYLENISEEELGAFLRIPSHNTCSTNRARKILDLVAQEQQKSLDYQQERDCLVRSIAQKIRFILREISTIEKLETKMYQKLGYQLETIPGVNIVTACSLVAHIGDIYRFSSPHKLANYAGVAPLHFGSAGKGKDVQNKSQGNRNLYSTLYFLAVQQIYLTSKGKPRNPVYRAYFEKKISEGKTKIQALICIMRKLIRIIYVMMKKKVAYELPELNQKAIS

SEQ ID NO: 47574 - protein, 356 aa, unidentified
MDTVTATDVIVGVDTHKHTHAAVALNGLGAQLGTTTIPVSRKGYHELEVWARSFGCVRAFGIEGTGSYGAGLSRALLARGHTVVEVNRPNRQLRHQHGKSDPLDAESAARAVLAGQATACPKSGTSTVEMIRQIKVVRDTAVKSRARAMITLKTLIVNAPAALREQLDCLGGRIALVRHLVSLRPGPMTSTTASTKAALRALARRWLMLDAEIKEHDAALDALTDACAPGLKAAHGIATGTAAEMLILVGDNPERIRSEAAFAKLCGACPVPASSGKTTRHRLNRGGNRQANAALYRVVIVRLRSHPPTLAYLRKRLAEGLTKREIIRCLKRFVAREIFAHLCGRHRRAASLLVAT

SEQ ID NO: 47575 - protein, 460 aa, unidentified
MRPDPVEIDAEAHEQVVERVAAIDVAKASGMVCTRVPHQAKPGQRSTKIWQVPATSNAILELAEQLVAQGIERVVVESTSDYWRPWFYLLEARGLQVWLVNARDVKHLPGRPKTDKLDAVWLAKLNERGMLRPSFVPPAQIRQLRDYTRLRSDLTGERARHVQRLEKLLEDALIKLSTVATDIMGVSARAMIDALIAGQRDPKVLAELARGRLRVKRAALVEALTGRFDDHHAELARILLDHIDALGGQIERLTSRIEELIAAIPAAHPPQGGATPTGGPPSDPATGEGTHQQATQPPLSALARLDEVPGIGPKAAQVIIAELGLDMGQFPTAAHLVSWARLSPRTIQSGAKHRRGTTGKGNPYFKGVLGEVAAAAAKTDTFLGERYRRLVRRIGKRKALVAVARSILVIVWHLLADPTARFHDLGADFYSNRIDKDHKTRNHIRQLQALGFIVTLTPAA

SEQ ID NO: 47576 - protein, 394 aa, unidentified
MNFLKYAIGIDMGMEKLDACISLMTVQQQVIVKAQCNFNNDYKGFALFHAWVIKNIKMDIPIIFLMEATGVYYEQLAWFLYDKGCTVSVVLPNKAKKYKEALGLKSKNDHIDAKGLAQMACEQKATQWKPFSKDIYLLRLITRQIQNISKQCNIISNQLHALQHAMFRDKVIEKMYNKQLALLQKNKKDLQKRVELIVDSDKSLKQKFQNICKIKGLGLQNLAVIVAETNGFAAFENIAQLVSYAGYDVIENQSGKRTGKTKISKKGNAHIRKCLHFPAFNTVRLKVGPFKNLYERVYERSKIKMKAYTAVQKKLLVMVFVLWKNDQSFNPDYQDKVSRDAEPEPSLASASKKPLIIGITSIVKKVALAKTKATQDKHPSKHRRMPSLAYLKIT

SEQ ID NO: 47577 - protein, 402 aa, unidentified
MNAVGIDVSKGKSMVAIMRPFGEIVSAPFEIKHTASGINSLVELINSVEGESRIVMEHTGRYYEVLAHQLSEANLFVSAINPKLIKDFDNDSLRKVKSDKADAVKIARYTLDKWQNLKQYNVMDELRNQLKTMNRQFGFYIKHKTAMKNNLIGILDQTYPGVNTYFDSPARSDGSQKWVDFASTYWHVDCVRKMSLNSFIDHYQNWCKRKKYNFSQSKAEEIYGKAKELVPVLPKDDITKLIIKQAVNQLNIASATVESLRTLMNETASQLPEYPVVMAMKGVGTSLGPQLMAEIGDVSRFTHKGAITAFAGVDPGVNESGSYEQKNVPTSKRGSSNLRKTLFQVMDALIKTHPQDDPVYQFIDKKRAQGKPYYVYMTAGANKFLRIYYGRVKEYLSSLPES

SEQ ID NO: 47578 - protein, 338 aa, unidentified
MVRPPLSRCPEQMEGSESRMQGQEKTEAAPVYLGVDVSKAGLDFCGLDGEIGGVANDRAGIAALVRRARTLGGAQVVVEATGRLHHDLWRALDCAGVAVTVVNPARARDFARAQGRLAKTDAIDASALACFGAATAPAPSPWPGDKIMEIKELETACRALVTERARQKTRLGEASLALIRRQLRARIAQAGRQIAALEAELDARIEALPELARQRSILVSIPGLGATTARAIIAGLGEIGTAGHKRIAALAGVAPMNWDSGVMRGQRRIKGGRAALRATLFMAALAASRCNPDIRTFYQRLIGAGKPPKVALTAVMRKLLILANTLVRENREWTPSRP

SEQ ID NO: 47579 - protein, 402 aa, unidentified
MNAVGIDVSKGKSMVAIMRPFGEIVSPPFEIKHTTSDINSLVELINSVEGESRIVMEHTGRYYEVLAHQLSEANLFVSAINPKLIKDFDNDSLRKVKSDKADAVKIARYTIDKWQNLKQYNVIDELRNQLKTMNRQFGFYMKHKTAMKNNLIGIIDQTYPSVNTYFDSPARSNGSQKWVDFASTYWHVDCVRKMSKNAFIDHYKNWCKRKKYNFSKSKAEEIYEKAKELVPVLPKDNITKLIIKQAVDQLNSVSTTIESLRTLMNETASKLPEYPVVMAMKGVGTSLGPQLMAEIGDVSRFTHKGAITAFAGVDPGVNESGSYEQKSVPTSKRGSSVLRKTLFQVMDVLIKTHPQDDPVYQFIDKKRAQGKPYYVYMTAGANKFLRIYYGRVKEYLSSLPES

SEQ ID NO: 47580 - protein, 347 aa, unidentified
MPVTIGVDPHKASHTAAALDEHGHLLGQQRITATLEGYQALRQWAGQWEDRRWAVEGAHGIGRALAQRLVGDGEQVLDVPAKLAARVRVLSVGHGRKSDPHDAISVAIAARSVPCLRQVGVEDQAVVLHLLTKRRQDLVAARTQTINRLHRLLMDLVPGGARRNLTAKRAAALLAAVNPAGAPAVTRWELATELVADVRQLEERIATVEARIKTAVAQSNTTLLELFGVGPVLAARFLGEVGDIGRFPTKHHFAAHTGTAPLEASSGQVIRHRLSRAGDRKLNHALYMMAMVQVRRPSAGQAYYRRKLAEGKSPREALRCLKRRLSDAVYRCLLADQHRQPSPVGLA

SEQ ID NO: 47581 - protein, 405 aa, unidentified
MNAVGIDVSKGKSTVTIRKPGDVVLMSPCDIPHTQSAINDLIKQIKSLEGETKVCMEHTGRYYEPVATWLSDAGIFVSAVNPILIRDFGDDSLRTPKTDKADSKKIARYTLDRWAKLKQYGIMDKTRNQLKTMNRQFGFYMAQKTAMKNNLIALIDQTYPGANDFFDSPARNDGSQKWVDFIHTYWHVDCVRSKSLNAFTEHYQNRCKRKNYNFSAEKAAKIYQISSDLIAVFPKNDITKMLIWQAVALLNTASKTVESLRSKMNELASTLPEYPVVMDMNGVGATLGPQLIAEIGDVSRFTHREALTAFAGVDPGKNDSGKHIQNSVRTSKKGSPYLRKTLFQIMDSLIKRSPVDDPVYAFMDKKRSEGKPYYVYMIAGANKFLRIYYGRVREYLSNLSNNETI

SEQ ID NO: 47582 - protein, 399 aa, unidentified
MLAVGIDISKSKSVAAILNQDGSMHTSPFEFHHTQPELDAFIKYILNSNQSATILMENTGHYHYPVLKAFREAGLPVCMVNAYQIKKFGDMDLRKAKTDKKDAVRIARYALEKSYSLVPYTSMEQKYEDLRFLARQYNQRMLTLKNNKVFLLNLLDETMPGITNILPLTTRAPGTSLSVLFINRFKSYDRIKKMGKSRFLDAFEKIARKSRNRQTKTYGLAIYEAALRNITTRGENEYTLAAQDQCLELVCESQKAADSIILKMQTLAETLPEYAVLRSMAGVGNRLGPLILAEIGDIRRFHSGKALNAYAGNDAPPYQSGTFESHNRHISKRGNAALRKYCFEVMQALKLTRPQNDPVYLFLLKKEQEGKPYNVAKMAGVNKFLRIYYARAMETLKQQ

SEQ ID NO: 47583 - protein, 403 aa, unidentified
MERYLGMDVHAASCTLAVISETGRKLRDFPVETNGQALVEAVRMIPGRKHLVFEEGLQSAWLYETLSPHVEEIVVAGITESRGPKSDKRDAYGLAEKLRVGDLDKSVFKASRQFTRLRELSRIHMTLVGDVVRAQSRIKSLYRSRGILVSGMDVYGVRPREDWQKQLGSSAQTRAMRLYDHLDLLLEQKKQAESDLPREASKHGIVRILETAPGIGPIQAARLVPIVVTPHRFRTKRQFWSYCGLGIVTRSSADWIQTSEGSWVKARAPQTRGLSRQHDRFLKHLFKGAATTVVTQRNKDPIDARYQRLLDGGTKPTLAKLSLARMIAATVLRMWKDEEEYDPSEGSLPWGILVRFLVIGLCADSPLLSPTRHQLRRSALRPRRIERRHGELPPRRKRESSGQ

SEQ ID NO: 47584 - protein, 422 aa, unidentified
MKVVYSVCCGVDVHKTFLVATIITTQNITPHYLKKRFSTFNNSILQFKQWLIDKNCFDICMESTGKYWVPVLNLLEDSIHVTIANPKWVKAIKGNKDDTKDSRWIGDLFRLGLVPGSYIPDKPIRVLRELTRYRSKLVSCRSSEKNRFQNAFTVCNVALDAVVSDMFGKSASSITDYLISTDSFDPEYCSSLLQRSLKKKADTVLQSIEGYQITGEQKIRMKIVRAHMLYIQKCIGKVDEQITQMVQPYETHIKFFSTIPGVERASAITIISEIGLDMAQFSSSKRLCCWAGLTPSNNESAGKKKSVRITRAGVYLKPALVQVALAAVKSTDNPYYKVKFERISKRRGKKRAIIAIARMILTASYNMFITGEEFNPSDLYKIDMPAELQEKQNEKAVKQAIKLLISQQIIKLSDISCTQPKA

SEQ ID NO: 47585 - protein, 326 aa, unidentified
MTAPKLGIDISKKTFDVALIRDPETMKVKQRQFSNTPDGFQALQTWLAKQGVRQVHAVMEATGAYGDALAECLHGAGHLVSIVNPAQIKAFGQSELQRNKTDRADAALIARFGWRHNPAPWTPPEPEHRELQSLVRHLDDLIEQRTQVSNRLSEGRLTKAVRESWEEILQALNERIAEVKRQINQHFDDHPTLKRQRELLDSIPGIGPETAGRLLAEMPQLGEFDSARAAAAHTGLTPKRHQSGTSINAPTRISKIGNSRVRYALYLPAMAALRSSKEFKELASRLTERGKKKMQIIAAAMHKLVRIAHGVLKNQRPYDPNYAAAD

SEQ ID NO: 47586 - protein, 402 aa, unidentified
MATDRLWAGVDVGKEQHWVCVVDGSGAVVLSRKLSNDEDPIRALVAEIDALADQVCWTVDLSTVYAALLLTVLADAGKTVRYLAGRAVWQASGTYRGGEAKTDAKDARVIADQSRMRGQDLPVLHPDDDLIAELRMLTAHRADLVADRTRTINRLHQQLVALCPALERVAQLRSDRGWVVLLARYQRPKAIRQSGVSRLSRMLTDAGVRNAAMIASAAVAAAKTQMVRLPGEGVAAGLVADLAKEVIALDERIKTTDADIEDRFRRHPLAEVITSMPGMGFRLGAEFLAAVGDPALIGSADQLAAWAGLAPVSRDSGKRTGRLHTPHRYSRRLRRVMYMSALTAARCDPDSRAYYQRKRQQGKRPIPATICLARRRTNVLYALIRDNRSWQPESPQIAPTAA

SEQ ID NO: 47587 - protein, 395 aa, unidentified
MQTQSNKLNFKGQNIFIGIDVHTCTLYEVRSKGSWTVCIYSEHLEHKKFSQPPTVDALKTYLHRNFPGANYHSAYEAGFCGFHVHYALLEAGINNIVVNAADVPTTHKEKDNKTDLRDSRKLGRCLRSGELTGIHIPTRKTQEDRSLMRLRYTIRKDLTRIKLRVKSLMSFYGIEHPAQFSSPNKHWSRRYMEWLKTIKMEEDSGGAVFQTLITEVEEMRKVMLDVTRKIRDLSRTASYEKDYELLFGIPGIGLITGMTFLTEIEDINRFSSTDHFVSYVGLVPSCRSSGEKENNGDITSRAKKILRDLIVECAWSASRKDPALHMAFCKLCKRMEPNKALIRIARKLLNRIYFVLKTKTEYVYRAKRSMFVVLLNKEILFKCLLSEVTAEQPCS

SEQ ID NO: 47588 - protein, 355 aa, unidentified
MQYIGLDYHKQYTFATLINKETGEVRQARLSNTPQSIEGFIKCPEESHAVMEASRTWPVLYELLRGKVSSIKLAHPLRVKAIASARIKTDKIDSRILADHLSADLIPEAHIRDADNRSKQAVIRQRAFFVSSRTRVKNRIRVLIDRQPYEVRKTVEGLSDLFGKAGLLWLHEVKELSSADRTLLDQMLMFLDNLNMLISESDKLILKLFNNDSNAQLLYTVPGIGKFLAVLISTEIDDINRFPSGDKLASYTGLVPSTYSSSGITRHGRITKQGNKWLHWAFVEAATTAKRYNAQLNGYYTQIADRSDRNRAKIALSRRMVKITFSMLRKNQPFNEYYIPKTIYKNNPESPSFAY

SEQ ID NO: 47589 - protein, 328 aa, unidentified
MAKHIMICAGIDAGKLKLDAALEGRLERLQVANTPAGHQTLLEWLWRHGVTRVGIEASGGYEQAVVAELRRKGFVVIVFQPGQVRAYAMFHLKRAKNDKIDADLIAICTAAVKKIHAPPDPRLAPFAEHLTMIDQIVDDIARHKNRLETCRDARIRQVWKEEIARLEKHRKIELKSLVAAIRRHQDLATRLDLINSVDGVGLPTAVAILVRMPEIGRLTREQVAALVGLAPYDDDSGGRFGARHIAGGRKRPRSALYAAALPASMRWNAQLIALYQRLIAAGKLHKVALVACARKLLIFVNTVVARGTPWQRHQNPLPGAIPHAATAR

SEQ ID NO: 47590 - protein, 424 aa, unidentified
MNFTQNARLKQVTSDTLIVGVDVGSQTHFCRAFDWRGFELSRRVFKFSNTGMGFLTFLRWTEEILNKTEMKKVIVGCEPTGCYWLTFQKFLLDHDIQLVTVNPFAVNRSMELDDNSPEKSDLKDPKTIALLVKDGRYSTSYLPSGVYAEIREASVCRDQIVKQHVRLSNQIQGWIQKFFPEYFECYADWDSTSGLMLLKEAPLPQDILKIGAGGINQIWRTAKVRAAGIKRAQTIVDAAQNSVGLEAGEAARLEIWVLVNDYILKAEQLRRLDAYLEEKVKEVPNVEKLLAIKGVGMSTVIGFVAEVGDIGRFTDPKQIQKLAGLEIVKKSSGKKKGQPRISKRGRCRLRRTMYESARALMNWNPAFQDVFLYYRNRQRNPLGGMQAKIAVACKAIRVFYVVLKTGCDFDEEKFRKDIIRPEVA

SEQ ID NO: 47591 - protein, 348 aa, unidentified
MTEAYDGREVVGMDLHRRRSVLVRMTGDGRKLETARITNSPAELRRQIARAGKSPRVVLEATYGWYWAADTLAAAGAEVHLAHPLGVKGFAYRRVKNDERDAADLADLLRMGRLPEAWIAPHPVRELRELTRYRHKLVRIRTSVKDQVHAILAKLGIPVTCSDIFGVWGSAWLDGLALPQPFAGKMVSLRKVCALLAAEIALLDTAIAGLLEDHSGYHAVRALPGIGPVLGAVIVAEIGDVTRFPRPAELCSWAGLTPRHRESDVKVSRGHITKQGSRILRWALIEAIQHVPAGHPLRQRRDDIIARRGKEAKNIAKVAIARQLLTWVFYAMRDGQVRSLAAAARQAA

SEQ ID NO: 47592 - protein, 343 aa, unidentified
MKLSRVGIDLAKNVYQLHGADRSGKTVWTRRLKRHQWFKVLLDKIEPGCVIGMEACASAHHWGRQLQSRGYTVKLIPPQFVKPYVKSNKNDARDAEAICEAMSRPNMRFVTVKTVEQQDIQATHRIRAELITQRTAKANQIRGLVAEYGLVAPKHMSSLRAAIPCWLEDAENGLTGDFRQLLQGVWEDLLILDDRVSEMDKLIKRLADNHEECVRLQQLRGVGPMIATAMIASVGDARQYHTSRQMAASIGITPKQHSSGDRDRLLGISKRGDVYLRTLMIHGARSVVANAKHKDDRLSRWVTGIATKRHPNVAAVALANKTARMAWAMLRHATDYDPDFAIR

SEQ ID NO: 47593 - protein, 377 aa, unidentified
MGWSGRAPAPLARKLRGSEPRKEHVPCHGFPRLLRSPPSASIWARTASISSAQDERGAIVLRIKLSRAQLTRRLANLPACLIGMEACAGAYHTGRQLQALGHDVRLIPAQYVKPFLKGHKNDYRDAEAIAEAVQRPTMSFVAIKTPEQMDLLALHRVRSRLVSQRTGVTNQIRGFLLERGITVRQGLAPLRQALPGILASSPDRLSPRLVRLIADLMEDWHRLDERIAGVSAEIEALAAQDEHCQRLMSVPGVGPIISSAVVAAIGTGAGFKQGRDFGAWLGLVPKQESTGDRTILGKISKRGNKYLRTLFVQAAHVVLVRRPHGARLGLWPWIETAGRRLHRNMLVIALANKLARIAWAVLARGHGYQPRSASHAV

SEQ ID NO: 47594 - protein, 328 aa, unidentified
MSRAAVGIDVSKKTLDVAVTVDGKEVVSAGQFANETKGHKALLKWVNKQTRKHSSSEVHYTMEATGSYSEDLHEFLSEAGEKVSVENPMKVKSFSQVQMMRTKTDAVDAAVIARYAWIIKPALTPPMEPSIKRLRALVRHVEHLTRCKAQEATRLEGAKEKLVVKSIKAIVKRYDHEIEKTMEEINKHVDDNPDLKKKRDLLKSIPGIGEKLSSQLLCEIKGDAVSVKAQVAHAGLAPRQRVSGSSVRGKTQICKMGNARLRKALYMPTMSAMRYNPHIREFYKKLVSQGKHKMVALCACMRKLLVIALGVLRNGVPYQEDWVSKRPA

SEQ ID NO: 47595 - protein, 344 aa, unidentified
MLYVGLDLSRKRLDWLALDEEGELAEAGAISPDRDGLAKLGRRLGDQAVLAVIESMSGARFVHDRLELAGWDVRIADAAKARGLAPLACKTDRIDCWVLAELARRQLVPEIWLPDPRVRAERERARFRLHLVKHRRSLKNRVHAILFQHGRPNPHRDLFCAGGRCLLERLQLPEPWASTLRASLTLIDRLDEQIDDCERELRRLGVDHAYVPLLTTVPGIAWVLGYTIASEIGDIGRFASPRKLVGYTGLTPSVEQSGERDRRGPLRKNGPNYLRWALIEAAHTAGRDPRYRPIVERMRARHGRTRGSKIAAIEIGRRLTEAIWHMLTNDQPFAPAGAPTPVAA

SEQ ID NO: 47596 - protein, 412 aa, unidentified
MSLDPHEEPAAIQTHIGAIFISLELSRSKWLITSLVPGGGQRMSKHWVEAGDLAGLLAGFWAIRDKVLARTGKSYPFVVIQEAGLDGFWIHRSLVKEGIESHVVDAASIAVSRRRRRAKTDKIDGEALLRALLAFKRGEPRVCSMVRAPTPRDEDRRRICRERETLIAERIRHVNRIKGLLFSQGIGDYEPLRRDRRRALEAARTGDGRALGANMKAQIGRELDRLELLLDQIATIETERDAMLARQAEAETAPGAETVPEAEAAAGVQSVQSAPARVQKLMELNGLGAQTVAMLETEAFYRSFDNRRQLAAFGGLAGTPWKSGSIDHEQGVSMGNHRLRQTMIQLAWLWPIHQPNSALTRWYRERTKGATKLQKKKMVVALARKLLVALWRYVDAGVVIEGAVLKRAARAR

SEQ ID NO: 47597 - protein, 294 aa, unidentified
MIIVRCDDHPGFQQIAFVDTDTGELQERRLQHPEEAEPFYRDLAAHGIKGRVGMEAGGHARWFERLLAELNFELWIGDATEIAKKRERKQKTDRQDAQHILKLLRKDDVPKIWVPSWENRDLRQLLWHRHRMVQARTRIMNQLQAVALNEGLRCKKRLWREQGRQQRESFRRAPWASRRRQDLLELRDRLNPTIGELGQAIEQEAEKFPAARGLMTHPGVGPLTALAFVLIIGRAERFQCGKQIAAYLGLVPLEDSSGKRRRLGQITKQGSSMVALLAGGSGAGHSSQPSRMAQ

SEQ ID NO: 47598 - protein, 328 aa, unidentified
MSYVGIDISKDSFVVAFSSAYKSKTITYQNDDKGIEKFINTLDKEQHHCVMEATGNYGVNLLYHLCEQKIKVSLINPKQSNFLSKMKLSTAKTDNKDARLLVEYGEKMNPEVYKMPSDKIILLKQKQTVLTHLIKQRTASKNQLKSLELLNKKDNLAIDMLKNNIDNLDKLIDNLEKDIVSITEEEFEKQVQLLTSIKGIGKKVATTLVIITNGFSFFENPKQLSRYIGICPTYQQSGKSLNYNGHINRNGHSTLRGQLFIASWSATKYNSSCKALFEKLREEGKPWKLAQIAVCNKLIRQAFAVIKSGVAYIDGHVPTLSVPMQTAI

SEQ ID NO: 47599 - protein, 356 aa, unidentified
MPTIAQLEPVRVTVGVDTHKDAHVAVAKDHLGRHLGENTIPTTPRGYRELLAWAESHGEVEAWGIEGTGSYGAGLSRFLRGADQTVIEINRPDRKARRLRGKSDPIDAEAAARAVLSGEACAVPKSGDDRVEMIRALRTARSSAIKSRTQAINALKALVVSAPEELREQLRSLPAIKLVRTCSRLRPGDIVNPTAATKLAMRSLAGRYEALEAEVKVLGPELLRLTIEVAPALVELVGVGPDVAGTLLVTAGDNPERLRSEAAFAHLCGVSPIHASSGKTVRHRLNRGGDRRANAALYRIVIVRLRYDDRTKEYAERRTAEGKSKAEIMRCLKRYVAREVFAVLTDSSQKTVAEAA

SEQ ID NO: 47600 - protein, 325 aa, unidentified
MTSMPEPTPIDRAHDEREEVVLGVDTHKNLHVAAVLSGLGALLATRAFPTTTAGYRGLVAWARSFGALRRAGVECTGSYGAALTRHLQAEAIEVVEVNQPDKATRRKRGKTDAIDAEAAARAVLSGRATATAKTSNGPVEAMRVLRMARNSAVNASTKAINQLKAVLVGADPALRDSLAGLGPASLVRRCAELPDPTPGSGLSEVDRAVVFTLRTLAARIMALKAEAYQLHKQLRALIAAHVPELLERRGIGPDSAAALLIAAGDNPERLCSEGSYAALCGASPVEASSGKTQRLRLNRGGDRQANAALYRITLSRLRWDSRTQD

SEQ ID NO: 47601 - protein, 423 aa, unidentified
MKLTYPICCGIDVHKKFLVATIVTSKGLEPHYQKKRFSTFNGQILALKAWLLENSCRDVCMESTGKYWVPVFNLLEDSINVTIANPKWVKAVKGNKDDQKDSKWIADLFRMGAVRGSFIPCKAIRILREFTRYRYKLTCCKSSEKNRYQNVFTVCNIALDAVVSDMFGKSAASILDYILASDTFDPAHCVSLLHRSMLGKVDDIIASVEGYQMADAQKVRARMVKEHYDYLVGHIEKLDAAIDELTKPYESAISLLCTIPGVDRKSAITIISEIGTDMSQFGDSKRLCCWAGLAPGSNESAGKKKSVRISRAGVYLKPMLVQVAHAAVKNQQNPYYRIKYEAIAKRRGKKRAIIAIARMILTAAYHMFLTGEVWNPCDLQQVDMPPELREKELQKSLRKAAKLLIAHGIVTQEAVAFREPIAA

SEQ ID NO: 47602 - protein, 347 aa, unidentified
MKILALDLGKFKTVACFYVDGEAEFTTVETGRPEFTALLRKQAADVVVFETCTAAGWLSDLCEELDQTFFVANPNGEAWRWSKIKRKTDRDDALKLARLTAMHQLPTVHVPSRAVRAKRSLLKFRQSLVGYRVSLQNEIRALWQAQGFAPLPAGKSGWTKASLAFLKEHGRPLSECEPEDFWRGHLGLLLASLDHAFAQEKELDRRLEALAKADESIQRLMTIPGVGRCTAEVVCAYIDAPRRFRNGRQVSSYAGLVPVQYQTGQSDRRGRITKRGSRLLRKSLVECGWLLIRYNPWAAQLVQRLSKGQKTRRKQAIVALARRLLVRCWAMLRDGTDWNPPPLPVIT

SEQ ID NO: 47603 - protein, 340 aa, unidentified
MNVTTLGIDLAKSVFQLHGTDAAGKTVLRKRLRRNQVLDFLGTLPRCLIGIEACGTSHHWAREISRLGHEVRLIPPIYVKPYVKRQKNDMADAEAICEAVSRPNMHFVPIKSPDQQAVLVVHRTRSVLIRQRTMLLNSFRSHLAEFGITAPQGPGNVLILAQRLEAGEFEEVPEIARTALLGFARHLEQLKQEIRTLERQLREWHRANEVCQRLATIPGVGIITATAMAASVPAPSVFGSGRQFAAFLGLVPRQNSSGGKDRLGRITRMGDPYLRNLLVNGATSVLRRIGGDDGATGVWVRQLLTRKPPRLVTVAIANKTARIIWAVLSRGETYRQPVAV

SEQ ID NO: 47604 - protein, 349 aa, unidentified
MEAPQQHMYYIGLDIHKKTISYCVKDVSGQIQREGTIPATRTELDSWMKALPQPWTVAMEASIFTGWVYDHLLPHAVQVKVAHPVMLRAIAAAKKKNDRIDAGKIADCLRCDFLPECHMVSAEIRDRRRTLRYRHLLVRQMVQMKNRVSGLLLETGVSHNKQRLHKVKYFRELLTNNKEVDESIRPLLKLSRESIERLQKTDYALVSSLQRDPILADRIKNLRTVPGVGPITALTWALEIGDVSRFRSVKQAISYCGLCGDEKSSADKVLRTPLSEQRNKHIQHVLVEAAKLAPRNSHELSLVYERAKQKGNTNRATIAVARKMVTYLLAVDRGQRPFVPAEDFSTAVA

SEQ ID NO: 47605 - protein, 400 aa, unidentified
MLSIGIDVSKGKSTVCGMKPGGEIVYAPFEVQHTREGMSELVLLLHNSGEEVRAVLESTGSYHCPVVAALLENGIFVSVVNSLRMKRFCSQSIRKVKTDRIDAMQIALYGLAYWQELQPTRLPEDTYRELQLLARQYYQMTSMLIKAKVDFNALCDQVLPGMQELMSDHAGRHKLSDFVLRYRHTTHILEMGETRFRKDYCKWAEKKGYRNCERMAVLIFATAQNGIPVLPNAPSTQIVITEAIRVLHTVEASRDAILTQMQALAKTLPEYSLVREMPCIGDTLAPRLIAEIGDVRRFHSKRALIAYAGIDAPPYQSGKFCANNRHISKRGNRYLRKTGYEVMQSYVMHKPANDPIFTFIEKKRGEGKSGKLAMVAGLNKFLRVYYGKVTELYRSLPAIE

SEQ ID NO: 47606 - protein, 310 aa, unidentified
MEQIYIGIDVAKDRLDVHVLPSGQAFAVARDGEGLAALVARLAAARPSLIVLEATGGFETVVAAALGAAHLPLAVVNPRQIRDFARAIGRLAKTDALDAEVIALFAERVHPEPRPLADAEAQALAELVARRRQIVEMMTAERNRRQRLGSQRMRKSVDRLLAALQQELSALEADLDDAVRGTPAWREAEDLLTSVPGVGDKLARTLIADLPELGQLDHKQIAALVGVAPINRDSGTRRGTRTTWGGRAKVRAVLYMAALVAAHHNPVLAGFYRRLLAAGKAKKLALTAVMRKLLTILNAILRDRRPWQNA

SEQ ID NO: 47607 - protein, 340 aa, unidentified
MGDKYARYAVLEDGNDFIEQDRLPMTKAAFGSRFGHWKPARMAIEAGTHARWVSELLRAMGHEVIVANPRELKALTQSAHKSDGEDARKLARYARADVGLLKPVQLRSEATQLELLKLQTRDALARSRAQLTTTVRGWTKAFGANIRQCTTQGFALRAEQELPEALRCTLQPVLDVIALLTELIKKADRQVEKMVAEHPVAARLDGVAGVGVVTAMAFVLTIEDPGRYRRSRDVGAGLGLTPRKDQSGDSDPQLGITKQGNGLLRRLLVQCAQQLLGPRGRDCAIRQWGLKLAGEGKNKRLKKRAVVAVARKLAVVMHRLWITGEQFVAFPQGQPAKVAA

SEQ ID NO: 47608 - protein, 359 aa, unidentified
MNSINQKYSTIKRLGIDLSKNTLQMHGEDEKSRKILERGFSRRSILSFTANLSPCTIAMEACGSSHYWGREFMKQGHTVQLLPAQYVKPFVKSHKNDRIDAEAICEASARPNKRLVPVKTIEQHDIQSLHRVRQNICKNRTALANQIRGLLGEYGIVIPEGIAHVFSEMPSVLEDAENHLSNLIREVLNEQFEELKHIDERFQAITKKIENVAASHPLCRRLMTLEGFGPLTATALYGAVGNGSQFKKGRHMSAWLGVVPKQYSTGGRSRLGRISKHGNCYIRSLMAGGSRAVVQYADKKEDRLSKWICQIKGKKGYNVAVIALVNKNMRVAWAVLTKGEEYDITHQEQQAKRYEKAAA

SEQ ID NO: 47609 - protein, 460 aa, unidentified
MKKSPKSKKDLAEFELLNPNAAGIDIGAEYHYVAVPKGRDLDGDDVKRFGTFTSDLYALLHWLKGCKIETVAMESTSVYWIPLFEILDSEGINVNLVNPQFIKNVPGRKTDVLDCQWIQQLHTYGLLRGSFRPEDQICILRGYLRQRTMLVSYASHHIQHMQKALEQMNIKLNQVVRDITGVTGMGIIRAIISGERNPEKLAQLRNPRCRNDAATIAKSLHGNYRDEHLFALKQAVELYDFYQQKIDACDRQIELHLATFDDRTDSSHLNKGKHSNRGKNKPRFDARSHLYRITGVDLTAVDGIDSLSALKLISEIGLDMNRWPTEKHFGSWLGISPGSKITGGKVISTKTKKCANRAAHTLRLAAYSLQRSNSAIGAFFRRKKAQKGPAKAITATAYKLARIIYNMLKNGTEYKDVGQDYYEQRYKDRLIENLKRRARQFGYELQYVKEQQTVTQMIQG

SEQ ID NO: 47610 - protein, 322 aa, unidentified
MRYIGIDVSKATFVVAYSSDKGGEIRTFNNTTTGIKQFIGALPKDGSIHGVMEATGNYSALLLYMLNVAGITVSMENPLKVKNFAKALLSTVKTDKSDARLITLYGEKMNPRPFKVQGEAILRLRQKRTVIRQLTKQITAMSNLRGSLACLPVPDKGATHTVDETIKFLEKKRDRLQSELTDLVEVEFSRQLALLTTIKGIGITLATALIITTGGFTYFQNAKQVSRYLGICPTYEQSGTSVNIKGHINRNGDAYTRGLLYIAAWPASRFNAQCKETYTRLRQNGKSGKLAMIAVANKLVRQAFAVVAHDKEYVDGFVSNRP

SEQ ID NO: 47611 - protein, 430 aa, unidentified
MKSNTQNAKIEAITEKTLVLGIDVGSETHYARAFDYRGIEYSKKPFKFSNTEAGFVTFKEWILDLKERHEKDKVVPGMEPTGHYWFNLGKFLQDNEMKPVLVNPHHVKKSKELDDNNPTKNDRKDPKVIAGLVREGRYMIPYLPDGVYADLRTASNIRFQLQVELTRIQNRISRWFNIYFPEYKTVYGKPDAKSGMLILKAAPLPEDILTLGIDGVDQIWRDAKLRAVGKARAKTLIEAAEHSVGSKEGAVSARMEIRMLLEDYESRNIRLQEVMTLIEGLVKQIPMAEKLLEIKGVGIKTVSGFLAEVGDISRFNTPKELQKLAGLALVESSSGKHKGETTISRRGRKRLRYLLFEVAMSLVAKNPEFRELHNYYTTRRLNPLKKMQSLMAIAAKLIRVFYAMLTKGVDYDPKKMVSDIKRPVVYLQAV

SEQ ID NO: 47612 - protein, 415 aa, unidentified
MVSATMYAAVDWADRWLDCAVIARDGTRLGFRRVIYKNTSDPVAEVQDLLRSCNRTRWRTIPIGTEDPDGLVFQAMEDAGLTVVGIEPMLAARTRKATTMGLTKSDRADAYLLADMLRTGGDRFRPVPRSSPEARAVRVLARAQVAAVKRRSRALHQLRAVLVTYYPAAVTAWPRLTLRHAQARAVLAAAPTPARAAALSRTELAGILRDAGRWRTVDDEAERLSLHFRRPALRTHPMVEAAKGVEMRAVLDTLDHACDAAVQLSEQVAEAFGAHADALVLQSFPGIGPLLGARILGEIGDEPGRFATARNLCAYAGVVPVVWASGLAQRTSHRRFANETLREAIWQAAFCSLTKSPGAAAFYRRRREGGESHNGALRNLAARLLRALHHCMATHRLYDETLAFRDIHPAESRAG

SEQ ID NO: 47613 - protein, 394 aa, unidentified
MKLIGIDIGKNKHFFCIMDQQTGEIISQPVSFSNDKEGFDFLVQKIKSYPKDSILIGMEDTGHYHFALLKYLLDLQYTVALINPKTTDFNRKMQGGITKNDKLDTINICDVLDTPERKKQYRITKVNSFDLYEQKQLTRHHHNLKEEENVYKNRLQKCIDIVFPEFNKLFNSKYSTVYMNILKMFGSAENIANTDIRTIRKCFEIEGRGNRISLTPERLKECARSSIGISSSAEVIQIKHLTAQIELIEEQLTEIDKKIEEFSIQNNSPILSIPGISHFSGTSILAELGDISNYSKPSQIIKFAGVAPLHYESSQFNAQHTSITKKGSKYLRKTLYQIILPVIRHNPVFNKYYQLKISQGKGHRCAQGHCVRKLLRIIYHLLKTNQQFDPQLLR

SEQ ID NO: 47614 - protein, 422 aa, unidentified
MLEETEEREEIIERVAALDVGKAEVMCCVRVPGQGPSGRRVQEVKAYPTMTRSLLALADRLSQLGVTRVVMEATSDYWKPPFYVLEAAGFQTWLVNAKDVKHLPGRPKTDKLDAVWLCKVAERQMLRPSFVPPPHIRELRDLTRYRSDQVAVRTAEKQRVEKLLEDAQIKLSVVVSDIFGVSGRDMMAALIGGQRDPWVLAEFARGRMRAKITTLREAFTGRFNDHHGFLLAKMLARVDQVNADIADVEARIEEHIAPFAQAVARLDEIPGIGVTAASVIIAEIGVDMDRFPTPAHLASWAGFAPGVKESAGRKKGSGATGHGNRYLASVLGEAAINAGKTDTFLGERYRRIGRRRGKKKAIVAVGRSILTVIWHLLSEDDVRFHDLGSDFYDNRISPDRKKRNHIRQLESLGYKVTLEPAA

SEQ ID NO: 47615 - protein, 413 aa, unidentified
MEVVYPACAGLDLGKRFLVACALFPDERGQRQKEIKTFDTDTEDLRRLGEWLQERGVTAVAMESTGPYWKPVFNLLEERFECILVNPQHIKALPGRKTDVKDSEWIADLLRHGLLPRSFVPDREQRELRELVRLRQKKMQLLAAEANRLQKVLEGANIKLGSVASNVLGVSGREMLRALAEGEKTPDEMAALARGRLREKIPQLRRALDGVMADHQRQMILWALDDIEHIERRVQELDKEIAERTRPHEAVTERLMTVPGIGRRVAEVILAEVGPDAKAFDTPEQLASWAGLCPGNKSSAGKRLSGRIRPGNQSLKSSLVQASHAVSHSKNTYLGAQFRRFVRTKGVKRAAVAVAHTILVIVWHLLTTGDVYNDLGVNYLERADSSWAERQAVRRLERLGYTVSLTPKAGPAA

SEQ ID NO: 47616 - protein, 354 aa, unidentified
MKRVKKELQPGDKVFVGIDMHKLKWHVTVRTADFELFSGSIPGKWEALQRILDRYKGHQIYTVYEAGYFGFWLHDNLVEHGAECVVTPPSLIPQEYGNRVKTDRRDSRKLAHFLAKGMLKRVWVPTEKERYHRQVIRRRRQLIGDRIRTQSRIKAELRLHGIDLPEPQGKWTKIYLGNLGRIRFNNRWMQESFKHLLELYCFLDKQIIKQTDLLRKLSETKLYQERVKILTTTPGIGMIAAMELLLELQDVKRFQRADQLAAYVGLTPSQYSSADKIRMGRITCVGKNSLRATLVQASWALIRKDGVMREKYDRLKSRSGGKRAIVAVARTLLIRMRRMLLDNNPYVVGLVATN

SEQ ID NO: 47617 - protein, 456 aa, unidentified
MTTSKNSEMNLPTIHTNAAGIDIGANKHWVSVPPSRAPESVRSFGCFTADLYALSTWLKQCQIETVAMESTGVYWIPLFQILEAQGFEVNLVNAHHVKTVPGRKSDVLDCQWLQQLHTYGLLSSSFRPEAQICVLRSYMRQRDNLIKSASTHVLRMQKALTEMNVQLHRVISDITGTTGLRILRAIVAGERNPQVLAAMKDRRIKASNDDIAAALTGDYRTEQLFVLKQELQLYEVYQQQIAACDVELERHLNDFTAQVDPNIEPPPKPKRRGKKQPGNAPDFDLRTHLYRITGVDLTQIAGLGALSVLVILSEIGLDASQFPTVKHFVSWLGLCPGSRITGGKIKSSKTRRVVNRAANAFRMAAQTLSRSQSALGAFYRRMKARLGGPKAITATAHKIARIFYHVWSKGDAYVDPGVDAYEQKYRERMLSQLQRKAQALGFDLVPKPNDTAECVS

SEQ ID NO: 47618 - protein, 343 aa, unidentified
MQTITTVGLDIAKSVFQVHGVDAAGQVVVRRQLKRRYVLAFFQKLPPCLVGIEACASAHHWARELQVLGHTAKLMPPAYVKPYVKRHKNDAVDAEAICEAVTRANMRFVATKTPEQQSCLTLHRTRHLLMRQQTSVINAIRSHLAEFGIVVPVGRNGVEQLLGVVADPNDKRLPELARACVAALGAQLRVLKLQILEFDRMITAWHRSSEASKRLDQVPGVGPLLATALVASVAEPKAFRSGRDFSAWIGLVPKQNSSGGKERLGNISKRGDRYLRSLFTTGALAVIRYAKIHGTKHRPWLTALLARRPTKVAAIALANKLARMAWAMMARGERYKEPAALAA

SEQ ID NO: 47619 - protein, 429 aa, unidentified
MNCTQNKKIEQVKETTMIVGIDVGSEKHYFRAFNWRGIELTRKPVAFSNSMEGFNSFYNTIVELMQKSELEEALVGIEPTGHYWFDLGQFMGEKDIKFVMVNPHHVHKTKELDDNSPSKNDRKDPRVIAGLVRDGRYFYSYMPTGAYAELRNASNRRFVLVEEQTRAKNRLQKWIAVYFPEYKGIYTHIDAKGGLLVLKQAPTPEEIVRLGVEGIIKIWKDAKLRGNGHKKAMLILAAAMRSIGLKAGLTEARMEIQDLIEDYELQTKRLERVNDLIKGLCQQVRYADKLLEIKGIGITTVAGFIAEVGDITRFDSTKELQKLAGLELVADSSGKHNGKTKISKRGRKRLRYLLFEAAISVVGKNEEFKEIHRYYTTREKNPLKKMQSLIVVACKLIRVFHAILTKGIRYDASKMLKDIRHQGEQLKAA

SEQ ID NO: 47620 - protein, 409 aa, unidentified
MKLYVGIDVSSRDLATCIMDHEGNTCARFKVDNHLLGATFLRDQILLWANKRKPTEILIGMEATSVYSWHPAMFFHQQEALQAWNVKVFTINPKLIRKFKEAYVDLEKTDDIDAWIIADRLRFGRLKMTAVLKEQFLALQRLTRMRYHLVHQLTREKQYFLQHLFYKCSSFTQEVDSSIFGHAILELLLESWSLDDICQMDVKQLADFLRQKGRNRFADPECIAKSIQKAARSSYRLSKCVEDSIDLLLGLSIQSIRSLQSQLKELDKAITRHLEGIPNTLQTIPGIGPVYTAGILAEIGQIERFHNQAALAKYAGLTWSKHQSGRFQAEDTSLIRSGNRYLRYYLVEAANSVQRHDATFRAYYRKKYEEVPKHQHKRALVLTARKLVRVIDALLRNGQIYMPRKGEDR

SEQ ID NO: 47621 - protein, 350 aa, unidentified
MIIIGCDFHTRFQQIAMLEVTTGELIEHRLEHENGEARKFYAGLATPARVGMEATGYAQWFERMLAEQGHQLWVGDAAEIRAAMVRKQKTDSRDACHILDLLLKDKFPRIWIPSTEERDVRQLLRHRYKLVCLRTSLKNQLHAMAMGQGICRKKKLWTAVGRKELQGLSLGPWASRRRQHLLGMLDQLEPVLEELDRAVIQEVERRPAAMRLMTQPGVGPVTALAYVLTIGPVSRFQRSKQVVSYLGFNPSEESSGGRQRLGSISKQGNSMLRFLLVEAAQTASIYDPELRRDYRRLKFRRGSGVAKVAIARKLAVRLYWKLREQPSSVPPAPLQGSPAVSVVGESLSSS

SEQ ID NO: 47622 - protein, 424 aa, unidentified
MSKKKSSVAGLEALYARVCGLDVHKKVIVACVRILDAKDGTVQSTLRQFGAMTADLKELRQWLAEHKVTHVAMESTGIYWQPVFNLLEGHFKTWVVNAQHIKKVPGRKTDVKDAEWIAQLLQCGLLRPSFVPERQQRELRDLTRQQTKLVQQRNSVDNRIQKVLETANIKLGSVASDVMGVSGRKMIEALIGGEKDVTVLAELAQRKLRGKIPELQRALEGELTEHHRFLLSRLLGQYDFLEKEITGVSERLGAVAPPSFRAAVEQLDAIAGVGERGGRALLAETGIDMSRFPSHKHLASWAGQCPGNHESAGKRRSGKTPPANRHIDAVLTEMAHAAVRTKNSYFKAQYHHLAGRRGKKRAIGAVKHSLLVTVYFMLRDNKPYKDLGVDYFDKLNPQQRIRYHVRKLQQLGQEVELSPMAVAA

SEQ ID NO: 47623 - protein, 371 aa, unidentified
MKSILSVGMDVHKNSFSLCAYDGYTGEIVSESTFASDVKLVIKFIEALKSRYENDVEIKCGYEAGCLGYSLYKLLTARGVDCVILAPTTMQVSAKNKMVKNDRMDALNIAKNLASGSYKTVYIPDEEDVEIKEYIRMIHDFKKELQRVKQEICAFVLRHGYQYDGKSKWTIRYMNWIRELEMSEIQRETLNEYIAEMENLNDKIDRFMNRINEIYQSERYHEKVSKLRCFKGIETFAAMTIQVETADFERFPNAKAYASYTGLTTGEHSSGDKNNRIGITKQGNTVIRKTLVECAQALAKGNVYAKKSQRLKSRQKGMDVNIIVYADKATERLKKKYQKLIERNVPRNKAIVAIARELACFIWGMETGNIH

SEQ ID NO: 47624 - protein, 408 aa, unidentified
MSQVIIGMDPHKRSATIEVMTSDETVVGGGRYGTDADGFRAMLAEAKRWRERTWAIEGCQGIGRHIANRLLAAGEHVVDVPPKLSARTRVFATGQGRKTDATDAHSVALAATRMTGLRQVVDDQQLAVLRILADRRRSLGEDHTRMVSQLHQLLLELMPGGAKKDLSAAQAKALLARVRPRDAAGKARRRVAAELISDLERIYQRKKEANKELNALLAVTGTTLTDLHGIGPSGAARLLVEVGEVTRFPNKAHFASWDGTAPMDASSGDQVRHRLSRAGNRQINRVLHIMAVVQLRNPTEGRAYYDRKVAAGKTPREAMRALKRPLSDIVYHQMITDTRRAATGPGGHLGAATGSSAAGSHPTAGTSEKSLPGPATCDPTPARPAHSPGRSRQPSSVPDRSRRQAHFA

SEQ ID NO: 47625 - protein, 359 aa, unidentified
MKIVGCDFHPRWQQVAVFDVETGEIAEHRLLNGDGEAEQFYRALEAPSLIGIEACGNSQWFVDLLERLGHQVWVGDAAQIRASYVRKQKTDRRDAGHILKLLMENRFPKLWVPTAEQRDLRQLLIHRHKLVEIRTRVKNGLQHLALNRGLQKQSRLWSVRGRACLEKLPLQGWTARRREDLLKLLTELDQQLGELDEAVSRAAEEHPQARLLMTQPGVGPITSLAFVLTIGEVSRFRHSNQVASYVGLIPREHSSGGKQRLGAITKQGNQFMRQLLVEAVQNTCRLDEGFRKQYQARCHHKPKGVAKVAAARKLAVRLYWMLKQNVGYPEIALIESSPRVPLAGTEKAEGLVGRSRIQQ

SEQ ID NO: 47626 - protein, 457 aa, unidentified
MKRQTKAVAEPTLPILNVNAAGLDIGSAEIWVAVPADRDPQPVRPFGTFTPDLHALAEWLKACRVETVVMESTGVYWIPIYEILDAQGFQVAVVNARHVKNVPGRKTDEKDCQWLQRLHTYGLLSASFRPDAEVVALRAYLRHRASLLEHRAAHIQHMQKALQQMNVQLTQVLSDITGETGLAIIRKIVGGDRDPVTLAQLRDPRCQHSEDEIAKALTGNYRPEHVFTLKQALALYDFYTQQVRECDSEIEKQFSVMKPRHDQNDLPALDLSDKRDSHSKNAPSYDARTLLYQLVGVDLVAISGLNESTVQSILSEIGTDMSKWPTVKHFCAWLGLAPHHDISGGKVLRSRVLKTHNRAGQAFRLAAQSASRSPRTSYGAFYRRVCGRLGPAQAIVATAHKIARAFYHMLKHRVAFRDLSAEEYEQRSRDREIANLRKKAARLGMSLIEQPTQPATA

SEQ ID NO: 47627 - protein, 330 aa, unidentified
MGQPDTAFVGIDVSKATLDACLLLPGGRARAATFPNDPAGHAALIAWADRHAGGAALHFCLEATGPYSEQPATALAEAGRLVSVANPARVKAHAAASGQGNKTDPADARAVAQFARDRRPPAWQPPTPEVRELQGLVRRRDDLREMAAREKGRLDSPALTRAARKSVERAVKFLGREADRVQAQADALIAASPALRADRDLLASIPGVGPQTASTVLAELPPVGRLPSAQSAAAAAGLAPREFRSGVSVRKRTRLSKAGNARLRKALYLPTLTAVRFNPVLKRFFERLVAAGKPKMAAVGACMRKLVMLCYGVLKNRAPFDPAWASKKAP

SEQ ID NO: 47628 - protein, 327 aa, unidentified
MMQSIHVGIDISKATFNAAYKLHKGGKACWTDSEFSNDAKGFKALVAWAGPDACFTMEATGLYHVNAAMYLHGKGRTVHVSNPLQIKRFSQMQFRRAKTDKADARVIAEFSEVNAERLGNWNPPAENLAKARSLLSALRLLRVHGVAKLRSIQALRLTPAGHEVATTLEAALQAERTVILGMEKELVDLVRASHAEEFDMAQTIGAIGPKTAAAVILATDGLKNFDSSRQLSAYFGMSPRQYQSGTSVHGKGHICKMGNPYIRSLLYICAVSSLRHNKPCKDFYDSLLARGKPKKVALVAVANKLLRILFAVMKNRQPWNPEVATTH

SEQ ID NO: 47629 - protein, 347 aa, unidentified
MSGAYEGRQFVGMDLHRRRSVLVRMTETGERLETVRISNDPEYLRAVMARAGEAPEVVLEATYGWYWAADTLAELGAHVHLAHPLGVKMFSYRRVKNDERDAADLADLLRMGRLPEAWIAPPATRELRELVRHRAKLVGLRSNLKCQIHGVLAGAGVHVPVSDLFGVDGHTLLAQVELAPAARARVNSALRLIETLDFEVELFAKLTAGRLRTHEGYQAIQRIPGVGPVLAAVFVAEIGDITRFDRPARLASWAGLTPKHHESDTTVHRGRITKQGSRLVRWAAVEAVQRVGAHTALGQVREQVGARRGRNIGVVAAARQLTELVFYGLRDGQIRRLAPLSPCTPAA

SEQ ID NO: 47630 - protein, 371 aa, unidentified
MNSIHYVGMDVHKEKYTLCCYSFEKDELQYKQTIAPDYKMILKYLEQLRTRHTDGIEFVCGYEAGCLGYSLYHQLTDHGVKCVILAPTTMGITNTGHIKTDKRDAGNIARCLAFHSYSEVFVPTHQDNEVKEYIRMRDDQKKALKIIKQQILALVLRHGYRFTEGRNYWTGKHVKWMKSLELGGVLQESLDEYLITYEYLTDKIERMDKRIAELAEEERYKGNVKKLSCFIGVKTHTALSALVEIGDFKRFAKAEQMAAYLGLVPGEDSSGGKHKREPITKAGNSHVRRLLVESAQSYTRGAVGHKSVDLRRRQTGNEPQIISYADKANERLRRKFYRMTLQNGANRNVAATAIARELACFMWGMMTDNVA

SEQ ID NO: 47631 - protein, 405 aa, unidentified
MERIIERCCGLDVHKKTVAACVRVRGVEHVRTFGTTTTELLTLRDWLLAHGVTHVAMESTGVYWKPIFYVLEDAFTCVLANAAQVAQVPGRKTDVKDCMWIAQLLEHGLIRGSFVPPAPIRELRDLTRYRRALIEERTREANRLHKVLEDAGIKLASVASDVLGVSGRTMLAALVDGTTDPGVLADLARGVLRKKLPALREALRGRFRAHHGFLVAQILAHLDYLDEVITTVSHEVERVMAPFAAELARLDTIPGINQRTAEVIIAEIGVDMSVFPSAGHLASWAGLCPGNNESAGKHKPARTRKGNRWLRTALTEAALAGAVRTAKGALAARYRRVMRHRGPKKAVGAVAHAMLVTVYHMLVRQTTYHDPGAEYYERRHADRVRRRAIQTLERQGYRVTLEPAA

SEQ ID NO: 47632 - protein, 353 aa, unidentified
MPVYVAVDFHAREQTISWCDTADGEVQRTKLRHQHDDVRQFYEPFRGEVIVAFEASGYSAWFEQMLAELGHTVWLGNAAEIRRKAPRKQKNDRRDADLMLELLLKGDFPRVHSFSPESRTVLRQLRYRHKLVKVRTIAKNSVHAIGINAGLPLRSRLLTQTGLEQLEALPLSPVLSQQRDEWLALIRLMNEQIGAVEESLAQRAQDDAAVKLLRTHPGIGLLTALALRYTLDPISRFPSTRCVVGYAGLDCVETQSSERRRMGSISKQGSRLLRFLLNEAGQTAARKDPQLKQFYRRLLRRRDKPKAKVAVARKLLVRSFIMLRDQIDYAEFVRRGVAARVARETHSPKVTDL

SEQ ID NO: 47633 - protein, 315 aa, unidentified
MSDKIFLGVDVSAEWIDIAFHGRGSVERIANEAESIGAWLARLKADEVGLVAFEPTGGYERSLRRELVLARLAFARVHPNELAAFRGRRGVKAKTDPIDARLLADFAALELSGRGLAPLVEGDEALREMSARRRQLVDLLHAERCRADRAESRVVREGLDEVIATLNVALRRLEQAIEAHIAAEPVLATTASHLRSLTGIGPVTVHTLMGELPELGRLSGKEIAALVGLAPRTNKSGKLTRRATIGHGRPGVRRVLFNAARSAIRWNPVMRDFYATLVHTNRRPGKVALTAVMRKMLVTLNAIAREQQPWRSAKA

SEQ ID NO: 47634 - protein, 543 aa, unidentified
MTQMRYRTNECVLGAPAPQAARCRAANRWHNEGRGGLRPFSHWCVRTRLGAWPARYRRGVVEGTAQAVTSYERVNPFATVLPPRTLSHTMEEILMARKSKKQRLKIVHPSCAGIDIGSREHWVAVDPDCCEEPVRCFSAFTDSLYALADWLQSLGVEIVAMEATGVYWIPLFEILQARGIEVVLCNARDVKHVPGRKTDVNDAQWLQQLHQFGLLRGSFHPPEEIAGLRAYMRQRERLLDYAGSHIQHMQKALMQMNLQLHHVVSDITGKTGMRILRAILDGERDPLVLAELRDVRCKASVETIAKALKGNYRPEHLFALEQSVRLYDTYQKQVLECDGRIESTLRRLSSPTPPAEPLPAPRHRTKQPNALNFDVRTALYAMIGVDLTQIHGLGPYLSLKLISECGTDLSRWPSAKHFTSWLCLAPGNQISGGKVLSSHTRRSKNRVSALLRLAAVNVGKTDSALGAFYRRLSARIGKSKAVTATARKLAILFYNTLRYGTDYSDPGASYYEQQHRARVVHHLERRAKQLGYTLEPTSEAGVS

SEQ ID NO: 47635 - protein, 348 aa, unidentified
MYLKEDIILAVDYHDENLVIRQFNCHTGQERLLKYRTTSKNIRKVICDSASEVAQVGGRVFWIMESTTGWARVKKAIGPLATMLVANVLQMPLPPKAYRRKTDKIDTGRILREFLNGSLPVAFQPSVELRQIRRLVATRESLVSRRTALRNWINRYLAHETWRSRAGLWSAKGMRSLKRFAASVEGPDKVVLSVKFKELEHLEELQTIVETELLAIYKQWPQAQWIDEIPGIAEISAVSILARIGPVERFDSPEELISFAGLAPGIQQSDGSKREGRIGGGGTDKHLRHYLIEATFWARRVPRYFKTYERMLDKRGPKIARVVVARMMLRSIHKMLQAQVRFNRLRVA

SEQ ID NO: 47636 - protein, 345 aa, unidentified
MHYCGLDVSTKSTHVSIEDDRGRRVARAVVPTTPEGIERALARYVERGLRVAIEAGGQTAWIHDVLMEVGVKQVHVVHPLKVKWIAESKKKTDRVDAELLAHLLRIGGLPEPVHMPSARSRELRGLLQARRQLVQMRTKLINVVRGLLRQQRVTLKARALQSARGWQRLQTLSLSAGVREIVTAYEATVQTVTQALGALERQLQARAGRDGRVRRLESIPGVGPVTAQTLVATVDRIERFARAKKLVAYAGLAPSVRASGERVEHGRITKQGRSELRAVLVQAAHAVLAVKDGAAAPLQRWHARVARRRGKKTALVALARKLLTIAFHLLREGTTYDPGRVRCAA

SEQ ID NO: 47637 - protein, 354 aa, unidentified
MKRTTKYVALDVHQATTSASVREEGGRVIARTILPTAAPALLEFFQGMRGAIHVAFEEGTQAQWLHDVLAPLVDRVIVADRRGTAQQGNKGDQTDADQLSELLRRGALRAVYHSSSHRETIRELARAYTNLVEDSTRVMLRLKALFRARGIRTPGKHVYHPSHRAEWLARLSGQGVHFRATALYAELEVLRELRPKAKAALLTEARRDPAWHVLRTIPFLGPVRVALLLATMQTPWRFRTKRNLWAYSGLAVVSRSSADYLLVQGRPVRRGRAPMTRGLNRNHNRVLKNVFKSAATAATARPGALQAFYRGMVARGMREDLARVTLTRKLAALTLRLWKTGDHYDPAQLTVQAQ

SEQ ID NO: 47638 - protein, 490 aa, unidentified
MKPRVYVGIDLGGKFHQVQVTSASGERLGKSFRIGRGQAGLTELEDGLSRVAGMEREAVYTIEATQNYWLELVHPLQRAGASVYLVSPAKSSALRTFYRRHTKNDAIDAEALSRLPVVDPDLRTATATAPKWDMLKRLVRQSWQLKGQMANRKRRIMTRVLTIYPGYEEVFRDRYCGASLLFCRRYLDPAKARHLGRKRLSVLLRKRAWGKFDESRAERLWHVIENAPELSLSYEDHQFLVNQDLDLLEAEERSQQALRERIAELYSELDPETRLSSMPGLGDFLAAAITAYIGEPGRFQNANEVVAISGLCPRLKSSAGSDTANQPLTQHGDPVLRGCAYVAAEIARHYDPELRAFHRRLTARGKHYKQASCALAAKILRRCFALLRERRPYEVAHHEQMTRRQNEEGKTVRESVHEVAERLNDMSGPSSPERADYAAAIPPASKNAFLGGCERKSASKDDRTAPISVDHDFRSMARGQVTGESKKCVT

SEQ ID NO: 47639 - protein, 263 aa, unidentified
MSNTIRIGMDTSKSEFQLHGVDSQEKPVLKKKLRRAKVLGFFAKLEPTKVGIEACGASHYWARELVAIGHEVVLLPPQYVKPYVKRGKNDAADAEAICEAMSRPTMRFVPVKSQEQQAAQMLIGLRDGLVRRRTQLSNMIRGYGAEFGLTAAKGLVRVEPLLARIAQDEGLPALAKELFDTLGQEYARLQAQLRKIEAKLMAWHRHNEMSRRLAQVPSIGPVIATAMAIKVPDPKAFRSGRDLAAWIGLTPKDHSTAGRTAKG

SEQ ID NO: 47640 - protein, 412 aa, unidentified
MEVIYHSVGGLDVHKKMVMACRRRLVDEAHAELEIKPFKTTTAGLRELTDWLAQWEVTQVAMESTGIYWVPIWNILQDRFKLILVNAHELKKVPGRKDDVLDAEWIAQCMQCGLLRASFVPSVEIRQWRHLTRQRAKLTDHHTAVVNRLHGLLHQANIKLSDVASNIVGVTCRKILSAMSTGVSDPQTLAALGTERLKAKPEDLRESLDGRVEDHDRWLLTRLIRQLEMLEKEIAIYDERIKVRMKQYEHQIELLDTITGVGRRVAENLLAEIGPDMSQFPSDDNLVSWAALCPGRNESAGKKRSSRTGHGNKWVRRTLVEAAWAAVRSKNTYLAALYKRLAPRRGKNRAIIAVARTILQSAWHILSEDVEYKEFGANHFDRLNRDKTRNYFVKGLQRLGYKVELKENWTAA

SEQ ID NO: 47641 - protein, 401 aa, unidentified
MKEFNAEAVRIETASALEAVRPAQAGRKYPAYIGLDVHKETIAVAVARVGRAAPESRGEIANKPKTVANLVERLNQEFDGEVLLFCYEAGPCGYGLYRQLLALGHDCQVVAPSLIPKKPGERIKTDRRDACKLAGTLRSADLTAVWVPDEEQEAMRDLTRARDDMKGQERKARQQLNAYVLRHGHAWPSNKTRWTQTHYNWLESLKFAHDWQQVVLQEYIDAVKAASQRVADITAQMERVLPQWSLAPVVDSLVALRGIDKLAAMVLLAELGDISRFDSPKQLMAFLGLVPSEHTSGGRRRQGAITKTGNSHARRMLVESAWSYRFPARQTAHLKRKAANASDEAKVIAWRAQKRLCGRYRTLLQAGKNTKQTTVAIARELTGFIWDIVCHEMPKVQQTTR

SEQ ID NO: 47642 - protein, 339 aa, unidentified
MNNSVIGLDIAKHIFHLFSLGADGKSIKKKLKRSELLAFFANYPVSLIGIEACGGAHHWARELIKLGHEVILLNARYVKSFVVGNKNDFNDAAAIYDAVTRPNKRVVAIKTIAQQDIQLVHSMRKELVDKRTALVNQTRGLLSERGIVINQGIAQVRQQLPLILEDAENGLTTLGREMFAEQYEKIKALDKEIKAQDQRINRLCKANELSKRFLDVPGVGPVTATIIAANIGDNGKGYESSRDYAASLGVVPRQHSSGDKQVYLGISKRGNRYIRTMLIHGARSVLKNCSKKTDKLSLWLQELIKRRGFNKAAVALANKNARILWAMANKNKGYEALTA

SEQ ID NO: 47643 - protein, 319 aa, unidentified
MAQDGRIVGIDVSKAKIDAFIRSLEIGISQPSTPAGEKNLIAWLRENEVQAAVMEASGGYEKRWVVVLRAAGMSVRIVDPKRVRHFAKSAGRLAKNDPIDAAMIAWFAETFSDGVGLPHEPDREELDRLVTARVSLLKIQTQIENQGEHKQPPLVVKAHRALLRTLCRQLAKFEAAIAARLEASSEIARRTEIIVSVPGYAEQAAAGLIAWLPELGHISDKQAAALVGTAPYDDDSGEHKGKRIIKGGRRKLRNLLYMPTMGAATQHNPVLKAYYRRLLAKGKPPKVAVVACMRKMIVILNTMLARNQTWNPPAVPCPS

SEQ ID NO: 47644 - protein, 400 aa, unidentified
MLSIGIDVSKGKSTVCGMKPGGEIVYAPFEVQHTREGMSELVSLLRSSGEEVRAVLESTGSYHCPVVAALLENGIFVSVVNSLRMKRFCSQSIRKVKTDRIDAMQIALYGLAYWQELQPTKLPEDTYRELQLLARQYYQMTSILIKAKVDFNAICDQVLPGMQELMNDHAGRHKLSEFVLRYRHTTHILEMGETRFRKDYCKWAEKKGYRNCERMAVLIFATAQNGIPVLPNAPSTQIVITEAIRVLHTVEASRDAILTQMQALAKTLPEYSLVREMPCIGDTLAPRLIAEIGDVRRFHSKRALIAYAGIDAPPYQSGKFRANNRHISKRGNRYLRKTGYEVMQSYVMHKPANDPIFTFIEKKRGEGKSGKLAMVAGLNKFLRVYYGKVTELYRSLPAIE

SEQ ID NO: 47645 - protein, 405 aa, unidentified
MNMLQKNESNVNKFVAIDLHRKNFFATIFNTETEKSSSFKIPFNRESVKNFASTFDKKTNVVIESTQGASLLYDFFSKFANKVIVANPSKLRVIFDSYKKSDKNDTENLLELLIADKVPEVYIMPKEHREIWKLIKIRNSLTKTKTVLKNIIHSIIGSEGYNSPYSDLFGKKGKNFLLSLPLSVNESWMIQELLPEIERIEEKIKKIDERITAFALDKKEIQLLMTIPGINIYGATAIFIKIGDISRFPTAEKLAAYFGVVPSTQSSDKKTRHGRITKAGCDIVRTILVNAGFYGVKGSKVIKNFYNGIAIRRGNNIARVAVARKLAKIIWAMLTRGKTFNEVNEESFKRKIKRFMHAYISGVIPTGNLLLQEMLISNGYSIKDYKKEMEKEIFETILSKSEEKT

SEQ ID NO: 47646 - protein, 361 aa, unidentified
MRIIGCDLHARQQTLAMLDTVSGEVVSHTLMHEGNEVREFYSELPRPVLVGIEAIGPMQWFLNLLEELGIECQVGDAAKIRAAEPRKQKHDRRDAELILKLLVEKRFPAIWMPSRELLDLRALLLHRHQWVRLRTQVQNALQAIALANGLRRGPSLWSYDGLAKIAFLPLPPHTSLRRSALQALYRHMDEEIEKLTVQVAEQAEQRPGVQLLMTHPGVGPVTALATDVFLGDPQRFDDGKSLASYVGLIPQERSSGRRRRLGKISKQGNPLLRFLWNEAGAHAARRDPQLKRFYRRKLVQKGMGKARVAVARKLGIRLWIMLRDQIDYQEFCRRGQKQQSGAACAGIPEVRFGAHRHRPVD

SEQ ID NO: 47647 - protein, 371 aa, unidentified
MESIIYVGMDVHKDTYSLCSFNADRNLLFSQTQMKSTTGNVVRYLKKVSEMNNDALTLCGYEAGPTGFGLCRELQKLGFACVIIAPSSIAKTAKDKAVKTDRSDAQLLAKTLAFHSFKEVVLPSENIEAIKDIIRLRSSANKTCKRAKQNLLSFLLSHGFSYSDGKYWTVKFTSWLKTIHFASEYLTFCFEEYLSEVTRQIQRLSLLDKKLKELEDDKEISDGVKKLKCICGIDTVTAVSLVAETGDFNRFSAARHFANYTGLCPGRHSSGLSNKGTGITKQGNNYLRRLLIEAAKSVKRSASHGHKSKRILARQEGASSEVINYADKAAARIRMKMYHLERRGLHCNKAATAGARELACFAWGMMTGHIA

SEQ ID NO: 47648 - protein, 356 aa, unidentified
MNKISKLDFKDQQIYVGMNIHKKSWSISILTDQLERKTFTQPPNVEVLVNYLKRNFPGGSYKSVYEAGYCGFWIHDRLQEHGVQCLVVNPADVPTKDKERRRKTDRVDCRKLAKNLRNGEIKGIYVPCRPKVEDRSLIRTRHGVVKKQTRCKNQIKSILQFYGIQIPEELANSHWSKRFITWIETNRMQRTSGNFALKVYLEELNNMRKIIADLTRGIRSLANSEEYRQNVRILKSVPGISTLTAMTLLTELHEINRFKNLDKLCSYVGLIPDTDSSGETERDTGIIKRRNAHLRGILIESSWIAVRKDPALMMSFNALCRRMPKTNAIVRIAGKLLARIRYALKKQGVYVLAVVP

SEQ ID NO: 47649 - protein, 447 aa, unidentified
MDLIDQPVDADPGEEEILDRVAAIDVAKDSGMVCVRVPHQTQPGKRDTSVWSVPARTNSIIALANQLAEQGIQRVVLESTSDYWRPFYYLLDARGLTVWLVNARDVKHVPGRPKTDKLDAVWLAKLNERGMLRASFIPPVEIRQLRDYTRLRFDLTRDRSRQVQRLEKLLEDALIKISSVATEMMGVSGRAMIEALIAGERDPRVLAELAKGRLRLKHAALIEALTGRFDDHHAELAALLLEQIDGLSAQIEHLDARIEQLIADIPAAQAPRPGSGQDSDAAHVPLDAVDRLDEVTGIGPHAAQVIIAEVGLAMAVFPTDAHLVSWSKIAPRTVQSGAKSHPGKTGKGNPYLKSVLGEAAASAARTNTFLGARYRRLARRIGKQKAQVAVARSILVIVWHLLADPTSRYCDLGPDFFDTRIRPERRKQNHIHQLEALGYKVTLEPAA

SEQ ID NO: 47650 - protein, 420 aa, unidentified
MKVVYQTCCGVDVHKSFLVATIIKTTSGVEPSYQKKRFSTFNNSILQFKEWLVKNQCRDVCMESTGKYWVPVFNLLEDEINITIANPKWVKAVKGNKDDTKDSKWIGDLFRLGLVPGSYIPCKPIRILREFTRNRYKLTSCRTSEKNRYQNALTVCNVALDSVVFDIFGKSATSVIDYLIEQPDNSINHEEIASRLLRSLKKKSDSVIESIEGYQMTDAQKYRMRLIRAHLDYITSTINDIDTMLNSLIAPYENAVQLLCTIPGVDRNSAITVISEIGTDMTPFSNSKRLCCWAGLTPDNNESAGKKKSVRITRAGVYLKPALVQVAHAAVKSDKSPYYKQKYERIMKRRGKKRAIIAIARMILTAIYQMLSTGEAWNPTDLFKIDMPEPMKEKQKEKAIKQAMKLLIREGKISESQLAS

SEQ ID NO: 47651 - protein, 305 aa, unidentified
MYYSGIDLHSDNCYITTIDDTGAVIKRQRVENDNKHVLDYFNSLLGSHQAVVESTTGWYWLNDLLQDNGIELVLAHAKYLKAISYAKVKTDKVDSQTLAILLRQELIPRAHKISRDLCGLRDTMRIRLRLVQQRSACLLRLNSIQMKFNGSVPDPYRFQLAVLEHTKDTFTSQILALEKSLHPVLIPNDDIQRLLNIPGIGKLSAFIIYLEIDGIERFASDKHFVSYCRLVPAADNSNRSVHHRSSKDGNKYLKIAFSDAAVHAIQYYPEYKRFYQKLARRSNEATARTVVAKCRFTASRSLYFY

SEQ ID NO: 47652 - protein, 413 aa, unidentified
MEQLIQRCAGIDVGQAESVVCVRVPDAVTGAPAELIASYGTTTPDLLELVDWLRGLGVTHVAMESTGVFWKPIYYLLEDDFTVLLVNAAHIKHVPGRKTDTIDSAWIAQLLAHGLLTASFVPPPPVRELRDLTRYRKALVNEKTAQVNRIHKVLQDSGIKLTTYASDVMGVSGRAMMRALIAGQSDSTVLAELAKGRMRTKIPDLRKALTGRFREHHGFLLKRMLDHVEAQEAEIAALDERIEAAIAPFVAQVELLSTIPGVDRRSAQVILAEIGPDMSVFPTAGHLASWAGMCPGQRDSAGKHGSGKTRKGSKWLRAALVQSARGASRSKSTYLSERYRQIMRRRGDAKAIVAVGHEILLAAYRVLVTAQPYTDPGPTTFSRLTTQRLTRQAVRRLQDLGYQVTIAPRTDAA

SEQ ID NO: 47653 - protein, 348 aa, unidentified
MKILALDLGKSKSAVCILETASMQERYTTIPTKPFALVNLLERERPEMVVLEVGTLAGWVHDVVAAQGCRVAVANPNHDGWRWRNVKRKSDRLDALKLARLSAAGQLPTVHMPAGSVREHRALIQYRGQLVGRRTRIKNTIRSLVARQGRGMASGAAGWTQKELAVLRGWSKPWEEVTAEDLWRGQLHEELQALEQIEQQLRRAEDKLDALGRGDERIVRLQTIPCVGPRTAEMLVAVLDDPHRFKSLKEVGSYVGLTPRQIQSGQMDRSGGISKQGHRQLRRMLVEVSWLALRYNPYLRSIFLRVCRGSPSRRKIAIVAVARKLLIIAWAMLRDGTAWRPRAISNVA

SEQ ID NO: 47654 - protein, 296 aa, unidentified
MAQNDQVVAGVDVAKDKVDACVRTLASRPIFPSSTQGRRQLVAWLRKYKVTKVVMEASGGYEREWAKTLRQEGIEVRIVDPKRVRSFALSAGRLAKNDAIDAKMIAWFGETFSEGPGQAYDADREELQALVKGRLGLIDLRTRLEAQGEHAAPGVVQKAHARILKDLNTEIGKLEAAISAKVKSTPDLVERTEIIESVPGLGRTSATNLAAGMPELGRVSEKVAAALIGAAPYDDDSGKRRGERHVKAGRRWVRNAIYTPCVGAATLNNPVLKAYYRRLIAKARRRRLPSWPACAS

SEQ ID NO: 47655 - protein, 429 aa, unidentified
MTSKSCTTSPVVRVAIDVATLTHQVLLELPSGTRRVLRVANTKAEIDRFVATLRALELSCEIAFEPTGDYHRPLAYLLGQAGFHLCLVSSIAVARTREALYNSWDKNDPKDAQVILHLLKNGTTQRYLDPLMTGYQDLQEIAKTYQQISLRKVRLQHSLVTHHLPLYFPEAERYLHSSRAEWFTELLLFTPCPTAVRRYTKTAFVAAAREQIGGRKVDKARWLADFYETACSSVGLPVSEASETMRMFRVVLEEYRALCQRRKRLEADVVTRLANQPDFVRLQTLPGIGPILAMIILAEARDLRRFGCARQFLKYCGFDLCTEQSGQFRGTTHLSKRGNARLRYAFWMAGTVAIRMQQNSFRRKFDDYIRRDPQNTDRRRKGYTAVAAKMARVAYAVVTTGTDYRRFPEATRPGGRIPSPGAVEAHATS

SEQ ID NO: 47656 - protein, 348 aa, unidentified
MYHVGLDVHKNRSSLAILDENGAMFKRMEVKGTWSALLTEMATIPRPFAVCYEASCGYGYLHDQLQSLAHRVAVAHPGRLRLIFRSKKKNDRVDAGKLAKLLYLDEVPPVHVPGADVRAWRGLIEYRRKLLRSGTAAKNQVRALLRGLGISAVKRLWTGAGRRWLLEQSLSPQDHLRLEIMLDELAGLKKKNQRVEKELAAIAAKHPGVFLLRSIPGVGIRTAEAFVAYVDDVSRFARVDRVGSYFGMVPCQDASAERNRLGHITREGPSCVRALACEAAWQGVRRSPTLRAFFQRVMRKDPDRKKIALVATAHHLLKVMAAMLRTGEMWRESVVESPKPDGGCAAGD

SEQ ID NO: 47657 - protein, 325 aa, unidentified
MIQNKEKVESRIILGADVAKASIVLKQVRDGRSVCAGVKTIPNNAADITKALINLGQIDLIVCEVTGGYERQLLEAANQLAIPIHRADGARVKAFITSHGVRAKTDAIDAYGLALYGQDRFNSLPRWTPPDPKREELQSLVKHRQALLDQRTMATNRSKAPNSHYLAGFLQEEINFINTQVEKIEQQIADIMKSHATIKAQEKRLRAIQGIGPVSAHTLIAMLPELGHATRKQIACLAGLAPHPAQSGNSFKKYPMTGGRDLIRRTLFMAALTASRYHPDLKHFYQTLLNNNKPKNLALAAVARKLVTIANAVLKPIQSPHAQLT

SEQ ID NO: 47658 - protein, 332 aa, unidentified
MKKIIHFIGIDVSKETLDIALIKNNDKSNIYSSKATNNKTGFKKMKQWLKLEKVSWQEAVFCIEHTGMYSKPVGQFILSLQGNLWMEMSLKIIRSMGVQRGKNDKIDAMRIALYAQRCQDEMKLYEPPRPIVEKLRTLLQLRKRLINSRNSLQVPCNELTTIDEQAGKEATRLIRSSVTALEKNIDVINEKIDELIASDEQLAHEFEIGTSVPGIARITLAYMICFTNEFKNYAGGKQLACYCGVVPFEYTSGKSVKGKPHVHNMANKFLKKLLHMGAIAAVTYYDEFKCYYKRKLKEGKPKMLVLNNVRNKMVLRLAAVIKNNKPYQKIAA

SEQ ID NO: 47659 - protein, 333 aa, unidentified
MKILKQSIGIDVSKNDFKVCLGVIDEQLETRNVYEYAYTNNKKGISGFIKDITKKTDQVVPLSFVMEATGVYHQELAYALADNAFPVVILLPNKAKSFSKSINIRAKSDIIDAKLLCQMGLERKLTTWQPPETIFATLKVLTREREALVLQRSKLKNQLHAYQTAFVKTNKTISRIKAHIAYLTKQISDAQADMKALVKQAQPVADKVKKITKVKGLSFLSVVTILAETDGFNIILNQKQLIGYSRLDVRVDQSGEKTIKGRITKKGNSHLRKALYMPALSACRTNKAMKLFYTQLNERQRAKKQGVIAVQRKLLLLTYSLWKSGQDYLEKCA

SEQ ID NO: 47660 - protein, 341 aa, unidentified
MSIFVVGIDLGKNVCSLVGLDETGAVVLRRRLRRDGVVGFVGKMEPCIVAMEACCGAHHLGRVLGARGHAIRLMSPEYVRPYVKANKNDDHDAEAIAEAATRPTMRFVPVKSEAQSDIQALHRARSRLVAERTALINHLRALLLERGIVVAQGRRKLEDALGVFADEDDPRLSSRVRLLVEDLRAEWRSLDERIAAFDAEFARMARDDDMARRLSTIPGIGIVNATALVAAIGDAAGFRRGRDLAAWLGLTPRQATTGGKPRLLGISKRGNRYLRANLIHGARAVLPRIMAQDTPLGEWARGLLERAHKNIVVVALAAKLARIVWAVLRMKCSFDPAIAAA

SEQ ID NO: 47661 - protein, 409 aa, unidentified
MQVIHPRCAALDLGKDVLVAAVRLQDAAEVRRECRTFQTTGQELLRLASWLESGGVTHVVMEATGSYWKAVWHVLENRFDLTLANPAHIKNLPGRKSDVNDATWMADLHAHGLVRGSFVPPAEIGALRELTRTRKQFVREINRHTQRIQKTLDIAGIKLTGAVSQVLGVSGRKILAALIAGETNAKKLAALAHPRLTASSDRLEEALQGRLTTQQRRLLGMHLNLIQTLDAAIAELDADIAKAVDPFRGIVERLHEVPGLSEINIPAVLGEIGVDMSRFATHAHLISWARLCPRLDESAGKVRSKQTMKGAVWIKELMIQAAWAAIRTKDSYLRAQFLRLRARRGGKKAIVAVAASILTIVYHVIRDGTTYRDLGPNHFTTRDRTQAARRLLARLHQLGYNVSLTAEVA

SEQ ID NO: 47662 - protein, 377 aa, unidentified
MGFHRELAVKVAVSHRDGGTRSERVGLKHQRKTAMEWFIGIDVSLEQSSVCVLDAGGKIMREAKIASEPEALVAFCRELELPVTRIGLEAGPLSQWLHAGLTSAGFETVLLETRQVKAALSAMVVKTDRKDARGIAHLLRMGWYRPVHCKSVPAQEVRALLAGRKLLLGKLRDVELSIRGLLRGFGLKVGEVSKGRLEARIRELIAGHPMLEQVIQPLLRAREVLNQQYHVLHRAMLNLVRHDAVCRRLMTVPGVGAVVAITFTSAVDDPTRFSRARAVGAYFGLTPKRYQSGETDVVGTISKAGDEAARTALYQAAHTMLTCPGRYSSLKRWGMEVARRRGLKRATVALARKLSVVLLRIWTSESEFRFDRPVAAV

SEQ ID NO: 47663 - protein, 451 aa, unidentified
MMKSKRLSPERDFVPTHPNAAAIDIGSRMHVAAVPPDRDPVPVRSFGTCTGDLKQLADWFERCGVRTVAMESTGVYWIPAYELLEQRGFEVVLVNARDAKHVPGRKTDVSDAQWLRRLHEYGLLRASFRPKGELAALRAYLRQRERLLDYSASHIQHMQKALMQMNVQLHHVVTDVTGETGMGIIRAVVAGERDPAVLATHRDRRCHASEQEIAAALAGNWREEHVFALGQALELYDAYHAKVVECDLRIEIVLRRLRDAAAKPAGRLPPARHRDKTANAPTFDARAALHAVLGVDLTQIHGLGPSLALKLIGECGTDLSAWPNAKHFTSWLCLAPANKISGGKVLSTRTRRSGSRAAALLRLAAVTVGRTQTALGAFYRRLSARVGKAKAVTATARKIATLFYNTLRHGIDYADPGASYYEDRYRARVLANLRRRAKSLGYMLHEMPASE

SEQ ID NO: 47664 - protein, 339 aa, unidentified
MSPTPVGIDIAKTVFQVHYVDEETGEIVNRSIKRQKFLEHFANRSLCLIGIEACGGAHHWARELTKMGHQVKLMPAKYVKAFNIRNKNDAADARAIWLAVQQPGKPVAVKTEMQQAMLALHRMRQQLVKFRTMQINSLRGLLTEYGEVMSKGRAALDGAIPNVLARISERLPAVLVDTLREQWNGLTKLDEQIAAIERRMREWVKHDPAVKAISEIPGVGLLTATAAVATMGDAKAFRSGREFAAWAGLVPRQSGSGGKVNLHGISKRGDTYLRTLLIHGARAVLSHAKDAGPWIEEMRRRRPANVVIVALANKMARMIWAILAHDRPYQRDYVSRKPA

SEQ ID NO: 47665 - protein, 411 aa, unidentified
MNPVVGLDVAKGESQVQMFLVKKMPYKSSVKVDHTVDGLEELHSYLLDLERQTGMKPPVVLESTGHYHAPVVQFLEAREYIVIIVNPLVSYRAKSSSLRKTKTDAIDAYHLGELYYKEDLAPQKKRGVQLLNLRHLTRQHENMTGIMIQTKLQFQAVLDQIFPEYKGVFGDLYAEISIKTLQAYPTSESVKEAGVEEIAQFIDTHCKARSFNWALERSEKLIGAAERNPFQSTLYQSLLVSLNIYIDLLQVYHQQLSTLEREIDELAAQLEEYELLQSIPGIGEKIAATIISEIGEIDRFNHPKKLVAFAGLDPSVFESGRFKGTKNHITKRGSARLRHMLYTAVRCSIRDSRKKKTTPETIARNKRLRAFYDLKREEGKPYKVAIIACANKLLHWIYAILKTKTPFQETM

SEQ ID NO: 47666 - protein, 403 aa, unidentified
MNNVAGIDVSKGKSMVSVLRPFGEVVAKPFSVGHTGSELKELAGYLKSLDGETRVVMEHTGRYYEPVARFLHDEGVFVSAVNPKLIKDYGNNTLRKVKTDKADSRKIARYGIDNWAELRQHTPMDTIRMQLKTLNRQQSLYTKTKTMMKNNLIALLDQTYPDVNALFDSPVREDGSQKWVDFATTFWHVDCVRNMSLAAFAERYRKWCKRHGYNFSQSKAVEVHAEAQDLIAMLPRDALTKTMVRQAIDALNAVSASLERLKAEMQALAAQLPEYPVVMAMHGVGDSLGPQLMAELGDVTRFTHRNAITAFAGVDPGADQSGTHEAKSTRVSKSGPPELRRALFLVMDCLLKTQPQDDPVYRFMDKKRAEGKPYLVYMTAGANKFLRIYYGRVKEYLAQLENS

SEQ ID NO: 47667 - protein, 345 aa, unidentified
MTQIAVLGIDLGKNSGSVAGLDSRGAVVRRRRMRPGSIPAFTRDLPPCIVAMEACCGAHHLGRLLRAQGHQVRLMSPEYVRPYVKAQKNDDRDAEAIAEAATRPTMRFVELKSEKQLDMQTLHRARERLVAERTALINQLRAILLERGIAIAQGRRKLEKDLAERLGENGGLPVSPRTRALIEDMRVQWAELDRRIEAFDDEFAQAARTDEAPRRLATIPGIGVLNATALVAAVGDGSSFARGRDLAAWLGLVPRQVTTGGKPRLVGISKRGNVYLRKLLIHGARAALPSLAASATPLGAWLRGLMGRMHTNAAVVALANKLARIAWAVLRSGGVFNIGSMALPR

SEQ ID NO: 47668 - protein, 368 aa, unidentified
MAKRSTFVGLDVHKESIAVALAESGRFGDVRAYGTVGGGLEALDKVIRALRAPGRTLHFVYEAGPCGFTIFRHLTRLGEDCAVVSPSMTPTRAGDRVKTDRRDAVMLARLHRAGELRAIYVPNESDEALRDLVRAREDAVEVTREAKQRLKAFVLRHGLRYRGRAGWTIPYRRWLAGLTMPEPAPQIALQEYLATVEEAEQRVTRLTEQLQQLVPTWRWAPVVNALQALRGISFITATGLVAEIGDVRRFTRAPELMAYLGLVPSERSSGPLTRRGRITKAGNPHARRLLAEAAWAYRSIPRIGRVMQQRQEHLPAPVRALAWKAQLRLCGRFRRLNARGKPRVVIATAIARELTGFVWAVAREVPAP

SEQ ID NO: 47669 - protein, 317 aa, unidentified
MINPITDTAGIDAAKAKLDVAVPDRAMRFQVANAAPGWRRLAAELAEARVTRVGIEATGGYERGVVAHLRAAGFTVLVLQPIQVRAYARLHRHRAKNDALDAVLIAACAAVMAPPEITPDERLAKLASHLTFVEQTEEDIARLKVRLEHVDDPRLRRIMLADVNRLKARRLTELARIAKALRHHDDLARRLDLVCSVPGIGERTALALVVRMPEIGRVSREEAAALAGLAPFDDDSGTHSGARHIAGGRGRLRRSLFAAALPAAFRWNQALGELYRRLIAAGKPHNLTLVACARKLLIYANTVVQRGTPWTEKPATT

SEQ ID NO: 47670 - protein, 339 aa, unidentified
MAIVRVFVGLDYHEESIQVCVLNGEGRILANRNCLNDVEQVRELIGDHGSRARCALEACGGAAEFAHQLLRHRELDVRLAHPGYVRRMKHNPDKSDAEDAFVLADLVRMNYLPEVWLAPQPIRQLRRLTRYRRQLVNERKNHKLRVRALLREERASDAPANAWTKAWLAWARDEAPLGEQGRWVMGRLLAQIEHLSREIVEVEKRLAEAVRDDPLTAALLRQRGVGLVTAATLRAEIGSFTRFKSGKQLARYCGLSPCNASSGKRQADAGLIRAGNDELRTILLEMAHRLAQHDDRWRTMKERMQYRKPMCVIVAAIANRYVRWLYHEMVRCEQPLEAA

SEQ ID NO: 47671 - protein, 345 aa, unidentified
MNVSTVGLDLAKNVFQVHAIDDAGAVIVRRSLRRRQVMPFFGKLEPCLVGVEACGTSHFWAREIEALGHEVKLMAPAYVKPYVKRGKTDAADAEAIAEAVRRPTMRFVAIKSAEQQSVLALHRTRDLLVGQRTQLVNMIRSQLAELGIVLAKGIHHALRLVDQLVEGVVPDIPSLACKIVVALAEQIRELEARIAMLEGEIKTWFRGSELAKRLETIPGIGFITASALAASVTDPHQFTSARQFAASLGLTPKADSSGGRERMGRISKMGDRYLRRLLVIGMTSQLQSARRKPEAYPWVAGLLANGKPNKLVAVAMANKAARIAWVVMTRGEVYRAHRPASEGTV

SEQ ID NO: 47672 - protein, 344 aa, unidentified
MKHYAGLDVSVKETSICIVDEAGRICREMKVVSHPEDLLAVLCDPAWRLERVGLEAGPLSQWLFSGLAEAGVPAICIETRHAKAVLKAQVNKSDRNDARGIAQMMRVGLFQPVHVKTLASQKRRALLAARKILQEKALAIENDIRGLLRNFGLKVGIVGVVGFEQRIHDLVEGVPELADIMEPLLAARRVLREKFAKLHRKVLLLARDNEVCQRLMTIPGVGPVVSLAFISTVDVPARFRNSKAVGPSLGLTPVLNQSGESHRVGRISLCGDEAMRALLYEAAQVMLTRVQKWSWLKAWAMNIAKRRGQKKAIVALARRLAVIMHRMWSDGTEFRWTREMAPTI

SEQ ID NO: 47673 - protein, 319 aa, unidentified
MQSKLTIGMDIGKGEVVVACHESAFAVLKMANAVPVLRRWLATLPAGSRLGLEATGGYHEPVAELAHSLGFTVYILNPKDVHHYARALGARGKTDRLDAQVIAAYVAEHNARLHAFVPLSADEKLLRELARRRATLVNAKSMLQQSLRVLPGFEREGRELLRAMGSFADRLERKLAEIAARSSERAALVKRLQTIDGVGTLTSIRCATLFTRVPLHGSDAAVAFFGLDPRPHDSGQHRGRRRLSKRGPSEDRRLLYNAAMSAIRTPTWRPLYQHLRNRGLASTEAIIIIARRMVRIAFAMYQNHSDFNPRLVPRPSCPA

SEQ ID NO: 47674 - protein, 403 aa, unidentified
MNAVGIDVSKGKSMVSVLRPFGEVVATPFEVRHTASELKKLADYLKSLDGETRIILEHTGRYYEPVAQLLHDSGLFVSAVNPKLIKDYGNNSLRKVKTDKADSRKIARYGLDNWVELRQHTPIDTIRYQLKIMNRQYGLYSKSKVSMKNNLISLLDQTFPCVNTLFSSPAREDGSQKWVDFAASFWHLDCIRGLSLAAFTQRYQKWCKRHGYNFSSGKAAEIHESTKNQIALLPKDAMTKMLVHQAIEQLNAVSKAVELLRTEMNRLAQQLPEYPVVMAMGGVGKSLGPQLMAEIGDVTRFAHKGSLAAYAGVDPGANQSGTHEAKSTASSKSGSPELRKTLFMVMSSLLQTSLANDPVFQFLDKKRAEGKPYYVYMTAGANKFLRVYYGRVKEYLLSMGSAD

SEQ ID NO: 47675 - protein, 339 aa, unidentified
MMDVTTVGIDLAKNLFQSHGVDERGRVALSRRVTRSQLAEAVASLPPCVIGMEACASAHHWGRAFERFGHTVKLMSPKYVKPYVKTNKNDCRDAEAICEAVSRPTMRFVSIKTVEQADLQALHRTRSLLVKHRTAVINQIRGLLAEYGLVIAPSPEKVRPALVRFLDDAASGLTAFARDTFAELYEQLRDLESRLARVTERVERVFRAHPMCRKLAAVPGIGPLTATALLAAVGRPQTFRNGRHLAAWLGLVPRQYSSGGKEILGGLSKRGSRYVRTLLIHGARAVVHRAEGRSDPQGRWLWTLKCRKGTNVAAAALANKNARVVWALLAHDDVYRPSA

SEQ ID NO: 47676 - protein, 355 aa, unidentified
MDSAKYIGLDVHTESISIAVLNATGKTVMESVIETKANTILQFLDGLRGELQVTLEEGTSAAWLYDLLKPHVARIVVCDPRKNASMKQGNKSDKIDARRLAELLRLNHLNPVYHGEHGLRTLKELVRSYLTITKDLGRVMTRVKALYRSWAIPCTGKQIYAPRHRAEWLGKIGEPGVHRRAEFYFQQLDALRSLRQQVRCELLAESKKHQAWKSLCQIPSIGPIRAAVLLGILQTPHRFRTKRQLWTFSGLGIETHSSADHRYVEGQLQRSKKPVLIRGLNENCNHDLKNLFKGAAIIASTKPGPFQEFYAALLAKGIRAEMARLTLARKIATIVLVVWKKGVCFDAQSLKPQTA

SEQ ID NO: 47677 - protein, 416 aa, unidentified
METYKIVGIDVHKKMLAVVVTDAAAEGECRLERRKFGIEASELRALTEWLTQQGVREVVMESTAQYWKPVWRQLEPQFKLYLAQAQSNRAPRGRKGDFRDAERLVRRHIAGELILSFVPDPEQRMWRTLTRTKYQLTGDRVRLNNQLESLLEDARIKLGTCVSDLLGVSSRRILKALAEGETDATKLAAMKDKALRATPEQLQECLCAAATLSPLHRQILQLFLERLELIEQQIDKLDHSIAEALKDYNAAVVRLAEVPGYGADSAQQVLAEVGPKAATFASAAQLASWVGACPGREESAGVSKTNRSPKGNRQIRRILTQVAQAAVKTKGSIFQILFHRWLPRIGFKRALWAVVHRLCRLTWKILHQGVRYEERGLVRDPKLDKERKKKLIRQLRTLGYDVQLTPLTTAPLPATL

SEQ ID NO: 47678 - protein, 427 aa, unidentified
MAYRVAAVDVHKKMLAVVVADVVVEGEYRFERRKFGATPDQLHVLAQWLVQQEVEEVVMESTAQYWKPVWGALERYWKPAREKREGATKMSGALHLCQAKSNRGPRGRKNDFADGERMVKRLVAQELVLSFVPDAEQRLWRTVTRRKHQLTRDKIRFQNQLEALLEQAHIKLSSFVSDLLGLSARRMLKAIAEGETDPAALAALADCRLRATPEQLRDALGACAQLNGVYRRLLKMALEELKLMEEQMEQLDQEASNLLQHHQDAVQRVAEVPGFGVDSAVQMMAEVGAAAATFESAEELSSWVGVCPGSEESAGKSKSTRSPKGNSTMRRLLNQAAQSAVKVQGGIFDITFRKLLPRMGYKQAIWAIAHRLCRLLWMILHKGIRYEERGPAVSAKSQRARSARMIKALKKLGYRIEGGPLPAGAQA

SEQ ID NO: 47679 - protein, 373 aa, unidentified
MKYSTVYVGMDVHKESFSLCCYTNEKEQAEYPQKVDGHYSKVINYIEAMRFHYGDDALFICGYEAGCLGFTLYRQLTDHNVKCVILAPTTMLQQKGKKKVKTDKRDAALIARCLAHHDYSPVHIPTEQDEQTKEYIRMRDDHKLALKKVKQQILSFCLRHNYRFNGTAYHWTQAHLRWLRSLEPEGLYAEILQEYLLTYDSLTDKLERFDRRIEELASDERYQENVRKLSCFLGVKTVTAMAVLTEIGDFNRFASAQNFASYIGLTPGEDSSGDDRNHLGITKAGNRHVRTLLVEAAQSYSRGKPGYKSKALKARQKGNSPEVIAYADKANERLRKKYYRMVLKNNKRTNIAKTAVARELACFMWGMITGNVA

SEQ ID NO: 47680 - protein, 416 aa, unidentified
MSGEREIACGADVHNSFIVATILSSDGMKLQDRFDTNLEDLLKFKNWLKENSCHKVAVESTGNYWIPIYSVLEGSVNFILANAYQIKHIPGRKTDMLDSEWIAEICLKNLISPSRVFFRDHRELRSLTRSRENLVKLRTKLKNWITHELEAACIKLSTVLSDIFGKSGRHIVDGLTNGIDLEEILETIPSKKVRANKEEIRGIIHANLSSSQIFLLRSHLDTVDSISNQIAEIDVKISDLISLRKDDLQIALSMPGMGIVSASTILAEIGDFRDFSSPDKLAAYCGLVPSVYQSAGKLINGHITKHGSPHIRGMITEVAHAIVRSKRNSKLKKFFLRIKARRGTKIAVVALARKVLCILYHLLINQELYQDDLIDKPKRIRPLYVHSTKTLSLDEMIQTVIKAGYEVRRNEYMGSG

SEQ ID NO: 47681 - protein, 353 aa, unidentified
MKRDKYIGMDVHQATTVVAVLDTNGKVIWETIVPTQAGPIIELLESLSGPLHVTLEETTQAEWLYEIVRVYVAEVVVCDPRRNRLLSEGSKADKVDARRLAELLRVGMLRSVYHGNEGTRKLKQLARGYQTVLSDTQRTMTRIKAMYRSRGIPTPGRGVYQAKQREQWLSLLTDPGMRQRTAWLFEQLDQLGALRRRAKRAMLDESRKHRAVALLRTIPQLGPIRSALLVAILDTPHRFRTRRQLWSYSGLAVVTHMSSEYEIKEGRVVRSRKPIATRGLNRNCNRVLKDVFIGAATGGGQREPYRQYLQGLQDRGMRKEMARLTLARKISSIALTIWKKGEAFDPKKLKWAT

SEQ ID NO: 47682 - protein, 321 aa, unidentified
MIKNRNYVGIDISKKSFDVAIRNEKGNYLHYKFSNDSEGFEKFFGLLNNENDSCVMEASGPYYLRLATFLYEKQVDVSVINPLVIRRFSQMRMMRTKTDKKDAVMIAEYGKTENPKIWEPEETYVLELKKMQAYVEQLNKSRTGFIRQQEAFKQNPVTCLAMNKSITKTINLLEKEIATIEIKMEAIVKEHHQKQFQQLQSIPGLGKKTSMQLIVLSGGFTKFENAKQLSSYVGLSPHIFESGTSVKGKAKICKMGMSRVRAMLYVCAWTAKKCNKACRELYDRLLKNGKAKKLALIAVANKLLKQAFAIATKNEFYVQIN

SEQ ID NO: 47683 - protein, 404 aa, unidentified
MIFVGVDWAETHHDVCVMGEDGQVLEQRRVSHSVAGIGELHALVAGHAGEGEPVAAGIEVDRGLVVTALLAAGYQVYAVNPLASSRYRDRHATSGAKSDRGDAKVLADLVRTDRHNHRQVAGDSDLAEAVKVLARAHQSAIWSRQRQVNALRSALREYYPAALAAFGTDLAASDAVAVLALAPTPDAGRSLSRAKIASALRRAGRQRNTEQRAAEIQAALRAGYLQAPPAVAGAYGAAARSAIRLISAYTAEITELEEALSGHFEQHPDVKIVRSLPGLGTILGARVLGEFGDDRTRFASPQCRKNYAGTSPITKASGRSHVVLARHARNRRLADALEQWAFCSLTPSPGARAYYDQLRARGKTHRQALRQLANRWVGILHICLERGCTYDETAAWHHPQANAA

SEQ ID NO: 47684 - protein, 435 aa, unidentified
MQCHSMRHPSIFAPLRLVCYPKQLECNKPVIVTIFFLALFLLLAGVDMWITFAISVARPCGRIEQEAEAFCAWDRHGAQVRREAIPRLLFTCSTMKTGHYLGHYHWVGADVAKNTFDAALVLAHQHFPATQLRDIPVRTFPRSEKGVSDFIQWLDTFELSDASVRVMMESTGSFSTELCAWMLKQRDSLSPAIETARYTAHYLKSMGLRNKTDRLEARALGFYGIERNPRPYTKPAPEYLELPQLSRYRDNLVHQQTHLKNQTHETTTAFIKHEQQKQLTRLKKDITRVEKAMKDLIKKHDKLAHDIDLLTTIYGIAFISAVTLVAELGDLRRFDKARQLTALSGLSPRQHQSGTRVYRQSRICKQGNPRVRQILYLSAMVAVRGNNQFRTTYQKLIHQGNPKMVALIAIMRKLLILMRAILITGKPYQPMGITR

SEQ ID NO: 47685 - protein, 346 aa, unidentified
MTIVETTRPVTGGVDTHADVHVAAAVDANGGVLGVASFATTPAGFGELHGWLVGFGPVARVGVEGTGAYGAGLARHLRGHGLVVIEVDRPNRQERRRKGKSDELDAIEAARAALSGRASGIAKSADGDVEAIRALLVVRRSGRNVRIKYLNQIRHLGFTAPDALRERLRDVHRDRLARTAAALRPTPGSDSVVYATKLAIATLGRRVLALEADAVRLDHELEMLVRRTAPNLLEVYGVGINTAAVLLVAAGDNPHRLKSEAAFAHLCGVAPLLASSGKIDRHRLNPGGNRQANHALWRIVFTRMSSDERTRKYVARRVAEGKTIREIMRVLKRYVARELYPHLVRD

SEQ ID NO: 47686 - protein, 402 aa, unidentified
MITCGIDIGKGKHAVAVIDESGRQLVRTRFYDNTKAGAERMLAELLRHAEPSQIHVGMESTGNYWRAYYDFLKGRGCVVDVINPIVTSASSAGDIRGRKTDKRDAESIAEVVLRGKYACRRDEGLQERKLRALTRQRGFIVEERSAAKLHLASLVAEAFAEFESLFEDPYGALALAVLSKYPTASHLARARKSSLAKIVRANTRGKDADAEALRLIGGAKDSISLSCEITDALARCVTSSIRTIMDLDERVKDVEEAIKGFDPPDLASKLMAIKGSGKVMPMVVAAEFGDISRFRNNPKDGSEAGMHKRLLAYAGCEPRIRESGKWKGRKFISKRGSRQLRTALYLIANNIRQWDPYFKAVYERKIGSGKHHNVAVFYVVAKLIEVLCALYKSGRNYAAIQP

SEQ ID NO: 47687 - protein, 351 aa, unidentified
MDYRVYCGVDFHARQQTISCLTTEDGVVSTHELKHQNKAELKAFYAQFRGPVLVALEASGYSPWFEQMLEELGHEVWLGDASEIRRRARRRQKNDRRDAELILDLLLHDEFPRIHRPAVKSREILRMLRYRHKLVQMRTIIKNSLQALSIQSGLSLRARLFTGVGLDQLRSLTMSPVMQYQRDQWLVALESLNQHVVAATNWLGEQAAGDARVQRLRTHPGIGLLTGLALVHTLEPVIRFRNQRKVAAYVGFDPQERSSGEKKRYLGISKAGSRVLRYLLVEATHTAIKSDSDLKRFYLRLLHRHGKAKAIVAAARKLLIRSYILLRDHIDYAEFGRRAVAARLARLASKA

SEQ ID NO: 47688 - protein, 422 aa, unidentified
MLEETQETEEIIQRVAALDVGKAELTCCVRVPGQGSSGRRAQEVRTYKTMTRSLLVMVDRLAELGVTRVVMEATSDYWRGAFYLLEAHGFETWLVNARDVKHLPGRPKTDTLDAVWLCKLAERQMLRPSFVPPRPTRQLRQVTRYRADLVAARTAEKQRVEKLLEDAQIKLSVVASDIFGVSGRAMLTALIAGERDPKRLAQLARARLRAKLSLLEEAFSGFFTDQHAFLLAKMLARVDQLDADLAELDAKLQELIAPFVAAVERLDEIPGVGQLAAHLLIAEIGTDMTRFPTAGHLVSWAKFAPGVKESAGKRKGSGSTGHGNPYLARVLGEAAVAASKTDTFLGERYRRIARRRGAKKAIVAVGRSILVIAWHLLSDPEAHFHDLGAGFYDTRIGPERAKRNHIRQLEALGYKVTLQPAA

SEQ ID NO: 47689 - protein, 417 aa, unidentified
MFTPTDLLVGVDVHRRTNVVQVMDGRGQVLAPRLRVANNRLGTSQLVKQLRQLAAASNCTHIHIAAEATSNYWLPFFCALETAAELDEWPLSLYPFNPKLVHNFRKSLGEWDKTDDLDTTVIVERLRFGRQLPYPFRMEERYLPLRTLTRYRYHLVGELVRVKSHALSLVYLKGSEYTAQPAFGDIFGKTSQAVLQEFSSWETVAAMPFDELVEWLDVQGKRRFANPPDNARRLQQIAQDSYQLPDDWLAAVNTALSLSLRHLTLLQQLLKRLDTAIADQMTAYPNTLTTIPGIGPVFAAGIIAEIGDLARFAFNEARVASYAGLKWSKHQSADFIAEETYLKRTGSDFLRYYFCEAAQLVRMHDAEYAAFYQKKYDEARNHHHKRAIVLTARKLVRLIVRLLTTNEPFRARQVPTD

SEQ ID NO: 47690 - protein, 315 aa, unidentified
MTQTNITTAGIDTSKAKLDIAVHGRTERWQVANALPGWRILAANLAKAGVTRAGIEATGGYERGVVEHLRAAGLDVLVLQPIQVKAFGRVHLRRAKNDALDAVLIAACADAINPPRVAPDPRLAELTGYLTFLEQAEEDIARFKTRLEHIDEPGLRRIVNSDITRLKARRAAQIRDIAKRLRAYDDLARRLDLVLSIPGIGERTALALIIRMPELGQISREEAAALAGLAPFDDDSGQHKGQRHIAGGRGRLRRSLFAAALPAAYRWNKALIALYTRLKARGKAHNSALIACARKLLIYANTVVQRGTPWTEKVA

SEQ ID NO: 47691 - protein, 347 aa, unidentified
MEKLIRVGVDTSKSVFQLHGVNCAEQVVLRKQLRRRQVLEFFARLEPTKVGLEACGGSHYWARELRALGHEVALLPPQYVKPYLKRGKNDALDAEAICEAMSRPRMGFVAVKTAEQQAALMLAGRRDQLVRQRTQVTNSIRGYAAEFGLTAATGLDKIEPLLGRIAADGQVPELARELFGDYARDYARLEAQIRAIEIKLMAWHRGNELSRRLTKIPGVGPVVASMLVMKTPDPKAFRSPRHFAAWIGLTPKDHSTAGKTRLGVITRAGDEALRSLLVVGATSVVQQVGKSRGNPSLWLIELLKRKAPKLAAVALANKIARIAWKMMVSGEAYNPARALAGARDKAA

SEQ ID NO: 47692 - protein, 461 aa, unidentified
MSANKPKGKRNGSVRKKVDWKALEIVHPDAAGIDVGGSEHRVAISPDRDPEPVRCFGCFTADLRKMAQWLVEKGVHSVAMQSTGVYGMPVLEILEQHGLEVYLVNAQHTKHVPGRKSDIEECQWLLKLHSFGLLNNSFQPTDEIRIARTLWRQRGNLVAEASSTIQRMQKVLTEMNIQLSNVLSDLTGVSGMKIIQAILDGERDPWTLAGCVEPGVRATRDEIVKSLEGNWREELLFILRQHVELYRIYQEKITDCDLQLRKHLESLGSKLDLKAQPLGPRPKGKHKSRNAPFFDLRTELYRITGIDWAQINGIDVLTAQTVIAEAGADLSAFPSEKQFASWLGLCPTNEQSGGKILKRRTRKVVNRATVAFRNAASTLLRSQSYLGAQYRRLRTRLGAPKAITAMARKLACLFYRLIKHGQQYADKGTAYYEARYREQQIRSLTKRAQKLGLQLVTPQTA

SEQ ID NO: 47693 - protein, 368 aa, unidentified
MSHDTTFVGLDVHKDSITAACIGGDADASLIDLGTLGTQQYAIDRLCKKLSGRGRLRFVYEAGPCGFWLQRYLAARGYACEVAAPSLIPKRPGERIKTDRRDARNLALALRAATLSCVHIPTPEQEQFRDVVRAWQQAKRDVTAARQRLKSFLLRHDIRYTGRANWSAAHRRWLSEMVLPSPAQQIVFQELVDSITERERRRDRLEHQLDALAPEWSGYPLAQALLAFRGIQKTVAYTVVAEAGDLSRFAHPKHFMAWLGLVPGEHSSGPTRRQGPITRCGNRWARTLLTEAAWSYRYSPKVSRIIETRAQDIDPAIRAIAWKAQIRLHHQYRKLTAKGKHKNVAVTAVARELAAFIWDAARQIEQSA

SEQ ID NO: 47694 - protein, 383 aa, unidentified
MSIKYSVGLDVASKKIDICMSVIDCNQKVTVVASTSFPNTLKGFQSMDEWIVKKKKLQEIPLVMCMEATGVYHENCALYFSEKKYAVSIILPNKAKHYLISLGLKSKNDSIDAKGLSKMGAEQCLELWQPMGKLYYELRQYTRQYQNLQDQKTVINNQLHALENSMYMSEMMINQQKAIIELFNEQLKELEKLMKNLINSDQVLKQKVDNICKIKGIALLSVSTIIAETNGFELFKNYKQLVSYAGFDVVERESGMSVGKTKISKKGNSRIRRALFMPAFVAIKYKEKPLVSLYERTFAKHGIKMKSYVAVQKKQLVLIYHIWKKNEPYNPDYKKDSPEMNSEAIQDNSLKSGFSEVQNYEKKEDNETKDKKKEKIHSHCEVA

SEQ ID NO: 47695 - protein, 464 aa, unidentified
MEPFYLGIDVSKGYADFMIINSKKHPVVQGFQLDDTFDGHRSLYNILGRFLAEHSDSTLFAGMESTGGYENNWYNSLIEFQGSLNIQTARLNPLGVMHNSKADLKKNTTDKISAQNIAEYLIAHPEKVVYQQHDQLAGLRKQWGFIKMLTKQSTQFLNQLNTLLYTANPELLSYCQGGMPDWVLKLLVKYPGAARLKKARVKAVANIPYVSPERAQQLIADAKHSVASATDSTTEQLIVATARQILHLKKTIAEQKKRMINECVIPEIELLKTFPGIKDSSAIGLIIEIQTIKRFAGAKKLASFFGVHPVYKISGDGVGGFKMSKQGRKQPRQILYMIALSAIQCNPLIREIYEKHQQQGKHNMAAMGICMHKILRILYGMLKHNKPFNPQVDIANRQRSARIKNDTPVKNTNRRFQDYDQKAPVTRRQQKKRLERERSHSVADTKSGITAPVPVADIIANILP

SEQ ID NO: 47696 - protein, 376 aa, unidentified
MAEATPRIRYVGLDVHKETITVAVAEQAGGRPEAWGTIASDPQAVRRLVRQLGREGHQLELAYEAGPTGYGLQRQLTRLGAECLVVAPSLIPKPASNRRVKTDKRDAEQLAKLLRSGDLVPIWVPDEEHEAFREVVRARFAVKKDVERHRHQLVKLLLRWGLRPPARVKRWSKPYRRWLTQLRHPLQDLQTVLDDYRSALWAAEARLAYLEKQMVEAALRRPQLALFVALQMLRGVGELTAATVVAEVGDFRRFARANGFMNFSGLTASEHSSGEKQLQGPITKAGNSNLRHVFIQAAHNARHQPQPRARLRARHEGAPADLVEMAARAQERLYHRYWYLARRIGREKAVVAVARELAGFVWAMGQRMSDPAQQAA

SEQ ID NO: 47697 - protein, 412 aa, unidentified
MKDLLEISCGLDVHKEKIVACILTGPLGKPTHSEIREFSTLIPDMIALRDWIVSRNCHHVAMESTGIYWMPIYEILEDAFSGDITLLVVNARHMKNVPGKKTDMRDSEWISTLLRAGLLNGSFIPEKRIREFRDLNRYRKSIIRDITSQKNRIEKFLQSSGFRLSSFISDIFGASGKNIILHLIEHGQIDRTALDSCLKTKTRNHIDEILMSVNGTLSEHQKKFLKILMNHYDSLKEHLNEIEKDLEQDIEPFILQVQQLNSIYGISTTASCAIIAEIGVDMKPFKTAEHICSWAGLCPGNNESAGKRKSTSVTKGNPYIKSMLCEIAWVIAGKRNTYLSAWYWRIKQKKGAKKAIVALARKLLVIIYTMLKQGTLFDESCFEARRKNWEQKQLSRYIRELEKHGYHVEAQG

SEQ ID NO: 47698 - protein, 321 aa, unidentified
MPTFYLGIDVAKAKLDCALRLPNGKFRAKIVPNNSQGYAELVDWLSHKEALDVQVCMEATGVYGEDIAQCLSTQGFIVSVVNPAQIKAYSASRLTRTKTDAVDARLIAEFCAERNPPPWQARTEAEVALRALVLRLDALQTMRTQESNRLGVARDAVRTDIQEHLDWLDEQIKTLLKTINGHIDSNSDLKGKRELLDSIPGLGERTIAILLAFYADPSRFANSRQAAAFAGLDPRQYESGTSLKAKPRLSKVGHAFLRKSLYMPAMVTLYKTDWGKQFKDRLAFSGKPTKLIIGAMMRKLLHVVFGVLKSGKKFDPALHGA

SEQ ID NO: 47699 - protein, 402 aa, unidentified
MLPDHLNNPTAIRMQFGAIFVSLELSRKTWLITSLSPGKGEKMSKHSVTAGDIAGLLARFSELQRKAAVRTGKSFPLIVIQEAGLDGFWVHRVLQQEGIESHVVDPASIAIPRRRRRAKTDKIDGEALLRALLAYKRGEPRVCSMVVAPSPEEEDQRRLCRERDTLTAERVRHVNRIKGLLFAQGIADYMPLWRNRRKRLDELCTGDGRPLPQYVKAQISRELDRLELVLEQIKVVEKERDRVLLSLAPVVVSMGPEAVCDQPRRASGVRMLTALRGFAANGATKLWSEGLSRHFSNRRQVAAYAGLAPTPWQSGGISHEQGVSKAGNPRLRTTMVQIAWLWLRHQPQSALARWYFARVGVGATKARKKVAITALARKLLVALWKYVSAGELIEGAIMKPVA

SEQ ID NO: 47700 - protein, 401 aa, unidentified
MVSDFRKGRYNLMKIYVGIDIAKLNHFAAAISSDGEIILEPFKFTNDADGFQLLVSKLESFDKNSLIIGLESTAHYGDNLVRYLVTELYQVCVLNPIKTCQMRKNNVRKTKTDKVDTYVIAKTLMMQDNLRFVSFFDLDMMDLKALGRFRQKTIKQRTRLKIQLTTYVDQVFPEIQYFFKSGLHQHAVYALLKEAPSPKEIASMHMTHLANLLKVNSHGHFTKEQAKELRVLAQKSVGANDSAISIQITQTIQQIELLDSQLEKIEAEMTDIMKFNDSVIMTIPGIGYINGGMILGEIGDIHRFSNPNKLLAFAGLDPSVYQSGNFQAKTTRMSKRGSRVLRYALVNAAWNVVRNNATFKAYYDAKRAEGRSHYNALGHCSGKLVRVIWKMLTDKVEFNLE

SEQ ID NO: 47701 - protein, 403 aa, unidentified
MNAVGIDVSKGKSMVTILRPFGEIVSSPFEIKHTSSDIHSLIKLIHSIEGESRVVMEHTGRYYEALAHQLSAADLFVSAVNPKLVKDFNNDSLRKIKSDKADSVKIARYTLDKWQSLEPYSITDELRAQLKVMNRQFHFYVKQKTAMKNNLIGLIDQTYPNANTYFNSPTRSDGSQKWVDFVSTYWHVDCIRKMSLNAFVEHYQNWCKRKKYAFNKSKAEEIYTKTKELVPVFPKNEITKHIIRQAVDQLNSTSVTVETIRTLMNETASKLPEYSIVMQFKGIGPSLGPQLMAEIGDVTRFTHKGALTAFAGVDPGVNESGSYAQKSVPTSKRGSSNLRKTLFQVMDVLIKTMPQDDPVYQFMDRKRTQGKPYYVYMTAGANKFLRIYYGRVKEYLSVLPDPS

SEQ ID NO: 47702 - protein, 346 aa, unidentified
MPIVGGLDIHRKQITFDYLDTETGQVQRGQISPADRLHLRAWLARFGGRDDVAFAVEGCAGWRYVAEELAAAGIAAHLAEPADTAARRGRKRHAKTDKTDARHLRMLLAEGRLPECWIPPGHILECRALLELYNDLRREHTAWVQRIHAVLFHQGAPALGAGTLRTGPGVAALQAAAAAHLSPAGQLQVATALEVIDGLEARLHAVRHQLLAAARHLTGAKVLAARLYGVGPVTALAITCWLAGADRFSSSRQAVRFAGLDITVRSSDRKGPPGRLSRQGPPVLRWAVYEAGKTHARTSAPDHRYYAQVKNRKNSKRACLSEARKILRQAHHILAELGDDALAPAA

SEQ ID NO: 47703 - protein, 346 aa, unidentified
MTIVDSSRPITGGVDTHLDNHVAAALDANGGVLGVESFPTTPVGFVALHDWLCAFGPVARVGVEGTGAYGAGLSRYLQSCGLVVIEVDRTNRQVRRMQGKSDPVDAIEAARAALSGRASGIAKTADGNVEAIRALLVAQRSGRQARARCLNQIRHLGFTSPDGLREQFRDVPKAHLAERAAALRPRADGDAVLHATKLAMRTLGRRALAISDDMHTLDVVLSELVTATAPALLACHGVGVDTAAILLVAAGDNPERIRNEAAWAHLCGVAPLDASSGKHHRHRLSRAGNRQANHALWRIVFTRMGHDPRTRVYVERRTEEGLTKPEIMRVLKRYVARETYRLLPRT

SEQ ID NO: 47704 - protein, 362 aa, unidentified
MRIIGCDLHARQQTLAVLDTATGEVMEKTLAHSGSDVKEFYSRLPGPVRVGIEATGTMQWFLSLMEELGIDCQVGHPAKIRAAEPRKQKHDRRDADLILQLLVENRFPSIWRPSKELVDLRALLLHRHQWVRMRTRIQNALQAIALANGLRRGASLWSQAGQCAIASLPLAPHTAHRCSELQAMYAKFETDIEKLNQRVGEQACERPGARLLMTHPGVGPITALATDVFLGDAKRFADGKALASYVGIIPSEYSSGGRQRLGGLSKQGNPLLRFLWCEAAAHAVRRDPELQRFYRRKLVQKGLGKAKVAAARKLGIRLWIMLRDQIDYHEFCRRGQMQQRLGDACAGMPGTRYGATSHRPID

SEQ ID NO: 47705 - protein, 392 aa, unidentified
MLFVGIDVSKSKHSCYIIDFEGTIYEDNLQISNNIKGFNTLSETINSICKTHGLSNVKIGLESTGHYSTNITNYLHSKGFEVILFNPMITNSKRKSNTLRKTKTDKTDAKVIAIMLLTDNSKSYSPISYQIIELKSLTRFRHRMVNQRSKLKQSFVRLVTIVFPELSDFVWSLHQKSIQKLLLELPTANNIANCHLTKLTNLLIKYSQGKYRKDKAIKLKQLAAKSIGSSNRATAFEIQTTINLIHVLDKEIKVIDQKIKTIVDEINTPLITIPGISYTLAAIIIAEIGDINRFANPAKLLAYSGLDPSVYQSGQYNATHTRMVKRGSKYLRWAILQAVKTVAMRDKTFKDYLNKKLKEGKHYFVALSHAGKKLIRVIFYLLKNNTTFVPQN

SEQ ID NO: 47706 - protein, 364 aa, unidentified
MKRKVYVGMDVHKETISIAYLTSNSKELVKEQQIKHNEVQIKKFVTKLKSEWNEIHCCYEAGVTGYPLYRYLNSLGVNCTLIAPGKIPRQSSDKIKTDKRDAIKLARLLRSGDLESIHIPSEEEEAVRDYLRSRDSLRLDLGRNRQRLMKFLLRKGNVYSATKYWTVSHYKWLNNLHFENEILQETFNDYYSRVKVQEENLKAMDQKIRGVAESEPFRERVGILRCFRGVDYLTAMFLLCEVCDFKRFKTAGGFMSFLGLVPGEYSSGSKRKQTGITKTGSPRLRRILTEAAWQHRFPGTGSKIVTARRVGQPALVVALAEKASLRLHKKFRNMQQRGKTPQVMITAVSRELSGFLWAAMNLVA

SEQ ID NO: 47707 - protein, 332 aa, unidentified
MSAVVCGLDVHKETTYATILDPSGQVLIQRKMQNEDIPAFLDMTHPDKLAMEASTYIIPLYRKLTESGYDVTVSHPKKTRLIAEARIKSYRVDSRALAELLRLDSLPTSYIPPRDIAQIREKVRRRAFMVRQVTKLKVKIRDVLAAEGVKTPEGYGLFTAKGVEWLRSLKLEPVDCYLRLIQPLKEEVKLVSGDLKRSAGKDDDVQLLMTIPGVGYYVALLVKAEIGDVRRFSSGDHLASYAGLVPSTRSSGGVERHGGITREGSRWLRWAMVEAAMVHVRFDTPVTRFYHGVAERRGKRAALVAAARKLTEVCFSVLVHGRPYFNPLDAQA

SEQ ID NO: 47708 - protein, 318 aa, unidentified
MTQISTFIGGIDIAKEKLDAAVHGMPGGIVVENAEAGWEQLAQFFKQAGVGKVGVEATGGYERRVVRYLQRAGFDVVVLQPNQVRAFAKMRLQRAKNDRIDAHLIAACTYVLDARARAPRDERFDELADHLTFIEQIESDATRIKTRLEHIGDRRQRGIYARMIKRLETLAKAERLRLMKHLAVHPDLVRRVELVSSIPGCGEKTALAIVIRMPELGQISREEVASLAGLAPFVHQSGKHQGKMHIGGGREPLRRALYKAVLPAATFWNPALMALSERLKSRGKGHLCAQIACARKLLIFANTVVRRDTPWEARPIAA

SEQ ID NO: 47709 - protein, 406 aa, unidentified
MGRRRGYGTIVAFRQKMERPMQVNDLSRSLVAFEQNSTLVAVVELSLKTWLVAGLVPGLTRQPLKRSPADGEALAALLERWRAEAVKRGGRIERVAVAFEAGRDGFWLARVLRARGIEAYVIHPNSIPVPREHRRAKTDRLDTGLLMRAFLGWLRGEAKHCSMAPIPSFAEEDAKRPNREHEKLGAERTRILNKIKAALVRLGVRGFKPNLRNAAERLEALRTAEGLPVPPNTLAELRRDLARLKLIREQIKEIERARDRRLKQAPREGAHPMVLMLARLKSIGVETADRLVHEAFYRPLRDRRAVARYGGMTGAPDESGAKRREKGLARAGNVRVRKAMLQLAYRWIMFQKESALTQWYQRRVAGAKGDVRKTMIIALARKLLIALWRYVTEGEVPAGAVLRPAT

SEQ ID NO: 47710 - protein, 356 aa, unidentified
MISVRISATTFMILGGASMETYAGIDLHSSNNYLGVINEEDKVLFGKKMPNDLNKTLMALDPFKESLKGVVVESTYNWYWLVDGLQENGYKVHLANPSAIKQYEGLKHTDDKWDALWLGNMLRLGILPEGYIYPKENRPLRDMLRRRILFVRQRTANILSLQSMITRNLGTRMSGNAIKKLNPSDAEDLFDDANLVFMAQNNIEIIHFLKKTIYKIENKILKEAKLKKEFDLLLTIPGIGKILALTIMMEVGDIRRFPDVGNYSSYCRCVKSQRLSNGKKKGENNSKNGNKYLSWAYVEAANFIRRYCINAQRFHQRKTAKRNQIVATKALGNKVARASYFVMRDQVPFDESRLFK

SEQ ID NO: 47711 - protein, 392 aa, unidentified
MYIRTRWWPARASTQVKTFKTTTQELMALSEWLSSEAVTHIAMEATGVYWKPVWHILSDGEFELVLANAAHVKNVPGRKTDANDAVWLADLMAHGLIRPSFVPDQPTQQMRDLLRTRKQMARDRASHIQRIQKVLEDANIKLDSVVTDLLGLSGRRILEALIAGQTMPQALAALAHRRLHASSDELEAALRGRVTRHHRFLLKLHLDQIDAIDAAIARIDQEVSANVEPFRAAIEQLTAIPGISPLAAQVLVAEIGIDMSRFKTAGHLISWAGLCPKNDESAGKRRSNRMKKGAPWLKTTLVQCAWAAARTKGSYFQAQYHRLRSRRGSKKAVCAVAASLLTTAYHMLKNGSPYRDLGPGHFDQPDKQKQAARLLKRLQNLGYSVQIQPIAA

SEQ ID NO: 47712 - protein, 362 aa, unidentified
MNYVGVDIHKKYSVLCAVDERGRKLREARVEGNAPFGFAQFFSGLGGPSKAVVEACWNWGRIHDELEELEGIEEVVLAHPYKTRLIADAQIKTDRLDAYALSTLLRGNLVARAHVPRRETRVRKNLLRQRLYWARLRTMLRNRIHALLDRQRSLELPQCSDIFGVRGLSFLRRLELPETDAALLREQLALHDLIAQQMKAQEKRIGLEFGSEAMHRQLMSVPGIGPTLAAVIACEVDSIERFSSAEKLCAYAGVVPTTHSSGGKTSHGQLLPFCNKWLRWALIEASWVAIGCSPYFGALYKQHRARGKKANSAVLIVARRMCRIIWQLLHEKRDFEKRPLRPNFNFPGCSVVRLTAATAARP

SEQ ID NO: 47713 - protein, 312 aa, unidentified
MAQMVKTAGIDVSKPWLDVAIWPTREATRVSRDTAGITALIAWLTAHGVMRVGLEASGGYDREVSDALQAAGFETATLNPLRVRRFAEAKGRLAKNDTADARTIAQFTAIMVEEVPPPRRRDLDALAELLAYRRRLKGWSTDCTNQLEHPRDGALRKKIERHQTGFERELKQVDQKLAELVAEHDDWRALARRLRSVPGVGPVVSATLIALLPELGVLSRRTIASLVGLAPFDRDSGGHHGERHIKGGRKLVREVLYMAAVSAKTHNPVIAAFAKRLAGKPPKVILTACMRKLLVILNALVRDSTDWSAEPA

SEQ ID NO: 47714 - protein, 289 aa, unidentified
MKHYAGLDVSVKETCVCIVDGTGTVCREIKVPSHPQDLLRILQDPTWRLERIGLEAGPLSQWLFEGLADAGLPVVCIETRHTKAFLKAQLNKTDRNDARGIAQMMRVHLYRPVHVKTLASQKRRALLTARKLLQDKAIAIENDIRGLLRNFGLKVGIIGAVKFQDRIRELIADRPDLAEIIEPLLAARRALREHFVALHQKLLAVVRNDGVCRRLMTVPGVGPVVALAFVATLDSPARFRTSKAVGPALGLTPVQHQRAKVTGSDGSRSAAMPCCEPCWSKPLNRCSCA

SEQ ID NO: 47715 - protein, 411 aa, unidentified
MQVIYERCCGLDVHKRTITACVLKWLGGDWKKEIRQFGTMTHDLLALSDWLVREGCTHVAMESTGVYWKPVYNILEGQFELLVVNAQHLKAVPGRKTDVRDAEWIAELLAHGLLRGSFVPPVRVRELRELTRYRTSLVCDCARTINRLQKVLEGANLKLASVVSDIRGVSARLMLEALVAGERDTSQLANLAQGRLKEKHAQLVEALSCRLQPHQSFLIAEHLAQIDYLEGAIERLSRQIEEKLRPFEQEMAWLDTIPGVNRRTAEVLWAETGGDMARFASARHLASWAGMCPGNNESAGKRRTGRTRKGSPWLRHCLIEAAHGAAHTKNRYLSSQYHRLAARRGKKKAQVAVGHSILVIAYHLLTRKQPYSDLGANYFDERDRQAVTKRCLNRLQKLGFKVTLENVQMAA

SEQ ID NO: 47716 - protein, 336 aa, unidentified
MTTIATLGIDIGKRSFHVIGRDENEKQVKKAKYSRQKLLKFIANIPPCLIAMEGCAGAHWLGRKCQEHGHQVKLIPAQFVKPYVKSNKNDFIDADAICEAVGRPQMRFITLKTEQQQIISAWCRIREGYVVEKTAVSNKIHAFFLEFGVSRSKGKRSLNEIPSILEDSEAPIPDGLREIISRLYDEYKALQQQIKQVETRLTELLKPEPLAEKLMEVHGVGLITTALLIAKVGDGKQFKNGRELAAWIGLVPRQYSTGGKDTLLGISKRGDSHLRRCLIHGARSIIQWHSESSQRWSSWLKKLQSTKPANVVCVALANKLARIVWAVMVKEPRFQA

SEQ ID NO: 47717 - protein, 407 aa, unidentified
MRGFGLDVHRDFCEVAVAEGGTIRSAGRIATRVDSLALFAQSLVASDVVALEATTGADKIVSLLQAHGIRVVVANTRKLKSISEAKAKTDRLDARTLARLLVSGLLDEVWTPDERTRTLRRLTNRRERLVRARTRAKNEAHGVLARNLCDRPPVTDAFGKAGRRWLARLQLPVDERLTLDGCLRQVDFLDEEVGALDREIAKHALAWPEVLRLMTVPGVNVQTAATFMASVGDIRRFSSPRKLVSYLGLDPRVRQSGSGPARHGRISKAGASEARHMLGEVAWKVMQTPGPLRAFFERVRARRGPQVAATATARKLTVLFWHLLTREEDYAFARPAMTRNKIRRLELLAGAPAQKGRKASAVSLRLEGDMMQGETVSRARSTTRSRPPRRPTGFLPPLGLRYLRGQR

SEQ ID NO: 47718 - protein, 343 aa, unidentified
MTRFVGLDVSQKITAICIVDNAGRRLWRGQCPTVPEQISVLVRRHGGDDARIGIETGAMTPWLVHELRNLGLEVVCLDARHARAALEMQINKTDQNDAEGLAQIVRTGWYRSVHVKSFDSHRARALLGARTQLIGMTTRLSNHIRGVLKTFGLLPGAMRGLPFDRKVEALLLDRSDVALIVRPMLVAWRQLREQIAVFDKAIRVLVRLNSSCRLLMSVPGIGVLSALAYVSTVEDPGRFSRSRSVGAHLGLTPRQYQSGEVDRSGRISRCGDTLARTLLYEAAVVILTRLKKASSLKDWGHAVARRSGNGKARVAVARKLSVILHSVWRSGQPFRWSEHAGAA

SEQ ID NO: 47719 - protein, 402 aa, unidentified
MNAVGIDVSKSKSVVAIMRPFGEIVSTPFEIKHTASDIHSLIELINSVEGESRIVMEHTGRYYEVLAHQLLEANLFVSAINPKLIKDFDNDSLRKVKSDKADAVKIARYTIDKWQNLKQYNVIDELRNQLKTMNRQFGFYMKHKTAMKNNLIGILDQTYPGVNTYFDSPARSDGSQKWVDFASTYWHVDCVRKMSLNAFIDHYQNWCKRKKYNFSQSKAEEIYGKAKELVPVLPKDAITKLIIKQAVDQLNSASTTVESLRTLMNETASKLPEYPVVMAMKGVGTSLGPQLMAEIGNVSRFTHKSAITAFAGVDPGVNESGTYEQKSVPTSKRGSADLRKTLFQVMDVLIKTHPQDDPVYQFLDKKRAQGKPYYVYMTAGANKFLRIYYGRVKEYLASLPES

SEQ ID NO: 47720 - protein, 332 aa, unidentified
MSNIIGIDVSKASLDCAYLRDADQKRTQRFRCDNVVSCFASLVAWAEARSGLPVESFAFVIEPTHVYHEQLARFLYNTGATVYLVNPGRVRKFAEGIGILSKNDLVDAELLVRYGLLARNLIAYEPVAQEVTDLRSLLNRLDVLERNLRSELNRQEKVGKTMVFHRLERQSIARAVKRLKAEVITFKRAIRECIKSTPSLQQSFNLLCTIPGVGAKTAWIMIVILASRPFISAPEVASFLGLNPIEKRSGNSQYRRPRLSKSGSGHYRQKLYFPAMVATRKNPDIKALYERLLAADKTKMCALGAAMRKLVHICYGVIKNQTPYQVQTTQSS

SEQ ID NO: 47721 - protein, 328 aa, unidentified
MGIDLAKATFDFCLLSRDGAVLWRGRFTNDASAIRQFLAQLEGGRWKPSLIHFALESSGVYGKALIGALHQVALAVSVLNPAQVKYFAFSVLRRTKNDRVDAELIARFCRERKPLATRPLRPVEEQLKLLVHERESRVGEQNRERSRAKKDPFQISLPALISHQGQYRLNQLQKEITQLDEAINELIASDECLKTQSKLLCSIPGIAETTAAKLLSELAGKEFQSARRLAAYAGLTPSEFLSGVSSYGKTHLSKIGNAFLRKALYLPAAVARRWCKPLRPWVTLLEKRKLTDLAIRGAIMRKLLHIAFGVLKHQTPFDPSLVFMPKTV

SEQ ID NO: 47722 - protein, 390 aa, unidentified
MHVVAHQPEAPGAIRSDLGAIFVSLELSRSTWLITSLSPCAGEKMSKHGVAAGDIGALLARFSEFKQKAFARTGKSFPIIVIQEAGLDGFWIHRVLQSEGIESHVVDPASIATSRRRRRAKTDRIDGEALLRALLAYKRGEPRVCAMVKAPTPEEEDRRRLSRERKTLIGERVEHVNRIKGLLFCQGVSDYEPLRRNRHQRLDELKTGDGRALPDHLKAQISRELDRLELLLEQIKAVEAGQNTLFAAAKAEAPTPAPVTMLLDIKGIGPEFAAILWMEAFFRSFANRKQIAAYAGLAPTPWQSGAVNCEQGVSKSGNPRLRTTLIQLAWLWLRHQPQSALALWFKERVTRNGGRFKKTTIVALARKLLVALWKYVTAGIVIEGAVMKAA

SEQ ID NO: 47723 - protein, 459 aa, unidentified
MVVEGSHENRGLLPSSTSVRLLKSSSPPRDRHLPIIHVFEKAEVTVDLVHPRCAGIDISKRDAKVCVRVASAGRAKATSTVTTRGSVTNQVLALREHLVAEQVTLVVMETTSDYWKPFYYLLEDGPFEVMLVNARHVRNLPGRKSDVSDAAWLAQLGAHGLVRGSFVPPEPIRQLRDLTRTRTAIVRERAREIQRLEKLLGDAGIKLSAAATDITGVSGRAMLEALIEGQRDPVVLADLAKRRLRSKIPELTEALTGRFGEHHGFLARLHLDLIDNHTHAISELAARIEVVIEPFRGARDLIVTIPGISTNVADVIIAETGADMTRFPTAGHLASWAGTCPGSNESAGRIKSTHTRPGNPYLKGALGVAAMSASRSKNTYLAAKFRRIASRRDPIKAVVALEHAMLVAVWNMLDTGTFYGDPGEDFFTRLNPDRAKNRALEQLRKMGYAVTLSPLAASA

SEQ ID NO: 47724 - protein, 353 aa, unidentified
MDVTTVAVDLAKDSFEVVMATATRRIVSRRRLTRAQFERFLTDLAPGTELVMEACGTAHHWARYGQARGLRARLLPSQYVRPYVRRNKTDRCDAEALLEAAGCGGIQSVPVKTPEQQSIQALHRVRTQWQGARTARINVVRSLLAEHGISIRRGAAAALHAIPALLDENDRIPSYLREVLGRVYEEIRSLEERIREVERLLRAIAAQHPIAPRLQQVPGIGVLTATACVGSVGHIHAFRRSRQFASWVGLTPREFSSGRRRHLGRISKCGDAYLRCLLVHGARSVIIAAQRTARTRPERLTRLQQWAITLVQRRGHNTATVALANKLARILWAVWHHDVDFTSTAAVTETEAC

SEQ ID NO: 47725 - protein, 381 aa, unidentified
MRTTYDEQHKADDRVLAVALELSKASWKVAMSDARHHPRIKNADAQQPLERLEQVLALIKDARARWSLPEDVRVVVLYESGQDGFWIQRALATRGIETLVIDAASLPVERKARRAKTDRLDACRLVEALLGWLRGERQRFRVVRQPSVAQEDSRHWGRERQQLQREMQQHRDRMVKLLTTQGCWEKFDRGFAQRLANGELRDWEGKPLGATLQVRLQRELTRWQQARDQLKQLEQERAERFSVQQQAQLTQLVQLRGVGPVSAQRLVLELFWRHFANARQLGACVGLVPQPYDSGTMRKDQGISKQGNRRVRALLIELAWMWLRYQPNSALSRWFASKVQGDSKRSRRVAIVALARRLLIALWRYLERGMPPEGSQLKAAA

SEQ ID NO: 47726 - protein, 347 aa, unidentified
MNYCGIDLGGVSSYAFVTDEKGNKLWSGPIATEKVAFEQLAKKFAGGGLSIAIEAGNQTAWVHEELVKLGAEVTVVNPTKVKLIAESRRKTDKIDAKILCELLRLNALPHPVHMPGPQARELRGLLVARRQLVSARSKLSNVARGMLRQTGVRLPAGGLSSLVAWKRLLAGGFEQEHLLLIVSAYYDSFVALTKSIRELDRQLAQREKNEPRVQRLKTMPKVGRIASLTFLAAVDDVKRFSSSRKLVGYSGLAPTVRQSSERTEYGAISREGRSELRAVWVQIAHLVARDKTKATQPLRTWFNRVARKRGKKTALVALARRLLVIAYQLLRTEQDFDVGRLKKKRAA

SEQ ID NO: 47727 - protein, 345 aa, unidentified
MALAISVLGVDLGKNVCSIVGLDSSGAVVMRRKMRRETLIGLAEKLPACLVAMEACCGAHHLGRIFATAGHDVRLMSPEYVRPYVKAHKNDDRDAEGIAEAATRPTMRFVELKSQDQLDMQTLHRSRDRLVGERTALINQLRAILLERGFVAPQGKRKLEQFLTALMDEQGGAGLRPRMMLLVADARAQWAELDRRIAAFDAEFIRWAKENEDARRLTTIPGVGALIASALIAAVGRAESFDRGRDLAAWLGLVPRQFTTGGKPKLLGISKRGDRYLRRQLIHGARAALPYVAERDTPLGRWAKELMGRAHRNVAVVAFANKLARIAWAVLRRQERFAAAPTVAT

SEQ ID NO: 47728 - protein, 402 aa, unidentified
MTSTLPVVAGADTHSQTHHVAVLDAATGALLADCQFPATLAGYRAILAFVATLGRLTRFGVEGTNSYGAGLTRHLSEAGIEVREVIRPNRAARRLRGKSDPLDAITAARVALADDHLPTPKSSDGPVESIRVLAMVRDSAVKARANVLRQIAMILVSAPATQRESLQGLRETALLRTLRRSRPGDPLTGVEPATATALRHLARRHDHLTEEIDDTTEQLRALVEHVNPGLRAAPGVGVVTAAQLLITAGDNPQRITSKAAFAAISGVSPIPASSGKTNRHRLNRGGDRRANNAIHTIALVRMTMDPRTKAYITKKVAQGKTKREAIRCLKRHIANEVFTLLTNPPTVPDITDLRPTRQARGLSLQTVADHFGVWPMHISSIERGKRRDDDLAHRYRQWLTAA

SEQ ID NO: 47729 - protein, 436 aa, unidentified
MRGCRCSMIMGFTKPIEHFNLQRKKVITMNTLYVGIDVSSKSNVVYLMLPNGDKHSNFSVANSHEGSTQLVKRILSALTSHSLDTVLIGLEATSVYGDNLVYFLREDATLAPFNRKIHVLNPKQVKKFHDAYNDLPKNDYVDSFVIADCLRFGRINKEVYLGDYRYKALQNLTRARFFAVQNLIKEKQRFMNVLFKKYSTMTQEKVFSDTFSTTALAVYDEFDSAEALANMDLHELTDFIIEKGKNRFPDPDAVAKAIQKAARSSYRLPKTVNDSVNQVLSISITSMKALESQIKEFDKAIKAQMELLPNVLISIPGIGPVYSAGIMAEIGDINRFDNQAALAKYAGLAWKQHQSGSFEAEVTRLIPSGNRFLKYYLYEAAFSLVRCDKEYSDFYHLKYKEVNRCQHKRALALTARKFVRLVFRLLKDNRLYCPAK

SEQ ID NO: 47730 - protein, 337 aa, unidentified
MDYFAGLDISMDATHVCVLDREGVVIHESKTASTAQSIADELAKAPSCRRIVFETGRMAPILFHGLSQLGLPVVCVESRQAYQALKSLATHKTDRNDARGLAHLARTGFFKPVHVKSLSAHAVRSLIIARKKLVGQRVTLENQIRGLAVVFGVRLPRALTAAFIDQALKASEGVAGLSAAMRGLIAARTAVMTAVAAIDADIRRMTTASEACRRLMAIPGVGQLTALAFVAAIDDPSRIRRSRDVGAYLGLVPKRYQSGEVDYVGGISKCGDRRVRTLLYEAANVMLTRYKGQLKLKEWAFAIAKRSTMRKARVALARRLAITMHAMLRDGTEFASA

SEQ ID NO: 47731 - protein, 453 aa, unidentified
MVQRKQKISIKASKSREALTITHPNAAGIDIGSSSHYVSVPPDRDDEPVREFPSFTVDLNALADWLDACRVDTVAMESTGVYWIPLFELLESRGFKVFLVNARHVKNVSGRKSDVLDCQWLQQLMTYGLLRGAFRPTDAVCVLRALWRQRGILLRNQGTHVQRMQKALTQMNIQLTNVISDVVGETGQKILRAIVAGERDGQVLAAMKNARIRATADEIAKSLQGNWRAEHLFALKQALDMFDFIGTQLAECDREIEAQLQTLQAHDGEPANGKKRGRTRNAPKFDLRTQLFRMCGVDLTRIDGIDVTTALAVISETGADMSRFPTAGHFASWLGLCPGTKITGGKVMSGKTKRVANRAAQALRLAAAALRSSQSALGAYFRRMCGRMDKPKAVTAAAHKLARLIYTMLTKGEEYTDQGQDYYEERYRERVLRQLALRAEKMGMKLVASEQPA

SEQ ID NO: 47732 - protein, 428 aa, unidentified
MGRSIGLDVHREFCEVAVSDGGPARSAGRVGTSAEQLQLLALSLEAGDRVVLEATGNALAIARILAPHCAEVLLAHPKRLRAISHAKVKTDKLDARVLAELLAANLIPAVWIPDEQTRRLRRQISRRRALVKRCTAMKNEISAVLIRNLKRRPEATDVFGRTGREWLHRLELPLDERETVDACLRQLDFVTRELSMIDTQIAEAAIRSAQMRRLMTIPGVDATTAATVIAAIGDVTRFPSSRHLVGYLGLHPKVRQSGSSPAHHGRTSKEGPAAARHVLVEAAWITTRSPGPLRAFGQRVAARRGKHIAAVAVARKLATLAWHMLTHEQDYAYQRPTLTRRKLRRLELMTGAPRVKPGPNHTPIRKTGAAQIEWQLAEQAEIAYRRLIADWQATGPKEGAGATPGRASQRPSKGKAARQATRPQTPAL

SEQ ID NO: 47733 - protein, 331 aa, unidentified
MEKDGWAGIDVSAARLVAAIEDARGRVQRVEVANDAAGHRTLLRQVRKAGRQVAVCLEATGVYHFDLALALHRASGVTVMVANPRSTAHYARAAMRRSKTDRVDAALLLDFVKRMPFRAWTPPSTVVLNVRAFARRIEALIQTRAQEKQRLHAITRSAEFSPALAAASRAHLAFLQSSIRSLTADAKALVQTDPQLARRLAQLVSVPGIGERSALRLLGELAVLPADMTVRQWVAHSGLDPRHLESGSSIHRPPRISRAGNTHLRHALYMPALVAIRVDVAVGHFYRTLLGRQKRPKQAIVAIMRKLLHAIYGMFLHDEVYDATKCYPQAA

SEQ ID NO: 47734 - protein, 484 aa, unidentified
MRGGKIAGIPPTHNPQRSLYDACRPGCRAYRGLESRRTVTDRTGLSRGDRNRNARLARLRVLLPQRNAIVGIDLADDKQAAVVTDHDSRVIARRRVAARAWELGELLDWAVGVATAAGFVSVTVACEPTGHRWRVLDQLAAQRGLAPVCVQPLLVYRAREAEDLTRDKSDPKDAVLIARLASELRCYEPERADAVWARLRHLGARRLQLTTDATGQANQVRDLLECAWPAVLAAAGKPFRSATWCAALALTLDRSAGDLGRVHRLGPTRFEAAVRRELPRWGASRPCLRIVRAVFAALADDAGVSAHRPGALERAGLVMADWHDTRQRLAATEARMVTVMDELGLTGLVTTIAGLTPVGAAAILAETGDPARFATPRSLVKHAGLFPRDNASGEFQGKTPISGRGRPGLRVAAWRAVWAALPNNPVLAAKFIHLTTRDDNRLARQQARTACAAALLRWIHVVITKGVAWDPAIAAGITPLQRAA

SEQ ID NO: 47735 - protein, 313 aa, unidentified
MITEEVHVVGVDVSKATLELGCFSLTLPASIPNTPAGFKILLKSITKCITPVHIICEATGPYHGPLVRFLHQAGIKVSVVNPRLTRDFARARGKLAKTDAIDALLLADYGRTMQPDPTAPPEEHVVLLDELVTRRAQLVEDRARERNRLEQASGPDVAASLRLHIRHLDEQIKKLLKRIAEVVEKHPSLKAKVSLLAQVHGIGTLTASVLLATLPELGTLSKNEVTALAGLAPFNRDSGAFRGKRSIHGGRIGVRCAIYMSALCASRGNPILKTFYQRLRAAGKPHKVALVAVMRKLLIYLNSLLKQHSLSPA

SEQ ID NO: 47736 - protein, 349 aa, unidentified
MPPTVHAVTAIGIDMGKNTLHMVGLDLRGAIVLREKVSRGRVASRLANLQPCLIGIEAGMATHYVARELAALGHDVKQVPPTYAKPFRQGHKNDFRDAHAVAEAVQRPTTRFVPAKTNEQLDLQALHRVRSRLVSERTAVINQIRGFLLERGIIVRQGLRFLRQQLPDILAKRTDVLSPRMVRIVADLAGDWRQLDERIETVTNEIETLAKSDDNCRRVMTVPGIGPIISSAMVAAIGSGAAFARGRDYSAWLGLVPKQMSTGDRTILGRISKRGNGYLRTLFMQAARVILLRPANWPKHGFGAWLIRAAQRLHPNVLAAALANKLARIAWTVLAQERSYEARVTKAAA

SEQ ID NO: 47737 - protein, 352 aa, unidentified
MEIIALDAHKHYSQVCVQDGSGRFLCEKRIEHAKGQIFGFLSQWTPGTSVAVETVGNWYWIVDEIEQAVMVPKLVHAHKAKLMLGSINKTDKLDARGLNRLQQTGTLPTVWIAPGEIRDNRELPRTRMVFANFRTRLKNRIHSVFDKYGLHRDFVGISDIFGKRGREQMTLTIKQLPSETRYTLRCLLRELDMVESQIVRIEKRMKKVFTKTEMVKRLMTLPGIGFILAVAIANEIGDISRFATPQRLASYAGTVPRVHSSGGYTRYGKLRSDVNHYLKWAYSEAGNSTAVNHKRFPFRHTSKLYRRIRERKGHAKAVGAVGRHLAEASFWILSRNEDYKEPKSKSFSSTAV

SEQ ID NO: 47738 - protein, 349 aa, unidentified
MAALERSSTGAIKLGIDVHQDFYVVVEQVDGSNPKPPQRFAKAAFLHWATKLKNGKGEVYAVYEACGFGFSLQRQLSSLGVQCHVVCPQKLDEQNRRVKTDGLDAKALVLKLDRFVQGNRSALALVRVPTEEEEQKRAIHRQREQLVKARMQLEAQGRSLMVNHGLEPVKSWWKGRTFAALQVPEWMKELLGNSQSILLALQEKIGALTLQLQAAALAQQPRGLGKMTSVIIDREIGDWKRFNNRRQIASYTGLCPGEYSSGNTRLQSCVTKHGNPRLRAALVELAWRLVRFQPNYKPIKKCKRLLGKGALATGAARKKAIVAVARQLAVDLWRIKTGRLRAEELGLIN

SEQ ID NO: 47739 - protein, 356 aa, unidentified
MKKVTSVISYDGKEVFIGIDVHKKTYAVVARLDGEVIKKWTTAADPQGLAQQLLKFFVGAAIHTAYEAGFSGFVLHRVLTSHGIHNLVIHAAGIEVAVNDRVKTDKRDAQKLATLLEAKRLRGIRIPSEAQEQQRMLTRTRQQLVEDRTAVKNKIRMKFHQLGLIDNDENRPMTHRLVEKLLPNVSAQEFILAIEAYWSIWKKLDEEISKLVAELKQQAQADPNEHTYRSAPGVGPLSARILSNELGNMSQFRNERQLFSYTGLTPSEHSSGENIRKGGISRQGNSRLRGILVEISWRAIDKDTALRACFDRLHPRIGKKRAIVAIARKLIGRIRAAFQAEVEYKVGYFGLEGEAA

SEQ ID NO: 47740 - protein, 315 aa, unidentified
MSDVPCFIGIDVAKAQLDIALRPSGERWAVPNDASGVATLVDRAQTLQPTLIVLEATGGLERAVTSALATAGLPVVVVNPRQVRDFARATGQLAKTDALDARALAHFADVIRPAPRPLPDAQTQELRALLGRRQQLIGMRTAEQNRLAGVSERLTKDITAHIAWLNAGIATLDDDLETLLRASPLWRENDDLLQSAKGLGPVSAHTLLLELPELGTLTRQQIAALVGVAPLNCDSGTLRGKRTIWGGRAHVRTVLYMSTLVATRFNPQIKTFYQRLLAAGKVKKVALTACMRKFLTILNAMLKQRTPWQAQEVQS

SEQ ID NO: 47741 - protein, 338 aa, unidentified
MKLYCGIDLHSNNSVIVILDETDKVIYQKKLNNDLEVILQQLSPFNDDMVAIAIESTFNWYWLVDGLQAAGYEVKLVNTTAVQTYSGLKFTDDKHDARWLAHLLRLGILPTGYIYPKVERAVRDLLRKRSQLVQQSSTNILSAQNILTRNAAQSLSVYRLKKIEDEQLETLLVDANISLALKSNITVIRCLQTAIKEIEACVLKQTRLRKEFQQLLSVSGIGPILGLTIMLESGDMNRFAKVGNYASYCRCVKSERLSNGRKKGENNRKNGNRYLAWAFIEAANFAVRYNDKIKSFYQKKKSKTNGIIAIKAVAHKLARACYHIIKDQVPFDVNKAFA

SEQ ID NO: 47742 - protein, 350 aa, unidentified
MTMVGGLDVHRHQITFDYVDDDGLVHWGQIRPATRHTLRVWLGEHCPQRDAEFALEGCTGWRYVSDELAAAGVGVHLGDPAEIAALRGPKKRAKTDRADARLLRTLLLEGRFPESWIPPAHVLEIRTLGRLYCTLMDQRRAWQQRIHAQLFHQGCPPIRALLSAAGREALAGAELSAVGRQYVDAALRRIDELSAEIEPLRTQIVNFARRQAGCRALQTHYGIGWLCAAIIWAEIGDARRFTSSDQLVRYAGMDVTVYSSDNKRAPGHLSRQGSPELRWAAFEAAKCAARRGSPDYAYYRRLAAKHERHNGKNPTLAVERKILRRCYHTLRELGAPALALPDTSSQQAAA

SEQ ID NO: 47743 - protein, 373 aa, unidentified
MFHFTTLFIGMDVHKESFSLCYYDMMANQFKHSTKVGPNVSYIVNYVNELRRLYGQDAEVLCGYEAGCLGFTLYHQLQAHGIPCIVMAPTTVMKEGSKRVKTDKKDAAQLAKVLAFHSYRPVHIPTVEDEQVKEYIRMRTDHKVALKKIKQQILAFCLRHDFRYTEGSSNWTQKHVRWLHSLNLDGLYAEILTEYLLTYEKLVDQIERYDARIEQLGQSDSYQEKVSQLSCFIGVKTLTALSIVTEIGDFNRFATAQHFASYLGLTPSENSSGDKERRGAITKAGNSHVRRLLIEAAQSLAKGTVGYKSKELKRRQSGNRVEVIAYADKANERLRRRYRTLVLGKNKKQNVAKAAIARELSGFIWGMMTGRIA

SEQ ID NO: 47744 - protein, 427 aa, unidentified
MNNALTTTLFIGIDVSSKSNYVFALDFFGKKLLSFQVNNNLPGSEEIVSTILSCLKENNLTHLTIAMESTSFYSWHLANTLATHEALVWFKPKVHCMNPRVICAYKKSFIDMDKTDPKDAFVIADFARVGKITTAPWNGAQYIALQRLTRCRLHLMENISREKSYILSNIFLKFSELAVLDKSENPFSNTFGATSLAVLTEYMSTEELANASIEDLVAFLVEKSKNRFSNPEATAKLLQKAARDSYRLDKALYDPLNATIAASLNCIKALEKEVKGLDKAIEKAIKRIDNHEFQCLLSIPGIGPVLTAGIISEIGDIAKFNNQCCVAKYAGLTWRKKQSGNFTADNTFLTKTGNKYLRYYLLEAAASVVRHSDEYRDYYHKKYDEALVHKHKRALALTGRKLVRLIFALLHNNQLYTSKEVVGKAII

SEQ ID NO: 47745 - protein, 355 aa, unidentified
MDNAKYIGMDVHTETISIAVLNSTGKLVMESVIETKALTVIQFMQGLRGDLHVTLEEGTWAAWLYDLLRPHVHQVLVCDPRQNAFLKVGNKSDKIDARKLAELLRSNLLRPVYHGEHGVRTLKGLSRSYLAIRGDLARVMTRLKAVYRSWAIPCVGKQVYAPRYRAEWLGKLSEAGVRRRAEIYYEQFDALRSLRQQVRRELLAESAKHKASKLLCQIPSIGPIRAAQLIAILQTPYRFRTKRQLWAYGGLAIETHSSADHRYVDGQLRAAKKQVSLRGLNRNHNHELKNIFKGAAIIAATKPGPLQDFYAALVAKGIRPEMARLTLARKLAAITLIVWKKGVSFDAQHLKLQTA

SEQ ID NO: 47746 - protein, 359 aa, unidentified
MRRVKAFCGIDWASDHHDIAVVDETGSLLARARIDDTAEGLDQLLRILAEQGETPQEPIPVAIETSRGLLVACLRTTRRPVYAINPIAAARYRDRHTVSRKKSDHLDAMVLANILRTDAAAHRQLPADSELAQAVAVLARAQQDAVWDRTQAGNKLTSHLREYFPGFLAAAGHRREGIYHSIARTLLAAAPTPQRAAKLTRAQLRALLKKAGRKNTIDKEVERLHAALRMPQMRHLPLVEEAMGRQTLALLRQLEAACVSADDLAEASVQAFEMHADAEIITSFPGLGPLSGARVLAEIGDDRSRFADARGLKAYAGAAPVTRASGKSVSVVARRVKNQRLASVGYMWAFSAMAHSDGA

SEQ ID NO: 47747 - protein, 349 aa, unidentified
MEEITTIGVDIAKNVFQLHGVNAEGQVVLRKALRRGQMQPFFEALSPCLIGMEACATAHHWARTLIASGHDVRLIPPNYIKPYLRRQKNDAADAAAICEAVTRPSMRFVPVKNEDQQATLMLHSARELLISQRTALINALRGHFAELGIVAPQGARNVRQLIAILEDERYSPQAVCTALTPLATVLIEIEGQITKLDKALLAAHRNNDVSIRLATVPGIGPVIATCLSASVSDPKLFEGGREFAAWLGLVPRQHSTGGKPRLGSISKMGNRHLRKLFVVGAHAALYRMKKGTADTPLANWARGLLSKKPFKLVAVALANKIARIAWAIMARNVNFQSERVSRCPDLVPA

SEQ ID NO: 47748 - protein, 391 aa, unidentified
MPKPQQRQPDDLSRSLVCVNMDTTLIVVIEMSQSSWLVAGILPGIERQPLKKMKPDETGLLALLYRWRDEASTAGHTVSRIAVAFEAGRDGFWLARWLRAHAIDAYVIHASSVAVSREHRRAKTDRLDTELLKRAFLGWLRGERGHCKMVAIPTSVAEDAKRPNRERENLVSEQNRIVNRMKAALTRLGIRGFNPKLKKAPERLEGLRTPEGEPIPSNTMAELRRDMARRQFVRKQILEIETARQHQHAKGSEDGPNAMVRLLARVIGVGIETADMLVQEVLSRNLRDRRALGRYAGLTGAPDESGAKRREKGLARSGNARVRRGMIQLAWRFLMFQKDSALAQWYRARTENAASSRKTMVVALARKLLIALWRLVRDGVVPDGVVLRPAQ

SEQ ID NO: 47749 - protein, 360 aa, unidentified
MKKNITPVSEIPELTIGLDLSDRTAQYCELDAAGRMLGEGQIKLNHTALRRYLSGKPTGARVALETGGQSAWVRELIEATGHEAVVAHARDLEAVTGRSHRSDRHDARQLARLARVDAGLLHPVELRRSAEQADLFVIRARAALVEARTRLINLARGAAKTLGCRFPSTASHCFAERARAAVPEALEAALLPLLNVLEQIATEIVGYDEKIEALAQDRYPETRWLQQVPGVGTLTALTFVLTVAAPDRFAHSRDVGPFLGLVPRRRQSGEQDPHLRITKCGDGYLRKLLVQCAHVVMGRFGPDSALRRWALQHAQHSRTAKKRTVVAVARKLAVLLHRLWRRQEVFQSFPMAVAELATMT

SEQ ID NO: 47750 - protein, 457 aa, unidentified
MKKQDNYLAMPVVHQQVAGIDVGSQFHVVAIGDDPKQHVQQFGVSTKELFRLSQWLTDNQVSHVALEATGGYERALVNVLQETGFDVLVTSGANTKNYRRFKSDTSDAIHIRTLHSLGLLPPIFLPDEFSTLIRPLVRLRRSLVEDAADYIRRIQKALRAGNVRLDTVLTDTNSVSGLRIIAAICQGQEDPLKLAELVDSKCKKKPAEIIELLRGNWNGAMRFEVRSNYRLYLNLQAEIAELDKELDGHFTDHTKGLEQPQAVADPTVGRQKLRQSRNTPRLPIEQYAHKLLGVDLSNIPGFGRDALLTFMAEVGESITKFNSAKAFAKWLGFTPNNKASGGKVLSRKTLKNKSTLPNTFRMVANSLGNMKKPNPMTAFFQRIAYRAGRIKAITATARKLAVVVYKMLTTGEAYEPTKLVRDVAQVKQQQIRQIKKKLAKFGITGPELGLDVVFLAN

SEQ ID NO: 47751 - protein, 401 aa, unidentified
MKEFNAEAVRIEAASALEAVRPAQAGRKYPAYIGLDVHKETIAVAVARVGRAAPESRGEIANKPKTVAKLVERLNQEFDGEVLLFCYEAGPCGYGLYRQLLALGHDCQVVAPSLIPKKPGERIKTDRRDACKLAGTLRSADLTAVWVPDEEQEAMRDLTRARDDMKGQERKARQQLNAYVLRHGHAWPSNKTRWTQTHYNWLESLKFAHDWQQVVLQEYIDAVKAASQRVADITAQMERVLPQWSLAPVVDSLVALRGIDKLAAMVLLAELGDISRFDSPKQLMAYLGLVPSEHSSGGRRRQGAITKTGNSHARRMLVESAWSYRFPARQTAHLKRKAANASDEAKVIAWRAQKRLCGRYRTLLQAGKNTKQTTVAIARELTGFIWDIVCHEMPKVQQATR

SEQ ID NO: 47752 - protein, 427 aa, unidentified
MRVLYDRVAAIDVHKDMVKVAVRVPGSKRGTRKTDVLEYRTFYGVLQAMARELRRRGVTHVVMEASGVYTEPVYYALTELDFTEVLVINPAHAKALKGHKTDAKDAVRLLDLYECGALLRGSYIPAPDLKEVRDLARYRMKTVQARASEIQRLQKTLETAGIKLDSVVSDITGMSSTAMIEALIDGERRGGVLADLALGRMRTAGKLADLSMALTGRFTDHHALMCRLHRDRISMFDDAIGDLDAKIAPLVARYAREADLLKTLPGFGEVVAAGWLGAIGPAPHRHFGTAERLASWVTLCPGNYISARKSRSGRTGDGGSHIKPLLVQAAWAAIRTPGRLQAKFHRLVRKFGGPKNKGARKRAIIAIAHALLKIAYAVLKTGKPYQEPGADFYTRRESAQAREEYLLRQLQKLNPGCVITITPAEAA

SEQ ID NO: 47753 - protein, 414 aa, unidentified
MDVVVERCAGLDVHRDSVVATVRLPGTGKSRRRRDQQTRSFGTTIGQLETLADWLEGFGVTLVGMEATGVYWKPVFYVLERRFECWLLNAQHLHNVPGRKSDVIDSAWCCQLLEHGLVRPSFVPPPEIRRLRDLTRLCVAQVEERTRAIQRLEKVLQDAGIKLSSVASSTYSASARAMLEALLAGVSDPAELAALAKARLRAKIPQLQEALANRFELAHHGVLVAGLLAHIDSLDQTVATLDARIAAATQPHAELVELLCTIPGVNVNTARVLIAECGLDMSVFGSAEHLVSWAAICPGLNASAGRRRSGKTRHGNRWLRKALTEAARAAARSKNTYLASHYWQIRGRRGDAKAIGATRHDILIAYYHIVRDRVPFRELGADWLARRHSVEHRTHRLVRQLEALGHTVTLEAAA

SEQ ID NO: 47754 - protein, 575 aa, unidentified
MEVMQRRCCGIDVHKKKLMVHVLPPQGQMETRPLEREFRTFTRDLRELRDWLKECGVSEVVMEATGQYWRPVWNVLEQHIPSVMLVNPQHVKALAGRKTDRIDSRRLARFLERGELVGSFIPPRPIRELRDLTRSRIHLVEEVNRVKNRISALCETGNIKVSSVATDLFGTSGRRMLHSVADGNQDAGWMADYAQGRLRQKRQELSLALDGDFSECQRWMLREALAHLKHIEKAITDLQAEIGKRMQAYEDQIQHLVTIPGVDRIVAWTIIAELGTDMSVFPDAKHVASWVGICPGNHESAGKQRSGRTRKGNPYLRRDLCQAAWAASHTKGTYLAALHRRFTVRHGHNKAIMAVAHRILIVAYQMLRKGEDYQEHGGNYFDRQDRSRVTTRLVGRLTSLGYHVSLQPASTVVAPVQTLATEGERATPTPGGTPPPKAARRPPGRPCKCAIRGITCTHKTRAERRRLQNHEHSFASTYRRPFFVGPLTDKRQGLHPSLFSRDHVGSIENSPADCRETDAKCESPASLMPMPFAGFARHWRFRGIQSPRWLLPYQLAPATPGVAPIPSDLHAARRT

SEQ ID NO: 47755 - protein, 308 aa, unidentified
MLTLRFDNTAHGLKLFKKWLTAQHVSFDNNTLLVIENTGIYHRLLWRFCSTHNLQLHIGNAAHIKWSLGITRGKSDIIDSKRLCLYCCKQAEELKATPALNPVFMKLKDLMTSRSRLVAQLHSTKNYPKEIQCTEDKQLLLVLESLHKAAIEGLKKSILKIEEYITKMIKEDAAIYHNYELIKSVPGIGHLTAVYIICCTNNFASKISGKQLASYAGVVPFEHSSGISIKGRNRVHKMANKDLKKMLHLCALTAIKYYPEFSNYFNRKKAEGKNGMSALNAIRNKLVLRVVAVVNKQTPYVDYSVKVA

SEQ ID NO: 47756 - protein, 426 aa, unidentified
MSQIVSAERAQAVWEAVIEHCCGLDVHQKSVTACLLDGDLDQQPSESVRTFSTTTKGLLELRDWLEDQGCTHVAIESTGIYWRPVFHILEDTVTVLLVNAYHMKQVPGRKTDLKDAQWIARLLRWGLLKPSLIPPRHIRDLRELCRYRKKLTEQASAEKNRIQKVLEDANIKLASVANNVFGVSGRAMLAALMDGVMSPEETAELARGKLRSKIPQLVEALEGHVNEHHRFLIGMQMEHLAYLEQAIAELQRRIDEKMQPYQRELELICTTPGIDTRSAQHILAELGGDISVFPSERHLSSWIGICPGNNESAGKRKSGRTTKGNVWLKALLVQTAHASSRTKGTYLKAFYHRVAAKRGKKRAAVAVAHKQVTIIFHELSEGKPYQELGENYFDRRNQKALEQRLVRRLRSLGYPVDLQPEALPAQ

SEQ ID NO: 47757 - protein, 325 aa, unidentified
MQHHDDRRSLRSVVGIDVAKHTLDVFVDLPARSFSFANDDAGRAALVAELRRVDDAALVCVEATGRYHRRLAAELLDADIPVAVVNPQRVREFARATGRLEKTDPIDARVLAEFARAVGPRQAEQPPQKQTELRDLVSRRRALVQVRVAETNRLADDAPKLARTQAARLLRFVEQQIEDLDRAIAKLVERDDDWNHRAGLIAGVKGIGQATAHQLVADLPELGKLDRQQIAKLAGVAPLNCDSGQRRGQRHIRGGRHDVRLTLYMGAFNAILHNPRFKAFAQRLKDAGKPFKVIVTAAMRKLLVILNQMVKTNTPWNPDLAFKFD

SEQ ID NO: 47758 - protein, 375 aa, unidentified
MGKNTRFVGLDVHAETIAVAVAEGRNQVRSLGTIANRPEAVRRFLGKLGKLAELKVCYEAGPTGYALYWELARLGVACEVIAPSLVPMKSGDRIKTDRRDAERLARSYQAGDLTAVWVPDSQHEALRDLVRAREATKEDQLRSKHRLLKYLLRYGQRPADDGRSWTTAWWQWVRALRLPHPEQNATLLELILEVDHQGQRIERFDAAIDQAVAAAPEQLQAIVGALQALRGVAKVTAVTLATEFGCFSRFEKAGQVMSYTGMVPSEHSSGPKTRRGAITKTGNSHLRRVLVESAWHYRHQPKLCKRQKELQRSLSPQVAAIAWTAQQRLHRRYWALSNKNKPSAKIVTALARELAGFVWAIGVETERSLKLGKAA

SEQ ID NO: 47759 - protein, 367 aa, unidentified
METLHVGVDVSKEKFNYAILRNGNKLKEDQQKIDYTGMHWIRGDIEVLRRQGEIVNIYIEQTGIYAIPLIKFFLESGYRVFLVDGGRFNQWIKLKGGKKTDKKDAENLALYGIAGLPTREIELKDLVIFELKQLITHRERLLKEINGTMNYLRQLVETEYPSLRYQPKTKLWRIVKNRQEQEYSTMMGFKALKWIIKEQRDKLLYLEEMLKDVEEAIEEFLKKYFKEDAEVLRSFGFRKTAGYLIATYGDITRFKNVKKFKKYMGLANAPAQSGKSEKERRTYNNKHIRKILYMYVVQNLRHENEVKRYYEKLIERGVKKKKKAIMKTASKVLEWIYYALKNKTLYDLSWLECLEEANNETQQKDIG

SEQ ID NO: 47760 - protein, 368 aa, unidentified
MFEHTFIGLDVHAVNVVGHALNPGTGEISHHTMAADPALVLEWVRRFEPPVKVVYESGPTGFVLARYLRAAGVNCVVAASSKLLRAPGDRVKTDRRDARVLAEMLAVGSVTEVRIPDPDEEALRDLSRLRSGAAKDLAHARQHVNAILLRHGLRYPKDTRWTQEHRLWLHRQRFDEPALQFTYEADVEQAELLAAHLKRIDQQVAATAAACPYTAVINALMCLRGIQLTTAFGLAVEIGDWTRFTGSSIGSYLGLVPSEESSGQSRHQGPITKAGNTYARKLLIEAAWQHRRPYTRPGERLLRQLDQVAPATRIRALEGNHRLHRKWEHFDERHKMSVKANTAIARELAGWCWSLAAPLQKGRAMSAA

SEQ ID NO: 47761 - protein, 375 aa, unidentified
MSNHSEAFVAFDSSKLRNAVAIADSGRMGEIRFLGEIGNTATTTAKLVRKLASKYERLTFCYEAGPTGYELYRQIKSLGQECIVVAPSLIPKKPGDRVKTNRRDAVSLAKLLRAGELTAVWVPDRHHEAMRDLTRARDTAVNDLRSKRQQISAFLLRKGLHYCAGKKTWSQAHLNWLMSQRFEYPEHRLVFEEMMMAMRQAQERLERLEQAMRAAVPDWSLADLVTALMAMRGIDLISAATFLAEIGDLSRFQSPCELMAYLGLVPSEDSTGDRIKRGPITKAGNRRARRTLVECSWSYQHPPRVGKDKQAKVAAAPQAVREIAWKAQSRLNRRYRALVRRGKLKTVAITAVAREFAGFIWAVAREATAARAAAK

SEQ ID NO: 47762 - protein, 480 aa, unidentified
MIRSVGIDLSRTGSHQVRCLDEQAKPCDSFSFDSTLEGLEKFEKRVFSNSDTPTIIFEPTGLAWIPMAVYLRARHPECQMVKARLQKVAALRRYLRSYTKSDRVDGVTLAKMPFIDAEQLDEAYLPPAEYHSLQRLTRQRERLMKSITVRKNRIGSIVNGYLPGLRKAFSDEWSDRARLFYRQRLNPFTVVRDGKSALETFLVSVKAKGAQTESNRVYQACQKLAEFYEKSKAAGMINEDFFDDLQDEIACELRLMETEEAEVERVSVRIEELYGHLHPSDYLRSIPGIGVRTAQVFLAIIGDPHRFRSQSAFANWTGVVPGARQSAGTEGKGLRMTKAGPSMMKRALFQAGDIARRYDPQLAHLYYREMVHHGKTHLQAMGAVMSHLGARIMAVLREGRPYELRDSQGKLLTKKEAMELIRSAYKVPEETRQARRRRKPNEGRLTGRRTREAAKAPQSGPLIPPQKTVYCGEELQSIAN

SEQ ID NO: 47763 - protein, 343 aa, unidentified
MKLHVLGIDLGKTVFHLVGLDSTGQVVIRKKCSRTQLLAFTANLQVQLIGMESCSGSHFLGRALREQGHEVRLMPAQYVKPYVQTNKSDFLDAEAIAEAVQRPRMRFVPIKTDEQLDLQALHRVRERWVMRRTAVVNQIRSLLLERGLTLPKGRRYVDARLPGILEDAELRLSGSFRVLLAQLKIELEQLTARLEQMDRVIQQTAKENEACQRLTEIPGVGPVTATALIGAVGNASDFRKGRNLAAWMGMVPRECSTGGKQKLLGISKRGNKYLRTLFVQGARSVVQQRHKQAPGLSSWLAQLLARAHQNVVIVALANKLVRMAWAVLCKNERYRAPDLAVTT

SEQ ID NO: 47764 - protein, 346 aa, unidentified
MEHYAGIDVSLELSSVCVVDGRGKIVKEAKVASEPEVLGCFFKELGVPANRIGLEAGPLSQWLHAGLTQAGFQTVLLETRHVKAALSAMTVKTDRKDACGLAQLLRMGWFQQVHAKSIGSQEIRALLVARKQLLGQLLDVELSIRGILRGFGLKVGQVTRKTFEARIRELVTGHTTLERIAEAMLLARATLKAQYEKLHKAVLAIVREDAVCRRLMTVPGVGPVVAVTFKSAVDDPSRIGKSKAVGALFGLTPKKYQSGEKDVTGGITRTGDEMVRTALYEAANVLLSRITRFSKLKRWGMDVAKRRGSKRAKVALARKIGVILHRMWIDGTTYRWAEANPIAVQG

SEQ ID NO: 47765 - protein, 355 aa, unidentified
MDTTKYVGMDVHTEAITIAVVNSAGKIVMESTLETKANTILEFFQGLRGNVQVTFEEGTWAAWLYDLLKPHVTTVVVCNPRKNALLKDGNKGDKIDARKLAKLLHLNNLKPVYHGENGIRALKELSRSYLTITKDLGRVMNRLKALYRSWAIPCAGQQVYAPRHRSEWLSKITEAGVRRRAEYYYQQLDALQALRHEVRRDLLAESRKQTGTKLLRQIPCIGPIRAALLIALIQTPHRFRTKRQLWNYSGLGIQTRDSAQYRFVKGELQRSKRPQILRGLNENHNHDLKNIFKGAATMATISPGPFHDFYEGLLAKGRKPTMARLTLARKIAAITLIVWKKGDSFDAKHLKQQAA

SEQ ID NO: 47766 - protein, 413 aa, unidentified
MDWVACVGIDWGDREHAYVGRTRGGSTFRGTFKASAEEVHQWARQMREQFGGGKLIVAVEQGRGSLLYALMSYEFVVLVPINPCASKAYRDSLRLSGASSDPADAALICEFAFKHIDELRAVKPDDVLTRKLRLLAEDRRRLVDQRTAFTHMLAETLKQYFPQALEWFGGESSPCLVTFLGRWLTLAKMRKATAGQLTTLFRSARAQHACRRGEELLAKLRAAVALTDDEAIVEAKSRYAESLILMLVPLARQIEAYDQAIAALWAEHPDRAIFDSLPGAGPVLAPRLAAAFGQDRARYSAADELQCYSGIAPVVEQSGKQRWVHSRYGFPKFLHQTFHEFAQSSMLKSRWARAFYQEQRSRGAGHHQAIRSLAFRWIRIVFRLWKTRTTYDEQHYIDALTAKGSPLVARLAA

SEQ ID NO: 47767 - protein, 361 aa, unidentified
MSVERMHVGLDVHAHVVVAAALDAETGELVRRRLGSSPGEVLAWLRSLPGPVAAAYEAGPTGFTLARALRAGGVRCEVLAPSKLQRPVGERVKTDARDALHIAKLLRLDEIVTVRVPSETQEAARDLVRAREDARRDLMSARHRLGKLLLRHGVAYPGKTAWTRAHHDWLRQQRFDPPGLQAAFDAAHEAIVAVEDRRDRLDDAIRSMAADSEFTGVAQRLACLRGVSTLTAFGLAVEIGDWSRLDGRRIGAYLGLVPTETSSGQSRSQGGLTRTGNAHARRLLVEAAWHHRPRYTPTSPTLRARWALASPAARERAHQGNQRLHHRWRSFEARGKRKVVANAAVARELAGWCWSLAVMEA

SEQ ID NO: 47768 - protein, 400 aa, unidentified
MKGPIVSIDVSNGNSHFQCFTQRGTKMGKVHRISHTVEGFNFLKSKIEELEKKTNEEVIAVYEATGVYTKPLERFLEKNEIKQYSISPLQSAKQRKTEIHNKKTDKKDPESIAEVYYIKELREDEKEADLYHELRTANRVYEDCLVHLRKYKVTFQSHLSIVFPGYMKLFQDGYSQISLQLLEMYPHPDRLKNKQPEKVAKKLNKHTDHSFEVCLKTAEKVIEFANKTYPGCDKEDAWVAVLVDDIHHLQDTMEEAEAKLDKIIELAKATPYYSIILSIDGIGPNLASRIIAEFGDISKFKTRGAMVAYVGNDPNRAESGDIEGYHLSISKKGNKRLRCILYLAVTCSIRSRKENPINAFYQKKRQQSTPLKSKAAKVACITKLIRTIHGMCKTGTVFTS

SEQ ID NO: 47769 - protein, 429 aa, unidentified
MKIIYPRVCGIDVHKKFIVAVICISESVEPVYLKKRFSTFHNDLIRFRNWLIQNDCQNVCMESTGKYYIPVYNILESHISNIVVANPKWVRAVKGEKDDDKDAKWIADLFKLGIVKSSFIPQKDFRILRELTRYKYKLVNMRSSEKNRYQNALTSGNCKLDMVFTDVFGKSASNIIDLILSDNPYTDEDILSKVHKNCKASPDMILNSINGTDLTPVQKSRIELVNNHIKQLSSNIQRLDKLIDLMIEPYEDYISFLCQIPGVSRNSAITILSEIGVDMNQFTSTRRLTSWAGLTPSSNQSAGKKKSVRISRAGVYLKPCLVEVAHAAVKDTNHPYYANKFNKISKRRGKKRAYIAIARKILVAAYHMLLTGEIWNPADLAEVETPVEQRIKYVKNNLKSDIKQLLDIGLTVEELTLMIQQNANNIATQ

SEQ ID NO: 47770 - protein, 324 aa, unidentified
MLPTLGIDISKDSFHLELSLNEKLRHRKFANRKEGFGELRAWLAKHKATQVHACLEATGPYSEALAVYLHQQGHIVSVVNPVQIKAFGQSELRRNKDDRPDAGLIRRFCEKQRPAPWTPPPVQVRELQALTRHLENLIETRQQQINRLEATNTKNVAKSLRKLVAHLDAEIKRTEQQIDDHVDRHPDLKQQSELLESIPGVGKRTAARLLAEITDISLYKSARQVAAYAGLTPRNNRSGTIRGKTRLSKTGNARVRKALFFPAIVAKRHNPIVRAFCERLSGNGKNKMQVIGAAMRKLIHIVFGVLKSGKCFDPSHELLLNSVS

SEQ ID NO: 47771 - protein, 356 aa, unidentified
MSRDIKYIGMDVHKEAIVIAVRNTRGHVVMESIVETKANSILQFIHGLQGELHVTWEEGTWAAWLYDLLKPHVHQVLVCDPRRNALLKEGSKNDKVDARKLADLLRTGMLRPVYHGEHGLRTLRELARTYQTLSQDLNRVMNRLKALYRGWGIACGGTQVYAPRYREEWLGKIEPVGVRRRAELLYQQLDGLQALRRTLRPELLAESRKHKAAKLLRQIPCIGPIRAARLLALMQTPHRFRSKRQLWTYSGLGIETRDSAQYRFVRGELQRAKKPQQIRGLNRNHNHEMKDIFKGAATRASCGVGPLRNFYVALLDKGMKPEMARLTLARKIAAIALTLWKKEERFDAEQLKMQAA

SEQ ID NO: 47772 - protein, 319 aa, unidentified
MAQNDLVVAGIDVAKDKVDVCIRALSLRRTFAATAEGRRELASWLRRQKVGKAVMEASGGYERDWAKALRGAKIEVRIVDPKRVRSFAQSAGRLAKNDTIDAEMIAWFAETFDEARSQAYDATREQLHQMVNARQALKGMQAKLESQGEHALPAAVQRMHARILKTITVELVKFEAAIAAMIQATPRFTELAEIIESVPGIGRTTSAAIIAAMPELGQANNKIVAALLGVAPYDDDSGRRRGERHIKGGRRRTRNVFYMACLGAATQHNPVLKAFYDRLVAKGKEKKVALIACMRKLISILNIMIERRQKWDASRYALS

SEQ ID NO: 47773 - protein, 343 aa, unidentified
MKHTTIAVDIAKNVFELAISHCPGQVEETHRLSRSRFLRFLAQREAADVVMEACGMAHYWARQLQQLGHSVVLLPPQYVRPYVRRNKTDRTDAKGLLEAHRNKDIRPVPIKSVEQQTLASLHRFRSAWLATRTARINGVRGILRELGIFIPLGAKQVVPRVRSLIEDADSQIPMALRDSLHQACDEIGNLESLIRGADKQLQALARQLPTVEQLLTIPGIGILTATALLAFVGDVHRFRSCRHFASYLGLTPRERSSGTTRRLGRISKQGDVYLRTLLTHGARAVLWAATKHSQPDRLRTWALELQHRRGHNKTTVALANKLARIVWAVWKRGTEYQSLPKAA

SEQ ID NO: 47774 - protein, 406 aa, unidentified
MNMNAVGIDVSKRKSTVAILRPGGEIVKKPFDVPHLSSDFRSLTRLIQDLDGETRIVMECTGHYYEPIARRLSQAGFFVSAVNPHIIRNFQGHDNPLRKVKTDKADSVKIARYTLDSWGNLKQYTLMDELRSQLKTMNRQFSFYTKHKTAMKNNLIGLIDQTYPGANTYFNSLAREDGSQKWVDFLDTYWHVDCVRKMSLQAFTEHYQKWCSRKKYSFRKSKAEEIYGIAKELVPVLPKDNFTKCIIKQAVAQVNAASQTVEQLRSLMNETASKLPEYPVVMAMKGVGPSLGPQLMAEIGDVTRFTHKGAVTAFAGVDPGVNASGDYSQKSVHASKHGSPMLRKTLFQIMDVLIKTKPDDAVYLFMDKKRAESKPYYVYMTAGANKFLRVYYGRVKEYLSALQESY

SEQ ID NO: 47775 - protein, 434 aa, unidentified
MSEVAAGWVLAAAWLERGEQSPFIRTARRGIPTTVKVKEEVMFVIGIDPHKRSHTAAVLDDTEALVGQVRVNADRWQCDRLLRFAAPFEPRTWAVEAAGGLGSLLAQQLVAAGECVVDVPPTLSARVRLLDAGRTDKSDPHDARSAAIVALRHARLRPVRPVDHSAVLRLLANRHHDLTASRTRTICRLHALLCLLVPGGFTGRLSARQAGQVLRGLRPVELVDIERRRIALELLADVRRIDNQLEALTKRIGAAVVASGTTVTDVYGIGPWAAAIIIGHTGDVTRFPSAGHYARYNATAPLEASSGPRVRHRLNPRGNRQLNHALHVAAITQIAHDTPGRTYYERKIDEGKTRKEALRALKRTHQRLRLPPTPRRHSTLTSRGPGGQTGTAPRPAWPALHPDGRLFGKVTPGPDTNATPTPTTLAHTRPRTGP

SEQ ID NO: 47776 - protein, 355 aa, unidentified
MSQERYIGLDVHQATISAAVTDGSGKLLMECLLETKAATILEFIQGLRGTLSLTFEEGTSAAWLHDLLKPHVSRLVVCDPRKASLLTDGNKSDRIDARKLAELLRNNQLNPVYHGEHGIRTLKELGRSYVTITKDLTRVMNRIKALYRSWGIACGGSNVYAGRHRTEWLAKIVEPGVRVRAERLYQQLDSLQPLHLEARRDLLRESSKHAAVKLLRQIPSIGPIRAALLMALLQTPHRFRTKRQLWAYSGFAVQTHDSGEYRCVRGKLQRNRERIRVRGLNQNHNKELKNLFKSAATSASTRPGPLRDFYMARVESGMRPTMARLTLARKIASITLTMWKKGASFDPKQFERQAA

SEQ ID NO: 47777 - protein, 407 aa, unidentified
MDLLKTVFGIDVSSRKSNVCIMVNGQKVNDYAISNDMVGFNRLLGDLKQVTKPQIIFEATGVYSRRLQAFLDMHELRYVMMNPLEAKRKTKDDLHQNKTDKLDALYLAKLQSKHPQRLAYVQNKEYQELMANNRIYEQASHDLITNRNRLHKAIQLTFPEIEHLLANPRGKNYWSIALRFPHPDIVLETKEADIIDFLKGLSGIGKKRANDITQSLIRLAKVACSAVKKSSAHIRGLKMAINNILSAEEECQTALQEMAKLAPKRDLEILTSIPGIGKNTALRIISELGDIRRFNNPSQLNAFVGVDPQVYESGNLTAHLSISKRGTAISRKVLYLAINQIQSAKKAGKPCHIADYYEKRKRSSETASHKKAAIASIHKLLRTIFALIKNDQLYSYDVAKHNQRLLS

SEQ ID NO: 47778 - protein, 370 aa, unidentified
MPSFLFKHNIFGDWLDISKKELNYFNKLFGGPMFYSGIDQHKRFSYITTVNDDGIIIKQAEIKNNDFDILNYFSSFSKEHLATVETTGGWYWLNDLLSSNGVNLKLAHAKYVKAIAYAKVKTDKVDSHILAQLLRMNFIPEAYKISDSVRPLRDTLRARLRLSQKRTSCLNFMNRMLEKFNINDSASLSDFYKLQYQQFDNQVHLLKEQMLILEKSLYPSLIPNEDIQRLLWIPGIGKMNAFTLLLEVGDINRFESEKNFLSYCRLVPSARNSAGKTKQRSSKDGNKYLKLVFSDAAVHALQYYPVIKKYHDSKLRKKKKQVAHAIIAKEIARIAFYVLKYKSDFNNHFKGIELENKKSFQWPRITSPDV

SEQ ID NO: 47779 - protein, 353 aa, unidentified
MQAVRTIGLDIAKSVFQVHGVDAHGKVVVRRQLKRRYVLAFFKKLPPCLVGIEACSTAHFWSRELQALGHTVRLMPAAYVKPYLKRQKNDATDAEAICEAVGRANLRFVGTKTAEQQSCLMLHRTRHLFVRQQNAVINSIRADLAELGIVAPVGRNGVEELLDVIADPDDDRVPDAARECVAALGTQLRMLKAQILEFDRRIMAWHRSNETSKRLDEIPGVGPVLATALVASVADPKAFRSGRDFSAWIGLVPKQNSSGGKEKLGSITKRGDRYLRSLFTVGALAVIRYAKIHGTKHRPWLTALLARRPTKVAAIALANKIAHGVGDDEQGRASQGASRAGGMNEIAPSAGVM

SEQ ID NO: 47780 - protein, 342 aa, unidentified
MDHFAGLDVSVKDTSVCIVDDTGKIVREVKVASEPEALLAVLKNPAYRFKRIGLEAGPLSQWLFSALAEAELPVVCVETRHMQAVLKAQINKTDRNDARGIAQMMRVGLYRPVHVKTLRSQKLRMLLTHRKLLQSKAIAIENDLRGTLRNFGLKVGMAGTVKFEARIRELVENLPDLAALVEPLLLVRRVLREQIVILHRRLLAIVRGDEVCRRLMTVPGVGPVVSLTYRATVDVPARFRKSKAVGAVFGLTCAKYQSGEVDWSGRISRCGDEMMRVMLYEAAQSMIHSKKWSWLKAWAMQIAKRRGMKKAIVALARRLAVIMHRIWVDGTEFRWSREVEPA

SEQ ID NO: 47781 - protein, 437 aa, unidentified
MAMRVEIEAEPAAVEGRERCAGLDVHRSTIVVCVTSPVGGGRLKKVWNEFPTTSAGLVRLAEWLAELEVSHVAMEATGVYWMPVYAALEKAGVFDLTLVNAHHAKALRKRKTDIKDAQWLAYLVRHDLVNKSFVPAQPFRDLRELTRYRRKLVEAQASERRRLIKLLESADIKLAGVISDIFGVSGRAILCALIAGGQSPFDMAKLARGQLRRKRPQIIDAVSVEVSEHRRAILAMQLARVEAAEADIAKIDEMIAHHLEPYQEFVERLVSIAGIDWIIAAIVIAEIGTDLSSFPTVQHFAAWIGVCPGNNESAGKRTPIGARKGNPYLVTALCNAATSAARTRGSFFKATYHRIKSHRGGGRAALAVAHKIAIAIYYMFTRKTSFRDLGEHHHEARHAQRSVNRYLRGLKRLGYTVILQPQTAPTPQQTQAIANPA

SEQ ID NO: 47782 - protein, 461 aa, unidentified
MQTGAVGVAGIANSSSEASPQRLVSRALRVLARVLTSANPCLMEDELDHYCGIDWAEGHHDIAIIDAGGKLVTKKRIGDDPGGFAALTQLLIDAGDTAEDPIPVAIETPRGLLVATIRASGRPVFAINPMAVARYRERHTLARAKSDHADAMTLANILRVDAHLHRALPADSELAQAISVLARAQQDGIWRRTKAGNELRSLLREYYPAFLETFSARSATNLAEPEARAVLAVAPTPAAAAKLTKSRVAAALRRAGRQRGVDGLAAQIIERLRAPQLRQPLMVETAMGRQALALLAMLNAACDGARDLEQAASELFRTHPDYAIITSFPGLADSTGARVLAELGDDRRRFADARALKSYAGSAPVTRASGKTISISYRRIKNDRLAAVGWVWAAVMVMNPGPAQQHYRQRRQHGDRHAPAVRHLFNKMLGQLYHCLQTGQVYDPAKAFGHPATKPETSAAA

SEQ ID NO: 47783 - protein, 331 aa, unidentified
MINKAAQFAGIDVGAEELVLVVRKNATSMKAQKFANTPADRARLVAKLAKLPGLRVCLEATGTYHLELAVALHDAGVELNVLNPKAAHNFAKALMKHSKTDAIDADTLAQYAERMPFTAWVRPSPQALTLRSFARRINALTRQKAMTKNHLHALSFGPDLPQAVLDDAKLAIAQLEKRLASLSCEAQAFIGKHEDLKRIFTLLLGIKGIAQTSAIALMGELLLLPKGLTHKQWVRYAGLDPRVFDSGKSVHKAPRLSKAGNRQIRQALFMPALSAKQHDPYVKAFFQHLIEKGKKPLQALCAVMRKLLHAIHGMLRDNRAFDNTRFYATAA

SEQ ID NO: 47784 - protein, 385 aa, unidentified
MGSQTFIPRDYDVFSGLDVDKRSISVTFTDHQGFLKSLRMPYSVEHLLNHVRKHFPGKKVAFAYEAGPTGYGLYDGIVAQDYPCLIAAPSMIPKAPGQRVKTNRLDSRTLSENLRGGQLKSIHVPSPLYRELRHLTQLRDVLVGEVVGMKQRIKSLLLMEGIEFPPAPPGSQWSFLVKDKLRKLPCSATVRFKLDQLLDSLEFNEQQVLKATKEVRRFCKNDPELSQCIKYLMTIPGIGWIVASQLLARIGDWRELKNIRQLSGFLGLVPTEHSTGERTDRGSITHTGDGRLRSKLIQASWSAIRQDGELREFYRAVCRKHPREVASRIAIVAVARKLSVRIAVVLMQQRPYDVRERVHSAPLTQEETRPKGTTRREPEAGEKNS

SEQ ID NO: 47785 - protein, 413 aa, unidentified
MRTGGLDVHKSFIVAYIFDVFFEKDDDGKPVVKAKDVALGRFERTWEGLDRLAEFLEKNETKKVVMESSGPYSYMVYMALDSAGFDVWMAHPRDNKTNDQLKTDKRDAERLVKRFVVGEVRAYKLPTDPKIIRLKRLTRFRMKMVSRLISVKNEIRKTLDEVGIDLKKAFSTLGKGAIAIVSGLVRGLSVDAIISSNQSLAKKRDVIDEILKSRGKLDDALIFEIKSLLRLLREIERQIESAEKRIENALSDFEEETKLLTTIPGVGLQSAAIILAEIGGISRFPSPKNLASYAGLVPSVYQSGDEIVYGKLRKDCNRRLRYILYQVALKAIKYSPRLRKFYERLRSRGKKHKQAVIAVARKIAMAIWHILTRRTPWSENLKRGYVPRRRRFKRITMKQALKILRELGYEVLA

SEQ ID NO: 47786 - protein, 442 aa, unidentified
MRLLNANANEHPLRIKLSAHIRTGIIMEPQRNKVCGIDVHKRFLIATILSRDGKKDTQRFSVTLEDLLKFRDWVIENGCEQVALESTGIYWHPVHAVLEGKMDLIVANAYKIKHTPGRKTDVSDSEWIAELCLNGMIEPSRIFPKDDRELRRLTRAREGYVKQMTQEKNKIHQSLDSACIKLASVVSDIFGKSGMHLLNCVLEGRDIDEIIEGIPSGRLKKKADQIKESIKSRLEISQVILIRGSLSLMRSIQERIDELDGEISSRIQYRKNDLAIAMSIPGTGFISATAILAEIGNCADFKKPEQLAAWCGLVPSLYQSAEKTILGRITKQGSKHIRRMLIQVAYAISRTKDSKLKKFFLRIQAKKGSKVAAVALARKVLCILHHLLMNQEMYIENRDKKNMRRKHLTPPSPIEMPIKEMIDCIVRAGYVVTKSDSIGGFG

SEQ ID NO: 47787 - protein, 382 aa, unidentified
MQTIDTVNPTILLAIELSASTWLVAARVPGLEKPHLHRIDGGDTAALLALISSLQARAARGLDATIGVVCCFEAGRDGFWLHRLLTAHGVVCHVLEPTSILVNRRARRAKTDRLDAEGMLRVLAAYLRGDHQACSMVRVPTPEEEDAKRTHREREKLVQERLRIENRIEALLFTQGIRKRPSLRSWERDLAVLRTGDGREIPRHLRAELDRLRRRLVMTLELIREVEAERDQAAKTKPQDQACHKIAALSRIRGIGENFAAVLTREVFYRSFDNRRQIASYVGITPMPYQSGGMDRDRRISRAGNPRARTTMIQLAWLWLRYQPGSELAEWFRERVGTLAGRTRRIAIVAMARKLLIALWRYAETGVIPAGAEIRAEITVAA

SEQ ID NO: 47788 - protein, 453 aa, unidentified
MGNALTPVFEEIRRNVAGIDLAWRAETYICGPRREDGSYEIESFGTTTPELHRILMWLQDRNVESVAMESTSVYWIPLTDLLEANGIEVVLVDARMVRMVPGRKSDVQDCQWLQKLHSCGLLRGAFRPPEAVAAVRSILREKDNVTAMRTQSIQQMQKSLDQMNIRVHHAVSDIDGKTGTAIVKAIVEGERNPVELAKLRDVRCKKSEKEIADHLTGTWREEHLFNLGQAFKTLQFLDERLSEYDRKASELFKALAVKSDNPPPPPHPTDRKLTKKERNNPEGKANLCQIMGFDMTSIDGIEYDTARIIASEVGTKIGSFPTENHFASYLGLVPSLSKSAGKKVRQKKRGKTTSRAGTALRMAASALHKSQTELGALFRGVARRTDKKTAVKATARRMAHLIYRGVRFGKEYIDRGAQAYESRLRERTVNSIKKLIKSHNINSSEISSAFAHI

SEQ ID NO: 47789 - protein, 357 aa, unidentified
MYIHIVITPFRIFSYQCYILLGYFLTHNIYTQMQKKNVKMELVNPNAAGIDIGSRSHFVAIGQGSDDVKEFGVYNEDLNAVADWLKLNGVKTVAMESTGTYWQSLFAVLQAEGFQVILCNGKFTKNIKGKKSDVQDCQWIQKLHSIGLLSGSFLPDEATEQLRTFCRHRSNLVDMAADTSRKMQKYLRLLNLRLDVVVNDICGLTVEGVSYSTVLTLMSEVGNGIYKFNSAKQFASWLRLSPNNKISGGKVLSNKIPKGRNRLKIALRNAANAIGNLKDTALSNFFSRISHRKGRVSAISATARKLAVIIWNMVVKGTAYIPLTEYQFVDQKRKKITAMKRLITKFEITTDDLNLQL

SEQ ID NO: 47790 - protein, 469 aa, unidentified
MEKTALEAINVPSCGLDVHKDMIEACVIDETGMKHRKTFDAMRKSLYALKEWIQSLNCLHVLMESTSVYWIPVYEILEEVPGMDVGVGNAQRMKQVPGRPKTDKADSDWISRLCMMGLVLKSFVASRKTRELREYTRYHKKLVQERSRQINRIEKLLQMNGFKLSSVLSSITGTSGTKLLRILSDKGNVTAAEVQAELHKRVKRTPTEIENAINGQMKPTSRLLLNKMMSRLGTCDAEIADIYRMMSESAKDNRREIEQIESIPGIGEQSAIYILAEISTDMSSFKTSGHMAAWAGLAPKDNISAGKLRYSKTQRANIYIRSILIECAWAAVRARNTRLSNWYWSNVGRIGTKKAITAVARKLLVYIYAMLKSGMMYDDSLDIADTEKRKANKLESACKLVERRSNTENAQNHRMGSNQETFVSTLLQSSTGSGTRADSAGFNSTTPPRKRGRPRKTTDPLNFETNQAI

SEQ ID NO: 47791 - protein, 344 aa, unidentified
MQITTVGLDLAKNVFQVHGVDSTGQVVLRKSLRRSQMLPFFAKLPPCLVGIEACGTSHHWARELINLGHEVRLMPPAYVKPYVKRGKTDAADAEAVCEAVTRPTMRFVPVKSPEQQAALSMHRTRDLLVKQRTQLINMIRGLLAEFGVDIPKGLERALLMARQIADGRGPEVPIEAAKMVTTLSQQALDIHVRLREIDRDLAVCLRGNDVARRLMTIPGIGPVGATALAASVTDPHQFRSGRQFAAWLGLTPLQKSSGGKERLGRISKMGDKYLRKLLIIGMTSLVRRAKYNPGKIDPRLADLLARKPTRVATVAMANKTARVIWAIMARGETYRAGHRPALEA

SEQ ID NO: 47792 - protein, 413 aa, unidentified
METMVERCAGLDVHKDTVVACVRTPGPKGQREVELREFGTMTRDLLELREWLVEKKVTLVGMEATGVYWKPIYYVLEDALECWLLNARHLRNVPGRKTDMQDAAWIAQLVEHGLVKPSFVPPKPIRELRNLARYRKAQIEERTRESQRLDKILQDAGIKLSSVASDIRGVSGKTILTALVAGETDGQRLAELAKGQLRKKLPALEAALQGRFSRHHALIVSEILAKLDYLDELIDRLSDEVGDAIAPFAQQVQLLDTIPGVDQRMAEALVAEIGVDMGQFGSSAQLASWAGLCPGQNISAGKSRGSKTRKGSKWLRGHLTQAAKVAARGKGTYLAAQYARLKGRRGPSIASVAVAHSILVAAYHILDRMVPYEDLGGDWFVRRHSPEQHARRLVRQLAALGYEVELNELEEAA

SEQ ID NO: 47793 - protein, 352 aa, unidentified
MGLVVHALSVVAHAVDEETGKVSKARLCPDHGEVLGWLHQLRAPVRMTYEAGPTGFGLARAINEAGMECVVAAPSTLQRPAGDRVKTDARDAAHLARLLRLGEITAVTVPEREIEAVRDLVRAREDARVDLMRVRHRLSNCFCGRGSSIFGGTPCTCAHEKWLRRQRFDDAHLKAAFDHGFDAVLAATAARDRLDEQITEVAASPRFADPVNRLGCLRGIAALTGLALTVEIGDWSRFTGSSIGAYVGLVPCEYSTGTSWVQGSITKVGNTHVRRLLIEAAWHHRKSYSTSGPTLRARWAVVEPALRARGHAGNRRLYKRWRHFTERGKNPLVANLAIARELAGWCWSLATM

SEQ ID NO: 47794 - protein, 347 aa, unidentified
MRFYTQQHKHYCGIDLHAKAMYVCILDQSGTKLVHKNLPTTPEAFLRVIAPYREDVVVGVECIFTWYWLADLCQKEGIAFVLGHALYMKAIHGGKAKNDKIDAHKIAVLLRGGMLPQAYVYPAEMRATRDLLRRRCHLVRKRAELLAHIQNTNSQYNLPEIGKKLAYKANREGVEEHFPDPSVRKTIEVDISLIDHYDKLLGEVELYITRTAKAHDGQTFSRLQSVPGIGKILALVILYEIQDIARFPRVQDFVSYCRLVKCAKESNGKRLGTSGKKIGNVHLRWAFAEAAILFLRQNQVGKEYFTKLEHKHGKAKALTVLGHKLARAVYYMLTREQPFDLHRFVSA

SEQ ID NO: 47795 - protein, 341 aa, unidentified
MSIVILGIDLDKNSCGVVGLDEGGTVVVRRRMRRDGVIAFAAKLPPCIVAMEACCGAHHMGRSLAMLGHQVRLMSPEYVRPYVKAQKNDDRDAEAIAEAATRPTMRFVELKSEEQLDVQTLHRVRDRLVGERTSLTNQIRSLLLERGHVVAQGHARLRLLLGELLDNGSDALSRRMAFLLEDMRARWDELDRRIAAFDAEFAAMARTDDRARRLTGIPGIGALNATALVAAVGSAATFNKGRDLAAWLGLVPRQATTGGRPKLLGITKRGSRYLRKMLIQGARSALPRLAKSNTATGLWLRALLARAHSNVVVVALAAKMARTVWALLYHGRTYQVALTTE

SEQ ID NO: 47796 - protein, 333 aa, unidentified
MGFEPGPSKEGSWMMTQDDLVVAGIDVAKDKVDVCIRSQSLRRAFASTTEGRRELASWLRRRKVGKAVMEASGGYEREWARTLRAARIEVRIVDPKRVRSFARSAGRLAKNDTIDAQMIAWFAETFGEAPHQAYDAERERLAQIVNARQALLELQSELQNRGEHSRPDVVQRVQARLLKKIAAELATLEAAIAATVKATPQFAALAEIIESVPGLARITSAGLIAAMPELGQVSNKVAAALLGVAPYDDDSGKRRGERQIKGGRRKARNLFYMACLGAATRHNPVLKAFYRRLIAKGKEKKVALVACMRKLIVILNIMIARRQKWNPDLYAWD

SEQ ID NO: 47797 - protein, 352 aa, unidentified
MQQSNTMPALTQTLGLDLGDRRSSSCLISAQGEILEEDQVKTTNEALTSLFERLKPCRIVIEACGHVHWIAKLADERGHDVIVANPRELRLISKSGRKNDRNDARALARLGRVDPELLRPIKLRGEDCRATRALLHARDQLVRMRTKLVTSTRGQVKSFGGRIPSCSAESFHKRAGAHVPEPLRDVIGPMLELLTQLEVRIRTFDKEIERISQERHPETKILRQVRGVGPILALAYVATIEDPGRFSSSRTVSNYVGLAPKLYHSGAKTPELRISKCGDRHLRRLLVNAASYILGPFGGDSDLRRHSERIARSGSQRDKARARIAVARKLACLLHHLWRTGSVWDPNYALAH

SEQ ID NO: 47798 - protein, 384 aa, unidentified
MNKHSILFIGLDTHKTFTEVAYIEDVRGAKPQHLGRILSNKSAFKKLVRQLQSKYPQATLHFVYEAGPCGYWIYRLLTSLHQCCYVIAPSLIPKKPGDRVKTDKRDALNLAKLLKSEDLTPIYVPEPEDEAMRDLSRARETTMKDLKDAKYQLKALLLRNNINTTIKDNWSSQHLRWLAELILPSPCQQIVLQEAVLTITERIQRLKRLDNELTHQVKNWRYYPVVKALQAMRGIRLLVATGVIAELGDLTRFDHPRKLMSYLGLVPSEHSSGSKRRLGAITKCGNSRARRLLVEGAHTYKYNANISKEMQLRQEGLPKQITDIAWQAQCRLCRRYQRLMHKGKHRNVVVTAIAREMAAYIWAISREVVLSPVDIRSRIARLPA

SEQ ID NO: 47799 - protein, 452 aa, unidentified
MATKRRKREQELPVLHPDAAGIDVGASELFVAVPADRDPEPVRSFPTFTQDLYELVDWLQGCGIRSVAMESTSVYWIPVYQILEARGIEVFLVNAHYLKNVPGRKSDVSDCQWIQYLHSVGLLRASFRPPGAICAIRSLWRHRGSLIEMAAEHIQHIQKALDQMNLQIHRVLSDITGLSGLRILDAILEGNRDPVALARLCHKGVKSSQETVAKALAGDYREEHLFALKQSLASFRYYQQLIAEVDTEIASRFQALEKSPEAEGKPPVRTKKSPYSRKHYEPTSFDLRSELYRIFGVDLTDVPGISAVTAHTILCEIGADLSPFRNASAFASWLGLCPERQISGGKVLFTKSRRVRSRLALALRLGANSLHHAHNYLGEFFRRIARRLGKPSAITATAHKLARIVFHLLTTKEAYRESVFMRCEEEAQKRAELRLKKHAAQLGFQLIPATNA

SEQ ID NO: 47800 - protein, 334 aa, unidentified
MSNVTTCGIDLAKNVFSVHAVDGCGVVVLRKTVSRARLMPLVAQLPACVIGLEACSGAHEWARRFAQHGHTVKLMAPKFVAPYRKSGKNDNNDAEAICEAVARPSMRFVPVKSVQQQAMLTLHRVRLGFVEERTATINRIRGLLAEFGEVLPQRVVEVRRGAAATLDQLPSLAQRALRDLLSHVRVLDERIGEYERELEQHARQDERAKRIQKLSGVGPISASAIVSSVAEAHEFKNGRQFAAWLGLTPKQYSTGGKARLGRITAHGDPYLRTLLIMGARSMLQTALRRTDRLARWALGVRARRGYHRACVAIAAKHARIIWALLAKNESLQLA

SEQ ID NO: 47801 - protein, 344 aa, unidentified
MQTMYYIGLDVHKRTISYSVKDGSGTIHAEGTVPATRFDLDRWMKTLPQPWSAAMEATVFTGWIYDHLQPHAAALKVAHPLMLRAIAAAKKKNDRIDASKICDCLRCDFLPECYMASTAIRERRRTLRYRNLLVRQMVQMKNKISPLLMEAGVSYNKQKLHKAGYFRELLATNQDINEGLCSLLRLCRETVVRLQRTESALVRSLERDSLLLDRVERLMTIPAVGPITALTWALEVGDAKRFSSIKKAISYCGLCGAEKSSANTVQRMPLSKQRNKHLQTTLIEAAKMAPRNSPELAMLYDKKKQQGNANRATLAVARKLVAYLLAVDRGQRNFQLVETNCIAA

SEQ ID NO: 47802 - protein, 315 aa, unidentified
MASAPPFVGIDVAKNRLDIAVRPGGECWSATNDADGVTALVTRLHELQPTLVVLEASGGYEHPLTAALAGAGLPTAVVNPRQARDFAKATGKLAKTDALDAQALAHFAEAVKPAARPVPDAQAQALAAVLARRRQLVEMLTAERNRLHTAVPAVQERIAAHLVWLEEELDEINRQLDRLVAEDPAWRERDALLRGVPGVGPVLSTTLLAELPELGALTRHEVAALAGVAPLNRDSGARRGKRTVWGGRAQLRAALYMGTLAAARFNPLIKAFYERLCAAGKPKKVALTACMRKLLTILNAMLARRTRWQPQPAAA

SEQ ID NO: 47803 - protein, 349 aa, unidentified
MRSFQPPADTRFYAGVDLHARALFVVILDHHGQVRFAKNLPANPDAFLRAVAPFRDGLLVACECMHCWYWLADTCRDHAIPFVLGHAWAMTAVHGCKTKCDRKDAEAIARLLKGGNFPPAYAYPRERRSLRDLLRARLRLVRQRAELYGHVHTARRQANLPPISSDVKYKSKRAAITADIADPLLRRRVETHLALLEPLDTTIRQLEAELEDAAKGHYPTELAVLQSTPGVGLVLSLTILLEIDTIERFDTRQQFCSYARLCGAVQTSDNKRAGAGNRKAGNAWLKWAFSEAAVLSAQKHEQIGALLQRLASKLGKAKALSALAHKLGRAFYHMLHTKEVFDVTRFVRH

SEQ ID NO: 47804 - protein, 415 aa, unidentified
MKKHSNSPKKSESRSKRAKLRGPVQQDTKEVLAELVGKLREKLDPKVGAASAGEEHQQGRPRPNLDRLTVGVDLGDQWSQYCILGLEGETLAEGQLRTTKQDVSEFFEALNAARVVLEVGTHSAWIREVIHSYGHEVLVANPRLMEGSKRRKRKNDRIDANKLARLGRVDPQSLHPMQHRSAEVRQDLVMLRARDALVAARTELINATRGLVKSMGTRLPKCSSPSFAQKVEEAVPAEIREALLPLVRMTAELSDCIKGYDEKIEKLASGKYGHTALLRQVKGVGPITALAYVLTLESPERFVKSRDVGPYLGLVPKQEDSGESQPQLGISKAGDTMVRRLLVGSAQYILGPFGPDTDLRRYGLRLCERGGKNAKKRAAIAVARKLAVLLHRLWASGEVYEPLRPALSTPITAAA

SEQ ID NO: 47805 - protein, 372 aa, unidentified
MTVPTPARLRIDNLPTVFPNAAGLDIGSAEIVAALPPDRDGTVVRTFTTFTADLRQLVTWLLDHHVDTVAMESTGVYWIPIYEMLEAAAIRVYLVNARHFKIVPGRTSDYNDAQWLQKLHALGLLEGSFRPDDEMCVLRSLLRHRAQLIEHRSPHILHMQKALKLMNIQLPEVLSDVTGVTGMAILRAIVAGERRGDVLARLRRPGCRRTEQDIIQALTGTWRDEHLFVLAQSLDLYDFYTTKITECDHRLDQQFSSMKPRFDVEGDPPAPPTSRTKKNSNSKNQPAYNVRAHLVRILGIDLVDIIGISESLAQTIIAEIGTDMSRFPTSKHFCSWLGLAPHNDMSGGKVLRSRVMKVHNRAGQALRHAAQS

SEQ ID NO: 47806 - protein, 386 aa, unidentified
MQKLNDLSRSLTPLNPDSTLIAVIEMSQSSWLVAAIVPGVERQPLKKLAVDESALLKLLHRWREESKKAGHKIGRIVIAFEAGRDGFWLARWLWARDIEAHVIHASSIAVSREHRRAKTDRLDTGLFKRAFLGWLRGERDHCKMVAIPTAKDEDAKRPNRERESLVGEQNRIINRMKAALIRLGIRRFNPKLKKAAERLDGLRTPEGEPIPPNTLAELRRDMERRRLVSDQIRQIEDARLERIEQAPSGGPNAMVRLLARVIGVGIETADMLVQEALSRNLRDRRAVARYAGLTGSPDESGKKRREKGLARSGNARVRRGMIQLAWRFLMFQKDSALAQWFRARTENARGTRKTMIVALARKLLIALWRLVREGIVPEGIVLRPAP

SEQ ID NO: 47807 - protein, 369 aa, unidentified
MGEYNEAFVAFDVAKIKHAVAVAEGGRTGEVRFLGEIENREGPIERTVKKLAGRYGRLHFCFEASPTGYGLYRQLQTLGHECMVVAPALIPKRPGERVKTNRRDAVTLARLHRAGELTGVWVPDAVHEAVRDLVRAREAAADDLRRKRQQLLSFLLRHSRIYSGSGHWTLAHRRWLASQAFEHAAQQIVFQDGVDAIEDAIARLRRLEEQLVAIVPSWSMAPVVEAYQAMRGASFLVAVTFAAEIGDVRRFDNPRQLMSFLGLVPAESSTGDTVRRKGLTLAGNRRARRALVEAAWTYRYPARVSETLRARLEGLPKAVRDIAWKAQIRLCARYRRLSATGKKLPVVVAAIAREMAAFLWAIGREVAPG

SEQ ID NO: 47808 - protein, 301 aa, unidentified
MQKYSLGIDMSFKTFHACLSVIEHDQQVKVKASTSFSNNPQGFKLLIAWINKHYKQKELPLLIVMEATGVYYERCALTLFLAGYNVSVVLPNVAKKYFQSIGQKSKNDKIDAKGLARMGAERKLNEWQPMEDFFYTLRSYTRQHEGLQQTRTLLNNQKHAVENQAHPNELVLNQLQQLVDTIEGQIKELFKAINGHVATNKEVSDKVKAICEIKGVGILTIAVILAETNGFALFKNIPQLVSYAGYDVIEDQSGKHIGKTKISKRGNGHIRRACTCLQFMQETGNNQYFKTYIKEFLTELK

SEQ ID NO: 47809 - protein, 347 aa, unidentified
MDHIGIHVHKKESQICILAEGGELLEQRIHTEPARFAAVLGARPRGRIVLESSTESEWVARCLEALGHEVIVADPNFAPMYATRTRKVKTDRRDARALAEACLLGAYRPAHRLSDPQRHVRARLLVRDALVRTRTRYISLIRALLRQHGYRMPSGSAEGFLGRVRAVALPGPLRSQIAPLLAVMCHLNRQLTYSDATIEHLAVQDPRVQRLRSVPSVGPVTAAAFVATIDDVQRFHHAHQVEAYLGLVPREYSSGESQYRGHITKVGHARMRWLLIQVAVSILRRRPPEADALRAWALRIAVRRGKHVAVVELARRVAGILYALLRDGSVFTPRAAPHPDPVAAAPA

SEQ ID NO: 47810 - protein, 356 aa, unidentified
MSRDIKYIGMDVHKEAVVIAVLNGSGKLVMESVVETKASSILQFIHGLRGELHVTWEEGSWAAWLYDLLQAQVTRVLVCDPRRNALLKEGNKSDKIDARKLADLLRTGMLRPVYHGEHGLRTLRELGRSYQTLSQDLNRVMNRIKAVYRGWSIPCAGSQVYAPRYREEWLQKIEHAGVRRRAELLYQQLDGLQALRRTLRPELLAESRKHKASKLLRQIPCIGPIRAARLIALMQTPHRFRSKRQLWTYSGLGIETRDSAQYRYLHGQLQRTKKPQQIRGLNQNHNHEMKEIFKGAATRASCGVGPLRDFYVALLAKSMKPELARLTLARKIAAIALTLWKKEERFDAEQLKPQAA

SEQ ID NO: 47811 - protein, 331 aa, unidentified
MDVNEVVGIDVGKEENEGRIHSSQEVLTFKNNKKGFKQLVSWVFKNTMLDSQQILYAFEHTGLYSFPLALFLTENKYPFVLLPGLELKRSMGITRGKSDKIDAKRIARYTYEKRESITPYEMPMEEVIQLKRLLALRERLVKQCSGYKASLGEYKHFLTKKDNVALFEVQEDMIKVLVKHINKVDKELANIIKGNGRLKKMYELIVSIKCVGPQTALFIIAYTNGFTRFEKSRKFASYCGIAPFPYQSGTSIRGRTKVNNLANKKIKSLLDLCAKSSIQYNMEMKIYYEKRLEEGKTKMGTVNIIRNKILSRIFAVVQRGTPYVNTLGYAD

SEQ ID NO: 47812 - protein, 402 aa, unidentified
MSAVMIGVDPHKGSHTAVALAGDEISLGKMRVRASVEQVGQLLVWAKTWPKRTWAIENASGLGYLLAQRLVAAGERVLDVQPKLVSRVRLLDSGDINKNDPNDARSVAVAALRSKELPEVAKEDHAAVMKIWVRRRRQLTRQRTRVANALHAVLCELVEGGLSKEISPTKAAKLLDGIEPSGAVETARKDFACELLEDLRQLDQKLKDVRRRLSEVVEASGSSTTKIFGVGPIVAAMTLGITRDVRRFSSSDRFAAYSGTAPIEVSSGPNKVYRLSRRGNRQLNHAIHMAAVTQIRNRDSEGRAYYDRKIAEGMSGKSALRALKRRVSDALYAAMVADARRAGLIVERGPGGQVGNDSVTSVAGFTPRRPALRRSHSRTRANSTTTPRPARRGRRRIKSAAP

SEQ ID NO: 47813 - protein, 359 aa, unidentified
MESKVSNLDYSGHKIFIGLDVHLTNWKATIMLEETSFKTFSLDPSPALLRHYLEKHFPGGEYFSAYEAGFTGFSTHRSLEQNGINNIVVNPADIPTTDKERKQKEDKRDSRKIANSLRNGQLQAIYIPKVEMEELRSLVRYRKTLVKEISRNKARVKSFLYRNGISIPLELSGASKYWSHNFTNWLKTVKLTTDFGHIVLMKTLEIVIHLRTTLLSITKDIKRIVKGDAQYTKAIADLKSIPGIGFIVAVTLLTEIEEICRFKDLDHLCSFIGLVPSTNSTGDKDRTRGITPRSNKPLREVLIESAWVAIRNDSSMTLAYSNLCRRMEPNKAIIRIAKKLLNRIRYVLKNNTTYEIKSV

SEQ ID NO: 47814 - protein, 463 aa, unidentified
MGDRTRTCMAAVFEHKKLLLRACILNIESLELHCRLLNLFTGGIGLKKTKKLFTVLHQCVCGIDVHQGNVVACLLKVDEDGEYVDTIKTFSTMTSQLQKLKTWLQEEGCKKVGMESTGVYWIPVFNVLEEGDFAITLSNAQQIKNVPGKKTDPNDSRWISKLLAVGLVNGSFIPPREIRELRTLTRYRDKLIGMRTSEKDRALNILESCNIKLNSVASDVFGVSGRAMMNQLIEHKSDIDIENVANLAQKKMRKKIPELMEALNGKMDTHHAKLLKIVLDHLEYLNGQIKIIEAEIEEKCKPYQQVIELLDEIPGVSKVTAQSLIAEIGPDMSVFETPERLASWAGLSPGNNESAGKKKSTRIGPGNKYIKTKLCQCALAASRTKNTYLAAKYYSIKGRRGGKKATIATARHMLVSAFFIIRDKEHYKELGGDYLLKLKSQNIVKSMAGRLKSLGYDIVKIAQ

SEQ ID NO: 47815 - protein, 361 aa, unidentified
MEWPAPLLHHDRVTMEGGMKDVCILGVDLGKNSCSVVGLDGSGRVLLRRRTRREGVIALAAKLPGCVVAMEACCGAHHLGRLLVAQGHEVRLMSPEYVRPYVKAQKNDDRDAEAIAEAATRPTMRFVALKSEAQLDVQVLHRVRDRLVGQRTSLTNQIRSILLERGIVVPQGRRSLLDALAALSSDDGSGVGARVQLLLEDMLDQWRALDTRIKALDDEFAEMARNDPAARRLATIPGIGVLNATALVAAVGDGRTFSRGRDLSAWLGLVPRQATTGGRPKLLGITKRGSKYLRKLIIQGARAALPSLARTATPLGGWLRGLLARAHGNTVVVALASKLIRIAWALLRNETRFAAGEHAAA

SEQ ID NO: 47816 - protein, 389 aa, unidentified
MIIGIDIAKRNHEATAIDDAGQILGRITFANSNAGAAKLLDFIARLKSEDEKVVFGMEATGHYWLAIYSYLVERDFDVCVINPIQSDSLRNLFIRKTKNDQRDSFIIAEIIRFGRYTETQLSDENTLALRQLCRYRTSLVDQTTELKLQAIAVLDQIFPEYETLFANIFGVSSKALLMEYTTPDDMLSVSAEKLAEVIDKTSRGRFKLEKAKEIQEKARNSFGITIAIDAFAFQLRQLIEQIKFIEEHIKEIEDHIKTYFDTLDSCLPTIPGIGMITAAIIESEIGDINRFAGPEKLVAFVGIDPSVKQSGDFIGSQNRMSKRGSPHLRRAIWQAAVRAVQVDPVLKAFFEKKRSEGKAYGTAIGAVARKLTYIIFVIMRDKKTYVPMA

SEQ ID NO: 47817 - protein, 339 aa, unidentified
MKFAGCDLHKETITICVVNQSREVLKRERLVCRDERGLRSFFESLGPFQAVVEATASYEWFVRLIEPVACRVLLAHPKKLRVIAESTRKSDQLDARMLAEFLALDMIPTSYQPTPRQREHRRLVRQRHGIQRRLTSVKNRIRRILSNYNADRKSLFSTAGLAYLERVLLSAADRFSVEQVVEELQFGRRQLQAAEARRKQFAEQAPLREREARTLLRTIPGVGFVTTEVVLAELADIDRFGSQKQVVSYAGLSPGQRESAGKSRELHLEKNGSAHLRATLVEAAWRLVRHSLRWRGIYERLKVRVRAKKAIVAVARRLLCLMTAILKSGRPYSASYQPA

SEQ ID NO: 47818 - protein, 332 aa, unidentified
MNMHSQGRVADGIERPNAGIDVSKQHLDVCCGEHEQRWNNDATGWSELAAALKAWQVDLVVVEATAGLERGLVCALQAAGVQVARVNPRQARDFAKSLGVLAKTDRIDARCLRDFASVLARHPQRERYITPVADQHREALQALMVRRRQLLDMQVAETQRLASAGARAARSIGVVIKTLQRQLESIDRDIDDLMDQHFKPQRKLLEGVKGVGTGTALALLAALPELGTLGRRAISKLVGVAPLADDSGQRKGKRRIWGGRAHVRSALYMATLSAMRYNPAIAPVYQRLIAAGKPKKVAMVACMRKLLVILNAMLRDGAAWDSTKSLAQAIHL

SEQ ID NO: 47819 - protein, 401 aa, unidentified
MTVAFGLDVSKATSAVAVVNDGVTVKQFKIDTNWFGFQNLLKEMKDYTSPQIVFEATGVYSRRVQRFLEDNHYPYTRLNPLAAKKQLDSLRPNKTDNNDALHLAQTQLVIKRRLEYYQKPVYHDLMDDSHFYEQLNEDVVREKNRLHRSLQLTFPEIESLLSKPDGEQYWNIVQHYPHPDLLEGLGPDELGKTIMKTTPKNISLNHATTIAKKLLHLAQASYPADRVEAPSVSQTRYHAKRVSELTHHKQQLIKSMTVLAKTLPEFNILMSIPGFAETTTVLLIGELGDIRRFGSSNKLNAFIGIDLRHYESGEFVAADHISKRGDTFARKILFRTISNIAAVAHYHPNHINDFYQRRKKQSPQSGTKKIAIAAMGRLLRTIYHLVITNQMYIYGVKRQSF

SEQ ID NO: 47820 - protein, 392 aa, unidentified
MYIVGIDIGKNHHEASIVSPEGKQIGRSLRFATTHKGADSLMRFIFKNIGNSPCVFGMEATGHYWYPIYSFLKAKGYTIYVINPIQSDSLRKMYIRQTKNDSIDSFLIAEVIRFGQFGTTSMADENILAMRQLCRYRDSVISSRTEIKLRIGTIMEQIFPEYEKQFSSLWVSTSMGILEKYLTPENIENTPIDELFEIIKDKSHNRLTKAKAISIKEAAADTFGIKIAQDAFSFQLKQLIDRMNFLDKQIEALDIEIMKYYEQFDCYLHTIPGIGIIGAATILAEIGDISRFKNSSALVAFAGIDPTVRQSGEFNSTHNHMSKRGSPYLRHAIFLAATTCSFHNSPLNAYYKKKRDQGKHHLTATGAVARKLTTIIYAVLRDSKPYEPKKFC

SEQ ID NO: 47821 - protein, 363 aa, unidentified
MSDGKDIVLAMDYHAENIEFRWFNEATGEERTGKFPTTRANILRQVEQGAGELVPGGRVVWIMESTTGWARVKDLLGERVKFLLSNVLQMPMPPKARRRKTDKIDTGRMLREYEHGTLPTSFQPSAWWREVRRVVDCRQDLVERQTALKNWITSLLHHETWLDRTNLWSDKGRRRLAEMNLPPGDRMLVELKGRQLDELARQLEQVEARMGEIYRAWPEAQWLDEVRGIGMVTAVSVLAHIGPIERFATAEGLISYAGLAPGTRQSDGTCHHGRIGGGGTDGHLRYLLIEATTWLCQIPRYRPAYERVEKRRGKKIARIVLARMLLRSIHKMLRDRVRFHPAGRPVRRPPSPTTPMATAGCTR

SEQ ID NO: 47822 - protein, 413 aa, unidentified
MSLKIVYPICCGIDVHKTFVVACVASTNSSNITSYSSHRFSTYTNGLRELALWLEAHNCRDVCMESTGKYWIPIFNILESSFNLVLAHPKYVKAIRGKKTDKKDAKWIADLFKHDLVAPSFMPPSDIRQLRDLMRYRFKLTCFSASEKNRFQNCLTVSNIQLGNIVSDTFGKSSQRIISQILEHPGEPLNLPSLIHGSMMPKLPELTLAVDGVFSPEQADKLKIIRQHYDDLKIRKTELEQLILALAMPYQQEINLILTVPSFKNIFSAITVLSEIGTNMEAFPSAKHLCSWAGLTPTNNESAGKKKSVRISKAGCYIKPLLVQCANAVVKSEKHPEIRNRYLRLKKRRGHKKAIIAIARMLLTAIYHILKNKVSYNAELYRKADIIPVNREITIEQAVLLAQSQGYRIKIAS

SEQ ID NO: 47823 - protein, 339 aa, unidentified
MMKLTADQLNAATFVGIDAHPDSHTALAMNRFKEPKGHVSFPNTFTGISQFQTWLQTLGTQKDQIVIGVEGGGNARNTLLSTILSTHDLLFEVNPLYTKHKRSFGTKGDKTDLDDAKLIAGVLTTELEELPRITPEQLTSAMLCLKKAVWFYEEITVQGARLKNQLHKLNREHKLTQEKEEKQLLLKIIKARMKELSFVEKTKVDMEKELKVLFRGYGKNLTSIRGVGIITAARIIAHTGGIERFSNRDGYVRYTGIAPLARSSGKTNFFVKANRGNRKLNSVYYFASLCRIVHNPQVKELYEKKIASGKTKREAITFIMRKTAILAYSMLKSGKEYRQ

SEQ ID NO: 47824 - protein, 454 aa, unidentified
MSSKAKSRQSGRMLPIMHPDAAGIDIGAEEIFVCVPPDRDIDSVRRFDTFTRDLFALADWLRECKIRSVAMESTGVYWIPLYQILETHGFEVFLVNAHHVKNVPGRKSDVSDCQWIQYLHSVGLLKASFRPPDEICVLRSLWRHREGLVQMAAEHIQHMQKALSQMNLQLHHVLSDIVGVSGIAILDAILAGERDPAKLASLCNRRIRSSRQTVAKSLEGDYRPEHLFALRQSLSAYRFYKQLMAELDLELEQNMRKLPRAEDAPHKRPVGTKKRIYQHAGNEPSFDLKEELFRIAGVDLTDVPGISTLTAHTILMEVGADVSRFRNASAFASWLGLCPEKQVSGGKVLYTRTRKVKNRAAIALRLGAHCLYHAQNYLGDFYRKMKWRLGAPAAVTATAHKLARIIYHLLSTRQPYSDEVFSRCDQQTSVRAEKRLRKQAAELGFQLAPITETT

SEQ ID NO: 47825 - protein, 417 aa, unidentified
MKKNSNSQTKNGQKTRPTKARGPVQRDSKEVMAELVAKLSEKLEQNSAQEKAAEGKPQGETGPNRDRLTVGVDLGDQWSNYCILGLEGETLAEGQLRTTREDVAELFRALAAARVIIEVGTHSAWVREVVVGCGHEVLVANPRLMEGTKRRKRKNDRIDAQKLARLGRVDPQSLFPMEHRSTEVRQDLVVLRARETLVAMRTQLINATRGLVKSMGARLPKCSSSSFPKKVEDALPAEVREALLPLVRLAEELSDQIRVYDERIEKLGREKYGHTELLRQVKGVGPLTSLAYVLTLENPDRFRKSRDVGPYLGLVPKQEDSGDSQPQLGINKAGDTMLRRLLVGSAHYILGPFGPDTDLRRYGLKLCERGGKNAKKRAVVAVARKLAVLLHRLWISGEVYEPLRHAPPAVTAQEATA

SEQ ID NO: 47826 - protein, 391 aa, unidentified
MPQAKDLSRSLTALDETSTLIAVIEMSQSSWLVAGIVPGVERHPLKKLTPNEETLLHLLLRWRDEAAKAGRSIARIVVAFEAGRDGFWLARWLRARGIEAFVIHPNSVAVSREHRRAKTDRLDTALLQRAFLGWLRGEREHCSMVAIPTLEEEDTRRPSREREALVGERTRIGNRMKSALARLGVRGFKPGLRKAAERLAQLRTPEGVPLPPNTLAELGRDMARLRVITDQIGEIEAARVERLRQQPDEARHPMILLLARVIGIGIETADMLVQEVLSRNLRDRRAVARYGGLTGSPEESGARRREKGLARAGNARVRRGMLQLAWRFLMFQKDSALAQWYRARTADMRGATRKTMIVALARKLLVALWKLVTTGEVPHGVVLRPAIQAAV

SEQ ID NO: 47827 - protein, 403 aa, unidentified
MNSVGIDISKGRSTIAVMRPFGEVVISPFEVRHTDSELSELARQLKSLDGETRVVMEATGNYHASVAKLLHDAGLYVSVVNAKLVHDYGNNELRRVKTDRKDAVKLANYGLDRWLTLPRYIPEEDTRLLLKNCYRQYRQYSKVQTVLKNNLISLLDTVFPNVNRLFSSPIRGDGSEKWVDFVAEFWHCRCVSEKSQKAFTNKYQRWCRKHGYNFSEAKAHTIHAETCGHIDVIPKSETTKLLVEQAVSQLRATSTALAALKHEMQSLASQLPEYPVVMDLFGVGPTLGPQLIAEIGDVRRFYSKKALVAYAGLDAPPNDSGDVTGRHKSMSKIGASSLRRTLFLVMSVYLQTAPLDEPVYQFMDRKRAEGKPYRVYMMASANKFLRIYYATVKAYLESLEHTA

SEQ ID NO: 47828 - protein, 315 aa, unidentified
MQSDFGSIGQIVCGIDVSSEELEVCVLLVDDSVNPVRRVFGNTSKGIKKLVSWLKGNRVELVVIEASGGYERVCRKMLGESGLQVRVVNPVQVRHFAKGVGKKAKTDRIDAEVIARFGQVVKLEELPDLSGVVLELQELVKRRQEIQDMVVAEKNRLRLSEGEKEKSLKRVIRVLEKELKLIEGRIKELSGKDKEIMHKIEVLRRQNGIGFITAVSMLSCLPELGRVGRKQIGALAGIAPFNRESGKWKGKSFIAGGRWLIRKILYMPALVATRFNQKLKEFYQRLLASGKPKKVALVAVMRKLLIISNAMLKNT

SEQ ID NO: 47829 - protein, 338 aa, unidentified
MHNNVVGIDIAKNIFHLYSVKAGGKVMKKKLKRKEMLAFFANFPASLIGMEACGGSHYWARELSKLGHEVVLLNTRYVKSFVVGNKNDYNDAQGIFDAVTRPNKRVVAIKTEDQQDLQMAHSLRKLQVGERTALVNQIRGLLLERGVMIDKGLNQVRKQLPLILEDADNSLTPAAREFIAQAYERLKTLDEDIKMHDRRITRLCQENALSKRFLDVPGIGPMTATLAAADIGTGKGYRSSRDYAASLGVVPRQHSSGDKPVYLGISKRGNRQLRTLLIHGARAVVKHCSGKSDPLNQWLQRLVERRGFNKAAVALANKNARILWAMTSKNEIYSPLSA

SEQ ID NO: 47830 - protein, 353 aa, unidentified
MQLYAGLDVHSAFTVVTVKDEAGNVVWQLKVPTNEKGFEQLLGKFTRHELHAVFEASRSWTYVAPLIRKHAKHVVMAHPLRVRAIADARIKTDAIDSNTLADLLRAKLIPESYMPCGDIIRLRNIVRYRVHLGRLSSKLKNKIRNVLAREGKKCEWTDPTGGRARIWLNRVELSPENRQELDYFVKLLDDVKQEIDKQQKMIERAALNYPDVELLRSIPGVDTYSALLILSEIADINRFQTPEKLASYTGLISSTYQSGNCCYQGRITKQGSRWLRWILVECALIAIRKLNRLQRFYKRLAFKKGHQKAIVATARKMITIIWHLLVKRQAFLPDDGLQAPRYSTDRKGRGLFV

SEQ ID NO: 47831 - protein, 411 aa, unidentified
MKAQVNFPQVIERGCGMDVHRDTVVVTVMGVGITVETRSFTTYTNSLRSLRDWLISLNITHMAIESTGIYWKPVYNILEQDFEVILVNARHVKNVPGHKTDKKDSRWLAKLLISGLLKASFIPPKDIRDMRDLTRYRKKLVQNAAADRNRFEKILQDANFKLSNVISDIFGKSGTLLINALIDGVDDFNLLLSLCHGRIKKKREILYESLQGVLTDNHKYMLNAIRTNLYNTLSKIESVDNQLLQLSKPYDIELELLKTMPGLNQISATMLLSEIGVDMSRFPTVNHLASWAGICPGNNESAGKSRSSRTNQGNQYIKPILVECAWAASHVKNSYLKKKYESLIGRRGKKRALIAVGHKMLNAAYYIIRDKVPYQDLGYEYLDSRKKQKQIQSYIDKLKDLGIYIEIPNIQ

SEQ ID NO: 47832 - protein, 325 aa, unidentified
MRQPQSQVKPQTQVGLDVSSQTLDAHIRVDGKTFSVPNTDAGFDQLCEILSAYSVSMILMEATGGYEDNVACYLQLQGYDVVVINPRHARRFAQSMGRLAKTDRIDAAILAHMAFMIDSGPDRERYIKPVTDEQRKQLSRMSSRRRQVVDLITIEKQRLTHADDYSRESINDIISLLNAQLKRIESDILCYVKKNFSELASRLLSIPGVGSQAVTVLIADLAELGHVNRRRISALLGVAPFNHDSGKFKGQRRIRDGRSSVRNVLYMGVISATRFNPVIKAFYDSLLLRGKPRKVAIIACMHKLIRIINAMMRTGKPFDMSLHGV

SEQ ID NO: 47833 - protein, 378 aa, unidentified
MSSCVNFWVGLDVHKDSVTAAVFRNRDPEPMRVDRLPYDLHKIRRYFQRLQAEGNVQACYEASGAGYVLQRSLAEWDVECHLAAPSLIPRRPGEHRKTDRRDAIKIGRDFRDDRLVLINVPTEDDERIRDLVRCRETFQREIIKSRHYILKFMRRRGFIYRDGDHWTLRHLNWIRQVLAPGTLADEDHIVLSEYLALLEYKLQRRDELDGRIEAFALMPRYKPVVDRICCFRGFKAQAAMVIATELGDLRRFENPRQLMAYVGLVPSEDSSGDRRRLGAITKAGNARVRHILIQAAWQYRRRPAVGAPLRRRQSGQDPNVIRHAWKCQHRLYTLFHRLAIKKPTPVAATAAARELVGFLWAILRDIDVSKLREVPAAA

SEQ ID NO: 47834 - protein, 339 aa, unidentified
MKTITIGLDIAKNVFHAVFVTSHGKVTKKKQMKRAAVLKFFANTEPAIVVMEACGSSNYWAREIQKLGHEVKLIAPQYVVAYRRKNKNDYNDAEAIAECSQRDDMSFVPIKDIEQQDAQMLLRIRERLVKQRTKLSNQIRGMLLEYGLCINKGTAALRRAVPEFLEDADNSLTWTARSLFSELYEEYLLLSDKIEKVDKKIKAFTKENELCQLAQTVTGIGPITALALYAAIGNGKHFANGRHFAAWCGLVPRQHSTGGKSVLYGISKKGNIVLRALLVHGARSVLNVVDKKEDKLSVWATNLKMKKSYNVACVALANKLARVVWSVIANNRPYELKMV

SEQ ID NO: 47835 - protein, 420 aa, unidentified
MSKLKYKTTNVNKLDWTMIEKQVQGKEVIFSIDVAKTDFVGLLRTREEEVIQLISWAHPQDTKEFLDNLKGLGVARLEAIMEPTGTYGDALRWQLTQRGIPVYRVNPKHTHDESESFDGVPSSHDAKAACIIADLHLRTRSQPWPETPLEQRELRGLVDELEIHQGVHRANLNRLSALLVRHWPELDGIMNLGSVSVLTLLSHYGTPANVAYHADEADELLRRTGRAGLKEKKRLAMIASAKDSLGVPCVANECKHIQGLATDLLRTHQASAAVEARMSQALGERSELDTLAQVCGKTTSIILIALLGDLRRYPNANSLLKAIGLNLKEHSSGQHKGNLKITKRGPSKVRFYLYWLVLRLIHRDLHIKAWYERKVARDGKRSKGRAIVAIMRKVVKGLWHVAQGQTFDSHKLFNLNAAEA

SEQ ID NO: 47836 - protein, 340 aa, unidentified
MRVLYAGFDLHGNSNYLGIMDGEGKRVFRKKLLNDLPWIREVLVPFKEELVGIAVESTYNWYWLVDGLMEEGYRVHLANPSAIQQYSGMKHSDDRHDAFWLAEMLRLGILPEGYIYPKEERPVRDLLRKRGHLVRLRTSLVISLQNILSRNLGRKVNVNDVKALREDRVVPLLEGHEDLALAGRVSKEAIDFLTHQIRRVEGVVLKKITLREAYRYLLTLPGVGKILALTIMLETGSIGRFATVGDYVSYCRKVPSQWTSNGKRKGSGNRKNGNKYLSWAYSEASELARRFDLEPRAYYHRKMQKTNAAVAHSALAHKLARAGYYVMRDQVPFDPGKLFK

SEQ ID NO: 47837 - protein, 333 aa, unidentified
MRGMAKDVFQVHGISENGRVILNKAIKRAKLLAFFETLPPCVIGMEACGSSHHWGRTLRKLGHDVRLMPANYVKPYVKRGKTDAVDAEAICEAVRRPTMRFVEIKTEDQQAVLSIHRTRDLAVRQRTQMANMIRSLLREFGHILPLGVEAVTAFAKRHLDGDQPDMPDIANGMLGMQCYQFIGLSERITGYTKMIEQHALLSTDARRLMDMPGIGPITASAIVATIGDAHQFRTGRDLAAWLGLTPLNKSSGGKERLGKITKKGDRYIRKLLVVGMTSRAVMAKRSPEKVDLWTAKIIAEQPFRLATTAMANKAALAIWAMLTKKKEYRQPAF

SEQ ID NO: 47838 - protein, 415 aa, unidentified
MSHMVSFLDVHKRMLAAVIGDAAKDREEHLLRRKFGAREGDLQVLVDWYKELGVQEVVMESTAQYWKPVWQTLEEQGFHLELAQAQSNRGPKGRKSDFRDAERGWRRYNADELTLSYVPNPEQRLWRTLSRTRIRLTRDKARMQNRLEGLLEEMRIKLSGVVSDLLGVSATSMLRAIAKGETDVEKLAEMADPNLRATKAELCDALQAVKKLDPRYRVILQQFLERLDLNEEHSEALKKELAESLKPYGDQVERVAEIPGLGVDSAQQIIAEVGPGAEKFATAGDLSSWVGVCPGENESAEESSSDRSAKGNASMRRILDQAANAAVKAKGTVFEKRFRRILGRDPKKYGRAIWAVAHHICRVIWKILHDGVRYEERGDRRDPRADKRRAARLLRQLKKLGYPEIRTPAVQEASA

SEQ ID NO: 47839 - protein, 359 aa, unidentified
MEAQRKALSFKGQNIYIGIDVHLKSWSVTLMSEATQLKRFSQSPDPDALYAHLVRNYPEAEYHSVYEAGFCGFWIHYRLVGLGIHNIVVNPADVPTTTSEKLRKTDAVDSAKLARSLRAGELKGIYVPGSESLETRSLIRLRDSITKDQTRLKNRIKSHLRYLGIEIPEEFSGPGRCWNRRFVVWLKGSETGTAYGRQTLDFLVRQYEALRGQRLEMLRAVMALSRTERFEKPLENLMTVPGIGQLTGMSLLSEIDDIRRFKSADQLAAFIGMIPMCHSSGEREGVGDITVRRSARLRSVLVEASWVAVRQDPALSMAYGNYCKRMAPGKAIIKIARKLVNRIYFVMKRNQPYVKCVVA

SEQ ID NO: 47840 - protein, 421 aa, unidentified
MRGLRAKRVRMVKEGTLIATVDIGITNNTGYCTTLDGRSTKSFSFDNTKEGFEKFWYMTVASKNRFGCNEVLVGYESTGPYAEPLVHYLANQQVKIVQVNPMHTKKMKEVNDNSPLKTDDKDPRVIADIIRLGRALSIVVPEGDAAYLRRLNNARERHVGEQTALLNQLQQLVFLIFPEFKTVLKNMKSKTAQYILKRYGTPERIGTLSKEALGEEMRKRSMGKFGIKEAESLIGLARETVGIKEGLGGIFMDIRHILMQLEAEVRFISEIEAEMGATLERIPYSGRLLSIKGLGTVSVAGLIGEVGDFSKFSTQSEIMKLAGLDLYEISSGKRKGQRRISKRGRSLLRKILFYAAIQMIRKNGIMYEYYARLTGRGMERMRALIAVSRKLLRIIHAIVRDNRDYVEQYQAPQRRVIKMAA

SEQ ID NO: 47841 - protein, 420 aa, unidentified
MKAYNINDFAALIGIDWADTKHDICEHPINTQKYYYCIIKSKPEALHDWAMSLKQRYPNQQVAVACELKKGPLIYALAKYSHLTLFTINPSSVANYRKAFTPSNAKDDPSDALIQVEILTLHMDKLSVIEPESAAVRSLAQLVEYRRSLVQDSVSLSNKITATLKNYYPQALEWFKEKDTFIFCDFISKWPSLTKVKRAKKQTLLDFFNSHNSHYAQVNDARILSIKSAMPLTEDIGVIEPNQLLVEVLIAQYRVLLKGIESLDKAIKLAYKSNDDKVIFDSFPGAGPQLAPRLLVAFGSNRERYEDASEIQKYAGIAPVIERSGKKMWTHWRYSCPTFLRQTFVEWAGFSIRYSFWAKAYYDQQKSKGKPHNSIIRSLAFKWIRILFRCWKTSTPYDESKYLEALKRRGSPLLKFAINS

SEQ ID NO: 47842 - protein, 458 aa, unidentified
MPKKSSNKAKSQRSRERALLQKVHLNAAGIDIGADAHWVAVPEDRDASPVRSFGVFTRDLVALCDWLKSCQVETIVMESTGVYWIPLYQMLERKGFEVRLVNAHHVKNVPGRKTDIKDCQWLQQLHTFGMLAGSFRPEAQMCVVRSYLRLRDTLSKDCNSLVQRMQKALTEMNVQIHRVISDITGVTGMSILRAILAGERDCLKLAQLKHPQIKSSAQDIAKALDGDYCQEHLFALGTALEFYDSYQLKIMACDRHVQDALSAFELKAKAPAPDVSRMRCAEKRLEALRRHHLEEMTGADLTKLPGLDLLAVERILSEIGLDMSRWPSEKHFCAWLNVAPNNRVSGGKILSSKPRKNANRAAAALRLAAQSAMQSKSAIGAFIRRIKSRLGAPTAINAGAHKLARLVYRMLKFGKAYVEIGQEAYEKFFKERILRNLQRKAHQLGFQVTPITVTVPAS

SEQ ID NO: 47843 - protein, 286 aa, unidentified
MNYCAVDLHGNNGFYGIIDEDGKRVFNRRISNDLPSVLEALKPYREDLKETGIVVESTFNWYWLVDGLMENGYDVHLANPAAIHQYDGLKCSDDKTDAFFLAELARLGILPEAHIYKKEERPVRDMLRRRLLLVRQRTQHKLSLGSLYSRETGGNLSSNEISKLRPADAAKLFDSEHNRMMAEINLKMIRFLEEQIKSIEKVVLKIVDLKPEFEILLTVPGIGRILALTIMLETGSVDRFTKAGNYTSYCRCVKSKKTSDGKRKGENNGKNGNAYLCWAYIRQPIS

SEQ ID NO: 47844 - protein, 338 aa, unidentified
MKHTVIGMDIAKHIFQLHCVDPSTGEIKRFKLKREQVLDFFAKQSPVLVAMEGCGGAHYWGRELSKLGHTVRLLPAKLVRPFVLRNKTDAGDARAIWVAAQQSDIKSITIKTEHQQSILALHRIRSQLIKMRIMQTNALRGLLMEFGETLPEGYLALRKALPVSLAALETKLPGMLLQTLREQWTRSQGLDQDIAAIELRLKHALAQSSACKAIAEIPGIGLLTATAAVATMGDPASFKNGREFAAWLGLVPRQTGTGGRIQQLGISKRGDAYLRTLLMHGARSLVNRNKQSVWITGLLAQRPYSVAVAAVANKLARILWSVLATGRPYEPATLSAAV

SEQ ID NO: 47845 - protein, 361 aa, unidentified
MNTVIRVGIDLAKYLIQVHAVDAAGKVVTNRVLKREKFLLWCADLPAGCVIAMEACSGAHHWSRKLIDRGFDARIIPGSSVAPYRIQGRTGKNDANDAAAVCEAASRPHMNFVPPKTLAQQGMLCVHRLREGLKEERTACINRIRGLLAEFGVVLPQSPEILRRHLIDIVEDASNDIAGVARLVLQRAHEHWRELDAHIKWCDQRIADHQKFDEQVQRAAELMGVGSITASALVATVGEFRQFRNGAQFAAWLDLTPKQYSSGGKTSLGSITKRGSVYLRTLLIQGAKAIVLTRQYDKPIFLWAHKLRERIGWQRAVVALANKNARILWAVMTREKRYDAHHVSCIPLLAAVTAPALVSVA

SEQ ID NO: 47846 - protein, 544 aa, unidentified
MAEVRAKLAPGTPVEVWFQDEMRVGQKNKLTYRWARKGSRPRAAHDQRTQSTYLFGAVCPERGTGAALVLPFCNTEAMQLHLDEIAARVTAGAHAILILDQAGWHGAKDLKIPSNLSLLPLPPRAPELNSQENIWQTVCSLSVRMWLVHAMRRARVASDRPAPSLTHRGRAMQENSKIFVGLDTSKMKISVALAEEGRQGEVRFLGDIDNTSDAIRRLVRKLTGKFCELLFCYEAGPTGYGLHRQITALGHACSVIAPSLIPKRPGEHVKTNRRDALTLARLHRAGELTTIWVPDPGHEAIRDLVRAREAAMEDLREKRQQLQSFLLRHGRIYPGLRSWTLVHARWLSNLTFEHPAQYLVLREYRQAIEDAEARLERLTQQVADVVSTWSMAPVVEAYQAMRGVAFLTAVTFVAEIGDVRRFETPRQLMAYLGLVPSERSTGEQVRRGSITKAGNPRARRVLIEGAWTYRYPARLSRALQVRQERLPKTVRAIAWKAQMRLCARYRRLMAAGKRQTLVTTAIAREMAAFLWAIGHEVEPRSAAA

SEQ ID NO: 47847 - protein, 476 aa, unidentified
MTDDGTDDPQHASTPAAEVPPTPNGDRVPVGLDKYQKRRIAWEAAGVVGVDAGKFHHALVVRPRGGRDSKPLRFPTTREGFETATAFIHRVVLGATPREIVVGVEFAGVYGYTLAHYLDARGYRVVSVLPSHTKSFKQIEHGAPLKTDEKDAVSIVELAAEGRFTTFAFLRPEYAGLRYLVSGYERVTKQSNAAVTRLRSTLHVAFPEFETVFRSLTKQLGALAILREYPSAAALLAAPKRRVVRVLETATQRKMGVETYEALTSAAAATLAVPDASDALAVEVRRLVEQIDLYTQQRRDMETAMTAGLATLPEAAALLSVPGVSAVTAAVFLGSIGDPRAYESGRQVLKLAGLQLVKDASGTREGRYRISRFGKGVLRRHAFLFAMRSVKGSPLGIYHRTYQRFLRRDKPKMVALIAIARQAIRLWYVIARSRQPFDRVRFAGLGAADRIDEAVWPSGPGEDADAALDAPAPIGS

SEQ ID NO: 47848 - protein, 346 aa, unidentified
MEKLIRIGMDTSKSVFQLHGVDGREQPVLKKKLRRREVVPFFSKLEPTVVAIEACGGSHYWARTLGGLGHEVRLMAPQHVKPYVKRGKNDAADAGALCEAMSRPGMTFVAAKSPEEQAALMLAGMRDRLIKTRTQLSNAIRSYAAEFGLIAPKGLDKIEPLLMRAAAQEGLPELARRLFALHGREYARLQAEIREVEAMLMTWHRHNQDSRNLAEVPGIGPIGGTRMAMKKADAAACRSARFYAAWIGLTAKDHSTAGKLRLGGITRAGDPALRSMLVVGAMAVIRQAARNPAKASPWLLALLRRKPKKLVAVALANKNARIAWKMMMTGERYDPNRAAPAIANAA

SEQ ID NO: 47849 - protein, 365 aa, unidentified
MLYLGIDQHKRQLTVNLRAEDGTVVLKRQVSTEWEKVRAFFGDLAEKAKPEGGFLAILEVCGMNPWLLDMLNEYGCRETVVIQPTERAIQKTDRRDAGDLSRLLWVHRQQFLDGKHPLGLRRVQPPTPQEADDRQLTALRARLTKKRTAVLNGIHKILRKHNLEQASPTKKFQTQKVRRWLAAMELPALDRLEMDLLLPQWELLDSQLEVVEAKIAERAAADERVKLLESAPGMGHYSAVAIASRIGDIERFKRPDSLANFFGVTPGCRNSGEATQRLGSITKRGSKMVRYLLNQAVIKVLRFDGAMRTWFKRIKKRRGSKIARVAVMRRLVTIFWHMLKKKQRYRYDSPLKKHKEFEAYEGTPA

SEQ ID NO: 47850 - protein, 338 aa, unidentified
MKLYGAIDLHSTNNVMVVINEHDQVVYQKRLPNDLSLIAQQLSSYRRSLEGIVVESTYNWYWLVDGLMEKGYRLHFANTAAIQQYNGLKYTDDHSDARWLAHLLRLGVLPEGYIYPKQERAVRDLLRKRGQLVHQRTANLLSIQSLISRTTGNSINAQYIRALNIQRVDGVLSNPNHVLALKANLAVMNSADGQIEILEKAVQDRVKLRPQFRFLKTVPGIGPILALTIMLETGQIERFASVGNYASYCRCVGSKKISNGKRKGSGNTKNGNKYLAWAFVEAANFAIRFNSKIKGFYQKKKSKRNAIVAIKAVAHKLCRACYYIIKDQVAFDITKAFA

SEQ ID NO: 47851 - protein, 386 aa, unidentified
MQTPNDLSQYRIVLKQDTTLIAVIEMSLSSWLVAGIVPGVKRQPLKKLPVDESALLKLLNRWREEAEKAGRKIERIAVAFEAGRDGFWLARWLRARGIEAHVIHASSVAVSREHRRAKTDRLDTELLKRAFLGWLRGERDHSKMVAIPTIGDEDAKRPNRERESLVGEQTRIVNRMKAALSRLGIRGFNPKLKKAAERLEDLRTPEDEPIPPNTLAELRRDMERRRLVRSQIRDIEDARLGRLEKAPGDGPHAMVRLLARVIGVGIETADMLVQEVLSRNLRDRRAVARYGGLTGSPDESGKKRREKGLARSGNARVRRGMIQLAWRFLMFQKDSALAHWFYARTKQAPQTRKTMIVALARKLLIALWRLVREGVIPEGIVLRPAL

SEQ ID NO: 47852 - protein, 412 aa, unidentified
MLKKSSIGSNIRCRVRVATCKSRSHTDAAVGPKPTAPRHLDAVAKQGSSRRRVQQPEQTNEPLTPSSSHKQERVFVTSVASVVPSTSSAVPAASGPFVGIDVSKDKLDLAIHPQQQIRTFSNDAAGITQVLELLKPLQPRLVVLEATGGYERDLLYQGLDAKLPLARVQPGRVRHHALAHGLLAKTDHIDARIIASFAQSVLPAVTQRRSAAQEELDALLVCRKQLIDAHTAHSNQMDLAASDFTRKSLKRVLRQIQKEIDALDKRIARIIDSDDDLSDLRDVLESAPGVGAITAATLISQLPELGKLDRCQISALVGVAPYNDDSGGRAGKRAIRGGRAEVRGTLYMAALSATRCNPVIKAFAQRLRDAGKAFKVVMVAAMRKLITLLNAMARDRKPWSPPKAALAQEALA

SEQ ID NO: 47853 - protein, 419 aa, unidentified
MSFKILKNNCCGLDVHKTWIYACIGITDSFKRTEYKQARFSSFTKGLQELCLWLAKYNCIDVCMESTGKYWIPVFNVLEKNNIFVTLSHPKYTKPQKGNKTDRKDAKWICDLYMCGMVKPSFIPPADIRQLRDLVRYRFKLTCMITGEKNRAHNCLTVSNLKLDDVFSDIFGKSSRSITEQILQHPGEVFDVAPFVDSRCKTPIEEIQAAVDGAISHEQAVKLRQCLKHIDELEMHKAEIEREIFRLSQKYESVLDLIRTIPGFDKNPLTAIQVLSEIGADMSVFPTAKNLVSWAGCCPRNDQSSRKIKSTRISRAGSYSKPVLVQIANALIKSKKHPEFTTRYRRIKARRGHKKAIIAICRMILTAIWHILTDLKPYTPEGFLESRPVNKEKVLTISQALNLIKQRGYIIKDDVGPVT

SEQ ID NO: 47854 - protein, 317 aa, unidentified
MTPETVYAGIDVAKRRLDVAVRPTGEQRAFANDANGIAELVAWLQGQQPQLVVLEASGGYERSVLASLGVAGIPVAAVNPRQVRDFARAIGRLAKTDALDAAVLAHFAEAVRPEPRPLPEAQAEQLRALVVRRLQVVEMLTAERQRLAFARPPVRGLIEAHIAGLKEELTHLEEEFDRTLRGSPLWRAREDLLRTVPGVGHAVARVLLVEMPELGQLDRRRIAALAGVAPLNRDSGQWRGRRAVWGGRARVRSALYMAALVGSRHNPVLQSCYQRLLAAGKVKKVALIACMRKLLTILNAMMRDGAEWRPVPFAIPA

SEQ ID NO: 47855 - protein, 349 aa, unidentified
MALTIVEEARSVTGGVDTHAGTHVAAALDPVGGLLGVAEFPATAAGYSRLLGWLGGFGTVCLVGIEGTGSYGAGLARHITAAGIRVVEVDRADRQDRRRQGKSDPLDAVSAARAAQSGRARGAPKGRDGAVEAIRTLMVARRSAAGERTRTINQARALVLTGPDDLRIRFARHTPAALITGLASLRPRTGDVAGHATRIALRELGRRARFLDGQLQRLDELIVPLVTAHAPGLLALYGVGPHTAALLLITAGDHPGRLRSEAAWAHLCGAAPIPASSGKVTRHRLNPGGDRQANHALWRIVFTRLGSDPRTRAYAERRTAEGKSKAEIIRCLKRYVAREVYPHLGPAGG

SEQ ID NO: 47856 - protein, 416 aa, unidentified
MDAIVERCAGLDVHLDTVVACVLYGKLDIKPKKEVKTFSTTTKGLLELLDFINQKECTHVAMESTGIYWKPVWNILESGAFDLIVANAKKIKNVPGRKTDVKDAEWIASLLRCGLIEKSFVPPERIRDLRDLTRLRKELLGEVNRNKNRIHKVLQDANIKISSVLSDVFGETGKSILNQIIDNQCITEEFIYSLYEGRGKSKLKSTPMEMYEALNGKIRGHHVILLGMHNSNIVFLEKQINELEKEIDILLQKERDSLELLETIPGISKISASSIIAEIGTSMDVFKTEKHISSWAGLCPKNNESAGKKKRSGIKSGNNWLRSMLCECAWSATKKKDSRFKNKYWNMVPRMGRKKALIAIANMMLRLIYHLLKTKSTYKELEIQYFIDKDKRREDRIIKELKSKGYLVEKDSLQMA

SEQ ID NO: 47857 - protein, 394 aa, unidentified
MSLIEDCAGMAGALPQTWGTSPMNNTIFVGLDVHKETIAVAVAEGRRGGEVLQLGNFLNRPDHIKKLVERLARGNRILSFCYEAGPCGYGLYRQLVALGHECLVAAPSLIPVKAGDRVKTDRRDAVMLAKLHRAGELTAVWVPDDAHEAMRDLIRARATAVRVLSKARQHLQGFLLRHGRIYAGKKGWTQAYRRWLTTVRFDHAAQQVVLQDYIHAVADAEARVERLLRQIEDLAQVWSQAPVVAALQAMRGVAFVVAVTLVAEVGDFARFANPRQLMAYLGLVPSEHSSGRAVRRAGITKAGNALARRALIEGAWTYRMQPRVSRKLHDRVETLPQVVRDIAWKAQVRLCSRYRRLAAAGKPKVVVTTAIAREMLGFVWAIAQSVQVTPLRTI

SEQ ID NO: 47858 - protein, 315 aa, unidentified
MDAIRERCAGLDIHQETVVVCLLSGPLEKKPKSVIETFGTTTRELLRLQEWLEQQGCTEIAMESTGVFWKPVWNILESTCTITLANPQRIRNMPGKKTDVKDAEWIAKLHRCGLIEGSFVPDEPIRDLRDLTRYLRKLKQNATQEKNRIHKILQDANIKLTTYVSDLFGVSGRALLDSIVNGEVLEVHEVRKLVHTRLKMKVPSLVEAMNGRLRLHHRKMIRRHWDHLQYLESEMQTLEAEIEELVQPYMKEIELLDTIPGVSTDAAASIVAELGTDVSPFPSEAHLASWVGVCPANHESAGKKKVKRTNAGTEV

SEQ ID NO: 47859 - protein, 417 aa, unidentified
MKKHSNSVEKSESPTKCRSSRVAERRDSSEVMGELVSQLRQQLELKSVSVVEAARDERDAVSPNLDRLTVGVDLGDQWSNYCILGLAGETLAEGQFRTRREEVGEFFRGLAISRVVFEVGTHSAWVREIIAGLGHEVLVANPRQMDGSKRRRRKNDRIDAVKLARLGRIDPKSLYPIQHRSTEVREDLLVIRVRDSLVESRTKLISTVRGMVKTMGARLPGCSSVSFSRKTADQIPHEVRETLQPILRLIQMLSEEIKGYEKRIEKLASEKYMDTNLLRQVNGVGPVTSLAYVLTLETPQRFKRSRDVGPYLGLVPQQEDSGDSQPQLGISKAGDKMLRKLLVGSAHYILGPFGPDTDLRRFGMKLCQRGGKNAKKRASVAVARKLAVLLHRLWSSGEVYEPLRHGIARTMTQSAAA

SEQ ID NO: 47860 - protein, 412 aa, unidentified
MEVIVERPAALDVDKAQVTACVRVPGQGGRRCSEVREFSTMVGGLLVLRDWLRAHGVTQVAMEATGVYWKPVWAVLEDDFELLLVNARHVKQVPGRKTDVSDAAWLCRLLEAGLLRPSFVPPKPIRAVRQLTRYRKAQIKERQREAQRLHKALEDSGIKLDCVATDILGKSGRAMLDALCRGTTDPEVLADLAHGKLRRKIPQLKQALEGRFEPLHALLVSSILAHLDFLDEQIERLSEAIEAQLRPCAAAVELLRSLDGIETRTAQNVLAEIGVDMSVFPTAGHLASWAGQCPGNDQSAGKRKSGKTRKGSKWLNDALKDAAMAAIRTNDSYLQAQYQRLRPRIGHGRAIGAVKHSIICACWHMLTTGELYRDLGGDYYRRQNPERQTRRLVAQLERLGHKVNLEQMPHAA

SEQ ID NO: 47861 - protein, 354 aa, unidentified
MGLKHQKEKRSMDYFGGLDVSVKDTSICIVDDTGGIVREVKVASEPEALLAVLVSPLYRFKRIGLEAGPLSQWLFSALVEAGLPAICVETRHMRAVLKAQINKTDRNDARGMAQMMRVGLYRPVHVKTLRSQKLRMLLTHRKLLQSKAIAIENDLRATLRNFGLKVGVVGTVRFEARIRELVENHPDLTLLVEPLLVVRGVLREQLDILHRRLLAVVRDDNVCRRLMTVPGVGPVVALTYRATVDVPARFRKSKSVGAVFGLTCSRDQSGERDRPGAISRCGDEMMRAMLYEAAQSMLRSKKWSWLKAWAMKIARHRGMKRAIVALARRLAVIMHRIWVDGTEFRWTREAAVAA

SEQ ID NO: 47862 - protein, 410 aa, unidentified
MEVLYQRCCGLDVHKETVVACLRVVFGGEVVREVRTFETTTASLMALSEWLAENGCTHVAMEATGVYWKPVWHILDDGDFQLILANAAHVKNVPGRKTDVNDATWLADLLAHGLIRASFVPDTQTQELRTLLRTRKQLVREKSSHILRVQKTLEDANIKLDSVITDIIGMSGRAMIEALIAGESNPAKLARLANYRLRASQEKLREALRGRVTKHHRFLLRLHLNQIDALDASIATIDQQVEAGIAPFRVAVELVTSIPGVSDLGAQVIVSEIGTDMSRFPSEGQLISWAGMCPRNDESAGKRRSNRVRKGAPWLKTTLVQCAWAAVRKKDSYLKAQFLRIKARRGPKKAIMAVAASILTAIYHMLKDGTLYQDLGSNHFQSRSKGQQTKRLVKRLADLGYDVALTPLAS

SEQ ID NO: 47863 - protein, 344 aa, unidentified
MRQETMVYVGLDIHKEFCQACVMNKSGKVLSNEKFLSNQESLDKFLDRFDKAKFVLESTGIWEFIYEGIEKRGFEAVLAHPLKVRAIAEARVKTDKVDAQTLAHLLRADLIPRSWVPSKDIRDLRQLVRQRSYLVRQSTSLKNRIHAELLRRGVRRPEEFGGAFTKKSIVWMRSLRIPTVDSCLCCLENVQEQIEAINGKLLEEFNRRPEAQIIATIPGIGFYGALLIHAEIDDIHRFAHPEKLCSYAGLVPTVSQSASSVKYGSISKEGSAYLRWILTESVHVHLRCNPDSRLSKFYSRIEKRRGKQKATIATARKLLRIIYWMLLNKERYHGHGFNPVLKPA

SEQ ID NO: 47864 - protein, 417 aa, unidentified
MDSDKEIVCGADIHRDFLIATMISRSGLKLQERFNMNQDGLLAFRSWIINHRCQRLAVESTGGFWYPIFTILEGHVEFILANAYQIRNIEHKKTDKLDSERIAIYCLNNLITPSRIYPKDYRDLRSITRARETLVNARSKIKNQIHQSLSTCCIKLSSVISDSFGKSGRYIIDRLLEGKTIDQIISGIPSKRIRKKEDELREAIKNGLDPVQVFLIKANLDVIDDISKKIKILEAEIAEKVKPFEDDLKIILSVPGVGFISAATIIAEMGDYRDFPSADKMAKYFGIVPSVYQSAGKLRTGKITKTGSKHMRRILVEVAKAISRTKKNSRLMRFFQRILARCGKKNIATVALARKVLCIIYHLLMNHENYQEPEVTKTKPKIPSSVSPIRMMDIDEMIKIISQAGYLVEKDLKEGCG

SEQ ID NO: 47865 - protein, 320 aa, unidentified
MRYIGIDVAKDTFDVAFPSSNSNYKVVQFVNNEEGVKKFIKKLKQDDRSVLEATGSYSTLLTKRIMESGFEVSVVNPLQTKYFSKMTLRRTKTDASDAEMIAEYGLKMSPEPEKPTPDYIDDMRQRRAVLSQLKETVVRFKNQLHAMKARVRPDKTSIKFIEETIANLQMQIDELEKNMQEVVKEKASKSYESLVSIPGIGKLSAIELIAITSNFENFTNYKQLSAYVGLCPRISESGTSVKGKSSLSKMGMSSTRQLLYMCSMAAIKCNKSCKEMFKRLIENGKHRMVALMAVANKLVKIAFTIVKKGELYDDKKVCFS

SEQ ID NO: 47866 - protein, 353 aa, unidentified
MIVIGSDPHKRSYSCQAVAAGTGELRSSESVPATVAGHERLLAWARGLDGERVWAVEDCRHVSAKLERFLLARGERVVRVPPKLMAGRRRGSRQAGKSDPIDALAVARAALEEGVETLPTATLEGPAREVKLLLDHREDLIAERTRVQNRLRWLLHDRWPELQLPAGCLDRYVWLDRLAGRLARSPQDADVRVMRAQARRLKEITREAAALERELLLLVRALQPRLLELPGVGPLTAAKLIAEIAGIERFRSEAKLARLAGVAPIPASSGNRTRMRLHRGGNRQLNAAFHRIAVTQMRMHPPAKDYIARKLAEGKTKPEAIRALKRHLVRTVYNTMTTHNPNASAPTPALALT

SEQ ID NO: 47867 - protein, 430 aa, unidentified
MAELIPLTALLGIDWADQSHEISLQRGTLPVGAADVERHQLPHTPEAIRAWMGELRARFPVGAVGVAIETSRGPLIHALLDYDWVVLYPVNPRSLARFREAFTPSGAKDDAPDADLLRELVAKHRDRLRPWMPDTEATRALRRLVESRRHAVDLRTKFTQQLTAALKEYFPQALEWAGTDLGSDMACDFLLAWPTLAAVQQVRPQRLRSFYTRHHCRRPERIEARLAAIRAATPLTTDRAVIESGVLVVQMLARQLETLGVSIRRFDDEIAARFAAHEDAALFRALPGGGAALAPRLLVAFGSDRTRFPHASDVQAFSAIAPVRERSGKSWVIHWRWSAPTFVRQTFHEFAQHSIRSSPWARAYYALQRARGKDHHAAVRALAFKWIRVIWRCWQDRTPYDEARYLRALADRASPLTGHLPSPTGDSRAA

SEQ ID NO: 47868 - protein, 310 aa, unidentified
MQIICGVDVSRAWLDAFVAPDHYQRFANDPDGASTLAGFCRDHDAQLVVMEASGGFEQPAFLALWQHGQPAAIANPAAVRHFARALGYLEKTDRIDAGVIARYAEAKRIAPTPPPSRNQLKLAAIAARLRQVVADLSVQKQRLHFTRDPLALASLHEAIAFFTRQAKALADEIATLVEADPLWQALDRTLRSVKGVADRTVAIILADLPEIGTLSNKAIAKLAGLAPLANDSGKRHGHRTVRGGRASVRTILFLVANIARKFDPSLDDFHRRLTDQGKPKMVVRIALARKLLVRLNSKARETRAQLALAL

SEQ ID NO: 47869 - protein, 410 aa, unidentified
MQVLYPRCCALDVHKLTVVACLRIVEDNKVTTEVRTFGTTTASLIGLRDWLAANKCTHVAMEATGVYWKPVWHILSDGEFKLVLANAAHVKNVPGRKTDVSDAEWTSDLLAHGLIRASFVPDTQTQELRALMRTRKQLVREAASHIQRIQKTLEDANIKLDSVISDVMGKSGRAMIEAMIAGETNPAKLASFADRRLKASPSQLCAALRGRVTTQHRFLLRLHLKQIDALEAAIAEIDQQVEGDIAPFRAAVKQLSSAPGVKALAAKVIVSEIGIDMSRFPSDGHLVSWAGLCPRNDESAGKRRSNRLRKGAPWLKTTLVQCAWSAVRQKDTYLRAQFYHLKARRGPKKAIIAVAASILTAVYHMLKDGKAYQDLGPNHFQRRNKDQQKHLLVKRLANLGYAVALCPLPG

SEQ ID NO: 47870 - protein, 307 aa, unidentified
MFVGIDVAKDRLDVHVRPAGEAFTVGRDGEGIEDLVGRLSRMAPALVVLEATGGFETIVAAGLGAAGLPVAVVNPRQIRDFARATARLAKTDALDAAVIAHFAEAVNPPARPLADEQSRLLGELMARRRQLIEMIGAESNRRRMLTVRRTLKTVDRVLATLKTQLQQIDDDIDSAVRGTPAWREAEDLLVSVPGIGPRIARTLIAELPELGRLGRREIASLTGVAPFNRDSGTLRGRRTIAGGRPVVRAALYMGILVSIRRKLPPALTYHRLRAAGKPAKVAIVACMRKLVTILNPILRDKKPWAIA

SEQ ID NO: 47871 - protein, 346 aa, unidentified
MTTYCGVDFHARQQTICYCDTADGVLYRRELDHQKDDVRSFYSKLTGEVIVGLEASGYSTWFIELLEGLGHQVLIGDAVEIRRVARRRQKNDRRDAGLILDLLLKGEFPQVHRPSLESREMLRHLRYRHKLVQMRTRAKNCLQALAFSAGSAGRSKLLSKKGREQFLQLPMSEAMARQREEWLSLVEEFNQRIKSLDAWFEQQAGADERVLRLRTHPGIGLLTSLALVHSLEPVTRFEGSRKVAAYAGLEPMEYSSGDKQRFGSISKSGSRLLRYLLVEAAQITVRRDEELKRFYLRLLHRRGAQKAKVAVARKLLIRGYVLLRDRIDYAEFLSRGVEARLARLAT

SEQ ID NO: 47872 - protein, 339 aa, unidentified
MELYAAFDLHANNSLLGIIDGDGKRVFKKRLHNERELMLEVLRPHKEHIVGIAVESTYNWYWMVDALMEEGYRVHLANPSEIQKYEGLKHADDNHDAFWLAQMLRLGILPEGYIYPKQERPVRDLLRKRGHLVKIRTSLILSLQNIITRNCGLRLNVNDVKRLRENRVSPLLEENDDLALAGMVSKETIDFLTHKIRKIERAVEGKIQLKKEYRYLLTLPGVGTVLALTIMLETGPISRFAKVGNYVSYCRKVSTQWTSNGKKKAGGNKKNGNRYLAWAFSEAAELARRYHSQARAYYNRKMQKTNFMVAHSALSHKLARAAYFIIRDQVVFEPEKLFR

SEQ ID NO: 47873 - protein, 424 aa, unidentified
MNCNQNFKISQVTEGTLVLGIDVGSNTHYARAFDWRDLELSKVFKFKNSFEGFQSFVLWVNDLCCKYNKSKVIAGLEPTGHYWFSLGELLKENNITIAIVNPYHVKQSKELDDNLQTKNDSKDPKVIAKLVIDGRYSFPYIPEGIYGELRVADKLKNDIKQQIISIKNKIHRWLSIYFPEYEKIYSSIDSKSGFLLLKETPLPKDIVELGSEGIVERWKQTKLRAVGLDKAKKLEEAAKKSIGCKNITSSARFEIKLLIEDYEYKQNQLNSITEELNKLCEKIPMIKEIAEIKGIGIATAISFVAEVGDIRRFKSAKQVQKYAGLALKENSSGKHKGLTRISKRGRKKLRTILFRATIPLIGFNKEFSSIYNNYIERKDNPLKKKQALTAICCKMIRIFFTILSKGIKYDETKMLHDIKRPVAA

SEQ ID NO: 47874 - protein, 357 aa, unidentified
MGKSIIDPSSVTRVGLDMAKRVFRIHAVDATGFVVIARSVNRRTLVKFFDMLPRWVVAMEACSSAHHWGRQLLDLGFAVKLIPPAHVKPYVRRSKNDAAAAAAICEAAGRPGQRFVAVRSVENQAALMRHRARELTVGQRTAALNALRGHLSEIGVVAAQGVQNAYALKDMAAEGFDANGEIVVPDCVRLALAPLVRQIDALDEAIEVIDRELEASARTDETAKRLMTIPGVGPVTAMALLATIQDFAAFSSGREFAAFLGLTPREHSTGGKPRLGRITKMGDRYLRKLLVQGACSALGHRKGHNDALRRWASGMLERKTVKYKFKLTAVALANKLARIVYALATQGGHYDDRPVAA

SEQ ID NO: 47875 - protein, 427 aa, unidentified
MNEVDAIRIEQFRQFKQQIRGSREYEVVGVDVGKEKHHAFFGTAMGKTLLRSLVFDNDLDGFIKLTEQAEALRIQEGLSKVAYGLEPTGDYHKPLGEHLIKCAKLVVLVSGVALRRNRELLDGRWDKHDVKDAANITDLMAQGKCMFYEYPDSNVRDLRVLLSLKMRLKKQGQGLRVRIRNHLVAQYFPELDRMWNQSESENLAIVRWCLDPSVVAGLEIDEFVRRVACRERGVRQHSRLKGIWKMAVDSVGCGVPEAVEVECKVVVEGLRRLKEEMKEVTEEIQKVCLRFPEYPFLLSIPGFGPEVSAQVLGAIGDPHRFENAGEVLKMAGLDLGAHRSGKTAETAVPVISKRGKARLRYMLYQAALIASIRNRLFIRYYTRKLEGRQQERGIKTKMRIKLAAKLLVIAWTLMKKREPFDPGRLKI

SEQ ID NO: 47876 - protein, 369 aa, unidentified
MYGTTVALNPTYFIGMDLHSNNVVVCVLQNAANQAGQLIKKVIQRKKIVLSTELEELQHFLQPYCSAQHQATVGSTYNWYNIADLFERNGWHLKLADPTTVKNNKTKFSDDISDAEFLADQMRLGALKAADIIPKQDRAFRDLVRLRVDLVQDRARYRTVLKNFFNNQRYMRITTEHLNHMAEQYCDGDVTELYSIFDNDNTCLKAGHYLTAMHHLNLQIQQLEEQIKAQEIKNDLTCHRYLPRLYSMKGCGFILGSIIATEIVNINRFRTEKDFVSYCRLSPAVRLSNEKKKGDGNRKNGNAYLSWAMTELANLMVFHNPVIKKKYDRQLKKSHLRAKAIRSIAAKLARCIWHMLKKDKDFQIDLAFK

SEQ ID NO: 47877 - protein, 370 aa, unidentified
MRNAHGTIYVGIDVSKDKLAVAIAGGERGDEVLSLGTFENTPAAVDKLLKKLAGSGDILACYEAGPTGYGLYRQIRASGCSCCVVAPSLIPVRAGERVKTDRLDALRLARLLRAGELTPVWVPDETHEAMRDLVRARESAAEDQRHKRQLVSAFVLRHGRIYPRTKPWTMRYRRWLQTLAFDHPAHQIALQEMLQAERNASERLERLTKHIEALVPEWNLAPAGNALQALRGVALISAVTFMAEIGDVRRFETPVKLMAYLGLVPSEYSTGKTTRRGGITRAGNARVRHKLIEGAWTYRLQARRGERKLYILKEQSPEVQDIAWKAQSRLTARYRKLSQRGKKSTVVTAAIAREMAAFMWDIARRTMPAR

SEQ ID NO: 47878 - protein, 344 aa, unidentified
MEHYAGLDVSVKETSVCVIDGTGKVIQEVKVATEPDTIRAVLVDDTFAIERIGLEAGPLSQWLYSGLAEAGLPVICVETRHMKAALSAQLNKSDRNDARGIAHMMRAGLYRPVHVKTLASQKRRMLLTSRQLLQAKALDIENDLRGTLRNFGLKVGTVGTSKFEARICELLADHPDLAAIVEPLLIARRALREQLGVLHRRLLAIVRQDEVCRRLMSVPGVGPMVALTFRATVDVPARFKNSKAVGAVFGLTPRRHQSGEVDRMGGISKCGDAMMRRLLFDAAHVMLTRTIRWSWLKAWGMKIARHRGMKRAVVAVARRMAVIMHRMWADGTEFRWTSTNIAAA

SEQ ID NO: 47879 - protein, 475 aa, unidentified
MNIKGTKKKNQVETVNIFEQQELLKKAEVIRENLTASTWRELETNGKFGKNEKLSFVSDDMLILGCDVGSDTHYVRAIDTRGRELSKSAFPFSNTLEGFQSLMDWATKIAASNGKEQIILGLEPTGHYWFCLATWLIGNGISVVQVNPYAVKQTKEVEDNSQLKDDRKDPKLIANLVKDGNFGMPYLPERLYADIRRLSMLRDQVNEDRIRDLNRLHREMKIYFPEYKDAFGKIDGAFCLEVLKVAPFPDELVILGVEGIRQIWHEAKLRGRGYVNATSIFENAKKSIGIQDGAESGKLAVKWFVHRMIESNEQLAEIESRLRQMCMEIPYAENILAISGIGENTLSGILAEMGDISRFDDVKEIQKLSGLGLVACSSGKHKGETKISHRGRKRLRYWLFQAAKSAVAHADEFKELHAYYTTRKDNPLKKKQSLVVIACKILRVIFAILTKGMPYDPKKMLGDIVRPNEQSVQAA

SEQ ID NO: 47880 - protein, 343 aa, unidentified
MEYYVGLDVSLKHTSICVVNPTGSIVQEGVVDSDPEAIALFVRSRAPGTVRIGIETGPTTTWLWTELNRLGLPVICIDARHAKAVLKMQINKSDRNDAAGIARIMQTGWFKEVRVKDIDSHAVKALLASRALLVKIKRDLENQIRGLLKNFGLVIGRGKFNVFAVRAAELIENRPELIAAVRPLLEARKAIEQQVDDLDRKVHKLARHDVEVRRFMTVPGVGPITALCFKATIDDPTRFKRSRSVGAYIGLTTRRHASGEIDWSGRISKCGDAMLRMYLFEAAGVLLTRVPKWSGLKAWGAKLTKRNGLRKAKVAVARKLAVILHRMWIDGTEFNWSTKKAAA

SEQ ID NO: 47881 - protein, 367 aa, unidentified
MNDIIYCGVDFHARQQTICCLKTETGELAFHELKHDDKDELRKFYSQFRGPVIIGLEASGYSPWFEQLLEELGHEVWLGDATEIRRRARRRQKNDRRDAELILELLLHDEFPRLHRPTPESREILRMLRYRQKLVKVRTIMKNSLQSLSLQAGLSLQARLFTRAGEQQLLATAMSPVMTEQRKQWLALLQQLNQRISETEWWLKQQALKDPRISLLRTHPGVGLLSSLGIVHTLIPVSRFPNTRKVAAYGGFDPMERSSADKKRYLGISKAGSRLLRFLLIEATQTAVKGDADLKRFYRRLEQRRGRPKAKVAVARKLLIRSYIMLRDEINYAEFQQRAVAARLARENARVNIPGPLIGQSASSAKG

SEQ ID NO: 47882 - protein, 354 aa, unidentified
MTITKYIGMDVHKESISIAVMNAAGKLVMECVIETKGSMLLQFIDGLRGDVHVTFEEGTWAAWLYDLLKPHVSEVVVCNPRKNALLKDGSKSDQIDARKLAELLRGNHLKPVYHGEQGLRTLKELARSYLIISKDVTRVMNRLKALYRSWGIACAGTQVYAPRHRSEWLGRISEAGVRRRAEHCYQQLDALRLLHQQVRRDLLLESKKHQAWRLLGLIPGIGPIRAALLIALIQTPHRFRTKRQLWTYSGLGLETHDSAQYRVVEGQLQRSKKPVTLRGLNQDHNHDLKDIFKGAATRASSRGPFHDFYEHLLAQGRKPTMARLTLARKIAAITLIVWKKEVRFDASYLKSQAA

SEQ ID NO: 47883 - protein, 343 aa, unidentified
MEYFAGIDVSLEQSSVCVVDGAGKIVREAKVASEPEALVGFFRGLETGVTRIGLEAGPLSQWLYAGLAAAGFEVVLLETRHVKAALSAMVIKTDRKDARGIAQLLRMGWFRPVHAKSPAAQEVRALLVARKLLQTKLLDVEFSIRGILRGFGLKMGEVSKGRFVARVRELAAGHAMLEQITEPMLRAREALRTEYARLHGEMLAIARPDPVCRRLMTVPGVGALVAITFKSAVDDPGRFARSRVLGAHFGLTPRKYQSGETDVTGAISRVGDAMVRMALYEAANVMLSRVTRFSSLKRWALDVAKRRGLKRAKVALARKLATVLHRMWVDGANFHWGKQAAAV

SEQ ID NO: 47884 - protein, 355 aa, unidentified
MNDTKYIGMDVHRESISIAALNSAGKIVLECVVETKASIILQFIDGLRGELHVTFEEGTWAAWLYDLLKPHVTKLVVCDPRKNASMKQGNKSDKIDARQLAELLRLDHLNPVYHGEHGLRSLKELVRSYLTITKDVGRVMSRVKAIYRSWGIACSGKQVYAPQHRVEWLAKITEPGVRRRAEFYYQQLDALRSLRREVRRELLEESKKHQAWKRLCQIPSIGPIRAAVLLGILQTPHRFRTKRQLWTFGGLGIETYSSADHRYVEGQLKRSKKPALIRGLNENCNHDVKNLLKGAAIIASTKPGPFQEFYTALLAKGMRPEMARLTLARKIATIVLIVWKRGVSFDAQHLKPQTA

SEQ ID NO: 47885 - protein, 503 aa, unidentified
MLVRKGQLPKVPDVVDPLKIVNPRAAGVDAHAKAHFVAVPSELAKPDSAKSDSAKSDSANCDWTNGAWRKGLAGGFVDPFANENATLPTFIRKFGTYTQDLNACAEWLLACGVTTVAVESTGVYHLNLVSVLQSRGIEVIIVDPRQTSHVPGRPKTDVLDCQWIQRLHGYGLLRASFRPEPEILKLREYERLRGTLVASAAKEVHHMQKALEQMNCKLPEVVSDIMGKTGKKIIKDILAGVRDPKKLAKNRDERCKATESEIAKALEGTWNEEHVFALKIGYKLYCMIHQQMDECEKKIEACLRAFADRTEGKQLASKPRKRQRKVNEMSFDVRGMLYRMVGVDVTVLEGIDEMSAFTILSEVGFDLSKFPTSKHFTSWLRLSPNHRGSGGKIRKRSIPPGSGRAAYAFRMAAAGCHHAKHAMGGFYRRIASRSGGAKAVVATARKIAERFYDLLTKGMDYVRKSTAEIEAQQRKRVIDGLTRRAQELGYELVLVNAETPSVA

SEQ ID NO: 47886 - protein, 344 aa, unidentified
MTKADRTFLSNHFLMKKSTNSAVGIDVSSETLDVYLLEGDNNGVHQVFSNNEKGLKKCISFFKKNEFNGRIVMESTGRYHFLCAVMLREAGFSAFVINPLIVKKYHTANIRKCKTDKQDAKMLAQVALLEKNLIPFAKDRADLAIRQKISTLKSLEKTLQRVKSSFLNYRNTMEELGESMTETEDSIMATITTLDKQKNKLEKEITEIIKEKYDNNKFEILCSIPGVSPFLASLILFFFSSEEGTKTGKWVAFCGLEISTQQSGKWQGKGRLSKRGNKYLRKRLFAGGWGCFMNNEYFKKYYYELRENNRRGHVEALNIISRKIVRISFSLLKNNTFFDPARCF

SEQ ID NO: 47887 - protein, 358 aa, unidentified
MVVTEGTRRIVGGVDTHKDLHVAAVVDEQDRVLGTRSFATTRQGYRQMLAWMRAFGDLQRIGIESTGSYGAGLLRFMQQAGITVLEVTTPDKQDRRRRGKNDDLDAQNAAHAAFAGQRTVTPRSRDGMIESLRVLMACRKTAVSARRVALQMIHNTIVCAPDGLRDQLRSLTRMQLVRTLGSWRPDLTAYRDLESAYRIGLKSLARRYLELHDEIADLDAMIAAIVEELAPKLIARNSIGHVGAAQLLLTAGGNPERLRSEASFASLCGVSPVPASSGKTVRHRLNRGGDRAANSALHIIAIGRLRTDQRTKDYVARRIAEGHSKLDAIRALKRYLAREVFTLVTQRRREINATQIAA

SEQ ID NO: 47888 - protein, 357 aa, unidentified
MTVKVIKQNVGVDISKDDFKVSFYQLKDTHQSRIKASRTFKNTLAGFKAFTQWMQGHSAKDVEIRITVEATGVYYEQLVYFLHDEGNYYLSVVLPNQSKAFGRSLGINTKTDKVDARILAQMGLERDLKKWAPMSNNLRTLKQLTRERVTLLDEKVALMNRFHALNHAYRPSSEVVKRLKKRLNWTIRQIKQVEKNIAQQVEQDPMLQERIEKACQVKGLGLITVATVVAETGGFELFTSRNQLTSFAGYDIVERQSGSSIKGKTRISKKGNRFIRRALYCPSMAVARYETQFKKLYERVSDRTAIKMKGLVAVQRKLLLLIYTLFKNNVNYDPNFAQKKADEQRSRQDTTVPAYTG

SEQ ID NO: 47889 - protein, 416 aa, unidentified
MEIEHTHCAGLDVHKKTVVAAIIVPDGQGGLRKEVRTFGTMTADLLGLSDWLLSFGVTHVAMESTGEYWKPIYNILEENFEVLLVNARHIKQVPGRKTDVMDAEWIADLLRHGLLRSSFIPPVGQRELRELTRHRTNFVRERASVVNRIQKTLESANIKLASVASNVMGVSGRAMLEAIVAGTTNATEMAGLAKGRLRGKREQLDKALEGRVKPHHRFVLAELLCQVDSLDESIARFDAEIEKYCHPFEEEVELLDTIPGVAQRIAEVIVSEIGNDMSRFPTADHLAAWAGVAPGNNESAGKRYSGTTRHGDRALTSALVQAAHAAARTRNTYLSAQYHRLAGRRGKKRAILAVAHSILVISYHIIQRKEPYRDLGGDYFDQRRPEATAKRLLIRLQHLGYDISRIEQPATLSAVA

SEQ ID NO: 47890 - protein, 345 aa, unidentified
MEHFAGLDVSVKETSVCIVDDTGKIVREVKVASEPEALLAVLKNPAYRFKRIGLEAGPLSQWLFSALAEADLPVICIETRHMRAVLKAQINKTDRNDARGIAQMMRAGLYRPVHVKTLRSQQLRMLLTHRKLLQSKAIAIENDLRGTLRNFGLKVGVVGTVKFEARIRELVENVPDLAALVEPLLVVRQVLREQTTILHRRLLVIVRDDEVCRRLMTVPGVGPVVALTYCATVDVPARFRKSKSVGAVFGLTCAKYQSGEVDRSGAISRCGDEMMRTALYEAAQVMLTHSAKWSWLKAWAMQIARRRGLKKAIVALARRLAVVMHRIWVDGTEFRWTREQVTAAA

SEQ ID NO: 47891 - protein, 460 aa, unidentified
MMNRDRSKSRVARTMPMVNPNAAAIDVGATMHMAAVGADRAPEPVRSFGTFTADLYRLVDWFTECGVETVVMESTSVYWIPIFELLDARGFTVFLVNARDAKHVPGRKTDVSDAQWLQRLHSFGLLRASFRPKGQIAVLRCYVRQRERLLAYAASHIQHMQKALTEMNVQLHHVVADITGATGLRIIRAILAGERDPEVLASLRDSRCHASAETIAKALTGNYRSEHLFALEQALALYDACHEKASACDMRIEAVLKELSIHRGRGHGAVPPPRRRHRTDQANALAFDVRAALFALLGRDITVINGLGAYLSLKLIAECGDDLSSWPSAKHFTSWLGLAPSNKVSGGKMLSSRTRRSGGRAAALLRLAAVTVGRTDTALGAFYRRLSSRIGKAKAVTATARKVAVLFYNAVRHGMEYLDPGASSYETRYRTRVVNNLHRRAKAFGFVLQPMEPKAGAAVS

SEQ ID NO: 47892 - protein, 348 aa, unidentified
MALRLEPEQLPEPRARIRKAGPWPGFTLERLMSEVFVGVDVSKARLDVAVRPSGAAWSVTNDEEGIGQLVAQLKELGPALVVVEATGGLEVALVGELAASVTVAVVNPRQVRDFAKAVGQLAKTDRIDAEVLARFAEAVRPEARPLKDEETRHLAALVSRRRQLRDMIVAEGNRLGSAPKALHKGIQKHIDWLRRELRLLEKDLDDTIKSSPVWREKEDLMRGVKGIGPVSAATMLAEVPELGTLNRKQIAALVGVAPLNRDSGSYRGKRSIWGGRASARAVLYMATLSAIKSNAALRSFYRRLVAKGKPKKVALTATMRKLLTVLNALVRDGRPWDASIGLDVQHSC

SEQ ID NO: 47893 - protein, 298 aa, unidentified
MKHYAGIDLSMETSHVCVVDADGCKVAAQCVDSTPEAISALLERHGPVERVVIETGRMTPWIARGLHELGVAIVCIDARQAHQSLKAMKANKTDPHDAAGLAQLARTGFYKEVHVKSPTSHGVRSVITARAHLVEARVRLDNTIRGLCATFGIRPGAGQGERFLARVQAAIAVPGLGEAVASLLRARTGLVDEIRRMDRELKAISIASPACQALMSIPGVGVQTSAAFAAAVDEAGRFKRSRTAGAYFGLVPRRHQSGELDWTGRITKQGDGTVRKLLYEAANSILTRTRQTLSLIHI

SEQ ID NO: 47894 - protein, 400 aa, unidentified
MAGSTRIEARVLDQKAESLRAWIQELRQRFQGRQVAIALEQSRGSLLYALMNVDFLLLYPVNPQNLAKYRKAFYPSGAKDDPQDALLLLEMLEKHRDRLRVWVPDEASTRCLRLLAEHRRKLVNRRTALTNQLTSLLKEIFPQALEWAGPLDSPRACDFLGKWPSLQALQKASQAKVPKFDHDYSREDSESIQLRLEQIRQAQPLTSDPALLTASALMIEALVGQLRPLIESIRQFDQQLKERFQQHDDYTLFHSFPGAGPVFGPRLLSAFGSHRDRFECAMEVQNLSGIAPVTERSGRSCWVHWRLACPKFLRQSFHEFAAQSIHHSLWAKALYDKLRAHGVDHHAAVRALAYKWIRILFRCWKNRTPYDEALYIASLKHRGSPLFAALSSQLQDVTCE

SEQ ID NO: 47895 - protein, 397 aa, unidentified
MYIVGIDIAKRKHEAAVIDGEGAVIIKPFSFTNNCSGYNRLLAMLAKAKLPLDEVSFAMEATGHYWLALFTRLQKEGFRVQVINPVQTNSIRSFYIRQAKTDPRDALLIAEVIRFGHFSESTLHPENIYELRELCRGRHAIVSMQADVKRKVVALLDQVFPEYETAFTNLFGDTSMAILQTCPTPKELSEMPLEELCHLIEVSSHKRFRMAKAQELQELARNSFGFAMAGDVFSTMIRLYAKHLDFLKQQVREMDRKIAEIMDTLDTPITTITGIGPTLGAYILSEIGDISRFSSAAKLAAYAGIDPTMRQSGEYNGVRNRMSKRGSPYLRHAIWLAASSAVLHDPALKLYFQKKRDEGKPYMASVGHACRKMVSIIYAVMRDNKAYTPYIPNEISA

SEQ ID NO: 47896 - protein, 360 aa, unidentified
MAKARTLVGLDVHAAKIVAAVLDADTGELKAFAMKGDVVAAAGFCAGLPRPVRVAYEAGSTGYTLARELAKRRVECVVAAPSKIPRATGDRVKTDRRDAEHLVRLLLAGKLHPVRVPGPEEEALRDLVRARETLRLDLMRARHRLSKMLMRHGIQFDDGRAWTDRHRAWLKTVCLEWPAAQTTLLDLAGVIDVLVHRRDHLEREIVSDLPGSPWETQVGRLRCLRGVDTLTAVGLCAEVGDFERYARAGQLMNYLGLVPSESTTGNSRRLGSITKTGSAHARRLLVEAAWHYRKAPAIRKTLTDRQAGQPAEAVAVAWSAQRRLHRTWARLEARNKRRTIIAVAAARELVGFCWAITQIE

SEQ ID NO: 47897 - protein, 352 aa, unidentified
MNTQTTASVPKLFIGMDVHKKSWTCHFKTDLFDYKSITMPADASCLQDYVQKQFPQHEVTCCYEAGCCGYWIARQLQQNNWKVLVVNPADVPRTHKQDWQKTDKIDCRNLCHQLQQNNLHGISIPDEQQEQLRSLFRRRIHLARQLRTIKNHIKSQLLYYGIKLPEQFDNPNWSHDMKTWISNIQWKFTSAAQAMKSRLKHLDFLWYEELHISTELRAYCRKHHKTDYYLLKSVPGIGGITAAALLAELGDLRRFKRLDELAALVGLVPGIYQSSDNRTCLGLTKRSNRYIRSLLVEASWVAVRTDMEIQNYYRKHSAKEPNKAIIKVAHKLLSRIRAVIISGVPYQSGVIQ

SEQ ID NO: 47898 - protein, 354 aa, unidentified
MIILALDLGSTCTKATKTAATMLDTDTGEIRRTKCQTSPADLVGLLDAYRPQRVVLEQTNGTGWVVDCLRGADVQDIQVVNTRDAAWRNRTSKTDRNDADLLARLSATGQLRTVHVPARDIREWRGLIDYRHQLVRRRTRIKNHIKSLVRNQGLPTGKLWSTEGLERLAKLAKPIGSCPLDELWTGELATELTMLAEVGSHLAAVTTRLDGLVNRSPMATQLADLPGIGPRTAEIVVATLDDPTRFATRKQVGAYFGAVPKVSQSGGSSRHGKITKAGDGLARAMLTQVVQSARRRKSGWIYDIYSKLLHPKEKNTNRAVQATVRRVVVILWAKCRDRRRAHPCEPLLPSLLAA

SEQ ID NO: 47899 - protein, 442 aa, unidentified
MNQIPNDTNPASALVAAPARPHPEPAFAAFVAIDWADEKHAVALQVAGHAQIERTTLEQKPEALTQWIAGLRQRFAGAKIALILEQKRGALLWALQPHEHLVLYPINPQMSAKFRQAFHPSGAKDDPLDADLQLDILLHHRARLTAWQPDEATTRQLSLLVEGRRRFVADQVRATNRLRDALKSYFPQALALVGEDLSSRMACAFLKKWPRLASVQAVKPAVLRQFYYAHHSRSAQLLTERLQIQAQAQPLTTDEAILAAQSLLVQSLAQALATLHPLLARYDQQIAQLFATQADFAIWDSFPGAGPALGPRLAVVWGTQRDRFADGQAMSAYSGIAPVKEASGKALWIHMRWACPKFLRQTFHEMAKCSLQRCAWALCYYRMQIERGKGHHAAIRALAFKWQRIMWRCWQDRTPYDDAKYVASLKRSASDLYARLSAAPAK

SEQ ID NO: 47900 - protein, 400 aa, unidentified
MRVVFGIDVSKASSEVAILVNGEKVHGYTMPNDAIGFARLLGDLKTVHKPEIIFEATGVYSRRLQAFLEDNGYAYTRLNPLEAKKQLDSLRVRKTDQIDAEKLAQSQFVLNRKPTYVQEEVYQELRDLSRFYQNLTEDIVRAKNRLHKVLQVTFSELETILSTPTGEQYWNLVIAFPCKDFVLDLSKNELSKSIRQSTSKRISDKRVAYLAEKLIALANQSYCAVKKTSPMLEEVRYYAKELLRLSEQRQAVLDQMVELAQPLPEYDILLSIPGIAETTATSIIGELGDIRRFQSANQINAFIGIDLRHYESGNFLAKEHITKRGNPYARKILFKCIHNIASASHTNPCHIADFYEKRKRQSQMTSTKSHTIASIHRLIRTMYYLIMHNKLYDYASTQNR

SEQ ID NO: 47901 - protein, 385 aa, unidentified
MTATTRSFDPTALDDTLCLALELGEGRWKLGFARGFGGKVLRRQVAARDGQALLAAIAWAKGKLGLSEPARVVSLYEAGRDGFWLHRFLVAHGVENLVIDSSSLEVNRRRRRAKTDRLDLEGLLDLLLRHLAGSRKKVFSVVRVPTVEEEDRRHLHRELLSAKRDRTRVTNRMKGLLANHGLTLDLKKDVPAQLAALRQWDGSALPAGLQTRLAREWERVCFFDALIGRLEAERRELLRTSSDPAMQQVLQMNALRGIGINSAWLYGTEFFGWRQFRNGKQVGALAGLAPTPFQSGESEREQGMSKAGNRYVRAMAIEIAWGWLRFQPQSALTKWYERRFGHGSKRLRKIGIVALARKLLIALWRYLETGVVPEGAVLKTDARIR

SEQ ID NO: 47902 - protein, 413 aa, unidentified
MSIPESPGGVRVTAGVDWAKDDHAVCVVGEQGEVIERFTVAADAAGLTQMARRLLRAGVGEVGIERGDGPVVEALLLAGLILFVIPPGQVKNLRSRYGSAGNKDDRFDAYVLADVVRTDARRLRPMVFDSAATTTLRASVRARRDLVAHRVAVGNQLSAHLQSVFPAAATLFSAVHKGVALSFLERFTTQEQADWLSVKRLATWLRGVSYRGGVEPEVLYARLTAAPRGAVGAHAGVHAVTTRALVALLRTLNAQIQALADSIGAQLEAHPDSAVFTSLPRSGTVRAARLLAEIGDARGRFPTPDSLACLAGVAPSTRQSGKVKAVIFRWGADKQLRDAVCDFAADTRHVNPWAAQLYEQARARGHDHPHAVRILARAWVGIIWRCWQDNTPYDPAVHGALQHLLRQDQQKVA

SEQ ID NO: 47903 - protein, 344 aa, unidentified
MQIAVIGLDLAKNVFQVHGIDDAGQAVLKRKLRRSEVLPFFAGLDAALVGIEACHTAHYWGREIAALGHDVRLMPPQFVKPYVKSQKNDAADAEAIAEAVQRPTMRFVPIKSADQQAVLMLHRTRDLLIRQRSSLISAIRAHFAEFGIVVGQGIRNVERLLALLETAGDQRLPALAAEMLGILAAQLRYVAEQVKEVEVKLLAWHRADETSRRLQSVPGLGPITASAIVATVGDPKQFKSGRQFAAWLGLVPQQRSSGGKERLGGISKRGDGYIRRLLVHGARAIVGWRKRSATHKTPWIEQLLARRPTDVATVAYANKLARIACAIMMHGNRYNPALAFATIP

SEQ ID NO: 47904 - protein, 391 aa, unidentified
MPTAADPAEAPTAIQTNLAAIFVSLELSRSVWLITSLSPGSGGKMSKHSVPAGDVAALLARFAELKQKTLARTGQSFPIVSIQEAGLDGFWLHRVLESEGIESHVVDPASIATSRRRRRAKTDRIDGEALLRALLAYKRGEPRVCVMVKAPTPEEEDRRRLSRERKVLVAERVEHVNRIKGLLFSQGVSGYEPLRRDRRKRLDELMTGDGRALPAHLKTQISRELDRLELLLDHIKAVEGERNALLAEQQATAPPTVAAGKMLLDFKGIGPEFAAILWLEAFFRHFDNRRQLAAYAGLAPTPSQSGSVDREQGVSKAGNPRLRETLIQLAWLWLRHQPKSALALWFKERVSRNGGRMKKVIIVALARKLLVALWKYVTAGVVIEGALFNAA

SEQ ID NO: 47905 - protein, 337 aa, unidentified
MTDWTVAIGVDTHKGAHVAVALDRLGGQIASCTVNATIAGYRRLLVWATDLGRPVFGVEGCGSYGAGLVRFLETQRVLVYECERPRRNERRRGTNDLIDAALAARRVVTGEGLSLPRGGGRREQLRLLLVERRGAVRARTAALNQLSALVVTAPDPLRHRLAALSKHQLARKAALLRSGSGAAADVLRRIARRVQRLSEEITEIDRDLTILVTEIAPHLLTECGVGAVCAAQLLVSSGDPGRMASEASFAALAGTTPVDASSGKHQRHRLNRGGDRQLNWALHVIALQRIHHHPETAAYYQHLLDAGKTTREARRCVKRTLARHFYRRLRPTPALTT

SEQ ID NO: 47906 - protein, 392 aa, unidentified
MVSSTIRNKDNGEGPTVELATIGIDVAKNVFGVHGVDALGRVSVRTRLARDRLLEFLGKVPPCLVGLEACGSSHYWARKIGQLGHRVKLMSPRFVKAYRKNDKNDANDAEAICEAVTRPSMRFVPIKSEQQQEIQALHRVRQQLLKSRTALVNQVRGLFAEHGLVVARGISHARRLLVDNLADPERNGLSDFFVETLIEMAERLRFLDERVRAYDLKIKRLFQQDERCQRLAKIEGVGTLVATALVAAVGNASEFKSGRELSAWLGLVPRQHSSGNRNVLLGISKRGDRYLRTLMIHGARAALRTADRGTNRRSIWLNRLRHERGANVAAVALANKNARVVWALLTRGEKYRPPVEVSQDRTQRIAILRDRPPDAVRRAVAENRLKPKREPA

SEQ ID NO: 47907 - protein, 311 aa, unidentified
MTKQVVGIDVGKAKLDVGLSGHKRVRVWNNDEAGREELSEWVVAQAVELVVVEASGGYEAAIVSELVERGQAVALVNPTRVRAFARAEGILAKTDKIDAGVIARFGATMKPAPQARRDLSQVELNQWVTRRRQLVLMVTAEKNRLQTAAPSMQTHIAKHIAWLQTEIEALEQQINQAIVANPDWSETAQRVESVPGIGAVTSSTLVADLPELGQLNRQKIAALVGIAPFNHDSGKRRGQRRIFGGRASVRSVLYMATLSAIRHNPVIKSFYDRLLAKGKIKKVALTACMRKLLVILNAMVKNGQDWSPTIS

SEQ ID NO: 47908 - protein, 539 aa, unidentified
MKKFPVNQVKELSFFGKTIKMTEEEVRALGFEPVGQFLPSARFKSGNNMVHRHRISTRLMIPGTSHITLYRKGGVMNNYYLGIDVSKGYADFVILNDKKKPVEENFQLDDTFDGHCCLYERLLSFFEDHPGSTIYAAVESTGGYENNWFNALIKFQGTLNLKTARLNPLGVNANSKADLKRNITDKISAQSVAEYMIAHPEKVSYEQQDHLASLRKQWGFINMLTKQSTQLFNQLEPLLYSANPELLVYCKNGVPGWVLKLLLRYPTASDLSKARAVSVSRIPYISSARAQDLITIANRSVASATDKITAQLIMEIVKEILHLKKIIASQIDLMAQHCSVPEVDLLKSFIGINDYSAIGLILQIQTVERFLSSKRLASFFGLHPVYKISGDGVGRFRMSKKGRKEPRKILFMVTLTAIRSNPLIRSIYLEHIEKGMERMAAIGLCMHKTLRIIYGMLKHNMAFDPEIDRKNRDKSYQSTARVNKDKSRRYQDFDSKAPISRRQNSKRKEQKQSHSDNLTKSGIIASAPPITLIDIGDFV

SEQ ID NO: 47909 - protein, 360 aa, unidentified
MRIIGCDLHARQQTLAMLETATGEVVKTTLKHEGNSVWEFYSSLPRPVRVGIEATGSMQWFVNLMEELGIDCLVGHPAEIRAAEPRKQKHDRRDADLLLSLLVEERFPAIWLPTKELLDLRALLRHRHQWVGLRVKIQNALQAIALANGLRRGSSLWTQAGQQAIASLPLSPHAAYRRNELQAMYVKFETEIEKLNQRVEQQARERLGARLLMTHPGVGPITALATEVFLGDPSRFAGSKELASYAGMIPGEYSSGKRQRLGGLTKQGNPLLRFLWSEAAIHAVRRDPELKQFYRRKLIQKGLGKARAAVARKLGIRMWIMLRDQIEYNEFCRRGQMQQKVVMPVRGCHNAVMARKSPAD

SEQ ID NO: 47910 - protein, 337 aa, unidentified
MNIVFLGIDLAKNFFQLCGLNQAGKPVYTKRTGRKELLQTLANIPACLIGIEASTGAFYWQREFEKLGHKVKVISPQYVKPFVRGQKNDGNDAQAIAVALMQPTMQFVPPKSPEQQDIQALHRARQRIVNHRTATVCQIRGLLLDRGIPIGSAVFRARRAIPLILEDAENGLSSRMRRTIAELYDLFNDPGRRIHFFDKEIETVFRQSEACQRIAKVKGIGPETATAVVAIGKGTEFKNGRHFAAWPGLVPRQHSSGDRQVLMNMTKKGDKHLRTLFIHGARAVVRVATNNNDGHMNQWVNRLKERRGFNKTTVAVANKNARIIWSMLRNDTGYQVV

SEQ ID NO: 47911 - protein, 399 aa, unidentified
MAKAFIGVDPHKLSATIEVVDRHERVLATGRFGTDKAGYAALRKHVVSYPDRVWAVEGSNGAGRPLAQRLLADGEHVVDVPAKLSARARLLDTGHNRKTDAHDAHAVAVVAVRTKTLRVLAYDAELEVLRMLVDRRDELSKAKVQAANRLHRLLSEIVPGQSKKDITALQAKAILASVRPRDSVGKTRKRLALEQLAEMIVMEKKIKASSKELKTLVIARGSHLMDLTGVGPVVAARILADVGDVARFTDRNRFASWTGTAPLDVSSGEQIRHRLSRAGNRKANHVIHIAAVNQIRLDSPGRAYYRRKLAAGKTPMEALRCLKRRISDALYRQLRADGAPGMEAGPGGHCGAALISSAAGLHPHTGTSDQPLPGPAPKTLPPPRTRRKTTTPRTLQTAP

SEQ ID NO: 47912 - protein, 363 aa, unidentified
MSYLNHTREAQIEVTIIGIDLAKRIFYLHGVDKNGKTVLKKKLMRDNLLNFIVNLPKCLIGMEACGGANYWAQEISKLGHDVRLMAPQFVKPYIKTNKNDEKDAEGICEAVSRPSMRFVPIKTTDQQDVLSIHRVRERLIKNRTALSNEIRGLLHEFGIIIPQGIHKVIGHLNEALESSRLSEFSKQTFKTLRDEFLENDKRISELEKRLKLMAQNNEVHAQLMEIPGIGLITSTALIASIGNAANFENGRQLSAWLGLVPRQPSTGGKEKLLGISKRGNVYLRTLLIQGARAVFTQRIAIPKKKETLKTNNSVFSDWMINLSNRRGFNTSVVAIANKLARVVYAVLRSGQNYTENKVCHGQI

SEQ ID NO: 47913 - protein, 344 aa, unidentified
MSVYVGIDVHRKRSQVAVIDADGEVLANRNVPNGVEPILKVIGGLPPGTPAAFEAAFGTGWLVELLEDYGFDPHLVHPLRCKAIASARLKNDKVDAAILGQLLRADLLPEAWIAPPAVRQLRALLRHRAQLVRLRTLLRNRIHAVLADYGHDRPAGCWSGPGRAWMASLQLPAVSREVVDDDLALIDALETVIDRLDWEIHQRARSDPRVKVLTQLPGVGPFTALVILAEVGDISRFGSARKLASWAGLTPTVRGSDRVAHYGHISKQGSVWLRWVLCEAAQTAKRSPQFAAGYQAIATRRGKKIATTAVARKLLTRAWHLLTDAEHAAATQSAAASAPQAGTR

SEQ ID NO: 47914 - protein, 335 aa, unidentified
MNKFNYYIGIDVSKLTLDVSILFECENATKTDYYKIENNEKSIAQFVKNKLGKYASEQILFCFEDTGIYSMPLAYYLNDNNLTYWQVPSVEIKRSRGICRGKDDKIDSKDIAFYACTHTHKFRQGKVSAQSIQQLRLLFTEREKVLKALASFEKTSENKEFILKDVFSAVASVNKSVVNQLRKTLKSIDQKMLEIIASDEKLNRQYKLVTSIPGIGMQTAIYLLIATKGFEAFDNWRQLACYAGVAPFPYQSGTSIRGRNKVHPLADKKLKSLLNMCAICAVRHDRELKAYYERKVKEGKSKMLVINNVRAKLLARVFAVINRGTPFVNTHKFAA

SEQ ID NO: 47915 - protein, 315 aa, unidentified
MVTGIDCSKDYFDISVQSGQKEVFKGRFSNDEAGFVEALGHMHGSHIAMEATGPYYFRLAKFLWERDERVSVINPLVIRRFSQMTLARTKTDRKDAQLIAKFTSMTEPAQWRLPEEHVLRIRNLEGYIKGQKECRTMLTNRLHAYEHAGTLEPTLRKTIEEGIKRYDQDINEHERQVQQIIMENYGELNANLRSIPGIGPRSAALLIILTDGFSRFEGHRQLISYFGLAPRIFESGSSVRGKGHICKMGMGQVRKVLYMAAISAIRSNTACSGLYGRLMEKGKPYKVAIIAVVNKLIKQAFAIAKSGKGYIAKAA

SEQ ID NO: 47916 - protein, 420 aa, unidentified
MNDSQQWQQHRAFGALDWASEKHSVIVVNQTGRVIEEFEIEHSALGWKKFREKLQPYGSIPFAIETSQGVAVEQLLEAGMLVYPLNPKSAQAYRERKAPSGVKDDRLDAWSFADALRVDGQNWKALRPEEPLIKELRLLCRDEVTLIEQRTAFVNQLRHALAEYYPAALEAFEDWTSVSAWMFLQRFPTPESLAQAGKRQWQKFLHSRRLWGSDQGPRRMEIFAHASEFAGTPPTVKAKSLLALSLVQMLFSMEKQLALYRQRIEELFARHPDHDLFGSLPGAGPKIAPRLLSEIGDDRQRFGGDPQNLQCLAGSAPVTKRSGKQRKYWHLHQRWACDKHLRHAIHLFAEQSLSRCVWAEIYYQHHRQKNQSHANALRRLAHRWLKIIYKMWIDRTPYNAELHHRNQLQHGSWIFQLQQS

SEQ ID NO: 47917 - protein, 355 aa, unidentified
MNSNKYVGMDVHTATISVAVRDATGKLIMESVIETKASTILQFIQGLRGNLYVTFEEGTWAAWLYDLLKPHVTNVVVCNPRRNALLKEGSRCDRIDARKLADLLRTNLLRPVYHGEKGLRTLKELARAYLTISKDLARVMNRVKAIYRGWGIPCGGKSVYHPRHREEWLSKITQASVRRRAELFYKQLDALVLLRKQARQELLAEGKKHQAWKWLRSIPSLGPIRVAVLMAIVETPHRFRSKRPLWKYSGFGVVTHSSADHRYVQGQLERSKKPVSVRGLDPDHNHDLKDLFKGAALHASTRKGPFLEFYEALVAKGMRPEMARLTLARKIAVITLTVWKKGVAFDAKYLKSQTA

SEQ ID NO: 47918 - protein, 320 aa, unidentified
MMAQNDRVVVGIDVAKDKVDAFIRSLSLRQTCPSTAQGQRKLVTWLGKHQVNKAVMEASGGYERVWARVLREAGIEVRIVDPKRVRGFALSAGRLAKNDTIDAEMIAWFAETFSEAPSQTHDAAHEELQTLVKARLGLIDFRMRLVSQSEHAARGLVQKAHAHVLKCLASEIAKLEAAICAKIKSMPDFAERAEIIQSVPGFAATSSANLVAGMPELGQVSNEIAAALIGVAPYDDDSGKRRGERHIKGGRRWVRNAIYMPCVGAATLNNPVLKAYYQRLIAKGKEPKVAIIACMRKLIVILNTMIARRQKWDPGRYVLS

SEQ ID NO: 47919 - protein, 428 aa, unidentified
MTVRDCTSVKEFWQLKKEIRGSEKHLIVGIDVAKDEHKAFFGTAYGKTLLKRLIFKNDIEGFENLLSRVKALKVKHSLKEVVFGLEPTANYHKPLGDFLIKCGHMVVLVSGVSVKRNRELLDGRWDKNDTKDSANVGDLISQGKCLYYEYTPVLFRELRSLLSLKRRLKKQEHGLRVRLRNNLLAQYFPELDRYYGQWEKEILSVVRWCLDPSVIAGLEYDQFVNLIAPGSKNIRQQGRFEWIWKKAVDSIGCDVGEGVEFEAKVMVEELRHIREVIEETNAKIKDICMRFPEYKYLLSIPGFGPDISSKVLAYIGNPFRFNNQNQVLKMAGMDLNAQRSGKSSETAVPVISKKGNAHLRYALYQAAFVASVRNKYFIAYYTNKLMGREKEKGIKTKMRVKLAAKMLVIGWSLMKKKEPFDPAYLRID

SEQ ID NO: 47920 - protein, 414 aa, unidentified
MEVIIDRCAGLDVHKKSVVACVRSPGVGRQRRHSEVRTFGTFEHELVGLRNWLRELGVTQVAMEATGVYWKPVWQVLDDGDVFDEILLVNPAHIKNVPGRKTDVNDATWIGQLLECGLLRGSFVPPAEIRQLREITRYRRQLIEERSREVQRLQKLLEDANVKLSSVATQVLGVTGRMILDALCAGERDPDVLAAMAKGRLKDKADDLRQCVPGRFNEFHAVMTRELLSHIDYFDAASARLDEQIDRLMAPFADARDRFDTIPGIGKRNAEIIVAEIGIDMTQFPTPAHLASWAGLCPGNNESAGKHKATTTRSGNPWLTSALVEAAWSAVRTKDCYLAVRFRRIAKRRGEQRALIAIAHTILVICWHLLVDQTSYTELGTDYLAGKDQPDRRRRLLVAQLEQLGYTVELTTAA

SEQ ID NO: 47921 - protein, 332 aa, unidentified
MNNYVNAIGIDISRNTFDVHDYKLEAHKEYQNSESGFKQLLSQARKDHGKNLNGIIICMEHTGLYSLPISVFFTQKKVSFSMIPGLEIKRSLGMTRGKNDKIDAYKIARYAYLRREEIKEYELPSEEILKLKSLLSLRERMVKHRTSYLGHLKELKAFYKKIKNPLLFKTQEKLIKELSSQIKRIETEMLEIIANDPKLKKLYYLVTSVKGVGLVVGITFLVYTNAFTAFENWRQFASYSGIAPFPDESGTSRRKPKKVSHMANKRVKALLSNSASTSIIHNPEMRIYYNKRIGEGKSTMSTLNIIRNKIVSRVFAVVKRGTPYVDTLKYAG

SEQ ID NO: 47922 - protein, 409 aa, unidentified
MLFVGDDWAEAHHDIELVDEAGRRLVRRRLPEGVEGLAGLHALIADQLPEDAEPEQVLVGIETDRGPWVGALIAAGYTVYAINPLQVARYRERHGVAGAKSDPGDAHVLAELVRLDRAHHRPVAGDSPIAEHVKVLARTHQSLIWSRQRQANALRSMLREFYPAALAAFGEELAGRGALAVLALAPSPEAGRRLSRSQIAAALRRAGRQRNIDESAEQIQAALRAPQLQAHPGVVGAYAASVRSLVAVLDAMVVQIETLRGEVEAGFGRHPDAEIYLSQPGLGTVLGARVLAEFGDDPARYADPKARKNYSGMAPITRASGTRRVVLARYARNRRLADALYLQAFTAISASPGARAYYDTQRARGATHHQALRSVANRLVGILHGCLRHHTHYDEATAWHTHTDQAAAA

SEQ ID NO: 47923 - protein, 337 aa, unidentified
MGLYGGIDLHSNNHLLTVIDEGDRRVYERRLPNDLAITKAALEPYRAELVAVAVESTFNWYWLVDGLMEAGYAVRLVNTAAVQQYEGLKHTDDKHDAFWLAHLMRLGILPTGYIYPKSERGLRDLARQRMRLVQHRSSLITSVQNQVWRSLAVRLRSETIKGRGKQPWPEISDPDLALSVKAGRAAIDTLTVQIERLEKLILKRVDRSPQFRMLKTVTGIGPILAMTIALEVGDIGRFAGVGEFASYCRCVDSQRLSNGKKKGEANRKCGNRYLAWAFMEAAHFAIRNLPAAKRFYERKRRQRHALLAVKALAHKLARACFYVLRDQVPFAPERLFV

SEQ ID NO: 47924 - protein, 388 aa, unidentified
MYLVGIDISKYKHNCFIATEAGVILKEFIFENNRSGFKLFHKSLKNLDQTQDIRIGLESTGHYGTNLKQFIAASGYTYIEFNPYLTHQFAKAMSLRRTKTDKVDARTISNMLGSVDYKTLHTRFYHINELKQLVRDRDDILMNRSKTLVKLTNVLDIVFPEFKPFFNKRFGTTARFILKKYKSAKKISTLTMLDFDSLRSLSKGKFTYARFSHLKSLAKDTVGVQSPVYTGRIVSLLKDYDYFDQSLEHIDQNIISLFSNVETKLTTIPGLGIIQAATIYAETGDIRRFPNPQKLIAFAGFDTSINQSGISEHHGKLVKHGSPLLRKTIWVYALTALKSMPIFHDYYRKKRQEGKIHKVALTHVCRKLIRMIYHIEYHQIDFNEQLMK

SEQ ID NO: 47925 - protein, 353 aa, unidentified
MKRDKYMGMDVHQATTVVAVIDAEGKSVLETIVPTAAGAIRRLIESISGPLHVTLEETTQAEWLHDLLQGFVAEVVVCDPRRNKLLVEGSKGDKADARKLAELLRTGMLRSVWHGRQTTRGLKEMVRAYETFAIDTTRTMMRIKALYRSRGIATKGSAVYQKKERDHWLKQLIEVGMQQRAVWLYEQLDHVRELRKRAKAAVLTEGARHRAVELLRTIPQVGPVRAAQIVATAGTPHRFRTKRQFWSYSGLAVVTHTSAEYEMREGRVVRRNKPVATRGLNINCNRRLKSVFISAATAGGVAHPWQAYLDNLKEKGMKADMARLTLARKIAALTLAIWKKGESFDPKKLNWTN

SEQ ID NO: 47926 - protein, 311 aa, unidentified
MEHSRFVGIDVSKAHLDVHVRPTGDSFRVSHDDAGFAMLIERVRPLTPTVLVLEATGGYEVTVTAALASAGLPVAVVNPRQIRDFARATGQLAKTDTLDARVIALFAEAVRPAARPVPDEQAHALGELVARRRQLVDMLGAEHNRRRLLRDRRLQRHLDAHIAWLEEALRRLDHDLTTLIRSTPVWRETEDLLRSVPGIGPVTACTLIADLPELGRLDRRRIAALVGLAPFARDSGAFRGRRMIAGGRAHIRRVLYMATLTAAKHNPAIRAFYQRLVAAGRPGKVALTAAMRKLLTILNAILRDRRAWLSP

SEQ ID NO: 47927 - protein, 343 aa, unidentified
MTQIITIGLDLAKNVFQLHGIDASGAVVLRRQLKRAAVEKFFAHLPPCLVGMEACGSAHHWARVIGRYGHEVRLMPPAYVKPYVKRNKNDGRDAEAICEAVSRPSMRFVPVKSVEQQARLAVHGTRALLVRQRTMAANALRAALSELGIVAAQGYEGLRELMARLEEPSKDIPENMREALLVLAKHWQTLDADERVLERQIAKAARCDQDGRRLMEVPSVGPMIASTVLAKVPDPKVFRSGRDFAAWIGLTGKDHGTGGKHRPGRISKQGDRVLRALLISGASAHLRQQKARGVTDPWLRDLLARRPYKVAMVAFAAKTARIIWAMLVKGEHYRDRASVSAAA

SEQ ID NO: 47928 - protein, 389 aa, unidentified
MLLDHPSDGPTAIRTHIGAIFVSLELSRSNWLITSLSPGKGEKMSKHSVTAGDVAGLTKLFAELRRKAEARTGESHPIITIQEAGLDGFWLHRVLQQNGVESHVVDPASIATPRRHRRAKTDRLDGEMLLRALLAYKRGEPRVCAMVVAPSPEEEDRRRICRERQSLIAERITHVNRIKGLLFAQGISGYEPLRRDRRARLEALRTGDGRELPAHLKAQIGRELDRIELLLEQIKAVEAERDALLAAATKPASEEAAPDPVTMLLALKGMGANFAAVLWSEAFYRQFSNRRQVAAYAGLAATPWQSGGIRHEQGVSKAGNPRLRTTMIQVAWLWIRHQPQSALTRWFKERSPQGRKRAIVALARKLLVALWKYVTQGVVIEGAAMKPAA

SEQ ID NO: 47929 - protein, 404 aa, unidentified
MNAVGIDVSKGKSMVCIMKPFGEVVVSPFEVNHTASELGKLAKLLRSLDGETRVVMEYTGNYYLPIAWALHDEGFYVSVVNAMLVHNYGNNSLRRAKTDKKDAIKLANYAIDRWLFLPQYFPEEDVRQMLKTFHRQYNLYMKLKVMQRNNLIALLDQTFPDVNKLFKSPPRKKDGHEKWMDFAARFWHCECVCGHSVETFSKLYRKWCEHSGYYFDEEKALDVYASACGHIGLMPKTEAAELLVTQAIAQLQAVSQTLAAVQREMHLLAAKLPEYNTVMSMYGVGPTLGSQLMAEIGDVRRFHSKGALIAFSGIDAPPYQSGTVDVKSRSMSKRGAAPLRKTLFQVMEVIIQNAPADEPVYQFMDKKRTEGKHYYVYMMASANKFLRIYYARVKECLNAIDGNT

SEQ ID NO: 47930 - protein, 349 aa, unidentified
MQITTNGLDIAKNVFQVHCIDAAEKVVVRKQLRRGQVMKFFEALPPCLVGMEACATAHYWARELTKLGHEIRLMPAKDVKAYVKRNKNDAADAAAICEAVRRPTMRFGGIKSADQQGRLMQHRTRDLLVRQRTQVINALRAHMAELGIVAAQGHEGLKKLVAIIADEKDERLPADARASLIVLTAQLQALQTMIRVIEKRIIAQHRASEASKRVATIPGIGPLGASAIIATVTDPSAFRSGRDFAAWIGLVPRQDSTGGKPKLGPISKQGDRYLRRLLVVGAHSALRRAKQSPQNYPWLVQLLARRPFKVVAIALANKMARVAWALLARGGRYRAGGGSTYRAPQLAAA

SEQ ID NO: 47931 - protein, 447 aa, unidentified
MQSKDLNSGTFEILHPNAAGIDIASQMHYVAVPTDRDEQSVRKFGSFTEDLHDMARWLKLCNIDTVAMESTGVYWVQPFLVLEEYGFDVYLVNARHIKHVSGRKSDIKDCQWIQQLHSYGLLNKSFQPEDLMRELRTYVRQRKNLTQGYATQVQLMQKAFDQMNIKLHNVISDITGKSGLLMIDAILDGERDAHVLAELADRRIKATKEDIVKSLQGIWRQDNLFELKQAYELYLVFRDKIIDCDKQIENVLKQIADQSDETTKYNQKRKATGKNKFNFNASDYFKVISGVDLTEIFGISELSVADIVSETGTDMTKWITEKHFTSWLNLAPNTRTSGGKRLKSKPMKKKNKAGQAFLIAASSLKASNNWLGEFYRRIKAKSGSPVAIKATARKLAIIFYRMLKEKIDFSPLPIEEYNQYFKERKLKYINKQATSYGFKLVPLELVS

SEQ ID NO: 47932 - protein, 389 aa, unidentified
MVARSVVKIAVDPHKRINAVVVVDTSGSVLARGTFTQSTTGFAELMGFARRWPRREWAVEGATGVGKNLAQRLVVKGETVFDVPSKKSSLVRAFSATSGRKSDDVDAYSVALACLHATGLNQVRVDERAETLRLLSHRRDELVGSRTQAVCRLHRELQILIAGGASRALTAAKAKALLASVRPRDEVGKVRKSLALDQLADLVAIDRRLKDIDAQIKTVVAETHTSVTEVRGVGPVVAAIVLGEVRDISRFPSKHHFASYNGSAPTTWGSAGDARPCVNLHGNRRLNHALHIAAIVQLRYDCEGRRYYLRKIAEGKTPKEARRCLKRRISDAIYHQLAADAQAAERGPRGQMGAITKISAADPTPTVDSSIKPQPGPHTKGSPAAARAS

SEQ ID NO: 47933 - protein, 406 aa, unidentified
MSAYRFYVGLDWATEAHRVVVQDAERQGVAERTVPHEGGALEAFAAWLSELAAGVPRDVAVALESPRGAVVDILLANGFHVFALNPKQLDRFRDRYTVAGAKDDRRDATVLATALATDQPAFRRLAPEHPLVIELRELSRLEDELQQELQRLTNRLREQLHRYFPQLLQLVPAANEPWLWALLERAPTPSAAQHLSRAALRTLLTRHRIRRVDADAVRALLQHPALPVAPGTVQAAQRHLAVLLPRLRLAHQQRAECATLIEDVLERLGEQQEHRDVPILRSLPGVGRVVAATMLAEASRLLAARDYHGLRTHTGVAPGTKQSGKHCVVIRRSACNRRLRDAAHYWGQSVVRHDPRSRAHYDRLRARGHSHGRALRGVVDRLLRVLIAMLTTQTLYDSNRRLPIAA

SEQ ID NO: 47934 - protein, 410 aa, unidentified
MLELFVGDDWAEEHHDVELMDPAGRRLARARLPEGVTGMARLHAMIAAHLGEGVEDVVVKVGIETDRGPWAQALIAAGYEVFAVNPLQAARYRERHSVSGAKSDKADAHTLADMVRTDSHQLRPVAADTPRAEAIKVVARAHKTLIWERTRHTQRLRHALREYFPAALEAFEDLAASDTLELLSKAPDPGAAARLSISQISAALRRARRRKIEEKAAAIQTALRAEHLGQPEVVVAAYAAGVQSTVAVLKVLVEQVKTLQGQVESHFGRHPVAEIILSQPGLGPILGARVLGEFGDAEDRYVSAKSRKNYAGTSPITRASGKKKLVLARFVHNDRLIDALAAQAFAALSASPGARAYYDRIRARGVGHRAALRQLANRLVGILHGCLTTGTVYDETTAWPADATDSPAAA

SEQ ID NO: 47935 - protein, 486 aa, unidentified
MNSIVLTANVQPNLDVNYIGMDVHSDNVVVCVRRNTINSSGQLVGKTIKTKKVVIKNSQEPLVELLSKYADGQQHIMTAESTFNWYWLADIAEDHGWNFRLADPCTVSQANIKAANDETDAEYLADRLRTGSLKSTSVLPRQLRGVRDLMRHRLRVMQEVSDKKVRLSNLYHNHCAHPMHGKLLAALQDAYDEINIDAVLESGICNNGSELIIGDLLTGLREAETRLAKIEAAVYARIDEIDSYKAERMLLKTSMKGCGDVLSAIIVTEIGDISRFRTMGDFVSYCRLAPTSKLSNGKSKGQGNAKNGNAYLSWALTELATLMARFNEPIRRYLERKQEKTGLRVVAVRALAAKLARCVYQVLQKKESFDLGLAFGSKPTHGQMTAAAEAAQTPPEPALPPVPAVAGEHHCPAEESDAPIVVKEPVPVKSKRSTRKKAVSAASSEPAVAAEGRQTARKADRVKARCALTATPPSCAGTSCVKSRRE

SEQ ID NO: 47936 - protein, 373 aa, unidentified
MPKYSTAFGMDVHLRSTTVCALDADTGEAVTRRFPGNPWGEIAGWMDGFPGPSLAAYESGYLGFAPQRELAGLGVECVVAAVSKIPRSAADSASKNDRNDAARMAKAILAHDISPVWVPSPEAEGIRDLAGAYDGATARLATAKQRLLAFLARRGFVYGGTTPAGNPRKYWTYDFLRWLDKVRPEDDGGVRALAALRNEVEAAAEARADLLSEYRAAVDASPIAAEVAALQSIKGCAFALAAAFSAEVGDFTRFRSGRQVTAYFGLAPSQRSSGDSVRLGGISGAGNALVRKLAVEGSWCYAAARHQPKLMPRDTGVPLEIRMHGRKGSERLLRRREEMLARDMPAAKANAATAAELVRWLWALGTMCREGAE

SEQ ID NO: 47937 - protein, 432 aa, unidentified
MNESIPAASLEGVAAYIGIDWADQKHDVVLRSAAEPNKVEHRVIEHQPGALMEWIGQLQQRFGGHGQILVCLEQSRGALIYHLMGYGFLELYPVNPLQLARYRETFSPGGAKDDQPDAELLCELLYCHRDRLRAWKADSELTRKLAFFNEGRREAVDQRTRLSNAIKSQLKVYFPLALELLNQDTSTALAADLLLRWPSLEALQKQIPHQLRKFFYAHNCRGESTMLERLELVQQAQALTQDSAVIEPATVRVQMLARQLKNLLPDIARYDQKIAELFAAHPDRFLFENLPGAGRVLAPRLLSALGSDPNRWESAQEIATLYGVAPVRRASGKKSGKKGEKKASVRFRQACPKFLRQSFHEFAGCSIRYCGWARAHYEAQRAQGKGHHVALRALAFKWIRILFACWKQRIPYDPQRYLQALQQRASPYATAC

SEQ ID NO: 47938 - protein, 355 aa, unidentified
MDSRKYIGMDVHQASISIAVRDANGKLVMESVIETKAATILECIRGIRGNLWVAFEEGTSAAWLYDLLKPHVAQVIVCDPRKNALLKTGNKNDRVDARKLSDLLRAGLLTPVYHGESGVRTLRELARSYLTVTKDLTRVMNRLKALYRSWAIPCAGEKVYSARHRSAWLEQLSEVGVRRRADQLYQQLDMLLQIRREARRELLTESRKHPAQELLRQIPRLGPIRVALVIALLQTPHRFRTKRQLWAYCGLALQTRSSGEYRFTGGQLQHSQKLPALRGLNINHNHDLKNLFKSLATHVSTSSGPLGDFYRSLLAKGMKPAMARLTLARKMAAIVLTIWKKGERFDPEQLKRQAA

SEQ ID NO: 47939 - protein, 405 aa, unidentified
MGAEQVAHGWAGIDVGKGHHWVCLVNEAGSTLWSSKVVNDEAAILDAIAEVLARAQQVSWAVDITGTSSALLLALLSAHGQAATYVPGRTVNQMSTAYAGEAKTDARDAYVIAETVRLRGDLTPVDVPATLVAELRLLVTHRTDLVADRVRMINHLRDVLSGYFPSLEREFDYATSRGAVVLLTGYQAPAAIRARGRARLTTWLRARKVRSAEQIATAAVKAANAQHTTVPGQDVAASIVAEIATALLELDQRIRVLDARIGDTFHAHPQAQIIESMPGIGTILGAELIAAAGDLSRYVDAGHLASAAGLVPVPRDSGRRTGNLHRPLRYSRKLRRVFYLSAQTSMMREGPNRDFYLKKRGQGHGHVQALIALARRRVDVLWALLRDNRVFELTPPTREKLPQTV

SEQ ID NO: 47940 - protein, 366 aa, unidentified
MEKIGNVEDVPSVDEVNEVILGVDTHLDLHVAVALDQLGRRLGQTAVPTSTRGYARLLRWAGGFGIVGCVGVEGTSSYGAGLARYLQSAEIPVVEVERPKRRHLRRNGKSDPIDAEAAARAVLAGEAAGEPKSGDGQVEMIRTLRSARQSAVKARSQAANQLQALLVTAPEELRHSLRERPTKGLVATCARFRPGKEPDDVRTATKIALRSVARRHEALSEEIAELDEQLDRLVAQTSPGLISLPAIGTHHAATLLCVAGDNPQRLASEASFASLCGVSPIEASSGKVVRHRLNRGGNRDANRALHMICVVRMGSDRRTREYVARRTVEGKSKWEIMRCLKRYIAREVYRVMAPATSAPSPVGTST

SEQ ID NO: 47941 - protein, 381 aa, unidentified
MKERGLLAPRSCPKRSCAGVSTSSTTMGVPLVEAYDGPQIVGMDLHRRRSVLVRMAEDGHKLSTARIANSPARLAAEIKRAGLHPKVVLEACYGWYWAADTLTAAGAEVHLAHPLGVREFSHRRVKNDELDARDLADLLRMGRLAEAQLAPAEIRELREITRYRGKLVQLRTSCKDQVHGVLAKLGIEVTCSDIFGAWGTQWLDELPLPQPYSWKVASLRQLIGWLSAEITVLEQVTADLLAGHDAYRAVQQLPGIGPVLGAVIVAEIGDITRFRHPARLCSWAGLTPRHYESDTKVVRGRITKQGSRPLRWALIEAVQRTPAGTPIHQARDAIIARRGPQARNIAKVAAARKLLTYVFYAMRDGHVRALDTPGAAAPETA

SEQ ID NO: 47942 - protein, 348 aa, unidentified
MKIKTIGIDLAKDVFGVHGVDVRGKALVHRRVTRKHLLGLLAKLEPCLVGMEACGSAHHWAREIEQLGHTVKLMSPQFVKPYRKGNKNDPNDAEAICEAVTRPSMRFVPVKSAAQQDVQALHRVREQLLKSRTALVNQVRGLLGEHGIIAPRGIAHLRRLLSELLADPEGSGLSGLLGETLVEIAGRLRFFDERIRTYDLRIGRVFAHDERCKRLAKVEGVGPLVATAMVAAVGNAREFKSGRELSAWLGLVPRQHSSGNRNVLLGISKRGDRYLRTLLIHGARSALCRVERRRDRRSIWASRLKLARGFNVAAVALANKNARIIWALLTRGDNYRPAVAADPGNQAA

SEQ ID NO: 47943 - protein, 413 aa, unidentified
MNKLYAGIDVSSKTNYVYLMKPDGTKHNSFSVKNTPDGSKKIANNMVSALTTLNISNVVIGIEATGVYGDNLMIYLRDESSLTQFGCDFHVLNPKQVKKFKESYSDLPKNDPIDAFVVADSLRFGRIAKPMYIDDGYKYKALQTLTRARFFAVQNLSREKQRFSNYLFMKCSGLAQEKVFSNQTGATSMALIDEFETIDELIYMDIDELTDFISEKGRNRFDNPNAIAEAVKSAAKGSYRLPKTINDSVNQALSVSVANIRAMKEPIKTFDYAIAKQFELIPNTLTSIKGIGAVYSAGIIAEIGNINRFDNHAALAKYAGIAWSENKSGNFTGEVTNLVKSGNRYLRYYLLEAADSIRKCDSEFRRYYDLKFKEVNRFRHKRALALTARKFVRLVFRLLKDNRLYTPPELFKR

SEQ ID NO: 47944 - protein, 455 aa, unidentified
MDKARAQSAPTTIRKIHDRAAGIDVGAEEHWVCVDAALTSEPIRRFAAFTEDLMALVTWLTSVGVTTVAMEATGVYWRELYIRLAEAGIEVLLADPRKTRNPRGRKTDMQDCQWIWELHAHGLLEGAFVPGPLVQQLRTYMRFRQARTADAAVSLTEMQRALSLMNIKLQHVLADVGGITGMAIIKAILDGERDPHVLARLRDWRCKADEKLLAKALTGTWRSEHIFLLRHAYLDYEHHRQAMAVCDQTIEALIASFPARATETLPLTPKRATARNSFSFDAQQAAYRLTGVDLAAVDGIGPKTALDFLGEVGFDLSAWPSRKAFCNWLGLAPNPKRSGGKHLGNLPTTANRAAQILRNAAMGLDGKDKTNPLSAIFRRIASRKGRAEAIKATAHKLARIIYAMFRDRTTYDATKLTPPLTERRKKHLLRHLSQQAARIGYTLQLAPAALPETAG

SEQ ID NO: 47945 - protein, 343 aa, unidentified
MKREFYIGVDVSKNWLDLAYYDGVVVDWKQGHIRVDNKESGYSQIGRWLKKLGVDRESVLFCMEHTGLYSQDFRIWLEQVGYVYGMVQPRKMHRFEPDLGENERALDRIKTDGTDSFRIAMYCEKHCRKIKASPSRLPGESYFKLKRLIAERKLYTNQSSVYKLQLHDISAYDTEDSRERKKAGQDFLARQLRQTDAEIRRIVESDPALSRNYGLLCSIKGTGLVVAVETIVLTENFTSITNPRKYACYIGIAPARKESGVSVRGGEHVSRKGFTQAKADLSMSALQGIRCDNGIRAYWERKKAEGKHSGVILNAVKFKIVLRMFAVIRRQKPYVELNGFSQK

SEQ ID NO: 47946 - protein, 323 aa, unidentified
MNKDTLYFGIDISKDVFDVTDSKSNHHQFENNYKGFKQFKKALNEMSHCVMEATGYYHYKLAYYLQEEGFKVSVENPLSVKRFIQMKLSKIKTDKSDSKLICEYAKQVDLKLWKGHSKQQLECLQIIRTLDVYTKQGTMLKNKIHGEVTLGNPSLAVVRSLKRLLKHLEKETNNLEEKLLKTVKSTHQDLLTRIKTVPGIGVKTATTLIVLTDGFERFNSAKELCSYSGLTPIIRQSGSSVNGRSRISKVGNKKLRNLLFMCSFNACKYNKACKALYDRIVAKGKSKKLALIAVCNKLLKQAFAIAKSGLVYDQDYRSALVKN

SEQ ID NO: 47947 - protein, 430 aa, unidentified
MKNKSQLNEKIEAITLRTLVVGIDIAKEKQWARFVDCRGVECGKAMYFRNDGAGFEAILAKIRQISKENSFENTIVGMEPTGHYWKALANWLMKQEHIRVVLVNPYHTKKAKELDDNSQTKSDKKDALTIARLVKDGRYFEVYLPHDIYAELRVLATARNSVNRQKAALENTITAVMDEYFPEFTKVFKHPFKAKSAMQVLKACPFPKYILELGADGVLAEIKKAVKKTVGRKRAQKLVDTAAASVGVDYGVAAARCKLQVLLEALELAKRQLFQIEEEMAKALQATDIAEYLLSIKGVGVVSLAVCLGELGDPLRFDDPRQLSRLAGYNLVEDSSGKNKSGTCISKRGRKGLRKALYQMALTAVAVNPEMKELYEYLKSRAVNPLKKMQALVVISKKLLTLIYTLAKKKQYYSAEKVFGEVRRSQLTAA

SEQ ID NO: 47948 - protein, 357 aa, unidentified
MVYGLKHQKEKRSMEHFAGLDVSVNETSVCIVDDAGRIVREVVVASEPDALLAVLKSGAYHFKRIGLEAGPLSQWLYSAFAEANLPVICVETRHMRAVLKAQINKTDRNDARGMAQMMRAGLYRPVHVKTLRSQKLRMLLTHRKLLQGKAIAIENDLRGTLRNFGLKVGMVGAVRFETRIRELVKDLPDIAILVEPLLVVRRTLREQLGILHRHLLTIARDDEVCRRLMTVPGVGPVVALTYRATVDVPARFRNSRAVGAVLGLTPCKYQSGQSERTGAISKCGDEMMRVMLYEAAQVMLVRSTRWSWLKAWAMQIARRRGVKKAIVALARRLAVVMHRIWVDGTEFRWSRQEAVAA

SEQ ID NO: 47949 - protein, 337 aa, unidentified
MIIIGCDFHPSFQQIAMLDTETGATEEHKLMHTSGEAESFYRKLASPAVVGIETVGNDLWFVQLLQKLGHEVRVGDAAQIRASYVRKQKTDRRDAKHILQLLVEGRFPRIWIPDAGMRDHRQLLMHRHKLVQIRTRVKNELQHLMLNQGMQKKQKLWSTEGRAALASLPLEPWTDRRRKDLLNLLAMLDAQLESLDDAVTRVAKEYPGVPLLMSQPGVGAVTALAFVLTLGDVHRFPRGKQVASYLGLVPREHSSGGKQRMGGISKQGNRLLRFLLVEAANIAVRFDPELRKEYLHRCHQKHFTVAKVATARKLAVRMYWMLRTQTPYPQVLSSRVA

SEQ ID NO: 47950 - protein, 487 aa, unidentified
MLPNESVHIGVDIGKFKHVAGFVSKTLLERHQHFEHCPAFTFEQSREGFRAFVERIGAYCPLEQCLILMEQTGHYHKALQQYLLELDLPVYVMHVQRRECGMIKTDKRDALGLANQLYNQLELGVQVTDKLQVVHRAIPPSGAAAPLKSFMRHRYELVNEATQRKNKLTAICDEVFPELTQVFKNPNLTVALELREKFPTPQAVATASLMELREVRKRNRPSEAEFALLQQLALQSIGTKDVARQRGLILEQTLLIKELRLIQEHLERLEEEICQIVEHCREGKILLSIPPISPLAAATILAAIGHIANFEDAGHLKSYFGWAPKRAQTGVSFDHTSLTKGGSREMKKIMYLVAWHAIKDETEWAKLYKRLVPRLCTYDERTQTYRGRGKAVGHVIGRLITLIYALRHRKMTKRSAILLLEHSHQSQSSMIQNCTGTIAPVTTNRSEKACQRTGSYKFSLEGLYVGGRRPSLLELPRRSPQPPLCRR

SEQ ID NO: 47951 - protein, 409 aa, unidentified
MQVLFNRCAGLDVHKASVVACVMITAPDGAVQKEIRTCGTMTRDLLELGDWLKSHQVSHVAMESTGSYWKPVYNLLEGQRELLVVNAQHIKAVPGRKTDIKDAEWIAQLLRHGLLRGSFIPPKPQRELRKLVRHRANLVGRRAQTVDELQRTLESTNIKLGNVVSDITGVSATEMLIAILGGQTDVATLAKMARGKLREKEEKLQAALQGKVQEHHRLMLSQLMADIAGYEEQIAEVGALIAQRLQSQQELLDRLDEMPGINQRVAQVIAAEVGTDVKRFPTAQHLISWAGICPGNNESAGKRHSRHIKPGNRSLRAAIVEAANAAGRKKDCYLSAMYRRLAAKRGRKRALIAVARTILQSCYYMIQRGAKYQDLGADYFDKRNPEGLAKHLVKRIQKLGYNVTLAKAA

SEQ ID NO: 47952 - protein, 343 aa, unidentified
MKLTRVGVDLAKQVLQVHGVDRAERPVWCQRLKRGRWIAELERHVEPGCEIGMEACGGAHHWARLLQSKGYVVKLIATQFVKPYVKSNKNDANDAQAICEAMSRPSMRYVAVKTVEQQDIQAVHRVRASLITERTAKANQLRGLVYEYGMVAPREIASLRRAVPAWLEDATNGLSARFRALLAALYRDLQWLDERVGELDREIAAIAREDEAVQRIEQLRGIGPLTASALVAMVGDGRQFKNGRQLAVALGLTPRQHSSGGKDRLLGISKRGDRYLRTLMIHGARSALRTATGKTDRLSRWALALAERSHPNVAATALANKMARVVWAMLRYGTTYEPERVAA

SEQ ID NO: 47953 - protein, 336 aa, unidentified
MYSGIDLHSNNSVVAIIDDADRIVARKRLPNDVTKIVGFLARWQGDLAGVVVESTYNWYWLVDGLQDAGLQVHLANTAAIKQYDGLKHSGDETDAQHLAHLLRLGILPTGTILPREHRVVRDLARKRMQLVNCCTAQVLAVENIMARQLGGRMTSNQIKRLTADAIDSLPLATDVRLAIKANVAVIATLRSQIEVLEKRLQERVKPRSQYGLLTSVPGIGQALATVIFLETGPIERFADVGNFASYARCVDSVHTSNRKKKGEGNVKNGNKYLAWAFVEAANFARRFCPEAKRFHERKKAKTNNIVATKALAHKLARACYHILKEGKPFDVTRCFA

SEQ ID NO: 47954 - protein, 339 aa, unidentified
MPLYGGLDLHGDNVYLALMDAAFNRVFERRLPNDLTVILNALEPYQERLAGLVVESTYNWYWLVDGLQAQRYPAKLANPARMQENIGLKNASDRTDAFFLAKQDAMGVLPQGYVYPKEERPVRDLMRRRMRLSRVRTAEWLSLESLVARHSGKSLGIQALSHLKEGELSTLLGGERLVVGAAQISYRHIAFLDQEIALMEKSVEARVKLLPEYERLMTVPGIGRILTMAIMLETGPIKRFAGPGNYASYCRAVKAEHTSNERKKGSGNRKSGNKYLSWAYVEAATYAVRYSPELRKWYQRKEARTKRVVAIKALANKLAKACFFILRDGVAFDVKKLVG

SEQ ID NO: 47955 - protein, 310 aa, unidentified
MGVCIGVDVAKSHLDWALGPKGEVERVPNNPAGVRRLVKKLKQLEFDLVALEATGQYERLLYEKLGDAGIPVVRLNPVRVRRFGQGMGVLAKNDAIDARMLALFGEKAEPEIREQKTDRERLLGDLAARRRQLIGIITAEKNRLEHATPCVVAEVRGLIRILENRVVKLDSKIDQVIAQDRRQKADFDRLQSVPGIGPKIARTLLIDLPELGKLDRRRISSLVGLAPYARDSGKRSGSRSIHGGRAAPRTALYLAAMVGSRFNPKLKAMYERLRAAGKPPKLAFIAVARKLLTILNAIVRDQTEWKSMTA

SEQ ID NO: 47956 - protein, 314 aa, unidentified
MPQLVQSAGIDCGKRFLDVAVYPGGEQIRLENEPADHQRLVVWLKERGVTRVGLEASGGDERAVRDVRCAAGLEVHILDPARVRHFAKAKGRRAKTDPIDARVIAEFTATLVDTPPVTVEPAREDLAKLIRTRRLLVAKRADMTKALKDLPDAARTVVETALASLGAAIAELEQLIDRQAGADAALAKRVEALCSAPGIGQTTAVAVAVLLPELGRVSGCAIAALLGVAPFADGSGDRKGERHIAGGREDVRQLLYMSVLRAATQGQGVLRAFYLRLTGRGKPAKVALTACMRKMIVRLNAMLAAHQTWKEEPA

SEQ ID NO: 47957 - protein, 409 aa, unidentified
MEVIFSRCAGLDVHQETVVACARIQSGSKAGQEVRTFSTTTEGLLALSDWLVGQDVTHAAMESTGVYWKPVWHVLEASVELILANAKQVRNLPGRKTDVADAVWLADLLAHGLIRGSFVPPVAIQEMRDLTRTRTQFVREATRHTQRIQKTLEDANIKLTSVLSDILGVSGRAILRGIVAGTTDPPALAALRCPRGLKATEEQFVQALTGKVRDHHRFLLKLHLAQVDSIEASVSLVEQRIGEFLQPFRIEIALLTTIPGISDTVARTIVAEIGLDMSRFPSAGHLVSWAGLCPRNDESAGKRRSTKLRKGDTWLKTALVQSAWAASKKKNSYLRGLFLRLKARRGPKKAIVAVAASMLTSAYFILKRREPWKDLGINYFDTRDRTKLANRLVKRLENLGLRVQLSEAA

SEQ ID NO: 47958 - protein, 410 aa, unidentified
MQSAPTTLPRTPDGGLTSGIDWASSDHAVAVVNTDGLEVDRFITEHNQAGLLAMTRRLRKLGVGEVAIERPDGPVVEALLGAGFTVVVISPNQVKNLRGRYGSAGNKDDRFDAFVLADTLRTDRARLRPLVPDGPQTVTLRQTCRARKDLVAHRVAVANQLRAHLQLVFPGAVGLFADIDSPISLRFLDRFDCQERADWLSPKRFEAWLASVGYCGRTDPAVLHARLVAAPRGAAGTTATVHITRAMTAVLRTLVDQIKALSEQIDEQLAGHVDAHIFTSLPRSGTVRAARLLAEIGDCRARFPTPESLACLAGVAPSTRQSGKVRAVGFRWACDKQLRDAVCDFAGDSRRGNPWAEHLYQQAIARKHDHPHAVRILARAWLFVIWHCWQDGVAYDPTKHRALQNLGLPA

SEQ ID NO: 47959 - protein, 437 aa, unidentified
MRRKKKNANKSINLQVLPLVHPNAAGIDVGAKEHVVAVPCDRDPKPVRTFQAFTPNLHELAAWLKRCGIETVALESTGIYWISLYEILEQYGFEIRVVNARHVKHVPGRTKTDVLDCQWIQKLHSFGLLNGSFRPDQQIRKLRTYMRLRDNLVAASTQAVHHMQKALFEMNVQLSNVISDIVGETGLRIIEAIITGQRDPMQLAALCSTRIKASRETVAKSLHGNWDEALLFALKAALETYRFSQTKIQECDCCVQQHLAQFESRAEAINSSQDSKAQLHRVCGVDLTKIPGIKEQSAQIIISEVGLDMTKWKTEKQFCSFLGLCPDNSISGGKVLHRATRKVYNRAADTLRLCAQSLTHSKSALGAKYRRLRARLGAPKAIVAMAHHLARLVYRMLRYGQNYVEQGIHQYELKFQLQRVKWLRKEAKSLNLQLVPA

SEQ ID NO: 47960 - protein, 400 aa, unidentified
MRTVFGIDVSKATSEVAILVNGERVHGYSIPNDVIGFSRLYQDLTQVVNPEIIFEATGVYSRRLEAFLKNNNYTYTRLNPLEAKKQLDGLRHRKTDKIDAETLAQTQFVLDRKPSYVQEEIFEHLRDLSRFYQNLTEDIVRSKNRLHKGLQATFPEIEKLLSIPSGAQYCNLVITFPSASLVLEKSRIELQDIVRQSTAKQISEKRVIDLTDKLIESAEQSYPAVAMDSPMLETVRYFAKELLRLNAQRKSVLDHMVEQAQTLPEYDVLLSIPGIAETTAVSIIGELGDIRRFRSSNQINAFIGIDLRHYQSGDYLAQEHITKRGNPYARKILFKAIHNIVSASRTKPSHIADFYSKRKRQTPNAPTKPYTIASMHRLIRCLYYLIIHNKTYDYALTQNQ

SEQ ID NO: 47961 - protein, 345 aa, unidentified
MTIRVIGIDLGKNIFHLAGMDEDGQVITRKRLSRSQVLTFMANLPACVVGMEACCSSHWLGKKLREQGHEIRLIPAQFVRPFVKSNKNDAADAEAIAEAVQRPTMRFVPIKTEDQLDLQAVHRVRERLVARRTAVVNQVRALLLERGLAYRQGRAYLRQQIPAILEDAEPQRSPKIRWLLHLLWEEGNNLEQQIDELNQEVNSVAADDAACQRLLEIPGVGPQIATTIVASVGNGSAFRRGRDFAAWLGLVPRQHSTGGRPRLLGISKRGNSYLRKLFVHGARAVITRSKRGNHPLGRWIDELASRVHHNVLIIALANKLARISWALLNRGETYRGMATEVTVTT

SEQ ID NO: 47962 - protein, 343 aa, unidentified
MDHFAGLDVSVKETSVCIVDDTGRILREVKIASEPEALLPVLTKPAYHFKRIGLEAGPLSQWLFNALAEVGLPVICVETRHMRAVLKAQINKTDRNDARGMAQMMRAGLYRPVHVKTLRSQKLRMLLTHRKLLQSKAIAIENDLRGTLRNFGLKVGMVGKVKFEARIQELVENLPDLTALVEPLLIVRRVLREQIGVLHRRLLAIVRDDDVCRRLMTVPGVGPVVALTYRATIDVPARFRNSKAVGAVFGLTPSKYQSGESNRTGAISRCGDEMMRVMLYEAAQSMLVRSTKWSWLKVWAMKIAKRRGMKKAIVALARRLAVIMHRIWVDGTEFRWTREVAAA

SEQ ID NO: 47963 - protein, 313 aa, unidentified
MSNSKVLKEEQVSNHPQAIATVIAGIKEELSMSNDSLIICAEHTGQYTYPLICACKSVGSKLWLENASQIKYCSGVTRGKNDKVDARRIAVYAMRFFDKAKPYQRPTEELIRLKQLEAERSLYLTDLAKYKAQLSDQEGFMEDKIFKRKAKRLKEMIKSLEKTLKEIAQEMADVIYSSEELSRQMRLLKSVEGVGPVVAMNMIIATEAFTRFDNPRQFNCYVGVAPFAYTSGSSQHSRNRVSQRAVKYIKCLLHMAAVAIAHKKTGDLKTYFERKVAEGKNKMTVLNAVRAKLVARMFAVIRNNRVYQPILSV

SEQ ID NO: 47964 - protein, 382 aa, unidentified
MNRIIKIGMDVHSTNYTLCAMEPVLDGEDRIFTNIQVTPDYENVIQFIDNLKERLGSSDSYSIECGYEAGCLGYSLYHQLTKAGVKCTILAPTTMLTQQGKRVKTDKRDAVMIAQCLSYGGYHAVHVPTDQDASVKEYLRMRDDHKLALKKIKQQINAFCLRHGYIYGGHKWTIKHLEWLKKLDLSELNRETLNEYMTSYEEQTAKIERFDKRIEELAADSDYHENVRKLSCLLGIQTYTALSLIVETGDFKRFRKGNTYAAFLGLAPGESSSGEKISRTGITKAGNSRLRTLLIEAATGICKGQVGHKSKALCARQAGNPAEVIAYADRGNIRMRSKYKRMIRHEKKRNVAVAAIARELACYVWGIMTNHIEPREEGKKAA

SEQ ID NO: 47965 - protein, 341 aa, unidentified
MSDYSYFCGIDLAKNHFSLHAVDQNGKVILHKSVTRSKLLTTITNMPLMRIGVEACGGAHYWARTLNKLGHDARIMAVKYVVPYRTKGKNDLNDAVAICEAVQRPSTRFVPVKSPEQQAILSVHRMREHWVRERTALMNRMRALLSEFGLIIPVGRSSLMKQIPLMLEDAENELPHLARTVIADAYHHLGELNQRIADTEQVFDSLAKVSANVQRVMKVRGIGPQTATAILASIGNGSQFDKSRDFSAWLGLVPKQYSTGGKPRLGRITKHGDKYLRTLLVHGARTVIANLGDKQDKLSQWCRGVLERRGINRAIVALAAKNARIIWSLLHNQTEYENYAA

SEQ ID NO: 47966 - protein, 394 aa, unidentified
MVQSGRVVIGMDPHKRSVTIEVMADDETILGGGRFATDPDGFTAMRQYVRAWPDRVWAIEGCNGIGRHVALRLLADGQDVVDVPPKMSARARVFATGQGRKTDATDAHSIALVGTRMAGLRPVVDDEQLAVLRTLADRRRALGEEHSRMVSQLHRLLLELVPGGAKTFLSAAQAKAILASVRPRDAAGKVRRRVAAELVSDLERTYKRKKAADKELRELVQATGTTLLDLTGIGPSGAARLLVEVGDITRFPNRAHFGSWTGTAPIDASSGDHVRHRLSRAGNRQINRVLHIMATVQLRNPGIGRDYYDRKKAAGKTSMEAMRCLKRRLSDIVYRTMLDDTAAHATGSRTGPGGHRGASLTSSAAGSHPHTDTSDQPLPGPVSNEPTTALPAAS

SEQ ID NO: 47967 - protein, 427 aa, unidentified
MPYRIAGIDVHKKMLAVVVADVEVEGNYHFERRRFGSNPEQLRLLAEWLLEQAVEEVVMESTAQYWKPVWGALERYWKPICQKREGAGPMSGALHLAQAQSNRGRRGRKRDFPDAERLVKRLVAQELTLSFVPDAEQRLWCTVMRGKYQLTRNHARVQNRLEALLEEAHIKLSSLVSDLLGASARRMLKALAEGETNPVALAALADQRLRATPAQLCDALGACTELNPVYRRLLKMALEELQFIEQQIGKLDQEMATLLSRHQDAVERLAEVPGLGADSAQQIIAEVGATAATFPSAKNLSSWVGACPGDEESAEVNKSHRSPKGNRHMRRILNQAANAAVKHKGSIFDIVYRRQVPRMGHKQSIGAIGHRLCRLIWLILHQGVRYEERGPAVSRKSRQRRTAKMIRELRLLGYRIEPVSAQFTNPA

SEQ ID NO: 47968 - protein, 391 aa, unidentified
MDEQGKEMGYPTFPNTLPGAKALESHLLQIIKEKDFSTLKIATEATSFLDLHLVDFLASSQDLAPFHPSIYQFNPKLVRNFKKAYSDKEKTDKIDAFVIADRLRFGRLPEPYESHRPYLPLRRLTRYRFHLVRAISREKAYFLTHLYLKFSAFSIEKPFASLFGATSLALITEFSPDELVHLPLEDLTQFIIKNGKNRFKDPEKIVETLQRAARESYRLRPALSSSIDLILATILQTLRALGEALKEVDKAIEKEFRAFPNTLQSIKGIGPVYSAGIFSEIGDIHRFPTEDAVAKFAGLTWKRYQSGNFEAEETHMSKTGNEYLRYYLIEASNALRVHNAEYKAYYETKFKEVTKHQHKRALALTARKLVRLVFALLKKGQLYRANYQQEA

SEQ ID NO: 47969 - protein, 347 aa, unidentified
MRFYNHQHQYYCGIDLHVKTMYVCILDATGQVLVHRNVPSTPEAFLAVVAPYREDLVVAAECMFTWYWLADVCAAEGITFVLGHALAMKAIHGGKAKNDKIDSHKIAVLLRGGLLPQAYVYPAAMRSTRDLLRRRLHLVRKRGQLLAHIQNTRAQYNLPAFEKRLAYPGNRDGIVERFPDPSVRKSIEVDVTLIDQYDALVNDLELTIVREAKRHDGDAFHRLRSVPGIGKVLALTILYEIHDIQRFDRVQEFASYARLVKCQKQSGGRTLGTSGAKMGNVHLKWAFSEGAVLFLRHAPGGKKLLAGIEKKHGKGKALSILAHKIGRAVYYMLSRGTVFSMDKFRAA

SEQ ID NO: 47970 - protein, 343 aa, unidentified
MKYFAGLDVSLEETAICVVEESGRIVKEMRAASEPEALIKALRKVGLPLERLGLEACSLTAWLHDGLRAEGLPAICIETRQANAAMKTMPNKTDRNDARALAQIMRTGWYRQVHVKSRQCRLWRALLVARRTVLNEMRSIENVVRAMLRETGVKLGTPSRTAFADRVRELAGTEVMAMVEPLLAILSVMLKEFARLTKQVLHIVRKEEVCRRLMSAPGVGPITALAFRATVDRPERFGSSRAVGAHLGLTPARYQSGETDVQGKVSRCGDELARTALYEAAHSLLVRSKKWSSLRAWGMNIARRRGMARARVAVARKLGVILHRMWADATEFRFGKEPAALAA

SEQ ID NO: 47971 - protein, 337 aa, unidentified
MDTSKHIFQLHGVDAAEVPILRKKLRRKEMVAFFETLAPTVIAIEACGASHHWARLLKSFGHSVKLIPPQLAKPYVKRGKNDAADAEALCEAMSRPTMRFVPVKTAEQQAALMLVGLRDRLIRNRTQLANAIRGYAAEFGLTTAKGMAHLPQLLERIQSDKSLPALARELFAIQEKEYTKLQTQMGEVESKLAAWHKDDECSRRLVKIPGIGPIGAALLKMKTPAPELFPSGRQFAAWIGLTPKDHSTGGKVRLGVITRAGDEGLRSVLVVGAMSVIKQVLRGGRASPWLIELLKRKSAKLAAVALANKMARTAWKLMVSGETYNASSAPVASARAI

SEQ ID NO: 47972 - protein, 415 aa, unidentified
MSLKIVYKICCGIDVHKTFVVACIASTNDKGITSYESHRFSTYTSGLKTLLQWLLNRNCKDVCMESTGKYWIPVYNILENDCSIVLAHPKYVKAIRGKKTDKKDAKWIADLFKHDLVAGSFMPPADIRQLRDLMRYRFKLTCFQSSEKNRLQNCLTVSNIQLGNVVSDTFGKSAQAILDKLLENPADTSFDLEPLVYKSLKKKLPELRDTIDGYITPEQTGKLKVIKSHYENLESRKAELEELILALAAPYQQELAILQTAPGIRSDFTAIGFISEIGTNMEAFPSAKHLCSWAGLTPTNNESAGKKKSVRVSKAGCYIKPLLVQCANAVVTSKKHPEIRNRYLRLKKRRGHKKAIIAIARMLLTALYHMLKNGENYNAELYRKSYLPPVDREITVEQAIIIARNQGYKIKSATA

SEQ ID NO: 47973 - protein, 338 aa, unidentified
MDKLDFSGIEVSARELVVALQREGKRKDLKTFPNAAAGHQALIRHLNCPGRTVRAVLESTGLYGLDLALALRRAGIEVMVANPRAVRHFAQALMQRSKNDRLDAGVLLEFAARMPFQAWQSPATPVLQLHALARRLQALTEMQTAEKCRRDALQATETTPPALRRDLERSLRSHRRAIARLSGEALKIIESHPHLKLHFDLLLSAHGSIAGTSAIQILAELALLSPDLDVRQWVASAGLDPRECSSGSSLRKKTRISKAGNAHLRRALYMPALVAIRHQPHLRAFYQHLRAQDKPKMVALVAVMRKLLHAIYGMFKHQQPFDGSKVYRLPDISTGVAA

SEQ ID NO: 47974 - protein, 355 aa, unidentified
MNGLRYIGLDVHQDTVSAAVLDGSGKLLMQSVFATRAVAILDFLHGIKGTLHVTFEEGVHSAWLYDLLRRRVARVVVCDPRKNKLLKSGNKGDLIDARKLAELLRNNSLSPVYHGGMSALEVQHRTRSYTMLTEDTTRVMNRLRAVFRSQAIRVHGRKLFRSDLRESHLAQLATPGLRQRAESLYRELDALHPLRLQAKREMLAECRKHPAMKWLRSVPFLGKVRTAVLIGRVQTPHRFRTKRQFWSYCGLALETHDSAEYRVVHGQVQRKSRPAQVRGLNWNHNHELKGLFKSAATMAAFRKGIFREFYSGLLAKGIRPEMARLTLARKIAAITLKIWKEGETFNAEHIKPQAA

SEQ ID NO: 47975 - protein, 310 aa, unidentified
MTDTIGIDISKDHLDAHRLSDEKCSQFANTKAGLKTLNKWIGCTSHRVVYEATGRYHREMEACLSQAGFALVKVNPRRARQFANAIGKDAKTDRIDAAMLARMGSVLELKGQPLKTANMHDLSELHVARRGLIKDQTACRNRLAGVRHKLVKSQLKARLGHVEKQITQVDAELKRLIHKDESLKRSFTILTSIPGIGAVAATSVLIEMPEIGTMTSSQVGALAGLAPVTRESGNWKGQSHIKGGRAGLRKALYMPALVAVRFNRQMCEKYTALRAAGKPAKLALTVIMRKLIILANSLIHENREWTEIRP

SEQ ID NO: 47976 - protein, 347 aa, unidentified
MLYAGLDLSRQRLDVCVLDENGRTIEVTAATPEVFGLRELVTRISRHGEEVSATIESMNGARFVHDQLELYGWDVEIADAVKVKGLAPLAAKTDKIDAWVLAELGRRDLVPAIWLPDPSVRAERERARFRLHLVRHRTALKNRIHATLITFGHPVPVSDLFGAKGRELLASLAIPEPWATTLARSLRIVDELGAEIEQCTADLQAAGADHPYVPLLMSVPGIAWVLGYTIAAELGDIGRFASAKKLAGYTGLCPLVRQSGRRDDRGPLAKNGPKYLRWALIEAATHAARHPAYRDRYEHTKKRLGRQRGSKVARVELARELSTAIWHMLTKNEPFAPGRPPALPLVA

SEQ ID NO: 47977 - protein, 390 aa, unidentified
MRCCIGIDLAKRKHSAAVIAEGGERRLLDFEFRNDGEGFAALLAKLTEAGAMPGESGVCLEATGHYGRNLIAFLEARGYQVFEVNPLLTSNWRKAMSVRKVKNDAVDAEALALWLLAGNPTERRRTKSETDDLRSLSRSRTSLSHIVGDCKRKAHAIVDVVFPEFHGFFCDDFGRAGTAVLSRWGSAANVAAARVDSVEKAIREASGGRFGRADAERLKALAKSSVGQHSGPLAFQLRQLLAQIEFTRGQMADLDRELGRLVAGSPITTIPGIGTVCAAGILGEIGDVSRFESASKIVAFAGCDPSVFESGEYEGSQAHLSKRGSPYLRWYLWLAADRARRFDPVLRDYYLKKRSEGKCHRVAISAVVRKLCSIVFAVLKDDKPYVCPVA

SEQ ID NO: 47978 - protein, 352 aa, unidentified
MIGKTPDVIKLSADPNVNTLDGLEVPPQRAYVNNCKLSTKDKIMTNSAKYNTFIGIDVSKDKLDLFNSATGELVAIENSKAAISQYIKALEFSKQTLVIVDLTGGYEAECVRAFALKGFDVVRAEGLKVKGFAKAVGQKAKTDGIDARLLAKYGEKCYEDLFLYDPYPNVIKPLVVRLADVKQMCQQEKNRVQAPDLNKTIKRGIERTIQFFESQIKELETLIMAEIGRDEQLSARYKLLTSHKGIAQKTAIILLGLLPELGLLNRRAIAALVGLAPFAKDSGTLAGYRFTRTGRKDVKKALFIIALGAVRYDQKWKTVYENFQLRGKKKMVALTAVMRRILVTLNAQCKDL

SEQ ID NO: 47979 - protein, 399 aa, unidentified
MLKKLIVACLKKGNTQEIREFGATTRELLEMADWLKDGGCEMVAMESTASYWKPLYNIFESSDLNAIVVNARHMKAVPGRKTDVKDAEWIADLLTHGLLQASYIPDKDQRELRELVRYRKSLVGERNRELNRLQKMLEGANIKISGTITDINGKSARNILEHILSGKQIDSAEYDILYEKKVIAHNLKASKEQIIDDLNGVMSDIQRKMMRLLLKHLDELNAIIKELDDDIDSFMKPQEKQAAKVIQDIPGIANTSAQAIISVLGTDMERFPSDRHLASWAGLCPGDNESAKKRKSGKTRKGNALLRETLVICAHSAVRNKKSYFYAQFMRISAHRGKKRAYVAIAHTILIAIYHILKEGVTFKDLGADYYNQFNKERKINAYLKKLKALGWEAPVVAA

SEQ ID NO: 47980 - protein, 322 aa, unidentified
MLPTLGIDISKDSFHVELSINHKLRHRRFTNRKEGFAELCVWLSKHKATPVHACLEATGPYSEALALYLHEQRHTVSVVNPAQIKAFGQSELLRNKDDRPDAALIRRFCEKQCPIAWTPPPAHFRELQALTRHLENLLETRQQQLNRLETTTTKNVVKSLRKLVTHLDAEIKRTEQQIENHVDRHPDLKQQCQLLESIPGIGKRTATRLLAEIENISQYKSARQVAAYAGLTPRNNRSGTMRGQSRLSKTGNARVRKALFLPALVAKQHNPVVRNFCQRLARHGKNKMQLVGAAMRKLIHIAFGVLKSGKVFDPNHELLLNS

SEQ ID NO: 47981 - protein, 370 aa, unidentified
MFAGIDTHKDTLAVAVIDDAGRLLAARDVPNTEQGFVQLVGLFDTHQVVRVGIEGSGHFGRAVAVHLVLCWQPPRSVAVVEVPTLMTSRERRGQLGKGKTDPVDALAIARITAREPQLPPVRLTVGPAADLRALLDYREDLVTERGALVNRAHAELSGLRAGYQHQAPNLTTRARVRAVLTLIADQDSVRAVLCRRRLERILAIDAETAELKQQIADLVAAAGTTLTDLHGIGPLVAARFIAEVVDVRRYPNRNAFAAANGTAPLPASSGRTVRHRLNPGGNRQLNRALYTIAITQIRSDTEGRAYYERKRAAGKTKREALRCLKRKLSDIVFTTMRHDADRQTAQLGQLPPPNQARVGAADANEARLTA

SEQ ID NO: 47982 - protein, 444 aa, unidentified
MLQALVGCCAGLDVHRKMVVCTIIREMPDGVFSKQTREYPSFRRDLEGLAHWLHEQGVDLAVMESTGIYWKAVYGALEEAGVESFVVNARHVKNVPGRKTDVQDSEWLAELARCGLLRPSFVPSSDFRQLRMLSRYRRKLTGYLSGQKNRLHKVLDDCGIRLGCVVSDIDGVSGRAMVEALIEGKESPEQIAQLARGQLRKKDEALRLALDGQISDRHRLVLRKILDHIRYLDQEIEAIDAQIVTAMEPYKEEWRLVQTIPGMDQISAAMLLIEIGVDMTRFGSKERLSSWAGVCPGNSESAGKRKSGRMRKGNSYVRAILCEAANSASRTDSQFQGLYKGLVIRRGHKRAIMAVGHKILEIVYLLLTRKEPYRDGSIQDFLHRRLRGTVPLTMFHVRFSPRILEAMQLHDFSIRTVVLGTAQFEDVIGVARIPPCPRSFQAHM

SEQ ID NO: 47983 - protein, 355 aa, unidentified
MDSKKYIGMDVHQATISVAVRDSAGKLVMESILETKANTILEFMRGLGGSLWVTFEEGTSAAWLYDLLKPHVAHVVVCDPRKNALLKAGNKNDRVDPRKLTDLLRAGLLSPVYHGECGVRTLQELARSYLTVTKDLTRVMNRLKALYRSWAIACAGEKVYAPRHRSAWLEKLLQAGVRRRAEQLYQQLDNLVQIRREARQELLRESRKHPASQFLSQIPRLGPVRVALLIALLQTPHRFRTKRQLWAYCGLALQTRSSGEYRFTGGQLQRSKRLPAIRGLNVNHNHDLKNLFKSAATQASGSSDPWADFYQNLLARGMKPAMARLTLARKMAAIVLRIWKKGERFDPEPLKRKSA

SEQ ID NO: 47984 - protein, 342 aa, unidentified
MKKSLFIGIDFSKKTFDVSVIHQNNLQAVDYRQFENSKEGCIALLKWIKSLTKEPIANWLFCGEHTGLYCICLSEFLIKKGLFVWLENPLQIKMSSGIKREKNDKVDSREIALYAFRYQDRARAYQLPDKALKSLELLLSFRARLVSNKKGLLVSASEIRQVLKRDSTARFIYERSVKEIERINKDIKEVEKRMLEQIASDECLQENYELVSSIKGVALINTATILVATQNFTRFENSRQFACYAGMAPFGKQSGTSTNSKPRVSNLANKKIKTLLTQAVKCAIIHDPNIRQYYERKLAEGKDKWLITNNVRNKIIHRVFAIVRSKQKYQIDYRNPLQKNAA

SEQ ID NO: 47985 - protein, 412 aa, unidentified
MEAVYERCCGLDVHKATVVACLWMRDPGGKIHKEIKTFGTMTADLLVLYDWLRAKEVTHVAMESTGVFWKPIYNLLEDGFAVLLVNAAHIKRVPGRKTDVTDCEWIADLLAHGLLKGSFIPPKPIRELRDLTRYRKSLTDERVREMNRLHKLLQSANIKLSSVASDVMGMSGRKMLEALLGGNTDPEVLADLAQGKLRKKLPELRKALHGRFSAHHRLLLEHILSHLDFLEEAIEGISKEVAARTAPFDDRIQCLDTICGVDRKAAEGTIAEIGLDMERFPTHRHLASWTSLCPSNNESAGKRRNGRTRKGNLWFRRYAIEMALAASRTKETYLSALYHRLVRRKGHKKAIVAVAHAILVIIYHILKHRIPYRELGADYFNKLNATYIKRHCLKRLESLGFKATLEPLEAAA

SEQ ID NO: 47986 - protein, 408 aa, unidentified
MDKLFIGIDVGSRNNAVHIMLPDGEKHSSFSVQNNLGGSQRISKNVVSAMAEKELKSLEIGIEATGVYGDGLMCFLNEDGAIGQFEKRLYILNPKQVEKFKQAYSDLPKNDPVDAFVIADSLRFGRIKANPFQDDYRYKALQTLTRSRYHAVQNLTREKQRFMNCLFRKCSGLAQEKIFSNNYGAAALAVFEEFETPDDIVNMDVDQLAAFIAEKGKNRSPRPDEIAKEVQAAARGSYRLPKTVNDSVNQVLSVSISSMRAMQAQIKALDKEIERQFENIPNTLKSIRGIGPVFSAGIIAEVGDINRFGKGQAGLAKYAGLVWKEHKSGTFEGQNTRMIKSGNRFLKYYLCEAAMSLVSCDAEYKRFYDLKYKEVNKFQHRRALALTARKFVRLVFRLLKNNRLYIPA

SEQ ID NO: 47987 - protein, 356 aa, unidentified
MKYLKNMKSFIEGKVVFCGIDVHRNRWSVCFYCDGEVVEKMSLQPNYSVLHHTLSVRYASARAIHLVYEAGFSGFWLCRKLRADGYDCIVTPPNRIPKPGDKVKTDRRDAEKLARYLAAGLLKAVAIPPPDVEADRRLNRRRPQLVKKQTRIKNQIQSFLHVHGLNRPETIKTCWSKAYVEWLSQLRFDYDSDAFLLNQMIRSYHHVRDELAELNQYLRQLSRSPAYRDNYRRIPVLRGVGLITAMTFLLELFDLPRFKNTSCFCSYLGLTPSQHSSGEHIRLGHITREGNAHLRRVLIESAWTVIRHDPHLREKYYRIRARGTNANKAIVAVARSLAVRLRRCLLDEVEYGIGVC

SEQ ID NO: 47988 - protein, 343 aa, unidentified
MQTVTTIGLDIAKSVFQVHGVDAAGQVVVRRQLKRRYVLAFFEKLPPCLIGVEACASSHHWSRELRALGHKVRLMPPAYVRPYVKRQKNDAADAEAICEAVTRANMRFVETKTPEQQSCLMLHRTRHLFIRQQTAAINAIRAHLAEFGIVAPVGRNGVEELLGVIADASDKRLPEIARACLAALGAQLRMLKAQILEFDRMINAWHRSNETSKRLDEIPGVGPALATALVASVADPRAFRSGRDFSAWIGLVPKQHSSGGKDKLGGISKQGDRYLRSLFTAGALAVIRYAKIHGAKHRPWLTALLARRPTKVAAVALANKIARMAWAMMARGESYKEPVALAA

SEQ ID NO: 47989 - protein, 452 aa, unidentified
MANSAKRKQTAKGLRFEVVNPNAAGIDISPKEMQVCVPADRDGDCNRTFGVYTDDLHYIAEWLKACRIDTVAMESTGIYWLPIFRVLKDKGFDVILVNPSDVKNYSGRKTDASDAEWLMMLHSYGLLKGCFQPENIARTMRELIRHRDNLIRSASREVLHLQKAMEQMNLKLDNVFSDILGKSGQAIIKAILSGERDPKKLSALADPRCRTSKEEIEKSLQATWDEALLFEMRQSDALYQFYQQLISECESEINAIAERYTAMVDAPKAELLRSAKYNAKKNRINFDVEKYAFELWGVNVMRMPGMSRASLLRLLGELGQDFTMKFPDVKHFVSWANLVPNNKISGGVMLSSKVPKKKNPVGMVFRQAANSLRAAKCPLGDYFRHIRAKGGHLQAMVATGKKLASVFYIMVQRKVEYDEEIYTIHKRTELQDKVSYLQKRLKRMELELANCS

SEQ ID NO: 47990 - protein, 368 aa, unidentified
MDQDSTVVGMDVHKKNLTVAILPPGKARPVEVLTIENRAKAIARMATRLTTSRAVFVYEAGACGYEVQRQLHRLGCRAVVIAPALTPIRPGDRVKTNRRDAEKLARLYRAGELTEIRVPTREEEAARDLVRAREDAVADRLRARHRLSKFLLRQGRLYHDSKAWSKGHRVWVRQQRFDLAAAQQTFDAYLRALEEAEARLESLNSQVLELAQTPAYAGLVRALSCLKGIDTLSAVTIVVETQDFRRFPDARGYMKFTELVCSEDSSGDKTRRGGITKAGNAHLRRVLVEAAWSYSHQNTTGPTIRRRRHGRSTGVVQIARRAQDRLHRRFWRLVHRNKLRQVAIVAVARELAGFVWAIAREYSTMQVA

SEQ ID NO: 47991 - protein, 347 aa, unidentified
MLIIGCDFHPGFQQVAIFDNLTGEIEEKRLQHCEEAGQFYGALAGQEVLVGMEACGHYPWFERLLGELGIELWFGDAARVRASVVRKQKTDRRDAEHLLDLLRQDRFPRIWVPSLEVRDVRQLLVHRHKQVQARTRTKNQLQAMALSCGVQKKYKLWTKAGRAELEQLPLLPYAAERRKRLLETLDSLETEMVELDRRVAEEARQRPEAVRLMTHPGVGPVTALAMVLTLGPAERFGSGKQVGSYFGLIPREDSSGGKQRLGKISKQGSSFLRFLLVEAGQTAARYDPQLKRFYRRLAVRKNRSIAKVAVARKLATRLYLMLREDWTYAQLCQAVMQVSPSHSVAGE

SEQ ID NO: 47992 - protein, 355 aa, unidentified
MNSLGIDVGKKKCRAALKDERGDVIREFFFSNNNEGISALIQSASHYGKCTAVVESTGNMWIRIHDTLEENGIDTILANPYKTKIIAEAKIKSDKLDARILADLLRADLVYESYVPTKEFREKRSLVRHRISLVRNRTMLENKVHSLLDKYDYKSELTDVFGKSGIIWLKTLDVSTIDRLIMNTTLAAIENINLQIETISKELAKYGWDSDDVKILLSMTGIDVFSAMLIATEIVDVKRFCTPWKLVSYAGLAPSTRESSGKTKTGRISKQGSPWLRWILVQCAMTAVRYDQRLKSFYERLKSRKGSAKAIVATAKEILVIIWYMLTRRELYRHMNKDRYEQKLSRLKKIKESAV

SEQ ID NO: 47993 - protein, 322 aa, unidentified
MAAVMIGVDPHKASHTAVAIGAAEEPLGELRVRACVAQAERLLAWAAAWPQRTWAVEGAGGLGHLLAQQLLAAGERVLDVPPKLGARVRLLAAGDVNKNDPNDARSVAVAALRSAGVREARADDHAAVLKVWSKRYRNLGRTRTQAACRLHAVLCGLIPGGVPKAITTARAGRVLKALRPASAVETARCELAADLVDDLRRIDARMRETRKKLAAAVAAAGTSLTGLFGVGPVIAAAVIGDIRDVSRFPGRDHFAAYNGTAPIEVSSGPARSTGFPGAGTGGSTTPSTWSRLPRSVTGTARGAPITTRSWPRARPPKRPCVR

SEQ ID NO: 47994 - protein, 330 aa, unidentified
MAREYIGVDLHKQFFQACAVSGTGDRLWEGRFPRTAGGVGLLMAKCGIETAVAVEATGPTWAFVDQLQPTGATICVIDPRKTKLKAGFAAKTDRLDARRLADALRRESVVSIYVPPPAVRELREICRGRHQVIRVRTRVSQMIRALLLRSGVSDVPVRRVFSARGLAWLEQVTLPPATGASLQRLRRMLTAIQAEALDAEQRVTTAAAGDPIAVALDGLVGIGPVLALTIRAEVGDVRRFRRGAELASYAGLVPRVDASADRYRTGRITKEGSPWLRWAVVEAAIHGMRRPDAIGRWARQLAVKKGGVKARVALARRLCDDIVARWPPGA

SEQ ID NO: 47995 - protein, 343 aa, unidentified
MESTLIAVDLAKDVFEIAVSRKPGKVAERHRLSRARFLPFFAERQPTTVLLEATGSAHHWARELRQLGHQPVLLPPRAVKRYRDGNKTDRNDAKSLLEASRNEEIRPVPLKTVAQQTLTSLHRLRSAWMATRTARINTVRGLLRELGLTIPLGARKVAPLVTSLLADPESAVPLALRSLLGEACEEIGHLEARIKSTERQLEALAKEIPAVRYLRSIPGVGLLTATALYAFVGEVRRFPTARHFASYLGLTPREHSSGNQRRLGRISKRGDTYLRTLLTHGARAVPRAAHVADSPTRLHAWALAVQQRRGHNVAAIALASKLARIVWAVWRKEQCFEATPKAD

SEQ ID NO: 47996 - protein, 270 aa, unidentified
MKDLELVGIDLAKNVFQLHGCSSTGEVVSRKQLRRSKLLSFIAELPTCTIAMEACSGSHYWGREFETLGHSVRLIAPKYVKPFVKRSKSDAIDAEAICEAALRPTMRFVRVRSEDNQAAGLAFKARDLLVRQRTQIINALRGHLSEFGFVVAKGPTHVRKLVSAIEDGDIDLPEISRPLLSILVDTLEALNARIRLLEAQIAQRAREDEICQRLTTIPGIGPIIATAIAALAPPPSTFRRGRDFAAWVGLTPLQHSTGGKQRLGRTVIVS

SEQ ID NO: 47997 - protein, 342 aa, unidentified
MSGDYDGRQYVGIDLHRRRSVIVRMTEQGEQLGWVRIDNDPVALGLELAKAGPDPEVVLEATYGWYWAVDALQTAGAHVHLAHPLGVKGFAYRRVKNDVRDAADLADLLRMHRLPEAYIATPQERELRELVRHRAKLVALRSGLKAQVHATLAKQGRLPAASDVFGRAGMAWLRSAPLELVYRQRIDSLLELIDAYDGEIETFRTMIANRFTGHRGYRAIQQISGIGPTFAAVFVAEIGDINRFSRPEKLCCWAGLTPRHRESDTTVHRGPITKQGSKLVRWAAIEACQHTRAGTKLSADRSRIIAARGRNVGIVAAARRLLTLVFYGLRDGEIRALAARAG

SEQ ID NO: 47998 - protein, 346 aa, unidentified
MVEYVGLDVSKEETAYCVKDERGKVLARGKVASDPDALFAVLREHCLCPERIVLETGTLSNWLARELRKRGLPVTVIDARQAHAVLRLQHNKTDENDASVLADLARTGFYRSVAMKSERGQRHRALLKAREHLVGQLRSRGNAIRGLLGTFGIRLAKGTAKFDLRVRAALAERPDLAAIFEPLVGERAALLGAIEQLDRAVDAEAEADPACRLLMTAPAVGPVTALAYVATIDEAGRFGKSRAVGAYVGLTSRRNQSGEMDYSGRISKQGDRMLRALLYGAANSLLTRVRRAHPLKAWARKVKRKVGHKKACVALARKLAVILHRMLITGEAFAWPQDDAKETATA

SEQ ID NO: 47999 - protein, 411 aa, unidentified
MDIAHERCCGLDVHQKMVVACLLTSSAKGNVQKEVRTFGTMTGDLLKLADWLADAGCTHIAMESTGVFWKPIYNVLEGLFELLVVNAQHIKAIPGRKTDVKDAEWVADLLRHGLLRGSFIPSASQRELRELSRYRRTLVEERARLLNRVQKTLEDANIKLGAVVSDIMGVSARAMLEALLAGQTDPTVLADLARGRLRDKRDTLSQALLGRFNAHHAFMLTEHLSHLDYLSEAIDRVSGELDRRLTEAEQVIILLDTIPGISRHIAQVILAELGPEVSRFDSPGHLASWAGLCPGNNESAGKRYSGRTRKGSPYLRQTLIEAAHGAARTKYTYVSAQYRRISARRGRRRALVAVAHTLLTIVYFVLKRREPYRELGGNYFDERDRTAVERRLIGRLHKLGYDVTIQPAATT

SEQ ID NO: 48000 - protein, 419 aa, unidentified
MSKVQPVCRWTGRAIGLDLHRDFCEIAICEEGQSYGAGRVAMTAEGIEALADSLLPTDRVVMEVSSGAWEVARRLEGRCQRVVVVSPDDTGIAQARAKTDKLDARTLASLLWRGELEAVWTPDDRVRVLRRRLHRREQLVRARTRAKNEVHGVLMRTLQGKPPCSDMFGVKGRRWLEQLQQKLAVEEAETLESALRQIDFLDREIEQVERTVAQQMLDSPEAKRLLTVPGVNVIAAATFLAAVGDITRFRDSRKLIAYLGLDPRVRQSGDHPARPGRISKRGSAQARWALVEAAWSVVQQPGPLRAFYERIKGRRGHGKAIVAAARKLAVLFWCLLYRGEDYAHQQPSLTAQKLRRLEVTAGAPTRKGKPSGVWATRERMRQAEKQLAAQAQASYERTVRDWQAAGPNKRAQAVTPERA

SEQ ID NO: 48001 - protein, 410 aa, unidentified
MTEIIVAQDAPVLVAIDIAKARHEVLIAIPDKKRRRRLTVLNELADFNRLIDTLRDYGCPVRVAFEATGNYHRALGYHLATAGFEVKLVSSVALARTREALNNSWDKNDPKDAQVILHMMEIGNEQFYHDPLVHGTNDIQELSKTHDIVSKSKTELWHRVLTHYLPLYFPEADRFHRSSRSDWFFAFLERYPSPHFITAMGKDAFTADAWDVIGRKVAKKRLLADIYETAKSSVGLPVAPNSDAISMFRLVLGEGRSLIAQRNQIEDRAVARLKDLPDYQLLTSIPGIGPINALTILAEAGDLRRFGHHRQFLKFCGMDLATIQSGTFRGQTKLSKYGNARLRRTLWMAGQVAILQRTNSFRDKFERYIAKDRQNTHLRRKAYTAIAAKMARTVHGIIKHGEPYRPFFEG

SEQ ID NO: 48002 - protein, 317 aa, unidentified
MQLNNYFFGIDVSSRWLDIAQNDTQVIRIDNSLESVESWLSDLPNKAVVAMEATSQYHLLVAKLAYSKGMIVYVLNPREVHHYARGVGRRHKSDKVDALLIRRYIEKENECLTVWIPPTKEQEKISILIKRRSHVIVQKQALTLSCKDIKHLSQELEVTLNALQKLADELERLILEEIKSNKQQTHLFALLKSIPGIGKLTAAFFTNLLGHAHFKNADQLVCFMGMDLQFFDSGLKCSKRKLSKRGSSEARRLLFNCARAASQGKLKPLYESYASRMNHTMSTVAVMRKLIKLIYGVWKSGISFEISKFQSPLLNNA

SEQ ID NO: 48003 - protein, 428 aa, unidentified
MIANSAAAPRGTFVAIDVAKLVHEVLVEPSTGRRQRWRVRNCLPDFVALRDRLHAFQPPVLIGFEATGNYHRPLTYYLSQCGFELRLLSSLAVARTRDALYNSWDKNDPKDTYVLLHLLKTGVTQRYHDPLVHAMNDLQELAQTHYQISLRKVQVQHSIMTHYLPLYFPEVERYYTNSRAQWFTQLLHRFPCPTAITRYSQDAFEQEAWTVVGRKVNTRGFLADLYATASQSIGLAVAEDSEAIQMFRVMLAEHQHLCATRAAIEHQADQALQSHPDYHRLRTLPGVGPILALTILAEAGDLRRFPHHRQFLKFCGFDLSTQQSGQFRGTSRLSKHGNARLRYAFWMAANGAVRMRQNTFREKYARYIKSDPQNPDRKRKALCAVAAKVARVAHGLIKTGSDYRPYFEALPPSGVLRSRGPSRQVLTS

SEQ ID NO: 48004 - protein, 370 aa, unidentified
MESIYYIGLDVHKKSIAYCIKTVTGQIVCQGMVKAERRSLRKWLEDIPGSWVGAMEATMFTGWIYDFLKPYAVELKVAHPAMLKAITAAKKKNDRADAEKLADLLRVNLLPECTMMSEELRELRRILRYRNLIVRTASKMKNKISGLLMEVGAVYDKRKLHGKRYFGQLLERVEDVPESVKDLLKLSRSSMELFEAVQKKLLKTLREDSLISKRVELLRSISGVGEVMALTWVLEIGDPKRFSNSGQAISYCGLCSAQHESAGKEHRGPISKKRNKYLQSMLIEAANLAPYWNPQLGILYEKELTRGNRNRATLAVARKLVIYMLAVDRRGKPFMTENVVISSESGLNGSRQLSPFRPHLQYLKEQKVFR

SEQ ID NO: 48005 - protein, 448 aa, unidentified
MQVVYERCCGLDVHKKVVVACLITLTAKGQRHKEIRSFGTMTRDLLMLLDWLRAAECTHIAMESTGVYWRPIFNILEGEMTVLLVNAAHIKAVPGRKTDIKDAEWIADLLQHGLLRPSFIPPAPQRELRELTRYRSSLVADCARIINRFQKVLEDTNLKIASVVTDVTGVSARDILRAYLSGEETDPWELANLARGSLRGKQVQLAQAMVGEVKEHHRFLLLQQMALIEILEGQIAEFDQKIAERIEQDEEELETKQPLSSQEQPEATIEASSPSVVRQGLEGYAKALARLDRIPGINRRVAEIVLAEIGINMEHFPSDGHLASWAGMCPGSKVSAGKRLSGKTTKGSAWLRAALLEAAHGASHSKHSYLGEQYRRLARRIGKKKALVAVAHSILVIIYHVLKEETTYQELGSTYFEERERDAVKRRALRSLERLGYDVSLQEKGAVA

SEQ ID NO: 48006 - protein, 343 aa, unidentified
MKHYIGLDVSMKRTFICAMSEEGKVVHEGSEVTDPHLVADYLFKLGMKEMIVGFESGSLTPYLLRGFKEKGIDARCMDARKLSPILALKVNKTDKNDARGIAEALRAGMYTAVYCKPEESINRAILLTARRALVQQQTDLKNSVRGLLKGYGVRLGSISAKKFGAAVRKKLEAHEEIVQLSIDCLIEAFDKLVEEIEKLDKKMLQIAAQDREVQRLMTVPGIGPVTALTYKAEIFDAGRFKKSRTVGAYLGMTPTQYASGETQRQGKTSKCGSKELRFLLVEAGIVILTRSKKWSKLRAWGQKIMRKKGLKKAAVAVGRKLAVIMHRMMVEEKDFIYGEPKAA

SEQ ID NO: 48007 - protein, 409 aa, unidentified
MMYFVGLDWAAREHAVCVADGRGAVVAQFTVAHTAAGMADLAARLVKVAPAAELRIAIERPTGLVVDTLVEGKFAVVPIHPNVVKAARPRYSAAQGKTDLGDAYLLADLLRTDGHRFRTLVPLSDETKALRGLVRVRDDLVGQRVATANQLRCLLDQFWPGAAEIFADVDSPIALEFLDRYPTSQSAASLGEKRMAAFMARHSYTGRRTAAELVQRLRSAPPSVAGELEAEAKGECVRALVAVLRPLVAQLATLSAAIEHAVDAHPDGKIVTPLFRSGRICAAQLLAEIGDDRARFVSADHLAAEGGAAPVTRESGKHRAVTFRWACNMHLRRALSTLADTTRHTNPWARSIYQRARDRGHAHPHAIRILARAWCRVIWTCWQQRTPYDPTKHRAAHQFTLHLVDQEAA

SEQ ID NO: 48008 - protein, 316 aa, unidentified
MSEKLQESFVGIDVSKNSLDLRIEPVGQSLQVAYDDTGVSEICQRLTEVSPTLIVMEATGGLETRLASELAAQGLPVAVINPRQARDFAKATGQLAKTDLVDAGVLAAFAQAIRPAVRPLKDADTRELGDLVTRRRQLVAMRVQETLRLGTANSKALQKNLKSHITWLDKQIAKLDDELIQRLRNSGVWKAKDDLLRTVPGVGAVTSLTMLAKCPELGQLNRREIAKLTGIAPLANDSGKHRGKRFIWGGRADVRAVLYMATISAIRCNPAIKAFAERLKQTGKPAKVVIVACMRKLLTIMNAMIKSNTPWTPKIA

SEQ ID NO: 48009 - protein, 348 aa, unidentified
MTVYCGVDFHARKQTISYLTIEDGEVQQTELHHEQDDIRGFYAKLRNLGPVIVGFETSGYAAWFEEMLEELGCEIWIGMPAAIRRQARRRQKNDRRDADLILELMLRGDFPRLHRYTPASREVLQQLRYRHRLVKLRTIVVNSLQYMALSRGVSLRTKLLTGRGQERMKQLSLPDHLAKQRDEMCELLQELTQKIETAESWLDLKAKQDARVERLRTHPGIGPLTGLCLVYTLEQVERFANPRKVTAYVGFDPVEDSSGERQRIGAISKQGSRLLRFLLVEAGQVAVRTDPDLKAAYWRVQLRRNHQKAKVAVARRLLVRAFIMLRDEIDYAEFQRRGVAARSTRRTA

SEQ ID NO: 48010 - protein, 451 aa, unidentified
MSRPQVIDDEEHERVHDRVAAVDVAKDTGMVCTRTPHPSRPGARRSTVWTVKARMKAIRTLGRQLKKDGIEIVTLESTSDYWRIWFFVLEACGLAVQLVNAAQARNLPGRPKTDKLDAQWLARLTEMGLLRPSFVPPAAIRALRDYTRARTRLVQERTRCWQRLEKLLESALVKVSSVASKLTTESAKDMVKAMIAGQRDPRTLAALARGRMKAKHDDLVEALDGMFDDHHGELAQMLLDQIAFCDTRIGQLTARITGSVAAMPEAWGVDGDGTTGPDAGTGPDAAVLPAAARLAEIPGISPDLARSIIAETGLDMSRFPTAAHLVSWAGLCPAARQSGPRTRNGKKGQGNGYLRGSLGQAAIGAARTNTFLGERYWRIARRRGKAKAQVAVARSILIIIWHLLADPAARYTDLGPGYYQARTDKDKKIKNHIRQIEALLGHPITITPEAA

SEQ ID NO: 48011 - protein, 341 aa, unidentified
MNNSMTIGIDLAKTLFFLVVLSPSGKQLQRKKLRRPQVLPYLANQPQGVVALEACSGAHYWAREIQALGHDVKLLPPQHIKAYLRRQKNDYNDAEAIAEAAQHGRIRPVAPKTVDQLLDQNLHRLRKALVADQTRLINRTRALLAEHGVIIPKGKTRFGSTVAALLEDGENGLPWRLRQLLDRQYQQYCAWEKELVWYQQEIESQVEQDEVCQNLISVPGFGPISSSAFRSWIGNGQQFSCGRDAAAALGLVPRQHSTGGKTILGSITKSGDRYLRALLIHGARAVIRYASKHNDRLRQWVLSLVERRGYNKAAVALANKMARIGWAVVARSERYQPSPCQ

SEQ ID NO: 48012 - protein, 436 aa, unidentified
MPLSAMYCVRRCPVKPAIEPSFTALVGIDWSDRKHDFCLQAAGSSQREFGVLVHSPEAIALWAKALYRRFGGPIAVCLEIAKGPLVHALQRHEFIVLFPVNPATLAKYREAFVPSRAKDDPTDAQLALELLLRHRDKLQPLQPQGPDMRTLATLVEQRRLLVGDKTRITNRLGGTLKEYFPQALDWFEDRDTVLFCDFLQRWPSLKHAKRARQATLRSFFSAHNLRRASLIEERIHGIRSATALTDDPAVLGPHQLLVQALVAQLRVTLQAIDHFDAEITAVAKRLPDYALFAALPGAGSILAPRLLVAFGEQRERYASAAQLQQYAGVAPVLERSGNKCWVHWRLACPTFLRQTFVEWAGSTIPRSFWASVYYHRQRAKGSSHQAAVRALAYKWIRILYRCWQTRTPYDESVYLLALKHRGSPLIAAMATTPQNT

SEQ ID NO: 48013 - protein, 393 aa, unidentified
MICVGIDVAKDKHDCFILSSEGEVLADVFTIQNNAEGFDMLLQTIRRCARPEDKIKVGLEATGHYSYNILGFLLDKGLDTYVINPLHTNLYRKSLSLRKTKTDRVDARTIAAMLMSDVDLKPYTDTAYHNEELKSLTRYRFDKVRERAKLKQSVSRLVTILFPELEKLVPSLHLASVYALLIEFPGAKQVAGAHLTHLKAILSDASKGRYGRDMAVTLRDAARCSVGSVMPAKSLELQHTIRLIRELDAEIEDIETAIQSMMDEMQSPITTIPGIGVRMGAMILAEIGDFSRFDSPDKILAYAGMSPSTYQSGQLSLSGTYSHMEKRGSRYLRYALYNATKYVCLWDPAFAAYLAKKRGEGKHYNVALSHAAKKLVRLICALEKSQQSYRNAA

SEQ ID NO: 48014 - protein, 458 aa, unidentified
MVQTKRPRSRRDMPAVHLDAAAIDVGATMHVVAVPPDRDPEPVRTFGTFTADLHRLADWLRACRIKSVVMESTGVYWIPIFEILEQTGFDVQLVNARDAKHVPGRKTDVSDAEWLQRLHEHGLLRGSFQPKGEVKALRSYLRQRERLLDSAATYIQHMQKALTQMNVQLHHVVSDITGVTGMRIVRAIVAGERDAATLAAFRDSRCKEPVETIREALIGNYREEHVFALTQALELYDIHQKKVAECDKRIETVLVQLKATRPTPAKPLPAPRHKTKQSNAPNFAARDALYAVLGIDLTQIHGLGPYLALKLVGECGTDLSAWPSAKHFTSWLSLAPRNKISGGKILSSATRRSNNRAASLLRLAAVTVGRTETALGAFFRRLSARIGKAKAITATARKIAVLFYNALRHGMKYTDPGAAYYEERYRQRVLSNLQRRAKAFGYVLQAAAPQAPQAVGVS

SEQ ID NO: 48015 - protein, 341 aa, unidentified
MKVMAGIDLHSNNAMCGLMDMEGKRLAHRKVACSLEEVLKVFEPFRKQIDTVAVESTYNWYWLVDGLMDRGYKVALANPAQIDQYDGLKHTDDKSDVFFLTELLRLGILPTGYIYDRQTRPVRDLLRRRLSLVRQRTALILSFKNLHVRNTGVDLGLARVKSLGVLEGKDLFEHPCDRLIAEEQLTVMRQLDRSIERIEKAVLKVVKELPCYRRLQTIPGIGMILGLTITLETGEIKRFATAGDYASYCRCVKSQRLSNQKSKGKNNRKCGNKYLAWAFVEAANCALRSDGQCRKFYERKKAQRNGIVGIKALACKLSKAAWHIMSRGVDFKSEQVFGGRT

SEQ ID NO: 48016 - protein, 331 aa, unidentified
MNFIGMDIHKQFTVAVVKDEQGNELAKEKFENNKENFSEFLKVFPKENTKIVMESTCVWEYIFEILEKMEYDVKLSNPSKTKAIAYARIKTDSIDASTLADLLRANLVAESYIPPKEIRRLREIVRERKTFVKQSTQSKNKIHAMLIRRGIKLPTKILGKKALKLISASIQEDDLLEHYINMLWYNKQEVNFIEDKIQKIASQNEEAKLLMTIPGIAETSAMEIIAEIGEIKRFPTADKLCSYAGLVPSIKQSGNSLRFGRLIQQSSKNLKCTLINACWTAVRTRESNNLQEFYKRLAKTKKKQKAICATARKLCCVIYAMLNNKEEFRYS

SEQ ID NO: 48017 - protein, 356 aa, unidentified
MSNRKYIALDVHKATCQASVRNDVGRVIARSTFETNRRGIINFLASQPGESWVAFEEGTHANWLYDIIQPRVHQVIVCNPRKSKQHGNKSDRIDADRLSELLRNGSLSPVYHGERSTRTIQELGRSYERLTEDAVRIKNRVKAIYRGRGIECEGAGVFDPAQRSEWLKKLNQSGARRRAERLLRELEAIEPLQEEAERELIAEGRKYRATKILRTIPGIGPLRAAMLVAIVMTPFRFRTKRQFWAYAGLSLVTRSSADHSFVEGELHRSRKAPLVLGLNFDFNHTLKGIFKSAAVSAATRGGFQPYFQERVQQGQAANLVMLTIARKIASVTLALWKKGEQYDPVKHGLEHNDSTE

SEQ ID NO: 48018 - protein, 462 aa, unidentified
MNRKMQAGKSTKGSAQKKVDWKTLEIVHPDAAGIDVGGSEHWVAISPDRDPEPVRRFGCFTVDLREMARWLIDKGVRSVALQSTGVYWMPVLEVLEQHGIEVFLVNAQHTKNVPGRKSDVQECQWLLKLHAFGLLNNSFQPNDEIRVARSLWRHRGDLVAEAGSAVQRMQKALTEMNVQLSNVLSDLSGVSGMNIVQAILEGERDPQALAALVMPGVKATPEDIAKSLEGNWREELLFVLRQHLELYRIYQEKIADCDLQLRKHLESLGSKVAGQSQPLGPRPTGKKIARNAPAFDLRSELYRITGIDWSQINGIDVLTAQTVIAEVGAELSAFASEKHFASWLGLCPTNEQSGGKILNRRTRKVVNRATVAFRNAARTLLRSQSYLGAQYRRLRTRLGAPKAITAMARKLACLFYRLMKHGQQYVDKGTAYYEAKYREQQIRLLTKRAQKLGLQVVIPQTA

SEQ ID NO: 48019 - protein, 434 aa, unidentified
MHGIVGLDVGSDQVSVCVLDERGQELIRRHEIANSAVGADQLVTRLAALAAEQSLTGYRLGLEASGMYWWPLAVHLATAAPLADSQVYALNPKLVKDFRSSVNSGIKTDRHDAHLIAEWVRFGRRLPAPFAVDWRYEPLRRLTRLRHHLAQSLAREKNYFLTMLFLPFSGFSAAHAFSDPFGPTSWALLEDFTTEDLAATPIEELVTYLQAHGRRQFADPAATATTLQRAAKDSYRLHRAMHDPMRLVLGTTRATITTLQQQLRVVDRTIARELAGIEQTLSTVPGLGPVWTAALVAEIGMIHRFSTEAALAQYAGLSWTVNQSGHFQAEDTRLTKQGNQYLRYALVEAANSVREHCPEYQAYYAAKKAETLKHAHHRALVLTARKLVRLVDALLRTGQCYQSPEQRTSRKEANQPRMQRSARQGRTQPTSASA

SEQ ID NO: 48020 - protein, 331 aa, unidentified
MKQTTVFESVGVDVSSQELHAWFRSSDRDGVHQVYENTAEGIIQMINFLGSRGQGSPIVMESTGRYHYLCATMLNENGFYVSVINPLLVKKYQQSRIRKTKTDKIDANILAEVGAKEKELPRFVCSREDIHLRQKISLICSLEKTLQKCSASMSNYEKSLEKTKGELSPDEATVKEIIEQLKKQKDKLEKEVVRLISVQPQHVESFGLLKTIPGVSPFMACLALFFYSFDKGKKSRQWVAYTGMDITVLESGNWKGHGHLAKRGNKYLRKRWFSAAWGAMMHSEEFGVYYKHLKEEGRAHTEALNIIARKLVRITHHIMKTKQPFNPGKAF

SEQ ID NO: 48021 - protein, 409 aa, unidentified
MRLFVGLDVSSFDMKVCILNGEGEKLDSFSVNNDLPGATALKERLLQRIANKEVETFKIGLESTSVYSFHPSMFLHYDKDLQRLGAKVFLMNPKQIANFKKSYSDMDKTDEIDAFIIADYLRFGRNQMSIVKESQYVALQQLTRSRYQLVRMLTKEKQHFLQHLSYKCNTFSQEVNSSTFGNAMMELFLEKFSLEELADMPLEELAEFLQTKGKNRFGDPKCVASTIQKAVRSSYRLDKVVEDSIDVLLGTSIAVIRTYQQQIKELEKSIKRIMDGLSQTLESIHGIGPVFAAGIIAEIGQIERFDDETKIAKYAGLYWRTHQSGRFIAENTSLSRNGNHYLRYYLVEAANSVRRHISDYQEYYVKKYNEVPKHQHKRALVLTARKLVRLVDALLRSHQLFTPERCVKV

SEQ ID NO: 48022 - protein, 322 aa, unidentified
MSVSVLGIDIAKQKFDVALLVDGKTKHKTCKNSVEGFETLMIWLEKQGVQKVHACLEATGNYGEELAIYLHETGHMVSIVNPVRIKGFGQSELIRTKTDKIDAALIARFCLAMKPGPWSPPSPKIRSLRALVRRVDSLIDMRTQEKNRISTAYESVIPLIKGHIDYLNKEIEKIRDQIADLIDQDPNLRNKKDLLVSIPAIGTATIPHILAELDDLGKFNNVRELVAFIGLAPRETLSGSSIKGKPRLCKIGHARLRKALYMPALVSIQCNPVMIAFYNRLKEKGKNGKVIVCAIMRKLVHLIFGILKSGKKYDPNYKPALA

SEQ ID NO: 48023 - protein, 436 aa, unidentified
MPNPTDPTTAPSAPPSSLPPGEFAAILGLDWGDQEHAIALRSSGASSPVENTVLKHSPEILHAWLEKLGQRFNHQAVAVAVEASKGAIVAALLEHPWLIIYPVHPSTSRRFSTAFTPSGAKNDMPDAQILLELLEHHRGRLRALVAQEPPTRRVALLVEARRKLVDRRTLLSNQLTSLLKNYYPQALELVGDSLCAPLGLDFLDRWPELIELQRARPQTLRDFYHTHQVRREEVIEARLALVQKACPLSGDRALCDVSILQMRALVAEVRTINTHLAKAEEAIEAAFCAHPDAGIFRSMPGAGKAMAPRLCVLFGVDRNRWPSAEELQKYYGIAPVTEKSGRQHRVHWRWSAPTFGRQSLVEWAGQTVRVCPWAKAYYLQQKQKQKGHSAILRSLAFKWLRILWRCWRDKKPYNDELYMKHLHERNAPLLAFLPAA

SEQ ID NO: 48024 - protein, 351 aa, unidentified
MKPDPTAQPKLFIGIDIHKRSWKVHCATDLFAGKSFSMPPRPEVLIEYVNKHFPDHQVTTAYEAGCCGYYADRSFETYGWISLVVNPADIHRKGKERFTKTDKIDAQLISRELKDGRLDSIHIPDIEREQLRSLFRRRNDLVKDFRRIKSPIKMQLLYFGVAVPEEFDNDHWSHKFRGWIDGLSFDFPSARGTLDSRMRSFRFIDKELRDVSSEIRAYCRKHYKKDYYLLRSVPGIGGIVASGIICELGDLRRFNSIKHLAGYVGLAPGIHQSGDNQKSTGITMRAHRLMRSYFIEASWQAIRTDPVMQVYYRKHLGKDVKSIIIKVARKLLSRTLAVIKTETPYAIGVIE

SEQ ID NO: 48025 - protein, 380 aa, unidentified
MNDHIAAFVAFDTSKLRNAVAIAEEGRTGEVRFFGEIDNTAEATARLVKKLAAKYERLAFCYEAGPTGYGLYRQITALGHECVVAAPSLIPKKPGDRVKTNRRDALDLAKLLRAGQLTAVWVSDPRHEAMRDLTRARGAAVQDARMKGQQVSAFLLRLGRHYPGKTAWTKKHMSWLASQQFDHPEQRIAFEEMLLAVRQAQERIARLEEAIRLAVPDWSLAEVVQALMAMRGIDMVTATAFLAEIGDLSRFRSPRELMAYLGLVPSERSTGERVERGPITKAGNRRARRLLIESAWAYRHPPRVGKDKQAKVAAAPQAVREIAWKAQHRLYARYRALTRNGKLKTVAITAMARELAAFIWAISREIANTRGAAAQQGIRG

SEQ ID NO: 48026 - protein, 317 aa, unidentified
MAEVTFPQLIQRACGIDVHLKVVVATIDGLGITRETRSFKTFTSSLNELKEWLLSNGITHVAMESTGVYWKPVYKVLEGSIPNVWIVNARHIKNVPGHKTDKMDSEWICKLLLAGLLKPSYIPPKEQRQLRDLTRYRNKLIGHIASEKNRSMRILEDCNIKLSSVVSNTSGVTATALIDMLCEGKKLTLEDIESVYHGRLAASPQELLEACTGFVEEHHVYMLQMIRKDIEQTQKLIDDLSTRIKNLLSKYDNALELLKEIPGFNTKVVEDLVSEIGLDMSHFPSEKHLSSWAGLSPGNNESAGKKKVQESLTETNK

SEQ ID NO: 48027 - protein, 325 aa, unidentified
MESKKLCCGIDVSHSKLDVCYQNNLGELFYLQVGNNNKGYSKILEHTGTNYHFVMEATGVYYIRLAFYLHQQGCKLSVVNALSIKRYIQMHLERNKSDKKDAAWICRYAIDQCPPYWEMPDSAYFESKQLYNTIREYTEQIKRFNNQLHSLKLLPVPSKDTIKSLERIKHQLEKEIDGLEQKLEAMLEKWQPAQLKSIGSIKGIGKRATAMLIVFTQGFKNTHSHRQLISFAGLSPTEYSSGSSIQGKPRIYKRGGKNLRDVLYMCSMNAIKTNTACKTLYERLRTNGKTGKQALIAVCNKLLKQVFAVVKNNSLYQPNYCSAKS

SEQ ID NO: 48028 - protein, 427 aa, unidentified
MKTTPPFDLVIGLDRSDRKADLHLLNRHTGAEQRQTVPTTPEALKAWADALRPSHPDDRVAICFEQPANNLIAFLTRYLWITLYPINPISLQKFRETCVVSRAKDDGKDAEYLARLLAAHHDRFQPWQPDTQQTRLLERLVVDRRSVVDHRTGLCNRLQAILKDYFPQALELAGDDLWRPLGTAFLKRWPTLQALQKARPDAIRKFYYAQGSRSEQLIRERLNRLAQAVPLTDDPALLESYALRVRLTVQELELVTRTIKLYDQKIAAVFAEHPDPYIFRNLPGAGPVFGPRLLTSLGTRREEYPKATHLQRASGIAPVTKQSGASKQVHRRYRCSVFFKQSIHEWAAESRFWSDWARAFYELKRAAGMNHHTAVRALAYKWLRVVWRCWQDRGVYQEAQYLAALKKHGSPVIDWLDKTRLQTSPAE

SEQ ID NO: 48029 - protein, 366 aa, unidentified
MSSVTPAAGPIHLGMDTSKNTIVVGILMPGDEVPVIDRIWNEEGSVRHLVGRLGDPAALRACYEAGPCGFELHRLLASMGVACDVVAPSLIPRRAGDRVKTDRRDASRLARLHRAGELTPVRVPSAAEEAVRDLVRVRAALLADRKRAQQRLTAMLLRHGRVWRSGSSWTQAHEQWIAGQRFEEPALAAALAHYRAGLDTRRAELDAIEAELAPWAGREPLAGPVARLGCYRGIAELHSLALAAEVVDWHRFPSARAFMGFTGLVPGEYSSGDKTRRGSITKAGSEPVRTALVEAAWAYRFKPAIGVTLRRRQRGAEPGTLARSWKAQRHLYAKYKAMTARGKPPAVAVTAVARELAGFVWAEMTS

SEQ ID NO: 48030 - protein, 410 aa, unidentified
MTTISIAQTETVLAAIDIAKARHEVLIAIPGKARRRKLTVLNRQEDFNRLIQALTEYGQTVRVAFEATGNYHRALAYRLCVAGFDVKLVSSVALARTREALNNSWDKNDPKDAQVILHMMQIGNEQFYHDPLLSGMNDLQELSKTHDIVSRSKTALWHRILTHYLPLYWPEAERFHRSSRSDWFFAFLERYPSPHFISAMDQDTFIADAWEVVGRKVSKERLLADIYQTAKASVGLPIAQGSDAARMFRMVLAEGRSLIAQRNAIEDRAVDLLKHHRDYQLLTSIPGIGPINALTILAEAGDLRRFGHHRQFLKFCGMDLATIQSGTFRGQTKLSKYGNARLRRTLWMAGQVAILQKTNSFRDKFERYIARDRQNLHLRRKAYTAIAAKMARTVHGIIKRGEPYRPFFEG

SEQ ID NO: 48031 - protein, 340 aa, unidentified
MDKRYIGIDLHRNRFTCCIRLENERTYVTEWELEDLGKFVKKLRPSDEIAVEITGNTRLFYDAVAPHVARVVVVNTNQFKVICQSVKKTDPHDARALALYLSKDMLPEVRMKDKEHGQLASLTQTRDTLVKLRTALKNKINNILSARGLNLAKEALSSEKKLDEVLSLPFDEIVRIELRVIVEQIRSLNKSIAELEKTIGEEGSKLEGHKGLSSIKGIGKITGAILLSVIGDVNDFADEGRLASYFGIVPRVSNSNETEHSGRIHKRGSKLGRTALVQSALIAANYSPYLKRFYEQVKARRGAGKAIIALARKFLGIIYRTLKNKWVFEDFPNFVLAEAA

SEQ ID NO: 48032 - protein, 426 aa, unidentified
MRVLYDRVAAIDVHKDMVKVAIRVPGAKRGTRKTDVLEFRTFYGVLQAMARELRGRGVTHVVMEASGVYTDPVYYALRELDFTEVMVINPAHAKALKGHKTDAKDAIRLLDLYECGLLSGSYMPSEDLREVRDLARYRMKTVQARTSEIQRLQKTLETAGIKLSSVVSDVTGGSATAMIEALISGERRGSVMAGLAQTRLRTAGKMADLSMALAGRFTDHHALMCRLHRDRITIFDDAVKDLDAKIAPLVARYAREAELLKTLPGFGDVIVAGWLGAIGPAPYQHFATASRLASWATICPGNYMSARKSKGGRTGDGGAYIKPLLIQAAWAAVRVPGRLQARFGRLVRKFGGPRNKGARKRAITAIAHTLLKIAYSVLKTGKPYADLGADFYTRRESPDARQDYLMRQLQKLNPGCVITITPAEAA

SEQ ID NO: 48033 - protein, 354 aa, unidentified
MKRTTKYAALDVHQTTTSASVREDGGRVIARAVIPTEEAAIVEFFRGMRGSIHVAFEEGTQAQWLHDLLVPLVDRVVVCDRRGKSRQGNKGDQVDADELSELLRRGGLRAVYHGSQDRATLKELARTYQNVVEDATRVMQRLKALFRARAIKTPGKRIYDPKNRSEWLGKLENRGLRYRAETLFAELDVLRELRPRVKAAMLAEARRDSAWSVLLSISYLGPVRVALLLATLRTPWRFRTKRNLWAYSGLAVVTCSSADYALVDGRPVRRRRAPLTRGLNQNHNRVAKEIFKSAATAATGRTGPLRDFYDAMLARGMREELARVTLARKLAALTLRLWKTGERYDPTKLTMQAR

SEQ ID NO: 48034 - protein, 309 aa, unidentified
MKQSVVYIGIDVAKAHLDVAWAQTVRRLPNQRSGHAALIRWIKQSTTPVQLICEASGGYEQALLESLEKSAVKVTLVQAVRVRQYARASGILAKTDKIDAKVLAAFGSAIKPQPMSPRSVEQKRLRQYEAQRRHLSRILVAEENRLAQLSCAELRTLSRSLMSKIKNQIETLDRRIGELIAQDQTLWEKAQKLTAISGVGARTAALLLAQMPELGQLNRRQAAALAGLAPFNHDSGSIRGKRAIFGGRRALRSGLYMAALSAARFNPILSRFYQRLRAKGKPHKLALTAVMRKLLLALNHSLKPEPILA

SEQ ID NO: 48035 - protein, 410 aa, unidentified
MERVIERCCGLDVHKKTVVACVRVPGRTSAREQQVRTFGTTTAELMALRDWLGGYGVTHVAMESTGVYWKPIFYVLEDAFTCVLANAAQIAQVPGRKTDVKDCAWIAQLLEHGLVRGSFVPPAPIRELRDLTRYRAALIGEHTRETNRLQKVLEDAGIKLASVASDVLGVSGRAMLDALTQGTHDPDVLADLARGALRRKLAALRQALTGRFRPHHAFLVSQVLAHLDYLDEVIEALSTHLDEVMAPFAEEVSRLDTIPGVNKRTAEILIAEIGVDMSVFPTAGHLASWAGLCPGNNESAGKHRSGKIRKGNRWLRGALIQAALAGGTRATKGAFAARYRRVMRHRGHKKAVVAVAHAMLVAAYHLLARHTTYHEPGADYYERRHAERVRQRAVQLLERQGYRVTLEPAA

SEQ ID NO: 48036 - protein, 410 aa, unidentified
MAERFVGIDVALREHRIAVLDRDGEAVGQSFTIAASKDGVATLLRTLDARAATAAQTLIGLEASGHLWENLEAALVSTGYRVIVLNPLQTRRYRDVVRRKAKTDDIDAHVIAGLLRSGAAQASYVPDEQIQSLRELARLRARLMADRQDYLRQLVAQLDVVLPEHRAVLGDLLTARARGILAQFPTAQHLATANPRAIRRAAEDAGARGFSLDDATGVRDSARRSLYSGKAAAARAHVVRTLVSQLERLTSAIDEVDRAATALLPPSEPGTGPSDAELLQTIPGIGPQTAATLLGELGALTRFTDARALVAYVGFYPVINESGDRAATPRLSRVGSRIARHSLYLAAVNAVRRSGEWRTIYLRKKAQGKTAKQALVVVAVKLLHAVYAMLKHRQPYNPSRLLVAPATIGS

SEQ ID NO: 48037 - protein, 375 aa, unidentified
MNYNTVYVGMDVHKKSFSLCCYTNEKEQAEYPQKTAPHYSKVLNYLEAMRFHYGDDVLFICGYEAGCLGYTLYHELMDHNVKCILLAPTTIPQPTGRKKFKTDKRDAALIARCLAHHDYSPVHIPSEKDEQVKEYIRMRNDHKIALKKVKQQISAFCLRHGYRYDATVNQWTQAHLKWLRALKPEGLYLDILMEYLSTYDQLTDKIERMDRRIEELAGEPQYREGVKKLSCFLGIKTQTALSTMVEVGDFKRFSSAQRFAAYLGLVPGERSSSESQKRLGITKAGNSHIRTLLVEAAQSYTRGRVGFKSKALKERQYGNPADVIAYADKANERFRRKYYTMVLTKGKKVNVVKTAIARELACFIWGMMVGNLTER

SEQ ID NO: 48038 - protein, 367 aa, unidentified
MKQQTSATSETLIEGRNIIDFTGKTIYVGIDVHQKDYQVAKVYDGICLGNHRMAANSEALIEHLRSHYQGADFKCVYESCAWGFNLQRKLTAANMECMVVHAADVSTNDKERKRKTDKVDALKLARNLAAGELKAIHVPDETIQKERNLIRYRTRLVGDINRSKNRLKSLLKYQGIEIPAPYLKNNWSRNFMAWVEDQAAKDDLLKYRLLLMLEQMKLLRQLLLKIERKLGVLRKGKYESKAKLAMSVPGIGPLTAMLFLLEVGDVKRFKGFDTLNDFVGFCPDTASSGETDRNKGISARRHKQLRSALVEAAWQAIRIDPAMMNTYQMLTKRMKGSQAIIRIARKLLRRLRAVLLTGIEYQKGVVA

SEQ ID NO: 48039 - protein, 428 aa, unidentified
MEQQDGIRLEQFRQLKKEIRGSERHLVVGIDVSKDRHHAFFRTVMGKTLLKRLVFENSCEGVTKLLDQVARVQLENGLSEVVFGLEPTGNYHKPLGEYLIRRLAQVVLVSGVAAHENRKTLDGRWDSNDPKDAANVADLVSQGKFLFYEYPDLRLRELRSLLALKRRLKRQEHGYRVRIRNHLVAKYFPELDRYFDQSEKYGLAIVRWCLDPRSLSGYQFEEFVRLVAPGRRGGEQNSRLRMILQMAQGSIGCEAGPAVKFEAELMVEGLRQIRLMIGDTDKQIQDLCLEFPEYEYLLSIPGFGPDVSSKVLGALGDPFRFENGRQVLKLAGWDLNAERSGKSAETARAVISKKGKADLRYALYQAALIASIKNQHFMVYYTNQLRGREREPGIKTKRRVKLAAKLLIIAWTLMKKKEPFNPDYLNLE

SEQ ID NO: 48040 - protein, 419 aa, unidentified
MKKVQNTSGYERYMALDIHREYILVGAWNKEKEWVLTPRRVSIVKFPEWAKKHIRAGDIVVLETTTNVWATYDIVAPLASRVLVANAAEVDEIAKARVKTDKEDLKRLLKLLIGGIVPEVWVPPVPVRELRAFVSYRHRLVKTSTMIRNRLQSLQHKHNLTAAGVSEAGLLDQVWWDEQKNISRLEKMQICQELALLREVEKLKAAVDEELERQSTGAVWGKPALQIMQLPGVGYIVAMTVLSAIGDISRFESARQLVGYAGIGAGVHDSGKTHKEKKITKKGRRELRWAMVEAAWRAVRMSPYWKEQYERYLRRLRKPNQAIVVIARKLLVAIWHVLSKEETDVHASEEDLAYKMLLLSWSLGEGARMGLTYKQFAKHALMKLGVEKDITRFVRKNVPRRLAPREEVMARMAELGLTV

SEQ ID NO: 48041 - protein, 416 aa, unidentified
MTNDKRWYAGVDWASESHHVFLTDDDGRKIGERVFRHGGEGLAEMAAWLMATSGAAEGPQIQIAIEVPHGPVVETLIEREFKVHAINPKQMDRFRDRFTLAGAKDDSRDAEVMASALRTDPRCFRLLAVADPIVIELREWSRIADDLAAERNRLTNRMREQLWRYFPAMLELEHDLGAEWFLDLWETVPTPDKAARIRRTTIAKLLKRNRIRRFDVAHVLAVLRKLPVKVAAGATEAASAHIATLVVRIRLVNRQLKQAHHQLDTLTARLIPTEEAEPGQRKQHDVEILASLPGVGRVVLATLLAEAFDALQRHDYAALRSLTGVAPVTKRSGKSCIVVRRQACHDRLANAMYHWARVAIQHDSRSRSKYSALRSRGHSHGRALRSVADRLLNVGCAMLKSRTLFNPSLSAPKTTC

SEQ ID NO: 48042 - protein, 348 aa, unidentified
MIVIGVDTHKRSHTFVAVDAATGGVLGERTILASDDGALAALRVAAALGDERVWAIEDCRHVSGRLERALVAAGERVIRIPPALTANARRSAREPGKSDRIDALAVAHTAVREGLDRFPAAFLDGQAMAIRLLCDYRDQLVAERTRAINTLRWHLLALDPELEASLRPSGLQGPRIRAKVARHLAKLGDGAQVKIAKGFLRRITEITRQELALRAEMNTLIAAHSPQLLAEHGCGTITAAILIGHTAGAERFPTDASFARHAGTAPIPASSGNTTRHRLHRGGDRQLNRALHTIALSRARTDPHTRAYLDRRAAEGKTKLEALRCLKRHLARHFWKLLYRNPQIPRLT

SEQ ID NO: 48043 - protein, 332 aa, unidentified
MMAQIELVVVGIDVAKDKVDACIRSLAQRQTFPSTTEGRRALIRWLRQHKVGKAAMEASGGYERDWAKALREAGLEVRVVDPKRVRSFAKSAGRLAKNDPIDAEMIAWFAETFVEAKSRADDAAREKLVQIVNARHSLLEMQTSLQNRSEQSTPEVVQKMQGRLLKQIAGEVAKLAAAIAAEVKATADFAELAAIIESVPGLGKTTSAGLIAAMPELGQVSNEVAAALLGVAPYDDDSGRRQGQRHIKGGRRRVRNLFYMACLGAATQHNPVLKAFYARLVAKGKEKKVALTACMRKLIVILNTMIARRQKWDVTRYKASDLARPLPSACPA

SEQ ID NO: 48044 - protein, 358 aa, unidentified
MNSKAFIPRDYDVFAGLDVDKKSISVTFTNHQGFIRSLRVPYSAEHLVNHVRKHFPDQKVAFAYEAGPTGYGLYDGIVAQDYPCLIASPSMIPKAPGQRVKTNRLDSRGISENLRGGQLKSIHVPAVLYRELRHLTQLRDTFVSAMVAMKQRIKSLLLMEGLEFPPAPAGSQWSFMVKAKLRKLPCSSTVRFELDQLLDSLEFNEKQIVKTTQQIRRLCQNDAELSQCIKYVMSVSGIGQIVASQLLARMGDWRELRNVRQLGAFLGLVPTENSTGERTDRGSITHSGDPRLRSKLIQAAWSAIRKDGELREFFRAVCQSHARPVASRVAIVAVARKLTVLISVVLMEQRPYGVRKKV

SEQ ID NO: 48045 - protein, 429 aa, unidentified
MNYNTQNAKIASITEKTLIIGIDVGSETHYARAFSWRNYEYSKKPFAFSNDEAGFAAFKEWMDDIAEKHGMEVIIPGMEPTGHYWLNLGAYLQEQGMKPVHVNPHHVKKSKELDDNNPSKNDRKDPKTIAGLVNEGRFSYPYIPTGIYAEIRNLSNLRIQTQEEITRIKNRMARWFSIYFPEIKDVYRNPDAVSGLMVIKQAPLPCDIRELGVEGVNKIWRDARLKGAGIKRATTLVTAAEHSIGNTEAPRSARKEIRNLLEDYEGYKKRMDELMEEIEKTLSEIPYIDKLMEINGIGIKTVSCFIAEVGDIGRFDNPKQVQKLAGYAIVADSSGKHNGESRISHRGRKRLRYALYEAAISVIGKNKEFKEIHSYYRTREKNPLKKMQSVIAVACKLIRIFYTILTKGVDYDGQKMLNDIVRPEIQPAA

SEQ ID NO: 48046 - protein, 415 aa, unidentified
MGRVVIGVDPDKLSVTIEARDNREMLRATGRFGTDARSHRQLPGVARQWPGRIWAVEGANGIGRPLAQRLLAEGERVLDVPARLAARARVSGTGQGRKTDPADACAIVMVALRDKGLREVSTDPGLMVLRMLCDRRDVLSRARTQALNRMHRLFLGLLPGGAPVKKPVSQYQALLATLRPRDLAGKTCRRMAAEELEDLHRLDAKLKAMKAELKAAVLATGSHLMDIHGIGPAGAARILAGVGDVARFPDRNHFASWTGTAPIDASSGQRIRHRLSRAGNRRPGHVLCIAGIVQLRHDTAGRACYRRKRAAGKTPMEAMRCLRRRLPDAVYRQLAADALVQEEASPGGHPGASLTSSAAGLSPDTGTSDQPLPGPAHPTLPPPPSKTPQPMAPAAAATRRRARGVNVSAPPDERR

SEQ ID NO: 48047 - protein, 345 aa, unidentified
MDQISRIGMDTSKHIFQLHGVNAAEVPVLRKKLRRKEMVTFFEKLAPTVIGIEACSASHQWARLLQSFGHSVKLIAPQLVKPYVKRGKNDAADAEALCEAMSRPTMRFVPVKTAEQQAALMLVGVRDRLIRNRTQLTNAIRGYAGEFGFTAAKGKAHLDPLLERIQADESLPALARELFAAQAKEYAQLQAQIDKVEARLMAWHRADECSRRLATIPGVGPIGAVLLKMKTPEPELFRSGRQFAAWVGLTPKDHSTAGKVRLGVITRAGDEGLRSVLVVGATAVIQHVRRGGRASPWLTELLKRKSPKLAAVALANKMARIAWKLMVTGENYAAKSAPAALVGAG

SEQ ID NO: 48048 - protein, 360 aa, unidentified
MLYLGIDQHRKQLTVSVRNEAGDVVLRRQVSTVWERVRAFFERLREQAEVEGGFVAIVEVCGFNPWLLKLLGEYGCRDTVLIQVEKRSKKKTDRRDAHQLSGLLWVNRQRLLAGQKVEGVRRVAPPTERDAEDRQLTALRQRVSQLRTRTINKVKHLLRKHNLEQDQPAKGIGTKKTRKWLAALALGSIDRLEMNLLLEQWKLWDEQLDKLKLEIRRRQANSPTAAVIATIPGCAAYGSLALASRIGVIERFPRPSSLANYWGLTPGCRNSGEVTDRLGSITKQGSAMARFILGQMVLHVLRRDGAMRAWYSGIKKRRGSKIARVAVMRRLATIIWHMIQRHEPYKIARPSPRKVRSKAT

SEQ ID NO: 48049 - protein, 447 aa, unidentified
MSCISILYRYEAVSALKELKKCPWGIEVKHTKDVKMHYYVGIDIAKSFHVACVVNQEDKVIKKSLKFNNDESGFEELLLLLNSIDEVSTFTIGMEATGIFFENLYLYLSEKGFNVILLNPYQTNRFREMDSMKKVKNDNIDALMIAALIKSGRYSKAYVSEDMYQSIKSLYRHKNNLLEEMKKHKRQISTLLAVVFPEMEQVIKDPFNVTGLALLEKYPTAKHYHHASVERILKTFRGIKGNNFNEEKASKLLELAKHSVYQGNGVDERAYVIKSHIRVIKLLQEELKELESEMLKLFNQQVSLDANEEQEVMDIIDNLRTIPGVSDKTIFALISECGDLGRFKNNSHLIGYLGLYPTLEQSGNKLSYGPIAKRGAKLAKKALYQAAIAAIRHNDELNKLFRDKVSQGRAKKEAVVIVARKLAHIILAIYKHNVVYDPQRVFQASVS

SEQ ID NO: 48050 - protein, 372 aa, unidentified
MNYNTVYVGMDVHKESFTLCSCKYEDEKASHYQRTPASYKNVLRYLAFLRTIYGEDTRFVCGYEAGCLGYSLYHQLENFNVECVILAPTTMLEQRSKRRIKTDKRDAEIIAKSLAQHNYSPVHIPTKMDNQTKEFIRMRDDHKAELKKIKQQILSFCLRQGYQYDGSGNWTAKHVKWLRSLKPAGLYKEILDEYLLTYTILTDKLNRLDQRIEELASKEEYKESVSKLTCFLGIKTHTALSVIVEVGDFQRFVSARKFAGYLGLVPGQHSSGDDRNGLGITKAGNTHVRRLLVESAQSYTRGKIGYKSRVLRSRQAGNSPQIINYADRANERLRRRYYQMVLKDGKKYNIAKIAVARELACFIWGMMTDNIY

SEQ ID NO: 48051 - protein, 450 aa, unidentified
MQQPQEVEDREGERTVARVAAVDVAKASGVVCTRVPREGEPGRFTTKVWPAAATTNAILELADHLAAAQIEKVVLESASDYWRPFFYLLEAAGLTVELVNARDVKNAPGRPKTDKLDAVWLAKLAGWGMLRPSFVPPAEIRQLRDYTRLRTDLTRERTRHWQRLGKLLEDALIKVTTVASRIGTMPVRDMIEAMIAGQRDPHKLADLARGRMKAKRAALIEALTGRFDDHHAELAAILLAQIDSLTRQAEALTARIEQLIPAIPAAQGVDPDGTTGPLAGRGPDAPVLPAIDRLEQIPGISRHAAQVIIAEVGLDMTRFPAAAHLVSWAHLCPRTIQSGASIRPGKTAKGNPYLKGVLGDAAAAAGKTSTFPGERYRRLAKRRGKLKALVAIARTLLVIIWHLLADRAARYDDLGDNYYITTINTDRKLRSHIRQIQALGYDVTITPAAA

SEQ ID NO: 48052 - protein, 340 aa, unidentified
MEYKRISVDTSKTVFTIHGIDSAERAITRLEVKRDKFLAFFEKLPPTEVAMEACGASYHWARQLTAMGHRPKLIAPQYVKPYVKRGKNDRNDAEAICEAAGRPNMRFVPVKTEAQQADAMALSVRDLLVRQRTQLVNALRGHAAEFGIVAPRGLDRIEGLRAKIAQREGLPAPAQRMLELLGTQIDGLDQQLAELDKQLLAHHKANPISKFLAGIPGVGMIAALTLATKIDATQFASGRHLAAWIGLTPKEHSTGGRQRLGGISREGNERLRQLLVVGAMAVIRHAKPGSKSASPWLLNLLERRPKKLAAVALANKMARIVWAMLTSGEAYRAPTCPKAA

SEQ ID NO: 48053 - protein, 390 aa, unidentified
MIYVGIDVSKFKHDCVIINSDGEILVDVFQVSNNLEGFTKLKNIILENVPNNDLQKIKVGLESTGHYSNNIINFIHQNSFPLTIFNPLSTNLFRKAQTLRKTKTDKIDAIFIATMLFSDNSKPYSPKSYHMTEIKSLARHRFRLIDYRAKLKISYTRLLDIVFPELASVIWSVHQNSAYSLLLELPTTRDISLCHLTKLTNILSKASRGKYGKDRATEIKELAKNSIGTCSLGVSFELQQTIRLIKNVDDEIKLLDKKVKVMLDELNSPIMSIPGISYVLASIILSEIGDIQCFSTPAKLLAFSGLEPSTHQSGKYTASHSKMVKRGSKYLRWALLQAALLTTNKTQTFKSYFQKKKSEGKHHIVCLSHVAKKLLRVIYHLENTNTAFID

SEQ ID NO: 48054 - protein, 337 aa, unidentified
MTLYCGIDLHANNSVISVIDDHDTVVYEKRHPNDLNAIRDILEGYRKHLLACVVESTYNWYWLVDGLMEAGFDVRLAHTGAIPQYAGIKHSNDQTDARHLAHLLRLGILPEGHIQPPEQRAIRDLLRRRLLLVRQKTLHHLSLQSLIVRQTGERLSANQIKALDNEAIADKLADPIRLGGQITHMARCWHEHAIEMLEDEVLKHLKPRAEYQLLNTIPGVGRILASTIVLETGSIERFPDPGHYASYARCVSTAKISNGKLKGRGNKRNGNKYLAWAFMEAAHYAAIWSPEIKRFYQKRQAKRHILIAKKTVANKLARACYHMLKRQEPFDVQRAFG

SEQ ID NO: 48055 - protein, 412 aa, unidentified
MRLFIGDDWAEDHHDVELMDEQGRRLAKARLPEGVAGIARLHRMVGEQLGEAAEDEATEVVVGIETDRGPWVGALLAAGYTVLAVNPLVAARYRERRAVSGAKSDAADAHMLADMVRTDGHQLRPVAGDSELAEAIKVVTRAHKTLIWERTRHTQRLRHALRDYFPAALVAFEDLDAPDTLELLAKAADPVSAARLSRSQIAAALKRARRRNVEAKAVRIQTALRAAHLGQPPTVTTAYAATVRALTAVLATVDAQVTALGQEIDAHFGQHPAAKIIVSQPGLGPIIGARVLAEFGDDPDRYTSAKARKNYAATSPITRASGKKRVVAARYVHNDRLIDALMAQASTAINTSPGARAYYDKQRARGAGYNAALRQVANRLVGILHGCLKHGTLYDEDTAWAHHANQDRQAAA

SEQ ID NO: 48056 - protein, 348 aa, unidentified
MAIVGGFDVHRAQITFDYVDRDSGQVTAGQIRPATRPALRNWLQRFEGRDDVAFAVEGCTGWRFVVEELVRAKVEPHLAEPADTANLRGRKKRAKTDRADARLLRELLAQQRLPESWAPPGHVLEVRTLGRLYVTLMDERRAWQQRIHAQLFHQGVPSVRALLTSDGRVALAKAELSPAGVQMLHTALAAVESLTLQILPLRAQLQTIGCNQPAVVALTQQYGIGLLSGTIIWAELGDCRRFSNSHQAVRFAGLDVTVWSSDTKRSAGRLARQGSPELRWALFEAAKCAARQTSPDHDYYQTVRDRLGGKRPALSVARKLVRRCYHALRDLGDQAWQASITNPSQAAA

SEQ ID NO: 48057 - protein, 349 aa, unidentified
MNRTTYGLDIAKNVMQLHWVDAETGEIGRKKLARAKLAEYFAQRLPVRVVMEACGSAHHWARVLGKLGHEVELLPAAQVRPFVRSNKDDAADARAIWLAAQQSDIRRVPLKSSEQQAVLALHRTRSHWISVRTATVNALRGLLYEFGVVLRGGRMAGLKALAEQRAHIDEQVPQIMRGLVDGQLQTLSQVQQRIDQLEHEIAAVQKQLNKAGELRQVPGIGVLGATALAATLGDGKAWHSGREFSASLGLVPAHSGTGGKVRTGHISKRGDPYLRTLLIHGARSVIEHAKDKPKWLQQMLARRPPNVVVVALANKMARTAWALVAHGRAYQREWQSAKPGCSTAQAAAA

SEQ ID NO: 48058 - protein, 410 aa, unidentified
MPLYCGIDWATAHHDVAVVDADGRVVARARVGSDAAGFAQLLTLLAEVGDSAEHPIPVGIETDRGLWVAALRETGRVIYPINPLAASRYRSRYAVSGAKSDATDAVLLANIVRTDAAAHRPLPADTELAGAIRVLARAQQDAVWARQQIGNQIRDLLKDFYPAAVVAFAELPSGGLARPDARTILAAAPTPTQAAALTPARLRRLLTKAGRRRNLDRDIERLRQVFTDSYLHQPPMVENAMGIQLSALLRQFDAACAAADELAEAAIAHFEQHPDAAIITSFPGLGNLTGARVLAEIGDDRARFADARGLKAFAGSAPITRASGKKTVVLHRHIKNRRLAAVGPMWALTSLRASPGARRHFDARRAAGDWNRQAQRHLFNKFLGQLHHCLQTGQLYNEHRAFPPPLPLAA

SEQ ID NO: 48059 - protein, 348 aa, unidentified
MSNISLIGIDLAKNIFQVCAEDKHGKQLFNRRFTRAKFKEFINQLPLCTVGMEACGTSHYWGRELIGKGHQVKLLNPRKVKAYVDRNKSDYRDAEAICEAMKSKRVVVIPVKSLAQQNLTHIHRSRSLVMKRRTQLTNHIRSQLAELGLICTQGFSPLKKLVSEVLAGEKLELCSDTLFVFQDLYSEWQQLNQRLKEYDKLIQRVAKDNPYTQRLMQLPGVAKITATAILAKVDSFERFNKGSAFGAWIGLTPKENSSANRKRLGKISKQGDRYLRTLMIQGAHSSIQSILLKDKQETAYHRWVQKTVNRIGKQKTAVALANKHARMIWAIMKHGRTVDLNHAESFAA

SEQ ID NO: 48060 - protein, 409 aa, unidentified
MRIIGLDIHRAFAEAVAWDDGKLRRLGRVDMRRELLTAFAEQLSQDDVVVVEATGNAAAVAAVITPHVKKVVIANPKQVRVIAHAKIKTDTIDAGVLAQLYASGFLPEVWIPDEPTQALRRQVTRRNQIVRQRSRLKNIIQSILHGHLIPSCPHADLCGPKGRAWLIDQVVPEDERLAIERHLREFDRLGEDLKVIERDLARSALADEGVKRLMTIPGVDMVVALAMKAAIGEITRFDEPQKLVSYLGLNPSVRQSGPGPAYHGRITKQGRGHARGMLVEAAWAAARAPGPLRAFFLRIRARRGQHVAAVATARKLTVIIWHLLTKGESYVWARASLHAKKLRDLELKAGQKPARGQKGAAYAYNIKSHREQERRWVEQAETAYARFVTGWNPRGPKKLRTGTETEVRR

SEQ ID NO: 48061 - protein, 370 aa, unidentified
MSQMHAVAGIDPHKNSATVAVIDSCGCQRGGRSFTIDAAGIEDLLSFLIDSELVIDRVGIEGSAFLGRPLVLALSAAGYDTREVQANRTAERRSRRRRAKTDNEDAEAIARETLAHVDLPPAGKRDTPDADWDALGAIRNWRESLVLQRVRLLTESEAVLVILPVAVRSALPATSRVLPQLKALGDGGIDLDGLDLADQIKVERLLASLTDIITLTTRIKDLDKKIPAVLDRLGCTLTTIHGIGAINAMDLLVEIGDPCRFTTEAQFARWCGAAPVALSSGEGDGLPRRHRLDLGGNRAVNSILHSIHVTQVRCHPPAKAYMARQLDKHKPKRSARRSHKRHLANVIIRQMWKDAGRLPATTNQALPAAA

SEQ ID NO: 48062 - protein, 338 aa, unidentified
MNSNVISIDLAKNIFQVCLFNEHRMPIINKKVTRANLFMTVMKLDADRIVMEACYSSNYWGREFQALGKKVDLIPPYQVKPFVVGNKNDANDAVAIGEASYRPKAVFVPVKSISQQDIQSLHRIRERAVKTRTAVANQMRGLLSEYGIILPKKMSVLRKEVPFVLEDAEQPLSTTARSFIADLYDELIVHDKQIKRQELALKALLKNDDNYQRVRQIPGIGPIVGSALISAVGDARQFKNGRKMSVWIGLTPLQHASGENSRMGGMSKRGNRTLRKLLIDGARSVITAVENKTDPLSIWIQTLLTRRPWAKVVVALANKLARMAWAVLAKQEQYCAPA

SEQ ID NO: 48063 - protein, 407 aa, unidentified
MATPDTVDVWIGLDVGKEFHHAVVLDDAGNALFDRRVANTETDLVKVFDAAATHGTTALAIDQPGSIAQLALALARQRDIPVAYIPGLVMRRAADLYPGEAKTDRRDAMIIGDTARTRRKQVHWLTIDDELLLQLRVLNGLDTDLAADSTRHANRLRDALTSISPALERAVGAKLSHAGVRDLLAKYPTPTALRSAGKARIRNTIAKRSPRLKVSVTERVWAALSQQTVTVPAEETVGRVIAELVVELDRIRDRRDRLEKEIEVVFLAHPLGPVLITMPGIGPRTGARTLAEIADGSGFANGSKLAAYAGLAPVTRQSGTSIKGERRSRRGNHRLKNALFLAAFASLSDPDSRAFYDRKRAEGKKHNAAIICLARRRCDVILAMLRTGEPYLTSTQLAERAETKKAA

SEQ ID NO: 48064 - protein, 445 aa, unidentified
MHYKRLLTFIDSVSSYLSVGLDVGADFTWMSIALPNGSFIGKPFKIVHSDPGSRDLAVAKIKEAQETYSLKSRCFLESTGIYHIPLLCFLRDKGFDCSVINPIITKNSTNISIRKLHNDKFDSKKAALVGLNVSLKTSIIPDDSVVDLRNLIRDYYYFKDLPSAVALKLTAELKVSFPAYAKIFSKVTTQSSLKLLSSYPLAEDMLTAPKDDIVKIIRSTARFGEAYALRKYDAIIAAAQDAAVFGRALPSNAVRIRLYIDTYQEYQKHLDALLKALHETVDQLQDTLIYDQICLLQSLRGIGFLTAVVLIAEMGDFKLFSSPKKLYAYFGLDPAVKQSGKLNGDKVHMSKRGSSLARRVLHMAALNNVKVDKGSGTPVNPVVYDYYTRKCSGKKKPVAMGAVMHKICNIIFAMLRDNKPFEVITPEEHCRRFAAEHPDKIQKAA

SEQ ID NO: 48065 - protein, 321 aa, unidentified
MSVVLGIDIAKKKFDVALLRDGKFRTKVFDNSPSGFTALKEWLVRQGADQVHACMEATGILFEGLATFLADEGHRVSVVNPLKIKAFGESLLTRTKTDKADARLIARFCEAMNPSPWQPDPPEIRQLKALGRRRDALVEMRTQESNRDGSSTPRVQESIRTVIGMLDREIEEITRKIKEHIDNHPDLKNKSNLLRSIPGIGDVSIEVILSETNGFANFDKVEQVVAYMGLSPREKSSGTSVRGKSCLCKTGNRRLRKILYMPALVAMRHNPLVQQLAQRLKEKSKHGKLIACACMKKLVHIMFGVIKNNQLFNPNYTPVCA

SEQ ID NO: 48066 - protein, 309 aa, unidentified
MKEQLVYLGVDIAKYYLDAAIGSEKRRFPNEAVGHRQLIRWINQMESAVQVICEPSGGYERALVRALVGAQLKVSLVQANRVRQFARAAGILAKTDRIDANVLCAFAQAMQPGTVSASQLEQEHLRELESQRRHLTHLMVMEQNRGARVSDICVRRLNRTLIQQIKKQIEQLDLLIKNHIEESAELSAKAQKLTAISGVGARTAALLLAQMPELGQLNRREVAALVGVAPFNRDSGKMRGKRAIYGGRRPVRHGLYMAALVAARHNPILRQFYLRLRAGGKPAKLALTATMRKLLIVLNSALKPDLSYA

SEQ ID NO: 48067 - protein, 313 aa, unidentified
MPQFVRSAGIDCGKRFLDVAVHGGETIRLRNEPVDHQRLVVWLKERGVTRVGLEASGGYERAVRDVLCAAGLEVHVLDPARVRHFAKAKGRRAKTDPIDARVIAEFTATLVDTPPVTVEPAREDLAKLIRARRLLVAKRADMAKAVKDLPDAARTAVETALASLSAAIEELEALIDRQAGADAALAGRVEALCGAPGIGRTTAVAVAVLLPELGRVSGRAIAALLGVAPYADDSGDRKGGRHIAGGREDVRQILYMSVLRAATQGQGVLRAFYVRLTGRGKPAKVALTACMHKMIVRLNAMLAADQTWTEEPA

SEQ ID NO: 48068 - protein, 455 aa, unidentified
MSMPKALPILNPKAVGIDVGSESFYVSIGGEAPEMFGTFTSEVYRLKDYLKGQECNTVAMEATGVYWLFIYSVLEEAGMEVIVVNGRHVRNLPGRKTDVSDCQWLATLHAHGLLRGGFVPPAGIRKLQDFQRLRGDHIIGAASQVQKMQQALERMNIKLHDVISSLTTISGLKVVRAIVAGERDPVRLLDLCDVQIKKKKADRVIESLRGTWAPEHIFALKQALLVWDFYQGLMQDCDVQMEAVLKELAAEANANQGEGENNQNPAAKTTKARGKNAPDIENLHQLLVKIAGADATELPGIAEDLFLQLITETGTDMTKWPTEKHFTAWTGNAPGSRQSGKRKGSVPRQRNRAGRLFCTAARSLIKSVDKGMGGFYRRLAARKGGMIAIQALARKLGLLYYRTLRYGLKFVEKGLKAYEERYAESQRRLLIKLARKQGFELVSMAGKELKDAISA

SEQ ID NO: 48069 - protein, 364 aa, unidentified
MAPPAARHRFALGLDVDLTYCVTAIQCDHGAIKPAQKLTRAQLLKWVTEQVAAGHAVHTVYEACGFGYTLHEALVAAGAQSLITTPVKLSPERRRKNDRLDARELCVRLARHLDGHAHELRPIRIPSAAERERRELGRQRNFWVREVRRLENHGRALRLEFEHATLPGGWAGPRTWPKLASECSAFVREQLEPVVAQIRAAKATIAQLTKQVEATVKAEEVPTGLGALTVGLVEGEVCDWQRFPGRKAIGSYTGCCPSEHSSGGVQRFGHIDRHGNAHVRTLLVEAVWRLLRWQPNWHARVKYREKLLHGASLKKKLAVALARQLAIDLWRWRTGRCSAADLGWTTERGTRSAECGTKPTAPAG

SEQ ID NO: 48070 - protein, 328 aa, unidentified
MMYVGLDVHKRVCYGTVMDGEGRVVKRGRFSNDPEGLEEFMEGIGEALVALEAGYCWQPLYDGLEEAGHDVRLAHPQKVKAIAEAKVKTDKIDSETLAHLLRAGLLPESYVPPRDIRELRDRVRRRAFLVRLRTTLKNRIHSELAKRGMRLGAPLFTREGVELLRGLGLEAVDQMLSVIEALDRQIARISGSLRRMSGEEPRARLLTTIPGVGYYIALLLISEIGDVRRFPDSEKLCSYAGLVPSVKRSGGSTRHGGITREGSRWMRWALTQAVHVHIRYDTNLTRFYQRLAERKTGQEAVIATARKMLKVVYWMLRDMKPYDPWNVG

SEQ ID NO: 48071 - protein, 345 aa, unidentified
MIIGCDFHPSWQQVSWVDTETGETGVRKLVHASGDAKLFYERLARPARIGMEATGNSQWFIELVEDLGHEVWIGDAAQIRASYVRKQKTDKRDADHILKLMMENRFPRLWTPDREQRDLRQLVLHRHNLVEMRSRVKNELQHLSLNKGMQRKHKLWSQAGQKLLRELPLKPWAACRREDLLGLLATMEEQIGRLDAAVQRAAEQHPQACLLMTQPGVGPNTALAYVLTIGDVSRFARSKQVASYLGLIPREESSGGRQKLGAITKQGNRMLRSLLVEAAQIAVRFDPGMRKQYLHRCHQKPKGVAKVAAARKLAVRLYWMLRTNVAYPEIVRIESGPRVPLVGAS

SEQ ID NO: 48072 - protein, 440 aa, unidentified
MNDLRVLDAHAALVDVGSEQMFVSIAGGSPEVFGTVTSQLHALRDWLLTHQVRSVAMEATGVYWLPLYAVLEAAGLEVLMVNGRQMRNLPGRKTDMQDCQWGATLHAHGLLHAGFVPPAHIRRLQDYLRLRADHITSAAAHVQHMQKALERMNVKLHHVISSLTGTSGLAVVRAILRGERNPEQLLALCDTQIQRAKAQRVKESLRGTWAEEHLFALRQALASWEHYQNQIAECDRQIEALLPASADDHTPPNTAVHTRPRKRAGPNAPEIPQLSEILTQMCGGQDLTRLPAHTEYSVLQIVSEVGTDLTKWATEKHFTAWTGLAPGSHQSGKRKGSVKRQRNRAGRMFCVMARALARSKDIALGGFYRRMAARRGGLIANIALARKLAVLFWRVMVKGTDYVEHGLAQYEAKVLQTKQRALRRLARQLGQQLVPSPVPT

SEQ ID NO: 48073 - protein, 350 aa, unidentified
MIVLGADMHKRSHTIAAVGSSTGELLGERTVQVGVRGFGALLVWARALGSERVWALEDCRHVSGSFERFLIERGERVLRVPTRLMAAARRSGRERGKSDSIDAIAVARAALREGLTKLPAAQLEGPELDLRLLVDHRERLVRQRVALNNTLQWHLHDLWPELTLPGSALFSTKWSTRIGRRLARAEQSTRVRIARDELRRLRELTQTIKSLEAEIAALVASIAPQLLSEPGFGPLTAAKLVGEIAGASRFASDAKLARSAGIAPIPVSSGKTNRHRLDRGGNRQINAAIHRIAITRARCHPETQTYLTRKTAEGKTNREAIRCLKRHLARRVWHLLQPATPNTLPTNPLT

SEQ ID NO: 48074 - protein, 332 aa, unidentified
MEMLAIDLGKQSFHLHGVDADGIVISRKVSRSKLENAVAELAPDIIAMEACASAHHWGRQFRSTGCQVRLINPRFVKAFVRGSKNDAIDAEAIYDAASRPTMRFVPVKTTEQQDLQSLHRVRERLVIQRTSLINHARGLLAEYGVILPKGPWRFRDQAPQAIDDADLSELAKMLFTDLLDQLRDVEMRLSKLDTELVRICREHDACRRLAALPGVGPVIATALVAAVNDGRHFRSGRELAAWIGLVPRQYTTGGKPRLGGIGRRANHYLRRQLIHGARAVISRLTGRDDRRSAWLKGIVARAGFNKALVALANKTARIAWVLLARKESYVPA

SEQ ID NO: 48075 - protein, 343 aa, unidentified
MNELKVRITREGSTKMTKHTTICAGIDTGKRKLDVAIEGRCEQLQVDNTPEGHELLLAWLRQHRVKRVGIEASGGYEQPVVIELRRKRFVVVVFQPTQVRAYAKFQLQRAKNDKIDAALIASCTAAVRKIHAAPDPRLLPFAERLTMIDQIGEDIARLKNRIESCRNAMIKRLWQEDIARLEKREKAEFTVLVALIRKHRDLARRLELIHSVDGIGLPTAVAILVRLPEIGEITREQAVALAGLAPYDDDSGERVGVRHIEGGRKRLRRALYTAALAASFRWNRQLIELYQRLTAAGKEHKRALVACARKMLIFANTVVARGTPWCDEPPAVNASIAGASSVS

SEQ ID NO: 48076 - protein, 326 aa, unidentified
MTHPVAASKAELPPASITIGIDVSKDHLDAARHPGGDTVRVANTRKGQTALLRWIGDIKAVARVVFEPTGPYHRTLEERLAAVGIPQVKVNPRQARRFAEATGKLAKTDRVDALMLARYGALLDPVTRPVRTDIQNRLAELVAARRSLMRDRTATLNRLKTLTIGLLQRHARHRLRQIEAQVTSLDAATDALVAEDAHLSRRRDVLASIPGLGTVTAHALLADMPELGMMEEGQAASLAGLAPITRQSGTWRGRSFIQGGRATVRQALYMPAIVAMRFNPDLKRVYDRLIAKGKHAKIAITAIMRKLVVLANALLHKDRLWTPKAA

SEQ ID NO: 48077 - protein, 378 aa, unidentified
MNRIIKIGMDVHTTNYTLCIFEPSFEHDGTVHCITQVKPEVKNIIRVIETFKKKHENEELNIVCGYEAGCLGYSLYHELKEKGIECVILAPTTMKTEKGGRKLKNDYRDAKMIAECLAYGGYSAVHVPTELDNSVKEFIRMRDDIKENLKSIKQQIIAFLTRNGKQFEGKSFWTRKHIDWINTISFSEPLLQDTLKEYMIEYNHLCDRIEILDKQIEEISLKEEYVEKVQQLQCLIGIKTHTALSLIVETSDFNRFKKGNMYSAYLGLIPGDDSSAGHENKLGITKAGNSHLRKLLVEAAQGYTRGKVGFKSKDLKSRQEKCSSEVVAYADRANERLRRKYYRMTLRGKRYNVAKTAIARELACFVWGIMTDHIDLCN

SEQ ID NO: 48078 - protein, 400 aa, unidentified
MLSIGIDVSKGKSTVCGMKPGGEIVYTPFEVQHTREGMSELVSLLRGSGEEVRAVLESTGSYHCPVVAALLENGIFVSVVNSLRMKRFCSQSIRKVKTDRIDAMQIALYGLAYWQELQPTKLPEDTYRELQLLARQYYQMTSLLIKAKVDFNAICDQVLPGMQELMNDHAGRHKLSDFVLRYHHTTHILEMGETRFRKDYCKWAEKKGYRNCERMAAHIFATAQNGIPVLPNAPSTQIVITEAIRVLHTVEASRDAILTQMQALAKTLPEYSLVREMPCIGDTLAPRLIAEIGDVRRFHSKRALIAYAGIDAPPYQSGKFCANNRHISKRGNRYLRKTGYEVMQSYVMHKPANDPIFTFIEKKRSEGKCGKLAMVAGLNKFLRVYYGKVTELYRSLSAIE

SEQ ID NO: 48079 - protein, 344 aa, unidentified
MTITTVGIDLAKSVLQVHAVDERGKTILRKQLKREQVAAFFARLSPCLIGMEACGSAHHWARKLERFGHTVRLMAPLFVKPYVKTNKSDAADAEAICEAVARPNMRFVPIKNVDQQAVLSMHRARAGFVKAHTAQANQIRGLLSEFGLIIPQDISNIVQRVPELLEDASNDLPGAVRLLVQRLVDHFKELDRQVDELEREIQQWHRNCGASRKLARIPGIGPITASALVASIGDAKNFSSGRQVAAWLGLVPKQHSSGGKSVLLGMSKRGDSYLRTLLIHGARAVIRAAQTKGAQDSWLHKLLYRRNPNVAAVALANKNARTVWALLAHDREFRLDYAATAATA

SEQ ID NO: 48080 - protein, 411 aa, unidentified
MKVFCGIDWAEKHHDIALIDAEGKLVAKRRITETVDGFAELTAMLAEAGDTAENRIPVAIETPRGLLVAALRATGRAIYAINPQQVAAYRTRHSVSRKKSDHADAKTLANILRTDAHEHRTLPADTELARTIAVLARATQDAIWRRSKASNELRSLLREYHPGFLEAFAGGSATNLTTAEARAVPAIAPTPAATARLTKVRISAALRRAGRQRGIDKRAAELHEALRRPHLRHEPLVEEAMGTQALRLLATLDTECASVEQLGKATADAFHKHPDHAVIISFAGLADLTGARVFAEIGDDRNRFADARALKAFAGSSPVTKASGSSESVTFRRVKNDRLAAVGWIWSFVASTKAAGPALHYQRRRDRGDRHAAALRHLYNRLLGQLYHCLQTGQQYNEAMAFPNQLQQATG

SEQ ID NO: 48081 - protein, 372 aa, unidentified
MSKDTWVGLDVHAKTIAMAVLVGGAKVPETREIPNRRDKIDRAFRDLRKDGAKVYACYEAGPCGYGLYHQLRELGVECEVIAPSLIPTKPGERVKTDRRDAIKLARLYRAGELTPIVVPGHEQEADRDLVRAREDARRDRVAARHRLGKFLLRHGLRFPGTNWTKAHWAWIRQQSFEHASARVTFEHYIAELERLDLAVTKLDKEIEKLAREERYAGRVDRLSCLRGVRTLTAMIILTELGDLRRFEHPRQMMAYVGLVSSEHSTGENKNRGSITKAGNAHVRRVLVETAWAYRHARTALSPRILALLESQPAGVATIATKASQRLGRRYARLVAKGKASPVACTALARELCGFIWALDHAGEVPNEAKHAA

SEQ ID NO: 48082 - protein, 387 aa, unidentified
MEVRVVSTPSAGADNEPVHCYVAIELSKSSWIVGFQTPLTNKTSQYQVKACDANALLELIERIRTRVARELRRPIEVMSCYEAGYDGFWLHRVLKAHGIHNHVLDPASLQVNRRARRAKTDRIDADRMVRALIRYLRGEPEACSVVRVPSVEQEDAKRLHRERRRLIAERVQHVNRIKGLCATQGIYHYAPLRKDRLARLDDLRTGDGRALPTRLKAEIARELKRLEVLLEMIATVETERDVILTSAASTHLNAGKIKMLAKLKAIGPEFATTLVGEVFYREFANRRKLGSYVGLGSSPFCSGSLDRDQGISKAGNPTARSMMIELAWTWLRYQPGSALSIWFRERVGNLKGRPRRIAIVAMARKLLVALWRYLQTGLVPTGAVLKA

SEQ ID NO: 48083 - protein, 441 aa, unidentified
MEAVYRRCAGLDVHKDVIEVCVLPPAGQSGSPQRRRFATFTSDLIRLRMWLVSLKATEVAMESTGLYWVPVWRQLEGHIGKRLLCNPQQVKALAGRKSDRRDGQRIAEFLQDGRLDPSFVPPKEIQQLRELLRMRVSLVQEHNRLSNRVEKLLQSYGVKLSSVASDILGKTGQRILTALAAGQTDPDRLSWKAVGSLREKEAQLRRALRADFDEHSCWMLGVLLGQLKENEQWREQLEQRITEGMKPYEPIVIRLMTIPGVDRLTAWSMVAELGTDMSVFPDQRHCASWAGVCPGTNESAGKQHSTRTRRGNRYLRRILTQSAWATSRCKRGYLRAAFHRIAQRRGHKKAVVTIAHKILVAAYFIIRDQTTYLELGEDYFDLLHPERTARRLARRLERIGYQVTLTKAAATAPRSSEGQQPKKRGRPCKCAERGIDCKHKR

SEQ ID NO: 48084 - protein, 319 aa, unidentified
MAQMVVTAGIDVSKGWLNVALWPLKAKLQVDQTGAGYAQLAAWLTQHGVVRVGLEASGGYEIAVIDALEVHGFEVVRFNAQRVRVFAKAKGRLAKNDRADARTIAQATAVLLDAAPPPRRRDLDPLVEHLTYRRQLRAWITDCTNQLERLRDRTLRNKVERRRIAVQQELAGLDKRLAALVAEHDDWHVLERRLRTVPGVGPVLAQTLIALLPELGRLSRRAIASLVGVAPFDDDSGNYAGERHIKGGRAAIREVLYMATLVAKRYNPLIAAFAKRLAGKKPKVVLVACMRKLLVILNAMARDGQPWKYAGQHALDPVA

SEQ ID NO: 48085 - protein, 339 aa, unidentified
MKLYSAIDLHSNNSVLVILDENDKVVYERRHPNELPVILAQLAPYKKRIQAVAVESTYNWYWLVDGLMEAGYKVKLVNTAAVKVYDGLKYTGDEHDARHLAHLLRLGVLPTGHIHPKEDRAVRDLLRKRGQLVRCRTAQILSIQSLVSRNTGKGITTDGVRNLDEAAISRACGGDAVKALAIKSNLAILRCLDEQIAAVEDVVLKQAKLKPEFKKLLTVDGIWNILGMTIMYEAGSMERFEKMGHFASYARCVSSSRWSNGKKKGEGNRKNGNKYLAWAFIEAAYSAIRYNERIRKFFQRKKARTNSIVARKAVAHKLARACYHVIRDQVPFNEEKAFA

SEQ ID NO: 48086 - protein, 414 aa, unidentified
MVEETIAWFAGVDWGSAKHQACVLGVQGTIVGEREFPHSGKGLSELADWILSMTDIASAVAVAVEVPHGPVVDVLLDRGFIVHAINPKQLDRLRDRFSIAGAKDDRRDAYVSADGLRTDRHLFRRLQIADPRLIELRAWSRLAEELQEERVRLSNRLHQQLWRYYPQMLKLSDDLTATWFLELWLRAPSPAKAARLRVSAVERLLKQHRIRRVNAEGILRTLREPAIKVPDGVAAAAGVHIRSLIVRLQVVNRELNDAEHKLDELCTAIGETATASEERAEHRDVAILRSLPGIGRINLATLLSEASGPLSRRDYQALRTLSGVAPVTKRSGKSHVVVMRYASHVRLRNTVYHWARVATQHDHESRTRYAALRRRGHSHGRAIRGVADRLLAVACVLLQRQTLFDPHFRQTTAS

SEQ ID NO: 48087 - protein, 422 aa, unidentified
METVSFEQVVSRGCGLDVHKKTVVATIDGEGLERVTREFGTFTSSLTELKDWLVDNEITHVAMESTGVYWKPVYNILEPTGITVWIVNARHVKNVPGHKTDKKDSRWLCKLLLAGLLKPSYIPPREQRELRDLTRYRKKLIQEVASNKNRVTRILEDCNVKLSSVLSDTSGITATRLVDKLCEGKGVTMEDIDQVYHGRIKATREELWEACNGNITGHHVYLLGTIRAHNRHVESLIEELNQKIRHLLSPYENVLELLREIPGLSHKTVEDLIAEIGLDMNVFPSEKHLASWVGVSPGNNESAGKKKSGRTTHGNKQAKTTLVEAAWAATRAKDTFYKARYHRLAARRGKKRAVVAVAHSITKSVYHVLKYNVPYHELGAEYLDSRVKKKREKYLKTELEKMGYAVQLEPVNPLPPASALIA

SEQ ID NO: 48088 - protein, 345 aa, unidentified
MDLTIAVDLAKSVFEVAVSRAPGEVLERRRLTRTGFAAFVGKSGPCTVIMEACSSSHFWTRQFVAIGHRPILLPPHHVRPYRTNANKTDRADAKALLEAFRNKEIHPVPIKSVEQQAISAIHRLRSGWMATRTACINTLRGLLREFGLVIPVGSQHVVAQVSAWLREENPAIPSAIRTLLSATCDQIVELEAHMRSAEAQLAELVRDMPEVKRLRTIPGVGPRSASALVAIVGDPRRFKSGRHFASFLGLTPRERSSGNFRKLGSISKRGDTYLRMLLIHGARAVLLSARRRKDRHRIHSWVLEVEARRGHNVSAVALANKIARIAWATWSRQQDYRPAVAQDAT

SEQ ID NO: 48089 - protein, 350 aa, unidentified
MTMVGGFDVHRKQITFDYVDDDGLVRFGEIRPATRTSLRHWLGEHCANGDAEFALEGCTGWRYVVDELAGAGVVAHLGDPAEIAAARGPKKRAKTDRADARLLRTLLLQGRFPESWIPPAHVLEVRILGRLYCSLMDERRVWQQRIHAQLFHQGCPPIRALLTQAGRDALANIELSAAGRQYVDTALRRIDELSAEIGPLRTQLIDFAKQQAGCRALQVHYGIGWLCAAIIWAEIGDARRFSSSDQLVRFAGLDITVYSSDGKRAPGHLSRQGSSELRWAAFEAAKCAARRSSPDYAYYRGLAAKRDGHNGENPTLAVERKVLRRCYHSLRELGDAALALPVSQPQEVAA

SEQ ID NO: 48090 - protein, 337 aa, unidentified
MQPTVPLFVGLDYSQHKVQVCALDPQGKVLGNRAVPDSAAAIDQAVRRLGAVQGAALEACTGAADLAEELADRFGWPMHRGHPGFVSRMKQSPDKSDFSDARVLADLERVGYLPRVWIAPKQLRELRTRVRDRQQLVAQRRNLKLAITALLREHRQRCEHQRWTAAWRAWVAQQAQLPEQARWVMTQRLRRLEWVVAEVHAVERRLEEVTKDDSTVRRLRAIKGLGPVTAWTVRAEVGRFDRFRTGKQRARFCGLSPCNRSSGDKAADAGLIRAADPERRRVCVEAAWVLIRCQPRGRQRAQRLRAQGKPRTVVTAAVANRFVRWLDHEGVRQQAVA

SEQ ID NO: 48091 - protein, 351 aa, unidentified
MNILAMDLGKNKTVVCFYGSNDGNYKFDRIKTTPKKIHDLLVEYSPDRVVFEVSSLAGWIYDICSTLKINTQVANPNTQAWRWKNVKNKNDKKDALKLAQLSAMNQLPTVHMPKPAVRQKRALIHYRHTLVCRVVQIKNNIRAILDKQGYSMSAGKSGWTGKSIECLNRMALPIENCDVYNLWRGQLYVELEMLNSTLKALEDVTCKLDKLAESNRQIKLLRTVVGVGPRLAEAIVAFLDEPQRFRNSKQVGSYVGLTPRQYQSGSMDRQGKISGQGNKLLRSFLVEISWLGLRHNSWLRRTYQRLLRGSPSRKKIAITAVARKLLVRCWAMLRDGQPWREIEIEKVKEAA

SEQ ID NO: 48092 - protein, 404 aa, unidentified
MIFVGVDWSETHHDVCVLDETGDVLARLKIPDTLAGVRALHELLAPYAEEPDEVIVAIEKDRGLIVTAMLGARYRVFAINPMSVARYRERHVISGSKSDPGDAKVLAEVVRTDRHNHREAEGDTENADAIKVLARTHQSAIWSRQREMNSLRNALKDYYPGALVAFGTGLAESDAVEVLAIAPTPALGAQLSLAKITSALRRGGRERNLERTAKKIQAALREEQLRERPMVELAYGTITGAHVAMIRAYNAEIVQLEAALTKDFEQHPDAKIIRSLPGLGMVLGARVLGEFGDAPNRYADAKSRRNYAGTSPVTKASGKSRVVLARRSRNKHLAAAADQWAFCSLQRSPGAREYYDELRARHKTHRKAIRQLANRWVGILHACLEQHVNYDEDRAWKHRADIAA

SEQ ID NO: 48093 - protein, 363 aa, unidentified
MLFVGIDQHKRHLTICVRDEQGEIALRRQVSTKWEEVDRFLASLQQRGAEHGGYVAVMEVCGFNGWLIKRLEQWGCRRVYVIKAPDRVRQKTDRRDAAKLSELLWINRDRIAAEQSLVHVSEVYQPTEQEQYDRQLTHLRHRLGRALTRAKNSIKGILRRHNLEQECPTKGGFTQAALRWLAVVKLPGLDRLELNMRLTEYRLYAQQLVDVTAMIEQRAAKNADVRRIRTIPKPGAYTALALVAHIGPIERFPHARSLSNYFGITPGCRNSGDTDRPGSITKAGHPFIRFLLAQMVLHALRGDPGLRRWYRRVKRRRGSKVARVAVMRRLCESIWHMLSKKEDYRPVDCRGDDNRKGACRSAA

SEQ ID NO: 48094 - protein, 344 aa, unidentified
MMTHFVGLDVSQKMTAICVVDNAGRRLWRGQCPTAPEQIAAMVRRHAGDNSRIGIETGAMTPWLVHELRALGLEVICLDARHARAALKMQINKTDQNDAEGLAQIVRTGWFRSVHVKSFDSHRARALLGARAQLVGMTTRLSNHIRGVLKTFGLLPGAMRGLRFDRKVEVLLEDRSDVAPIVRPMLVAWRQLREQISAFDKAIRVLVRSNSPCRLLMSVPGIGVLSALAYVSTVEDPARFSQSRSVGAHLGLTPRQYQSGDVDRSGRISKCGDTLARTLLYEAAVVIMTRVKKASELKDWALAIAKRSGIGKARVALARKLSVILHSVWRSGKPFRWAEAAITA

SEQ ID NO: 48095 - protein, 460 aa, unidentified
MERLVNRFRNRAAPAPIIYQRTDMRRKKSKASKKVNLGSLPVIHPDAAGIDVGAKEHVVAVPCDRDERPVRTFQAFTPELHELAAWLKRCGIRSVALESTGIYWISLYEVLEQHGFEIRVVNARHVKNVPGRTKTDVLDCQWIQKLHSFGLLNGSFRPDQQIRKLRTYMRLRDNLVVNSTQAVHHMQKALFEMNVQLSNVISDIIGESGLRIIEAIIAGERDPEQLAALCGTRIKASRQTVAKSLHGNWDEALLFCLKSALETYRFSQLKIQDCDGRIERHLAEFQSRVELPALPKDLQAHLHRICGVDLTKIPGIKEQSAQIIISEVGLDMTKWNTEKQFSSFLGLCPNNSISGGKVLRRATRKVYNRAADTLRLCAQSLTHSKSALGAKYRRLRARLGAPKAIVAMAHHLARLVYRMLRYGDKYIEKGIEHYEQKFRLQRIKWLKKEADSLNLQLIAA

SEQ ID NO: 48096 - protein, 412 aa, unidentified
MEVVYPCCCGLDVHKKSITACVLWAEVKGKSRKEKKRFGTFTHDLLQLADWLEQCGVTHVAMESTGVYWKPVWNILAEQFEVLLVNAQHIKAVPGRKTDQKDSEWIADLLQHGLLRGSFVPPQPIRELRDLTRYRVSLVQEINRIANRIQKVLEDANIKLASVATDALGASGRAILEAMLAGEQDAARLAEMSKGLLRNKIPELKLALEGRVTEHHRFLLRQLFEHLRFTESKRSEIEQEIEKRMRPFEDKVTRLRTIPGVDRVTAWGMLAEIGMNMNQFPSSGHLASWACVCPGSFESAGKRLSGKMRKGNVSLRRCLAQAAWAISMMKNNYLSALYRRIAARRGAKRAVMAVAHALLEIAYHMLKRKEDYRELGADHFDRIDVNRIRRSLVRRLERLGHKVTLEPLAQTA

SEQ ID NO: 48097 - protein, 335 aa, unidentified
MDEAKNVIWAGIDVGKNNFVAALDDPAAQERKKVTSLPCRSFKRDQDEVEKFFHWIQEQFPEAEVRIVMETTGYYSEHLAGWIREIRPDVAVTIENAGSIHAFIQSLNLPHKTDRLDAQAIARFGTERQPKPTKFPSKTVLALRELTRTRAALIKAKIEFKNRQETLKEPFSIEINKQTIAMLEEKIKEVDLEIKKCAKEDDKVRKEVVLMSSLHGVSFLSACEIIATFGSLKQYSAKELSALSGLAPYIKESGSSVHSSYMSRKSSGRVRQILYLDSIVGIPKIPALQEFQERLLKKGKKKMTVRVACMRKMLLILRSIVVHQSPYDEKYQKKF

SEQ ID NO: 48098 - protein, 338 aa, unidentified
MNHYVGIDVSLEASSVCVVDGNGKIVCEGKIVSEPDALIAWLKGLKLGLTRIGLEAGPLSQWLYAAMRQAGFAVELLETRHVRNALKTMPVKTDRNDARGIAQLMRLGWFRPVHCKSLAAQETRALLAARKLVQVKLHDVEMSLRGILRGFGLKVGPTTPVRFEGRIRELVAGHPSLEAIAQGLLAVRVGLRREFDRFEKQVRAIARSDTRTRLLMSVPGVGAIVSLTFAAAIDDPARFKSSKQVGAYFGLTPTKYQSGETDIDGRISKIGDAWVRAVLYEAANIILTKPLKGCTALKSWAMKLAKRSGMKKAKVALARKIAVIMHRMLADGMSFRNV

SEQ ID NO: 48099 - protein, 338 aa, unidentified
MEQITTIGLDLAKHVFQVHGVDAAGKVVVRKQLRRAEVLRFFAAVPPCLVGMEACGTSHHWAREVTKLGHTVRLMPPAYVKPYVKRGKTDAADAAAIAEAVTRPTMRFVAVKTVDQQSVLMLHKVRDLLVRQRTMLINALRGHLAEFGIVAARGPGGVNAAIAALHEAQDGLPDLARQVLHGLIDQMRATGGEIAKAEKRILGWHRTSEASQRLATIPGIGPITASAMAAAVPDATLFRSGRQFAAWLGLTPRAHSSGGKQRLGGISKQGDGYIRRLLVVGATAVIRLARQDNASKTWAARLLERKPARLVSVALANKTARIAWAVLARNQSYTAPAV

SEQ ID NO: 48100 - protein, 387 aa, unidentified
MDVRTVNNLPPAAAHDEAVRCLLAIELSKKSWIVAVNTPLSEKISRYRLKGCDWKGLLELIEKIRARVARELNRPVEIISCYEAGYDGFWLHRLLEAHGVRNYVIDPASIQVDRRARRAKTDNIDVAQLLRSLMAYLRGDPKVWSVVRVPSIAEEDARRLHRERDRLINERVQHVNRVKGLCAVHGIYDYEPLRSNRMLRLEQLRTGDGRKLPPYLKAEIVRELQRLELVLTMIKTIEAERKAIISDKSPHLNVKKIQDLIKIKSIGPGISTVLVGEVFYRKFNNRQRLGSYVGLTPSHFQSGPMSRDQGISKAGNPKARTVMIELAWIWLRYQPNSPLSVWFHQRVGTAKGRIRRIAIVAVARKLLIALWRYLETGLVPTSAVVRG

SEQ ID NO: 48101 - protein, 357 aa, unidentified
MKKIVIGIDISKEKIDATAIDVRDTQQGVVKLDYQVYKNRPMGFRRMLVWARHLIKGVGLEDVLFCCETTGGYDRCLCDYIYAKGFDIWREAALQVKCSMGVRKGKDDKADSLMIAEYAMRHIDKAVIYETPDEKVRELKALFLYRYKLVQERTEKKVRASELKATAAKSESMRFIVRDAMKGVRSLDKSIRDCEKQIMAIINDDEELKRNYGHIVSVPGISIVNATAFIAYSNNFHSITTANKIASYWGCASFRERSGTSIDKKAYVKCYSSSLLKATLTQAAECTIKEHGIYRGYYLRLKAEGKPYGIIVNNVRNKLIHLVFSLVTNNMDYEKKHEFLRERRKNDKKPTQLEIIN

SEQ ID NO: 48102 - protein, 351 aa, unidentified
MTHQTTTEAITTIGIDLGKNTFHLIGMDARGRIVLRRQVSRGQLLQCVANLPICLIGLEACAGAHHVGRQLAALGHDVRLLPAQYVKPFLKGHKNDYRDAEAIAEAAQRPTMRPVPLKSAEQLDLQALHRVRSRLVGQRTAVINQIRGFLLECGIPVRQGPAGLREALPTLLSHRTDVLSLRMIHLIEDLAGDWRRLDERIETLTRDITAVARQDAGCQRLMGIPGVGVITASAMVAAIGTGAAFSKGRDFAAWLGLVPKQISTGGRTILGGLSKRGNRYLRTLFVGGAQVLLQRPRHWDGHGFGRWLAAAGTRLHRNVLAAALANKLARIAWSVLSRENGYNPEYVARMS

SEQ ID NO: 48103 - protein, 424 aa, unidentified
MNLTQNDRLKQVTSDTLIVGVDVGSQTHFCRAFDWRGFELSRRVFKFSNTGMGFLTFLRWTEEIMNKTEMKKVIVGCEPTGCYWLTFQKFLQDHDVQLVTVNPFTVNRSMELDDNSPEKSDLKDPKTIALLVKDGRFSTSYLPSGVYAEIREASVCRDQIMKQNVRLSNQIQGWLQKFFPEYFECYADWDSTSGLMLLREAPLPQDILKIGAGGINQIWRDAKVRAAGIKRAQTLVEAAQNSVGLEAGEAARLEIWVLVNDYILKAEQLKRLDEYLEEKVKEVPNVEKLLAIKGVGMSTVIGFIAEVGDIGRFTDPKQIQKLAGLEIVKKSSGKKKGRPRISKRGRRKLRRTMYESAKALMLWNPAFQDVFLYYRNRTKNPLGGMQAKIAVACKAIRVFYVVLQTGCDFDEEKFRKDIIRPEAA

SEQ ID NO: 48104 - protein, 341 aa, unidentified
MKANRTVVGVDTAKRVFQLYWVDMETGEVVDLKLTRAKFLKHFAARAPCVVAMEACGGSQHWARELRALGHEARLLPAKAVRPFVAGNKNDVHDARAIWTAVQMPGVKTVAIKSEEQQAILALHRMRQQLVKFRTAQINALRGLLTEYGEVMAKGRAGIARAIAPALERVAERLPAMMVESLREQWARVGQLDKEIAMIERRIALWHRSCPDSRRIAKIPGVGILTATAVVATMGDPAAFSSGREFAAWLGLAPRHTGTGGRVRMLGISKRGDKYLRTLLIHGARAVLTRSKTPPEWARRLAGRRPPNVVTVAMANKTARTIWALMAHDREYGANFVSRPA

SEQ ID NO: 48105 - protein, 403 aa, unidentified
MGCFAGIDWGSMKHAACVVDDTGKVLASFEVAHDANGVAELLRRLCKFGPSSELRVGIERPSGVIVDTLLDAGFRVVAIHPNVLKACRPRYRAAGGKHDLGDAYIVADVVRTDGHRFRDLQPLGDEIRALRALVRTRDDLVHARVAHANQLRALLESFWPGAAQIFADVDSPIALAFLAKYPGPASAARLGEKRLASFLGQHKYPGRRSAAELLQRLRQAPDGKAGELEADARSEAVLALACILRHLVAQLRLLTSRIEHDVAALPDGRIVMSFPRAGRINAAKILSELGDDRGRFVSAEHLAAEAGVVPVTYASGKHCGVVFRWACNRNLRVAICTFADNSRHASPWAASFYQAACARGCDHPHAIRILARAWIHVLWRAWTDRKHYDPAQHGAAARMAATA

SEQ ID NO: 48106 - protein, 341 aa, unidentified
MDIAVLGIDLGKNSCSVVGLDDSGKVILRRRMQRKTIMALASKLSPCVVAMEACCGAYHLGRLLSAQGHSLRLMSPEYVRPYVKAQKNDERDAEAIAEAATRPTMRFVTLKSQEQLDMQTLHRARDRMVRERTSLMNQLRAILLERGIIVPQGRAKLRLRITELLAQPCEELSLRIRVLIEDMLARWEALNDRIAAFDTEFVAEVKQSEAARRLTSIPGIGALNATALVAAVGDARTFARGRDLAAWLGLVPRQATTGGKPRLLGITKRGSKYLRKMLIQGARSALPSLSRSSTRLGQWLRGLLARAHSNAVVVALAAKLARIVWALLRHGTTFEQRAIAI

SEQ ID NO: 48107 - protein, 393 aa, unidentified
MICVGIDVAKDKHDCVILNSEGKILAGVFTIPNNADGFDTLLQKIRRCTSSDDKIKVGLEATGHYSYNILGFLINQGLPTYVINPLHTNLYRKSMSLRKTKTDRVDAKTIATMLMSNVDLKSYTDTAYHNEELKSLTRYRFDKVRERAQLKQSVSRLVTILFPELEKLVPTLHMSSIYALLIEFPGAKQITEAHLTHLKSLLKDASKGRYGRDMATEIRDAAKHSIGSVMPAKSLELRHTIRLIRELDSEIEDIEAAIEAIMEELQSPITTIPGMGFRMGAMILAEIGDFARFDSPDKILAYAGMSPSTYQSGQLSLAGTYSHMEKRGSRYLRYALYNATKYVCHWDPGFAAYLAKKRAEGKHYNVALSHAAKKLVRLIYAMEKSRQPYKRAA

SEQ ID NO: 48108 - protein, 412 aa, unidentified
MEVLHPHCAGLDIHKDTVVACVRHMVDGAVKREVRTFKTTTKDLMALSEWLSAEGCTDVVMEATGVYWKPVWHILADGDFKLMLANAAHVKNVPGRKTDVNDATWLADLMAHGLIRGSFVPDEPTQEMRNFLRTRKQFVRERSSHVQRIQKTLEDANIKLDSVITDIMGLSGRRMIEALIAGETDPFALAALAHRRIKASQAELEAALRGRVSDHHRFMLRLLLQHIDAIDAAIGQIDQEVDAHVEPFRTAIQILSSIPGISDLSAEVIVSEIGIDMNRFPTEGHLISWAGLCPRNDESAGKRRSTRMRKGAPWLKTTLIQCAWAAARTKGSYLQAQFQRVRSRRGAKKAIGAVAASVLTAAYHMLKNGTLYEDLGSDHFDRRAKGKQILRLVSRIQNLGFAVQITPIGAAT

SEQ ID NO: 48109 - protein, 387 aa, unidentified
MDILYKSCAGIDVHQAMIAVCVLHGSLTTTRPKREEAQFDTTAEGLKECRDFLKALDVQVVGMESTGVYWKPIWHALCHDFELILANPAHMRTIPGKKTDKKDALWIAKLTRIGLLPKSFVPEERIQEMRELTRQRKHHVETRNREVNRIHMILQSGGIKLTTYIEDIMGSSGRNLMNLLVKGEQITPQTIRDNVYTSLKRKVPQLEKALDGYFSEHHRFMLEESLEIYDFYQRKIHSLEERIESYLAEYEREVDILESISGIDHITASVFLAEVGADMNQFPTVGQLSSWTGLCPGNHESAGKKKSTRIRHGNAYLKKCLCQAAFAAKRQKGSPISQRFNRLRARRGPQKATIAIAHYLLKLAYELLSTNRTYSEYYQQKRLLETS

SEQ ID NO: 48110 - protein, 342 aa, unidentified
MQISTIGLDIAKNVFQVHGIDAAEKVVVRKRLRRRQVLEFFKALPRCLIGMEACATAHYWARDLTKLGHEVRLMPAKDVKAYVKRNKNDAADAEAICEAVRRPTMRFVRIKSAEQQGQLMQHRTRDVLIRQRTQIINALRAHLAELGLVAAQGNAGVNELRAIVTDEQDTRLPIDARASVIVLAAQLEALESVIGAIEKRIKMQHRSSEASQRVEAIPGIGVIGASAIVATVADPTIFRSGRDFAAWIGLVPRQDSTGDKQKLGPISKQGDRYLRRILVVGAIAVLRRAQENPGKYPWLTQLLARRPFKVVAVALANKMARMAWALLAHGGTYRAPELAETA

SEQ ID NO: 48111 - protein, 391 aa, unidentified
MLICGIDIGKNKHEACIIDQEGRQLAKSLRFTNTTSGAESLLDYIAGNNGEKDVVVIGMEATGHYWLSLYCFLFDAGFQVNVINPIQSDAIRNLFLRKTKNDAKDSFLIAETIRIGRFSKTDLADEDILSMRQLCRHRMDLVDYIADQKRKIIGVLDRVFPEYQTFFSDTFGKTSTELLSKAATPEELLAIPTDELCKLLRENSRGRFGEAKAEELRNAAQNSFGITIGTAAFTMQLRQLLEMIELLERQLVELEVKIEQYLVKLDTPITTCPGVGNVLGAVILSEIGDISRFPEPKKLVAFVGIDPSVRQSGEFVGTQNKMSKRGSPHLRRAIWLAATVAAFHDPVLSAFYQKKRGEGKHHYTAIGAVARKLTFIIYAVLRDDKPYVPNW

SEQ ID NO: 48112 - protein, 348 aa, unidentified
MRFYKRQHAFYCGVDLHAKSMHVCLVNQAGEVLVHRNLPTRPDRFLSAIAPYSSQDLVVGVECMFTWYWLADLCAAQKIPFVLGHALYMKAIHGGKTKNDRVDSEKIAMLLRGGMLPQGYVYPHKMRATRDLLRRRMYLMHHRAEALAHVENTRTQYNRPAFAKRLSYAANRQDVAAHFDEPSVRRSVEVDLALIDHLDEQIRALELYLEKTAKLHDPRSFYILRSVPGIGKILALVMLYEIHDVRRFSRVGRFLSYARLVKCPHESAGKRCGAGGRKIGNPHLKWAFSEATCLFLRSSPQAKALVEQLAHKHGKGKALSIFAARLARAVYLMLRRQEPFHQEKFFGQ

SEQ ID NO: 48113 - protein, 407 aa, unidentified
MEVVYRCCCGIDVHKKVIVACLVNGGEQELREFGTTTSEIKTLANWLTESGCEMIAMESTGVFWKPLYNLFELMDLDAMIVNAAHMKALPGRKTDVKDAEWIADLLRHGLLKASYIPNREQRELREITRYRKSLTEERCREVNRLQKILEGANIKLDSVVKDITGKSARKLLQRIIDDDIPDSDEVSKLVHGRMRPKLDQIVASIEGITTPLQRKLLAQIIDHIDDLNRRIGELDKLVQEYMAEYEAAIEAIDEIPGIARRSAEVILAEIGLDMGGFPSVAHLCSWAGVCPGNYQSAGRRKHGKTTKGNKALKTILTQCAKSAKTVKSSYFFAQYQRISARRGKNRATLAVAHSMLIAIYHILKNKTAFHDLGSDYYDSFNRDRKINSYLKRLKALGWEPDAIPSSA

SEQ ID NO: 48114 - protein, 359 aa, unidentified
MTAMVDRAGSHAVQVIIGVDTHRDTHVAVAVDQQGVRLAERDVETSTPGFVQLERWSRSQGEIRAFGIEGTGSYGAGVARFLSSRGYTVVEVNRPDRSTRRQKGKSDSTGAEMAARAVLAGVANATPKSGEGEVEMLRMLKNTKNSAVKARTQALNQMAALVVTAPAVLRETLDSLASGALAARCASLRPGHVDHPTAAAKYALRSLARRYRQLTAEIRGLEKELGRLTWKIAPALVDAFGVGPDTAATLLVTAGSNPERLRSEAAFAALCGVSPLPASSGKTTRHRLNRGGDRQANAALHRMVVVRLRYDQRTLAYMQRRTQQGMSKAEVIRCLKRYVAREVFAFLQELGRNDLAKAA

SEQ ID NO: 48115 - protein, 422 aa, unidentified
MRFIGLDVHRDFCEVAIAEGGALRSAGRIETTPAALRLFAESLGSEDSVALEATTQAAQVARLIEPHVARVVIANTRKLAAITQAKAKTDRLDARTLARLLASGYLEQVWAPDEETRSLRRLVARRSRLVRARTRAKNEVHGVLARNLCPRPPVTDAFGKAGRRWLSTLVLPDDEQLTLEGCLRQIDFLDEEVGAIERKLAERALQSVDIRRLMTVPGVNVQTAAAFVASVGDIGRFSSPRKLVSYLGLDPRVRQSGSEVARHGHISKAGSAEARHMLGEVAWKVMMTPGPLRAFFERVRSRRGPQVAATATARKLVVLFWHLLTREEDYAFARPAMTRKKIRQLELLAGAPPRKGKAGVAGNFANRHVREAERELSGQAEAAYRRLVSDWRASGPKKKGAGATPGRASSRPSKRQAARQAQ

SEQ ID NO: 48116 - protein, 342 aa, unidentified
MYYIGLDVHKKTISYCVKDAAGKIHQEGKIGSTRRELDAWMKTLPQPRMMAMEATIFTGWIYDHLLPHAEKVKVAHPLMLRAIAAAKRKNDKIDASKIADCLRCDFLPECYMTSTEIRDRRRTLRYRGLLVKQMVQMKNRLSGLLMETGVSYNKQRLHKVGYFTELMLSNEEIDCVRPLLRLSRETITRSQKLDYALVSSLERDPLLAERLDRLRTVPGVGPITALTWALEIGDVARFHSIKQAISYCGLCGAEKSSADKVMRTPISKQRNKYVQQVLIEAAKLAPRQSHELALIYEKEKQRGNRNRATLAVTRKMVAWLVAVERRKQDFVPAEDFGGTRAA

SEQ ID NO: 48117 - protein, 393 aa, unidentified
MYYIGIDVGKNNHAASMMDSSHKVIFKGFAFANTRDGAQSLLDKVQEIVQDKAQVEIGMEATGHYWLALYSFLFDDGYRLHVINPMQTDGWRKGVEIRKRKTDNIDSLLIADLIRYGQFLETKLTDESLLSLRTLTRFRSYLVDSIADLKRKVICVLDQVFPEYESIFSKVFGTTSKEVLLNYSTPAELEGVSVEQLTELLADISRQKCGEDRAQRLSHAAKHSFGVTFCRDTFSFQLRLLLQQMNFIEQQVTDTEKQIKALMDKLASPITSITGIGPVLGAVILGELGDISRFSSPAKLVAYAGIDASVSQSGQFESSNNRISKRGSPYLRRALYQAAVVASFKDPQLSAFYQKKHDEGKHHNVCIGAVARKLCYIIFTILKENREYVKRST

SEQ ID NO: 48118 - protein, 351 aa, unidentified
MMLIGVDYHPSFQTIAFLVEETGECGEQELNHSDGQAEKFYRDLKQRGICVRVGMEATGHSRWFEGLLAELGFELWIGDPAEIKAKRVKKQKFDREDARLLLRLLRENNFPQIWVPGPENRDLRQLLWHRHRLVQMRTRIMNQLHALAMNEGYCWKKKLFSEQGRAQLEKLALAPWASRRRQELLELLDRMNPTIEELTAAVEREARKRPEAMRLMTHPGVGPLTALAYVLIIGTPTRFQRGKQIGTYVGMIPCEESSARKQRLGHISKQGSSLLRFLLVEAAQAAARIHPDWRRRYMHLAMRRHKSIAKIAMGRRLAVRLYWMWRNSSDYSPSLEFGSYAGQLETRNGVN

SEQ ID NO: 48119 - protein, 487 aa, unidentified
MDNDRRLVGIDLGIASAHTVRVLDGTGETVAKRKAWPTVESLSEVEEAALAGCAAGTRLEVVVEPTGPAWLPIAVFFAARGHLVFRVSSAKAADLRRFLSRHTKTNGIDADTLARLSLFDPVGLQPLALPGAERAALDRRVRACDRLTQVAAEHKRRIKDLVRQLLPMTPLTGDLGVADMAVLERFADPNTLVKAGHRRLTALIVKASNNHQGAERAQQWLDAAQAALDLYGAHPAIAFADLAAEVATEVRLLSAAQTELAGHAAERENAYRWVDHGGLARSLPGFAEVGGPALVAGMGEPGRFRRGKQFRSFTGLAPKASETGDTDRKGQAMSKAGSSLLRTTLVRAADHARKQDPQLARIYYVQMVERGKDHLGALCVVAANLAERAWAVLDRGMPYVICDIDGRPVDPDEAKAIIAEHWTVPTEVRARRRSMKVGKAPQKALTGQSKPCARSAGARGDLPPPASSTDKTNSVNHANASSTRRIA

SEQ ID NO: 48120 - protein, 447 aa, unidentified
MAPRKRPTTPSAITLTHPNAAGIDIGSAAHFVAVPPDRDDEPVREFASFTADLHRLADWLDACCVDTVAMESTGVYWIPLYELLESRGFTVLLVNARHVKNVSGRKSDVLDCQWLQQLMSFGLLHGAFRPADQVCVLRSLTRQRTMLLRSQGRFVQHMQKALTQMNIQLANVISDVAGETGQKILRAIVAGERNGLALARLKNARIRASEDEIAQSLQGSWRAEHLFALKQALDAFDFCGAQLAECDAQIQDQLQALHVREDEPAQGKKRGRARNAPKFDLRTQLFQMCGVDLTRIDGIDVTTALVVVSEVGSDMGKFPSDKHFASWLGLCPGTKITGGKVMSGKTKRCANRAAQALRLAAAALRSSQSALGAYYRRLCARMDKPKAVTAAAHKLARLIYAMLTHGQEYTDRGQDYFEERYRQRVLHNLAQKAKAIGMQLVPSGNPA

SEQ ID NO: 48121 - protein, 338 aa, unidentified
MALYCGIDLHSRDSWLAILDEGLKVVQEAKVGNDLEAILHVLEPHREELEGVAVESTFNWYWLVDGLMDAGHCVHLTNTWAVKQYEGLKYTDDRHDARWLAHLLALGILPEGYIYPKEERSARDLLRRRAFLVRKRTSFILAMRGAFECRTGLRINSNDLKKWKAKDVEAHMEDPTEAFSITCLLEPMHALSAQIKKIEKGALARGRLRPEFAPLETVWGIGKILALTIMYEVGDVARFRKVGNFTSYCRLVTTARLSAGKRKGSGNPRNGNPHLSWAFSEAAHHAVRHYPEAQKFYQRKRTKTNGIIAIRALAHKLARASYHVMRDHVDFDPEKTFA

SEQ ID NO: 48122 - protein, 430 aa, unidentified
MNFRPIAGIDIGKYFSEMVILSPSNQISCRMKIHHDSVADIKRAVELLKKAEKDFALKPFVVMESTGHYHKILFRSLCNEKYEVSVTNPIQTDSIKNIGIRKVKNDKVDARKIALLYRFQELRTTNIPNEDIECLKNLCRQHYNLSDELTVYKNRLTSVVDQIMLNYTDVFPNIFSKASLAVLEQYPTPTAILKGNKNDIIALIQKKSRKSLESSTLKYQLLVKKASDFAPLSNEGNSNITMLGIYISMIKSFQENIDKVMTSIRKIINEDISNDFPQLSLTLELLQSLTGIGLLSAATLLGEIGDFSAFTKPEKLVAFFGIDPSVNQSGEFVGTRNKMSKRGSRLLRRVAFTISLANIRTKRDKQPCNPVIMEYYKRKCENKPKKVALGAVMRKIVCIIYAILRDKKPYELRSPEQHAQTLNKKLAIAQ

SEQ ID NO: 48123 - protein, 341 aa, unidentified
MMIIGCDFHPRFQQIAFFDQETGEFGERRLNHAEEAERFYRSLCGRQVRIGAEATGNFRWFRQLLDELGHEFLLGDASAIRAACPRKQKTDKRDARHILTLLVEDRFPVVWQPSVENDHARQLLLHRCRLVRMRTRIKNQLDAMAKNEGLLRRRVWSPKRRSEIEALPLPGWYAQRRADLLDLLDALDKRIRPLDEAVREAAEDNLEARLLMTHPGVGPIVSLAYVLTIGDWRRFPRGKQVGSYLGLIPEEASSGSRRRLGQVSKQGSVLVRWLLVEAATIAQRYDASWHRQYVRLSMTKHHGVAKVAIAHKLAVRLYWMLRSGDDYSKVMERGSHAGQSE

SEQ ID NO: 48124 - protein, 408 aa, unidentified
MEVLYPRCAGLDVHKDVIVACVRCVSEPTHHEVRSFDSTTRGLLELADWLALHACTHVAMEATGVYWKPVWHILEGNFELVLANAQHIRNVPGRKTDVNDATWIADLLAHGLVRSSFVPPAAIQELRDLTRTRKQLVREISQHSLRIQKVLEDANLKLGSVLSDVLGRSGRAMLKAIVAGESDPQRLAALAQGTARKKTAELREALRGHITVHHRTMLKLHLDVINALERTLSELDAAVGKSLTPIQQRVRLLITMPGVSDLTAQVLLAEIGVDMTRFPDAGHLVSWAGLCPRNDESAGKRRSTRVRNSGTWLKTALVTAAWAAVRVKTSYLHAQFLRIKARRGAKKAILAVAASMLTAAYYMLRDGVAYHDLGSDHFTRHDTSKTICRLLKRLADLGCNVDHLAHAT

SEQ ID NO: 48125 - protein, 410 aa, unidentified
MEVLHPHCAGLDVHKDTVVAAVRHMVGGTVRREVRTFKTTTTDLMALSAWLSAEGCTHIAMEATGIYWKPVWHVLGDGEFELVLANAAHVKNVPGRKTDVNDATWLADLMAHGLIRGSFVPDAHTQELRALLRTRKQFVRERSSHIQRLQKTLEDANIKLDSALSDVMGLSGRAMIEALIAGESDPDTLAGLAHRRVKAPPEELREALRGRVTKHHRFLLQLHLQQVDAIEAAISEIDREVDANVEPFRTAITILITIPGVSDLSARVIMSEIGTDMSRFPTEGHLISWAGLCPKNDESAGKRRSTRMRKGAPWLKTTLIQCAWAGARKKGSYLQAQFHRLRSRRGVKKAIGAVAASILTAAYHMLADGTLYDDLGPDHFDRRAKAAQTRRLVTRLHNLGYAVQITPLAP

SEQ ID NO: 48126 - protein, 366 aa, unidentified
MKKIAYVGIDYHLNSLSIAVVLENSKKVHETIRLKNDDKMIAKYMKKLSKTFNIHACYEASCNGYAFQRKMISWGYHCDVIAPSLIPKKRGERRKNDRRDARNLAKLYANAMLTVVHPPGEEQESVRSLIRCRIVFKDSEKRVKQQINSLLLAQDLHWSLSKWTKSHRDWLCELDLHNKYLQQVLDEYLGHLEYLDTRIRYLDKQIDEIAKSELYAPSVKKLKAFKGIGTFTAMLLIAEITDFKRFPNPRALMAFLGLIPSENSSGDQQKGGSITKNGNHRCRKQLIESVQHYVKKPYMTVQMKDNIVQVDRRSATIATTCMKRLHKRYWALTMKGKIRPVALTAIAREFVGFIWAMMIQPEPATV

SEQ ID NO: 48127 - protein, 347 aa, unidentified
MEVLHPDCAGLDVHKNVVVACVRHMVKGRAATIVKTFKTTTQELIALSDWLSVEGVTHLAMEATGVYWKPVWHILSDGVFELVLANAAHVKNVPGRKTDVNDATWLSDLMAHGLIRASFVPDEPTQQIRDLLRTRKQFVRERGGHTQRIQKTLEDANIKLDSVVSDIMGLSGRRMIEALIAGQTNPGVLADLAHRRLQASGAELEAALLGRVMAHHRFLLRLHLEQVDALDAAIARIDQEVDANVEPFRVAVDVLSSITGVSSLSASVIVSEIGVDMSRFPSEGHLISWAGLCPKNDESAGKRRSTRMKKGAVAEDHPHPMRLGGYADQAKLPSGSVPAHTIQARRE

SEQ ID NO: 48128 - protein, 309 aa, unidentified
MDTLHTHCAGLDVHQKEIVACILIGSSDETLIKEVRTFPTMTKNLFDMLRWLESLGITHIAMESTGVYWKPVYNIIEDFFDITLANAQRIKNVPGRKTDVADAEWIAKLLRYGLIEKSFVPPADIRELRDLTRRRKKVIGDMTAEKNRIQKTLECSNIKLGSVISDVFGVSGRKLLTRLVEQGYVNLQDVEETIHTKMMPKAQDISDSLFGTLNEHQIFLIRHSWNHILFLEQAIEQLEARIDELLLPYQEQVELLLTIPGVKKNTVASIIAEIGIEMSQFPSAQHLSSWAGVSPGNHESAGKKKAPGL

SEQ ID NO: 48129 - protein, 393 aa, unidentified
MILVGIDVASKKHDVLIMKNTGEVYKKHFKIDNDLEGYKRLLSEIESAKEFFNVSSVSIGIESTGVYSKNILYYLSSFNYNIYFINPLLTNMDRKASSVRKTKTDIIDTKAICMFLIRNRSELHPYTLSSYHINELKTLVRIRKSHKKILNMHINRLHALLSEAFPEIYKVFSKVNSKTCLNLLSKYASIGEFKSVRVNTLVKHLISTSRGRSRLELAEEIKQFANNSIGIDSKALSISIKQHVLLVNQTNKLINEVEMLIEENVNSLNTNILSIPGIGYQTGAIILAEIGDINIFKTDDALLAYAGLDPSVYQSGNQDSSYKMSKRGSSLLRWALFQAAKITVIYDPVFRKYHESKINQGKHYFVAISHSCKKLLRVIRSILKNNTVYQISQ

SEQ ID NO: 48130 - protein, 347 aa, unidentified
MEHVAIDLGRPNSMLCEVGLDGRKVTQGFRLDRRSLDRLFAERPRSRVLIESGTESEWVARHLEGLGHEVVVADPNYAAMYGERNRRVKTDRRDADALFEANRGGVFHRAHRRSEAQRCVMSLLRVRGSLVRTRTRWINVVRALARGQGYRIRSGEPESFGQRAWELESCLPAYLTRLLQVLVELLNGVNEKIAGLDREIAALGKRDPRVRLLQTAPMVGPLTATAFVALIDDVSRFKKAHGVENYVGLVPSEWSSSEKRLKLGITKRGDCLVRWLLVEASWSIMTRRRPDTFELRRWANNIASRRKRKVAVVALARRLAGILYAMLRDNKPFDPTRLGQSTRTKVA

SEQ ID NO: 48131 - protein, 346 aa, unidentified
MSSSNVHIYGIDLGKNWFHIVAMDRQGHILWRKKRNRSQLKTFVINTPPTIVAVEACPGSQYWGRLFNDAGFSVKIIPAQFVKPYLKSNKNDFNDAAAIAEAGSRGTMRCVSLKTHEQLALQATHRVRLRFIVERTATVNQMRALLLEYGITVPVGRKVFERNLPSILEDAENGLPDFIRALVFRLRERWQHLDVQIDEMSEQLQQASNASEKCQLISSVPDIGPIVATGLIAAVGSGTQFKRGRDMSAWLGLVPRQYSTGGKSNLGGISKRGNVYLRRQVIQGAQALKIHMKRDKSALGQWIAKLEATHHHHVVLIALANKIMRICWRVLTSGQEYQPYPASATK

SEQ ID NO: 48132 - protein, 343 aa, unidentified
MTKDTMIGVDLAKSVFQLHGASMTGDVRFRKKLSRDGFLKFMRAQPPTIIVMEACGSAHYWAREMVQLGHEVKLIAPQYVKPFLKRQKNDSADAEAIVIAAQRPEMRFVEPKQAEQQSRAILFRARERLVHQRTELVNAVRACLYEFGHIIPQGINQINRIEDILDDPNNDLPDLMREECQDLLKQIAEKTVRISARTTKIKAVAAEADMARRLQTIPGVGPLTALAVEAFAPPMESFECGRDFSAWLGLVPRQFSSGGKEKLGRVSKAGQSDIRRLLIIGAMSRLNWLGSKSIPEGSWLACMVARKPRMLVAIALANKMARTIWALLTKNEDYRVPSQETAA

SEQ ID NO: 48133 - protein, 346 aa, unidentified
MHYVGMDSHITTLEFAVVNEAGRLVKADRVATSVNGFMEFVRTVPRPRTIYMEEGTLAAWALETCVRFGEKLVITDPKKNHWIGSSGEKDDPIDALKLAQLGRGGYIKEIHHPVGQRRRFRELMIAYHDTVRSTTRIKNKIKARFRQNGIQCAGVTIYSETYREEWERKLPQEATLLLIVDGLWRQLEQSEQTEKELLAAARAQAKHYPEIKHFQALPGIGFIHAATISAMLETPYRFADKKKVWMYAGLGIMRRSSGGKIYSEKLSTDYNRLLKYTLKQAAEAAINAKDSPFRRKYLDMTLLHGVAPHRAKLTIARDILATMWAMWRKGEKYNPEIREQAAYKQG

SEQ ID NO: 48134 - protein, 465 aa, unidentified
MKHHRRRHSSKLRVSSSVLEHINPNAAGIDCGSAEHFVAVPPDRDPTPVRSFTTFTGDLQRLADWLTACRVTSVAMEATGVYWIPLYEILEARGFTVLLVNARHVKNVPGRKSDVSDCEWLRDLHMVGLLRGSFRPTDGIVALRAYLRHRETLVQTAGAHIQRMQKALVQMNVQLPLVVSDITGATGLRILRDIVAGRTDPHALAQHRDYRCHASEAEIVAALTGNYRPEHVFGLRQNLEAFDYVQQLLAACDTAIEGHLQMLATQATRATAPLPPARPRQKPRNNEPRFELRAPLHQLTGVDLSQFDGIGPYTALRLLSEIGTDMTRWPTEKHFASWLTLAPQNKVSGGRLLSSRTQPSANRAAAILRFTAMNLGRTQTALGAFYRRLAVRVGKAKAVTATARKLAILVYRTLKEGLVYADPGADAYDAQHRTHVLRRLRQRAANLGFGLVDLSTGEVVEGAVS

SEQ ID NO: 48135 - protein, 321 aa, unidentified
MTPPVFTGIDVSKDRLDVAQRPTGASWSMSNSEEGIQALIQALIPTQPVLVVLEATGGLEIPIVAALLAAQLPTVVINPRQVRDFAKATGQLAKTDAIDAGILAHFAEAVRPEVRPFPDEATRELDALVTRRRQLIEMQTAESNRLHRTAAQRVRRDIQKHLDWLQRQLEELEKDLDNSIKQSPAWREKDNLLQSVKGVGPVVSATLLGELPELGRLNRREIAKLVGVAPLNHDSGKFRGQRRIWGGRAGVRASLYMGTLAAVQHNPPICAHYKQLIAAGKPKKLALTACMRKLLTILNAIARDREIRQIIPLRLASQDSC

SEQ ID NO: 48136 - protein, 383 aa, unidentified
MKKTKGTPRKKVSIIEKVLHLAFELSQNKWKLAFSNGEKIRTVTVAARNLEQVQEEIEKAQVRFKMKGDVRILSCYEAGRDGFWLHRYLLSSGIENVVVDSSSLEVNRRKRRAKTDRIDARKLLQMLMRYHGGERKLWSVVRVPSVEAEDGRQLNRELEALNKERTMHRARIRGLLIQQGLEVRNPSTKRFLKELAALCTWEGKKIPEDLKERVVREYERLRMVEEQMKVLRKERDRRVESGATASYRMVAQLRTIYGIGKTSSWDFVMEMFAWRKFRNRKEAGAFAGLTPTPYDSGGSQREQGISKAGRGRLRALIIQIGWAWLRFQPQSKLSKWFWQRFGHGGKRMRKIGIVAVARRLLIDLWRYLEHGVIPEGARVRSAI

SEQ ID NO: 48137 - protein, 354 aa, unidentified
MLIIGCDYHPSFQQIAFVDTETGEFQERRLEHREAAEKFYRELAGQGKKVRVGMEASGQGRWFERLLEGLGVELWRGDAEVIRAKRGRKQKTDREDARHILKLLLKDDFPQIWVPSWENRDLRQLLWHRHRMVQARTRMMNQLQAVALNEGLRCKKKLWRETGRKQLEAFRLAPWASRRRQDLLELLDRLNPTIAALSQAIEQEVEKCPEAQRLQTHPGVGPLTALAFVLIIGKPDRFQCGKQIASYLGLVPLEDSSGNRRRLGHITKQGNSLLRFLLVEAAQVTARSLPEWRSRYVHLTMRRGRKIAKVAMARKLAVGLYWMMRKEWDYEQLKKFGSHAGQPGNRHGVKSNTE

SEQ ID NO: 48138 - protein, 349 aa, unidentified
MPSLAERVDVVIGVDTHKNTHTAAAVAAATGAKLDELTIGTDSDGYAALLTWAQSHPGDRVWSLEGAGGYGAGLARFLAAAGEVVLELDRPVRAARRNGAKSDPLDAVRAAREALSREHLAEPKTDGPRAQLAALMAARRSAVEAATLAQHQLHALVIAAPDALRALFRGQTTAVMLATAAKLRPHTGWDPTTVTTAQVLRRLARRSNDLTEEAAEHEKAITTLVKAWRPDLLELPGIGPIVAAQVLTAWSHQGRIRSEAAFAMLAGTAPIPASSGMLTRHRLNRSGDRQLNRALHVVALSRTRYDQRTRDYIERRRAEGKTDREIRRCLKRYISRQLYRQLEHGGRLA

SEQ ID NO: 48139 - protein, 317 aa, unidentified
MSAPAASFVGIDVSKQQLDIAVRPSGETWTVAQDEAGVSALVARLRDLTPTLIVLEATGGLEVAVAGALAAAALPVAVVNPRQVRDFARSTGTLAKTDRLDAQMLAQFAEAVRPAPRPLPDAQAQELTALLQRRRQLVEMLTAEKNRLTMASRRIRPQLQAHIAWLHKQIAQFDEDLRQLLRSSPLWREKDDLLRSTPGVGPVLATTLVAALPELGTLSRRQIAALVGVAPLNRDSGTLRGRRTVWGGRAQVRAVLYMSTVVAVRHNPVLIAFYQRLRAAGKAPKLALTACMRKLLTILNAMLKHHTRWAPVMAQHA

SEQ ID NO: 48140 - protein, 369 aa, unidentified
MADHTLFVGLDVHKRTIAVATAPDTAGTPCVYYGTIANTPDALRRLCKKLAADGAELHFCYEAGPCGYVVQRRLSRLGHRCDVVAPTLIPRKAGDRMKNDRRDAMTLAQNLRAGHLVEVWVPDEAHEAMRDLVRMRALAKRDLRRARQQLQSFLLRHGRSYSGTSWSKAHRGWLADLSFGQPAQHLVLQEHVQRIERAEELGERVQQAIVDLLPAWTLAPVVEALQALRGVSVVNAATLVAEIGCFGRFDHPRQLMAYLGLVPSEHSSGQTIRRGPITKSGNTLARTCLVEAAWTYRFPARVSRIIQGRSAHLPEPIRATAWKAQVRLTRRYRRLMAAGKVAPKVVTAIARELIGFIWAIARMVEPKTA

SEQ ID NO: 48141 - protein, 413 aa, unidentified
MDLLHDRCAGLDVSKKDVKACVRSPGARANQRHTEVRTFATTTNALLELRDWLVGQGVTLIAMEATGDYWRPPFYVLEDDLNVILVNPAHAKGLPGRKSDVTDSMWLAQLAECGLLKASFVPPAPIRQLRDLTRYRTTLSREHTREAARLEKELEDAGIKISSVATDILGVSGRAMLEALIAGERDPQVLAQMAKGRMRTKINALTQALVGRFGQHHAFLCRMHLDRLDALDQDIAKLSTRIEAALAPFRETLARLDTIPGVGRDVAEVIIAETGADMSRFPTPGHLASWAGVAPGLNQSGERHKPAHTRHGDHWLTGALGVAAMAANRTQDTTFLGARYRRLARRIGKLKALVAIQHSILTATWHVLSENTDYHDLGGDYHAKRDPQRALRRITRDANRLGYTVRFDPIQAA

SEQ ID NO: 48142 - protein, 353 aa, unidentified
MRKHYVGMDVHQASTSIAVMNGQGKLISESLIETKAQSLIDFLKGLSGEVHATFEEGTQAAWLYDIIHPHVTELVVCNPHHNHLLKSGNKSDRVDARKLAQLLRAGMLRPVYHGEYGTRTLKELVRSYECLVSDTTRVKNRIKAIYRGRGVRTSGRAVYQVSQRELWLQKIESVGLRLRAEFLFRQLEQLQLLRREAKRAMLQESRRHAASQLLRQIPELGPVRIAQIIASVGSPHRFRTKRQFWSYIGLAVVTRSSSDYHLVDNRMQKHRQATQNRGLNRNYNHRLKSVFKAAALGAAKNDAYREYYERLMAAGSSAELARLTLARKLAATALSIWKSGAGFTIDKVMKQAA

SEQ ID NO: 48143 - protein, 409 aa, unidentified
MEVLHPRCCGLDVHKATVVACVRRVIDGKAVKESRTFATTTSSLFALSEWLTETKCTHVAMEATGVYWKPVWHILSHGDLELVLANAAHIKNVPGRKTDVKDAEWISDLLAHGLIRASFVPDTQTHEMRTFLRTRKQVVREKSSHIQRIQKTLEDANIKLDSVITDIMGLSGRKMIEALIAGEKDPAKLASLADHRVKASQGTLREALRGRVTRHRFLLRLHLDQIDAFDEAIAKIDREVEASIAPFRTAVEQVSSVPGVKDLSARVIVSEIGTDMSRFASDAHLISWACLCPRNDESAGKRRSTRIRKGSPWLKITLVQCAWAATRTKDSYLNAQFHRIKARRGPKKAIMAVAASILTAIYHMLKDGTFYQDLGPNHFDPRTKERQKNRLIKRLADLGYVVELAPQVS

SEQ ID NO: 48144 - protein, 401 aa, unidentified
MKNLPGGIDVGSEQHHVVIMNDKEEILYDREVAHKFRAFYEAIEEFRGIEAKEKMTITFAMEGKNGYGSPFDRILIENGFTLYNVDNLKLKRFKDVFGAEWRNDRRDARMLAKMLKIRDYVDNGKEKAFIEIKRTPKNNEKLKILSRHQQSLTNEKIRIQNRLRKRILEICPDILEFGDTNSKKLLRLLIKHPDFSKYKKLTMASLLRIKMIGKKHASLMLEGLQKIQCFEELAETYKAIISSSARRVLELKEEIKMLDRQLEELGEESSEVKRLKSISGVGTKLSSRLVGEIGDINRFNSESQLAVYCGVACIDDDSGKSKKTKVVYKANKICTAAMIEIAGCTIRYVSESKAYYDKKRAEGKKHNHAVRCLARQLIKVVFKMLKEDRDYVTKEEMKKAA

SEQ ID NO: 48145 - protein, 403 aa, unidentified
MSNRFAGLDWASRTHAACIIDEHGSVHLQFEVNHDAAGLAELCRRLRGAGVTAVAIERPSGLIVDALLEAGFSVVPIHPNVVKATRPRYRSHGGKSDASDAYLLADLLRTDGHRFKPLAPQSDDIRALRALVRGRDDLVAARVQLANQLRSLLQSFWPGAAEVFADVDSPIALAFLLRYPTPESAARLGPKRMAAFCAQHAYSGRRSAQELLDRLHQAPAVAVGELEMEAKGELALGLTRNLDRLVEQIRLLTSRIEHHVSSIDDGRILMSFPRAGRICAAQILAELGSVRERFDSDEHLAAEAGVAPVTYASGKSKAVTFRWACNHRLRAALTCMADNSRHANAWAAAVYAKARARGCDHPHAVRILSRAWLRVIWRAWTDRKPYDPARHGAAQLVLKTAGG

SEQ ID NO: 48146 - protein, 366 aa, unidentified
MKKTSTVRVNGNMIFKGHKLTIGMDLGDRWSNYCVLDEAGEILLEQRLATTPEAMKQTFERIPRSLMAMETGTHSPWVSRLLKELGHEVLVAHAQRVELISKSTRKDDRHDARTLARLARIDPELLGPVRHRSAKAQIHLTVIRARAELVSARTGLVNAARGLVKSYGQRLPKCGTQQVSRELATELSAELREVLEPLLKEVESLNERIKEYDVRMEKIAREGYPQVELLKQVKGVGTQIALTYVLTIDDPHRFPKSREVGCFLGLRPGRRDSGQSQPQMHISKEGDPYLRTMLVQGAHYILGPFGEDSDLRRWGLRLAERGGKNAKKRAVVAVARKLAVLLHRLWVTGEVYEPLRNSHKAMRAVA

SEQ ID NO: 48147 - protein, 433 aa, unidentified
MLLPVGGREAGLLEETHDTEELIQRVAALDIGKAQLVCCIRVPGPGRQGTRLQEVRTYATMTRSLLVLADRLGELGVTRVVMEATSDYWRAPFYLLEAHGLEVWLVNAKDVKHLPGRPKTDRLDAVWLAKVAERQMLRPSFVPPPAIRRLRDLTRYRADLVAVRTAEKQRVEKLLEDAQIKLAVVASDIFGVSGRAMLAALVAGERDPKALAQLARTRLRAKRSLLVEAFTGHFSDHHGFLLARMLGRIDQASADIAELDRKLEEEVAPFQAAVDRLYEITGVGRVAAQVIIAEVGTDMSRFPTAGHLASWARFAPGVKQSAGKTKGKATTGHGNRYLAQVLGEAAVVAGRTDTFLGERYRRIARRRGTKRAIVAVGRSILVIVWHLLSDPNLRYHDLGAGFYDTRVNAERAKRNHVRQLEALGYTVTLQPAA

SEQ ID NO: 48148 - protein, 340 aa, unidentified
MGIDVHQKDYQVAKVYDGICLGNHRMAANSEALIEHLRSHYQGADFKCVYESCAWGFNLQRKLTAANMECMVVHAADVSTNDKERKRKTDKVDALKLARNLAAGELKAIHVPDETIQKERNLIRYRTRLVGDINRSKNRLKSLLKYQGIEIPAPYLKNNWSRNFMAWVEDQAAKDDLLKDSLLLMLEQMKLLRQLLLKIERKLGVLRKGKYESKAKLAMSVPGIGPLTAMLFLLEVGDVKRFKGFDTLNDFVGFCPDTASSGETDRNKGISARRHKQLRSALVEAAWQAIRIDPAMMNTYQMLTKRMKGSQAIIRIARKLLRRLRAVLLTGIEYQKGVVA

SEQ ID NO: 48149 - protein, 408 aa, unidentified
MQVLYPRCAGLDVHKDVIVACVRCVSTPVHQEVRSFQTTTTGLQSLDEWLSSHACTHVAMEATGVYWKPVWHILEADFELVLANAAHIKNVPGRKTDVNDATWIADLLAHGLIRSSFVPPAPIQELRDLTRTRKQLVREISQHSSRIQKILEDANLKLGSVLSNVLGKSGRAILHALIAGETNPERLADLAEGTARKKRAELIEALHGRIREHHRGLLKVHLELVAALEQALADIDATVGTTLAPIRDSARLLTTLPGVSDLTAQVMVAEIGVDMSRFPTAAHLISWTGLCPRSDESAGKRRSTRVRKGAPWLKTALVTAAWAAVRVKDSYLQAQFHRLRSRRGAKKAILAVAAAMLGSAYHLLRHGIPDRDLGADHFSSRDRSKAILRLVRRLNDLGCQVQLTPQAA

SEQ ID NO: 48150 - protein, 403 aa, unidentified
MNAVGIDVSKGKSMVTILRPFGEIVSSPFEIKHTSSDIHSLIKLIHSIEGESRVVMEHTGRYYEALAHQLSAADLFVSAVNPKLVKDFNNDSLRKIKSDKADSVKIARYALDKWQSLEPYSITDELRAQLKVMNRQFHFYVKQKTAMKNNLIGLIDQTYPNANTYFNSPTRSDGSQKWVDFVSTYWHVDCIRKMSLNAFVEHYQNWCKRKKYAFNKSKAEEIYTKTKELVPVFPKNEITKHIIRQAVDQLNSTSVTVETIRTLMNETASKLPEYSIVMQFKGIGPSLGPQLMAEIGDVTRFTHKGALTAFAGVDPGVNESGSYAQKSVPTSKCGSSNLRKTLFQVMDVLIKTMPQDDPVYQFMDRKRTQGKPYYVYMTAGANKFLRIYYGRVKEYLSVLPDPS

SEQ ID NO: 48151 - protein, 364 aa, unidentified
MAQEHPRAEASSSVTIGIDPHKGSHTAAALDGRQRVIGQIRVLATSAGYRELRRWAADWPERRWAVENAGGLGRAVAQWLLGDGETVIDVPPKLSARIRVLSTGHGRKTDQADAVSTALAACGPADLQAATLESHATTLRLLSDRRDDLVARRTQVLNRLHALLADLVPGTVPPRLSADTAAALLRRSRPPAGPRRIRRSLASGLVREARRLDGEIAALEAHIVEAVTESRTKLTELFGIGPILAAKILGRVGEVRRFPSAARFASYCGVAPIEASSGDVVRHRLSRAGDRQLNFALYMMALCQARQHPEGRAYFLRKRAAGHSDKEALRCLKRRLADVVYRQLVRDARPAPPTVPSAAPAPRA

SEQ ID NO: 48152 - protein, 347 aa, unidentified
MDQIIRIGMDTSKHVFQLHGVNAAEEPILRKKLRRQDMVAFFTRLPPTVVAIEACGGSHHWARLLQSLGHAVKMIPPQLVKPYVKRGKNDAADAEALCEAMSRPTMRFVPVKTPEQQAALMLVGLRDRLIRQRTQLTNAIRGYAAEFGLVAAKGPCKIEPLLDRIRADDTLPVLARELFEAQAKEYAQLQARLEEVDDKLMAWHRDDACSRRLARIPGVGPIGASMLVMKTPTPEAFRSARHFAAWLGLTPKDHSTAGKVRLGVITRAGDEALRSVLVVGATAVIRQVRRGQSAAASPWLVELLKRKPPKLAAVALANKIARIAWKLMVTGEVYNPKSASPVGAGAV

SEQ ID NO: 48153 - protein, 433 aa, unidentified
MNSPHPYDLVIGLDRSDKKADLRLIHTATGQRHSQIIDTAPEALWEWLLQLRQQYPQARVGLCLEQPAVHLIAFLESYEWITLYPINPITLQKYREAFVTSRAKDDAKDADYQADLLLTHHAKLKPWAPEDSATRAVQQRVYHRRAVVDERTGLTNRLTALLKQYFPQALMLCGEDLWRPLATRFLLKWPSLQAVQKAKPATLQTFYYLNGSRSAKLLEQRLALIPKAVPVTDETGVIESFVLRVQLICRQLQWVQRSVAVFDQQIAQAYAAHPDHEIFANLPGAGPVLGPRLLTSMGAQRERFTDATQLQHYTGIAPVTKKSGGSCYIHRRYLCPKFHKQSFHEYAGQSILWSRWAAAYYLQQRSKGCPHHTAVRALAYKWQRIIFRCWQNHTPYQEAIYEAALRKHGSPLVALFDKVELGKNPFKNPVKKS

SEQ ID NO: 48154 - protein, 330 aa, unidentified
MCISVGIDISAKTFDVVVRQNGKKHRAKKYDQSPKDHQNFTQKLLSLKPNIIVMEATGIYYLDLAIALYDAGLPVSVINPASFKKFAELTLTQSKTDAIDASLLAEFGERMSPRLWVAPSSEHLTLKDLGRQISRLKRDNTRSKNRLHALKSKQMTTNVLILDAEEGIQYCESRIKRLTQAALDIIEQNDELKIHMANMQAAKGIGQTTVISILAEFCILSRSMKAKQVSRHAGLDVKLSQSGTSVNGASRISKAGNAYLRSSLYMPAMSAVQHDENVRAFRDALVSRGKKKIQANVAVMRKYLTGLWAVYQTGEQFESAKLFSEIHKNV

SEQ ID NO: 48155 - protein, 345 aa, unidentified
MYYCGIDIAMKSSYIYITDSRGRKKTSGEIPTTAGVFRQRLRPYLRHGLRVAIEAGNQTAWIYDLLVDLGAEVTVVNPAKVKLIAESRRKTDKVDARILCELLRLDGLPHPVHVPDKEARSLRGLLVARRQLMSARTKLCNVVRGMLRQEGIQLPARHLTSFVGWQRLLRRSYAHEHIGVVLEAYYQSFVSLTRSIQTLDKQLAKRERQDARAARLKTMPKVGRIASLTFLAAVDEVDRFDTSRKLVSYSGLCPTVRSSGERTEYGSISREGRSELRAVWVQIAHLVARDTSRSTARLRRWYSKVASHRGKRTAIVALARKLLTIAYRLLKDQTVYCSSLVSRAA

SEQ ID NO: 48156 - protein, 366 aa, unidentified
MKQVSRVAAKPSRNNSQPKLTIGLDLGDRNSWYCVVDEAGQIRLEQRVRTNTKALQEVFGALPRSRIALEIGTHSPWISRLLSELGHEVIVANARKVRLIGESRQKDDRLDAQTLARLARIDPELLYAVKHRIAQAQADLMMIRARAGLVRARTGLVNTARGLAKSYGERLRGCNVRNMNPEKAESLSPELQRALEPLLSAIAELSERICEYNERIDELAQTSYSQVALLKQIKGVGTLIALTFLLTLEDPHRFRKSRDVGCYLGLQPGRRNSGQSEPQMHISKEGDPYLRTLLVQGAQHILGPFGVDCDLRRWGLKLAERGGRNGKKRAIVATARKLAVLLHHLWVSGEVYEPLHNRRAIVAAAA

SEQ ID NO: 48157 - protein, 374 aa, unidentified
MIPSLYYVSNEKRKGDHPLRIKQDNQIDFKGQDFYIGLDVHKKSWAVVIRNSGMRLKNYSMDPSPVQLKQYLDQNYPGGTYHVVYEVGYFGFWICRAFREMGIKCIVVNPPDIPTAHKEKDRKADPVDAGKLARELEKGELKCIYIPNEEDQHIRSLCRLYRKAVQDSTRVKNRIKGHLYFNGVKLPFESSYWSGKMIAHMESLPLDNGPARDYLILCLDELQYHRQRMVTIIGKVRHYVRQGRGSSIFQNLLTIPGIGFKTAITFYSEIINMNRFPNFEHLKSYVGLVPSISSSGETEYTRGLTYRSNKLLKYVLIESAWVAIRKDPALLHSFNKLILRMKKQEAIIRIAVKLLRRIRYVWQNNTPYAFGVLR

SEQ ID NO: 48158 - protein, 471 aa, unidentified
MKLKPSDSPRQPKPLRSPSSIEAAPLDTLKQINLNAAGMDIGDRSIYVCVPAGRDEQSVRVFSTFTADLNALADWLSQCGVKTVAMESTGVYWIAIFQILEARGFEVYLVNAAHIKNVPGKKTDILDCQWIQQLHTYGLLQASFRPDELTCVLRSFVRQRHMLIRNRASHIQHIQKALQQMNLKLTNVLKDITGQTGMSLLRDSLAGVHDPQQLARHRHPCCAKSEAEIAKSLEGDYRAEHLFALRQAVELFDVYTEKLRACEREIEQQLAKFTPQVNQPEQPLPPPTRRVTDRPKNHPLQDIRPALYQMAGVDLTQVDGLDILTVETILSEIGTDMSRWHSVKHFTSWLGLSPQNEKTGGKVIRTRTKKTNNRANGAFRQAAQALTRSKSALGQFYRRMRTKMGAPKAITATAHKLARIVYHMLKYRVPFAAVPPHQDETQSRERAIRQLQRQAERLGVTVVVEPSPQSL

SEQ ID NO: 48159 - protein, 370 aa, unidentified
MMRGKITLGVLDRSCRGPKRPRVSAGRHASSATEPEQLRGSTKPASQGRATMEDQMTPPQVFVGIDVSKAQMEVALRPEGRFTVANDEMGCTQLAERLRAISPTLVVLEATGGYEIPITGALVAAQIPVVVVNPRHVRDFAKATGTLAKTDALDAHMLAHFAEVIQPTPRAWPDEQTQALAALVTRRRQLVDMLTAEKNRLSQAPKPIRTSLKAHIAWLKRALEQADTDLTATIRQSPLWREKDELLRSVPGVGPVLTTTLLATVPELGTLTHKQIAALVGVAPFSRDSGLLRGKRMIWGGRAQARAALYMAAIVATRFNPIIRAFYQRLCQMGKAKKLALTACMRKLLIILNAMLKSGTPWRVATSQPA

SEQ ID NO: 48160 - protein, 403 aa, unidentified
MNSVGIDISKGRSTIAVMRPFGEVVISPFEVRHTGSELSKLARQLKSLDGETRVVMEATGNYHASVAKLLHDAGLYVSVVNAKLVHDYGNNELRRVKTDRKDAVKLANYGLDRWLTLPRYIPEEDTRLLLRNCYRQYRQYSKVQTVLKNNLISLLDTVFPNANRLFSSPIRGDGSEKWVDFVAEFWHCRCVSEKSERAFTSKYLRWCRKHGYNFSEAKAHTIYAEASGHIGVMPKSETTKLLVEQAVAQLRATSTALAALKLEMQTLASQLPEYPVVMDLFGVGPTLGPQLIAEIGDVRRFYSKKALVAYAGLDAPPNDSGDVTGRHKSMSKIGASSLRRTLFLVMSVYLQNAPLDEPVYQFMDRKRAEGKPYRVYMMASANKFLRIYYATVKAYLESLEHTA

SEQ ID NO: 48161 - protein, 369 aa, unidentified
MTSVGMDLGKKQSDVCVIDERDAVVERSRVRTGRDALSKRFANTPRCRIAIESCRDTGWVFDHLTSLGHEVVVVDTTRARALGIGQGRRKTDRRDAEALARAVARGVVPQAHVLSAAGRELRDALHARDQLVRVRGRLVTMLRGQFQGRGWATPRCATGDFATRLRSSGLPGVEAPEVQALLAVLRSVTTEIEQLERHLAARAARHEAVARLSSVPGVKLIVSLTVIAALDDATRFKNAHQVQAYLGLVPSEYSTGGKRRTGGITRCGNALARRMLVQAARSLLRTRRAQQDPLVVWARQVAARRGQKRAVIGVARRLVGILWAMWVDGTCYDPQGLARQSFAGLSRRARRAQQDAALMANATRSMAMA

SEQ ID NO: 48162 - protein, 435 aa, unidentified
MTLHENAVPLEAEDFAAWVAIDWADQKHVWALQETGSPRRQQGELKASPEAVDAWVSELLLRFPGRRIAVALEQKRGALLCLLSKYEALVLYPVHPATVSRMRAALYPSNSKDDPKDADLLLDILLHHRKRLRRLDADTVETRKLQILVEDRRQLVDQGTAYSNQLRAKLKLYYPQALRWLPDLHAVVAGEFLKRWPTLPLLQKSRRETIEKFFHQHNCRSEELIQKRLEEIPQAVVATTDAAIADSSVAMVRALVDLLAVLHTHIAALDREIAATAAVHPELPILASLPGAGPVMVPRLIAALGTQRERFACASELSAATGIAPVKQASGQSEWIHFRWACPKFWRQSFHEWAGHSLAKSTWAQAFYQEQIRKGKGHHAAVRALAFKWQRILFRCWQDRRPYDEQKYLAALRQKVPRTRRRPHKNIFYRGALSS

SEQ ID NO: 48163 - protein, 415 aa, unidentified
MDRRRYNVCCGADIHKKFLIATILLLDGTKLTKRFSMDLISLFEFRDWVNANGCEVVAVESTGSYWVPIYRILEGHVELIVANAYRIKNVPGRKTDTIDSEWIAELCLNGQIKPSRIFPKDARDLRSLTRARERYVDDKTRVKNRVHHILDSNCIRLSSVISDIFGKVGRYVLNCLLEGIDIDEIIEGIPVTSIKKKKSDQIREAIAGQLSETDIILIRGYLDQIDAIQTNIEELESEIRKRIAPLRKNLAIVMSVPGIGFISAAVILAEIGDCNDFDKAEQLAAWCGLVPSVYQSADKNYTGSITKQGSRHIRRILVEVAHVIARTTGKSKLKNFFLRIQARKGTNIAAVALARKVLCIVHHLLIMQEMYEEEERDRDDETEFLDNSGKMRLDDMIRYVVKAGYEVRKRVTVGG

SEQ ID NO: 48164 - protein, 389 aa, unidentified
MAEITRVLFALIVRVGVDLAKNVIQVHAVDRTGRRVVSRAIKREQFLAWCAQLPAGCLVAMEACSGAHHWARHLRVMGLDARLIAANFVSPYRMEGKSGKNDMTDAAAICEAASRPTMRFVPNKSCEQQAVMSLHREREGFKEERTACINRIRAVLTEHGLTFGKSPKVLRAVLADVIEDASNEMTGLARLVVQRAFEHWRELDEHMKWCDQQIGAHVRGSDDAKRAAKIIGIGEIGASALIAGVGNFKQFKGGHQFGAWLGLVPSQNSSGGKASLGRITKRGDDYLRTLLIQGAKSAVMSAGKRDDATSKWLQQLIARVGWQKACVAMANKNARILWAVMTREAGFDAKHVSVKPPGKCKAPAAPGKPPTLAAQAAALKLIQAAACIA

SEQ ID NO: 48165 - protein, 523 aa, unidentified
MATRFRSRTRRSGRFLTVAKPSGSLHPRVQKVGPEHFGIVAVDCAKARSKWMLADFYGRILIEPTVVEHNKRGFDSAIAQIRRARESHALGDIIVAIERTGIYHLPVKRVFSSNSFETRIVHPLTTRQYRLPADPGNKTDDTDLLAIHRATTNGFGLIEPQLDEVHGPLRLLARYRRTLVRKNASSRNQIITLLDVVLPGYTGLFHDIFNNPAALAIARTVTSAAEVQALGVDGLAQVLKTLGVRAQRRTLEQILAWTKGIENTADYAAMSNTIIVSLDDDRCARLQQIGMMEQKMAGLLARTPYVVLLSIPGIGVVTAGEFAGEMGPIANYASDQAITGRAGIYPSRYQSDKVDRCDGPLVRRANRSLRGVILLIADNLLLINRFFQGLKMRWQAEGMDYRDMCVHAAKRFCRIAFQMVAGRQVFRHPSCQKRDAILRKLTCFHVDHGTSMAQVLTDLQAAIDHIPKSEHTPEAKSLFDAMQPRNRRQQTGLRRLGEILPGVLAKVGVTAVELSSKGENDLT

SEQ ID NO: 48166 - protein, 309 aa, unidentified
MDTTVIGIDVSKDRLDVHVEPGGEAFAVARDAAGLEVLVERLRPLAPKIVAVEATGGFETVVAASLAAASLPVVVVNPAQVRAFAQALGKRAKTDPIDAAVIARFVAATNPEVRSLPDAETRLLADLVARRRQIIHMMVAERQREKRAPARTKRSILRLLKALQKELTAIDEDIEDAVRGSPVWREKEDLLASVPGIGPTIARTLLADLPELGTLDRRQVAALVGLAPFTRQSGQWRGRSFIGGGRATVRSAVFMGAMVAIRWNPQLRDFHQRLVAAGKPKMVALIAVARKLVTVLNAILRDRRPWQTA

SEQ ID NO: 48167 - protein, 345 aa, unidentified
MTKGMTVGLDLAKNVFFLVTLAGDGHPVGRKKLSRQQMLTHFARLEPCRVAMEACGSSHYWARELTALGHEVQLLPAQHVKAYRRGQKNDYNDAEAIAEACWHGRLRAVHAKSIEEQDRQSLDRIRRLLVQEQTALINQTRGLLAEYGLVIPRSKAQFQAALPRLLDDTETRLSPVMRELMQRQWQRYRTLREELGWYDRQLKALAESDPRCRLLQTVPGIGPVVATAFVNHVGDGRTFARGRDVAASVGLVPGQHSSGDRTILLGISKRGDKILRSLLIHGARSVVRQAHRKTDALSVWIQHLEARRGHNRTVVALANKLARIGWAVLVHGQPYRTRDTAVAIG

SEQ ID NO: 48168 - protein, 420 aa, unidentified
MSDMPTRFKRRLDIMTSNGGRLTPDGTRVSLPKPVPLDVATSTHNTRRSTMSQSRTLFIGMDVHKDSIAVAYVAQDHGAEVTYLGARGTRQCDIDQLVRKMQSKAKHLLFVYEAGPCGYWLYRYLPRKGYDCWVVAPSLIPHKPGDRVNTDRRDARQLARLARSGDLTVVSVPKVEEEAIRALSRAREDAISDLKDAKFRLKAFLLRQDIRYVGRAHWGPAHLRWLSEVVCPTPAQQIVFQEYVRAVQEHTERLQRLEQELQEQVNAWRLHPVVEALQALRGVQCTVAVTMVAELGDLTRFDTPRELMQFLGLIPSAYSSGEQRRQGSIPNAGKTHARKAVVEGAWAYRYPAKVSRHLQLRLEKPPKMIQDLSWKAQGRLCTRYRRLVSRGKHATVVTVAMARELVGCMGAIATQVPLTA

SEQ ID NO: 48169 - protein, 333 aa, unidentified
MMNMHSQGRVASGAPRPNAGIDVSKEHLDVHLLDIDLRVDNDASGWDALIAKLKESDVDLVVVEATGGYERGVVTALHRAQVTVARVNPRQARDFAKSMGVLGKTDRVDARCLRDFADMLARHKDRHKYITLPADPEREQLASLMTRRRQLVDMRVAESNRLEGATVRTVRSIRSVIKTLDKQLQDIDGDIDQQLERHFKPQKELLDSVRGVGPVTILTLTSALPELGRLGRRQIAKLVGVAPLADDSGKRKGVRRTWGGRSEVRAVVYMATLTAIRHNPAIKAFYSRLVAAGKPKKVAIVACIRKLLTILNAIVRDKAPWSDAAGLISQRSP

SEQ ID NO: 48170 - protein, 407 aa, unidentified
MQGSVITLDVSKGSCHYQGFIKKNQPSTKTRILKFTKKSFAELSAYRERLAIKAGQEDIPFIFEATGVYHKPLQKYLDDHGFTYYIISPLMSARYRKLELHSNKTDPLDCANIAKVFYEYDKLRVYQRMDKEYESLRDMNRNYEDMLVHLRKYKVRFKSMLDVIFPYYQKCFKNDGIYADLPLILLKEYKHPDIIHQTNEDIMVKKLSKLCPKHQTGYIRNKVQKVKELAEDVYSGCESTDIYVELFTELIETLQKQMKECDEQLIKIIETAAKSPYFDLIRSVVGIGDNLAARILAEIGDINQFDTRNKLISYAGLDPMIRQSGKKDGIHLSVSKKGNRYLRCLLYQAASANYRLKKHDVIYRFNQKKRQQSNPLNSKAANTATAHKILVIVYGMCKNGTYYNPCE

SEQ ID NO: 48171 - protein, 314 aa, unidentified
MIIPLRCVGIDISKSMLDIFDDAIGKPERIVNAPQPITEQVARWRCGNVFVVFEATGVYDRALAEVLRQAGIRFARINPARARDFARASGRLAKTDAIDARMLAAFARAMGPVADPPPEPARNALASFAKRRDQLVHMRAQEKNRRSESHDPAMAECITLHIDFLSRQIEAIEARINALIKAVPEICEQARLLRSAPGIGPVACMQLIAQMPELGRVGPKQVAALAGLAPLNVDSGSYRGKRAIGGGRKRVRDALYMGALNAARRDPSLKSFYQKLRVAGKPAKLALIAVARKLLTILNAMLRDRKIYAVAGST

SEQ ID NO: 48172 - protein, 413 aa, unidentified
MLLFIGDDWAEDHHDIEIEDETGRRLAKARVPEGLEGITRLHALLAEHAPADWSDLPSEEVAGRVFVGIETDRGPWVTALRAAGFQVFAINPLSSARYRERYSTSGAKSDAGDAHVLAEIVRLDRDHHRKIAGDTDLVDAVKLLARAHQTAIWERTRQVLRLRSTLREYFPAAVEAFSDLAAKDSLLLLARAPSPLRAAKLTRSQVVSALRAARRHHAEAKADALLAVLRTPGLRQPATTDAAYAAVVIGQVGIITALNEQIAQLQEVVAEHFGRHPDADIYLSQPGFGVVLAARALGEFGDDKKRFSDSRARKNYSGQSPITRASGKKTVVLARYATNRRLGDALHLQAFSALVASPGARVYYDALRARKIGHHAALRQLANRLVGILHGCLKTGTKYDETTAWQHQIVTAA

SEQ ID NO: 48173 - protein, 428 aa, unidentified
MADLLEGALPLNLVAIDIARYSNAVLIESSDGKRQRFRMTNNASDFDQLLSYLQALPGNCRVALEPTGDYHRPLAHRLLTAGHEVVSINSVAQARYREAMFNSWDKNDPKDAQVILEMLRRGTYQRYVDPQIAGHHDLQELAKTYYQVSRARTKVQHSLINHCLPLYFPEMHRYWCTTRNEWFVRFLLEFPTPTHVRALDRESFVAAAWDLVGRKVNKRAKLEEIWETAAHTAALPHAPDCLAVETFRITLRRYQELNVLRAAIEARAEAELHDNADFAHLKTLPGIGSVIAMTILAEAGDLRRFGHHRQFLKFCGFDLAKIQSGTQRGREQLSKRGNARLRLAFWMAGMAAVRMKENSFRSKYERYVHADPDDADLKRKALTAVAAKMARVAYSMIKKNQPYRQFFELGLPSGSIPLSAAVGAQATP

SEQ ID NO: 48174 - protein, 421 aa, unidentified
MESDYRIYVGIDWASEAHRVCVLDRERLIVAERSFAHAGNAVAEFAQWLRELAADSQQVAVAIEVPRGAVVETLVERGFHVYAINPKQLDRFRDRYSVSGAKDDRRDAFVLADSLRTDQPCFRRVSLEDPLVIQLRELSRVDEELQREGNQLANRLREQLHRFYVQALTLCPSADEPWLWTLLELAPSPSVAQRLRPTRVERVLRAHHIRRLSADDVVSALRVPALQVAPGVVEATTEHIALLLPRLRLVRTQRQQCGARIEALLDELQAANAEEDKLGEHSDVAILRSLPGVGRIVAATLIAEACAALTDRDYRSLRGHAGIALVTKQSGKQRMVLMRYACNGRLRHAFFHGARVAAIRDQPSKTYYTALRKRGHTHGRALRAVADRLLRILIAMLTTRTLFDSSKARTHAVNGLSEKLA

SEQ ID NO: 48175 - protein, 310 aa, unidentified
MSSFTVHIGLDVAKLHLDAHGQNQGYRVENDPKGHAKFIQWLERFNAPVHVVCEATGGYEQPVVQALMAASIPVSVVAPARVRAFAKSMAILAKTDKIDAMVLERFGQVAELNTCRPQSPAQLQLSALVTFRLQILDKVDALHNQMEHLPKGPVLASAKRLANSYQRELLKIDHAIETLMAQQPVLGSNFKRLCQVQGVGRFTALSVLAFLPEIGSLSQKQVAALAGLAPRNKDSGKFKGYRSIGGGRHKLRACLYMAALTASRSNPVLQVFYQRLISSGKKPKVALTALMRKLIILLNHIVKNPDFQLA

SEQ ID NO: 48176 - protein, 414 aa, unidentified
MNFVGIDVAKTFHMVSIVDENEARVINKAFRIENTMDGFEKLLKVLDSISLNKDDFILGLEATGIYGENLLEFLKSKGYNIKLLNPFQTSRYREQRTMKKVKNDSIDSLIIAYLLNDGKYSSGYVTDDEYQSLRTLYRNRASIQADMKEVKKRILTQITVTFPEFEGFIDPFSVSGLALLDKYPTAQHYKHSSVDRILKLFRHIQGNNFNHNKALKLLELSRDSIYSGKAKDARAIAIRSSIRLLKMYLGELDIIEAEILSLLDSKATVTTVNELGQEITKSDTLIENLKTIPGVADKTIAAVLSECGDLTRFPSIPKFIGYLGLFPTENSSGKSRSVGHLSKRGSSLVKHALYMSATSCLIHNPQMKLLYDTKRSQGKSKKESIVAVSRKLATIIYSIFKYNTPYNPNRVFTN

SEQ ID NO: 48177 - protein, 365 aa, unidentified
MQKAELSCEADSENDLGGSSKTMYYIGLDVHKRTISYCVKDAAGRVQQEGKIGSIRRELDGWIKSLPQPRTIAMEATIFTGWIYDHLLPHAEKVKVAHPLMLRAIAAAKRKNDRIDASKIADCLRCDFLPECHMASTEIRDRRRTLRYRELLVKQMVQMKNRVSGLLMEKGVTHTKRRLHKLGYFAELMAGSQEIDQSIRPLLKPSREHIVRAQKLDYALVSSLERDPLLVERLKRLRTVPGVGPITALTWALEIGDVSRFRSIKQAISYCGLCRAEKSSADKVMRTPISKQRNKHIQHVLVEAAKLAPRQCHELALVYEKEMQRGNRNRATLAVARKIVAYLLAIERRKQDFVPTEQFGGTAAA

SEQ ID NO: 48178 - protein, 414 aa, unidentified
MNRMTDPPVHVTGGVDTHADVHVAAAVCSASHRLLGTAEFETTPAGYVQLLAWLLRFGLLDAVGIEGTGSYGAGLARFLAAEGVRLVEVDRPDRAARRLQGKSDPVDAEAAARAVLSGRAKGTPKSRDGIIEAIRVLQIVYRSAVRDRTAATNRFQALVVSAPADIRADLQQQPPQQRIERARRWRDRDGDDTAARATRQALRELARRIHLLDEQATRIEVELDVLTEQAAPGLRDLVGVGVHTAARLLVAVGDNPERIHSEAAFAHLCGVAPIRASSGKTHRHRLNRGGDRSANHALWRIVMVRRLYDERTRAYVARRTAEGLSDREITRCLKRYVAREVHRALTRPLPLAPRGAELRRLRKQAGLPMRLVAEPFDITVQRLSRIERGITRDPDLQTRIHAWLTETNTTHMAA

SEQ ID NO: 48179 - protein, 327 aa, unidentified
MDDSKYIGMDVHQASIVAVVLDASGKVVMESILETRVETVLQFIRGLRGTLWATFEEGISAAWLHDLLKPHVARVVVCDPRKNALLKSGNKNDQIDAHKLAELLRAGLLSLVYHGESQERLLKELARSYQALTQDTTRVMNRLKAICRGRAIRCAGTKVYSARHRGDWLKQLHETGARRRAERLYEQLDRLQPLRRQARQELVSEGRKHPAAADLRTIPFLGPLRTAVLIGIVGTPHRFRTKRQIWAYSGLGIQTRISGEYQLSGGRVQRTKKVLGLRGLNRNHHPELKRVFKSMATEASLRRGPWCDWFRARVKEKVSIRPWRASP

SEQ ID NO: 48180 - protein, 385 aa, unidentified
MTIQIQVPRFIPRDYDVFAGLDVDKKSMAVTFADHAGSQRALRMAHQVTPLLNYVRKHFAGQRVAFAYEAGPTGFGLHDELVRRAYTCVVVAPSKVPRAPGERVKTNRLDSRKLAESLRGGQLHSIHVPSAVYRNLRHLVQMRDTHVRQLTSSKLRIKSLLLFEGIAFPEEHEKWTARAMRELQTLPCSDPVRFKLDDLLDTLHFHFQAAARATKQIRQYCLQEPELQQSIEVLLSLPGIGWIVASHLVARLGNHREIKNGRQIAGFLGIVSSEHSTGDKENRGEITRSGDSRLRNKLIQSAWTAIKRDPELRAFYRRIYQRHPKKVAARKAIVAVARKLTNRIYVVLKEQRPYVIRPDSSIAPLTAEETVGPRERLDGAQNDQS

SEQ ID NO: 48181 - protein, 441 aa, unidentified
MSHGRALSRGDRRRNERLARLRSIVRRDFAVVAVDLASAKQAAVVTDHDSMVLGRRMFAGDAWVIDNILDWAEPIAAKAGYAGVVVGCEPTGHRWKPLLDRCRARGLELVCVNPMLVHRGREEEDFTRDRSDFKDATIIAKRVAELRCYVPYVMEGHWCRLRHLGARRADQLVAVGSARQRLRDLLECAWPAALSAAAEPLDALTWRAAMAVSTDPDRIVAMGFDAFADAVRKQLPRWAGTRRNLRVLRAVFDAAHAPGGVQTERAAACERAAYALDDRHYALDQVADVEHRMVEVLDALDLSELVTTITGLSVVGAAAILAETGDPARFDCARTWAKHAGLCPRANESGNFHGSTKVSRRGRPGLRLAAWRALWPAVRHNPVYAARYTHLTTRADNPLCNGQARAAIAAALLRQLFIVVTQRVAWDPAIAAGTGVVPQAA

SEQ ID NO: 48182 - protein, 457 aa, unidentified
MEAYLGIDVSKGYADFTLLDKEKQELEKVFQLDDTCGGHDALKKLLKQFTLQHNLSTMYCAVESTGGFENNWYNWLIVLKKELPIKVARLNPSGVKNNVAASLERNVTDALSSRYIAQYIISHAEKVKYDVPDNIYSSYRSMSKHIALLKKQNTQLINEMKMVLYSTFPELMRYCKQGMPAWVLDVLKKYPSPAAIEKLKVEQLSKIKNVTHDKALSIINKAKNSTTSRNNSVQEFLIKSLAKQIADKQELIDEHKNYLADNCKGAEVDLIDTIPGIASYSAAAIMIEIESIHRFATPSHLASYFGLHPVMKESGDKQFAYRMSKKGRSGMRALLYMCAQTSVLHDEHLKNIYHRHRSKGKNHKQAIGVIMHKMLRMIWGVLTSTQPYNATTDKNNQTKKIKQQPDNKKEELKTKRRYQALDTDAPISNIQSKKRKAQSEPQVSSAEQVRDHQIAPV

SEQ ID NO: 48183 - protein, 353 aa, unidentified
MTDIVTHNDPIATIGMDLGKRSFHLIGMDARGKVIMRQQLSRGRLERHMANLQPCLVGIEACAGAHHIGRRLSAFGHNVRLIPGQYVKPFRKGQKNDYRDAEAIAEAVQRPTMRFVPIKSAEQLDLQALHRIRSRLVGHRTAVINQLRSFLLECGVIVPQGPARLREILPSVLAQRTDVLSPRMIRLIEELADDWRRLDDRVEAVTSEVHALARQDECCRRLTSVPGIGALTASAVVATIGNGAAFSKGRDFGAWLGLVPKQLSTGDRTILGRLSKRGNKYVRTLFIIGARAVLAKPGSWAKFGLQGWLAAAAKRLHHNVLAAALANKLARIAWSVLYHGRSFARNFEPQSVS

SEQ ID NO: 48184 - protein, 288 aa, unidentified
MANKDTEAAVVGGVDTHKDLHVAAVVDQNNKVLGTRYFSTTRQGYRQMLAWMTSFGALKRIGVECTGTYGSGLLRYLQNAGLEVLEVTAPDRMERRKRGKSDTIDAECAAHAAFSGIRTVTPKTRNGMIESLRVLKTCRKTAISARRVALQIIHSNIISAPDELREQLRNMTRMQLIRTLGSWRPDASEYRNVTNVYRIALKSLARRYLELHDEIAYLDVMIAAIVDELAPELIKRHAVGYESASQLLITAGDNPQRLRSESGFAALCGVSPVPVSSGKTNRYRLNRG

SEQ ID NO: 48185 - protein, 409 aa, unidentified
MRCVEAGLVHDGYGVFLGLDVGKGDHHAVGLAPDGKRLHDAPLPNTEVRLRQLFDKLARHGAVLVVVDQPASIGALPVAVARACGHQVAYLPGLAMRRIADLHPGSAKTDARDAYVIADAARTLPHTLRRVDTGDETLAELEVLVGFDDDLAGEATRVSNRIRGLLTQIHPALERVLGPKVHHKAVLELLSRCGGPVGLRKAGRRKLLSIAAAHAPRMGERLVEQIMAALDEQSVTVPGTTAAETILPRLADSLRDVLRQRDQVAGEVERMLDAHPLAPVLTSMPGIGVRTAARILLEVGDGTAFATPGHLAAYAGLAPVTRRSGSSIRGEHPPRGGNKNLKRAFFLAAFAALADPTSRAYYDRKRAEGKRHNAALICLARRRCDVLFAMLRDKIPYQPRPTDQAPAPA

SEQ ID NO: 48186 - protein, 338 aa, unidentified
MVYGAIDLHMRESQIRIVDAAGRVVREGRVPTTVARLVAVFDGHGPMRILVETGTESEWVAQALEAAGHEVIVADPNYAPMYAEIRRKVKTDRRDVVALSDANRHGWYRATHRVSRAQRDLRQVLRSRRHLVQLRSGTISLIRSLLRQEGYRLPSSSSERVPGRLAALALPAGLRETIAPLQRMVETLTTEIAAVDARLEGRAHSDPVVQRLQSVPGVGPVVALTFRAFVDDVSRFAHAGQVSAAIGLVPREDSSAERRHRGHITKAGPRELRSLLVQAAWSCWRSTASGALRAWVERLAGRRGKRIAVVALARRLSRILFALWRDQTVFDAATLAAA

SEQ ID NO: 48187 - protein, 371 aa, unidentified
MNHVTSIGLDVHARSVTAVALDSITGEVRSQKFGYSPAEIAGWILQLDSPKAVYESGVTGFHLVRELREMGVDCIVGAVSKMHKPASDRRKKNDRNDAEFLARQLMAHNIVEVFVPDVETEGARNLSRALEDIRDDLTRAKHRLTHLLIRWGYIWNEFNEDGKRRGSWTHAHWEWIRGIELPDAAARESLDYYISEVRHIESQKKAIEKRVAQCASRPRWRDRVEALKCMKGIETVTAFALTVEAGVFSRFDSARAFASWLGLVPSEHSSGERASRGGITKAGNSHLRKLLVEASWHYARATKERKRSLYDESVPASISNHAAVGVKRLVERRRHLSCELRKRPVVANVATARELACWIWALGRMSEGALA

SEQ ID NO: 48188 - protein, 424 aa, unidentified
MDKEIDPLKKNSKSPRKKEQTSKRTRLERPVQRKTKEVLAELVDKLRGKLERKATSASPGEAGPRAELRPNLDRLRVGVDLGDQKSQYCILGLEGETLSEGQVGTRQADVAEFFGAIVAARVVIEVGTHSAWVQEIIAGCGHEVLVANPRLMEGSRRRKRKNDRIDANKLARLGRVDPQSLHPIKHRSREARQDLVLLRARDALVAVRTELINTTPGLVKSMGTRLPRCSSRSFGHKAGAAIPEAVREALQPLVQLAEGLSACIAGYDRRIEELASQKYGHTKMLRQVKGVGPLTALAYVLTLENAERFSKSRSVGPYLGLVPKQEDSGESQPQLGISKAGDTMLRKLLVGSAQYILGPFGPDTDLRRYGLRLCERGGKNAKKRAVVAVARKLAVLLPRLWVTGEVYEPLDYRASGTMTQPAAA

SEQ ID NO: 48189 - protein, 360 aa, unidentified
MRIIGCDLHARQQTLAMLDTETGEVVNRTLRHEGNEVREFYSELARPVLVGIEAIGPMQWFLNVLEELGITCQVGDASKIRAAEPRKQKHDRRDAELILKLLVEKRFPAIWLPSKELLDLRALLLHRHQWVRIRTRIQNALQAIALANGLRLGPSLWSYDGQAKITFLPLAPHASWRRSALQAMYRHMKEEIEKLTVQVAEQAEHRSGAPLLMTHPGVGPVTALATDVFLGDPQRFADGKALASYVGLIPREYSSGARQRLGALTKQGSPLLRFLWNEAGAHAVRLDPELQRFYRRKLVQKGLGKARVAAARKLGIRLWIMLRDQIDYEEFCRRGQQQCGAACAGMLEVGNGTNGHRAVD

SEQ ID NO: 48190 - protein, 341 aa, unidentified
MLVLGIDIGKAELVVSLQKDNTSPLPQILGEPQAFSNTPAGFNKLTRWLARQSVCLGELHIVMEATNVYWEACAYTFHALGCSVSVVNPAQIKFFAKSTLRRGKTDAMDAEIIARFGVMMQPPAWVPPSRALVEIKQLVRERESMIQQQSRESNHLQALQSGQYATPLAVRLARQRLALLRRQITCIEAALLKAFQEDPELHRKLQLLMSVPGFGFVAAATVLAETNAFETLENGHEIAAYAGLAPAPNQSGLSQRRDRISKVGNARLRRIAYLAALGARLSHSPFKTFYETLRQRGKPPKVALVAVARKLLRVGLAVVKSGKPYQAVYRRGIEEEVLCAT

SEQ ID NO: 48191 - protein, 377 aa, unidentified
MSNYSHYKVGCDAHKRYSVFAVRDGKGKVLDRVRVNHERGAIQGFLSQFPSGMPVALETVGNWYWIVDEIEAAGCVPMLAHAAKAKVMMGLVHKTDKLDAEGLGTLLHNGTLPTVWIPPGDLRDERELPRTRMAFSKVRTMLKNRMHSTMAKYALSLDTQSDIYAAKWRPQLAELLRRFPDETRRCMDQELELLDLVQAHIDRLEARILERVRITPTIQLVMSLPGPAEILSIVIDREVGSIDRFPSPKKFCGYAGTVPKVKGSGGKYHYGRMIKQANNYLKWAFIEAANVVVRQRHHPNWRNKYVVLLYERTRQRKGHAVAVGATARYLAEATFWVLKKGEPYREPAPRHPAGKKPPSRPGRGRPAPNMGPPRSAS

SEQ ID NO: 48192 - protein, 427 aa, unidentified
MNNVDAIRIKQFRQFKKEIRGSREYELVGIDVAKEKHHAFFGTAVGKTLLKSLVVGNNLEGFEKLLSQAEALRVQAGLSKVAFGLEPTGDYHKPLGEHLIKCAKMVVLVSGVALRRNRELLDGRWDKHDVKDAANVADLMAQGKCMFYEYPDSNVRDLRVLLSLKMRLRKQEHGLRVRIRNHLVAQYFPELDRVWNQSESENLAIVRWCLDPSVVAGLDLDEFVRRVTCRDRGVRQHARLKAIWKTAVDSIGCQVPEAVEVECKIVVEGLRRLREEIKEVSEEIHQVSLRFPEYPFLLSIPGFGPEISAQVLGAIGDPYRFENAGEVLKMAGLDLGAHRSGKTAKTAVPVISKRGKAHLRYMLYQAALVASCPNRALMRYYTKKLEGRQQERGIRTKMRVKLAAKLLVIAWTLMKKKEPFDPIRLRV

SEQ ID NO: 48193 - protein, 341 aa, unidentified
MDKITTIAIDLAKHVFQVAAENARGEEVWQKRLRSRAALHAFIEGLSPPLKVGLEAGLGAQAWARVLAARGLEVHVLPAQRVAEHRSGAKNDCNDARAILRALHDRSIHPVPVKSTVQLTMQALLRVRAGGQRRHTAVANQMRGLLLEHGVAIAQGDAALTRALERVLPDAQVPIPDRVRALLAELAGEWEGLSQRVQAMDPELAELARADPVARRLCTIPGIGPVTATALVCKGLDPVRFRNARQFAAYLGLIPDQHSSGTKLRLGRMSRRGDRYLRGLLVSGAHAVLRHTRRDALDAGHRRILHWQQRHGSKAIAVRLANHNLRVVYALLRDHADYHAA

SEQ ID NO: 48194 - protein, 437 aa, unidentified
MEILYARVGGIDVHKKQVTVTARTPEEQGRVRWETTRTFRTFYGELLEMASWLVVQRGITHVAMESTGPYWWPVYSALREVGGPDLVIEVVNAAHVKAVPGRKTDVKDSQWLAQLMEVGLLRGSFLPPEQVRAMRDFTRYQTKLTEERSREKQRLLKVLEAAGIKLDNVASDTFGVSGRAMLAALVAGERDPVVLAALARGVLRNKTEDLRLALAGRFTAHHGQMVALHLARIDHLDQMLTQVTDTIGHTGDPAAGLIGPFTAQIELLMTIPGIGERVASVVISEIGVDMSRFPTAKHLAAWAGLAPGNNESAGKRRSGRRRKGNTHLCSILIEAALAASRTRTRIGARYHRLHRRFGGRQHPGAAKKAAFAVAHTLIKVIWTVLATGQPYTDLGPDYYTRRINPETHTKKLIAQLEALSGKKIIFVDDEGGEPPAA

SEQ ID NO: 48195 - protein, 423 aa, unidentified
MPYRIAGIDVHKRKLAVVVADVEVEEEYQFERRWYGSNPEQLQLLSDWLLEQAVEEVVMESTSQYWKPLWGVLERYWKPICEKREDAGHMSGSLHLAQALSNRGRRGRKKDFRDAERLVKRLVSQELILSFVPDAEQRLWRTLTRTKYQRTRDKVRLQNQLEALLEESHSKLSSLVSDLLGASARRMLKALAEGETDPAALAALADRHLRATPAQLRDALGACTELSPVYRRLVRLALDDLQLIEQQIARLDQEIASLLREHQDAVQRLAEVPGLGVDSAQQIIAEVGAKAATFASAKNLVSWVGACPGEDESAGVNRSKRSPKGNRQMRRILNQAANAAVKHKGSIFEIVYRRFVPRLGHNKTIGAIAHRLCQLIWISLHRSVRYEERGPAVSEKSKRQRTSRMIRTLRNLGYRVEPLGNPA

SEQ ID NO: 48196 - protein, 427 aa, unidentified
MKYTQNEKIMQITENTLIIGVDIASDVHYARAFDYRGIELDKVIKFNNDIQGFKVFSDWITKIATNNHKQHVMVGMEPTGHYWFTFAQYLEENNIKIVLVNPYHVKTTKELDDNSPTKNDRKDPKTIAMLMKDGRYMEPYIPKGIYSELRNATNTRWQLVKKLNSIRNQVKRWIKIYFPEFNNVFADWEGKAALIILKHFPTPEKITKLDAPEIIATWRKEISRAVGIKRATKLIKAAKASVGIKEGLIAAENELHILLEEYELLMKQHQNTMSLIEKLTMQIPGVKEILKIKGVGLKTLSGFIAEVGDIERFDHPKKVQKLAGLNLKENSSGKHKGQTTITKRGRKRLRSILFSTIMPIVAKNKEFQQLHKYYTTRKENPLKKKQSLIVLCCKLIRVFFVILKTGVKYDPVKMMNDIKRPTLQEVA

SEQ ID NO: 48197 - protein, 332 aa, unidentified
MRFYTKQHPFYCGIDLHARTMYVCILSQDGEVVLHRNMQAHPDALLKAIAPYRNDIVVAVECIFTWYWLADLCTREHIPFVLGHALYMKAIHGGKAKNDRIDSQKIAVLLRGGMLPQAYVYPAAMRATRDLLRRRMHLMRKRAELLAYVQNTNSQDNLPEIGKNIAYKANRDGVAERFPDPAVPKSIEVDLALIDYYDRLLTDLELYIVKTARQQDANTLYLLQTVPGIGKILRLVLLYEIHQIDRFPRVQDFVSYCRLVKCAKESAGKRYGTSGTKIGNAYLTWAFSEAAVLFLRNNAQGQQYLARLEKKHGKGKALTILPTSWPALSTTC

SEQ ID NO: 48198 - protein, 391 aa, unidentified
MDEAWAGVDAGKEFHWAHVLDVSGRQLLSRKVENDEADILRLIVEALSLAEEVHWAVDQPGGGAALLLALLWERGQKVLYVPGLSVDRARDTYRGESKTDARDARVIADQARMRPDLGELRPGEQELSELQLLLARRRDLITDRSRTITRLREALLSLFPALERALDLNSKGPLILLTHYQSPAQLRRAGHKRVAAYLRNRGVKGSSSVAHRALSAAGSQSVTLPAQEVASHIVAELAGEILALKERIESIDEELQKRFFAGPEARILISLPGMGAILGAEFLVCVGDISAFESADRLAAYAGLVPAARDSGKRVGNHRRMRGGNKTLKRVFYQSAFASLRGSAQSRAFYDRKRAEGKRHTQALIALGRRRVNVLWAMLRDGTTFEARSAA

SEQ ID NO: 48199 - protein, 324 aa, unidentified
MTQTIEKRNNEFVGIDVAKGKLDICLGEANKRSSISNSAQGFKELKKSLPEPNRCIVVLEPTGGYEKEVIAYLQKNSYKVVLANALRVRRYAEAMGFLAKNDPIDSYVIKSFGEDLFPKGKLTVLITKSDDFRKLEMWLNRSRQLVKLITSEKNRIDKTTDKDIIKSIERIIRGFEKELKSIDSKLVKLSDKCQLSKQATKYKQVKGIGKVCANALVIYLPELGKINHGQIAALVGVAPYCKESGKNKGKNKIKGGRQTLRGLLYMGTLSAITHNPAIKTFYDRLMKNGKHHNVAMVACIKKLLRILNAMAKNNTSWQENYGVK

SEQ ID NO: 48200 - protein, 408 aa, unidentified
MNAVGIDVSKGKSMVAALRPMGEVALLPQEFLHTEVGLEQMAYAIVALGEDTRVIMEATGRYHEPIAAALHEYGIYVCVLNPLFIKQSGGGSIRKVKTDKADAMKIAKYGLDNWVELREYTPMDTVRQQLKLCSRQYNLYMKTVVSLQNNLISLTDKTFPGVNELFSSPERADGHQKWVDFVMTFWHCDCICRVSEKAFTDRYQKWCKRKGYHFSTEKALDLYAGSCGHFTTLPKNDNTKLLITTAAQQLLAGKTTLAALRTEMTRLAKQLPEYDTVRAMYGVGETTAVQLMAEIGDVRRFPRRSSIVGFAGVDPAVDQSGKHSAKSVPTTKRGSPHLRKTLYQIVCTYLKKSPADEPVYQFLDKKRAEGKPYFVYMTAAQNKFLRIYYARVKECIETFDAQQDTVQN

SEQ ID NO: 48201 - protein, 392 aa, unidentified
MEIQDETGRRLAKARLPEGISGIARLHQLVGRFLPEDGDGAGVKIGIETDRGPWVAALVASGYQVYAINPLQSARARQGHDVSGAKSDAGDAHVLADLVRTQSHQLRTVAGDSENAGATKVLTRMHQSLIWDRTRQVLRLRSALREFFPAALEAYEDLAFPDVLELLTKAPEPDSAARLTRAQITAALTRAGRRDREVKTAAIMLALRTEHLRQPPLIAAAYGATVRALAVLITTSNEQIAALEGQVEACFGQHPDAEIYLSQPGLGAVLGARVLAEFGDDPTRYDGARARKNYAGTSPITRASGKKKVVLARYVRNNRLADALHHQAFSALSGSPGARAYYDALRDRDISYNAALRQLGNRLVGILHGCLKTHTHYDEAVAWNQHTQQAAA

SEQ ID NO: 48202 - protein, 371 aa, unidentified
MARLHTMIGELTGDIDPADVEVLVGIETDRGPWVAAVVTAGYAVLAVNPLQAARFRDRLGVSGAKSDAGDAHVLADMVRTHAHELRPVAGDSARAEAIKVVARTHKTLIWERTRHIQRLRHALRDYFPAALVAFDDLAATDTLELLAKAPTPAQAARLTTAQISAALKHARRKNVAEKAAAIQAALRAEHLSQPEVVATAYAASIQALIAVVTVLRTQITGLQGQVEAHFGQHPAAEIIASQPGLGPALGARVLAEFGDDPHRYTTAKARKNYAGTSPITRASGKKKVALARFIHNDRLIDALMTQAFSALRTSPGARAYYDRQKARGANHNTALRQLANRLVGILHGCLKTGTRYDEATAWSHHAANVTA

SEQ ID NO: 48203 - protein, 318 aa, unidentified
MNQSVGIDVGKEELVACIRDTDGKSAMPAPFPNTSIGLKKLIVHIKTEGIGADDPILLESTGPYHWQAARTLADRGYFVKVANPLHTKQIARLSIRKRKTDNVDASHLAFLASQQYGYRFIETEEMAKKKALVRHFWKLRRTATNLMIHERYLKQYRHISRASVSALLVKRCEKLKKEIVQEWSTGNDVKYLDSIPGITPFLAATILAELMPLERFQRIDQIIAFAGLDPSVKQTGGKRGTHGPISKRGSPTLREALFLAAFGSFSKGLMRGVYKRYKDRGLHHNAILCILARKILRIAVALLKKRRVFDPARLLTGT

SEQ ID NO: 48204 - protein, 416 aa, unidentified
MTFKIVRFICGGMDVHKNLIVATIGTTDKQTLNTEYIQQSFSTFYSDLIRLKEWFISHDCYDVCMESTGKYWIPIYNVLETELNICLTHPKYVKAIKGKKTDKRDSKWICDLYKCDLVKHSFIPEKEIREMREIARYRCKLVYMRSSERNRYQNCLTVSNIGLASAVSDPFGKTATNIMKELMQSEVIEDDKILKLIHKNCKDKDKILDSLQGYHIESDQRFKMDTVMNHIEYLDKQIQACEAELIKRAYPLRDYFQHITHIKGISALSAILIVSEIGTDMNQFESDKQLINWAGLSPANNESANKKKSVRISKAGLYLKPLLVQCALSSIKDKNSYFGIKYCRIKKRRGHKKAIIAIARMMLVCIYHMILTGEEFNPCDYESLTNPKPKKEPTMTVESALQFLKDSNFDFSSIQL

SEQ ID NO: 48205 - protein, 420 aa, unidentified
MKVVYQTCCGVDVHKSFLVATIIKTISGVEPSYQKKRFSTFNNSILQFKNWLIENQCRDVCMESTGKYWVPVFNLLEDDINVTIANPKWVKAVKGNKDDTKDSKWIGDLFRLGLVPGSYIPCKPIRILREFTRYRYKLTSCRTSEKNRYQNALTVCNVALDSVVSDIFGKSATSVIDYLIERSDNSINHEEIASRLLRSLKKKSDSVIESIEGYQMTAPQKYRMRLVRAHLDYITSTINDIDTMLDSLIAPYENAVQLLCTIPGVDRNSAITVISEIGTDMTPFSNSKRLCCWAGLTPGNNESAGKKKSVRITRAGVYLKPALVQVAHAAVKSDKSPYYKQKYERIMKRRGKKRAIIAIARMILTAIYQMLSTGEAWNPTDLYKIDIPEPLKEKQKEKAIKQAKKLLIREGILSESQLAS

SEQ ID NO: 48206 - protein, 401 aa, unidentified
MKTVLSVDVAKNKSMIMLMNSDGEILIDTKEIKHNLEDFEKAKEEIKEISPENLTVFMESTGTYHLPVERYFKENGFNTLVINSLTTKNNYDTIRKTKTDKKDCYRLAKLFFVNEVEYHELSKKDLYANLKAMTRQYFYLLQQNVSCKNRYKRLLNICFPELEKIFKSTRIYDDTALNFINEFPHAEIVKEKRIDALYNNLYKTNGRNLNFYKRLSETIKIASANSYPGVDKEHKDVKNLSDMAKIVQNNNNVINELRDKMIETAKKSPYYEIINSFYGIGEILTAEILGELGDITRFDSPKQLIAFCGLDPTIKQSGKSINVKGAISKRGNKYARYILFNCSQMVVKLGASNYPEHPVYIYYQNKKAEGKHYYESLTACSTKILRMLYSMCKNNKQFLEN

SEQ ID NO: 48207 - protein, 322 aa, unidentified
MQSVIGIDVSKEKLDICALFDGKSRKKIVENSVSGFKSLRNWISKNNIDDPHICMESTGCYSEGVAEFFHELGFKVSVVNPLQIKAFRSSKLIRQKTDSVDAQIIAEFCLQNAPAPWNPRSPEQKELHNLNVRISALKSELHRSSNALENRNLSKVILKSIHAEIKFLKKQIDLLENEARKIINSNKNLKEQFDRITEIKGVGEKLALAIIADMPDVSNFKKAGQFAAFAGVSPSHFQSGSSVRGKSHISRLGSKSIRKVLYMSALVVKNYNPHFRKFVQKLQKKGKAPKVIIVAIMCKLVTILFGMLKNSSDFDPKLAFGD

SEQ ID NO: 48208 - protein, 388 aa, unidentified
MNVGADKSEPLTAIRTDLGAIFVSLELSRSSWLITSLSPGGGEKMSKHSVPGGDFAGLMERFAQLQEKARLRTGQSFRIIVVQEAGLDGFWIHRALQNEGIESHVVDAASIATSRRRRRAKTDKIDGETLVRALLAYKRGEPRVCAMVKAPTPGEEDRRHLCRERKALTAERVRHVNRIKGLLFSQGISGYQPLRRDRRQRLEELQTGDGRAFPQHLKALVNRELDRLELLLKQIKTVEAARDALLAVGQTAKPAPAAMLLEIRGIGPEFAAILWSEGLFRHFENRRQIAAYAGLAPTPWQSGAVDREQGVSKAGNPRLRTTLIQLAWLWLRNQPRSALSLWFHERVSRNGGRLRKTTIVALARKLLVALWKYVTAGVVIEGVTMKVA

SEQ ID NO: 48209 - protein, 331 aa, unidentified
MNQAGIDIASETFDVQKRCGESLSHQTFSNTRSGHRKAIEWLRRGAKRVRVCMEATGIYHLQFALTLSRAADVELMVINPRAARRFAEAQMVRGKTDKVDAKVLLHYLERMQFVLWCAPSEQHLVLQSLAHRLSQLTKERVRECSRLHAVKRAGAHTHEAQNDIQVHIRFLQRRYQQLEAKAIALMQQQSRMAQDLELVDTVPGFASSSAMKVLAEVGVLPKDLEPQQWVAQAGLDPKPIESGTSVNSPRRISKQGNARLRAVLFFPSMVACQRDPNVRAFYEKLIARGKTKRAAQTAVMRKLLLSIWGILEHRQPWDGAKFYRLPEPGSA

SEQ ID NO: 48210 - protein, 320 aa, unidentified
MNMHIAITAAGVDIGRDYLDFAIAPTGLFKRFPNTDGGVAKLVAAVCKHQVKTLVIEAIGPYSYRLLRALRGVDLSVGVVNPQRIRAWRAAEGKRAKNDRLDAQAIARFAQKMPDVYRPIPDEASLKIKAMSARRRQIVEMIAMEKTRLKQAFDDELLASLRQMSALLEAQRDEVEARLNALLREAGRGDMLALLQTAPGVGPRIAATLAADMPELGHIGRRAAASLAGLAPHIQQSGINRGRASISGGRPCVRTALYMAALVASRSHPRTKAEYKAMLAAGKPPKVAFVAIARKLLVALNQMVAETKPWTEDQKLQVKD

SEQ ID NO: 48211 - protein, 370 aa, unidentified
MQQSSTLYVGLDVHKDAIAVAYVAKEHHAEVVSLGTIGTRQCDIDKLVRQLQSKSKHLVFVYEAGPCGYWLYRYLTKKGQVCWVIAPSLIPKKPGDRVKTNRRDAIKLARLMRSGDLTPVYVPKVEDEAMRDLCRAREDTIRALKAAKFQLKAFLLRHDIRYTGRATWGPAPLRWLSEVVCPTPAQQIVFQEYVRTVTEHTERLERFEQDLTDQVQTWRLRSVVDALQALRGVQFVVAVTTVAELGDLTRFDNPRQLMSSLGLTPSEYSTGDRRRQGGITKAGNSHARRALIEGAWAYRSPAKVSRHLQLRLEKVPKPIQDLSGKAQGRLCKRYRQLSARGKNANQVVVAIARELSAFMWAIAQEVPLAP

SEQ ID NO: 48212 - protein, 375 aa, unidentified
MGHHREAFIGIDTAKLRNAVAVAEAGRKGEVRYLGEIDTSEVATRKLVAGLAAKHRKPTFCYEAGPTGYGLQRLIESLGHTCLVVAPSLIPKKAGDRVKTNRRDAEGLARLLRAGELTAVWVPDARHEAMRELTRVRDAARQDITRKRQQVSSMLLRLGKIYPGIKTWNARHRSWLANLRLEHREQRFALEEMLQAERQAGERIERLEQAIREAVADWSLAPVVPALMAMRGIDLVAAVTILAEIGDLQRFKSPRQLMAYLGLVPSERSTGESVKRGSITKAGNGRARRVLVEAAWSYRHPPRVGVEKQVHVSAAPRAVREIAWKAQVRLCKRFRTLSRKGKKSTVVATAIARELAAFIWAIAREISSRRTVAST

SEQ ID NO: 48213 - protein, 360 aa, unidentified
MQTQRTELNFEGQNFFVGIDVHLKSWTVSIYTETLSHKTFTQPANALALYNYLHRNFPGGAYHSVYEAGFSGFKAHYSLKAMGIDNIIVNPADVPTTQKEHLQKDDPTDSRKLARSLRGGELRPIYVPDPSTIEDRSLVRMRSTLVKDLSRNKHRIKSFLYFYGITYPPEFEKSGTHWSKRFMKWLNQEVVTEYESGTQAFKILLHEAQQQRAHLLEVTRQIRHLARSEKYSKHTALLMTIPGIGLITAIVFLTELETIKRFENTDHLAGFVGLVPNRHSSGEKDNDGEMTFRGQDALKSALIESSWLAARLDPALMMSYHSYIKRMEPNQAITRIARKVLNRIYYVLKNEREYVTGVVK

SEQ ID NO: 48214 - protein, 460 aa, unidentified
MNNYYLGIDVSKGYADFVILDDKKRCVGENFQLDDTFDGHCRLYEILCTFCEDHPECTIYAAVESTGGYENNWFNDLVKFQGTLNLRTSRLNPLGVNANSKADLKRNITDKISAQSVAEYMIAHAEKVSYQHHDHLASLRKQWGFINMLTKQSTQLFNQLEPLLYTANPELLAYCKDGVPGWVLRLLLRYPTASDLSKARAVSVSRIPYISSARAQNLIIIAKRSVASATDKITAQVIMETVKQILHLKKIITYQIDLMAKHCSVPEVDLLKSFIGIKDYSAIGLVLEIQAAERFLSVKKLASFFGLHPVYKISGDGVGRFRMSKKGRKEPRKILFMVTLTAIRANPLIRSIYLEHIQKGMEKMAAIGLCMHKTLRIIYGMLKHNMAFDPEIDRKNREKGYQCRTRVNKDKNRRYQDFDAKAPISRRQNSKRKEQKQSHSDNLTKSGIIASAPTITLTDI

SEQ ID NO: 48215 - protein, 325 aa, unidentified
MQSTKNYVGIDISKLHFDAAIELSGKYVHYKLSNDATGFNTLMELLPDDCMLVMEASGPYYLKLACFFHDRQISVSVINPLVIRRFCQMRLSRTKTDKKDAKMIAEYGKAEHPSEWHPEAIHTQELRQMQATTDLLDKHRTSLLRHLEAASQMPVVNKQVLKTLNKTIKSIEHQIAELELTMDILIKQYHGELYEQIQSIPGLGKKTSLLLIVISGGFTKFADARQLSSYIGLCPRIFESGTSVRGKARITKMGMSRIRGMLYLCAWSARRYNHKCKDLYDRLVAKGKSKKLALIAVANKRLKQAFAIAKQKTCYQQDYAKNICF

SEQ ID NO: 48216 - protein, 315 aa, unidentified
MIIGIDVSKQTFDAAWMGAEQGHHQSYNYNEKGISALLKDTPSKAHYVMEATGVYHTRLALMLYQSGRQVSVINPLVIKRFAQMQLSRVKSDKADAELIRSYGEQHALSPWSPASTDVIELQQAHGWLDDLIRERTRLQNRQEAHAHQATASAYVKKQMKTQLRHLDKQIKDCEHHLEVIVKKSFADVYARLLTIPSIGSKTAIELIVVTDGFYRFEDVKALCAYIGVSPTTFRSGTSVKGKGGIAKMGQGRMRQLLYLCSWTARSCNPACRELYLRLKATGKPPKVISIAIAHKLLRQAFAVATKGTPYSESYA

SEQ ID NO: 48217 - protein, 404 aa, unidentified
MGLDVHRDIIVACLVKGAVDAEPEAETRTFSTLIPEMQKLRDWVIESECRNIAMESTGIYWQPIYEMLESCFDGEISILVVNARHMKNVPGRKTDMKDAQWIATLLRAGLLKGSFIPDKAFRELRHLTRYRKSVVHDITAQKNRIDKFLQSSGFRFTAFLSDTFGASGRNIIRHLIEHGSIDREALDKCLKTKTRNRIDEILVALNGSLSEHQRRFLNMVFRHLEDLEAHKHTVEDEITEEVLKHTDALNLLCSIPGIDVTAAAAIIAEIGTDMSSFPDSQHICSWAGLSPGNNESAGKRKSVHINKGNPYLKSMLCEVAWIMASHRKLYLSGWYWKVKQRKGTKRATIALARKILSIIYTMLKTGTPYNEECFEQRRLRCERKRANRLVNELQKLGYVVVAPD

SEQ ID NO: 48218 - protein, 370 aa, unidentified
MAERTTFFVGLDVHKDSIAVAHAEAHCPDPPHYVGVIGTRQVDLDKLVRRLHSQAPDLVFAYEAGPCGYVLYRYLTGKGLECRVVAPSLIPKRPGDRVKTDRRDAVEIARLLRSGDLTNVYVPRVEDEAIRDLCRARDAALVTLKSAKLRLKSFLLRQGLNYSGRANWTEAHRRYLSKVVCPTPAQQIVFQESVRAVDEQVDRLCRVEKELLEIAPSWRLYPVVQALQALRGVQWTVAITIVAELGDLTRFDNPRQLAAFVGLIPSEHTSGDKRRLGAITKAGNGRARRALIEAGWAYRYSAKISPIIQKRLESLPKPIQDIGWKAQVRLCKRFRRLSSRGKNSNIVVTAIARELIAYMWAIAKEVPINV

SEQ ID NO: 48219 - protein, 378 aa, unidentified
MAQSTTIVAFDQHAATTVAAVLPPGHRTPALHPMTSDVATLGRFVERLRRQGPVQCCYEAGPCGFELQRYLGGRQVLCDVIAPALIPRRAGDRIKTDRRDAGQLAVLYRAGALTAIHIPTEQEEAARDLLRCREDIRADLLRARHRLSKFLLRHGRRFTTTHAWSKRHDAWLRTQTWPLPALDQTHRAYLRTVDEAVARLRAVEQDLRALLDLEPLRARAARLRCFRGVDDLTALTIAAELGDPARFPTAPSLMAFVGLVPSEHSSGTTQSHGAITKTGNAHLRRVLVEAAWAYRHHPFVGQTLARRQRGAPADVVAHAWTAQQRLHRRYARFAARGKPRQHIVTAVARELTGFLWAALVPSADRPSVERRILGRSMR

SEQ ID NO: 48220 - protein, 319 aa, unidentified
MRKETEAGIDVSKDVLDVAARRDERQLETARFGNDAAGHQKLVRWLTRGGRTARVVLESTGTYSLDVALALHRTRGVAVTVANPRAIKQFTGALMQRSKTDLTAAVALRDFAIRMPFVAWQPPAAHVLELRGIARRIATLVVERTRERNRLHALCATAERSAVVCNDIEVNVRHLDRRIELLTEQAIALIADHADLREAFERLVSVPGIAAHSAVQLLPELLVLPPGMTVRQWVAHAGLDPRAHQSGTSVDKPARISKVGNRPHPAGPLHARARRGAAQSARAGVLRQARGARQDSPPSVRRRHAEAPSRDLWNALDTH

SEQ ID NO: 48221 - protein, 314 aa, unidentified
MTSNAEFVGVDVSKDNLDVASWTSNEYKRFQNDPTGIQELIDWLKTLQAELIVLEATGGLELPFVAELAFEKMPVAVVNPRRIREFARSIGQLAKTDKLDARVIAHFGAATHPEVRKLPTNDEGKLTALITRRRQIIEMLTAEKNRLHSARFSMKERIETHLSWLESELRNLDNEIAKFIHQSPIWKEKDKLLRSVPGVGPVTSATILAMLPELGTLNRKKIAALVGVAPVNKDSGRRQKKRRVYGGRANVRSVLYMAALSASKHNPRIKEFYDHLIRMGKEKKVALTACMRKLLVILNAIIRVNQNFTLTPNF

SEQ ID NO: 48222 - protein, 385 aa, unidentified
MQAIADRPEALSAIRSDLGAIFVSMELSRSTWLITSLSPGGGEKMSKHSVAAGDICTLLKRFSVFKQKAFARTGKSFPIIVIQEAGLDGFWIHRVLQNAGIESHVVDPASIATSRRRRRAKTDRIDGEGLLRTLLAYKRGEPRVCAMVKAPAPEEEDRRRLCRERKVLIAERVKHVNRIKGLLFSQGVSGYEPLRRDRRRRLNELRTGDGRPLPMHLKVQISRELDRLELLLEQIKAVEAERDALLAAQQAPAAMLLDIKGIGQEFAAILWSEGLFRHFDNRRQIASYAGLAPTPWQSGSVNREQGVSKAGNPRLRTTLIQLAWLWLRHQPQSALALWFEERVRRNGGRHKKTTIVALARKLLVALWKYVTAGVVIEGAVMKTAW

SEQ ID NO: 48223 - protein, 349 aa, unidentified
MSQYIGIDLHKATSFVTRLDRRGRVLEQVELPHATGALQQYLECVPPDTRIAVEATGNWMWLYELIEERHPDLVLAHPLKTKAIASARIKTDKIDATTLAHLLRADLVPAAYIPPRAIRDTRELLRYRASLVRVRTQVKNKMAAIIGKTGVQPPTKTACGVKAQRFLATVSVRPCYRLALDGYLRSLEHLTTEIRQVSTTIEQQAGADPQAQLLQTMPGIGAYSALLILSEIGDITRFPDSRHLCSYAGLVPSVHASGGKTRLGRLTKQGSSWLRWILVELSVHAINGAPQFRSLYYRVAKKHGRNTGRVAVARAMLKTIYAMLKKQEAFRPIARKAGITGQRPGVMAG

SEQ ID NO: 48224 - protein, 413 aa, unidentified
MEVVVACCAGLDVHQASVVACVNRTGCGGRSHKEVRTFGTMREHLIGLREWLKQAGVTLVAMESTGVYWQPVFEMLEGHCEVIVANARHIKNVPGRKTDVKDCEWISDLARHGLISRGFVPPREIRALRELNRYRRKLAQLQTAERNRLIKLLETAGIKLAGVVSDVLGVSGRAMIQALIEGQATPEAMAALAHGRLRASKTDLARALAAPLKPHQRFIAHTQLARIKQAELELERVDAELLRMAAPYRRHVELLMSIPGVNWINAITIITEIGIDMSAFHSAAHLASWAGLCPGNNESAGKQRSGKLRKGNVVLKATLVNAAIAGSGSRGHKGTFLAEKFRRLAARRGKMKAAVAIAHKILVSVWHMLSDGTFYQDLGAGFLDRLDRTRNARHLVRRLTNMGFEVQLTETAA

SEQ ID NO: 48225 - protein, 345 aa, unidentified
MELHTIGIDLGKTVFHLVGLNLRGEVVVRKKFSREQLLHFTSNLRVELIGMEACGGSHFLGRALREQGHEVRLMPAQYVKPYVKTNKSDYIDAEAIAEAVERPKMRFVPIKSDDQLDLQSLHRVRERWVMRRTAVINQIRGLLLERGITLRQGRRHIDATLPGILEDASAKLSSAVRLLLAQLRPELDYLQMRIDEADAVINKAAGENEACRRLVAIPGIGPVTATAIIAAIGNGAAFKKGRGFSAWLGIVPGEYTTGGKQKLLGISKRGNSYLRRLFVQGARAVLQQSAKQSSGLSAWLAQLSTRTHSNVAAVALANKLARMAWAVLAKNEPYRPPVMVGAATP

SEQ ID NO: 48226 - protein, 343 aa, unidentified
MEHYVGLDVSLKQTSICVVNQVGSVVREGVVGSEPEAIATFVRSQAPGVVRIGLETGPTATWLWTELKQLGLPVICIGARHARAVLKMQINKSDRNDAAGIARIMQTGWFKEVRVKDLDSHSVRALLASRALLVKIKRDLENQIRGLLKNVGLVIGRAKFNVFAVRAEELIEDRPELIAVVGPLLKARKAIEQQTDDLDRKVLKLARYDAQVRRFMTVPGVGPITALCFKATIDDPTRFKRSRSVGAYVGLTTRRHASGEIDWTGRISKCGDAMLRSYLFEAAGVLLTRVPKWSALKAWGMRLAKRNGLRKAKVAVARKLAVILHRMWIDGTEFNWSKKEVAA

SEQ ID NO: 48227 - protein, 375 aa, unidentified
MSEITRAPIARVGVDLAKQVIQVHAVDASGRRVATRSFKRDQFFAWCAQLPAGCLVAMEACSSGHYWARKLRALGLDARLIAAHFVTPYRMEGRNGKNDATDAAAICEAVSRPSMRFVPIKTCEQQGVMSLHRVREGLKEERTACINQIRGVLTEFGLVFGKSPKVLRAALADVIEDASNELSTTARLVMQRAFEHWRELDDHMRWCDRQVGQHVRASPAAKRAAKVTGIGELGASALTAGVGDFTQFKSGHQFGAWLGVVPRQASSGGKIRLGRITKRGDDYLRTLLIQGAKSAVMNADKRDDPTSRWLVQLTARVGWQKACVAMANKNARILWAVMTREEGFDPRHVSIKPQVKQAARQSVVAAPPGTVACAA

SEQ ID NO: 48228 - protein, 258 aa, unidentified
MQENGKIINRYKVNNDRKSIKAALRPYAKDGSKAVLELGRNWGLLYDIVSDCIDEVKVAHPLKVKARAEAKIKTDKISADILTHLLRADLIPECYVRSKNSQRIQQVLRQRMFLVRLQTMVKNKIHNLIDRQEEVREQAQSFTDLFGAKGMQFLRSVELPVLERKLLGGQLELLEELRTRISLIEYILAQIKENDEIAERLKTVPGIGECFTMLIRHEIDKIERFPTSNKLCSYAGLVPSTYSSVGGQDLSWQNHKTR

SEQ ID NO: 48229 - protein, 455 aa, unidentified
MAKKAKKIKTSKGMKLEIVNPDAAGIDVSSTEMQVCVPENRDGDNNRCFGTFTCDLHLISAWLKDCRIDTVAMESTGVYWVPLYARLVADGFDVLLGSAKAIKNIAEKKTDEVDAEWIMLLHSYGLLKASFQPCNQAREIRNLVRHRDNLLQSSTKEVQHMQKYMELMNIKLANVISDILGKSGQDIISAIIKGERNPKVLASLADPRCKASREVIEKSLEANWDENLLFTLKQSYDMYHYIQIQMKACENMIENLIFKYKQSLPQDMVTQTACKRSNKPQSPKNSISIDIEKYAHEFYGVNLMCIPGVKHGSLLRLMGELGHDFVTKFSSYKEFCSWANVTPNNKISGGKLLSSKVPKRKNPVGQILRTAANSLKCNKTPLGFYFRKIQAKSGYIPAIIATANKLGRIIYTMVKTKTEYMEDLGKEKQVDILKKKLAKTQKQLQKIQSQLKDCA

SEQ ID NO: 48230 - protein, 339 aa, unidentified
MQTYAGIDLHSSNNYLGIINDKDQRLVGKRLPNQLDSIMSALSPYKDSLQAVVVESTYNWYWLVDGLQSEGFPVLLANPSAIKQYEGLKHTDDKWDSFWLAHITRLGILPQGYIYPKAQRPVRDLLRRRVLFVKNRTSHLLSLQSMIERHTGQKISANKLKRLGHQDVERWFGSAHEIFTAQSHLSVIGNYKKHIERIEKQVLEQMKLRQDFKMLLTITGIGKILGLTIMLEVGDISRFAHAGNYASYCRCVKSQRISNNKIKGKNNRKNGNRYLAWAYVEAANFARRYCPLAQRFYQRKANKTNAVVAIKALSNKLARASFRVMRDQVPYDANKLFCR

SEQ ID NO: 48231 - protein, 338 aa, unidentified
MKVYCGIDLHSTNNYLVLLDDDREVVLSKKLPNRLETILDCLSPYREPLVGIAVESTFNWYWLVDGLMEQDFRVHLVNTSAVRQYEGLKYRDDRHDARWLAHLLQLGVLPCGYIYPKEERPLRDLLRRRAFLVRQRTADLLSLKNLFSRQTGQQVSSSELKRLTAEEVEQRFADPYLALSFTSTLKIISDLKAQITKIEKAVLKQARLRPDFERLMEIPGIGQTLALTIMYEAGSINRFPDVGHFCSYCRCVPSKHLSNGKVKGSGNVKNGNPYLSWAFTEAAHFLIRFEPRVKRYYERKSAKTNPILALRAVANKTARAVFYVLHDQTAFRVEQAFG

SEQ ID NO: 48232 - protein, 312 aa, unidentified
MNRIICGVDVSKEWLDAYVEPCGAADRFGNDAAGIAELAGFCRFHAVDLLVMEASGSYEQPAFLLLWEMGQPCGIANARAVRYFAESMGFLEKTDKIDAAIIARYAEAKRLKPTPPPSPAQRRLKALVARLAQVTGDLTIQKQRRSAMADAEMTESLDEVIALLVRQSRRLEGEIASMLDDDPLWACLDRAFRSLKGVAGRTVARLMAELPEIGILSNKAIAKLAGLAPIANDSGRRKGKRPIRGGRAGPRSILFLIARTVARYDPHLGAFHARLQKAGKPKMVTRIALARKLLVILNAKARHARNEFANAT

SEQ ID NO: 48233 - protein, 388 aa, unidentified
MGSVQTEITTAAGVRPAVYVAIELSKRCWLIALRGPAVDRISLHRLAAGDAAGLLALIERFRRAAVEATGTEVAVLACQEAGYDGFWLHRVLMAAGIASHVVDPASIHVDRRARRAKTDRIDVQALLRTLMAHHRGEGRVWSVVRAPTPEEEDARRPHRERQNLIKERGRHVNRIKGLCAQQGILGYEPMRADRHERLAELQTGDGRPLPPCLLAEIRRELARLELLLEQIAEVEAMREAALKAEPAGPAEAARVERTLALRRLLAVGPETSTVLGNEVFFRRFENRRQLAAYVGLAPSPHMSGGLSREQGIAKSGNPRARTALVELAWLWLRHQPGSALSEWFVRRVGEQRGRLRRIMVVALARKLLVAMWRYLETGLVPQGATLRA

SEQ ID NO: 48234 - protein, 381 aa, unidentified
MTTAATHDEQSNATEATLFVAFELSEKTWKLGFTTGHGQKPRERTVTARQQERVLDEIAQAKRRLGLPDSAPVVSCYEAGREGFWLHRFLQAHGITSHVVDSSAIEVNRRQRRAKSDGLDVRKLLSMLMRYHSGEHQVWQVVKVPTVEAEDQRHLHRDLETLKQERASTTTRIQGLLSSQGLRVTSLTKLPEQLDALRLWDGSPIPPGLRRRVLRVYAHHTFLSEQIAAVEVERRTQLQASTDTSIDKVRQLMQLKGIGINGAWLLVMEFFGWRAFKNRREVGGLAGFTPTPYQSGESAREQGISKSGNRHVRWMTTELAWSWLRFQPDSALSVWFRARFGGGGKRLRRIGIVAVARKLLIALWRFLETGVIPAGAVLKEA

SEQ ID NO: 48235 - protein, 379 aa, unidentified
MDHAIADTSAETVLRGALELSKNTWLLALQLPDRAQPSLYPIRGGDTEGLMAKLTAARDRWAKVSGKAPSIVLCYEAGYDAFWLARFLKARGIECLVVDAASMQVNRRARRAKTDRIDVGMLLRALIAWGQGDRHVWSVVRVPSVDEEDLRRSHRERDRLVRERTAHINRIKGLLFGQGIRDINVKSKYKTLQIDKLVTGEGHPLPPRLASEITREIARLALIQEQIAALERERDQAPTPCKTTERKRVQLMCLTGIGPAIAAVMTREVYYRQFDNRQQVAGFLGLATSPHDSGDVERSQGISRAGRGQVRGIMIQAAWLWLKHQPKSAITRWFVQRTAGQSGRIRRIMLIAVARKLAIALWRFVEQGLVPQGAMLATR

SEQ ID NO: 48236 - protein, 409 aa, unidentified
MMHPKMKHTYVGIDSHKDTHTAVFLDCFFEKLGSLSFGNRQEDFHTFIRDAQQFKQNGTTLLFGLEDVSNYGKALTKFLLAFGQPVKHVNANLVAQERKNLGFNKSDNVDAECAARMLISRFGNLPDAEEDERYHILRTLVVRRGFLARNITMVKGYLHSLLTVDFPNYHTFFAELNGKTALAFFAKYPSPGLLKDTTAEELAQFLWQHSGGLLKMERAKEILAAADMIHVDEIRNKTVRSAIQQLQYNMHELESVEADLYKVFNEFNTTLVTMAGLDLASASKLLSCIGDVRKFSTPAKLARYAGIAPMSHSSGKKDIHFASQLGNRELNSLFYNLAVRVTKTFEPGHRAQNPFFYEYYHRKMREGKTKRQAIKCVQRRLVNIIWTMLINTEDYVNPPMVEVENHKAE

SEQ ID NO: 48237 - protein, 357 aa, unidentified
MNYGVYCGVDFHARQQTICCLTTEDGVIATYELKHDNKEAVRNFYAQLPGPVLVGLEAGGYSLWFEQLLEKLGHEIWLGDASEIRRCARRRQKNDRRDAALILDLLVRGEFPRIHRQAPRSREILRMLRYRHRLVKIRTIIKNCLQAVAIQSGLALKSQLFTEAGMQQLASLAMSPVMQCQREQWLQLLPVLEQRISACEKWLSQQAAADQRVRRLRTHPGLGLLTSLAVVHTLDPVARFPNQRKVAAYGGFDPCEDSSADRKRYLGISKAGSKLLRFLLIEAGQAAVKEDAELKRFYRRLQQRRNKPKAKVAVARKLLIRSYILLRDEIDYAEFQRRAVAARLARENARLPCLSSD

SEQ ID NO: 48238 - protein, 317 aa, unidentified
MSSSGFVGIDLSQERLDVAMRPGGEAFQVAYDSKGVGGLVKRLAKAKPARIVLEATGGLEAPLVARLSLAGLPVVAVNPRQVRDFAKATGELAKSDRIDAGILAHFAEAIRPELRPLPDEASRALAELVNRRRQIVDMIVAEQNRLRRTATPAVRRRIDTHLDFLKRELDDLDTELKTRVHQSPAWQADADLLKTVPGVGPTTVASLLAHLPELGKLPRRKISKLVGVAPMADDSGLRHGHRRIWGGRSNVRTALYMATLVAIRYNPPIREIYQRLTSAGKPNKLALVACMRKLLVILNAMLRDRTPWNPTLASAHP

SEQ ID NO: 48239 - protein, 344 aa, unidentified
MEHYAGLDVSLEQTSVCIVDARGTIISEAKVASEPEALVGFLRGQGLDIGRVGLEAGPLSQWLHAGLVAAGFEAVLLETRHVKAALSAMTVKTDRRDARGIAHLLRLGWYRPVHAKSASAQEVRSLLTARKLIQGKLLDIESGIRGVLRGFGLKVGPISRGRFEARIRELVEGQAMLATVLDSMLAARAALQAEFARLHRTLLVLARADPVCRQLMSVPGVGAVVAITFKSGVDDPTRFRRSRDVGPHFGLTPMKYQSGEIDVTGSISKVGDRMVRTALYEAASVMLTRTVRMSPLKSWAMGVAKRRGGKKARVALARKLGVVLHRMWVDGTSFRWTSETAAIA

SEQ ID NO: 48240 - protein, 348 aa, unidentified
MSGPKQPVTAGVDTHGDTHHAAVVDQVGRHLDDAEFAATPAGYRRLVGWLRRTGHVQRIGVEGTGTFGAALMRLLREQGYEVVEVDRPDRKLRRFKGKSDPTDAYAAAIAALSGRASATPKARDGAVESIRALRVVRRGAVKARTQAMNQLKALLVTAPAELREQLRPLGRAQLVLTCARLRPGSVMTAPTNAVKQALRMLAGRYQALTAQIREVDEHLNDLVKATAPKLLELVGVGVEVAGQLLVTAGDNPGRLKSEASFANLCGVAPLPASSGRTDRHRLNRGGDRGANNALFTIVLSRLRHHEPTRAYAQRRRAQGMAPKEIIRCLKRYVAREIHKVLTARLDSP

SEQ ID NO: 48241 - protein, 347 aa, unidentified
MIPIGADVHKRRCELYQFEDGQLKRLPPMENTRENWLEVLTKLPPEAEIALEVSTSGYFVMSVLEEAGWRDRAHWVHTAGIDSLRKQKNDRLDAQRLARKLAVAHLEPLPEAWFPPPAIRALRLRARQRCWLAVLRAQGKNRLQSLLQMHGLRPEVTDVFGVTGQCWLAEQKLPAPTRESVDQILRLDRMWMQELKVAEGCLHAVESEFPQIRRLQTIPGIGPILAPVIWSEIGQLDRFSSASALVNYTGLVPSLYESGEVSVQGAITHQGSAWLRWALIAAANAVTKGNSPFADRYHRLRRRKKANVAKTAIARSLARCVYGVLKHGVDYQEERWGRRVGALEQEA

SEQ ID NO: 48242 - protein, 359 aa, unidentified
MVKYRRKTKMRKLDFITCDDKAYVGLDVHKRSIHGAVRINGKQISTFVMPANKDAVIKTLEPLAAGLEKIVYEAGPTGYSLARSLQEIGWPIEVIAPGKIPKEANQGSKSDRLDCKKLAEFAEKNLLKAVAIPTEQEEADRQLTRLRDHLKKKDKRTKQQIKSFLLQHGLKEPNGLSNWSQCGIDELAELELNSELRFVLDIFLEELKDLKNHLKITHNRIKQITKAERFEKKIALLKTHPGVGPQTSIKFLTEVYQPGRFTEYTQVARYTGLAPRVRQSGEKRREGPLIKAGQAPLRCMLIQAAWAWVRYDPHAAMVYRRLLKNTGKTQKAITGIARRLAVDLWCMLMRNEVFRTAAV

SEQ ID NO: 48243 - protein, 370 aa, unidentified
MEQVTTYVGIDAHKKDLFISMLIGTATTPVTWQLANEPQAVRRLVRKLEREAGGPVRIFYEAGPCGYALQRQMTTARVSCEVIAPALIPRKPGERVKTNRRDARKLAELGRAGLLTRVQPPTPADEAVRDLARARDDAREDLQRCRHRLGKLVLRRGLHYAGRHWTCRHRQWLDSLTWTHSAERAVVDDYLLAIDQLAARLSELDARLTEIAQADPYREPVGWLRCFRGIETLTAMLILAELHDFRRFPSAPALMAYLGLVPGEDSSGEQHRRGPITRTGNALVRRLLVETAWHYHHRPSVGVALTRRRKGQPGRVIAIADKAQQRLCRRFRKMAAEHKPTPKIAVAIARELAGFLWAALQPSPIAPAVV

SEQ ID NO: 48244 - protein, 342 aa, unidentified
METEDVIYERCAGIDVHKKVIVVALRIGRKTQVRTFGTLTHELRQMTAWLKENGCQMAAMESSGSFWKPLYNVFEIEGLPAMVVNAQHMKNVPGRKTDVKDAEWIAKLLSQGLLKASFIPDREQRELRELTRFRKSQIEERARNLNRLQKMLEGANIKLASEVSDIDGKSATELLELVIGKPDFTIEDVAKHRHGGLKASAEQLFLSLEGIVTPIQRELFKHVMQVIREQTSQIEQTDALIQSYMPEAYAKAAAAIDAIPGIGQISAQQIIAEIGHDMSRFPTAAHLCNWAGICPGNNESAGKRKSGKTNYANKTLKSTLVQCAQAVKKNRIASFAHSINGL

SEQ ID NO: 48245 - protein, 340 aa, unidentified
MSDYHEGVPMKKVLLCGVDVGSKELAVAIDADSGRVWEGVFANNPAGHRKLIRRLTRSKTTARVCVEATGIYHLDLSLALEQTKGIEVMVANPRVTKDFARAQLRRSKTDRTDALSLLEFVRRMDFDLWVPPSSSILALRALSRRIQALLVTRAQEKNRLHAGESVEATPLAIRESIERHIDAINAEIEALSTSALEEVHTNTVLDRRFTHLVSVKGVAQATAITLLAELSVLPADMTARQWVAHSGLDPKHNESGISVKGRVRISKVGNRHLRAALFLPAMVASQHEPRVRAYYEKLLAKGKKPMQALVAVMRKLLHAIHGMFQYDADFDGTKFFAERT

SEQ ID NO: 48246 - protein, 383 aa, unidentified
MRIVCGLDVHKDSVFVCILNEKGEKFEAKYGVLTPELEELHQLLLTHEVKEVTMESTSIYWHPIWRILGDIECLKLVNPYFIKQLPGRKSDVRDAAWIAECTMKDLIRGSFVPDATVQRMRQYNRRIFDLNKEKVYKLTKLDALLHRCNIRISNYVSSIDSKSYKEVVRLLSEGIVDAERLMEAIHGRTVNRVGKDVIRAALAGVVNEVDIDLIRQYREELLIDDKHLKECQNKLTEICRNEFPKEFENLQTIPGVKERSATSILSELGADMKMFLTASALVSWCGLKPRNEESAGKIKSRRITHGNKYIRKTMIECAWGASRTQDCFYSNFSYIQTVVRRKNAMKVKVAIARKMLVAIWHVLSETVPYNDYKKPKAIADGNS

SEQ ID NO: 48247 - protein, 493 aa, unidentified
MLIQEPDEPGRKGGDNATTALAPVTSPERAAFAPKERIYVGLDIGYREHVAAASPLSVFNVGRSPDGWKRVKPIHFASDATGFGRFQRYLDRHSPDPRDFLILLEPTGSYGLTVLLYLLSKGYRVLQVENRAVKDYREKIFGSETKTDDTDARLMARMGFLHELVGEEFSIQPVLLMNPDAAALRGMVHDLAKLQKEITRRRNQLQQMAALTFPELKTFFKGSTAAPAARALLEHFATPQDLAAASTEHVAEVLRSAHAYSHATRAAELQALAQATAGVPTLTHHQWRQAWLIKQLSVLERARQELVDEVALATATHPYARIIESLPVKSPIWTATLIGAIGDVSRFSNVNQFKAYLGWSPQLTRSGSSVDHSELAKTGVRPARNVLGQMTVIMLSSRIKATPFREVYHRLTGRGMRPASALGHVAGKLSVVLYGMLKNMTPYDQDQHRRQLGLVHSADQTDSLPVDVSLELVDLAESQNDLVADDQSATAAL

SEQ ID NO: 48248 - protein, 339 aa, unidentified
MKLYAGLDLHSTNTYLGIMDKEFKRIFNKRVSNSLPLILTILEPFRDQLKGIVVESTFNWYWLIDGLMDAGYQCVHLANPSAIKQYEGIKHTDDQHDAFFLAQMLILGILPQGYIYPKKDRPVRDLARKRLFLVRHKTSHILSLQSLIMRCCAQRLSANEIRKLTVTNLQHLLAEEHIVLSAQANLDTIVFLRKQIQRLEKAITKKVKLNKAFQQLLTVPGIGLILAMTIMLEVGDIGRFPEVGNFASYCRCVSSKRLSDGKSKGHGNRKNGNRYLSWAFTEAAHLSRRYNEGFRSYYNRKLAQANTSLATKALSNKLARICYYIMRDQVPFRENLLSQ

SEQ ID NO: 48249 - protein, 350 aa, unidentified
MRRPTEKLVAGIDLHSNNLVIGVMDQDGKRIGYRKLDCQLEEVLAFLRPHKARLQSLAVESTFNWYWLVDGLRAKGYPIELANPAQIEQYSGLKHADDKHDAFHLAELQRLNILPKGYIYDAQLRPVRDLLRRRTNLVHQRTALMLSFKSLYTRTTGQPMPLKQLKGLEPKQGQELYEHPANQLIAQVQLEHIEALNKSISRIERAVLACARELPLYDKLLTLPGVGKILGMTITMEVGDIARFKTDGDFASYCRTVDSRRLSNGKQKGENNQKCGNKYLAWTFVEAANFAKRYDENCRRWYDRKQAKTSTVLATKALACKLAKAAWHLMAKQSEYDASRMFPELAQKRK

SEQ ID NO: 48250 - protein, 337 aa, unidentified
MSYLGVDLHTNSFTVCRRTKQGKNSIGTFRIVRIADFRKTLRKRDLVAVEATGNTAWFVSQICDRVKKVTVVNPFQFEVIRRSVKKTDKHDAKTLAFFLSKDMLPEARMKSKENAQLHSLATTRDKLVKQRTALINKIHNVLNSYGIKFKKESLGSEKGLKSVWAYDWDVIVRIELEALIDQIRSLNKSIKTLDKEMSNHGQKLKGHKNLTSIKGIADRSATVLLSVIGDVNDFANENKLAAYFGIVPRVSDSNETVRHGRITKHGSKLGRTTLVQCTLVAKRYSPYLRQYYERIKSHRGSGKAIIATARKFLGIIYNTLKNDWIFEDFPNFVLVNT

SEQ ID NO: 48251 - protein, 342 aa, unidentified
MFYAALDVSLRSVAICIIDEAGKVRLERSVPSEVPDIARCFNEFGEHIHQVGLEAGTLTQHLTYGLTEAGFDVVCMEARQVNAALSAMRNKTDKNDARGIAQLLRSGWYSRVHVKSVESHYTRALLSSRKVKQRKCLDLENEIRGLLKVFGVKLPIRLRGGAFEEAVRDTIENDPALSHALLPMLEARQMLLETFLELDRRVRKAANEDAITTRFMSVPGVGYVTALSFKAAVDDPTRFKSSRTVGAHFGLTPRRFQSGEKDNPGRISHAGDADVRATLYAAANAMLMRSIAWSSLKAWGVRLMKTKGRRRAIVAVARKIAVLLHRMWIDGTEFRFGSEAAA

SEQ ID NO: 48252 - protein, 395 aa, unidentified
MVAALRPMGEVAMLPQEFLHTEVGLEQMAYTIIALGEDTRVVMEATGRYHEPVAAALHEYGIYVCVLNPLFIKQSGGGSIRKVKTDKADAMKIAKYGLDNWVDLREYTPMDTVRQQLKLCSRQYDLYMKTVVSLQNNLISLTDKTFPGVNELFSSPERADGHQKWVDFVMTFWHCDCICRVSEKAFTERYQKWCKRKGYHFCTEKALDIYAESCGHFTTLPKNDNTKLLITTAAQQLLAGKMTLAALRTEMTHLAMQLPEYDTVCAMYGVGETTAAQLMAEIGDVRRFPRRSSIVGFAGVDPAVDQSGKHEAQSTPTTKRGSPHLRKTLYQIVCTYLRKAPAGEPVYQFLDKKRAEGKPYFVYMTAAQNKFLRIYYARVKECLEAFDARQDTTQS

SEQ ID NO: 48253 - protein, 411 aa, unidentified
MDKVYDKCCGIDVHKKLIVACFRKGSKQELRNFGATTRELLELANWLQNGGCEMVAMESTASYWKPLYNILESSELKAMVVNASHMKAVPGRKTDTKDAEWIAELLQHGLLKASYIPDKQQRELRELVRYRKSLVSERTRELNRLQKMLEGANIKLSGTVSDINCMSARNILEYLLTGEFFDEAKYDEMYKKKIIAHNLKASKEQIIDDLNGVMTPLQRRMMKELLSHLDELNVHINNLEDEIDNFMKPEEKQATQAIQDVTGIGKNSSQAIISVIGTDMSRFPTAGHLAAWAGLCPGNNESAQKRKTGKMRKGNALLRSTLVVCAHSATRNKNSYFYAQFMRISSHRGKKRAYVAVAHSMLIAIYHILKDGVVFKDLGADYYNQFNKERKINAYLKKLKALGWEVPVVAA

SEQ ID NO: 48254 - protein, 355 aa, unidentified
MSQEKYIGMDVHQATISVAVMDSSGKLIMECILETKAATILEFIDGLRGTLSVTFEEGTSAAWLHDLLKPYVSHLVVCDPRRNALLKDGSKSDRIDARKLAELLHGNKLHAVYHGEHGVRTLKELGRSYLTITKDLTRVMSRIKALYRSWAIPCSGTTVYAVRQRAEWLAKIPEPGVRLRAERLYQQLDLLQPVRQEARCDLLVESHKHHAVKLLRQIPSIGPIRAALLVALLQTPHRFRTKRQLWAYSGFAVETHDSGEYRFVRGKLVRNRERITVRGLNHNHNHDLKNLFQGAALSASTRPGPLCDFYAALLEKGMRPTMARLTLARKMAAITLTIWKKGVEFDVKHLNRQAA

SEQ ID NO: 48255 - protein, 372 aa, unidentified
MNNTTVYVGMDVHKESFTLCAYTLEKEKGSYSRRTPADYKEVLKYLEFLRTVYGNDTIFVCGYEAGCLGYTLYHQLTDHHVDCVILAPTTMLEQRGKKRIKTDKRDAEIIGKCLAQHNYSPVHVPTASDEEVKEFLRMRDDHKLALKKVKQQILAFCLRHNYRFDGNSHWTAAHINWLKSLTPEALYKEILDEYLLTYTILSDKLERLDKRIEELAAKDEYKEAVGKLCCFIGVKTHTALSVIVEVGDFKRFASAEKFASYIGLVPGEDSSGDGQTRLGITKAGNRHVRMLLTEASQCYSRGQIGYKSKALKARQDGNTPQVIAYADKANERLRRRYYKMVLSKCKKHNVAKTAIARELACFMWGMMTDNIA

SEQ ID NO: 48256 - protein, 305 aa, unidentified
MKAVGIDVGKSALDVAVHGEAHVQRYANTKAGIGQLMRELSRWGEIRIVVEATGGYEEGVLAGCAKHGLWIARVNPRQARSFANATGQLAKTDRLDARMLAEMAHTLHARLRAHTPLTDWQHELRGWLRRRHQVTEAIQRTRQQLATTLPAIRALVNRTLAALRREQALIDRTLKDLLQAHATPAMRSSKGMGPMFQASVLALLPELGQLTRRQIAKLVGIAPLNRDSGQSQGVRRIYGGRAEVRVALYMATLSAVRWDAVMKAHYQQLRARGKVAKVALVACMRKLLTIVNAKRRDELRLAPAT

SEQ ID NO: 48257 - protein, 410 aa, unidentified
MELLHPHCAGLDVHKETVLACIRHMVDGKVTTEVKSFSTTTQELMELSDWLSSQGVTHIAMEATGVFWKPVWHILSDGEFELLLANAAHVKNVPGRKTDVNDATWLADLMAHGLIRASFVADQPTQQMRDLLRTRKQFVRERSSQTQRIQKTLEDANIKLDSVITDIVGLSGRRMIEALIAGQTDPQALAALAHGRIHATAAELEAALRGRVTSHHRFMLRIHLNHLDALNTTIADIDQEVNVNVEPFRVAIEMLTTIPGVSSLAAQVIVSEIGIDMSRFKTEGHLISWAGLCPKNDESAGKRRSNRMKKGAPWLKTTLIQCAWAASRKKNSYLQAQYLRIRSRRGPKKAIGAVAASILTAAYHMLKDGALYQDLGANHFDNRDKAKQALRLVNRLQSLGFTVQIKSMAA

SEQ ID NO: 48258 - protein, 334 aa, unidentified
MDDCSVFVGLDYHQNSVQVCVLADDGRVLGNRKWANDVGQVAVYIRTHGRVRGVAMESCEGTADFAETLIADTGWSVHLAHPGYVSRMRQNPDKTDYSDARLLADLERVGYVPRVWLAPRGIRELRRLVRYRQQLVNERRSIKLRIGALLREHRRGCDASRWTKAWQEWLRNVELPEESRWIMDRHWVRMRQLDIAVKEVEQRLTRVTRDDPMVHRLVEFSGVGAVTAWTLRAEVGRFDRFRSGKQLSRFCGLTPRNASSGARQADAGLIHACNSALRAVLIEAAHRLKRYDPRYTAMAGRLRSRGKPGSVIAAAVANRWMRWLYHEMKMFQAA

SEQ ID NO: 48259 - protein, 326 aa, unidentified
MQGKEASEQEANVKSSAGVDVCKDWLDAHVWPCDKRLRVANTPEGIRKLKRWLQRFDLSVVIIEATGKWHRLLWRSLFQSNIPVAVIDPYKARMFAKALGILAKTDQIDASVLSRYGFMVRPAVRAPQPQTIEQLAELVTGRDTAVAEQTRLQNQLSAATVDFFRKQLRQRLAHLDKSIDQLEREIGARIAAEPELARRYEIVISIPGIGPIVAATLVVRLAELGGLPDKEITMLAGLAPIADSSGKHEGKRVIWGGRAAVRRMLYLAALSAKQWNPTLKPFFDRLIENGKETKVALIAVARKLVILANTLIAEDRTWQKIPPQNA

SEQ ID NO: 48260 - protein, 392 aa, unidentified
MPVTNLQKTDDFKGQIFYVGLDVHKKSWAVTIRSLGMEVSHFTQPPGAEALSNYLKREFPGGTFYSAYEAGFCGTGIHEQLCKLGIKNILVHAADIPSTDKQKKNKTDLHDSRAIAGHLERGNLHSIHVLTQEQQELRSLFRLRESKVNDVTRANNRLKSFLMYYSIQLPETVSKNEFLSGKALAWLSMELGCAAGTFALQQYIEELKYQREQLFRITKSLREQVLALHKKTYENLLSVPGIGAITAMGLITEVADFTRFIEPDQYTSYIGLCPWEDSSGDTVKTKGMQPRCNSHLRPLLIEASWQAIRKSRTLFAYYSKHAGKSGKKAIIKVARKLALIAKGVATTGQPYQEDYLKKKQQEQQIKKDLKAGRFFQASRNSISTNSLTINCR

SEQ ID NO: 48261 - protein, 354 aa, unidentified
MNYVGVDIHKRYSVLVAVDERGRELARGRISGNSVHAFAQFFEALQGPGKVVLEACWNWGRIYDVLSEIEQVEEVVLAHPLKTRLIAEAQIKTDSLDALALATLLRGNLIARAHVPSKATRARKELLRQRLDWARLRTRVRNRVHAVLDRQRELEMPQCSDLFGRKGLNALSKLRLAEPDATLLSEELDLLKLIDSQIKAQEGRIVAFNANEQATQYLQSLPGMGKILAAVAAAEIDAIERFDGAAKLCAYAGLVPTTYGSGGKVHQGHLLKSRNKWLQWAFIEAAWVAVGCSSYFGGIYRYHRARGKKANIAITIVARRMCRIAFTLLKERRNFQEQHRTFPGRSAVRLTAAA

SEQ ID NO: 48262 - protein, 343 aa, unidentified
MQAVTTIGLDIAKSVFQVHGIDATGNVVIRRQLKRRHVLAFFQKLSPCLVGIEACATSHHWSRELKALGHIVRLMPPAYVKPYVKRQKNDAADAEAICEAVTRKNMRFVETKTPEQQSCLMLHRSRHLFIRQQTAVINAIRAHLAEFGVVAPVGRKGVADLLDIVADPSDRRLPEVARACLAALGVQLRLLKAQILEFDRRIMAWHRSNETSKRLDEIPGVGPALATALVASVADPKAFGSARNFSAWIGLVPKQHSSGGKDRLGSISKQGDRYLRSLFTAGALAVIRYAKIRGTKHRPWLTALLARRPAKVAAIALANKIARMAWAMMAKGERYREPAALAA

SEQ ID NO: 48263 - protein, 325 aa, unidentified
MEKLYGGIDIHKEKLAGCIMDRDGNITREHSFPSSKKAVERFLCDIPSPGITIAIEACGMWRGTYKILTDMGYEVKLANPKKTHDIACKKKTDRVDAKILADLLRTNYLPEVWIPDEQTLKFRDLARHKSQLTRLKTQVQCKIKSYLLRKGVKYGKLWNEKTLSTLAQEDQDIQNLINVYNSLKKEEKEVMKRIKQVARNRKETTLLMSMPGIAEFSSLMILAEIGDIQRFRSPKELVSYAGLCHGIYQSASTERSVHNTAVNKWLKWIIYECSGRAIMLDQRFQQYFYPIQKRKGRNTARRATARKMLTIIWYMLTNKETYRAS

SEQ ID NO: 48264 - protein, 460 aa, unidentified
MTLLEKLGAQLPERYYLGIDVGYKEHVAVVISLQTFVRGDERWKRARCVHFPSTQAGLRTLKEYLGHFSSEPANFLGLCEPTGGHYGATVFQYLLDQGYGMYLVGNATVKHMRDKIFAGLPKTDEMDSRVMARIGYLHEAVGEEFALQPLKLADPDDSQLLALCRDSWKLGTVVVRARNQFTQLMAVVFPELKTFFTSSVSTAVPVRLVAAYPTPALLAEAPEEAVREVLWQACGYQHARRVAELQALAAESSGLLPNPDLVWRLEWLTDFLLANFHHQATLERRVTKLVEQRRDYQLIAKVPYASPATLGVILTVSGDVHRFSNYRKYVAFSGYFAGLEQSQTIDRTKMSRRGNRNLKRAFFLIAAPLVWFDQGSNPYKELFERKKAEGRAWYEAMPLVCAALARHIYHCLKFNEPYDVARAFRDLPLVSTSDEGMWDLGADLDEKFEELEASLSQLEV

SEQ ID NO: 48265 - protein, 363 aa, unidentified
MDVHTTNYTLSCYTVENDMSFATIQVEPDYKNILKYLENIKKNYDGPCEFLCGYEAGCLGFTLYENLKRHNVSCIILAPTSMPVYKKTEIKTDKRDAMKIAKCLAYNTYTAVHIPTKEDSDVKEYIRMRDAHKIALKKVKQQILAFCTRHGFRFSEGKNYWTQKHLKWLRGLNLDGLLREILDEYLATYTHTTDKLERFDKRIAELAAGETYAKNVQMLSCMIGIRTHTALALLVETGDFHRFKKAEQYASFLGLVPGEHSSSDNQRRLGITKAGNSHLRRLLIEAAQCYNRGKVGYKSKALKARQYGNSPEIIAYADKANERLRRKFYRMVLKSNKKHNVAVTAVARELSCFIWGMMTEQTA

SEQ ID NO: 48266 - protein, 413 aa, unidentified
MDVMHPRCAGIDCSKKDAKVCIRVQGQGRRATSATVTTWGATTSQILALREHLIAANVTCVVIESTSDYWKPFFYLLDDELDVILVNAASVRNLPGRKTDVSDAAWLADLGAHGLVKASFVPPAPIRALRDLTRTRTVITRERTREVQRLEKLLEDAGIKLSSVASDITGVSGRAMLEALIAGQRDPAVLADLARRRMRSKIPALTEALTGRFNDHHAFMTRLFLDRIDAHTADIGRLDERIEEAMEPFRPARDLLMSIPGFSRIVAEVFLAETGGDMSVFPTAGHLASWAGVSPGSHESAGRVKSTKTRPGNRYLKGVLGIAALSAARSKNTYFVAKYKRIATRRGPMRALVAVEHAMVIAAHNMLINGDFYRDPGADYYTAHQPARTKARAINQLQTLGYRVTLEPLTKPA

SEQ ID NO: 48267 - protein, 337 aa, unidentified
MSRFVGVDLHKTAFTVCFLEGEAKRFETYKIGEIDRFREDLRSDDEVALETTTNTRHFVSRIRDKVHGIHVINPFQFKVISHSVKKTDANDAEAMAFFLSKGMLPEVRMKDERYAELESLANTRGKLVQLKTALKNKIHNILNAQGIVTKKECLSSGKGLDRVLGYSVSAVARIELEVIIEQIKGLNAGIAKIDKQLSDKGKDLDGHEGITSIKGIGDKGGAVLLSVIGDINNFEDEKKLAAYFGIVPRVSNSNETNHQGRITKRGSKLGRTTLVQCTLIAIRHSNYLRAFYEKLKAKKGSGKAIIATAKKLLGIIYQTLKNKWVFEDFPNFVLKEA

SEQ ID NO: 48268 - protein, 317 aa, unidentified
MAQKGTIVGIDVAKGKIDAAIRFGAEASFANSAEGRRELLAWLKEHGVCKAVMEASGGYEKSWATLLRGAAVEVVIADPNRVRHFAKSAGQLAKNDPIDARMIAWFGEVFGHAPGQPHDEERQELDQIVTARLGIGRLKEQIENWGEHEQPKAVQKAQQALLKAVATQLAKLETIIAAKIDKTERFAQRAEIIQSVPGLAGTAAAGLIAFLPELGLVDRQAAAALLGVAPFDADSGKRRGERHIQGGRHKLRKLLFMPVLSAATQHNPVLKACYQRLIAKGKKAKVALIACMRKLIGILNTMLARGEKWDPARHAIA

SEQ ID NO: 48269 - protein, 427 aa, unidentified
MEVIYSKACGVDVHKTFIVAVICDSTSITPKYLRKRFSTFNNSLIQFRNWLIENDCQNVCMESTGKYYIPVYNALEGYISNVVVANPKWVKCIKGEKDDNKDAKWIADLFKLGIVRSSFIPHKDFRILREYTRYLYKLTCNMVSEKNRFTNALTVGNCKLDMTFSDIFGKSSQDIINIILNNDSFSDNDIIKCLRKNCKSSHEDILSSVNGITFTLEQKLRIKLIKEHIDYLNNQIKTLRDIIDTLVAPYEDYINLLCTIPGVNRNSAITILSEIGTDMKQFSNHYRLTSWAGLAPGCNESAGKKKSVKISHAGVYLKPCLVEVAHCAVKDKTNTYYANKFNKISKRRGKKRSTIAIARKILVSIYHMLSTGEIWNPKDLASIETNNNDKIKYTKNNFNSSLKQLLSLGLTSEDLINLVTQNAALNT

SEQ ID NO: 48270 - protein, 315 aa, unidentified
MQVGKLIVGADVAKAELVIHHDDRDEIIKVKNTKPEIKKWLKQQPLNTAIAVEATNVYHLDLVELAHSLGFEVYVIDGFQLSNYRKSVGVRVKTDPTDARLLSRFLRNEGEDLRPWTPPPAVYGKLQSLLRRRSALVTARTAMTQSWANEALLKAAFTTFVKSIDRLDLLIQKKIKEVLREAGLHEQVARCQAVEGIGFLTATALVMAFMRGEFKSSDSYIAFLGMDLRVIDSGQKNGRRRLTKRGCSEIRRLLHNAAMSASRTATWKGIYEQHRNAGKATTQALVVLARKLARVAFALMKNQDEYVTKGGKAAC

SEQ ID NO: 48271 - protein, 350 aa, unidentified
MYFAGLDAHLKYVTVAVLDRLGTIVLETTVSTREPERLLAVLAPFRPLEVVVETCPFWPWLYDLLVPAGIGFHLAHAKRLRAIATAPQKNDRVDARLLARMLLSGLIPEAYPRPGDQRELLRLLRHRTTLVRYRTRLAGRIHSQLHQQRLLLPREQLLRQATRTWLRETAWPHLTTEQQAIVTTHLELIDHLTPLIQALERRIDTAAGANPTAALLATIPGIASYRSLLLAAELSPLTRFPRVEHLASYAGLAPVTRSSGGHTRHGSIPQGANRWVRGALVSAIPSHVRWAPTSPVTRAYAQLTARLGWRVARVAAARKLLRIVYIMLRRGEPWRGAGRVEADVRDEVHA

SEQ ID NO: 48272 - protein, 333 aa, unidentified
MGFEPEPSKEGSWMMAQNDLIVAGIDVAKDKVDVCIRPLSLRRTFASTTEGRRELASWLRRKKIGKAVMEASGGYEREWAKALRDAKIEVRIVDPKRVRDFARSAGRLAKNDTIDAEMIAWFAETFDEAPGQAHDAAREELAQIVTARLGLLDLQTKLLNRGEHAGPEPVQKMHARILKKIAVEIDKLEAVIAAMIKATPRFAELAEIIESVPGLAKTTSATLIAKMPELGQVNNKIGAALLGAAPYDDDSGKRRGERHIKGGRRKVRNLFYMACLGAATLHNPVLKAFYDRLIAKGKEKKVALVACMRKLIVILNIMIARRQKWDPNLHAVG

SEQ ID NO: 48273 - protein, 350 aa, unidentified
MIIIGCDYHPSFQQIAFVDTETGELQERRLQHREEAEKFYRELAAQGMKVRVGMEASGHARWFERLLSELQFELWIGDAAEIRAKRVRKQKTDRQDAQLILRLMLEGRFPQIWVPSWENRDLRQLLWHRHRMVQARTRIMNQLQAVALNEGLRCKKRLWREAGREQLEAFRLAPWASLRRRDLLELLDRLNPTIAKLTQAIEQEVEKCSEARRLRTHPGVGSLTALAFVLIIGRADRFQCGKQIASYLGLVPLEKSSGNQRRLGHITKQGNSLLRFLLVEAAQVTARSIPEWRSKYVHLTMRRGRKIAKVAMARRLAVRMYWMMRKGWDYERLTKFGSHAGKPGSGDGVK

SEQ ID NO: 48274 - protein, 410 aa, unidentified
MDRVEQGWVGIDAGKGHHHVVLIDGNGRPLLSRRVINDELELAALIDVIRDRVTNLTWAIDLADGAGALMIALLLHRAQPVFYLPGMAVNRASAGYRGEGKTDARDAAIIADQARMRRDLRQLRLLDDAIVRLRLLTAYRADLAADRTRSINRLRGLLVGIFPALERVLDFTNQGPLILIGGFQTPTAIRRLGQARLARWLEKRRVRGAARLAAAAAEAAGRQTVEISGEAAAASVIARLAQTILELDRQLAVIDREAAAIFHTQADAAIITSLTGIGDVLGAQFLAAIGGSLAGFASADHLAGYAGLAPMPRDSGYRTGNLHRPQRYNRQLQRVFYTSAMISIQRSAGLQGLLRRQARPRQAAHPSRDRPRPPKGQRALGNAPRPRALPRTTTKARPRRLTSGLRINCR

SEQ ID NO: 48275 - protein, 345 aa, unidentified
MQFFVGIDVSLESSSICVIDERGVVIKEGTAPSEPEAIGRFIRHQGRKVEHVGLETGSLSQWLHAGLVRQGFNVSVMEARHVHAAFGAMRVKTDRNDARGLAQLIRLGWFKSVHVKAPSAQETRALLNARQFLVDKVTGIENSMRANLRNFGLKMGVVSRKTWPTRARELARGIPALEMLVEALLKVRDVLLQELRTLDRKLLETARADPIVQTLMTAPGVGAIVALTYRNAIDDPSRFKRSKDVGPWLGLTPTRYQSGQIDRRGHVTKAGDGSVRTALYEAATTLLGRVVRWSALKNWGLRVARRSGMKKARVAVARKLAVILHSMWRTQSPFAWAADKEGVSA

SEQ ID NO: 48276 - protein, 365 aa, unidentified
MLHRLNSAETLIQRTTTEAPRLSMYYIGLDVHKETISYCVKDAAGRVQQEGKVGSTRGELDDWMKGLPQPWTVAMEATIFSGWIYDHLQSHAVEIKVAHPLMLRAIAAAKKKNDTIDAGKIADCLRCDFLPECHMMPPEIRDRRRTLRYRHLLVKQMVQMKNRVSGLLMETGVEHNKSRLHEVGYFGKLLATSAEIDASIRPLLKLSRETIERCQKTEYALVSSLQRDPLLADRIRRLRTVPGVGPITALTWALEMGDVSRFRTLRQAISYRGLCGDERSSADKVMRMPLSKQRNKHIQRVLVEAAKLAPRLSPELALVHEKEKQKGNSNRATLAVARKMVAYLLAVDRQQREFIPTEQRRSRAA

SEQ ID NO: 48277 - protein, 388 aa, unidentified
MHVYVGVDIAKELHYAAIMDSDGVVSKPFSFENNDKGFNLLLSHLAPYDKESILIGYESTAHYQENLAYFLKSLGYRTAEINPLQTTALRKANIRNTKTDSVDARLICLALMNHHIQGDQRDSVRLDDLYQLCKMRMDTMKKRTTCKIQFVAIMDRIFPELASFFDNNLHTNTIYRLIDSFPLPSQIKKTRIDILTKLLHKASKGHFKKEKAQKLKDLADISVGIPSDIFAFQAQQLVHQIEFYTDQIQTIEERINTNPDVMSSPLMTIPGIGTFCVACILSAIKNINDFGAPCKILAYAGLDPVIRQSGKFTASHTRMSKRGNSLLRYALVWSAGNVVKNNHTFAEYYRHKTEDQGKSHYQALGHCAKKLVKSIYHMLKYNESFNLD

SEQ ID NO: 48278 - protein, 416 aa, unidentified
MNAAGIDVSSRKSTVAVLRPFGEVVKLPFDVRHSAEDLAALAAQLKSIDGETRVVMEHTGRYYESIAKVLHEAGLYVSAVNPLLIKEYGNNSLRKVKTDKADAIKIAKYALDNWSELRDYTPMDTIRYELKTLNRQFQLASKQKTATANNLIALQEQSFPGIRKLFDSPVRSDGTQKWVDFTHDFWHVDCVRSGSQNAFAERYRKWCKRNRYQFSMEKAAEVYALAKSAVVLAQKTSVTKTLVQEAANQLTAIFHSAETYRSEMNKLASQLPEYPVVMEMYGVGESLGPQLMAEIGDVRRFERKQSLVAFAGIDPAPSESGDYCSRSNRTTKRGSPYLRKTLFNIMKVHLQRAPADEPVFQFLDKKRAEGKPYYVYMTAAGNKFLRRYYGKVMAYFSTLEGLPPVDMDSTGLHHAE

SEQ ID NO: 48279 - protein, 381 aa, unidentified
MKSLIYVGMDVHKESYSLCTYLILSGEFIGETKMDAKPSLIKQYLNEMEKLLKYKGYEEIEFITCYEAGCLGFSLYKELVKLGINCKIVAPTTLHKSADSNVKKNDRRDAKMLAQNLAYGTCSFVHIPDEIDQETREYIRMRMAHKREIKRIKNMINSFCLRNGHKYEGNYWTDKHISWLKHLELNDFLKSILVEYVDTYDILMTKLDRIEGKIEEISLSERYKESVDKVSCLKGLTRQGALTIISEVGDFSRFNTTNELCSYLGLVPGEHSSDGKGPSLGITKLGNTVVRSQLVESAKSITLGIKWIKSKRLKQRQKGMPLDIISYADKASKRLFDKYHSLISRGVHCNKAVIAIARELACFVWGMMTNNISERKVGTAN

SEQ ID NO: 48280 - protein, 389 aa, unidentified
MIYVGIDVAKDKHDCCILGSEADKLYPVFTIPNNKTGFDELYEKIFSVTDDKTEIKVGLEATGHYSLNLLGSLIDKGLTTCVINPLHTNLYRKGLSLRKTKTDKVDAGSIAMMLMTDKTLKPYSNTSYHSEELKSLTRYRFDKVHERAKLKTSVARLVNILFPELEKIVPSLHMASVYALLSEFPGASYIADSHLTHLKNVLETTSKGHYGRDMAVTIRDAARDSIGSVMPAKSMELKHTIHLIEVMTEEIDEIEASIKSIMDTCNFLIMTIPGISYRMGAMILAEIGDFTRFSNADQILAFAGLSPSTYQSGQLDSSYSHMEKRGSRYLRYALFSATKFVCKWDENFRAYLSKKISESKHYNVAVGHAPKKLVRTIYRMELSGEAYRK

SEQ ID NO: 48281 - protein, 402 aa, unidentified
MNAVGIDVSKGKSMVAIMRPFGEIVSAPFEIKHTASDINSLVELINSVEGESRIVMEHTGRYYEVLAHQLSEANLFVSAINPKLIKDFDNDSLRKVKSDKADAVKIARYTLDKWQNLKQYNVMDELRNQLKTMNRQFGFYIKHKTAMKNNLIGILDQTYPGVNTYFDSPARSDGSQKWVDFASTYWHVDCVRKMSLNAFIDHYQNWCKRKKYNFSQSKAEEIYGKAKELVPVLSKDAITKLIIKQAVDQLNSASTTVESLRTLMNETASKLPEYPVVMAMKGVGTSLGPQLIAEIGDVSRFTHKSAITAFAGVDPGVNESGSYEQKSVPTSKRGSSDLRKTLFQVMDVLIKTHPQDDPVYQFIDKKRAQGKPYYVYMTAGANKFLRIYYGRVKEYLSSLPES

SEQ ID NO: 48282 - protein, 346 aa, unidentified
MREVCRIGLDIAKLNFQVHGVDKRGKEVFNKKLRRAEVLPFFANLPSCLVGLEACGGAHYWAREIVGLDAGHTVRLISPRHVKPFIINNKTDAADARAICEVVGRPGTRFVNVKTVEQQDMMAWHRIRERKVKERTALVNQIRAFLGEQGIVIAQGITHVRKLLPTLIEDLDNKLSMSARDYLSELYTELVDYDALINKYESRIVAFAKANEACRRLQKIPGIGPLTATAIVAHVGDAKYFKNGRALAAYLGLTPREHSSGGKQKLLGITKRGNSYLRWLLIQGARIVLRYGLLQPEEAVSPRLQWLRGLFGRRGRHIAAVALANKTARIIWALLSSGEAYQPSTA

SEQ ID NO: 48283 - protein, 434 aa, unidentified
MYCVGIDVAKYKHSAAVIGERGERLLVGFDFMNDAEGFAAFLKQLETIGVLQRQAHEGGDNPTAPEPDGPKSHLRESDLRESHPELSNALEPHHEHPVGVCLEATGHYGRNLVEFLKAHGMEVYEVNPLLTSNWRKAMNIRNVKNDRVDAEALALWLYAGNPARHYHEKSRMDDLRSLTRFRFYVSRVSGDCKRKAVSLLDMLFPEYHRLFADCFCKASIAVLKKWPGARALSGASASSIEEELRAASRNSFGYAKAQDLQRAARSSIGQSSEYLEFQLRQQLAFIEFAQEQLAAIDRVLARAVEGELIMSITGIGVVCAAGILSELGGISRFSRAAQIVAFAGCDPSVYESGEFEGTRAHLSKRGSRYLRWYLWVAADRARRYDPALHAYYEKKRAEGKCHKVAVSAVVRKLCAIVFAVYRDGKPYACRADSQ

SEQ ID NO: 48284 - protein, 388 aa, unidentified
MRSTYAGVDWASEKHDVLIADETGEKILAATFVHDEAGLRSLCRTLVRHEVRLVAIERPDGLLVERLLDAGLRILPLHPNQVAAARDRFRVSGGKSDRFDAFVLCELARTDYHRFRVLEPDSDQTKALRALTRAREDLVATRTALCNQLRAELARFWPGPLGLFTDLYSRISLAFLERYPSPADAHGLGEARLHGFLTRQHYTGRQTPAKLLVKLRRAPETRIGALELATRRALVLSLIATLKTINEQIKSLERQIATAVHEHPDGQVFLSLFKKPTSVVCAAELLAEIGDCRSRYPTRDTLAADAGQAAVAKESGKRKAACFRWACNKRLRQAIVTLADSSRHHNPLGPGPLRPSPRPQARPPPRDPHPRTRLVPHPMAPLARPHPV

SEQ ID NO: 48285 - protein, 312 aa, unidentified
MERTFVGIDIAKDQVDVHVHPTNGRFQLSRTDAGLAELVARLQPLEPRLVVLEATGGYEIPVAAVLASAGVPVAVVNPRQIRDYARATGQLAKTDALDARLMARFAEAVQPEVRPLPTPEAQALGDLVTRRRQLVDMLGAERNRHQQARDLRLQRRIATHIRWLTKALAEIEADLGTRIRSSPIWRERDDLLHSAPGVGDVTAYTLIADLPELGHLDRRKIAALVGIAPFNRESGHWRGRRMIAGGRPAVRSVLYMATLTAVRFNPAIAHFYQRLTAAGRPKKVALTAAMRKLLTILNAMLRDQRPWQPESA

SEQ ID NO: 48286 - protein, 372 aa, unidentified
MNYNTVYVGMDVHKESFTLCSCKYEDEKASHYQRTPASYKNVLRYLAFLRTIYGEDTRFVCGYEAGCLGYSLYHQLENFNVECVILAPTTMLEQRSKRRIKTDKRDAEIIARSLAQHNYSPVHIPTETDNQTKEFIRMRDDHKAELKKIKQQILSFCLRQGYQYDGSGNWTAKHVKWLRSLKTEGLYKEILDEYLLTYTILTDKLNRLDQRIEELASEEEYKEPVSKLTCFLGIKTHTALSVIVEVGDFQRFASARKFAGYLGLVPGQHSSGDDRNGLGITKAGNTHVRRLLVESAQSYTRGKIGYKSRVLRSRQAGNSPQIINYADRANERLRRRYYKMVLKDGKKYNIAKIAVARELACFIWGMMTDNIY

SEQ ID NO: 48287 - protein, 399 aa, unidentified
MFVGIDWAAESHDVCVVDPAGKICGRATVAHSQQGFDELTKHLVRWSQQGEVLVGIERPEGRLVDAILEAGYSIVLIPTFAMKDLRRRYAVSGAKSDPGDAYVIADVVRTDGHRLRRLEPLSEQTRALRAVVRARNDLVDQRVALGNQLRACLEAFWPGAAVIFADVASEICLSFLERYPTPESAARLGELRLQSFLKKAGYSGRRSPAELLERLRSAPEGIVGVEAEARSDAVRCMARVMQSLLRSIKDLDRAVVAHLGEHPDAEVFTSLPRSGRINAAQMLAEWGDCREAYPEPDAVAMLGGLCPVTHASGKHRDVSFRWACNKRLRLALTTFADNSRHASPWAAEVYRRAVARGCDHPHAVRILARAWVRVIWRCWQDRTPYDPALHGAAVLLEAA

SEQ ID NO: 48288 - protein, 339 aa, unidentified
MSTSYDGQQYVGIDLHRRRSVLVRMTEAGEMLETVRISNDPEYLRLVMARAGEAPEVALEACYGWYWAADALLELGASVHLAHPLGVKGFAYRRVKNDERDAADLADLLRMGRLPEAWIAPPASRELRELVRHRAKLVGLRTNLKCQVHAVLASAGVPVTSSDVFGPGGRELLERVALPAAMRAKTNSALRLIDAITFEIDTFAGLVTARLHTEPGYAAVQTIPGVGPTLGAVFVAEIGDVRRFRRPEQLTSWAGLTPKHHESDTKVRRGRITKMGSKLVRWAALEAVQRVGPQTRIGAFRDQVAERRGRNQAKVAAARELVECVFYALRDHHVRRLTA

SEQ ID NO: 48289 - protein, 341 aa, unidentified
MGEYIGLDVSMKDTAISVRREGKRVWRGKCASDPEAIARLVRKHASEPERVIFETGPLSVWFYHALQAEGLPAICIDARHAKAALDMATNKTDANDADGLAHLAEVGFYREVRVKGFDSMLTRTLVAARTKLVRIKTEISNQIRGLMKTFGLVIPAGKGSTFETNVRVRLGEHSELAAIILPLLEAWRSVRMRAAELTRRLIADARQSEACQLLMTIPGVGVVTATAFATAVEDPANFRRSRSVGAWLGLTTRRYQSGQVDYNGHISRRGDHQVRNLLYEAACVILTRSSAESTLRDWGLKLRERVGFKRAAVAVARKLSVVMHAMLKSGELFDKTAGAPV

SEQ ID NO: 48290 - protein, 334 aa, unidentified
MKSDTVYIGVDVSKEKLDVFVPAQKEGMRPTAKELDNDVGGLGELRELARKANATVCVEPTGGYELELVAFMHKFGVPVAYADALRVRQFARAEGCLSKNDSIDAALISRFADKIGVRVLEEKDVEAVELKRRAKFRQTMSDSRTAMISRLETEVDPGMKALLKEQVKRMNKLIAKAERLCLATVRKNERMNTLCERFTQVGGVGALTAMSILSGLPEIGTLPDEKLNRLVGISPEENQSGSKDRLRRIWGGRQEVRNALYMAATASLMWNSILGAYYRKKRAEGHPHKWAMVPTMRKLLSLLNRIARDPDFTPRPEPESTKRNAKVGRRRKTA

SEQ ID NO: 48291 - protein, 357 aa, unidentified
MPSITPENAAIIEVTGGVDTHADTHTAALIDQIGRVLGTQQFPTTTAGYTALLAWMRGFGHLARIGVEGTGAYGAGLTRRLRDEHLEVIEVDRPNRKTRRFQGKSDPIDAIQAAKAALAGERTGTPKQRDGRVEAVRNLRVARRSAVEQRADTQRQIKTLIVTAPDELRDQLRGLSVKQLITTCANLRPDRADAATPATAARITLRSLARRHQQLSTEIAELDELLEPLVSAINPGLVAVHGVGADTAGQLLVTAGENHQRLTSESAFAMLCGVAPIPASSGKTNRHRLNRGGDRQANAALYRVVLTRLRWDPHTRAYTERRTKEGLSKKEIIRCLKRYVARELYQIITTNDLQPAA

SEQ ID NO: 48292 - protein, 402 aa, unidentified
MGIDWGSQRHRVCLLDRDGRRIDERWVDHSGSSLAELVVWLRDKSESSGVLAVAIEIPRGAIVETLMEHGFSVFSINPKQLDRFRDRYSPSGAKDDRRDAFVLADSLRTDMHCFHAVRLDDPAIIRLRELCRLEEDIVRDQNRVNNQLREQLHRFFPQLLQLCTAADEPWLWDLLQAAPSPAKAAKLTEARIARILTRHRIRRLDVDRVRAALAGTPLTLAPGAVEAASEHALLLLPRLRLLRQQRTEVARRIEVLLGELAAACGSDGEIPEHRDAEVLLSLPGVGRQVAATMLSEASQAIAERDYHALRCYAGSAPITRQSGKTAIISMRQGCNERLRNALYHWARVSVVCDSKSKEIYAQMRAKGHSHGRALRGLADRWLRVLMSMLRRNAIYDPKRSPA

SEQ ID NO: 48293 - protein, 350 aa, unidentified
MELHTIGIDLGKTVFHLVGLNQRGEVVVRKKFSRKQLLHFTANLQVKLIGMEACGGSHFLGRALREQGHEVRLMPAQYVKPYVKTNKSDYIDAEAIAEAVERPKMRFVPIKSDDQLDLQSLHRVRERWVMRRTAVINQIRGLLLERGITLRQGRRHLDAALPGILEDASAKLSGAVRLLLAQLRLELDHLQMRIDEADAVINKIAGDNEACRRLVAIPGIGPVTATAIIAAIGNGAAFKKGRGFSAWLGIVPGEYTTGGKQKLLGISKRGNSYLRRLFVQGARAVLQQSAKQSSGLSAWLAQLTTRTHSNVAAVALANKLARMAWAVLAKNEPYRPPMLAGAATECLACR

SEQ ID NO: 48294 - protein, 344 aa, unidentified
MDHFAGLDVSVKETSVCIVDGAGKIVREVKVASEPEALLAVLKKPAYRFKQIGLEAGPLSQWLFSALAEAGLPVVCVETRHMQAVLKAQINKTDRNDARGIAQMMRVGIYRPVHVKTLRSQKLRMLLTHRKLLQSKAIAIENDLRGTLRNFGLKVGIVGKVRFEARIKELVENLPDLAVLVEPLLLVRRTLREQTIILHRRLLAIVRDDEVCRRLMTIPGVGPVVALTYRATVDVPARFRKSKAVGAVFGLTCAKYQSGEIDWTGRISRCGDEMMRVMLYEAAQSMLRAKKWSWLKAWAMQIARRRGMKKAIVALARRLAVIMHRIWVDGTEFRWTREQAAAAA

SEQ ID NO: 48295 - protein, 387 aa, unidentified
MIYVGIDIAKFTHVAVIADSNGKTLVAPFSFQNDAQGFSSLLIHLETFPKDQILIGLESTAHYAENVISYLLKLEYQVALINPLQTAALRNSGIRKTKTDKVDSLLIVKALRLNHYIPLRMRDAEILSLRGLCKTRQNLIKLRTRSKIQLSSFVDQLFPELNAFFRSGLHINTSYQLLKLHSCPGDIAKLHLTSLSNLLLKASRGRYTKQDAIHLKNLAAHSVGIDSPVLSLQIELAIVQIELFNQQLDQIQAAIEQAMLRIDSPILTVPGIGFINGAIILSSIGDGSRFPNASKLLAFAGLDPAVRQSGQFSARNTRMSKRGSPLLRYALINAAHNVARNNTTFSDYYTSKVTQGKSHYNALGHVAHKLIRVLFTILTRNIVFNLP

SEQ ID NO: 48296 - protein, 344 aa, unidentified
MHITSIGIDLGKTTFHLVALGERNKILVRKKFSRSQLLAYTANLSASLIGLEACAGAHFMGAALRGQGHEVRLIPAQFIKPYRKSNKNDFIDAEAIAEAVTKHNMRFVQIKTEEQLDVQAMHRVRDRLVQRRTALINEIRGFLLERGITFAASPIHLRKSLPVVIEDAEQNLSARLRWLLERMWQEWKQVELDIKAMTEEIERISNENALCQRLRQIPGFGPLVSSATVAAIGNGAAFRRGRDFAAWVGVVPRQYSTGGKQKLFGISKRGNVYLRRMLIHGARAVLLRVKYDTGGFGQWVHRLAQRAPRNKVVVAIANKLARMAWAVLSSGKDYQHQPLQTTAA

SEQ ID NO: 48297 - protein, 343 aa, unidentified
MQTVTTIGLDIAKSVFQVHGIDAEGQVIIRRQLRRRYVLAFFEKLAPCLVGIEACAASHHWSCQLQALGHTVRLMPPAYVKPYVKRQKNDAADAEAICEAVTRANMRFVPTKTPEQQSCLMLHRTRHLFIRQQTAVINAIRSHLAEFGIVAPVGRHGVEQLLNIAADLSDERLPGVARRCVGALGAQLKVLKAQILAFDRQIMAWHRSNATSKRLDDIPGVGPALATALVASVGDPNAFRSGRDFSAWIGLVPRQRSSGGKDKLGSICKQGDRYLRSLFTTGALAVIRYAKIHGTHHRPWLTALLTRRPTKVAAIALANKLARMAWAMMAKNESYREPAALAA

SEQ ID NO: 48298 - protein, 338 aa, unidentified
MKLYGAIDLHSTNNVTVVINEQDQVVYEKRLPNDLSLIAQQLSTYRRSLEGIVVESTYNWYWLVDGLMEKGYRLHLANTAAIQQYNGLKYTDDHSDARWLAHLLRLGVLPEGYIYPKEERAVRDLLRKRGQLVHQRTANLLSIQSLISRTTGNMISAKYIKALNIQRVDGVLPSPDLVLALKANLAVMNSADAQIEILEKTVQDRVKLRPQFKFLKTVPGIGPILALTIMLETGEIERFASVGNYASYCRCVGSQKISNGKRKGSGNTKNGNKYLAWAFVEAANFAIRFNSRVKSFYQKKKSKSHAIVAIKAVAHKLCRACYYIIKDQVAFDITKAFA

SEQ ID NO: 48299 - protein, 358 aa, unidentified
MKKTILRTAAGLDIGKDSIFVCIKYQYDTTDVSIKGTREFKNTPKGIASLCKYLQKKLLANVPHIVLMEATGVYFENAAYYLTDLNYNVTVVLPKRSAYFAKSDNQKTKNDKEDSKMLAQMGIEKIGMLELWIAPSPHMRELRQLVRYRAQLVKHRSQSKQQLHALTHSYDPFSSVLKGQRTHIEYLDQQIETLEKEIESCVKRDADVFERLTNVCTVKGIGLITAAIVIAETYGFALFSSIPQLISYAGYDVVENQSGNRVGKTKISKRGNSRIRAALHLPALSAKKHEPSLKSFYERIHKRNPKIKMIGCVAIQRKLLVLIYTLYRKNISYDPSYEQKKQDAINRSRQSANLAYTA

SEQ ID NO: 48300 - protein, 340 aa, unidentified
MEYGAIDLHLKTSLIRIVDADGVVLEDRTIATTRKMLTQVFGGRPRGRVVVESGTESEWVAQTVEACGHEVIVADPNYALMYGQRQRRIKTDKRDVAALADACRLGIYRPAHRVSAAQRGIRRTVRIREQLVRVRTQTINLLRAQLRQEGMRLPAGAAESVGARLSALDLPPALAEALAPLRDLLSAVAPLIAAGDTRVAGHAAADPVVGRLMTVPGIGPITAVTYRATLDTVERFQDAGASTAFLGLVPREASSGTRQRKGAITKAGPGPVRVLLVQAAWVVWRQRRGRAALHAWVEGVSARRGRRIAIVALARRLARILYAIWRDGTVYQAVPRVVPT

SEQ ID NO: 48301 - protein, 334 aa, unidentified
MLYAAIDIHKHAFQAAVLDSESGEVVEERFSADRESLARWAERWRGRVAAVAIEATTGWRWVWRELVASGFEVRLAEPVQTRALLGRRRSAKTDRLDARWLARLLAKEMLPQSWIPPAQIPRAARRTRLRKGLAEDRRRWGQRLHAYLLHEGWPCSRSNLLRPPGLRWAAALQLSEHARLQVDSLLAVMAALETQLETVDTELRRFAHGDERCQALQSIYGVGPILACHLLAEIGEASRFQRAEQITRLAGLDPVVDESGESRRRGHLAKAGSPHLRWALVEAAVHAHRPTAPDLALYRATRQRRDTTVARLTIARKIGKRAFHTLRELELTAA

SEQ ID NO: 48302 - protein, 343 aa, unidentified
MASYAGLDVAEQATHVCVVDETGKVVFRGVCRTEPAALHELLARRAPQLGRAVLETGALASWLVHGLTALGVPAVCVCARQAHAALQHGPCKTDRADAEGLARLAQTGWLKEVHVRSLASHEAKSLVIARERLVHIRQDLVNLIRGLLKPFGILTGRIGAGRFDARIRELAADRPLLLAALDPLLTIRLRILDQIALLDEQLLGLAKDDEACRRLMTIPGVGHLTARTFMAVIDDPGRFRSSQEVGAYLGLVPRRWQSGQVDQAGGITRCGDGLLRHLLYECANVIVSILKKPCALKAWAERLEARIGARKARVALARKLAVLMHRLWANGEAYDGQRQPHAA

SEQ ID NO: 48303 - protein, 363 aa, unidentified
MRKNNIARRLNGKKRRLTIGVDLGDRNSRYCVLDEEGEVILEGSVATTKKGLAQAFGSKPRSRIALEVGTHSPWVSRYLTELGHEVVVANARRVRLITDSSQKNDRLDAKTLARLARIDPELLSPIRHRSEQAQGDLMVIRARAVLVETRTMLVNSARGLAKSYGERLPSCGTGQVRQELAGPLSEPLQKALKPLLAEVESVSQHIREYDEQIENIAKSRYPETELLKQVHGVGTLTALTYVLTVEDPHRFRRSRDAGAYFGLRPRQRDSGNSRPQLRITKEGDAYVRKLLVQCAHHILGPFGQDSDLRRWGLELAKHGGKNAKKRALIAVARKLAVVLHKLWVTGEVYEPLHVRQQSKTAAA

SEQ ID NO: 48304 - protein, 343 aa, unidentified
MYVGLDVHKKYCYYAMVDGRGTVVKKDRFRTTVEELEEFASALPEGDQVAIEASASGCFVYEQLDEQGIAVHLAHPTMVRPFAKKHVKTDKVDAIVLAQLLRMDYLPESYVPDEAMRDLRTLVRHRAGLVRIRTSLKNRVHALLTMEGVQPPAVSDLFGKKGREFLETVKIRESRRLALDNYLKVLDELNARITEVEQFLEEKAESIEEVAWLRTIPGIGLHNALLILSELGEVSRFSRPQGLVCYAGLAPKVAQSGDQVRYGHINRQSNGFLRWAFVQSAWSAVLSSTPNRFQRIYQKVKARRGAKIAIVATARHLAESVYWVLTKQEAYKEPKAQRASSSP

SEQ ID NO: 48305 - protein, 327 aa, unidentified
MRYIGIDVSKATFMVAYPLNEKEYKTREFGNNAKGIHQFIHTLKEDDHCVMEATGYYSYLLLYLLNQANITTSMENALKVKNFARTMLSVTKTDKADAQLLSLYGERMRPAPFKMPPDSILLLKQKRAALRQFQKQLQANNNLRKSLEALPHRDAATFKYIDKISETLEKQIRKIEEDLVALTQKEFERQMQKLTSIKGIGASLAAALIITTGGFTYFDNAKQVSRYLGICPTYQQSGTSVNVKGHINRNGDSHLRSQLYVASWSMSLCNKECRNLYLRMKEKGKPGKLIMIAVANKVLRQCFAVVKHDTDYIDGFVSRKPNSSIEG

SEQ ID NO: 48306 - protein, 413 aa, unidentified
MLFVGDDWAEEHHDVELQNEAGKVLSRAKLPEGVAGMARLHAMIGEHVGDDEEPTVVVGIETERGPWVQALIAAGYQVYAVNPLQAARYRERHTVSGAKSDTKDAHVLADMVRTDRHQLRQVAGDSPEAEAVKVLSRAHKTLIWERTRHLLRLRHALREFYPAALVAFDDLTTVDALELLAAAPDPDAGAALGIEAIEGALKKARRHNRAVKAEAIAAALRTPQLGQPKIVASAYAVTVRVQVSILSLLNTQISELEEQVDVNFSKHPDAEIYLSQPGLGTVLAARVLAEFGDDKKRYTDGRARRNYAGTSPITRQSGKRKVVQARFVHNDRLLDALGQQAFCSLRASPGARAYYDRIRARGTGHHAALRQLGNRLVGILHGCLKTGKEYDEAKAWAPAPQDQKTDEDQLLVA

SEQ ID NO: 48307 - protein, 378 aa, unidentified
MATTRSVLRHELTTKSGDLYMSLDLGDKRWHISIGDGRCGLSRYTVGAGQTDELADCIAKAKNRLHSSRKAIVHSCYEAGRDGWWLHRWLTEVGVDNIVVDPASIEVNRRARRAKTDRLDADKLLAMLVRHHSGERVWSVLREPSPQDEDARRAHRELQRLTHERVAHTNRIGSLLVLHNLRPNVVIGGRYWSAWWERHRAQVPSSLAAELEREVMRLQLVKQQVRDIEAARTQELLEGQQPQVAQLTRLRAIGTKGAWVLVKEVFGWRTFVNRRELAGSLGLVPTPYASGDSQLEQGISKAGNRRVRGLLVELAWGWLRLQPGSALTQWFNRRFASGGKRLRRIGIVALARRLAIALWRYLKNGEIPAGAQLKPTGA

SEQ ID NO: 48308 - protein, 356 aa, unidentified
MLAKSIAGSRPKIKETGMEYCGIDVHVSYSQICILDEEGEVMETSRVRTSRPALTKFFARRNQMRIVLEAGGSSPWVSRFLEELGHEVIVCSPRRNRLIAESTLKNDKVDAEVLARLLRMDPAFLKPVHHRSEKTQLMRSKLLVRRSLVEARTKWINTVRGLLRAFGYRVAGKAPHTFAERVDRMRLPDELRQVIEPLLEQLDLLSGEIARRDEELADMAREIPAVDRLQQIPGVGPITSLYFVLSIEDPHRFRRSRDVAAFFGLRPSMRESGAASHYGRITKEGDSEMRRLLVQAAHAMMITRADCALKQWAKGVEGRRGKGKKSVALARKLAVLMHHLWVTGEDFEAFPKSKAA

SEQ ID NO: 48309 - protein, 346 aa, unidentified
MPETEVDTFAGIDVSARELSVALCRGKGEDKPAMAKFSNHPSGHKALIAHLLRGGRRVRICLEASGNYSLDLALTLQAHRQVEISVINPRRARRFAESLGQRSKTDPVDARVLCEYAARMPWVAWQPPSSVALHLRAVARAIADLGVIHTQQNNRAHASAASQALPVLVVKEMQRHQKYLEQRMTRLRREALRLIAGDSELDRRFRLMLTTTGIAETSALQILGELAVLPNMLDARQWVAFSGLDPRLFKSGKSVEKRPRISRGGSRHLRRALYMPALVALRRDPYLRRFYQNLLARGKARLQAVVAVMRKLLHALFAMFRTNQPYDGSKLCCAVDMAGNAIAACA

SEQ ID NO: 48310 - protein, 284 aa, unidentified
MKQSVVYIGVDVAKANLDVAWAAASRRFPNDRNGHAALVLWIKQSAAPVQLICEASGGYEQALLESLEQNNLAVTLVQAIRVRQYARAAGILAKTDTIDAKVLAAFGAAMQPKPTPPFSAEQKRLRQYEAQRRHLGKVLLAEQNRLAQVSCAELRSLSRNLISKIKKQIDTLDTGIANLIAQDQVLCVKAQKLTAISGVGARTAALLLAQMPELGQLNRGEAAALAGLAPFNHDRSAASAPSSVDDAPCAAGSTWLRSAPLATTRSCRVFINACAPKANHINSL

SEQ ID NO: 48311 - protein, 411 aa, unidentified
MVKENFIYVGIDLHKETHTAVMIDCYNQKLGEITFPNRPADFPKLVTKVKKCNTDAKEVVYGLENAYGYGRPLAVWLIDKGYFVKDVNTAISHRQAKHRGAMYRKSDSDDAGAIALATLNMLDKLPDACPNDAYWSLGQLVHRRDNIMKQRTRLVNQLHEQLCIAYPSYKQFFNDISRPTALYFWENYPSRKYLKGKSVEDLGEELVPVSHNKCSTKTCQAILDAVAGDKVKNIDYQDARDMVTLSIVSDLQHYDSQLTEVDKMLEQMYKMLGCTLTTIPGVNVITAVKILAEIGDIKRFSNANKLAQFAGIAPLHLSSSGKGKDVATKQGNRRLQATIYFLAIQMVQLSSKGTPRNPVVRAYYEKRKAEGKTSQQALICISRRLISIIYGMLKNGTEYRMPVVENAGENR

SEQ ID NO: 48312 - protein, 361 aa, unidentified
MEKITRVGVDLAKRVYQVHAVDNAEHTVLARPMSPQRFEQWSARLPAGTLVAMESCSGAHHLARRLRVMGLDARLIAAHFIAPFRVQGASGKNDANDAAAICEAASRARTRYVPVKTPEQQGWQGIHRLREGYKEERTACINRIRGLLAEFGLVFPQSPDALRRVLSEVLEDASNELPGMMRLALQRAQTHWRVLDDEIAWCDQQVKQHVRGDQTAARAAQLHGVGELTASALVAAVGDMHQFKSARQFSAWVGLVPSQNSSGGKSRLGRITKRGDDYLRTLLIQGAKSALLAAPKRGDRISKWLLQLRDRVGWQKALVALANKNARILWAVLTREVAYDPEHVPPVPACKQPALKAPLPA

SEQ ID NO: 48313 - protein, 411 aa, unidentified
MNPVIGLDVSKGESQVQAFLDKGKPYRKSFKVSHTIEGLDLLVEFLEVVKRETGKKPPIVLEATGHYHSSVVQYLEDRGYLLIIINPLISYKAKSSSLRKVKTDALDAYHLCELFYKEDLEPYKKRGVQLLNLRNLTRQHENITGVLIQTKLQFQAILDQVFPEYRGVFGDLYSVVSLLTLSEFPSSEDILEASVETIADKIAQLCKSRSYRWANEKAIQLKAAADRNPFEKTLYQSHILSLGMYINIILQYKEHLSKLESEIDALAKEVEEYNIIKSIPGIGEKIAATIISEIGEIDRFNDPKKLVAFAGVDPSVFESGKFTATRNRITKRGSSRLRHALYMAVRCAIRDCRKSKTSDEIIPRNKKLREFYDKKREEGKPFKVAVIACVNKLLHWIFALLKSKTTFQDIA

SEQ ID NO: 48314 - protein, 454 aa, unidentified
MAQGNGLTRGDRNRNRRIAALREVVRRDRAVLSIDLGEDKQAAVLVDHEGTVLGRRIVKAKAYQLGGLLEWAAGRAARAGFAGVTVACEPTGHRWKAVMGLADAAGHGFVCVQSLAVHRSREGDDYTRDKTDHRDAYLIGKLVIRLDCYLPERAGETWGRLRHLGARRFALVADVTSCMQQVADLLGCAWPAALGAAARPLESTTWLAAMSAVTGRCGGNPARLRKMGYEKFAAAVRRELPRWGASKLRHRIVRGLWEALADAGGVASQRRGALERVRLVLGDWMSLLARLADAEERMTGIVDELGLTALVTSIDGLSAAGAAVILAETGDLTRFSSARAVVKHAGLNPAENTSATIVGRTRIARRGRPRLRAAAWRAVWGGMRHNQVLQDKYQHLTGRDGDRLNDGQARTACAAALLRWLHAVVTTRREWDPKVASGAVIPARHATAPCRQAV

SEQ ID NO: 48315 - protein, 420 aa, unidentified
MTSPNAIPADAVLVAIDIAKVRNEVLIEAPGHKRRRRLPVLNTRAEHDRLIEILQAYDQPVVCGFEATGNYHRPIAWRLAEAGFEVRLVSSLALARTREALHNSWDKNDPKDAQVILHMLRIQATQVYHDPLRAGINDVQELSKTHEAIARAKTEIQHRILTHYLPLYFPEIDRFRGNSRSDWFFAFLDAFPTPASITTLTKEEFVTAAWDVVGRKVSKTQILMDIYETARTSIGLPLPLDAPAICMFRMVIAEARSLIRQRNEIEAQADERLRHSQDYQLLRQIPGIGPINALTIIAEAGDLRRFHHHRQFLKFCGLDLSTQQSGQYRGQTRLSKFGNARLRRTLWIAGQVAIRQRENGFRHKFERYIARDRDNPDLRRKAMTAITAKMARVVHAVVKGGSDYRPFVEGRVPGGRTSVS

SEQ ID NO: 48316 - protein, 342 aa, unidentified
MYYIGLDVHKKTISYCVKDASGQVHREGTIGATRNELDWWIKTLPQPWTVAMEATIFTGWIYDHLLPHAAQVKVAHPVMLRAIALAKKKNDRIDAGKIADCLRCDFLPECHMASTEIRDRRRTLRYRHLLVRQMVQMKNRISGLLLETGVSHNKQRLHKVGYFRELISNNEEVHENIRPLLRLSRETIVRCQKTEYALVSSLQRDPLLAERIKRLRTVPGVGPITALTWALEIGDVSRFRSVKQAISYCGLCGDEKSSADKVLRTPLSKQRNKHIQSVLVEAAKLAPRQNHELALVHEREKQKGNANRATLAVARKMVAYLLAVDRREREFVPAEGRSTAAA

SEQ ID NO: 48317 - protein, 374 aa, unidentified
MDVHSTSYTLCAMEPVLGGEDRIFANIQVTSDYRNVIQFIDKLKEKLGSSDSYSIECGYEAGCLGYSLYHQLTKAGVKCTILAPTTMLTQQGKRVKTDKRDAVMIAQCLSYGGYHAVHVPADKDVSVKEYLRMRDDHKVALKKIKQQINAFCLRQGYFYAGNKWTIKHLNWLKKLVLSDLYRETLNEYLTSYEEQTAKIERFDKRIEELAEDSDYQENVKKLGCLLGIKTHTALSLIVETGDFKRFRKGNTYAAFLGLAPGESSSGEKISRTGITKAGNSHLRMLLIEAARGMCRGRIGYKSKVLRSRQDGNPTEVIAYADRGNTRMRSKYYRMIRHGKKDNVAVAAVARELACFIWGLMTNNITSKEEGTKVA

SEQ ID NO: 48318 - protein, 419 aa, unidentified
MSFKILKFNCCGLDVHKTWIYACIGITDSNNRTEYKQARFSSFTKGLNELCDWLAKYNCTDVCMESTGKYWIPVFNILEQHNLWVTLSHPKYTKPMKGNKTDRKDAKWICDLYMCGMVKPSFIPPADIRELRDLVRYRYKLTCIRTGEKNRAQNCLTVSNLKLDDVFSDVFGKSSRSITEQILQHPGEKFDVTPFVHGRCKTPIEEIQAAIDGVISREQAVKLRQCLDHIDELNKHISEVEQEILRLSDKYEAALNLIRTVPGFDKNPMTAIQVLSEIGCDMSVFPTDKHLVSWAGCCPRNDKSDRKIKSTRISRAGSYFKPVLVQIANALIKSKKHPEFTGRYRRIKARRGHKKAIIAICRMILTAIWHILSDLKPYTPEGFLESRPVKEQKILTISQALNLLKLRGYVIKGDPLPAF

SEQ ID NO: 48319 - protein, 367 aa, unidentified
MKKIAYVGIDYHLNSVTMAVVVEGQKDFHDAIRLSNHNKVISKYLKKLSEQFSIKACYEASSSGYAFQRKLSSWGYHCDVIAPSLIPKKPGNRRKNDLRDAKDLVQNYANGMLTMVRLPSEREEALRSLIRCRLAFKESAKRVKHQINSLLLSHDFRWSQKSKWTQRHRHWISTIQMPHEHLQQALEEYLGHLNYLESRLEYLDAQIEHIADSPMYAASVKKLRAFKGISTLTAMLLIAEITDFRRFPTPRALMAFLGLIPSEHSSGDKQQGGSITKTGNKRCRKMLIEAVQHYGKSPRITAKMKQDLAEVASPNAAIAVKCLNRLHHRFWTLTMKGKIRPVVITAIARELVGFIWATMQPTPATAS

SEQ ID NO: 48320 - protein, 391 aa, unidentified
MPTVADQAEAPIAIQTHLACIFTSLELSRSIWLITSLSPGSGEKMSKHSVRAGDVAALLARFSELKRKASGRTGKSFPIVVIQEAGLDGFWLHRVLQSEGIESHVVDPASIATSHRRRRAKTDRIDGEALLRALLAHKRGEPRVCAMVRAPTPEEEDRRRLCRERKVLIAERVEHVNRIKGLLFSQGVFDYEPLRRDRRQRLDELATGDGRPLPTHLKAHIGRELDRLELLLDQLKTAEAERNTLLAEQQAATERPAPVGRMLLDFRGIGAEFAAVLWLEALFRHFDNRRQLASYAGLAPTPWQSGSVDREQGVSKAGNPRLRNTLIQLAWLWLRHQPQSALASWFKERVNRNGGRMKKTTIVALARKLLVALWKYVTAGVVIEGAVTKSH

SEQ ID NO: 48321 - protein, 331 aa, unidentified
MKIKDVIGIDASKLTLDCCLHKSGAQEVFENTPEAIVFLVDWSIKISGLAKNELLFVFEHTGLYTHQLVRYLSEQGYYFLLVPGLEIKRSLGIARGKDDRADAKRIALYGYRIREEARPYQMPKESLISLKRLMSMRRKLVSQRAGHIATLGEQIRVLNNELGPILLQVQRDIIGVLDVQITKIEKELDRLIEQDPELQIIYRLLVSIKGIGAVTARFMIVHTVGFTAFKSWRKFASYCGIAPFPNRSGTSIRGRTKVSQLANKEGKTLLNLCAGSAIQCNPEMKAYYTRRIDAGKNKMSTLNIIRNKLLARAFAVVVRGTPYVNTIGYIS

SEQ ID NO: 48322 - protein, 295 aa, unidentified
MYHMKEELVYVGVDIAKRYLDGAMGNERRRFSNDALGHRELIKWVKQLSAPPVQVICESSGGYERALVQALARARVKISLVQANRVRQFARAAGILAKTDRIDAEVLCEFGKGMRPQTVTAAKLEQEQLRELESQRRHLTHLLVMEQNRGARLSDASVQRLNRSLINQIKKQIDQLDLFIKRHIDQSQELSAKAAKLTSISGVGARTAALLLAQLPELGELNRREVAALVGVAPFNRDSGRMRGKRTIYGARRPVRHGLYMAALVAAHHNPILRNFYLRLRAAGKPAKLALTATM

SEQ ID NO: 48323 - protein, 323 aa, unidentified
MREFTGIDISKKTFDIYFEQNGQGTHVCFNQNEQDYKRFINLIGNERICIMEATGNYHVKLSRFLYENKLKVLVENPLKIKRFSQMRLQRNKTDKADSKMIYEYGKMVFIEKVIVGWKPDSNEIAELKQYDTVRQQFTKQLTALTNTQEAMGQLSDLQEQVDGALKLMIKHLKDALNQLDMQMQQIVETHHKDSYKLLTSIPGVGPKTATMMICLTDGFRKFDAKRVKPFISYIGMSPRTYESGTSVKGAGHITKVGNGRLRTLLYLCSWTAKRVNPQCAELHKRLFEKGKPEKVIKIAIAHKLVRQMFGVIKSGSSFSTVRA

SEQ ID NO: 48324 - protein, 370 aa, unidentified
MKKRITFVGLDTHKNSIEVALADDGRNTEVRLYGSIGGDLASLDKMIRKLQATGTELRFVYEAGPCGYQIYRHLRAQGLQCDVVAPSMVPKRSGDRIKTDRRDACNLARLYRAGELTAIYVPQEDDEAMRDLVRGRQDAINAQRKVRQQLGGFLLRHGFRYPGKCAWTLAHRRWLAGVRTPHPAQQIMLQEYIHSVEECTQRVHRLTEQILQLMPDWRMRPLVGALQALRGVAPVVAATAVAEIGPMGRFERPRQLMAYLGLVPSESSSGGSVRRGAITKTGNGHARRALIEAAQAYSHPARISRVILKRQEAVPGPIRQIAWKAQLRLCARFRKLTARGKSRNRVVTAIARELSGFMWAIAKQVPVPQD

SEQ ID NO: 48325 - protein, 367 aa, unidentified
MSSVIYVGMDVHQDSFSLCALASSSGEIIRETRCSADVKNVVKFINHLPENESNQVTLGYEAGIWGYSLHNRLVELGYDCVILAPSTMYSNAKHQMVKNDHQDAQMIAHNLASGTYKVVYVPDQEDDEVKEFIRLIKAMKKELKQIKQRIRAFVLRNGFRFERTPWTGVYLEWLSQLQLPRIKKMVLDEYLIHYHELTDKIERLSRLLGDLSHQERYQEPISKLRCFKGIDTVAAMTIHVETSDFSRFPNARAYAAYLGLTPSEHSSGKNVSLGRITKQGNSTIRTTLVESAQGLVRGNPSKKSKKLKARQINQSGRVINYADRAVNRLHERYERMIHAGKPRNVAIIAVARELACFIWGMENGKIA

SEQ ID NO: 48326 - protein, 407 aa, unidentified
MEVLYPRCAGLDVHAASVTACVRIATGANVEYVHRTVATTTRGLLNLAEWLTTYACTHVAMEATGVYWKPVWHVLEEHFTLVLANAMHIRNVPGRKSDVNDATWIADLLAHGLIRSSFVPPAPIQTLRDLTRTRRQLVQEIARHVLRIQKTLEDANLKLTHVMSDIVGVSGRAILNALVAGESDPERLVDLTRGRLKASRAELVDALHGRVTDHHRFMINLHLTQIDALDAAVTAIEARIGDALEPFRAAVSLLKTMPGLSDTTARVLIAEIGTDMTRFPTVGHLISWAGLCPRLDESAGKRRSTRTRQSAPWLKPTLITAAWAATRKKDGYLHAQFLRLKSRRGAKKAIVAVANSMLTAAYYMLRDGVEYHDLGPQHFVEQNKEQVAKRLLQRLRDLGLNVEVKAA

SEQ ID NO: 48327 - protein, 356 aa, unidentified
MSEGSWVGLDVHARKIVAGVLDAGSGELRSLRAPTLPADTVDWLRQFPAPVRVAYEAGPTGYGLARACVAAGIACTVAAPSKLPRAPADKVKTDRRDAGRLARLLRLGELVAVRVPEPHEEAARDLVRAREDARGELMRARHRLSKLLLRHGLVYDASAWTLAHDGWLRRQRFEHRPLAIAFDESYAAMLQAKTRRDALDRAIVELAAEPPFAEIVGRLCCLRGVSTLTALALTVELGDWTRFRPQSLGPFLGLTPSEDSTGERRRLGAITKTGNTHARRLLVEAAWHQRRPLRASATLERRRQGQPAAVRARADRSARRLHQRWQTLEDRGKRRTIVAVAVARELAGHCWALATM

SEQ ID NO: 48328 - protein, 351 aa, unidentified
MKSINKKARGEELFVGIDLHKHRWHVTIRAADVEIFSCSIAGRWQELKKVLNRYKGCRIHAVYEAGFLGFWLFDHLTQYGVDCIVTPPSLIPREHGNRVKTDRLDSGKLARLLAKGLLKSIWVPSEKERFHRQVIRRRRQLVGDRVRTQNRIKSELCFYGIDLPAPRRKWTQVYFANLQRIKFKNRWMQQSFNQLLEQYEFLSAQIDKQTQLLKQLSQLPLYRDRVKILCSIPGIGLLTAMEILLELQDFARFRRAEQLAAYVGLTPSQYSSADKIRMGRITRMGKNTVRAALVESCWHLIRKDKAMQKKYEQIKARAGGKRAIVAVSRKLILCIRRLLLDNRPYEYKPVN

SEQ ID NO: 48329 - protein, 455 aa, unidentified
MKVLHERVAGIDVHKKMIKVAIRSPGAKKWTRKTEILTFTTFYGVLREMARELRRRGVTHVVMESSGIYTDPVYYALREEDFTEVLVVNPAHVKAIKGQKTDAKDCGRLAELLECGLLQGSYIPPLPLKEVRDLARYRCKTVQARTSEVQRLDKSLESAGIKLSSVASDITGTGPTAMIEALIDGERRGEVMADLARGRARTAGKLADLSMALEGRFTEHHALMCRLILDRVAAYDTAVADLDDRIRSAVAPWQQQVALLVTIPGFGEVTAWTWIAEIGPDPHQWFGSKEKLACWTSLAPGNHISAGKRKHSRTGDAGTYIKPALVQAAWAAIRVPGRLQARYNRLVRRFGGEKNPGAKKKAIVAIAHTLLKIAYSVLKSGKPYQEPGEDFYTRRRNPRNRQAWLEAELRKLHPGRPVTVIIGPGDDDSSPDGCSLPGSGSPPGSKPLTATASSG

SEQ ID NO: 48330 - protein, 403 aa, unidentified
MSSAVSYLFRRMKGSTALVIIGVDPHKRTHTASVVETGTDKVLATLQIDASLAGYRRLLKWASGFEQRRWAVENARGLGRHLAQWLVAREEVVDDVPSTATARVRELSRGGRRKNDVIDAAAAASVAALRGDANPVVADDLTTVLALLDERRDNMVTQRTRLINQLHALLRDLLPGGAPTALTAVDASRLLTGVRPAGPVEAARKHLARDLVAEIRDTDQRLKTLTAQIADTLDAHGTRLRDVAGIGPVIAGRLLGRTRRAGRFRSASAFASYAGVAPIEVASGDHARHRLPRGGDRQLNLALHIVALTQVRMRESTGRAYYATKVAAGKSHNEAMRCLKRRLADRVWRLMLSDEHPLAAGPGGHSGATLTSSAAGSTPTTSSSDKSLPGPADRNSTTPSPAA

SEQ ID NO: 48331 - protein, 343 aa, unidentified
MEYYVGLDVSLKQTSICVVDQSGSVVREGVVDSDPEAISVYVRSKAPGAVRIGLETGPTSTWLWTELKRLGLPVICIDARHAKAVLKMQINKSDRNDAIGIARIMQTGWFKEVHVKDIDSHSVRALLASRALLVKIKRDLENHVRGLLKNLGLVIGRAKFNVFAVRAEELIEGRPELIAAIRPLLEARTAVEQQVSELDRKVMKLARHDAQVRQFMTVPGVGPITALAFKATIDDPARFARSRSVGAYVGLTCRRHASGEVDWSGRISKCGDAMLRSYLFEAAGVLLTRVPKWSAVKAWGVKLVKRNGLRKAKVAVARKLAVILHRMWIDGTEFNWSKKEIAA

SEQ ID NO: 48332 - protein, 351 aa, unidentified
MLIIGVDYHPSFQQISFLDQETGECDDRRLNHSDGEAERFYKELKQRGVSVRVGLEATGYSRWFERLLAELGFEVWIGDAAEIKRQRGRKQKTDREDGRLLLRLLLENRFPRIWVPNPENRDLRQLLWHRHRLVQMRTRIMNQLQAVAMNEGYRWKKKLFSEKGRALLEKLPLAPWASRRRKELLELLDQLDPKIAELTKAVEQEAEKRSEVVRLMTHPGVGPITGLAYVLVIGTPDRFPCGKKIGSYTGLIPSEDSSAGQQRLGHISKQGNSLLRYLLGEAAQAAARCNPDWRRRYVHLTMRREKSIAKVAMARKLAVRLYWMWRNGWQYSQLVAFGSHAGKLGTGHGVK

SEQ ID NO: 48333 - protein, 373 aa, unidentified
MKKVRFLGLDVHADTIAVAVAEPDGEVRSLGIIPNRAESVRKLVKKLAPAEQLQACYEAGPTGYVLYWQLTALGVKCEVVAPSLVPVKAGERVKTDRRDATKLARSYRAGDLTAVWVPNQEHEALRDLVRAREAAKQDQLRARHRLSKFLLRQDRRVPSGFKVWTQRYQDWVKEHVHFEQAAQEYTLLDYLHEVEHMDDRIRRLDLAIAEEVKLAPPGMQEVIQALQALRGIAQISAVTVVAELGKISRFDKARQLMGYSGAVSSEHSSGKRMQRGQITKTGNAHLRRIAMEAAWAYRHRPAIGPRLRKRQEGLSEEVKEIAWKAQHRLHKRYCNLSAAGKEKQKVVTAIGRELLGFIWAIGVQAERNSKRVA

SEQ ID NO: 48334 - protein, 402 aa, unidentified
MNCVGIDVSKGKSMIAVMRPFGEVVVSPFEVRHTASELSELAKLLKNLDGETRVVMESTGNYHAPVAWLLHGAGLYVSVVNAMLVHDYGNNSLRRGKTDKKDAVKLANYGLDHWLTLPRYVPEEDARLMLKTCYRQYQQYSKVQTMLKNNLISLLDTAFPDANRLFTSPPRADGSEKWVDFVAAFWHCECVCGLSKKAFTTKYQKWCKKHGYNFSEDKALDIYASACGRFGVMPKTNTAKLLVEQAISQLQTTSAALAALKQEMQSLAASLPEYPVVMEMFGVGPTLGPQLIAEIGDVRRFHSKKALVAFAGIDAPPYQSGQIDVRSRSISKRGSASLRRTLFLVMGVLLQCAPMDEPVYQFMNKKRSEGKPYRVYMMASANKFLRIYYASVKNYLDSLEHN

SEQ ID NO: 48335 - protein, 451 aa, unidentified
MTLPVRHEASDRLVRCRATERYPLGRRARLELDEIAVYRNEKVTLSFTCGIDWAESHHDVALIDERGVVLAHRRIDTGTAGFAALLTLIGEHGGGVDDTVIAVETDKNLIVVALVEAGFTVYPINPRAVARYRERFGQAGGKSDPGDAAVLAHILRTDRHLHRRMPANTNQAGAVKVLARQHQEAIWALHQTVSRLRSVLLEFYPQALQAFPNLKHYAATTVLAAAPTPGDAQKLTKTRVTSLLRRSGRGNHPVLAERILTALRTPALRQPTCVEMAYGHVVQGLVGSVVAMRAAVDELEKALMCEFDQHPQSTLLRSVPGLGPVLAARILAEVGDDPARFSNPQSLRAYAGTAPVTIASGRSHYVKARKVRNKRLADACHWWAFTILTKSVGAREHYDRRRAAGDHHNAALRNLANKLLGRLWWCLTNHQPWTEDGAWPNASPPEEATAA

SEQ ID NO: 48336 - protein, 370 aa, unidentified
MKYVGIDLHTNRFTCCYLTDDSKQKQTKTFELNPEGLKGFYSTINKETYILIEATINTFAFVSLFKEMVKEVIVANTYQLKSVGVPGKKTDKIDASKLAEKLKTQIISGVNQIVPVIIPPDEVRALRSLFATYRTLRKEIGRTKNRIHSLLKENLYPFTKEYIFGVKAREEIRTITDDSILSFQINLLMDTLEHLEETFEKLVVEIKKAGAVFLPQVEILTSMSGISVITALAIIADVFDITRFKNSKHFASYLRSTPRVESSNDKTVIKSTNKAGRKLTITLLSQSLNHFRDNNKQLNHWYEKVNIFKKKGIVRMALCRKVITEIYQMLKKNEYHYFRNPLLHGKKLMEYRNFLRKENIYIEETSSNAA

SEQ ID NO: 48337 - protein, 314 aa, unidentified
MKALRTHVAGVDVHKDILAISTMIAEADQEPKVEHFECSTMTDDLKAMGLVLLEKGVREVAMESTGVYWKPVYNVWEPMGLKCTIGNASHIKNVPGRKTDTKDSEWIAQLHRFGLIRPSFVPDGVFQRLRLLSRHRTNLVEDLSRVKNRVEKVLQDGNIKWSSIVSETFGVAGVKILDLIADGVTNAQTLAASVTTKIKRKGEAKRALTNCLTGEHIFVIGKLMHQYRYLRDQIQEVDNELVEKAHPYAHLVEELDKIPGIDKVLAIGIIAEATTDMSSFKDERSFAAWCGVAPGNNESGGKKKDQNAERAILT

SEQ ID NO: 48338 - protein, 361 aa, unidentified
MKQVLYVGLDVHKESIVVATAPQGDTEAQLYGKIGGTLDALDKLIKKMEKPDLELRFVYEAGPCGYVIYRHLKKRDYECQVIAPSLIPTKASDRVKTDRRDARQLARLFRAGELTAIYVPDEEDEAVRDLVRARDRTMIDQGKARQRLKGFLLRLGHRYLGRGNWSAEHLLYLASMKLSHAAQQIAFQEYLEAITVATERLERLTKAMEAALTAWKREPVVRAMMSLRGVALINGMTLVAEAGDLTRFDSPSQLMSYFGLTPSEYSSGEKRQQGAITKAGNGACRRALVEAAHHYRIAPRVTPRMQERQEGQSKEVRAIALKAQQRLHSRYRLLTGRHKRTVIVVAALARELCGFVWAIAC

SEQ ID NO: 48339 - protein, 405 aa, unidentified
MATIVALDVSKGKSFYVMYQEMTCLYEGEITHTKSGSQELHALIKNLPEVPEIVFESTGIYSRPVETFCQKNQLIYYVLNPLQAKQQMEKESLRKWKTDKRDAHRLAQTHWNNSRTKSVSAEPLYKELRDLSRFYQEIMDEIGRMRMHLHNAIQLTFPELEQVLSNRLTPYGLTMIAQYPHPSFVLKQSRTIIKNRLMASTAKKISENRARNKADELIAYAKDSYPAVSETAIPVAKTRYYAEQLQALLNQKERLANQMIETAKQLEEFSVIASFPGIGELSAAQFIGELGDLRRFSDPRKANAYIGIDIRRYQSGNYLAQDHINKRGNPKGRKILFFIVKNMIKAQHAAPNHIVDYYYKLKKQPLPKKEKVAIVACMNKLLKCLHAMIRNGTKYDYSYTVSTDH

SEQ ID NO: 48340 - protein, 368 aa, unidentified
MKDNTKYVGLDVSKEKIAVAIADEGREVPRYWGVILNTPEAIKKLMKQLGEPDQLKVCYEAGPTGYPIYRLLLSLGIECCVVAPSLIPKKPGERVKTDRRDAIRLSQLFRAGELTSIYVPTEDDEAVRDLVRAREDSKEDQLRARHRLTKFLLRYDLNPPAGTKKWTRGYRDWLDVLKFSRGALSTVFQEYLHQLDEIEARVKRIESEIHIQATESVNAPLIQALQTLRGVAELTATSLVAEIGSFTRFGGARKLMAYTGLVPSEHSSGETRHQGKITKTGNAHVRRLLVEAAWSYRYKPALKGEIRKRQEGQSPEIKAIAWKAQDRLHRKYYRLMSRGKPSGKVIAAIARELAGFVWAIACKVEKAS

SEQ ID NO: 48341 - protein, 429 aa, unidentified
MRPAARMEARERYARQFPVNVGVDAGKTFHKLVACGADRVRTKAIQVDVSRAGFDGALAFLRATYPDVPTSQMLVAIEFAGHYGATFAAFLRDAGCVVVTMPATVTYKLKELEDNSPRKDDAKDAAQVCKLIGAGYFVGAPALSPVVAQLRVLATERHRLTMDETRLRNRLQAILDVAWPEFAGLAGPVELHTARALLRRWPVAADVAQAPVRSISMLTRRVSHNHFPVAKARALHAAARTSVAITSDAEARRAEIRRVLDRWDLLVVQIAAVEAELAVLVEQHPGARALTTLPGVGVVCASTLVAELGTPEGFESPRQVWKLAGMNLARKESGTSLHGRVRQTKRGRPLLRRQLFLLAGRWCQARGLYREDYLALVARNGGCKVSAICAIARRLVPLVLHIAQTGEPFDQVRWQRARSDSVLRTPPAA

SEQ ID NO: 48342 - protein, 343 aa, unidentified
MDHYVGIDVSLELSSVCILDAAGQIVKEAKVASQPEALTTFLTRLGLPLTRIGLEAGPLSQWLHAALVKAGFETVLLETRHVKAALSAMIVKTDRRDARGIAQLLRMGWFRPVHCKSAPAQEVRALLVARKQLQAKMRDGELSLRGLLRGFGLKVGEISKGQDAARVRSLVVGHAMLEQIAEAMLQAREALRTEFGKLHRTMLAIVRADEVCRRLMSVPGVGALVAVTFTSGVDAPERFARSRAVGAHFGLTPKKYPSGETDITGAVSRVGDVMVQTALYEAAHIMLTRAVRFSTLKRWALEVARRRGMRRAKVALARKLAVILHRMWVEGTTFRWGREVGAA

SEQ ID NO: 48343 - protein, 394 aa, unidentified
MKLVGIDVGKNSHHFCVMDKETGEFNVAPSSFSNNKEGFDFLINSLKPYSKKSILIGMEDTGHYHVALLKFLLSNGYTVALINPKTTDLTRKMEGGITKNDKLDTITICDVLETPERKKQYRITKVDRFDLYEQRQLTRHHHNLKEELNVYCNRLQKSIDLVFPEFNTLFSSKYSIVYMNLLKTFGSAEAIASTDIRTIRKCFEIKGRGNRISLTPEKLKECAKNSIGISSEVETIQIKHLVSQIMLIKEQIAEIDKKIEEFSIKNNSPILSIPGISHFSGTSILSELGDIGNYSKPSQIIKFAGVAPYHYESSQYNAQHTAITKKGSKYLRKTLYQIILPVINNNPVIKKYYLLKISQGKGHRCAQGHCIRKLLRIIYHLLETGQSFDPALLR

SEQ ID NO: 48344 - protein, 470 aa, unidentified
MVAVMIGIDPHKASHTAVAIDPAEVPLGQLRVRASAVQAERLLGWAQAWPERAWAVEGAGGLGHLLAQQLLSAGERVLDVPPKLAARVRLLATGNINKNDPNDARSVAVAALRSAGVREVRRDDHAAVLKVWSKRYQDLGRARTQVACRLHQVMCELIPGGVPGEITAGQAERILASITPAEAVQAARWELAAELTEDLRGIDARIRQARTKLAAAVRAAGTSLTGLFGVGPVIAAAVIGDVRHVARFPDRDHFAAYNGTAPIEVSSGGRKIWRLSRRGNRRLNHAIHMAAVTQIRHRHSQGDAYYQKKLAEGKTGKEALRALKRQVSDAIYACLQADARRDAAHVKSPGGQPGNGSDSSAAGSHPGHRLFGQATPGLRHHTTTAASDPAPGPASARGRAGHSSIAATSPLAKPQVQVQRPQRSEDERPGGAASQRPYSAARKARGQGSQAKPQRPKTASRAHENDRRNP

SEQ ID NO: 48345 - protein, 408 aa, unidentified
MERFYLGVDWADQFHQVWVSDFDGKKVVEKKVTQNIDGLAEFGRWLDEQRAKPIELWAANEKPQGRIVDFLLDHGVEVYPVNPKALDRARDRFRMSRSKSDGFDAYVLAQFLRTDHGHLRALKPNSVQAQELKLLTRDQQRLGHQKTRLLNQLTATLKEYYSRPLEVFSDLETQIALDFLKQNPTPDDLSKLTRRQWNRFAKREHHLGAERAQELWEQLNQPQLTVPEHVVRAKAHLLRVLLGQLDPLRKAVKSYEERIKSFFGSMPAAELLKGLPGAKTGTIIATLWAELGDAKSRWESFRHLQAEAGVVPVTKTSGKSRVVQFRFSCNKIMRHAAYWLAFVSLNRSEWANHYYRDQRAKGHSHHQSLRALGAKWLKIIFVMWRDHKPYDENYHLANIARQKMRQAA

SEQ ID NO: 48346 - protein, 447 aa, unidentified
MEILYTNCAGLDVHKKTVKVCLLRRMSDGQLHKEFRTYLTTTEELLQLGDWLKEQGCTHIAFEATGVYWKPVFNLLEGRFQVLVVNAQHIKAVPGRKTDVKDAEWIADLLAHGLLKASFIPSVPQRELRDLTRYRVRLTQEKAREVNRVQKTLEDTNLKLGDVVSDIMGKASRMILQAIVEGETDPGRLAALAVGRVHASQEQLEAALRGHVTDHHRFLLAEHLTQIRHLEQAIERVTAEIVRRFTPPSSPGEEPSSRKKQEAVPEVMPDSESPSAPQAALSWSAAVVLLCSIPGISERTAIGILAEIGINMQQFPSAAQLASWAGVCPGNHESAGKRLSGKTRKGNPWLRCLLVQAAHSASHQKHCYLAEQYRRIAKRRGSKRAAVAVAHSILVIIYHLLRDQTMYREKGEAFFEEQERQGAEKRLVRQLARLGYHVELQPITLAG

SEQ ID NO: 48347 - protein, 336 aa, unidentified
MKLVGIDVGKNSHHFCVMDKETGEFNVAPSSFSNNKEGFDFLINSLKPYSKKSILIGMEDTGHYHVALLKFLLSNGYTVALINPKTTDLTRKMEGGITKNDKLDTITICDVLDTPERKKQYRITKVDRFDLYEQRQLTRHHHNLKEELNVYCNRLQKSIDLVFPEFNTLFSSKYSIVYMNLLKTFGSAEAIASTDIRTIRKCFEIKGRGNRISLTPEKLKECAKNSIGISSEVETIQIKHLVSQIMLIKEQIAEIDKKIEEFSITNNSPILSIPGISHFSGTSILAELGDIGNYSKPSQIIKFAGVAPYHYESSQYNAQHTGITKKGSKYLRKTLY

SEQ ID NO: 48348 - protein, 346 aa, unidentified
MNVTTIGIDLAKEVFQIHGVDPHGKAVVRKQLKRAQVALFFANLPACLIGMEACGSAHFWARKLQALGHTVKLMAPQFVKPYVKTNKNDASDAEGICEAVRRPSMRFVSPKNADQQALLALHRARAGFVQARTAQGNQIRGLLAEFGFVIPKGQWRIAAALQPILEDAENDLPGTSRALFARLLAHLRYLDAQVTQIEQQIKEWHQNDADSRRLETIPGIGPLTASALVASIADINAFKNARQLAAWLGLVPRQHSSGGKSVLLGISKRGDTYLRTLLIHGGRAVLLAQQRRARSEGTWGAALARRRHPNIAAVALANKNARIVWALLARGQDYQPHYHASMRPAT

SEQ ID NO: 48349 - protein, 342 aa, unidentified
MKLYSGMDLHSTNTYAAIMDESRRRIMDRRLANQPKIILDFLEPYRVDLQGIVIESTYNWYWLVDLLQGSGYRVHLANPSAIQQYKGLKHTDDRHDAFWLAELLSLGLIREGYIYPKEVRPIRDLLRKRAHLVRLRTSLLLSAQNIILRSCGIQVGAEDIKKVTVDRVSPLLQGNEGLFRAGRVSKALIDAFTEQIKEIERWLIKQLKELQLQEAFLNLLTLPGVGELLAMVILLETGCIARFPKVGHYVSYCRLVASQRTSNDKVKGKGNDHNGNKYLAWAFSEAAEHARRHYPACRSFYNRKLQQKNGAVAHCALARKLARAAYYVLKDQVVYQERKLFS

SEQ ID NO: 48350 - protein, 444 aa, unidentified
MGKPQVFDDQEQERVFERVAAVDVAKASGVVCLRLPHPAQPAGRRSQVWEVPATMHAVTELAGRLTAEGVQKVTLESTSDYWRIWFYVLEEAGLAVQLVNASQARNLPGRPKTDKLDAMWLARLTEMGLLRPSFVPPAEIRVLRGYARARTRLTHDRTRCFQRLEKLLEDALIKVSAVASKLTTRSVQDMIRAMIAGQRDPQVLAGLARTRMKAKHDALAEALAGLFTDHHAELAQLLLDQIAFLDTQIARLAMLTGEQLASIRAAGGTGADGATGPSPGAIALPVIARLDEVPGVGAELAASIISETGLDMTRFPSPGHLASWAGLCGRTIQSGARTRTGKGQGNAWLRGYLGRAAIAAARTNTFLGERYRRLARRRGAARAQVAVARSILIIIWHLLNDPTARYHDLGPDHYQARTDKNRKARNHIRQLQALGYTVTITQAA

SEQ ID NO: 48351 - protein, 346 aa, unidentified
MRYSTTVGVDLAKNVIQVSVVSPRGKELLNRSFTRAKFAEFLGKQKPSLVAFESCASAHYWARAAKRHGHEARIIPAKAVAPFRQGHKTDSNDALAVAEAARRPNIKEAPMKTAEQQGLQAIQRSRELLIGECTALSNHLRGILLEFGVAIPQGFASLLRALPEILEDGDNELSDLYRPTLHRMHQRLLELREDIESMTKEVDGLVKQHPVCKRLTAIEGIGPIGALSLYAVLGSGKAFTRSREFSAYLGLTPRQFSSGGKANIVGISRKVGNRRLRSILIQGALAYVYRMKEPRSLKDRWLRDLIERAGPRRAAVALANKNVRTAWALVTQGTEYQRRLQLEMAA

SEQ ID NO: 48352 - protein, 257 aa, unidentified
MSESLAQVAGIDISKDHLDVHLHPSGATRQVTNDKAGHKALLRWFSRLRVERIVFEATGPYHRLFERALTAAGLTFAKINPRQARRFAEATGRLAKTDRVDAAMLARLGALLQPEASVPKSDVLDELTELVAARRALVKDRTACLNRAKVLRIQLLKSQTSQRLRQIEAQIAAVDRLCLELVTSDQTLAERLVILPSIAGLGEARAVAILADMPELGEIEPKQAASLAGLAPMARESGQWRGKSFIRGGRAHVRQAL

SEQ ID NO: 48353 - protein, 345 aa, unidentified
MKIVGCDLHTRYQQVAMLDAETGELVERRLEHENGEARAFYAALSSPVRVGIEATGHTRWFERMLAELGHELWIGDAAEIRASMVRKQKTDARDAAHLLDLLLSERFPRIWRPTLAERDLRQLVWHRQKLVWMRNAVGNQLHALAMGEGVCRKKKLFTKKGRAELESLALGPWASHRRHELLEMLDQLDTSIGELDRAVAEQAEQNAAAVLLMTHPGVGPVTSLAFVLTIGPVGRFERSKQVVSYLGLNPREHSSGGRQRLGAISKQGNPMMRSLLVEAGHTAARLDAELRQDYQRLKLRRGSGVAKVAMARKLAVRMYWMLRGQASYAQLVRMQGSPRGTLVGQ

SEQ ID NO: 48354 - protein, 390 aa, unidentified
MLILGVDAHKRTHTIVAVIESGKQLSMTTIPTTTTGHLDGLRWACEQHERRLWAIEDCRHLSRRLERDLLVAGEHIVRVPPKMMAHDRDSARTYGKSDPIDALAVARAALRHPDLPVARLDGPDREIRLFVDHREDLVAERTRAISRLRWHLHELDPTIDPTPRSLDRASNYTKLESRLEEFDTLVGRLARSLVTRCRELTVEINDLESEITKLITATAPSLIAIVGCGPLTAAKIVGETAGVRRFKSSAAYARHNGSGPIPVWSSNHQRHRLSRTVNRQLNAALHRIALTQIRVHPPPRNCSLDAKPTATAEWKPYAFSNGDSPTSSTAPSPTTTRPPASSPLDRGASDSPHSVAKARLTKYEFCTKVHLIAKAARSRCVAVPPGPVVK

SEQ ID NO: 48355 - protein, 339 aa, unidentified
MDRRYVGIDLHRRRSVIYAMNAEGDKLFCERIANDSLRMLEVVSAAGVGAEVVIEATYGWYWVVDLLQEAGFSVHLSHPSGNDWGKRRVKNDERDARDLADLLRLGRLAEAWIAPPSVREARELVRYRAQLVQLRSGLKAQVHAVMAKEGVLPGVTDMFGPKGQTLLDAMELADAYLARVESLRDLIEVYDREVVMLERRIHDLLRDDRGYQAIQALDGVGRTIAAIFVTEIGDIRRFRSPEALCSWAGLTPRHRESDTKVVRGKITKQGSKLVRWAALEAIVRYHGGAALRDTFHRVAERRGTNKARVAVARKLLTLVYYGLRDGEIRCLRDDEAEAA

SEQ ID NO: 48356 - protein, 428 aa, unidentified
MNENETTRYAQFCQFKKEIRGSQDYLIVGIDVAKDKHHAFFGTATGKSILRRLIFDNNARGFSTLVERADQFIRQFKLKRVVYGLEPTGNYHKPLGSWLLDQKQMLVLVSSKLIADNRQTLDGRWDKNDTKDSANVADLLSQGKCQFYEQANGDLEQLRTLLLLRRRFKKDEIRLRLQIRNGLVCKHFPELDRFWGQNSQENLAIVRWCLDPRQIAQMPFGEFVRRVTTCDRGLRQARRLRAIHEVAAESIGIAMSSADRYHARLLVGQLRLKQEQLSKVMERIEKACQGSVYYQLLLTIPGFGPYITSVVLARIGDPLRFSRRKQVLRLAGMDLSAKRSGKRSKDVVPVLSKKGNSELRYAIYQAAHTASCRNDTIRELFTRYLSGREKEPGIRKKMRVKLAAKLLIVAWAMMRNQTQFNASLLLTQ

SEQ ID NO: 48357 - protein, 408 aa, unidentified
MRTTVGVDVGCHRHRVAIAEPGGKIVEEFDLPVCWEGFRDFFARLEHYRTKYGVPVVVAMEGYNGYARPLDREIQERGYTLLNVNNFKLRRFKELFPSPAKTDAIDARKIVELVRLQDSLPRSREILQEVNEVPEDHRMLKRLTRRRRQLVDEKVCLLNRIQSDLQAVSPGLADLVEYKDGVAFLRFLSCRNRLEQLKSIRRESLLKIRGIGKSFAGKVQAWQKNACFSAEVSYVGPMIIEDARRILELKERIAGLEEQIRGLSESSPLGRRIGSIPGFGVVSTGELVGEIGTMDRFDSEGSLAMYLGMAPLDNSSGSYQGTKTARQVNRRARMAMMTATMRHIPQVEESRSYYERKRNEGKTYHQAVRATGRHLVRVIWSMVKRGEDYHIRQLHHLTENPPVSVASS

SEQ ID NO: 48358 - protein, 386 aa, unidentified
MQKLNDLSRSLTALEPDGTLIAVIEMSLSSWLVAGIVPGVERQPLKKLAVDESTLLKLLYRWREEAEKAGRRIERIAVAFEAGRDGFWLARWLKACGIEAYVIHASSIAVSREHRRAKTDRLDTELLKRSFLGWLRGERDHCKMVAIPTIKDEDAKRPNRERDSLIRERSRIVNQMKAAFVRLGIRGFNPKLKRAAGRLDGLRTPEGEPIPPNTSAELRRDMERRRLVSDQIRQIEEARLERIEQAPSDGPHAMVRLLARVIGVGIETADMLVHEVLSRNMRDRRAVARYAGLTGSPDESGRKRREKGLARSGNARVRRGMIQLAWRFLLHQKDSALTRWFRARTENARGIRKPMIVALARKLLIALWRLVREGVVPDGVVLRPAQ

SEQ ID NO: 48359 - protein, 315 aa, unidentified
MDTAIYVGIDIAKDRLDIAVRPTGTSWSVPNDDAGIDDLRNRLAGLAPSLIVVEASGGYERPVVAALAGAGFPIAVINPRQARDFARSIGQLAKTDALDARMLAHFAEVAQPTVQPMRDDEARALSDLVTRRRQVVGMLTAERNRLHGAVVPLRERIEAHVAFLEAEVSALDAEVERAIRRSPLWRENDARLRSVKGVGPVVSATLLSTLPELGAVEHKRLAAFVGVAPFNRDSGRYRGKRAIWGGRAQARQALYMAAVVAARHNPVIKPFYQRLLAAGKPKKVALTACMHKLLTILNAMLKHQTSWGQQAARTI

SEQ ID NO: 48360 - protein, 343 aa, unidentified
MNRRVKSNSDDSHRMFVGLDLHKNYLQAAVMDDQGRVLSQERIPNKDDSIEEFTRKTLKDSHAEIVIESSSTWYHVYELLSQKENCHVVLSNPVKIKAIASAKVKTDKVDALTLANLLRTGYIPESYIPPRHIMDLREMVRYRTSLVRMRVEAKNKIHAILLQNGTRIKEKPFTIAFVEELRRLGDYRIDGYLNIIQSLSQQILTVSSTIKREAREDESTRLLMTIPGVGYFSALLILSEIGDINRFPDSHHLCSYAGLTPSTHSSGGVTYHGSITRSGSRYLRWILTECAKAHIRTRRDSQLTRFYTRLAKRRGGSKATVAAASKLLRIVYWVLKEKRPYHS

SEQ ID NO: 48361 - protein, 403 aa, unidentified
MTIFVGLDWGGSSHAVCIVDAAGKILDHFAVAHDRDGLADLVARLRRYGPPGQTPIAIERPSGLLVDVLVEAGFVVTPIHPNVVKACRPRYRAVAAKSDPGDAYILADVLRTDGHRLAPLRPQSDAIKALRALVRGRDDLVASKVVLANQLRALLDSFWPGPAGLFADIASPIALAFIQRYPTPESASRLAEKRMAAFLALNQYCGRRSVADVLGRLRTAPSPIAAEAEADAKGELVRAIASTLEGLVAQIAKLSSRIEHAVAQLPEGRIVMSFPRAGKICAAQITAELGDVRARFQSEDHLAAEAGVAPVTYQSGKSRGVGWRWACNKRLRAAVTCFADNSRHASPWAAKVYQDAKRRGCRHPHAVRILARAWLRILWRAWQDDVPYDPQKHPAARALLASG

SEQ ID NO: 48362 - protein, 402 aa, unidentified
MNSVGIDISKGRSTIAVMRPFGEVVISPFEVRHTDSELSKLARQLKSLDGETRVVMEATGNYHAPVAKLLHDAGLYVSVVNAKLVHGYGNNELRRVKTDRKDAVKLANYGLDRWLTLPRYVPEENTRLLLKNCYRQYRQYSKVQTVLKNNLISLLDTVFPNVNRLFSSPVRGDGSEKWVDFVAEFWHCRCVTEKSEKAFTNKYQRWCKTHGYNFSEAKAHTIHAKASGHIGIMPKSETTKLLVEQAVVQLRTTSTTLTALKREMLTLAAQLPEYPAVMGMFGVGPTLGPQLIAEIGDVRRFYSKKALVAYAGLDAPPNDSGDVTGKHKSMSKIGASSLRRTLFLVMSVYLQNAPLDEPIYQFMDRKRAEGKPYRVYMMASANKFLRIYYATVKAYLESLEQV

SEQ ID NO: 48363 - protein, 443 aa, unidentified
MSRKKRTHLRGERGQAFANQIRGVPLDQILCVSLDIHKYFHVVIIHNALGEIVTPTFEIDIFQTGFDRLCQAIDEAITRTKAQVVLTGMEPSGHYFENLARHLRERPQPVTLINSYAVKENRSQQMMQYEKDDEIDTAAIGDLLRRGEGTPFRPASGVYLQLQHLDRVRISKIKIRTMLQNQIIGHLDRIFPGLVIMGEEAKARYTPLFATDFWSCQTLQHLIRVCPDPRRLAAMSPQDLVAAFHAHHYALGRTTAAKIIAYAHKVLLPDAELIAVRCQLLPHDLALLEEVECHIAQLEDQLRALLAQTPYQVLTQLKGLSDIQVASLAAAIGDPAHYTYAGQVFRRSGLVPGRNDSGTRQRRGKGKKVVKVGDVYLRRALLNALATLILHQPVLREYFHTLKQSKPAGVARVATARRAIGILWSTLRDQHSNTLILKKGVTM

SEQ ID NO: 48364 - protein, 276 aa, unidentified
MNDHYHPQLGIDVSKFKLDVVLLLPISTPTATFANTPKGFQALRDWLARFHASPRVCLEATGTYGLPVARFLHERGLSVSIVNPMAIHFFGRTQLSRNKTDAHDATLIAHYAQQHQPRPWQPPTPAQEQLQQRVRVREQLVESRVQAQQHLESAPAATAKFFRAQLRLLDRQISTLEKQLRQSLHADPKLGQAVALLTSIPGVGFITAVTVLAIIPPLDQLESARQLAAFAGLTPSQRQSGTFTGRSRLSKMGHRGRRHAPVDPFDLWCSEKPNPL

SEQ ID NO: 48365 - protein, 312 aa, unidentified
METKFVGIDVNKLTLDFDCLPVSAAQQFANDAVGIAAVVALLQDSGVERIVIEATGGYETAVASALAVASLPVLVVNPKQVRDFAKAMGHFAKTDRLDAKVLALFGERIKPPLRAIPDEAQRALADVLGRRTQLVVMRAQEKARLATVAAVARKNVEQHIAWLDKCIAKLDADLGNRLRKSPVWCNKATLLDSVPGVGEVTTFSLLAKLPELGTLNRQKISALVGLAPFSDDSGKRRGARYIRGGRAEVRCVLYMATLSAIKHNPPIKAMYERLTKAGKPFKLAITACMRKLLTILNAMLKKNQTWKIQPSS

SEQ ID NO: 48366 - protein, 360 aa, unidentified
MEPAGKTSRITGGVDTHKDTHTAAALDATGRVLGNATFPASAVGYEELLAWLRRFGPLDRVGVEGTGSYGAGLMRYLRESEVPVIDVNRPNRQARRQHGKSDPADAEAAARATLSGDASGVPKSQDGTVEVIRILRLERRSAIQARTQAANQLHAVVSTAPEPLRTKLRALSLAALLDHARKCRDVRPTDTVSATQRVLRGLTARWQHLDREVDQLDAQLAALVKTAAPALVALRGVGIDVAGALLVAAGDNPERLAHEASFAALCGVSPVDASSGRQRRHRLNRGGNRDANRALWVVALVRMQRDPRTRAYVLRRTGQGLGKREILRCLKRYIAREVFKLLRASSVVAGDGETRLEHVA

SEQ ID NO: 48367 - protein, 430 aa, unidentified
MKSNTQNAKIEAITEKTLVLGIDVGSETHYARAFDYRGVEYSKKPFKFSNTEAGFVTFKAWVLDIKEKHGKDKVIPGMEPTGHYWFNLGKFLQDNEMKPVLVNPHHVKKSKELDDNHPTKNDRKDPKVIAGLVREGRYMIPYLPDGVYADLRTASNIRFQLQAELTRIQNRINRWFNIYFPEYKTVYGKPDAKSGILILKEAPLPEDILTLGIDGVNQIWRDAKLRAVGKARAKTLIEAAEHSVGSKEGAVSARMEIRMLLEDYESRNIRLQEVMGLIEGLVNQIPMAEKLLEIKGVGIRTVSGFLAEVGDISRFNNPKELQKLAGLALVENSSGKHKGETTISRRGRKRLRYLLFEVAMSLVAKNPEFRELHNYYTTRKLNPLKKMQSLMAIAAKLLRVFYAILTKGVGYDPKKMVNDIRRPAAYAQAA

SEQ ID NO: 48368 - protein, 372 aa, unidentified
MLYAGVDVSKDKVSVAVLTSGGTKLTSGDFDITTEGLRLLELTLKHLKDEISMAIEQTGTYSMPVILYLMERVEGLRIYLVDGLNFNRFIKLEGRKKQDKADAVSLAEYLRRGLPARLITDKDIKAYGLKVLISQREHLLKVKNQIENRLRQLVETIFPDSKTLSKPVFWSEIRKGRTLLDWKRLTDKAEVLSTILRERKIWLEIVHSLEETEREINAFLRAYYPEDVEILKSFGFSETTIAYFISVYVDIGRFKDVKAFKSYMGLGLRIYQSGKKEKNVVNSYTNKYIRKLLYMYVVQAVRERSNHRRVKEYYLRQVEKSGSKKKAIIKTAGKVIEWVYYCLKHREPFKWEANYETQQEDPSQVNSGQAKD

SEQ ID NO: 48369 - protein, 351 aa, unidentified
MENPTTIAIDLSKSVFEVAVERDGRICQRKRLNRGQLSAFLSQCPKATVFMETCGTSHYWGRKAQELGHDVRLLPAQHVRPYRIGQKTDRRDAEAILSARSRKTIVPVPVKSVEQQTICSLHRIRAALMKTRTARLNTVRGLLREFGVTIAEGAERIQPALVEALSLSPSPVPEALHAALFSMMDEARELDERSGQVEKQLKALARTVPLVERLETIPGVGVLNATAFSAMVGNFPRFKSGRRFASSLGLTPKEKSSGKRRWLGSISKAGDPYLRTLLVGGARSMILAAHRTKRPHYLQAWALELEKRRGRNRAAVAVANKLARIIWAVATRGEPFKARFDIPNTQTTVPA

SEQ ID NO: 48370 - protein, 354 aa, unidentified
MSQTINSGIAVVGIDIGKNSFHVVGHDERGAIVLRQKWSRGQVEARFANLPPCLVGMEACVGAHHLSRKLNSFGHNARLMPAKYVRPYSKGQKNDFRDAEAIAEAVQRPTMKFVATKTAEQLDLQALHRVRERLVSQRTGIINQIRAFLLERGVAVRQGLRFLRAELPRILATPPDVLSPRMVRIIEDLAGDWRRLDERIEGLSSEIEAIARQDAGCGRLMSVPGIGPIISSAMVAAIGSADVFTKGRDFAAWLGLVPKQISTGDRTILGKISRRGNRYLRVLFVQAAWVVLVKPKIWERHGLKPWIEAARKRLHRNVLAIALANKLARIAWSVLARGRAFEVRKIDEAAVQPA

SEQ ID NO: 48371 - protein, 417 aa, unidentified
MAESNDTPEPISAFVGIDWADAKHDIYLHPADGSTASHEVIDAKPEALHDWILKMRERFSAAGKIYVCLEQSKGALIHQLMQYDFFVLYPINPKTLARFREAFRPSGAKDDRSDADLLCELVRLHTHRLRPWKPDAEQTRKLNAFCQNRRQAVGSAVRLLQQVREQLKLYYPLALELELNTVLACDFLQRWPTLEELRQAKPQTIRKFFYAHNFRRGDKIEQFVQKLQKQTPVTSDRAIIEPAAMQVRLLAAQLRVILNSIPEFDQTIAEIFHSHPDAAIFESFPGAGPQLAPRLLTAFGTDRDRLESAEQMSVISGVAPIKIASGKSFATHKRWACPKFIRQSFHEFAGCSIKFCAWAKAFYQAQRDKNKGHHTAVRALAFKWTRILFACWKNRKPYDDALYTGALKKRGSAFASP

SEQ ID NO: 48372 - protein, 381 aa, unidentified
MTTGFVDCCFEHERQTPDLPCLPRDSNPGPWHGFSTVIAVISVIAKGIIMEVLHQRCAGMDISKRDAKVCVRALGARNNTFTKVVTVSGAMTRDITQLPDYLVAEQVTLVVMEATGDYWKPFYFLLESDLNLMLVDPRHARNLPGRKTDVSDAQWLAELGAHGLVRGSFVPPQPIRQLRDLTRSRTIFVREKSREIQRLEKLLEYANIKLSSVATRTLGVSGRLMIEALIAGQRDPMILASLAQGRLKNKSEQLVEALTGRFNTHHAFTAQLHLDQIDSVEHRIQCLNQRIDTLLTSLPPWIELLSTIPGVSKTVAEIIIAETGGNMSQFPTPAQLASWAGVCPGHNESAGKVKSSHTRPGNSPPLKGALGVLPTEVVCVA

SEQ ID NO: 48373 - protein, 443 aa, unidentified
MAMKVRERELQVLHPNAAGIDVGSRSHFVAVPAHRSDQPVREFGCFTEDLQSIGDWLTECGVEVVAMESTGVYWIALHEVLEARGFIVHLVNARHVKNVSGRKSDVIDCQWLQQLMSFGLLAGAFRPAEQICALRAVSRQRDNLIREQARQVQRMQKALTQMNLQLANVISDIAGQTGLAIIRSIVAGERDPQRLAQHRNYRVRANEEQIARSLCGTWREEHVFCLSQALTLFDTYQTLIAQSDERLQGMLITLQRLESDLPAQKKKGRGKHAPQFDARTALYRWSGVDLTRIGGIDVSTALKILVEIGWDLSKFKSVKHFASWLGLCPGTRITGGKKISGTTQRLPNRVSQALKLAAQGLHRSQCALGAYYRRMAARLGAGKAITATAHKLARLVYAMLTKGEEFVERTEAQYEAQFRERTVRHLQRKAASMGFRLEPSTAV

SEQ ID NO: 48374 - protein, 430 aa, unidentified
MTTHTYSTSPRAIIASHNQKISKNRAVQPLVVDLSDQSIIKELNGKRPLGLDLATKKYRLCYQDDLGKMINVELRKNELRKMLRETPGKYHLCIEGCSGASYWERFARENGHKIKVVPGYVTRKLGWNQPKDDFNDAYNLYNALFNPLVPSCQTRTEDELAISALISQKEALLKSLNEQVNKTRSFLIETGEYDCVVKGGGSAVQAIELYISNHIHAASEHKYSIRCLEGFKRMILSLTREIDEINEILSEYGQTNKQVKLLLTIPGVGIETAVPIAIGAKNIERFESARQFQAYWGYHPTHGGSGGEIEMGKMSSNGDRALKRTLYESALSLNHQGRYKDEPRSEWIYTKVTQNKAAFKKGMIVIGAKILRTAYGVLKTGKPYNPAIDNSLGRIKTKIHKRSNPKYKEKNINAVLQNKYEQELTLAALG

SEQ ID NO: 48375 - protein, 401 aa, unidentified
MSELEKGLVFAGVDTHTLCLLDHTGRAIGTFRFAADAKGYDALAGKIGGPATCVGVGIEGTGSYGAGLTRRLLELGYCVYEVMVPGRARRKPGRPKSDPADAEVAARQVLARVNLSKPKDQSGWTEELRQLMIARDRLVQATSAMINAAKSLIVTAPEDLRRSLEGLSRKNLRSALSTLDPAAGGIILALGSLGKAWDLQDREADAIEERMKRVLEANAPALLTIYGCGTVSAAALAVAGGGNPERLKSEAEFASLCGVAPLLASSGKTERHRLNRGGDRRANRALYQIAVTRMSYDQRTKDYVGKRKRDGKSKKEAIRCLKRYIAREVFRALRNPLETKGPSWKDLRPARQALGITLVEAGKALNVGFQRVSYAETGRLMNVRFLEEYDAWLKSQAKRES

SEQ ID NO: 48376 - protein, 421 aa, unidentified
MIPAVIESCAGIDVGRKFVVVCVMCGDAHATPTLEVRKFSMLTEGLEQLRVWLHQSECTHVVMESTGSYWKPIFNILDDGQLEVVLANSQQVKNLRGHKTDPNDARWLAHLLRHGMIRPSFIPDRDTRELRDLTRRRKKLVECAAEERNRVQRVLQEANIQLGMVLSDVFGESGLNMLDALMNPDASPQQIADLAVRTARKKIPEIRKALEGHRMTEHHRRLIRHSMEHLAFLEEQIAELDREIDDHTNSRPALKSATELVKSVPGIQQTSAAALVAETGADMGHFPNGGKLASWIGICPGNNESAGKRKSGQTRKGNPWAKRALVECAWSASRKKDSETKRYYERVKPRLKHKRALVATAHLMTLKVYAALSTGQPYQVDQQPELTAAKLKRLVRHHSRRLRHLNKWLQDHKKRCGQAQH

SEQ ID NO: 48377 - protein, 428 aa, unidentified
MNFNTQNAKIASITEKTLIVGIDVGSETHYARAFDWRNYEYSKKPLEFSNTEAGFMTFKTWVEDIAEKHGKTAVIPGMEPTGHYWFALGKFLQDNEMKPVHVNPHHVKKSKELDDNNPNKNDRKDPKTIAALVNEGRFSYPYIPTGIYAEIRSLSNLRFQTQEELTRIKNRIARWFAIYFPEYKDVYGDLKAVSGRMVLKIAPLPEDIQKLGVDGVNKIWRDAKLRGAGMKRAKTLVSAAEHNVGSKEAPETARFELKNLLDDMDVYTLRLEELLRKLEEKLKEIPYIDKLMKIKGIGMITVSGFIAEVGDIGRFDKPKQLQKLAGYAIVANDSGKHNGESRISYRGRKRLRYVLYEAAISLVGRNAEFKAIHEYYRTRKENPLKKMQSVVAVACKILRVFYTILTKGVDYDPVKLMGDIKRPQLQAA

SEQ ID NO: 48378 - protein, 425 aa, unidentified
MSEKIVVGIDVSKAFSDICILSPNNDIIKRLKISNDINGMKSLIYVLEKVEDEYEDRAVIIMEATAHYHQILANFFRKHNYEVIVINPIQSGALKNINIRKIKSDKTDAYNIALLYRIKNYNETITHSDTINSIKKLCRQHKELTDEIVEHINRLIAFLDISFPDFKKLFTDLQGKTPLSLLEKYPTIQEVLSPENKQDILRLIKENSHKSSSYAEVKYEKLLKAAEKSIEVCIVSLSSAVLIQTTVRVIFSLQEALKAIDDEIKRLSLLDEKFHKEIVLLQSIPGVGEYTACVVLSELGDISNFSKPKELVAFFGLDPGVTQSGTYNRKNNKISKRGSPHVRSILHMLAKSNVYPNRNREYLNPVMRAYFEKKIAEKPYKVVMCAIMRKMVQIIFAVLRNQKSFELRTPEEHQKLIREKSKLVA

SEQ ID NO: 48379 - protein, 410 aa, unidentified
MELLHRRCCGIDVHKETVVACLRLVSDSKVTTEVRTFQTTTADLLRLSEWLAANECTHVAMEATGVYWKPVWHILNDGDFELVLANAAHVKNVPGRKTDINDAMWLAELLAHGLIRASFVPDKQTQEMRNLLRTRKQLVREQSSHVLRVQKTLEDANIKLDSVLTDLMGKSGRAMIEALIAGETNPVKLAGLADRRVKASPEEFRDALRGRVTKHHRFLLRLHLNQIDALNAAMATLDVQVEANLGPFRTAVDLIGSIPGIKNLGAHVIVSEIGIDMSRFPSAAHLISWACICPRNDESAGKRRSNRVRKGSTWLKTTLVQCAWAAVKKKDSYLQAQFHRIKARRGPKKAIMAVAASILTTIYHMLKNGTTYQDLGSNHFNRRSTDQQKTRLLKRLADLGYAVEIKPLAA

SEQ ID NO: 48380 - protein, 378 aa, unidentified
MDQTTSTLSANTLHCALELSKNSWLLALQFPDRAQPSLYPISGGDTVGLMAKLTAARDRWAKMSGKAPSIVLCYEAGYDAFWLARFLKARGIECLVVDAASMQVNRRARRAKTDRIDVGMLLRALIAWGQGDRHVWSVVRVPNVDEEDLRRSHRERDRLVRERTAHINRIKGLLFGQGIRGINVKSKYKTLQIDKLVTGDGRPLPPRLASEITREIARLALIQEQIATLERERDQAPTPCKTTEKKRLQLVSLNGIGPAIAAVMTREVYYRQFDNRRQVAGFLGLATSPHDSGDVERSQGISRAGRGQVRGTMIQAAWLWLKHQPKSAITRWFVQRTAGQSGRIRRIMIIAVARKLAIALWRFLEQGLVPQGAMLANR

SEQ ID NO: 48381 - protein, 387 aa, unidentified
MAQVNDLSRSLTAFDPISTLVVVVEMSKASWLVSGVVPGVERQPLKKLEPDATALLRLIERWRNEAVRAGRPISRITLAYEAGRDGFWLARWLIAGGIEAHVIHSASVAVSRERKRAKTDRLDAAMLMRVFLGWLRGERGHCGMVAIPTMEEEDARRPGRERESLVDERSRITNRMKSALARLGIRGFKPHLRKAPQRLAGLRTAEGTELPANTIEELRRDMARLALVREQISSIEKTRAERLERAPDTGPHAMVRLLARVIGIGIETADMLVREILSRKLRDRRAVARYAGLTGSPDESGLKRREKGLAKAGNARVRRGLIQLAWRFLMFQKDSALAQWYRTRTEGPSGARKTTMIVALARKLLIALWRLVTTGEVPDGVELRPAA

SEQ ID NO: 48382 - protein, 388 aa, unidentified
MNTFTITASTNTILAIDLGKYKCVACIFDPNSGELYFTTFDTSRAELQKLIAKQQPGVVIIEACLLAGWVHDLCGELGLRCLVANTASEAWKFKHLKRKTDKDDALRLAQLHLLGQLPTVTLPTTSVRQWRSLIACRQTWVGRRVAVQNRIRALFVAQGLPAPRGARAWSTSGLAGMASHAKPLADCCPDELWRGLLDMALTEYRQVCELIAQAETRLDVLAKQNADVVLLQTTPGLGPRTAEVVAAYLNDATRFKTGKQVSAYGGLVPRQHQSGEMDRRGRITKRGPALLRKLLVECAWCMLRYNPWARGIYLRLTGGGQRRKKQAIVALARKILVRCWAMLRDKKAWHDPQAGPKNPLPPSKQRRKEEAQQRRQAKQSAPLERANA

SEQ ID NO: 48383 - protein, 321 aa, unidentified
MTGYKDIYGVDISRNVLDIANTKTKHWQFSNNESGFKEFEKLLTKNDLVVMEATGYYHYCLAQYLFKKGYFVSVVNPLSVKRFIQMKLSKIKTDKSDAKAICEYAMINNVPLFSAKSKTQAECLQLLSLIDVYLKQSTSLKNKIHGENVLGIPSKFVLRSLTRSLKLLQKEINSLEERLIKLVEKHHQKKFELLKTIPGLGTKTSLLLLVLTDGFSRFENAKQLCSYTGITPFIRKSGTSVNKKSKISKIGNKKLRNLLFLCSFSACKYNKSCKALFNRIVAKGKSKKLALIAVSNKLLKQAFAIVNSGMPFSEDYISELV

SEQ ID NO: 48384 - protein, 417 aa, unidentified
MNESGQWQQHRAFGAVDWGSEKHYVVVVDQAGKVIEDFEVEHRALGWKKFREKLQAYGSIPFAIETSQGAVVEQLLEAAMIVYPLNPKSAQAYRQRKAPSGVKDDQLDAWSFADALRVDGHGWKPLRPEEPLIKELRLLCRDEVTLIEQRTAFVHQLRHALAEYYPAALEAFEDWTSVSAWMFLQRFPTPGALAQAGKRQWQKFLHSRRLWGSDQGPRRMEIFAHASELAGTQPTINAKSLLALSLVQMLFSVDKQLAVYRQRIEELFARHPDHDLFGSLPGAGAKIAPRLLSEIGDERQRFDGDAQALQCLGGTAPVTKRSGKYRHVHQRWACDKHLRHAIYLFAEQSLSRCVWAELYYQHHRQKDRSHANAIRRLGHRWLKIIHKMWIDRTPYNAELHHRNQLQHGSWIFQLRPT

SEQ ID NO: 48385 - protein, 325 aa, unidentified
MSEGTKFFGIDVSMETFDISTPDQKHFQFSNDVDGYHKLFRLLDETSHCVMEATGSYHQKLATWLFVHGSKVSVVNPIVVKRFAQMRLRLAKTDKADASMIRQYAETEKPEVWCPPQAYVIQANEINGLITLLIRQRTALKNKLHSINHKEGTFAVILETLKHQIKNLDHQINQLETSMEDLIMEHESEMLTSLCSIPGIGKKTAMFLIVITNAFQSFENSKQLCAYLGLAPTIKISGKSVRGQSRISKTGNNVMRNLLFMCSFTACERNKACRELYTRMVNKGKSKKVALIAVANKLLKQSLAIAKSGTTYNEEYQSLKPVSIH

SEQ ID NO: 48386 - protein, 416 aa, unidentified
MKRVYGNCCGIDVHKKMIVACFIHGKKQEIREFGTTTKELTSLAEWLKVGQCEMAAMESTGVYWKPLYNIFEVYDIKTIIVNAQHMKAVPGRKTDVKDSEWIADLLQHGLLRASYIPDKNQRELREMVQYRKSLADTHAAELNRLQKILEGGNIKLSGTVSEIDGKSARNIIRELLLNQKIDEQRIKEMKNQKLLSSHLKATDKELADSLEGVLSKIQIRIISEILNHLDELEKHINNLTDDIDSSMNSDEKKAKNAIKEIPGIGDKSADAIIAVIGTDMERFPDASHISSWAGVSPGNNESAKKRRNQKTNKGNKLLKSTLVVCANSAIKCKNSFFYAQYQRIMSRRGKKKAIMAIAHSMLIAIYHILKDKVPFRDLGANYYNQFNRERKAFALTKKLVSLGYCVSVTAMTDPIA

SEQ ID NO: 48387 - protein, 324 aa, unidentified
MERQGFVGIDVSSGWLDVAFRPGTELVRVNNEPRAITRLVRMLERRQPELVVLEASGGYEMAVLERLLAKEIPVALLNPRQVRQFARASGRMAKTDAIDAEVLAHFAEVMKPQPRRWADLETRQLRALVNRRHQLVQMVTAEQNRRRLALAVVRDGFGATLRCLKLQITAINKQLAALIRQVPGLRQKAELLCSAPGVGEVATATLLARLPELGSLDRKKIAALVGVAPFNRDSGRFNGKRAIWGGRGDVRTVLYMSTLVAVRRNPSLRDFYRRLRGAGKTTKMALTACMRKLIVTLNAMVKHETPWRCPLSISSKASRYATQR

SEQ ID NO: 48388 - protein, 351 aa, unidentified
MSEITTVGVDLAKELIVVCAGDAVGRTLFFRQFGCAGFAGWMANLPPCTVGMEACSSAHHWARVLAGHGHRPKLMAAEFVKPFRKSQGAKNDRNDAQAILSAVREPNMRFVSVKSLEQQSILACHRMREGWHAERTALLNRTRGLLAEFGIWLARSSAALYRALPRLSQEEAVPARVRALLGQAHEHLRQIDAQISHCEAQIRLHAKQSECAQRLTAITGIGPITASAVVATVANARDFRNGRQMAAWTGLVPRQSSSGGKERLGSITRRGDTYLRALLTQGARSALQAALMRAPERRSRLEHWMVELRQRVGYHKTLVAIANKHARICWAILAKGEEYDPQAWQRHALAA

SEQ ID NO: 48389 - protein, 352 aa, unidentified
MRTSQKTPGTITTIGIDLGKNTFHLVGLDKRGAIALQRKVSRSQLEHRLSNVPRCLIGMEACSGSHHIGRQLTALGHDVRLIPAQYVKPFLKGHKNDYRDAEAIAEAVQRPTMSFVAIKTPEQMDLLALHRVRSRLVGQRTGTINQIRGFLIERGITVRQGIVPLRKALPDILSSNTNMLSPRMVSLIAELMQDWRRLDERIETVSTEIEALALQDDSCQRLMTVPGVGPIIASAMVAAIGNGAGFKQGRDFSAWLGLVPKQESTGDRTILGKISKRGNKYMRTLFVQAAHVVLVRRPRTAMRGLWPWIEQASKRLHRNMLAIALANKLARIAWAVLARGQAYQSRIAANAA

SEQ ID NO: 48390 - protein, 469 aa, unidentified
MNHRRLVGIDLGIATAHTVRVLDGEGTIVAKRMAWPTRESLAAAEAAALAGCPDGTRLEVVIEPTGPAWLPIAVFFCGRGHLVFRVSSQKAADLRRFLSRHAKSNGIDADTLARLPLFDPAGLQPIELPGAARAALDRRVRAADRLTRQAAERKRRIRDLTRQVLPMSPLGADLGVTDLAVLERYADPRALAGLGLEQLTELIARASRRQQGAERAGQWLDAARASLDLYAGHPAVDYAGLAAEIATEIRLLRAVQAEAAAHAAERETRYRQVDPAQLARTLPGLADVGGPALTSCMGNPARFAHGKQFRSFTGLTPKASETGETDRKGQPISKAGPSLLRTTLVRAADNARRQDPQLARIYYQQMTERGKDHLGAICVVAASLAERAWTVMRRGTPYIICDTDGQPVSPAQAKAIIAERWTVPPDVRARRRSKKKGKAPQKVLAGQYARGGLPPTTTPRHGDLVKKSA

SEQ ID NO: 48391 - protein, 351 aa, unidentified
MSHKTAATAAHTIGIDTGKNTLHLIGLDDKGAIVLREKVSRGRIAAPFANVPRCLIGIEAGMATHHVARKLIALGHDVRQVPPAYAKPFRQGHKNDFRDAHAVAEAVQRPSTRCVPVKTDDQLDLQALHRVRSRLVGQRTAVINQIRGFLLEHGIAVRQGLRFLRQQLPDIMAKRSDVLSPRMVRIIEDLSADWRHHDGRIEHVTEEIEVLAQGSEGCRQLMTVPGIGPLIASAMVAAIGNGTAFAKGRDFAAWLGLVPKQMSTGDRTILGRISKRGNRYLRTLIMQGARVILLRPANWAKHSFGLWLTAAAQRLHHNVLATALANKLARIAWTVLAQGRSYEARVEPKVA

SEQ ID NO: 48392 - protein, 341 aa, unidentified
MNKFIRIAVDLGKRYFQVHGLESEGGRSVSRKLKRSKMLEFFSQIERCRVGMEACGSAHHWARELVAMGHEVVLIPPAYIKPYVKRGKNDAVDAAAICEAMSRPDMRFVPIKSADQQAVLVLHKTREMFVKQRTMSVNALRGHLAEFGIVVAKGIGRVDELLALAESDAALPQVAKSIVAGLAQHLAGLDQSIEAVEDEIARAHGQNPTSCLLDEVPGIGTLIASVIAASVPDPGVFKSGRDFAAWLGLTPRQNSSGGTEKLGAITKQGNRYIRKMLVTGSTSVLRVAGKRKGALADWINALRARKPERVVAVALANKLARICWAIMTTGESFRVDTYVKA

SEQ ID NO: 48393 - protein, 382 aa, unidentified
MSQNHARRTGDGELGAIVVSVELSRKTWLITSLSPGAGEKMSRHSVPGGDMPGFLERLGRLRQKAHARTGQHFPIVVIQEAGLDGFWVHRVLQAEGHESHVVDAASIATSRRLRRIKTDRLDGESLIRALLAFKRGEPRVCSMLRVPSPAEEDRRRIARERKILMQERIQHSNRIKGLLFSQGITGYDPLKRDRRERLEALRTGDGRDLPHHLKRQVERELDRLELLLDQIKAVEGERDAMLAEERQSSREVAVLSKVVGVGPEFAAVLWSEGLYRHFDNRRQVAAYAGLAPTPWQSGSIDREQGIGKSGNPRLRATLLEMSWLWLRHQPASALSRWFNTRVAQNGGRFKKVMITALARKLVVALWKYVTAGVVIEGAVVRA

SEQ ID NO: 48394 - protein, 362 aa, unidentified
MNYVGIDIHKKYCVLCAQDEQGRKLREARIEGNTEEGFARFFESLEGRSKVVLEACWNWGLTHDLLEEIADVEEVVLAHPLKTRLIADAQIKTDRLDAHGLSTLLRGNLVARAHIPGRQTRARKNLLRQRLYWARLRTMLRNRIHALLDRQRGLELPQCSDIFGVKGLGFLRRLELPEPDGTLLREQLVLHDLIATQMKAQEKRIASEFGAQEMHGSLLSLPGVGPTLAAVIGSEIDRIGRFPSAEKLCSYAGVVPTTHSSGGKTFHGKLLPFCNKWLRWALTEASWVAIGCSPYFGSLYKHHRARGKKANTAITIVARRMCRIVWHMLHEQRNFEKRPFVAHFNNVPGCSPVGLTAIPETR

SEQ ID NO: 48395 - protein, 405 aa, unidentified
MKMNAVGIDVSKRKSMVAILRPGGEVLAKPFEISHLSCDLRSLIRQIKSLDGESRIVMECTGHYYEPLAHELVSSGLFVSAVNPQIIRHYQDEDNSLRKVKSDKTDSLKIARYTLDRWAKLKQYGLMDELRNQLKTMNRQFGFYMKHKTAMKNNLIGLLDQTYPGVNAYFDSPAREDGSQKWVDFAASYWHVDCVRKMSLGAFINHYQKWCSRKKYNFNRTKAEEIYGAAKELVPVLPKDDFTKCIIKQAVEQLNTASKTVEQLRSLMNETAARLPEYPVVMAMKGVGSSLGPQLMAEIGDVARFTHRNAITAFAGVDPGVNESGDYSQKSVHASKHGSPMLRKTLFQVMDVLIKTKPHDDPVYLFMDKKRSEGKAYYVYMTAGANKFLRIYYGKVKEYLASLSQ

SEQ ID NO: 48396 - protein, 454 aa, unidentified
MKPRRNSRRKHLTSPILEPIQPNAAGIDVGATEIYVAIPVDRDPQPVRCFLSFTDDLQTLADWLQKCGIQTVAMESTGVYWIPLFQILEARGIQVCLVNARHVKHVPGRKSDVMDCQWLQYLHSVGLLRASFRPEQAICMIRSLLRHRDGLVEMAAVHIQHMQKALTQMNLQIHHVISDITGITGMAILDAIVMGQHDPQALARLRDPRVKAPEKTIVKALVGDFRREHLFALRQSMEAYRSYKNLMAECDLEIEQYLVALDAKVDVKKKPLPAAKYPHKARGNEFRFDLRSHLYRIFGVDLTAIPGMDAITAHTILAEIGADLSKFHSAAAFASWLGLCPDNRVSGGKVLSVKTRKVASRAAAALRRAAQSLHSSKTYLGNYYRRMRTRLGAPMAITAAAHKLARIIFHLLTTRHGYDESIFAVEETRQHKRTELRLRRQAREFGLQLIPLEL

SEQ ID NO: 48397 - protein, 355 aa, unidentified
MNDSKFIGLDVHKTSISAAVLDHDGKLVMQSIFATHAAAVLSFIHGVRGSVRVTFEEGTHSSWLYDLLRPQVSEVLVCNPRKNALLKSGNKSDQIDARKLAELLRAGLVSPVYHGQTSTVTVKELGRTYTALTEDTTRVMSRLKALYRSQAIATEGKKLYTKRRREQWLKELTQAGRRYRAERMFEQLDALQGFRRQARRDLFVECRKHAATAILTSIPFLGPIRAALLIARVQTPFRFRGKRQFWAYCGLALETRSSADYRLVEGELHRAKKPVFIRGLNLNHNHDLENIFKAAATTASACPGPFRDYYETLLGRGMKPEMARLTLARKIAAISLIVWKKGERFDPEQLKAQAA

SEQ ID NO: 48398 - protein, 318 aa, unidentified
MPESELTKVSVGIDVSKNTLDIAVHETGETWSSNNDSSGGAALATKLKQLKATSIVLEATGGFETLVTAILSAADLPVIVINPRQVRDFAKATGQLAKTDRIDARVLAHFAAAINPPLRPTKSAEAQHLEALLARRRQIVEMLVSEKNRLANNRDLAVVKDLKTHIAWLERRLKSSDDELQRVLRASPVWRERDDLLRSTPGVGPVLSLTLLAQLPELGQLNRRQIAKLVGVAPFNWDSGKWRGSRHIWGGRAAVRSPLFMATLCAIRINPTIRFFYQRLIKAGKAPKVAITACMRKLLTILNLMIKTQTPWRTARSS

SEQ ID NO: 48399 - protein, 370 aa, unidentified
MGHLSEAFVGIDTSKLRNAVAIAEGGRGGEVRYLGEFPATEAAMRKLVAKLAAKYRRLTFCYEAGPTGYGLYRLIKSLGHECLVVAPSLIPKKPGERVKTNRRDGLNLAKLLRAGELTAVWVPDDRHEAMRDLSRARLAAHKDLRGKRQQIISMMLRLGRIYPGKKTWGPAHMDWLMRQKLEHREQRIAFEELMEAVRQESERVARLEQAIREAVPEWSLAEVVTALQAARGIDLIAAVTLLAETGDLSRFRNPRELMGYLGIVPSERSTGDTVKRGGITKAGNGRARRILVEAAWAYRHPPRVGREKQAKVAAAPKSVREIAWKAQVRLCGRCRSLSRKGKHPAIVVTAIARELSAFIWAINREVMARR

SEQ ID NO: 48400 - protein, 366 aa, unidentified
MKKVSTTAVKQTNNFTCQRLTIGLDLSDRSSWYCVLDESGTVLLEQRLSTTPKAMTEMFGGMPRSRIALETGTHSPWVSRLLAEFGHEVIVAHARNVRLIGESRKKDDRLDAQTLARLARIDPQLLCPVKHRSAKAQADLTVIRARAGLVRARTALVNTARGLAKSYGERLRSCNVRSMNPEKAEGLSPELQTALEPLLLAMESLSEQIREYNERIENMAEQSYPPVALLKQVKGVGTLIALTFLLTLEDPLRFRKSRDVGCYLGLQPGRRNSGQSQPQLHISKEGDPYLRTLLVQGAQHILGPFGADSDLRRWGLTLADRGGRNGKKRAIVATARKLAVLLHHLWVSGEVYEPLRNSGQLVATAA

SEQ ID NO: 48401 - protein, 339 aa, unidentified
MNNVSTIGLDLAKKVFQVHGVDEAGEATVRRTLRRSQVLAYFGKLAPCLVGMEACATAHYWGRELSKLGHTVRLIPPSYAKAYVRRNKNDPADAAAICEAVARPAMRFVTIKTAEQQAATGVHKVRELLMKQRTMLMNSLRGLMAEFGIVVAEGPRHIGELVAILADPGDQRVPAPLHGGLARMADALLHLERQIKVVDKQILDWGRGNAMCRHLITIPGFGPILSSAMAAVVVNPATFRSGRDFSASLGLVPRQDGTGGKVKLGPISKRGNGYLRRLLVSGAMTVLSGKRAKQDPWLVKLLATKARKVAAVALANKMARIAWAVMMRQEDFRAVPAAA

SEQ ID NO: 48402 - protein, 361 aa, unidentified
MGPTVLVGLDVHARQTHATVLDRATGQVSACKLHGSPEEAVLPFLARLGSSIVAVYEAGPTGFGLAREAGRRGLDVRVIAPGSIPRAPGDRVKTDKRDSLRLLRQLAAGELTFVFVPTVADEHFRDLVRAIEDLRGELMRARHRLSKLLLRHGHRYQDGKAWTLKHAAWLRSVHFDDPCAQVTLADYLASVGLLSTRRAALIETLQAQAPSCSHAASIVRLRCFRGIDTLSAAGVCAEISGFERFQRPSMLSGFLGIVPSERTSDRIRRQGSITKAGSEHARRLLVEAAHHYRHQPAVGAELARRQAGQDPRIIEIAWRAQRRLHGRWQRLYIERRKPASLVAVAVARELAAFLWEAATLN

SEQ ID NO: 48403 - protein, 341 aa, unidentified
MQVTTIGLDLAKHVFQLHGIDAAEKLVVRRQLRRSQVMAFFEALAPCLIGMEACATAHYWARELTKLGHEVRLMPAKDVKAYVKRNKNDAADAEAICEAVRRPTMRFVRVKSAEQQGQLMQHRTRDLLMRQRTQVINALRAHMAELGIVAAQGREGTKALLAIIADDGDERLPVDARASLIVLAAQLQALQTLVGSIEKRIIAQHRASEASKRLATIPGIGVLGASAITATATDPNAFRSGRDFAGWVGLVPRQDSTGGKQKLGPISKQGDRYLRRILVVGAHAVLRRARQHPEKYPWLTQLLARRPFKVVAVALANKMARVAWALLAKGGTYRAPRVAAA

SEQ ID NO: 48404 - protein, 284 aa, unidentified
MGFVGIDVAKAHLDVCVRPTGETFRVGNDDAGISELVGRLVAAAPTLVVLEATGGYEAPVVAALAVAVLPLAVINPRQVRDFAKATGKLAKTDLLDAAVLAQFAEVVRPEPRPLDDDQTLELQATLVRRRQLLDMLTAETNRMYTCRSTLRKSIYQHVAWLRRQLKDVDRDLDQQLRETPIWREKDDLLQSVPGVGPVLSRTLIAELPELGTLDRKQIAALVGVAPLNRDSGAMRGRRAIWGGRASVRAPLYMAALVATKHNPFIRATYQRLPEPVNESETPVG

SEQ ID NO: 48405 - protein, 385 aa, unidentified
MAPPARPEIVIGLDVGKSSHWACVVTREGELLASGPIPNREDAIDRLYAQYPGALVVVDQVRNIGSLALSRARLAGMPRAYLPGLAAHGASRLFAGDAKTDERDAMVIAKTALGIPDALLPVADRPPEIEAARSLAAQRDFLTCENTRSKNRLRSILLESCPEFEAQADLSDPATLKLMAAVGGPWSISEASPQAVGALTRGCRRAKVAALVESVESSSRPHPAAVACEDRAVRLLARRISENAAEIESLASEISALLAADETYRCLLTVPGIGPRTASELVISIDIADFPSHDRLASYCGLAPRNRRSGTSISSVSASRQGNKRLKNLLVFSCNCLARSRNRWGGYYARCRDRGMPHGKALKAVARKRLKVIYAIMRDKVPYSA

SEQ ID NO: 48406 - protein, 343 aa, unidentified
MDQITRIFIDTSKHVFQLHGVNAAEAVVLRRKLRREQVLAFFAKVAPTVVGLEACAASHYWARQLAALGHEVKLVPAQYVKAYLKRGKNDGRDAEAGCEAMSRPTMRFVPVKSAEQQAALMLISLRDRLTRERTRLGNAIRGHAAEFGLTAPRGLAHIAPLLAEAAADARVPALARELVADLARRWDQLGDELRFADRRLMAWHRGDDMSRRLATVPSLGPIGASMLVLKVPDPRHFRSGRDFAAWIGLTPKDHSTAGKQRLGVITRAGDEALRSVLIVGATAVVKQAMKGKGSPWVIKLLKKDAPKLAAVALANRVARIAWKMMITGEAYDPEPLMRELPAT

SEQ ID NO: 48407 - protein, 402 aa, unidentified
MNAVGIDVSKGKSMVAIMRPFGEVVATPFEIKHTTSDINSLVKFINSVEGESRIVMEHTGRYYEVLAHQLSKANLFVSAINPKLIKDFDNDSLRKVKSDKADAVKIARYTIDKWQNLKQYNVIDELRNQLKTMNRQFGFYMKHKTAMKNNLIGIIDQTYPSVNTYFDSPARSNGSQKWVDFASTYWHVDCVRKMSKNAFIDHYKNWCKRKKYNFSKSKAEEIYEKAKELVPVLPKDNITKLIIKQAVDQLNSVSTTIESLRTLMNETASKLPEYPVVMAMKGVGTSLGPQLMAEIGDVSRFTHKGAITAFAGVDPGVNESGSYEQKSVPTSKRGSSVLRKTLFQVMDVLIKTHPQDDPVYQFIDKKRAQGKPYYVYMTAGANKFLRIYYGRVKEYLSSLPES

SEQ ID NO: 48408 - protein, 416 aa, unidentified
MNFNKLLSGNITKYQKEGFIMISVGIDVSKGKSTVCIMKPCGEILESPFDIGHTADELDSLISLIKSFDEETRVVMEDTGHYHLPVATYLSSHNIFVCCVNALRMKKFCSQSLRRAKTDKIDSIKIASFGITYWNELVKAYPSNVIYDELKFLARQYYQVTGMLVKSKVNFSNLLDQVMPKINDVLSNQGENHKLTEFVSRYIHFQNILDMGEMKFTSDYCKWAKKKGYRLNERKAAEILALAQNGIPTLPNSQSVKIAVSEAVKLIHSIEESRNTILAQMQDLCNTLPEYSVVKEMDCIGDTLAPRIIAEIGDVRRFKNKHSLIAYAGIDAPPYQSGAFHASERHISKRGNSYLRKTGYEIMQSLIKHKPADNAVYNFIQKKRSEGKCGKEAMIAGLNKFLRVYYGKVMEFYSEH

SEQ ID NO: 48409 - protein, 414 aa, unidentified
MSNPYVVFVGIDLGSESHQVCVLDAAGNILGRRRVEQSGAAIGELIGWLAERIAKTPAQSVAVALEAPRGAVIDALLERGYALFSINPKQLDRFRDRYSVAGAKDDARDAYVLAASLRTDLVHYRALKPDHPLLIRLRELSRTEAALQQDFRRSANQLWSYLQRYFPGLLRLVPAANELWLFDLLQQTQALPAQAARLSVKRLQNLLRARRIRRFAAQDLHQQLQQPLPLAPGVEQALAEQVLLLLPRLRLLHQQLSDLADRIDHLLEEMAQPENFPEHRSVEILLSIPGVGRVFTATVLSEATTPLLERDYHALRALAGVAPVTQQSGKTKLVSMRRACNARLRNAVVNSSGVHIHADTRAKQIYARLRCKGNSHSRALRGVGDRLLHLICVLLNSDQLYDPNRREPTHTAAA

SEQ ID NO: 48410 - protein, 376 aa, unidentified
MQIKSQIRSIGIDLGKTTFHLVALGVHAQVLVRKKFSRPQLLAYTANLPSSLIGMEAGVGSHFLGRALREQGHQVRLIPAQFVRPFVKSNKNDYCDAEAIAEAVERENMRFVPIKTEDQLDLQAVHRVRDRLVARRTSVINQIRAFLLERGISFRKGPASLRRQMPEILENAEAKLSTSMRRLLDFLWQEWKGLQAQIESLNADLEHIASSDPSCVRLQQIPGVGPLVSTAVVSAIGNGAAFKKGREFAAWLALVPRQWSTGGKAKLLGISKRGNPYVRKMFIHGARAAVLRVKREGSTLGKWMSGLETRAARNVVIVATANKLARISWAVLASGNDYQPLRKTPVFSNWTKWDLKFFSRESAEDRNDENTVKRRA

SEQ ID NO: 48411 - protein, 429 aa, unidentified
MKIIYPRVCGIDVHKQFIVAVICISESVEPIYLKKRFSTFHNDLIRFREWLIQNDCQNVCLESTGKYYIPVYNVLESHISNIVVANPKWVRAVKGEKDDDKDAKWIADLFKFGIVRSSFIPQKDFRILRELTRYKYKLVNMRSSEKNRFQNALTSGNCKLDMVFTDVFGKSASNIIDLILSDNPYTDEDILSKVHKNCKASPDMILNSINGTDLTPVQKSRIELVNDHIKQLSSNIQRLDKLIDLMIEPYEDYISFLCQIPGVSRNSAIIILSEIGVDMNQFTSTRRLTSWAGLTPSSNQSAGKKKSVRISRAGVYLKPCLVEVAHAAVKDKSHPYYANKFNKISKRRGKKRAYIAIARKILVAAYHMLLTGEIWNPADLSEVETPVEQRLKYVKNNLKSDIKQLLDIGLTVEELTLMIQQNANIIATQ

SEQ ID NO: 48412 - protein, 343 aa, unidentified
MEHFAGLDVSVKETSVCIVDDVGKIVREVKVASEPEALLAVLKNPAYHFKRIGLEAGPLSQWLYSALAEAELPVICVETRHMRAVLKAQINKTDRNDARGIAQMMRAGLYRPVHVKTLRSRKLRMLLTHRKLLQAKAIAVENDLRATLRNFGLKVGVVGTVKFEARIKELVEDVPDLAVLVEPLLVVRRVLREQISVLHRRLLAIVRDDDVCRRLMTVPGVGPVVALTYRATIDVPARFRKSKAVGAVFGLTCSKYQSGEINRTGAISRCGDDMMRVMLYEAAQSMLVRSTRWSWLKAWAMQIARRRGMKKAIVALARRLAVIMHRIWVDGTEFRWTREVAAI

SEQ ID NO: 48413 - protein, 386 aa, unidentified
MAEVLEKLTGKLDAPTVSTSAQENRRGSTVRPNLDRLTVGVDLGDRWSQYCILGLEGETLAEGQLRTTQEEVREFFQALTVARVVIEVGTHSAWVQDVITEWGHEVLVANPRLMEGSKRRKRKSDRIDANKLARLGRVDPQSLYPIRHRSREVRQDLVVLRARDALVSVRTELINTSRGLVKSMGTRLPGCSSPSFAEKVKDAIPVEVREALLPLVQLTETVNDCIARYDQRIEELGQKKYGYTTLLRQVKGVGPITSLAYVLTLEDPQRFSSSREVGPYLGLVPKQEDSGDCQPQLGISKAGDRMLRRLLVGSSQYMLGAFGPDSDLRRYGLRLCERGGKNAKKRAVVAVARKLAVLLHHLWVTGDVYEPLHHTGAETRTAPAAA

SEQ ID NO: 48414 - protein, 293 aa, unidentified
MEERTKIHVGLDVHKDSISVAAAEPCRAPGRLIGKVTHGVTKLLKALAKVRPTEQLHIVYEAGPTGFGLLRALRAKGYVCEIIAPSQIPRRPGDRVKTDGRDSVQLAECSRAGQLTAVWIPDPHDEAIRDLSRAREDAVNSRVQARHQLKGFLLRHDVRYKGKTSWCGAYYRWLATLNFGAGAAQAAFTEYWQTVKAADDRVDRLTKALQASIMGWRFEPVVGALQALRGVAAITAIGLVAEIGDLGRFAHPRKLMGYLGLVPSEHSSGERTSRGSITKTGNAHARRLLTEAA

SEQ ID NO: 48415 - protein, 368 aa, unidentified
MGQDTLWVGLDTDKKHIDVAVAEPLPGGEVRYWGQIAADPASLDRVIKRLRRDDRKLVVCYEAGPCGYGIYRQLNDKPGVTCHVIAPSMTPRRAGVRVKTNRRDSMTLARLLRAEELTAVWVPDPAHEAMRDLVRARGRAVEALMRCRQHIGGFLLRQDVRYIGAPWTKKHRAWLGQLEFAHPAHRLMFGELLDALDQAQARRDRLTDHIAELTPQWSLAWLVEALQVLRGYRLINAATVAAEIGDPRRFDKPRELMGFLGMVPSERSTGDSVRRGGITKAGNGRARRALIEAAWTYARPAKAPAPTGHSAALREIAAKARHRLGARYRKLTARGKLPQIAVTAIARESIGFIWAIAHAAAPKPPRQG

SEQ ID NO: 48416 - protein, 424 aa, unidentified
MNLTQNDRLKQVTSDTLIVGVDVGSQTHFCRAFDWRGFELSRRVFKFSNTGMGFLTFLRWTEEIMNKTEMKKVIVGCEPTGCYWLTFQKFLQDHDVQLVTVNPFTVNRSMELDDNSPEKSDLKDPKTIALLVKDGRFSTSYLPSGVYAEIREASVCRDQIMKQNVRLSNQIQGWLQKFFPEYFECYADWDSTSGLMLLRKAPLPQDILKIGAGGINQIWRDAKVRAAGIKRAQTLVEAAQNSVGLEAGEAARLEIWVLVNDYILKAEQLKRLDEYLEEKVKEVPNVEKLLAIKGVGMSTVIGFIAEVGDIGRFTDPKQIQKLAGMEIVKKSSGKKKGQPRISKRGRRKLQRAMYESARALMTWNPAFQDVFLYYRNRTKNPLGGMQAKIAVACKAIRIFYVVLQTGCDFDEEKIRKDIIRPEAA

SEQ ID NO: 48417 - protein, 344 aa, unidentified
MVTLGADAHKRSHSLVAVDDMGRKLGAHTVPATSAGHLAALRWAQQWCRRRWAVEDCRHVTRGLERDLLSAGEVVLRVPPHAAAAGRSSLREHGKSDAIDALAVARTALREADLPEAHLDDHCREIKLLLDHREDLVGERTRIQNRLQWLLHELEPGFQVASGSLSRRPAIKRVETLLDGRHGVVAELARELTARTAQLNSRIDELEQQLAGMMPALSPGLLALPGCGVLTAAKLLGETADVRRFRSRAAFAMHNGTAPIPASSGNQQRHRLNRGGNRQLNAALHRIAVSQIRRAGRSHDYFQAGGNTKREAYRALRRRLSDEVFRLMLTDQRAQVTGVQAPAA

SEQ ID NO: 48418 - protein, 348 aa, unidentified
MRNQPLGAVVYGIDLGKTRFDVVGCDAAGRPIQRVKFSRDTLFAFFATAPKALIGMEACPGAQWMARKLIELGHTVRIIPAQFVKPFVKSNKNDARDAEAIAEAVIRPTMRFVEIKPCEQIDLQALHRVRDRIVGNRTQLICQMRAFCLEYGIAIRPGTGAFKLDIARIITDETNDLTPAIRVLLKELWDELKIVDIRLAAVSRQVEVLAAKHDTARRLMTIPGIGPIGATALVAAVGDARQFRKARDLAAWLGLVPRQNSTGGKTTLLGISKRGNPYVRRLLIHGARSCMIHLDRSRDRMGVWLDALDGRMHRNKAIVALANKIARIAWALLRRPHTLYERIAPAHA

SEQ ID NO: 48419 - protein, 349 aa, unidentified
MAVTIVEEARAITGGVDTHADVHVAAALDPIGGLLGAGEFPATAAGYARLLGWLGGFGTVCLVGIEGTGSYGAGLARHVTAAGVRIAGVDRSDRQDRRRQGKSDPLDAVSAARAAQSGRARGASKGRDGSVEAIRALMVAKRSAAGERTRTINQARALVLTGPDDLRARFAAHTPAALVAGLGSLRPRPGGDVAGHATRVALRELGRRAQFLDSQLERPGELIVPLVTAHAPGLLALYGVGPNTAALLLIAAGDHPGRLRSEAAWAHLCGAAPIPASSGKVTRHRHCPGGDRQANHALWRIVFTRLGSDPATRAYAERRTAEGKSKAEIIRCLKRYVAREVYRYLRPGG

SEQ ID NO: 48420 - protein, 470 aa, unidentified
MRHNRSPRHGPTGKKFKRVSPSLLEGIQPNAAGIDCGSEQHYVAVPSDRASEPVRSFRTFTADLHRLADWLQACAIETVAMESTGVYWIPIYEILEERGFKVVLVNARHVKNVPGRKSDVLDCQWIQELHTVGLLRGSFRPVAEIAALRAYLRHREKLIQGATSHIQRMQKALIQMNLQLHNVISDITGVTGLRILRDIVGGVTDPTVLAAHRDHRCRASEEEIIASLTGNYRAEHLFALRQNLELYDTFQHQIQVCDAEIELLLQTLAAKHDQPDVPPPPPRTKKKPRDNEPRFEIRAPLYRLAGADLTQVDTIGPYTALQLVAEIGTDMTRWPTEKHFTSWLTLAPKNKISGARLISSTTQPSANRAAAILRICAMVAGRTSTALGAYYRRIAYRIGKPKAITATARKIAVLVYRVLRGDLDYRDPGAEAYEANHRTHTIRNLRNRARQLGFGLLNLETGELISGPVS

SEQ ID NO: 48421 - protein, 431 aa, unidentified
MSERDYNKQVAKRQRIRSTTLVVGVDVGKAYNAVGFMNKEGKVLGNCAKLYNSREGFEQFMEMVEDLKARYRLKDVLIGMEPTGHYWRKLAYFAKGHGYEVRFVRTTALKHHRELNESASAKSDPRDALTIANITREGKYIDTVIEDGPLRQLRTLSKARERLLRYSVSAKNSLHAALDDYFPELHELFWSMGSRSLWAILDRCPFPEDVRLVEVSMLKGLIVKSSRKKAGAVQKAEALYQAATKSIGLRPIGSADRYRVQMCLEEVKRTVLTLKSMDQQMKSMLKEIPAAPYLLSIPGIGALSAAVFLGELGDPGHFHNARQIVKYAGYDPQESDSGSWVSRKFISKKGRWLMRKYLFFMSMRVVVLTQYFKTYYERKLETKNRVGQLPRRKEMLCAVAIKLIKVIFALLRDKRRFDDTRDTVMALSQAA

SEQ ID NO: 48422 - protein, 344 aa, unidentified
MMYVGIDVSSKSFVIHAVDRQKRTVYQGEIAPTKATLLQLVADLGPERKKVVFEAGNQMKWLAETLQGCESVDLHVVHPNELKWISKSSSKTDKVDARKMAELARGDLLPRKVHIVEGPVRRLRELASARQTIQGKRVALINSIRALLLQEGVRLTEKFFGRRDWRERLTKVPVSETGRIVIIAYMQAIDALQTTEAELTAEIVAVKDRRLTLLESIPGIGVLTSRVLLGALDEAQRFDDRKAVAKYGALTPTIYQSGTVTQLGRINRDGRHEVRRVLLQCAHTVARMKSFESRPLRQFFERVMKRRGKKIAIVALARKLLTIAYGVLKNQAHYDPARLMPYPG

SEQ ID NO: 48423 - protein, 318 aa, unidentified
MDPVVGIDVSKAKLAVVLIAASGKPLHKSCANTPAGHAELVRWLARHGGDPVRIGLEATGGYHEAVAVALHETGHHVSVLNPSAVEAYGRSQLRRAKTDRTDAAVIADFMRTQTPPRWVPAPPEARQLQALVRRLDALLEMRTQERNRLELAAPIVRPSIEATVAHLDTEVVAIKRQIAAHIDQFPTLRTQRDLIVSIPGIGETTAAIVLGELLDIARFSSARDVAAFSGLVPHVRQSGTSIRGRGTLSRLGAARLRKALYFPALTAIRHNRPLQRFAARLRAAGKPKMVIVAAVMRKLMHQIFGVLRSRRRFDPTCA

SEQ ID NO: 48424 - protein, 412 aa, unidentified
MEVVYPCCCGLDVHKKSITACVLWAEAKGKSRKEKKRFGTFTHDLLQLADWLEKCGVTHAAMESTGVYWKPVWNILAEQFEVLLVNAQHIKAVPGRKTDQKDSEWIADLLQHGLLRGSFVPPQPIRELRDLTRYRVSLVQEINRIANRIQKVLEDANIKLASVATDALGASGRAILQAMLAGEQDAARLAEMAQGKLRNKIPELKLALEGRMTAHHRFLLRQLFDHLRFTESKLSEIEKEIDKRMLPFEDKVTRLCTIPGVDRVTAWGMLAEIGMNMNQFPSSGHLASWACLCPGSFESAGKRLSGKMRKGNVSLRRCLSQAAWAISMMKNNYLSALYRRIAARRGAKRAVMAVAHALLEIAYHMLKRKEDYRELGADHFDRIDANRTRRSLVRRLERLGHKVTLEPLAQTA

SEQ ID NO: 48425 - protein, 438 aa, unidentified
MSKLIVFEQQNAQAAAIDIGAQKIFVSWDGINAHGYSTFTVDYQHCIADLKKQKIKCVCMEATGVYWISLYEMLEDAGIAVCLVNPKEVKQVKGRKTDVKDCCWMQKVFSAGLVRQSYIPSGKLKELRMLMREREDIIGMGTTYVNKMQKALELMNIKLTEVISQIHGASGIKMIEAIINGERDSEKLLALCHQKLKENKAEQLLKALEGNYNETWLFLLEQNFKMYQLHQQHLSTLDKKIEEVLDELQKGRQTVKSSYRIKPIRHHKPAIQDLHQKLLNIYGVEANCLPGITDYSLLRLLGEVGVDMKRFPTAKHFVSWCQLAPSHNQSGTLNRRLRLRNGSKAGQIFREIAQGLINSKQLAIGAFIRRIRGRKDSRIAIKAGARKLAINFYNLLTKGKAYVETGVAMYAYHLQEQERAYLDKLAKKHGLQLVNLNT

SEQ ID NO: 48426 - protein, 310 aa, unidentified
MKQFIRIGVDLAKRYFQIHALESEGGKAITRKLSRSAMHSFFAQIKPCPVGMEACGSSHYWARELRALGHDVKLLAPNYVKPYVKRGKNDAADAAAICEAMSRPDMRFVPIKNEENQAALMLHKTRDLMIKRRTMSINALRGHLAEFGIVAAKGISCVAGLIEAAYEEAALPEMAKAAMEVLVRHIETIDTAVADLDRQIGRVHAQDPVCQLLSGIPGIGTITATAIAASVPMPRIFTSGRDFAAWLGLTPRQNSSGGKERRGGITKQGNRTVRRLLVMGATSLLRWSANAKGSCGIGLSHSWLASPPGL

SEQ ID NO: 48427 - protein, 341 aa, unidentified
MMIIGCDFHPRFQQIAYVDLETGEFGERRLSHPEEAERFYRSLAGTRVRIGLEATGNFRWFRRLINQLGHELLLGDPSAIRAASPRRQKTDKRDARHMLRLLQEDRFPVVWQPPVENEELRQLLLHRCRLVRLRTRITNQLDSMAKNEGLLGSKNWSAERRRRIEALPLSGWYMRRRVDLLDLLDELEKRIEPLEKAAVEAAENHQQACLLMTHPGVGPIVSLAYVLTMGDWKRFARSKELASYLGLIPAEESSADKRRLGHISKQGNTLLRWLLVQAAMGAQRSDPSWHRLYLRLSLNKHHGVAKVAIAHKLAVRLYWMLRSGQNYKQVMERGSHAGQPV

SEQ ID NO: 48428 - protein, 347 aa, unidentified
MTYIGIDLHREFFVAHVENRDGEKLLSQKYPNSLESVGELTGRFPNSKVVVEATRNWMWFVRAVRAGGCNITMAHPFRTKAIAAAKIKTDAIDAATLCQLLRANLIPESYIASDSEVDDRELSRGRVNMVHDRTLLKNRIKAILGKENLTFPGSDLFGKKGRIWLNGQCLSQGKELMVENYLNLMGGVEERLKKVDGAIKQKGGNNPRANLLTTIPGIGVTTAFLLASEIGSIDRFANSKKFASYFGLTPRLSQSGNHAYYGRITKVGNPYVRWALVQTAQRWVRMHKNSRVWFDRLSYRAGKKKAIVALARKLAVVVYSVLKYKRPFSLNFEVQKVSPAILPESSY

SEQ ID NO: 48429 - protein, 316 aa, unidentified
MTQNEAFVGIDVAKHELVIYLHPQGESWRVENTPMGRDKLVRRLRRLAAKHVLRIGFEASGGYERKLAILLESKKLDGYLLDLSRVHSFGRAEGKLAKTDPLDAALIARALAALHGDLTPYRHDPVAERLTERVRLRELMLVQVGQLGNQLESMADPAMRKIVKAQVARLKAQMLRLEAMIASLIASCPDLARREKLLRSAPGVGPIVAATLLAHLPELGSVSSREVASLAGLAPFDRQSGTSRKPGRCQRGRPAIRRALYMAALSIFRKNIPVAQLAKRLLEKGKPKKVALAATARKLLVALNAMVKQEVVFKTS

SEQ ID NO: 48430 - protein, 412 aa, unidentified
MFKIFRNNCCGLDVHKTWIYACIGITDPNGRTEYKQARFSSFSNGLRELAAWLAKYSCTEVCMESTGKYWIPVFNILEKSCFVTLAHPKYTKPQKGNKTDRKDAKWICDLFMCDMIKPSFIPSLEIRQLRDLMRYRSKLTNMLTGEKNRAQNCLTVSNLKLDDVFSDVFGKSARSITCYILDHPGETFDVSPFVDSRCKTPVSEIQAAVDGAISPEQAVKLRQCLAHIDELEAHRKEIESEILQIAEPFSAVLDLLYTLPGLDKNPMTAIAILSEIGPDMSVFPSSKHLVSWAGCCPRNDQSNQKVKSRRISRAGSYLKPLLVQVANALIKSKKHLEFKERYHRIKSRRGHKKAIIAVCKMLLTAIWNMLSKLEPYNPEGFLEHRPVRQEKTLTVSQALELLRLRGYAITNQ

SEQ ID NO: 48431 - protein, 346 aa, unidentified
MTHSTTVGVDLAKNVIQVSVISARGKELSNRSLTRRKFAEFLAKQKPSLVAFEACATCHYWARAAQRHGHEVRIIPAKYVAPFRQGHKTDSNDALAVAEAARRPSIKEAPMKTVEQQGLQAIHRSRQLLIQECTALSNHLRGLLMEFGVIIPQGFASLLRAVPEVLEDGENELPDLYRPTLHRMYTRLLELREDIEAMTKEVEVLVRQHPICNRLTALEGIGPIGALLLYATLGSGNAFSSGREFAAYLGLAPRQYSSGGKTTIVGLSKKVGNCRLRSILILGARAYTYRLKEPKSAKDRWLKNAIDRNGHSRAAIALANKNVRTAWAMVTQGTEYQRRGQLKVAA

SEQ ID NO: 48432 - protein, 346 aa, unidentified
MEIDKVGIDLGKSVFHLAGLSVTGETVVRKKFSRLQLLRFTANLRVRVIGMEACGGAHFLGRALRDQGHDVRLMPAQYVKPYVKTNKNDYIDAEAIAEAVDRPRMRYVPIKSEGQLDIQSLHRVRERWVKSRTALVNQIRGLLLERGITIRKGRRHAEAALPMLIEDAESNLSGPLRLLLTQLMSELRRLECQITEIDATISRGADEQEACKRLMAIPGIGPITATAIVSAVGNGAEFPKARSFSAWLGLVPAEYSTGGKQKLLGISKRGNGYVRKLLVHGARAILQCRQKQSPGLSTWLGQLVSRAHPNIVTIALANKMARMAWALLIRGETYRPPQLRQQTTVI

SEQ ID NO: 48433 - protein, 422 aa, unidentified
MAVYCGIDWAEGHHDIALVDDEGRLLAKRRINESVAGLAELGVMLAATGDSADEPIPVAIETPRGLLVAALRATGRPIYPINPLAVARYRERTSVSGKKSDHVDAMALANILRTDRHQHRLLPDDSAEARSISVLARAYQDSVWRRTKLVQELRARLREYYPGFLSAFAAGAGSGRGLPTTQLASGDARAVLAIAPSPQDGSRVSKARVETALRRGGRQRRISSLAAHIVAALRTPQLRQELVVERAMRVETLALLGVLDAVCDSVDQLVDALAEAFGQHPDYQIITSFPGLADISGAIVLAEIGDDRNRFADDRALQAFAGSAPVTRASGKSRTVSRRRTKNNRLAGIGYSWAFTAAARPSPAREHYLRRRHRGDGHPAALRHLFNRMLGQLHHCLLTGQTYEPIMAFPHATPTPVQQVAA

SEQ ID NO: 48434 - protein, 316 aa, unidentified
MEQITNYSFKGQPIYIGMDVHLKKWVLSFYTKEFELETKSFPASVEVISKYLHRTYPGADYYSAYEAGYCGFWIHEKLQSAGINNIVINPCDVPTKDKEKKRKQDPVDSRKLARSRRNNELEGIYVPDKKQQEDRLLVRSRYDMVKKQTRCKNQIKSVLAFFGISLTDEEVNEYWSKAYINWLRGHSHGNSGKAIRLNTLIEELEFVRKSISMYTKQIRSLSKEERYKRNVELLIKIPGIAILTAMIILTELGDIKIYNRLDKLCSYVGLIPDEHSTGGKERKSNMTKRGNRRLRRILIESSWGSNKKGSGFIFSI

SEQ ID NO: 48435 - protein, 352 aa, unidentified
MDATTVAVDLAKDIFEVALANRGGRIFERKRLTRRQFERFIDGLAPDTEVVMEGCGTAHYWGRRCQARRLQVRLLPVQYVRPYVRRNKTDRTDTEALLEANRCGGIQPVPVKTAEQQTLQALHRVRTQWQAARTARINVVRGLLREHGLPMPVGARKVIARVTALLEDAEVVIPELLRHTVALVVEEIRALEMRIIAIDQQLAQVARTHPVAVRLQQIPGVGVLTATAMVGAVPHIHAFRRGRQFASWLGLTPRESSTGGRRYLGRISKRGDVYLRCLLTHGARAVLLTAQRTMRATPHRATRFQQWAVTLAARRGHNKAAIAVANKLARTIWAVWHYEVDFRSQPGGTVAA

SEQ ID NO: 48436 - protein, 395 aa, unidentified
MQTLFVGIDVSKDSFSVAGLDAQGATAFSLTTGMTRAGFSELFKAISSHSVALSDAVVAMESSGCYHLNLFSFLSSKGIRTLVINPLVIANFSRLSLRKTKTDRKDAFTIARFILSHRDSVEPFTILQAHQDLKDLAREREFTLKMISSIKNEIKRLLQSTFPELEHMGNVFSDTMLQFLSVFPSARLIRMAEPQAISHAFEQRDKRKRIAVPPETIRRAARNSIAAVSLAKEMILPGKIETLLHLEERLAQLTKMLVKLCETTMQEDLKILTSIDGINNITAAPFLAEMGDWRGFRSYKQLIAFAGIDPSIHQSGTIQGVSRLSKRGNRHLRRLIWLMTFCAIRMEGPFKAYFIRRKTQGLPFKKALFATAHKLVRVIFSMLNNRTCYVAQPTA

SEQ ID NO: 48437 - protein, 344 aa, unidentified
MTTAPTIVGIDLGKNWFHLVGLDGRGAAVLRKKLNRGQLAEYAATAPRCVVATESCPGSQYWGRVFAKAGHEVRILPAQFVKPYLKANKNDFNDAEAIAEAGNRASMRCVPLKTTEQLELQALHRVRQRIIVERTAVVNQMRALLLEQGIVIPLGRALFARRLPAIFEDAENGLSPRLVGLLHRLRQRWLAIDIEIKDATRDLTAWADQSDMCRRVVTVPGIGPMIATATVAAVGNGRMFTSGRDMAAWLGIVPRQYSTGGKPTLGRISKRGNTYLRQLFIQGAQSSFLHLKRDHSSLGEWLRQVEARRHRQVAVVALAKKMVRICWKVLTTEEVYQPYPCRVA

SEQ ID NO: 48438 - protein, 430 aa, unidentified
MNDSDGIRLQEFCQFKKVIRGSTEYLIVGLDIAKERHNAFFGTATGKTLHKGMFFDNTYDGFQKLLIQADALKVQYSLRKVVFGLEPTANYHKPLGEYLIKGGHLVVLVSAAATVKNRELMDGRWDKHDTKDAANVADLISQAKCLYYDCPGEDLRSLRGLQSLKKRLKKEEHGLRVRIRNQLLAQYFPEMDQHFGSLASLNVVSRCLNPSDIALMEYDEFCRTVSPGKVNMAQQKRLTQIWRAAKQSIGCVVGEAVSVEAEIMVAALHRVRETIKTVDDRIEDICLKFPEYSFLLTIPGFGPDVSSKVLAAVGDPKRFTSGKQVLKMAGFDLCADRSGKKSNSAIPVISKHGKADLRFALYQAALISSLNDKDFIVYHTNKIRGREREKGIGTKMRVKLAAKLLIIAWTLMRKKEPFDPGHLSRQAKAA

SEQ ID NO: 48439 - protein, 306 aa, unidentified
MKEIGFTQMVSVGCGIDVHQKQVTASIRKSSTEVETREFEAYTSSLTSLREWCKNEGVTHVVMESTGVYWKPVFNILEEDFEVILVNARHVKNVPGHKTDKKDSRWLSKLLLSGLLKGSFIPPRDIRELRDLVRYRKKVVGQIASEKNRIIKVLEDANIKLSSVLENVDGAVGTKVINDLLNGETSAEQLSRHYHGKQKVSKAEFCRALEGRITEHHKLMLRIHKDSISDKEAQLERLDIAIDKATEAYRLEIDLLDTIPGVGKESAISIISEIGVDMSRFPNETHLSSWAGMSPGNCETGGKKKT

SEQ ID NO: 48440 - protein, 338 aa, unidentified
MNYVGIDHHRQYSHMTLMDQEGQVLRSGRVPNLRAEIEKFLEGGEAMEAVIETGRSSYTMVDVLEEMGVAVKIAHPNEVKAIARAKIKTDKRDSEVLAHLLRMNMIPEVYRRSTENRQAQRVLRQRAFYVSAMTALKNRVHAFLAQQREEVREVVARETNIFSEKGQKVLLGLDLAPREKRLLEALLKTYRHLETRIGESKAYVEKLYEESREAQFIRTIPGFGKYLSVLVAVEIADLTRFTDAAHLHAYAGVIPSIHSSGDKTYHGKIIRAGNRWLRWAAVEAVWPGIRADFDLRCFYERLARGKGANKAKVATARRLLTIIYKVLKEGRNYIAYRR

SEQ ID NO: 48441 - protein, 347 aa, unidentified
MTIVEAARGITGGVDTHRDVHVAAALDPLGGLLGTESFSTDPAGYKALVRWLEGFGDVTKVGVEGTGSYGAGLARHLRRVGVEVIEVDRPNRQKRRSSGKSDPLDAVEAARAALGGRASGRPKSRDGAVEAIRVLVVAKRSARQARVKALIQMRHLGYSAPEQLRCRLMGLSVPALVTEGSKLRPTRSADPVTAATKASLSSLAHRIEALDRELAELDERIEALLVVTVPDLLGLFGVGPDTAAALVMAAGDNPERLHSEAAWAHLCGVAPVPDGSGKTNGRVKAHDGGDRQANSALWRIVIVRIAHDPETQVYFERRVKEGKTKAEVIRILKRYVAREVYRYLPRG

SEQ ID NO: 48442 - protein, 397 aa, unidentified
MIAVGIDISKAKSTVAVIDSDGTVLASPFTMAHTQPEMEAFVTYLKGLGEPTTILMEYTGHYHYPVLKKLQDEGFPVCIVNPYQMKKYGDVEIHKAKTDKKDALRIAAYALEKSYKLVPYSSMEQKYEDLKFLSRQYSQRITYVAKLKVQLIALLDQTMPGITRILPLNSRNPEKCALLLFIKRFNSFDEIQRIGKARFLASYDVLAKKASERSASSKGLSIYELAVDSITTRGEDPYIWLSQNQCVDLLSATQNAADEIISQMRNIAETIPEYKVLRAMCGVGDRLGPIILAEIGDIRRFHSGKALNSYAGNDAPPYQSGQFESRNRHISKRGSSTLRKACYEVMQALKLTKPQDDPVYLFMLKKEQEGKPFNVAKMAGVNKFLRIYYARAMELYK

SEQ ID NO: 48443 - protein, 347 aa, unidentified
MVIIGCDFHPGFEQIAMVDSGSGEVRHLRLAHKEEARQFYAGLAGQEVLVGVEACGYTQWYEQMLEGMGHRLQIGDAAAIRASYVRKQKTDRRDAGHILRLLVEGRFPSLWVPSSAERDARQLIVHRHKRVQTRTRVKNQLHALAINQGLRLRWQLWTRGGRQQLEALELLPYAAARRADLLRQLEEMDSEIARLDEAVRKEAEARPAAVRLMSHPGVGPVTALAFVLTIGDVRRFEKARQVASYLGLIPSERSSGAKQRLGHISKQGNPLLRFLLVEAGHSAVRGDAELRRCYVRLQHRHSTGVAKVAVARKLALRLYWMLRNQTDYAQLQVGPYAGKPVSSCGPK

SEQ ID NO: 48444 - protein, 341 aa, unidentified
MEEYVGLDVSMEETSVCVMDAAGEIIWEGKAATEPGELVRTLHLRAPAAVKVGLETGPLSTWLWHALREAHVPVVCLDARHAQAALSMRINKTDKNDAAGLAQLVRMGWYREVKVKQLATHVEGALLASRALLVRQRCELENQIRGLLKNFGLRIKATKGRAFGQSVAALADKQPVLREMVLALLAAWSSLRLQIAVLSRRVEQQAIGDPVCRRLMTMAGVGKLTALAFRAAIDDPGRFRHSADVGAYLGLTPRRYASGEIDRMGRISRCGDALTRSYLYEAANVMLTRSRGSNPLKAWGLKLAKRAGWKKARVALARKMAVVLHCMWRDGTDFGAPKVKA

SEQ ID NO: 48445 - protein, 443 aa, unidentified
MSNRKRPELTRGDHRRNERLARLRAIVHPELAIVGIDLASTKQAAVVSDHESKTLAKRMFSGSPWVIDDILAWAAAIAERAGFSGLVVACEPTGHRWKPLVDRCSARGVELVCVNPMLMARAREGEDFTKNRSDFSDATVIARLTGERRCFVPYLAEGLWSRLRHLGMRRNQLLVAATAARQGLRDLLECYWPALLEAAAQPMRSLTLRACLEVSTDPGAIAAMSFEGFAEAVTAALPHWGSHRRSRRILEAAFAAAQCPGGVTSEVPAAAERAAFALDDWRRALDALAEAESRMAQVMTQLGLDELACSIEGLSVVGAAAILAETGDPSRFDNPRTWVKHAGLAPRANESGNFKGQTKTSGRGRPGLRTAAWRAVWGLLPHNSVFQARYAHLRTRAENPLNDGKARAALGAALLRQLFVVVTERVAWDPAIAGGSEVMPLAA

SEQ ID NO: 48446 - protein, 338 aa, unidentified
MVIKVIGLDTAKHVFQVHGADASGRAILHKRLRRSQIPDFFSNLPQCLVGIEATQGAHYWSRVIGSFGHDVRLVAPQFVKPYLKGQKNDARDAAAICEAISRPEMRFVPQKSIAQQDLQALHRIRSRLIGCRTQLGNQIRGLLAEYGIILPLHLSEVRRQLPELFSEDHPLLTSFSRELFASLYEELCALDERIQAMEKRIQRVFANNEQCQKIAAVEGVGPLTATAMVAAVSDGKVFRNGRQFAAWLGLVPRQHSNGDKQRLLGITKRGDPYLRMLLVHGARSVVYRSAGKTDRRNLWIADKQRQLGTTKACVALANKNARIIWALLAKDEPYRVAA

SEQ ID NO: 48447 - protein, 352 aa, unidentified
MNRIIKIGMDVHTTNYTLCIFEPSFEHDGTVHCITQVKPEVKNIIRVIETFKKKHENEELNIVCGYEAGCLGYSLYHELKEKGIECVILAPTTMKTEKGGRKLKNDYRDAKMIAECLAYGGYSAVHVPTELDNSVKEFIRMRDDIKENLKSIKQQIIAFLTRNGKQFEGKSFWTRKHIDWINTVSFSEPLLQDTLKEYMIEYNHLCNRVETLDRQIEEISLKEEYVEKVQQLQCLIGIKTHTALSLIVETSDFNRFKKGNMYSAYLGLIPGDDSSAGHENKLGITKAGNSHLRKLLVEAAQGYTRGKVGFKSKDLKSRQEKCSSEVVAYADRANERLRRKYYLNTHNLQVTI

SEQ ID NO: 48448 - protein, 409 aa, unidentified
MKLFVGLGVSSFDIKFCFLNGEGVQLASFTVSNDLPGATQLRDKILNIAKNHKVTTLRIGLESTSVYSFHPSMFLHNDKSVQALGGQVLVMNPKQIANFKKSYNDMDKTDEIDAFVIADYLRFGRLPMSVVKEEQYVALQQLTRARYQIIRQTAQEKQRFLQYLSYKCNTFTEEVESNIFGKAMLDLFLENYSLEELSNIPLEDLADYLQNKGKNRFPKPEYVAKSIQKAVRSSYRLDKVVEDSIDTILGTSITLIRTFEKQIKELDKSIERIMKGLPQTLQSIPGIGPVLAAGIQAEIGQIERFESEAKIAKYAGLYWRKHQSGRFTADDTSLSRNGNQYLRYYLVEAASSVRRHDSEFKEYYSKKYDEVPKHQHKRALVLTARKLVRLVDALLRKNQIYTPGRSVHT

SEQ ID NO: 48449 - protein, 382 aa, unidentified
MNQVTLKSGSNPPASRLCIWRAGSSTERLEFLPCYDHYIALDWSKTNMSIARISNKRPGKIKIIDTCSDIKELKHYLNNQEGSKVLTIEESTPAHWLYVELRDYVDRIIICDPYRNKLLSDGPKNDPIDAKKLCSLLKSGMIKEVYHTTDELYQLRKYVSAYEDLIKMGVRLKNQRSGFLAQIGKPKKTSERNFDSTSNFILKNIDASIESYQSGKEEYEKLFEELCRKNKRLKYLKTIPGIGPILAVKIIAMVIDPKRFRSIGKYLVQRILRTYCGLVKHIAESGGRIYGKRTPRFNRVLKSVYKTAASVVINGKSPIREYYDYLISIGLTEYNARHAVARYIAKISFGILKGETRYQPYLWREKKQQKNNDDSSKKRKEV

SEQ ID NO: 48450 - protein, 343 aa, unidentified
MEHYVGIDVSLEESSVCIVDATGTIVREVKIASEPEALVRYFDELELSVGRIGLEAGPLSQWLHAGLVVAGRDAVLLETRHVKAALSAMTVKTDRKDARGIAQLLRMGWYRPVHAKSVTCKDSRALLVGRKLLQGKLLDVELSIRGILRGYGLKVGDVSRGRFEARIRELTAGHVALETVIGAMLAARTALWCEFTKLHREMLKIARADKVCRRLMSTPGVGALVALTYRSAVDDPTRFGKSSTVGAYFGLTPKKYQSGETDRDGGVSKVGDAMVRTALFEAAHIMLTRATRFSSLKHWALDVAKRRGMKRAKVALARKLGVVLHRMWVDATDFRWSKAATMA

SEQ ID NO: 48451 - protein, 420 aa, unidentified
MDLIVERCAAIDVAKKEVVTCVRTPGPDGGERRKQVRTFPAFTQDLEAMADWFSAEGVTQVVMEATGSYWKPVWYVLEERGFELMLVNARHVKIVPGRKSDVLDAEWLAELLEHGLLRGSFVPPAVIRELRDLTRYRKRLVQSHTSEAQRIEKTLEDAGIKLDIVASDILGVSGRLMLKALVAGERDVDVLAELAKARLRSKRAELHKALRGRFREHHALMIGMALEHVEYLEASIATLEERIDALFTTNTSEAGVPFTVARDRLCTIPGIAERGAESIIAEIGVDMSRFPTAGHLASWAGLAPGNNITGGKRHSGKTTKGDRWLGEILNQCAWAASRKRDSYLSAQFWRLARRIGKKKAAVAVAHSILVICWHLLTNDCDYEDLGGDYFTSRINPDKQRDHHIEQLQSLGYRVILDKVA

SEQ ID NO: 48452 - protein, 408 aa, unidentified
MDLTPMHKRVIALDVHQAKITACAVIEHDDGQVEVTKRDFGAFKRDRRALAQWALEMAPEVVVMESTGVYWKSPFAALEAVGLIAWVVNARHVKAVPGRKTDMADAQWLATLARAGLLRASFIPPVQMRQLRLVARQRQKLVGMCSAEKNRLHKVLVDAGIRINVLVADIHGQSARAMVKALIAGQPMHEVLNHKGRLRASRQELCEALSTEQFSAVHRFVAQEIVQHIEQIEQRIARMDQYLLQGLQPWQPQLRLLQTLPGIDEQGAAMLLVEIGADMSVFGSAERLASWVGICPGNNESAGKRKTGRIRKGNAWVRRLLCEFAQAAARTRCALKAKFDALTIRKGHKKSVVALAHKMLRTIYAMLSNGSHYQDKEVDYEALNVQRNAPRWIKMLRKHGFIATPAAA

SEQ ID NO: 48453 - protein, 340 aa, unidentified
MGYYVGLDVSLKSTHICVLAGERRVVWRGVSDTQIAMIAEHLARWGKQIVLVGLETGSLTPWLYHGLSDLGLPMVCMDARRASDALKARAEKTDKADARALAEMLASGWYSAVHVKSLESHQLKALLGARDQLVRVKRQLYGQVRGLLRPFGIKISQRVGAKSFDEAVRMACNKEDVLYIAVGALLDTLANVASQIAVLDKQVRTLAQKRKACWHLMSVPGVGPITALAFTAAIEDPHRFGSNRDVGAYLGLTPKRYQLGERDVSLSISRQGDEMVRHYLYEAANCLLTTVTGASALKSWGLKMVKRCGAKRARTAVARKLAVLLLRLWKQESHFEVQSA

SEQ ID NO: 48454 - protein, 475 aa, unidentified
MEKKFSNKRDEVIKLLDRQKIRNVKDLESYKLSECHPHSAGIDLGSKDIYVALNPAIAAEMGLAIVHRFATFTNDLLACKDLLVSCGVKTVAMESTSIYWTTIYFILEEAGIEVFLVNPKKFRMVPGRKTDISDCQWLQTLHLYGLLSGSFHPPLQIDMLRSYMRERDSIIKERSTFIQRMQKAMVKMNLLLHNVIDDITGKTGIKIITSILEGQRDPALLASYRDPHCKKSEKEITEALTGYYKEDQLYLLKVNYQSFCFFDKQICDLDKEITKLLKQIPCKKEKKEKRPDNGKSNSKGKNDIRTKENLEDLLYRILGTDISRLPGFRSLALLQVISEVGIDMSKFPTANHFAAYLGFVPRNKITGGHVISSRTDRIKSSAAQAFRKLIPSISQTKTALGAFYRRLAPRIGKAQAIIATCRKLAILLYNALAFGMAFIEHGEEMYQQKQEAYERRKMLNLAKKFNCKIVENIAT

SEQ ID NO: 48455 - protein, 360 aa, unidentified
MARSTLPGNNTEVPKALITGGVDTHLDVHVAAALDHIGGLLGTESFPTTPAGYRQLLAWLGSFGTIGQVGVEGTSSYGAGLTRALQAAGVTVVEVDRPNRQVRRRVGKSDALDAVAAARSVLAGTALGAPKAKGGNVEGIRVLSVARLSCVKARTQALNQIRSLVSTAPADLREQLRSLTIKQTVATCAAYRPRAGSDVETVSKVALRALARRVQYLDEELTELDTRRTALVAEVAPALLEAFGVGPDSAATLLMTVGDNPQRLHSEAAFARLCGVAPIPTGSGKTDGYHRLHRGGDRQANSALWRIVLVRMSNDPTTKAYVERRTKEGKQKLFIMRCLKRYVARELFQLLPQPEQPLTQ

SEQ ID NO: 48456 - protein, 317 aa, unidentified
MIYIGLDISKHRIDVQILKGEDYERHEVVNDAEGWQKLITIIKRKRHKKVHICCEYTGSYYFGAAVALAEAGYDVSVVNPLTIKQYALQELTRNKTDSEDAKLIARYCKVHKPPLWQAPTEASRRIRQINRRIEQLTKMHVAEQNRQKEADEDMRESHATLLRHLAEEIAMQRKKLQELIAEDADLRGKFELMQTIPGIGEITASALLSPLASIERFPSAKHFVSYLGLSPYRRESGDVRRRGKLSKMGDRYLRKMLYMPARSACLRSRVFRDWAREMMQTRHPKVVYSIMMRKLATYAYKIIKENQPFNPELALKH

SEQ ID NO: 48457 - protein, 393 aa, unidentified
MALFVGIDVSKEKFDACGIGDDGTKVFSVICPMNREGFDKLIVELPTRETASLLFGMESTASYHIALFSYLTAKGYRVAIINPLLIANFAKLSLRKTKTDKKAASTIAEFLLLKKEALAMETEPPRLSELKDLSRRRERLADQATALKNDMKRILSVTFPELETITGVFTKSTLRLLTQFPSAHAMREAGYDAVATIVTSHSRGRKSAASVKTLMDAATTSVGVASSSKDLILTQEASLLLHVQEQAEEIMKVIVRLSDEKMKRDTEILTSMKGIGDKTAFSFLIEMGGDIRAFENDKKLIAAVGLDPTVHESGKYKGQSKISKRGNRHLRRVIWLMATKVIISNEVFRAYYFKRRKDGLIYKMAVLATAHKLIRVMFSMLVNQRHFEPERRK

SEQ ID NO: 48458 - protein, 470 aa, unidentified
MSSAIGIDPDSTGFVCALVDSQSPRVTTKGFLVTEEGLKDFLCWVRQHGEALVVLEGSHGQSRPIEKALRDAAIVFYSFKPADADKFRKAVLGQNKDNERDAESVARYALALESQGRLERHKKVWFPDMDLQLLTRRWGSLSEQITAEVNRLWKLLRYASADLYLALGGKNPHSDCGEHKALKNQGILTLLISVPDIGLWKTLSEEQIFQAMGGDNYKGRRQLIQELRPVMPSFPSLSHPMATLLKASALQIQRLREEQQDLKRALEDLSPARADIQKLLGIRGIGVTTAATMSAELIDIRRFSREDSLACYSGLGMNEHSTGQTLRMVPTHQFNRRLKDAFMTAALNFVLYNPDSHLAGYHKNLIKRGMSRLQANKRVARALVRVIYRLLVGVATTNTGTQAEEDLKRGESEVASGTSRSGRSHKSNTSLSAPKRSKAKKPTEVKAAESVITPVTKARRPRRKTLKQIA

SEQ ID NO: 48459 - protein, 351 aa, unidentified
MMIIGVDYHPSFQEIAFLVEETGEYGEQKLNHSEGEAERFYRDLHARGIHVRVGMEATGFSRWFERLLAELDFELWMGDPAEIKAKRVKKQKYDREDARLLLRLMRENNFPKIWVPSPENRDLRQLLWHRHRLVQMRTRIMNQLQALAMNEGKRWKKKLWSAQGRTELEKLPLAPWASRRRRELLELLDRLDPSIEELSKAVEREARKRSDVLRLMTHPGVGALTALAFVLIIGTTERFERGKQIGTYVGMIPSEDSSAGKQRLGHISKQGNSLLRFLLVEAAQAAARINPHWRRRYMHLAMRRHKSIAKVAMGRRLGVRLYWMWRNGCDYSSSLEFGSYVGQLGTGHGVK

SEQ ID NO: 48460 - protein, 342 aa, unidentified
MKIIGCDFHPSFQQIAMVDIETGEYTERRLTPEEARQFYAELEGPVLVGMEACGNTLWFERLLASLGIELWLGDAARIRAMEVRKQKTDRRDAALLLRLLLENRFPQVWVPTPAQRDTRQLLLHRHKLVCMRRQVKNELQHLALNQGVQQKRKLWSAAGRQRLQELPLTGWTARRRQDELELLDELDGRIAKLDVAAQQEAEKDAVAKLLQTHPGVGPITALAFSLTLGEIERFQRSRQVVSYLGLNPAEHSSGGRQHLGGISKQGNPMLRSLLVEAGQSAARYVPELKRAYQRLKHRKHSGVAKVMVARKLAVRLFWIWKTQQPYTAARTQGSPSHHVVAG

SEQ ID NO: 48461 - protein, 307 aa, unidentified
MESYVGLDVSLKRTSICVVDRTGKVLCEGTVNSAPEAIVEFVKSKAAGAVRIGLETGPTSTWLWTEIKALGLPVICIDARHAKAVLKMQINKSDRNDAFGIARIMQCGWYKEVRAKGLDSHAMRALLESRALLVKMKRDLENQIRGLLKNLGLIIATARGQAFHARVQELVAGKPFLAVAVLPLLETRNGIVRQIADLDREVLILARNDDQVRLFMTVPGIGPITALCYRATIDEPSRFKRSRSVGAYVGLTTRRYASGEVDWTGRISKCGDAMLRSYLFEAAGVLLTRVQKWCPLFDIEEPAAAHW

SEQ ID NO: 48462 - protein, 412 aa, unidentified
MRLFVGDDWAEDHHDIELMDGSGRRLAKARLPEGVAGMARLHAMIGEQLGEAGGEVADEDVEVLVGIETDRGPWVAALVAAGYTVLAVNPLQAARFRDRLGVSGAKSDAGDAHVLADMARTHSHELRPVAGDSAQAEAIKVVARIHKTMIWERTRHTQRLRHALRDYFPAALAAFEDLDAADTLELLAKAPTPALAARLSLSQISGALKRARRRDVAAKAAAIQAALRTGHLGLHEIVTQAHAASVQALIAVLAVLNTQVKTLQGQVEAHFGQHPAAEIIRSQPGLGTVLGARVLAEFGDDPDRYDSAKARKNYAGTSPITRESGKKKSVLARFVHNDRLIDALLSQAFGALNTSPGARAYYDRQRARGAGHNAALRQLANRLVGILHGCLKTATLYDETTAWSHHAETLAA

SEQ ID NO: 48463 - protein, 469 aa, unidentified
MAVMIGVDPHKASHTAVAISAAEEPLGELRVRACVVQAERLLAWAAAWPQRTWAVEGAGGTGHLLAQQLLSAGERVLDVQPELGARVRLLAAGDVNKNDPNDARSVAVAALRSAGVREVRADDHAAVLKIWSKRYRDLGRTRTQVVCRLHAVLGELIPGGVPKVITTARAGRVLKALRPEGAVQAARCELAAALLEDLRRIDAGIRETRKKLAVAVAVAGTSLTGLFGVGPVIAAIVIGDVREVSRFPGRDHFAAYNGTAPIEVSSGRRKVYRLSRRGNRRLNHAIHMAAITQIRHRHSQGRAYYDKKLAEGKTPKEALRALKRQVSNAIFACLQADARRAAARAKGPGGQQGNDSVASAAGSHPKRRLFGQATPGPGHHPTTVTGGPPPGPARSRGTAGHSSIAATLPPATPKVQVERPQRSEDERPGGTARRRPHSATRKARGQRSPAKPQHPKSTSQATERTDGTP

SEQ ID NO: 48464 - protein, 331 aa, unidentified
MKKKDVIGIDVSKLTIDAYVKIAQVHAEFSNDNKGFRQLVKWIKKHTDCQIEELLICFETTGLYSLQLASFLSQINIDFVMENPIQIKRSMGMVRGKDDHIDSQRIAEYAYMRKENLKHTKLPSEELIKIQNLLAMRERMVRQKAGYQASLGEYKRVLVQQQQKDLFLLLNNMISALKKQILKADKILIEIIQSNKKLMNTYTLLTSIKGIGVILAANIMVTTICFTKFNDSRKYACYCGTAPFKYSSGTSIKGRTKVSQMANKKMKALFNLAALSAIRHDPELKLYFDKRKANGANGMSTINIIRNKIIHRVFAVIKRGTPYVVMAKYAA

SEQ ID NO: 48465 - protein, 346 aa, unidentified
MDTLTHYVGLDYHQNSLQVCIMDQQANIQCNRRIDNDLVSLLPLLHRAGGVRKIAIEACEGAAQLGEALAQAGSASGASGASGGGGWTVELAHPLYVNKLKGSTDKTDAGDAKLLADLSRVGYLPKVWLACKSIRALRQLVNHRQRLVNDRKAIKLRVGAILRQQGVKIQGTRWSKAWLNALANESCLDESSHWLIDELLAELTFISQRIDTVCKRLKQQTAEDAVVKKLLQIEGIGPVTAWALRASIGRFDRFKKAKQLCRYCGLSPRNTASGERQTTGSLVGGVDRSLRALLIEAAHRLVRTVPRWRGLCEQLMRRGKRKNVAVAAVANRWLRTVHHRMMVVCD

SEQ ID NO: 48466 - protein, 340 aa, unidentified
MSTVSVIGLDIAKNVFQVHAIDERGEVLDRRKIRRAEMLVYFGKLSPCLIGIEACATAHYWGRMLGALGHEVRLMPPQYVKPYVKRSKTDAADAEAICEAVSRPSMRFVGIKSSDQQAILVLHRSRDLLVRQRTMLSNALRGHLAEFGIIETQGMAGTMRLVAVIADAGDARVPDLARQVLGLVAEQLHGVKLRIEDLKRAMMAWHKQSPVSQLLAGIPGIGPVTATAIAATVPDASVFASGRQFSAWLGLVPRQHSSGGKQRLGRITKRGDGYLRRLLVTGATAALERSKSTRARPWVQAMLKRHPKKKVAVALANKMARTAWAIMNTGEVYRAPQAAG

SEQ ID NO: 48467 - protein, 356 aa, unidentified
MIKNHTPKSKSEIPHQDEKVTYVGVDLSKLKLDVMFDKYKIYPNSDSGCSRFCRDLARYSNVVVVYESTGSISLQFGAMLDMNGIQRCQVSPRKIRHFAKGGIKEAKTDKLDCEVIRNYAIAYSQYLKINTPMNKNYAEMRELQRVERFIVQNIAKTKQALAACKSEFARKVLNDKIMADQQQRKLVNAQLHRLIKEDEYMVRKMRILMQEIGVGKETAAALALELPELGTLSRKEVAALVGVAPFNYDSGNKIGKRFIRYGRKNIRNLLYMCVRAALNAKTENVYHKRWNQLERKKKKPSLYINEPEDKDYKRRMVACMRLMIVRLNAITRDWIAEGCPDIIQSSKNNTAIAIKK

SEQ ID NO: 48468 - protein, 411 aa, unidentified
MEHIVARCAGLDVHKESVEACVRRIEANGRVHSETRHWGTMTRDLLEMADWLEAEGVTDVAMESTGVFWKPIFNILESRFVVLLVNARHLKQVPGRKSDVRDCQWIAQLLQCGLLKGSFIPPRPQRDLRDLTRHRTQLVEAKTRTINRIQKVLEDANIKLASVASDVMGVSGRAMIQRLIGGETNPCKLADLAQRQLRGKIPDLEKALEGKLTDHHRFLLKLLWKELSQQEELITELDSKIEEHTRPHAAEIERLDAVPGVDRRVAEVLLAEVGPDMKPFPSDEHLSSWAGMCPGNEESAGKRHRKRITPGSRWLKQTLAQAAWAASHTKNTYLASQYRRLAGRRGKKRALIAVGHSMLVIYYHMLKAGTSYADLGGNFFDRLEPKRLTHYYLKRLERLGYKVSLETSDMG

SEQ ID NO: 48469 - protein, 408 aa, unidentified
MNPLFVGIDVSSKNNVAYLMKPDGSKHSSFSVQNNLGGAKLLSERIVSALGSMQLERVVIGLEATSIYGDSLVYALREDGRLGRFQRKIHVLNPKQVRKFKEAYSDLPKNDWVDAFVIADHLRFGRINREVYMDDYRYKALQTLTRARFDVIQNLTREKQRFANYLFLKCSGMAQDKDIQNTSATTIALMEHFETVDDLANADLEELTAFITETGRGKFADPDATAKAVRAAAKGSYRLPKTVNDTVNQAMAVSIASMRALKGQVKVLDKAIEQQFEIIPNTLTSIPGIGKVYSAGIIAEIGDIHRFDSQASVAKYAGLVWNRSQSGDFEAEHSRMIKSGNRYLRYYLLEAANSVRRCDSEFRRYYDLKFHEVNQFQHKRALALTARKLVRLVFRLLKDNRLYIPPEG

SEQ ID NO: 48470 - protein, 353 aa, unidentified
MFDRTTVGVDLAKQVFSVCVVDARGKVIGRHELRRDSLSRFLQQLAPGTVVAMEACSSAHYWGRLSLSYGLVPRLMAAQFVQSFRKSIAVKNDRNDAEAIATAARQGNMRFVPLKSEAQQARLSWHRAREGYKKENLAIMNRIRGLLAEFGVVINRSAVALSRTLARLDEYTLPGTLVTLIRQLQQHWHVIQTAMKDCEKQIKQHADEDERCARLRKLTGVGPLSADAIVATIGNGNEFANGRQCAAWMGLTPRQHGTGGKVVLGNITCRGDTYLRTLLIQGARSSVQQARITALEKLSYEQQWILQLSTRLPFGKVVVAVANKHARQIWAMLARQEHYDADAWRQHPMHITA

SEQ ID NO: 48471 - protein, 400 aa, unidentified
MSQASLFVGIDLGNEHHALCIVNDVGKVVLERTVSNDLTAFEAVRRCMGDLDPTAVHVAVEDKNNALVDVLLAHGFRVSTINPKQVDRFRERGNVAGAKDDRRDARVLAMTLRSDGELYRLIDVGSPETVMTRSLSASVDHVTEELRRYSNHLRAQVLRCFPTLLGLCSGTDEPWFWDLIIELMPVGDVDEKVIAGILKRHRKRKLTAAAVLSVIRHNRLVPAPGVAEAATGEVRRLVEKLRLIERQRREIVTEREQVLETMKGSPEKPSDVDIVRSLPGFGPKTTAVFVGAALSLIKRDGGIAIVRAIAGVAPVTRQSGKTRIVQMRRACDPRLREALFHAAMAAVRHDTRFHDHYARLRAASHNHARALRTIGDRLLGVLDAMLRNRTTYRPMPTAAA

SEQ ID NO: 48472 - protein, 349 aa, unidentified
MNKKLFVGIDFSKETFDAAILKVSDDSSIDPKIIGNEQFKNDVPGCKRFVKWLNKTCALAGDYSSVLVGGEDTGNYSITLPKQLYVLGIDCSLQNAYSIKCGSGKIVRDKTDKMDAEKIAYYFYRFRDQIRLYKPLSKDMESLERLYSYRYGQVRERARLKCQIKEYKHILKSEPNDETLKFMIQRLEKQERFLKREIKAIEAKMVEIIKANEELNEIHKCLLSVPGIGKITSLLLIVVTRGFTRFDNPKQLACFLGVSPHPNQSGTSVQNGNHRSWFADPYFASLLHMAALSASRFNSKFIDYKKKLKSKGKPHLLIMNNIKNKLLTVAFTIATRRTKFYSDYDAKRA

SEQ ID NO: 48473 - protein, 343 aa, unidentified
MNEVTTIGVDLAKSVFQVHGVDASGQVVLRRQLRRSQVLPFFDKQAACVVGLEACATAHHWAREITKLGHDVRLMPARYVKPYVKRNKNDAADAEAICEAVTRPTMRFVAVKTEEQQSVLMLHRTRQLFVRQRTMLINAIRAHMAEFGIVAGVGRNGVERLLRLIDEGSDERVPPVARECLQALRTQLVLVKRQILEADRRILAWHRSNELSRRLETIPGVGPLIATALVASIPDPHAFGSARDVPAWIGLVPKQNSTGGKERLGSISKAGNRYLRSLLVIGALSVIRRAKQVGYTRRAWLAELMARRPVKVAAIALANKIARVAWALMVSGTRYREPVPQAV

SEQ ID NO: 48474 - protein, 354 aa, unidentified
MPRKSNRLETVATIGIDIGKNTFHLIGLDKTGAIVLRQKLSRSQVNARLANMSPCLIGMEACVGAHHLSRQLKALGHDARLMPARYVRPYSKGQKNDFRDAEAIAEAVLRPSMKFVAIKTVDQLDLQALHRVRERLVCQRTSVVNQIRAFLLERGIAVRQGLRALRSEMPIILATPDKLSPRMIHMIEDLCTDWRHLDGRIETVSDEIQTLSEQDDGAKRLMTVPGIGPIISTATVAAIGSGDVFSKGRDFGAWLGLVPRQMSTGGRTVLGPISKRGNRYLRMLFVQAARAVLLRPQSWEKHGLKSWIEAAARRLNRFKLAIALANKIARIAWGVLHGGRNFEVKPTRPASQAA

SEQ ID NO: 48475 - protein, 330 aa, unidentified
MYFIGCDVAKLTLDLAWRNPTTGRWSMAEKIPNDKAGWRVLIRWAQDRLAVDLAAISVVMEATAVYHLRLATYLSQQGVKVLVANPGRAAEYGRSQNRRNKSDRLDARSLQRYGTGLERPHWFQPDPPQIQELKALLSLLDQLDKDQRRWQNRLEKATWQEAANPVLKAIQRQLHNLQREQKRTQQAIDDLIQRDAELRHTQRLMCSIKGVSSKTSQRLLPLVHGGRFDSARQLAAFLGLTPSHASSGTSLHKPGHLSGRGDAVLRAKLYMPALSATQHNPQLRAFYQLLLARGKTPKQAITAVMRKLVHLCYGVVKNQTPYQDNYVALS

SEQ ID NO: 48476 - protein, 309 aa, unidentified
MDNFIGLDISKSTVSVFIPQGELEIEIANTVKGFTQLCSKLKKRYKKEYDSLVFVYEPTSSYSSTLELFCAHKQIRVFKINPKASHNFAKALSIRHKTDKVDARMLCQAGMLAKEEEIHIPVVDVIVEQINDLMSYYQLLVKQRVQTSNHLEKLQHKESTTTLKKALEKEIFAFKQKEQHTINEIKRLIMENSMLALKYQSIQTIKGLGDIATIALIHLFLKYPNANQKQIISLSGLDPIERTSGVSVRGKTRISKAGNKLYRRALFMSTMVAIRFNEEMKCFYDRLKEKGKHTTVAQIAVMKKLIIIC

SEQ ID NO: 48477 - protein, 341 aa, unidentified
MSVMIGIDPHKGSHTAVVIDSDEMVIDEVRVKATANQLVELREWASGYQERCWAVESARGLGYLLSQQLVAAGERVLDVPAMMASRVRVLGSGKSQKNDPNDARSVAIAALRHPGLVMVVADDHTRVLGLLAKRHRDVARLKNKAACRLHALLMELTAGGLGSEMTVNKANSLLGGVEVTDEVTRQRVVIATELIDDIARFESQMRASKKRIRTAVAASGTSLCDVRGIGPIGAAIILGSVGDISRFPTAGHFASYNATAPIDASSGNQNRHRLNPRGNRRLNHVLHMAAVSQLRYPSQGRDYYEKKLAEGKTSKEAIRALKRRISDVVYRRLRADARRTS

SEQ ID NO: 48478 - protein, 482 aa, unidentified
MTHRRLVGIDLGIASAHTVRVLDGEGNTLHKRKAWPTVESLCEVEEVALTGCPAGSRLEVVVEPTGPAWLPIAVFFTRRGHLVYRVSSQKAADLRRFLSRHTKTNGIDADTLARLLLFDPAGLRVLELPGSERAALDRRVRATDRLTQGAAEHKRRIKDLVRQLLPMTPLTGDLGLADMAVLERYADPNALVKLGAKRLTALIVRASSHHQGAERARQWLEAAEASLALYDGHQAVAFADLAAEVASEVRLLRATQAELARHVPERETHDRAVDPDELARSIPGLAAVGGPALVACMGEPTRFTSGKAFRSFTGLVPRASETGETDRKGQAMSKAGSSLLRTTMVRAADHARKLDPQLARIYHLQMVERGKDHLGALCVVAANLAERSWTVMHRGTPYVICDVEGRPVSSEEAKVIIAEQFTVAPEVRARRRSKKLGKAPQKVLAGQSKPCTQGAGTRGDLPRPASSSARDPRVKQLIATAP

SEQ ID NO: 48479 - protein, 410 aa, unidentified
MVKENFIYVGIDLHKETHTAVMIDCYNQKLGEITFPNRPADFPKLVTKVKKCNTDAKEVVYGLENAYGYGRPLAVWLIDKGYFVKDVNTAISHRQAKHRGAMYRKSDSDDAEAIALATLNMLDKLPDACPNDAYWSLGQLVHRRDNIMKQRTRLVNQLHEQLCIAYSSYKSFFNDISRPTALYFWEHYPSRKYLRGKFVEDLRKELVPVSHNKCSTKTCQAILDAVAGDKVKNIDYQDARDMVTLSIVSDLQHYDSQLMEVDKMLEQMYKMLGCTLTTIPGVNVITAVKILAETGDIKRFSNANKLAQFAGIAPLHLSSSGKGKDFATKQGNRRLQATIYFLAVQMIQVSSKGTPRHPAFRAYYEKRKAEGKTSQQALICISRRLISIIYGMLKNGTEYRMPVVESAGEK

SEQ ID NO: 48480 - protein, 380 aa, unidentified
MTTRYFGMDVHKDYVVVAAVDASSGEIVEPVRVDMPKLKEWIDQHLTPDDEVALEVSNNAWHVYDLLAHQAGQVVVSNPAKTRLIAQARIKTDKFDALALARLLASGFICDIWVPVSKVREQRTLAAHRQRLRKQSTQVKNRIHALLRRHDLRCPTSSVFSPEGRAWLESLDLSPIEALERQQLLAQLELAQTQLDEANTFIAQRAQYDPRVTRLMQITGIGFFTAFSVLAAIGDIHRFPSPKHLASYAGLVPSVHQSGQKHFTGHITKAGPPLLRWLMVEAAHIAIRWDPHWQAVYQSIAKRRGNGVAMVAVARKLLVVIWHLLTHEVPYRYLNSSTFTRKLKEWARLIGSENLLAENSRAFVAHQLQVTNLSLVVEGR

SEQ ID NO: 48481 - protein, 375 aa, unidentified
MAEITRALIARVGVDLAKQVIQVHAVDVAGRRVVARALKREQFLAWCAQLPAGCLVAMEACSSAHHWARKLRALGLDARLIAANFVTPYRMEGKNGKNDATDAAAICEAASRPGMRFVPVKTCEQQGVMSLHRVREGLKEERTACINQIRGVLTEFGLVFGKSPKVLRAVLADVIEDASNELSTMARLVIQRAFDHWRELDEHLRWCDRQVGQHVRASPAAKRAAKVIGIGELGASALTAGVGDFTQFKSGHQFGAWLGVVPRQASSGGKIRLGRITKRGDDYLRTLLIQGAKSAVMNADKRDDPTSRWLVQLTARVGWQKACVAMANKNARILWAVMTREEGFDPKHVSIKPQAKQAARQPVAAAPPSPAGCAA

SEQ ID NO: 48482 - protein, 362 aa, unidentified
MQVRHIFVGIDLGDKNSVARIAVDRQKSERIGFVNSQRGRARLLEELQRRAKLVGATQIYMAYEASAAGFLLCDEAESAGLQCWVLAPTRMEKSVEQRKHKNDDRDGEDVLEKVRAHVLAGSRLPSVWVPDRQTRDDRELVRTRLELAEKQSRMKTQIQMLLKRHGLEKPSGLGAGWTIRYRQWLEALTAVESVGWGARQALGSLLRQLGWIEQEIEWIQKSVQQLAAAPRHEAVIEELRKENGVGLLTAMVYRTEIGQASRFRRGRQVGKFAGLTPTSHESGQQNDRKGHISRQGPPRLRKMLCQASWVHIAHDAQAAQLYHKLVSRNPKKKKIAIVAIMRRLAVRLWHRMRRVEMESAVA

SEQ ID NO: 48483 - protein, 407 aa, unidentified
MNENGKRYIGLDVHKHYLIALGVDERLEVVLTARRVELSNLESWMKKNLTKQDEVVLEMTTNTWQLYDELVEHAGSVTVVHPPHVALITRSQVMTDKIAASILARLLAKGLLVGIWVPPQEVRELRGLVAQRQKMTRLATQAKNRLHAVIQRHHLKLPDGNPFAKTNNGWWESLSLGRLEKMNLQSDLETLQFSEKQESRLHEEMTGIAAENEEIGRLLHIAGFGVITAVTVYAAIGDIKRFAEAKKLVGYAGMGTHVHDSGMTTRTGKITKAGRRDLRVALVEAAHVAANSHPHWKAELARLEPRLGRNKAIVAIARELLVTVWHVLARKVADRFAEPEKVSKKMLHFAYEVGKANRAGKSAAQFARERMDTLGLGSELTSIPWGLKKPIPLPPSKLKKESAVPNK

SEQ ID NO: 48484 - protein, 328 aa, unidentified
MNKSHFCVGIDVGKDELVVAVEQGKPRVFGTSMAEIRRLELWVLKQAGERQVHIGMEATGVYSRGVAATLSRHEQFTVSVINPAQIKAFGRAMLTRTKTDQVDAGVIREFVRSQSPSAWTPPQPVREQLFALVAQSDAIQQEIQQWKNRQHAQQHHGNIPRTLTRSTATIIRSLERERQRLDDAINQLCETDTALTKDMALLTTISGVATRSAAQILAYGGDSLISRSRRQLDAHAGLVPAERQSGTSVRGKSHLAKQGNARLRRALYMPTLVAVQFNPLFKRFYQRLLEKGKAKKVALTACMRKLLNIIRAMLIKRTPFNLNYQPLT

SEQ ID NO: 48485 - protein, 426 aa, unidentified
MKYRIAGIDVHKRMLAVVIADVAVDGKFQFERRKVGTSPSELCRLADWFVAEQVEEVVMESTAQYWRPVWAALEQRWRPKRLQEGTGARSGQLHLAQAQSNRGAAGRKKDFPDAERLVKRLTAQELRLSFVPDVEQRLWRTIMRRKHQLTRNRVQFQNRLECLLEEAHIKLSSLVSDLLGKSARRMLQAIAEGAASPEAIAALADRRLRATAQQLSDALGACRDIHPVYRQLLKMALEELKLIEEQIDKLDQEMAQLLSAQKDVVQRLAEVPGLGADSAQQIIAEVGPAAAAFPSAKHLASWVGVCPGEEESAGVNYSHRSPKGNRQMKGLLNQAANAAVRTKGSIFEFIYRRLVTRLGHAQAIGAIAHRLCRLIWMILHKAIRYEERGPAVSRSRRERRATLMIRELRRLGYRVEPTGGEAGAPA

SEQ ID NO: 48486 - protein, 374 aa, unidentified
MGTAEMDEITFVGLDVHKATVCVAIAESGRGGEVRQIGVFENRPEVLSRMATRLSKGGRRLSFCYEAGPCGYRLHRLLTGRGHHCLVVAPSLIPMKAGDRVKTDRRDALMLAKLHRAGELTPIWIPDDAHEAMRDLVRARATAVRVLGKARQHLQGFLLRHEQIYRGARAWTLAYKRWLTTVRFDHPAQQIVLQDYIHAVQDAEARRDRLTGQIEELLPSWSMAPVVVALQAMRGVALVVAVTVVAEVGDFRRFVNPRQLMAYLGLVPSEHSSGSIVRRGGITKAGNALARRMLIEGAWTYRMSARVSRKLHDRLELLSAAVRDIAWKAQLRLCARYRRLAAGGKPKVVVTTIIAREMVGFIWAIARLAQPDLA

SEQ ID NO: 48487 - protein, 353 aa, unidentified
MQIIGCDLNARQQTLAMLDTDSGEVVNRTLLHEGDEVREFYSQLRQPVLVGIEATGSMHWFLNLMDELGIECQVGDAAKIRAAEPRKQKHDRRDAELILKLLVEKRFPAIWMPNKALLDLRALLLHRHHWVRLRTQIQNALQAIALANGLRRGPGLWSYDGQAKIAFLPLPPHASYRRGALQTLYRKMQEEIENLTAQVAEQAEQRSGAGLLMTHPGVGPVTALATDVFLGDPQRFADGKALASYVGLIPGERSSGRRQRLGKITKQGNPLLRFLWTEAGVHVVRRDPELKRFYRRKLVQKGLGKARVAVARKLGIRLWIMLRDQIDYQEFCRRGQKQQSSAACAGMPGTRLV

SEQ ID NO: 48488 - protein, 347 aa, unidentified
MSISMIGLDTAKSVFQVHAVDATGKAVLKRKLQRSELIEFFEKLEVCTVVLEACGAAHHWARTLSTFGHEVKLIAPEAVRPFVKKGKKNDPADAAAICVAASQPDIKFVPVKSPEQQGILALHSVRSLLIKQQTMLVNAVRGLAAEFGLTVARGIENIGELKELIDADKAFPARARQAARELFDQQRTLAESIETFESEIVAHARTNEAARRLATIPGVGPITASLIAATVADFGVFKRARDFAAWLGLVPQQHSTGGKTRLGKITKTGDGEIRRCLVIGAQSMVFRASKWKSATGLWITALLERRPFRLVTVALANKMARIAWAVITHSDVYHAKGRSVTAVEAAM

SEQ ID NO: 48489 - protein, 360 aa, unidentified
MATTAVDTTKSGDVVVGIDTHKYVHVGAVFDTTAGLLSTISVPADSRGFSQSLSWAESFGHTLAFGIEGTGSYGGALTSFIRRRGYRVVEVARPDRRMRRLVGKSDTIDAQNAAKAVMAGFATAEPKTADGTVEMIRQLKVAHDTAVKARATTMVTLKAMLVHAPEALRAEMAGKTQIMLARHCAALTTEHLDSPDDSIRITLATLARRWLTLHHEAIELNQHIEALVKTTAPQLVQSYGIGTDTAAEILIVFGDNPQRIKSEAALAKLAGISPIPASSGTTTGKYRINHGGHRQRGAAIYRTVIVRMRFHEPTKTYIARRTAEGKTKRDIIRCLKRYVIREVYHLVNNPVTSANASWQL

SEQ ID NO: 48490 - protein, 385 aa, unidentified
MIYVGVDVAKNTHYACVTGDQKVITAPFSFTNDEMGFTKFQNSFAKYPAADVIVGLESTSIYGENLMAFVAELGYRIALINPIETSSIRKTRIRNSKTDKIDAKSICKYLSREEYRLMQPKELALFQLRGLCRFRQTVKKSNCRLKTQLVSYIDINFPEFGSAFCSVHLKSTYAVLSEFPTAGLIAKANITKLTNLLNSNSRGKFNREKADKLKTLAKRSIASPNRDMAFQIINTIKQIQLIELQLDDIEKRICTIFNDIDSIIKTIPGIGEINGSMILSEIGDISRFSNPNQLIAFAGLDPTVSQSGNFKAKSTRMSKRGSSVLRYALVNAAWNVSLNNDTFKSYYNEKFAQKGRHYAALGHVAGKLTRVIFKILKDNVPFNLP

SEQ ID NO: 48491 - protein, 421 aa, unidentified
MPNIEIGVDSMVKENFIYVGIDLHKETHTAVMIDCYNQKLGEITFPNRPADFPKLVTKVKKCNTDAKEVVYGLENAYGYGRPLAVWLIDKGYFVKDVNTAISHRQAKHRGAMYRKSDSDDAEAIALATLNMLDKLPDACPNDAYWSLGQLVHRRDNIMKQRTRLVNQLHEQLCIAYPSYKQFFNDISRPTALYFWEHYPSRKYLKGKSVEDLRAELVPVSHNKCSTKTCEKILDAVASDKVKNNAYQDARDMVTLSIVSDLQHYDSQLTEVDKMLEQMYKMLGCTLTTIPGVNVITAVKILAEIGDIKRFSNANKLAQFAGIAPLHLSSSGKGKDVATKQGNRRLQATIYFLAIQMVQLSSKGTPRNPVVRAYYEKRKAEGKTSQQALICISRRLISIIYGMLKNGTEYRMPVVENAGENR

SEQ ID NO: 48492 - protein, 440 aa, unidentified
MTTPSLPVINAHAAAIDVGSEQLHVSIAGGPPKVFGTTTGELHALRDYFLKEGVRTVAMEATGIYWLCPYEELEKAGLEVVMVNGKYVKNLPGRKTDISDCQWQATLHAHGLLKPGFVPPEHVRRLQDYLRLRSDHIVMAASHEQHMQKALERMNLKIHDVISDLTGFSGLKMIEAILGGERNPTALVALCDPQVQKRKADRLRAALEGTWRKEHLFALRQAHELWVAYQRRIAECDEAIGEVLKEMVGPEDPQAPAPPPQTKRGGVNAPQIAGLHGLLFRLCGGKDPTQLPGVADYVLLQLLAEVGTDLGRNWKSEKQFTAWLGVAPGSRQSGKRKGSQKRSRNRAGRLFCVVARTVGRSVDKALGGFYRRLKGRRGGLVANIALARKLAVLFWRLMVHGAAYVEQGLKKYEQRVAETEQGLLRKLAKKYNLVLQPKAA

SEQ ID NO: 48493 - protein, 393 aa, unidentified
MRKPRKQKKPLNDLSRSLTPFDLNRTLITVIELSKESWLVAGIVPGVERQPLKKLAADETGLLKLLERWRAEAEKAGHKIDRIAVAFEAGRDGFWLARWLRARGIEAHVIHAASVAVAREHRRAKTDRLDTEQLKRAFLGWLRGEREHCKMCAIPTFAEEDAKRPHRERETLVGEHTTIINRVKGTLARLGIRGFNPKLKKAPERLEHLRTPEAEPIPPNTLAELQRDLARKQLVAEQIRQIEKARLEQLKQAPKAGPNLMVLLLMRVIGIGIETADMLVKEILSRNLRDRRAVARYGGVTGSPDESGKTRREKGLARAGNARVRRGMIQLAWRFLNFQKESALAKWFVARTKNARGSRKKMIVALARKLLIALWRFVRDGVVPEGVVLRPAH

SEQ ID NO: 48494 - protein, 382 aa, unidentified
MKKATRFVGLDVHAETIAVAVAEVGRTGEIRAVGTIPNRPEAVRKLVQRLGGSKGMHACYEAGPTGYTLYWQLVGLGVECDVVAPTLVPVKAGDRVKTDRRDAIKLARCLRAGELTKVWVPDPAHEALRDLVRAREAAKKDQLRARHRMSKFLLRAGRRPSDETKAWSCNYVQWLRGISFEQPARQATMVDYLGELDHVVERIKRLEQSIDDAIKTAPPLLRELVAGLQALRGVAKLTATTIAVEVGNFTRFDKPKQLMGYAGITPSEYSTGSSRRQGSITKTGNAHLRRVLIEAAWSYRHRPGKGHELRARQRGLPEHLTQMAWKAQHRLHRRYATLQAKGKPHTKVITAIGRELLGFVWAIATRIENDHATVSKPLRRAA

SEQ ID NO: 48495 - protein, 382 aa, unidentified
MHCQTSSLHTDETVIHAALELSKNSWLLAIEASEHNRPSLHHLKGGDSSALLAKLHRACEQFECRTGNRAKIVLCYEAGYDGFWLARLLENHGIDCLVVDPASLQVDRRARRVKTDRIDVEAILRTVIAWRRGERHVCSLVHVPSRDEEDLRRSHRERDRLVKERTAHTNRIKGLLFTQGIRDINLRRRRKPLVIDFADLVTGDGRCIPPRLKSEVERELQRLALVDEQLAIAEAERDQVARQCEDSEKKRHQLALLRGVGETGAAILVREVFYRTFSNRRQVGSYLGLAPCPYDSGSSTRSHGISKAGNARARSTMIELAWFWLRYQPDSQLTLWFERRVTGQSKRIRRIMIVALARKLAIAFWRYVETGLVPSGAIVAKV

SEQ ID NO: 48496 - protein, 343 aa, unidentified
MESITTIGLDIAKSVFQVHGVDAAGQVVVRRQLKRRHVVAFFEKLSPCLIGIEACASSHYWSRELQALGHSVRLMPPAYVKPYVKRQKNDMADAEAICEAVTRTNMRFVPIKTTEQQSVLMLHRTRHLLIRQQTAVINAIRAHLAEFGIIAPVGRRGVEELLNVVADPSDKRVPDVVRACIAALGSQLLGLKKQILDFDRMITVWHRSNATSKRLNCIPGVGPLLATALVANVADPKTFRSGRNFSAWIGLVPKQHSSGGRDRLGSISKQGDRYLRSLFVAGALAVIRYAKIHGTKYRPWVAALLARRPTKVAAIALANKLARMAWAMMAKGERYNYPPALRV

SEQ ID NO: 48497 - protein, 345 aa, unidentified
MIIGCDFHPSWQQVCWVDQETGETGEQKLVHATGDSQQFYQQLLAPALIGMEATGNSQWFIELVQDLGHEIWIGDAAQIRASYVRKQKTDKRDAAHILKLMMEGRFPRLWTPDREQRDLRQLVLHRHKLVQIRSRVKNELQHLALNKGLQRKRRLWSEVGQKLLRELSLRPWASCRREDLLRLLAMFDEQIGKLDGAVQQAAEQHAQAKLLMTQPGVGPNTALAFVLTIGDVSRFQRGKQVASYLGLIPREESSGGRQKLGAISKQGNRFLRSLLVEAAQVAVRCDPGMRKEYWHRCHRKPKGVAKVAAARKLAVRLYWMLRTQVAYPEIVGIESSPRVPLVGAS

SEQ ID NO: 48498 - protein, 331 aa, unidentified
MGFEPEPSKKGSWMMAQNDLVVAGIDVAKDKIDVCIRSLSLRRTFASTAEGHRELVSWLRRRKVGKAVMEASGGYEREWAKALRAARIEVRIVDPKRVRSFAQSAGRLAKNDTIDAEMIAWFAETFDEAKGQVYDAAREKLHQMVNARQALKEMQAKLQNQGEHAMPAAVEQAHARVLKTIGIELAKLDAAISAMIRTTPHFAELAEIMESVPGIGRTTSAALIATMPELGQASDKIVAALLGLAPYDDDSGRRRGERHVKGGRRRTRNAFYMACLGAATQHNPVLKAFYERLLAKGKLKKVALTACMRKLICILNVMITRRQQWDATATR

SEQ ID NO: 48499 - protein, 419 aa, unidentified
MVENVHWFVGIDWARQSHRVCLLDAEGRRLGEREFVHGGAGLVELRDWLLEKTKAAPAQIAVAIEMPHGPVVEMLLEHGFLVFAINPKQLDRFRDRFTVAGAKDDSRDALVLGGSLRTDRKAFRQLAIDDPAVIKLREWSRLLDELQQERTRLSNRLRHQLWRYYPQAAELADDVADDWFLSLWQKVPTPAAAAKASEKTIARILKEHRIRRLDAATVLQTLRKTALFVAPGTTEAACVHIRSLVARMRLVNRQIKEAGAALDGLCDSLAAQDEENSSGQSDEQRDVAILRSWPGIGRIVLATLLTEAAQPLRARDYHALRALAGAAPVTRQSGKQRFVIRRFACNRRLQTAVHHWSRVAVQHDPAARQRYDALRQRGHGRARALRGVGDRLLSALCAALRNRALYDANHGSAQAGTSQ

SEQ ID NO: 48500 - protein, 342 aa, unidentified
MDHFAGLDVSVKQTSICIVDDTGRIVREVKVPSEPEALLKVLGNQAYRFKRIGLEAGPLSQWLFSALAEAGLPVVCVETRHMQAVLKAQINKTDRNDARGIAQMIRAGLYRPVHVKTLRSQKLRMLLTHRKLLQSKAIAIENDLRSTLRNFGLKVGMVGKVRFEARIQELVENFPDLAGLVEPLLIVRRALREQIVILHRRLLAIVRDDEVCRRLMTTPGVGPVVALTYRATVDVPARFRKSKSVGAVFGLTCSKYQSGEIDWSGRISRCGDEMMRVMLYEAAQSMLRSKKWSWLKAWAMQIARRRGMKKAIVALARRLAVILHRIWVDGTEFRWTRETAAA

SEQ ID NO: 48501 - protein, 359 aa, unidentified
MRYVGIDYHKRYSVLCATDERGQELKQRRISGNSATGFAQFFSELGEESKVVMEACWNWGWLYDLLAKIDGIDEVMLAHPYKTRLIAEAQIKTDRLHAQTLAELLRGDLIAQSHAPSAATRARKHLLRQRLFWVRLRTMLRNRMHAILDRQQGLERPQLKNFFSRRGQTWLEEVQLPCAEDQPLLTQDLEVAELLEEKIKQLDRSIGQSQSEEEKLLESIPGIGPLFSRVIATEIDGVGRFNSATKLAAYAGVVPTTHASGGRVFNGRLLWQCNKWLRWALIEASWSAIQFSGYFGSIYRCARARGKNKNIAITMVAHRMIKIIWLLLTERRPYTETLPDRSEDGMTVVVRRKVLGLAS

SEQ ID NO: 48502 - protein, 331 aa, unidentified
MSNIIGIDVSKLTLDCAYLRNVDQNKPKRKRVANSPEGFEALLIWVNTVAGLVTNEIKFIIEPSSIYHELIVQFLYQHQATIYLVNPARIRKFAQGMGILSKNDLIDADLLTRYGLMSRKLIAYKPMPQEVCELKSLLNRLDSLERDLRRELNKQEKVGKTSVLHSREKQSMQRFEKQLKTEIIRFKKYIRETIASSQRLKRDFDLLLTIPGIGAKTAWIMLVILSSREFKSAPEVASFLGLNPIEKESGSTRYRRPRLSKAGNGRLRQSLFFPAMVASSKNPDIKAQYERLLAAGKTKMCALGAAMRKLVHICYGVLKNQRPYEVRTQQA

SEQ ID NO: 48503 - protein, 622 aa, unidentified
MVACVRATGPRGGAVAEKERFGTTTAQLSRLLGWLTDRHVSLVAMEATGVYWKPVYYALGQRLDVWLCNAQHVQNVPGRKTDLADAEWLADVVAHGMVRPSFVPPPPIRELRELTRYRKSQIDTRVAEVQRLEKVLQDACIKLTSVASKVLTQSGRAMVEALIAGEGDPAVLAELAQGKLRPKVPELREALTGRFGPQHAVAARRILDHVDFLDASIAALTEQINARTAPYQGVFELLLPVPGFDRLITDTIIAETGADMSRLPSPGHLAKWAGVCPGNHESAGKRRRVGVAPGNRWLRRALIEAARAAARTRGSYFGAQYRQIAKRRGPNKAAVAVAHSLIDLIWHLLSTEQCYQDLGSDYFLRRRDPERETARLVRQLEQLGYQVTLTATLTPAAQVSRAREHERAPTGRELRPRPVGACPRPGAQAPSHSGRISPQRSSVLVPKRSWRPPMAHSLPHGRPVHHRHAGYADVVLNGDCLAREPSAVSPADVGLPVPSAKRVVLGCRPKTGLAWMRDLQAWLDQLIQAGVRVEPVADDVTKGRQPVGRDVEALLVGDTRELFERWLMDWHASLSGWRAVRLSAQDASVLAHASAPSAPRQLGAIDRPDVRCVRRKAHASRG

SEQ ID NO: 48504 - protein, 419 aa, unidentified
MKKIRTKKFKTINEKTLIATVDIGKVMHMGYCRCPDGGEIKPFEFFNNGRGFNEFWKCIRKTMKTSHLEEVIVGFESTGPYGEPLTHYLRKRSVNLVQVNPLHTKKLKELQGNSPNKTDKKDPKVIADIIELGHALTLVVPEGVAAELRRLTHARERNITRRTVLWNQLQDLVFLLFPEFLQIMKDIKTKSAQYLVKHYPTPEDITEYGLNSLAITLRKISRGKLGEKRAQALYKAARGSVGIKEGQKSMLLEIKSIVTLIEASNRFIDDIEGKMSSYLKQIPHSRFILSMKGIGEVTVAGLIGEVGDFSKFNTISEITKLAGLDLFEISSGKHKGKRRISKRGRPLMRKLLYFAALNVVRKGGIMHEQYQRYLKRGMLKMKALIAIARKLLAIIFALVRDHSEYEISCPKIQNLLDAA

SEQ ID NO: 48505 - protein, 338 aa, unidentified
MEQPTLIAIDTSKHVFTLHGVNERGKVVLRRELRRRQMAGFFGKQPATEIVLEACGGSHHWGRVLTGLGHQVRLIAPQYVKPFVKRSKNDRIDAEAIAEAAQRPSMCFVPVKSAEAQAETMILSVRELLVKQQTQLVNAVRGHAAEFGVIAAKGTGHVEALLERIAADPAVPAAARAMFAELGAALADVSARIAELDRKLARLHKANPVSQQLAEVPGIGPVSALTLALTVNARQFQSGRHFAAWLGLTPKQNSTGGKHRLGKISREGNERLRQLLVLGATAVVRLVKPEQGKGSAWLQALVQRRPRKVAAVALANKMARVVWAMMTSGEAYRAQPAG

SEQ ID NO: 48506 - protein, 393 aa, unidentified
MIYVGIDVAKSKHDCFITNSDGEVLQDGFTIQNSMAGFLELYETICSFEPNRSSQNIRIGLEATGHYSNNLIDFLLAKNLNPVVLNPLSTNLFRKGQSLRKTKTDKSDARFITMMLITEDIKPYSPVSYHISELKSLTRHRFRLVQERTRFKISYSRILDIVFPELQGVVWATTQKSMLFMLLELPNTKAIGQCHLTRLTGLLEKNSHGRYNRNKATQIRELARNSIGSNSPALAFELQQIIRSILFLQDEIALLDKQIKSVVQEMDSPIMSIPGISYTLAAMILAEVGDVERFESPAKLLAFAGLEPSTYQSGNFTASHATMVKRGSKYLRWAVLNAARLVCMRDSTFKAYRDRKQLEGKHYFVASSHTAKKLIRVIFYMLKNNQQFVAQSA

SEQ ID NO: 48507 - protein, 361 aa, unidentified
MSESMALVGLDVHQSQTVAAVLDPVTGELSVQRLRGEPARVVPVFLEELDRPVAAVYEAGPTGFALVRVAEERGLDVRVVAPGSIPRAPGDRVKTDRRDAKRLVRLFAAGELGFAFVPSEPDERFRDLVRCIEDARKDLMRSRHRLSKFLLRRGHRFGQKAWTQPHDKWLDKLRFEDSPSQATFVDYRCAVQGLVQRRRTLIGVLEQTVPETSHAETVARLRCFRGIDTLTAAGLCAEVGDFTRFSKPALLSGFLGVVPSEYTSDDKRTQGQITKAGPPHARRLLVEAAHHYRHRPVVGLGLAGRQTGQDPRVVQVAWRCQQRLHERWKHLQGVRGKRTGTVAIACARELAAFCWEAATLD

SEQ ID NO: 48508 - protein, 417 aa, unidentified
MVDVMIGIDPHKSSHTAVAIGLSEETLGEVRVDACPAQAAQLLAWAAAWPERAWAVEGAAGLGCLLAQQLVAAGERVLDVPPKLAARVRLLQAGDTNKNDPNDALSVAVAALRSPAPRPVLAEDHAVVLKVWAKRHRDLARLRNQACCRLHAVLCDLVPGGHPKEISAGQAARILERVTPSDAVARARCELAAEFLDDMRRLDAKLRDTKRKLAAAVRASGTSLTGIFGVGPVIAGTVIGDVRQVFRFGSRDHFAAYNGTAPVEVSSGGRQVYRLSLRGNRRLNHAIHMAAITQIRHKHSQGRAYYEKKLAEGKTHKEALRSLKRRISDAVYAALVADARPAAAACPQGPGGQPGNHSVSRAASSHPARRLFGQATPGPATTIRPGTAGPAQIQTNGGLRRQARHSPAASKKSQATP

SEQ ID NO: 48509 - protein, 395 aa, unidentified
MFIVGIDVAKRSHEVCMITSDGRTVQRPFSIRNNCTGYNLMLEKIRKHTNIKSQIVFAMESTAHYWLALFTRLRKDGYHVILLNPIQTSAMRDMFIRKIKTDAKDSFIIAELIRFGRYAESNVAQDRLLALKELCRNRFYLVDMAGDLKRKLIALIDRVFPEYEAQFDTIFCKSSVALLKKYPTPQKLSNAHLDKLTELLWNSSNGHFGEWKARELKELARNSFGVEDCDGAYSTLILLMLDQIQSLSGKADALEKEISRLFQSFDTTVTTIPGVGPIIGAVILSEVGDISRFSSADKLAAYIGVDPSVNQSGEFQAAHAHMSKRGSPYLRRCIWMASQVAVQRDSMFRAYYEKKTAEGLKYMTIIGHVTRKMTAVIFAILRDHKVYEPVLPTAA

SEQ ID NO: 48510 - protein, 333 aa, unidentified
MSTDPSPSSTSQPAAAPYLGIDVAKEKLDLARDGSDQVDVFANDPAGIARVVALLNEAKPAMIVVESTGGLERPLLEALLEASLPVALVHPGRVRYFAKGVGILAKTDRIDARVLARFGQQAAPRLAEKLSKNEAELRDLVACRRQLINTRTQQSNRRGITFSKSALKSIDAVIKALDKQIESLDKQIRDLLDADDDFKYFDGLLQTVPGVGPGLSATLAADLRELGETDRQQICALVGVAPFADDSGTTRGKRSIRGGRGGVRSVLYMATLSALRVNPVLRAFSQRLQAAGKIAKVRIVACMRKLLSLLNAMIRDGLSWDELNVVKKLAANP

SEQ ID NO: 48511 - protein, 369 aa, unidentified
MGDGIRYVGLDVHKDGIVVAVAEGGLRSEVRDYGRIANTPAALRRLAHKLDREGVTLRFCYEAGPCGYGIQRQLSALGQECIVVAPSLIPKRMGDRVKTDRRDAANLARLHRAGELTAVWVPDPGHEAMRDLVRARLDAVRALRRARQQLSGFLLRQGCHYGRPAWTKLHRRWLAGLKFEQAVHHIVLEDYIAAVEAAQDRRDRLTAQIAAMLSDWTLAPVVAALQTMRGMALVNAATLVAELGDLARFANPRQLMAYLGLMPSEHSSGASVKRGSLTKAGNSAARRLLIEAAWTYRFPARISRELRLRQEAQSRAIREIAWKAQLRLCARYRKLARSGKPANVVTAAIARELAGFVWAIARRVPPAVS

SEQ ID NO: 48512 - protein, 398 aa, unidentified
MITTDIDIFLGLDVGKSDHWACAVTKDGTKIWNKTLPNDEAKLTKVFQELCTKGPVLVVVDQPATIGALAVAVAQHLGITVAYLPGLTMRRIADMYPGTAKTDEKDAFIIADAARTMPHTLRSLQVSDEDEATLGMLTGFDLDLARQITQTSNRIRGLFTQIHPPLERILGPWLEHNAILEVLAAWPTPAALKHTGKARIDAKLEKHGARRHTAWASAIFDALNEQTVVVAGTDAAGLVIPHLARQLISLHAQRADVATHLEAMVEAHPLYPVLTSMPGVAVRTAAIIIAETSGKTFASAASLSSYAGLAPTTRQSGTSIKSERVSHSGNKRLKRALFLSAFASIRFDPTSRAYYDRKRAQGKRHNQALIALAHRRLTVLFAMIRDGSLYDVPVVEAA

SEQ ID NO: 48513 - protein, 460 aa, unidentified
MNSKRSKSRNSSKMPMVHPNAAAIDVGATMHMAAVRADRAPDPVRSFGTFTADLHRLVDWFTECGVETVVMESTSVYWIPIFELLDARGFTVFLVNARDAKHVPGRKTDVSDAQWLQRLHSFGLLRASFRPKGQIAELRAYVRQRERLLEYAASHIQHMQKALTEMNLQLHHVVADITGATGLRIIRAILAGERDPEALACLRHYSCHSSAETIAKALTGSYRAEHLFALEQALALYDAYHEKASACDVRIEAVLKELSIHRGHGHGSAPRASRRRNRTDQANALAFDVREALFALLGKDITTIDGLGPYLSLKLIAECGDDLSSWPSAKHFTSWLGLAPSNKVSGGKMLSSRTRRSGGRAAALLRLAAVTVGRTDTALGAFYRRLSARIGKAKAVTATARKIAVLFYNAVRYGMDYVDPGASSYETRYRTRVVNNLHRRAKAFGFVLQPLEPKVGAAVS

SEQ ID NO: 48514 - protein, 343 aa, unidentified
MQAVTTIGLDIAKSVFQIHGVDAVGNVIVRRQLKRRYVLPFFRKLPPCLVGIEACASSHHWSRELQALGDMVRLMPPAYVKPYVKRHKNDAADAEAICEAVTRANMRFVATKTPEQQSCLMLHRTRHLFIRHQTSVINAIRAHLAEFGIVAPVGRNGVEQLLDVAADASDKRLPEAARACLLALGAQLRTLKAQILNFDRKIMAWHRSSEASKRLDEIPGVGPALATALIASVADPKAFRSGRNFSAWVGLVPKQHSSGGKDKLGSISKQGDRYLRSLFTAGALAVIRYAKIHGTKHRPWLTALLARRPTKVAAIALANKIARMAWAMMAKGERYKEPVALAV

SEQ ID NO: 48515 - protein, 356 aa, unidentified
MTKSIEGGLRMQFYTEQHRHTCGVDLHGRNLYLCVLDPDRKIVLHRRVDCDEEKLLRALAPYREDLVIGVECMFKWYWLSDFCQEHGIPFVLGHALEMKAVHGRKSGNDRLDAERIARLLGSGMFPVAYVYPKEMRSTRDLMRRRSFLVNQRSALINHIQVTNLQYNLPELGKISDPDNRDGIVERFEDPSVRESIQADMSVIDILDVVIARLERMIIKTARGHDHHSFALLKSVHGIGDVIGLTLLYEIHDINRFDSLGGFLSYCRLVKCEKTSDGKKKGTGGRKQGNHHLKWGFSEAAALFLRANPEGQKLHSRLVKKHGKAKALGILAAKLARSVYYMLHRNTPFEMDRFVRA

SEQ ID NO: 48516 - protein, 333 aa, unidentified
MLYVGVDHHTKTSHVTVCDEKGNIVMKKGITSSREGINEILGAYDSPIKAVLEAGFNWGQMYDWLDEVAEEVILAHPLKLRAIAEARIKTDSIDSATLAHLLRADLIPEAYACPADIRANRRALRQRMFMVKVQTMLKNRIGAILHQHSIQRPHVSDLFGAQGMNWLTELVLPEPDWSILREDLLLLEMVRDRIASSERLLEALAKDDRAIDILRSIPGIGKFFSVLIRYEVGDISRFPSAGKFASYTGLIPSTYASGNRVYHGRLTKQGNKCLRWAFIEAVTPAVRVSPEIRVYYERIKNRKGTKDARVATARRIAEITWKVWSEDRFYETR

SEQ ID NO: 48517 - protein, 339 aa, unidentified
MKKVFIGIDFSKLKFDAAIYSVDTKAIVSSEVFDNEQSGYVGFFQWVKENTCCQKSEMLFCGEHTGYYSGNLSVFLYESGYDMWLVSGLEMKLTQGIKRNKTDRVDACKIAEHAYRYQDKVVLFQPVSKALDEIRELLSYRERLVETRKVLTTSANEMKRVKDNTSCDYIYQDSIEYIKKLNASVRDCERRIETLMKQDVALKTNYKLVSSVVGIGLVNAALIMVTTANFTLFDNPRKFGCYCGVVPFEHSSGSSVRGKTRVSKMANRRIKTTLTLAARNSVRFDPELKEYYERKISEGKNSWLVMNNVKNKLIHRIFAVVRDGQMYEKQYIHPLKQAA

SEQ ID NO: 48518 - protein, 388 aa, unidentified
MSCRSESGPVGQRASDHSRATLYVSLELSPSKWLVTSLVSGTDKLSKHLVPGGDCGALLQLLAALKAKAEKQSGMAVVVATIQEAGLDGFSLHRLLEANGAESWIVDPSSVAAPRRARRAKSDAIDGETLLRTLLAYRRGEPRVCSMVHPTSPHDEDRRRLTRERRTLMRERIEHTNRIKGLLMSQGISGYDPLRKNCLVRLGELTTRDGHRLPPRLRAEIGREIDRLELLARQLKQVEAERDALISQVADDADSPAAQLMRLKGIGVETATLLWLEGLFRTFANRRQLAAYAGLAPTPWLSGRIRREQGISKSGNPRLRTGMIELAWLWLRNQPGSALSRWFADRVREEGGRKRRITIVALARKLLVALWKYVNRGVVPEGAALKSV

SEQ ID NO: 48519 - protein, 357 aa, unidentified
MVEGSWVGLDVHARSVVAGVLDAASGELHVKRVSPRSEETVAWLQSLPRPVRVAYEAGPTGYGLARACATAGIACTVAAPSKIPRASGDRVKTDRRDAERLARLLRLGDLVSVRVPNPDEEAARDLVRAREDARGDLMRARHRLSKLLLRHGLVYEASAWTLAHDAWLRRQRFPSRALSLAFDECYGAVAQAKGRRDALDQAIAELAGEPPFADVVGRLVCLRGVSTLTSLGLTVELGDWHRFRPQSLGPFLGLVPSEDSSGERRRQGAITKTGNTHARRLLVEAAWHQRRPVRASAALERRRQGQPAAVRARADASARRLHERWHALESRGRRRTIVAVAVARELAGHCWALATME

SEQ ID NO: 48520 - protein, 341 aa, unidentified
MNEVTVVGIDLAKNVFELAGQNRAGRVVYRKRVRRSKLLETVAQLPPCLIAMEACGGAHHWAREIAALGHRIRLLPAQYVKPYRVGPKNDRRDAEAVCEAATRSQVPAVAVKTRNQQAMQGLHRVRSQLTGQHTALSNCARGLLQEFGIVVPRGHARLRQALAEILAGSDLPEDLVVALHTIAEQLRELGERIGQLTARIAQAARVDELHRRLLSARGVGPITVTAFTATIGDPSAYANGRQVAAALGLVPAQSSSGDRERLLGISKRGDRYLRSLLVHGARSALKAARGKADPLSRWMCRLADRRGHNKAVVAIANKTARILWAMMKSGESFAPERAVAI

SEQ ID NO: 48521 - protein, 498 aa, unidentified
MGDDVMISVDPHKASNTLAVMDPVTKTVIARQRFANTAVGYRRLREFAGGWTHRRWAVEGCHGAGRSLAQRLIGDGEVVLDVPAKLAARVRVYSQGHGRKTDADDAISIGLAALNSTRVAVVRRDDTLVSLRLLCDRRDELGALRTQAVCRLHRLLCELTPGGTHRGLRASRAEQLLVKLRPVDPVDVVRCQLAHQHLDDIRALDAKMTAVRAQIVTLVDATGTRLTELYGIGPIIAGRILAEVERIDRFPSRHHFASYNGTAPIDASSGEQVRHRLSRAGNRRLNHALHMMAVTQIRQPETMGRGYYERKRLEGKTPKEAMRCLKRRLSDVVYWQLVADRRATITQCGSATTPTRTRPTSTSATTPVPRIAPLRRPAHPTVSTGSSHSTGKTAASSASKSSTPAVDSPKTSSTKQKTRAEATRKPRTNSAAVPDRRPTSAPAAGVKAGRRPPGGLGLDAGEDGGTMSGRDAGHAARGPSSKSIGDLICRAEWRRWRL

SEQ ID NO: 48522 - protein, 385 aa, unidentified
MSQPNDLSRSLTSLEQDSTIIAVIEMSQSSWLVAGIVPGIERHPLKKIEPSEEELICLLIRWRAEATKHGRTITRIAVAFEAGRDGFWLARWLRARDIEIYVIHPTSVAVSREHRRAKTDRLDTGLLKRVFIGWLRGEPDHCHMAAIPTLAEEDAKRPHREREGLVRERTRLVNRMKSCLVRFGVRNFKPTLRKAPERLETLQTPEGVPLPPNTLLELRRDMARLRFVMDQIKQVEEARAQRLEQAPQEKSHAMVRLLARVIGVGIETADMLVHEVLARNLRDRRAVARYAGLTGAPDESGSKRREKGLAKAGNARVRRGMIQLAWRFLIFQKDSALARWYQTRTASVGKKRKTMIVALARKLLIALWRLVTTGEVPAGVVLRAA

SEQ ID NO: 48523 - protein, 467 aa, unidentified
MAARSGKPKAKRMSAQLVEDEDYQLRHERVAGIDVAKASGMVCVRLPPGEGKSRRTSRTWEVAATVPDIAAAAAELAAAGVELASMESTSDYWRVWLAVLEDAGLKVQLVNSSQAKNVPGRPKTDKADAQWIARLTEMGLLRGSLVLPAEVRALQVCTRQLVHLTQDRTRYWQRLEKLLEDALCKLSSVVSKMAGSVSVRAMIEAMIAGERDPRALAGLALGPMRAKRAELERAFTGMRFGSQHAFAAAAHLRAIDFLDGEVRALEGQVRERVAGLPAAWGVDADGTTGPGAGLGPDAAVLPAVARLTEVPGISELIAIGLIAEIGLDMSRFATAGHLVSWAGMAPVADQSGPRKGRGKKGQGNSYARRLATRAGSGAANTGTFLGERHRRIRQRPGGGAKKADCAVGRSILVIVWHLLNDPAARYRDLGPGHYAKHSDTARKVRGHIRQLHALGLDVIVTPREDAA

SEQ ID NO: 48524 - protein, 344 aa, unidentified
MEQLSRIGMDTSKQIFQLHGVDASERVILRRKLRRREVLEFFGKLAPTVVGMEACGGAHYWARELTRLGHTVRLIAPQYVKPYVKRGKNDAADAEAICEAMSRPTMRFVAVKSAASQATLMLAGMRDRLVRSRVQLANAIRGYAAEFGLVAAKGPAKIEPLLLRLQTDETIPVLARELFAEHAREYAQLTAQLEVIHAKLMAWHRSNELSRRLARIPGVGPVIASLLAMKTPDPHAFRSGRLYAAWLGLTPKDHSTAGKTRLGRITRAGDERLRQLLVAGATSVVKQAKNRSRGPAWLIELLERKPPKLAAVALANKMARIAWKLMTSGESYDNARLAAQGAAA

SEQ ID NO: 48525 - protein, 505 aa, unidentified
MTLDDGTKIVTAPVNDIKRPLCGGIDVHKKILMAAACVTDKASLNATFYVKEFTTSNSDIRKMAEWFKKYGVTDVCMESTGKYWIPVYDILEQSGMKPVLTHPKYVKQAKGKKTDFRDAVHIANLFRMDLVVASFIPPSDIRDLRELCRYRLKLTYIRTSEKNRFQNSMTISKLRLDSVFSDPFGTSASKIMDYLIHTPKENVQDDAILSLVDKRVKASPDKILDSIRGYEFIGAQRDKLEVISKHLEDINKCIALIDNKLDYYREKYAGIIRHLITIPGISEEAALYILGEIGADMSVWRDSKSLTCWGGLTPANNESAKKKKTTSIGKGGHYLKPLLVQCALASIKSTRKHPYFYRKYQTLAKRRGHKKAIIAIARKMLVSIYHMIKSDSDFKPIDYDKVAAQKQNTTELSMKKVIEFLWEQGIDSAVIRKIESQCPKGQSTGQGEIRKEAPKKMAQKKQPESIARKLVSIGHRKRLANIPKRSSRPKRMLPRINGAVATAQD

SEQ ID NO: 48526 - protein, 371 aa, unidentified
MRNNSKKASEAVTGKMTMGLDLGDRYSYYYSLDDEGQNVESGRVKTSREAMEKRFGGGEPMRVVIEAGTHSPWVSRLLAGMGHEVIVANPRKVRLISDNDGKDDPVDAELLARLGRVDVRLLSPIEHRGEAAQADLAVIRARDALVAARTQLVNHVRGAVKSLGSRLEKSSARSFAGKMGDQVPEALRAALEPVLEVIAEITNQIGGYDQQIRRCCQEKYPETQLLTAVPGVGALTALGYVLTLEDPHRFAHSRSVGSFLGLRPGKDKSGQQDPELRITKAGSPLLRRLLVGSAQYLLGPFGPDTDLRRWGLKLAGRGRKNAKKRAVVAVARKLAVLLHRLWVHGEVYEPLYQSERTAARSAQACSVQSGV

SEQ ID NO: 48527 - protein, 381 aa, unidentified
MDVHSKNYTLCAMEPTIGAEDRIFGEVQVAPDYKEVICFIESLKMKLGFYDEYSIECGYEAGCLGYTLYHQLTGAGIKCVILAPTTMLTQQGNRIKTDKRDARLIAQCLSYGGYHPVYIPTGEDDAVKEYLRMRDDHKLALKKLKQQIHAFVLRHGYQYSGTKWTIKHVTWLKKLELDPMYRETLNEYLASYEEQEAKIERYDKRIEEIASERRYQENVKKLGCFLGIRTHTALSLIVETGDFKRFAKGNTYAAFLGLAPGERSSSDNVNRLGISKAGNTHLRCLLIEAAKGICKGAIGHKSKELRARQSGQPAEVIAYADKANTRLRSKYYKMIRHGKKTNVAVAAVARELACFVWGMMTGNISIRPTTAGTSMPAVRQE

SEQ ID NO: 48528 - protein, 321 aa, unidentified
MRYLAFDVGKDKIDGVFTNLRHKYQYFSCANNKTSIKNLILKNLDLKAKTTKRNIIAGCESTGNYHLILQKVMLKMGFNFKIINPILTKQFTKTTIRKKKTDKSDSLIIAKLLSQDEGTKTNLKWFDSDFKTFTRTSEKLIQTQTKLKLMLYHLKLHQNRLPEMENCFKQLIKYQQLIINKQKQILKDKYKNDKNVKLLQSLVGIGVKTSLGIAAEIIDIDRFPNSKSLVAFSGYDPKIRQSGHALNNQGRLTKRGSPYLRLYIHQAANVARQYDPELKQYYQKKRNEGKKYTTAMCAVSRKLIYRIYAVLKRQTPYVVKK

SEQ ID NO: 48529 - protein, 437 aa, unidentified
MRMNEKVAYVGFDCHKNFSRMTARDKERNILFRQRLDHADRPALRQELKHLPPGTPAILEGTFGWGWFCDELAACGLDPHLANSRKTAAWQQARGIAKNNKLDADLISELWGEPGRWWEIWLAPKEVRDQREWLRYRMTLVKMQTALKNRIHATLHRHGILHPMKDLFGKAGRLFLKELCQGPEPLRDSARQTLAGYLKLLDQIRTQLAGLTRMIRKTVSSSQEGERWRSLPGISWILAYTILAEIGRISRFSHWKQLSSYSLLAPRAHDSGDEDDQTPHGRHVGHMGRRTLKWAFVEAAHGAKRKSAHFRAIYDRRTNGGTRDKGRGKIAVAHELCRIGFSCCRHERDYREERPPRSGSTPPPSIDPISTSCVKQSDLQAPASNQEIPMPLKKERKGEPHVKELKQRKAIARTKIKQTSRPGTGGSCHPMVAAAKS

SEQ ID NO: 48530 - protein, 320 aa, unidentified
MHSIALGIDMAKNSFQVALLRDGKLRHHTFPNTEPGFAQLQAWLAKHGVNHLHACMEATAAYGDALAHVLHQAGHRVSIVNPLRIKGFAQSQLQRNKTDKLDATVIARFCATQQPEAWTPLPAEIQHLQALMRRLQALLEMRQQESNRLEQAGKQPVIGESLNKMIATLDGEMARLRQLINDHIDQHPDLKRDRELLLSIPGIGETTATWLLSEVQVKRYSSARQVAAHAGLTPRHHESGKRVGGRTPLSKTGNARLRRALYLPAVVAKRHNPIIQAFCARLQERGKRPLEIIGAAMRKLVHIVYGVLKSGKAFDPSFAS

SEQ ID NO: 48531 - protein, 338 aa, unidentified
MAIVGGFDLHRRQITFEYVDTASGEVSRGRVAPADREHLRAWLRRLEGQEAAFAVEACTGWRFVVEELERAGAQADLAEPADTAALRGPKRRAKTDRADARHLRELLMAARLPESWIPPAHVSDARTQIRLYKTLVDERTAWLQRVHAILFQLGAPAVPGLARASGRGRLDLAALPPAARLAVEVALRSVDRVNDELDTLRPELARLSRAQSGCRALQAHYGIGPLTSVAIWAELGDCGRFSSSSDAVRHSGLDVTVHSSDSRRARGHLARQGPGVLRWALFEAAVCAARPASPDHAYYLQVKARLGHQRAVLSVARKLTRWCHHTLRALGDQALAPA

SEQ ID NO: 48532 - protein, 340 aa, unidentified
MIRVFASEKQSMNTAGIDVAYKTLAVVIRKAGKPGKVREFANDPVGHRAVIKILKSAGIERVCLEATGTYHLDLAVALDDAGVALMVVNPKTSKRFAEALSKRTKTDAVDAAVLAEFAERMEFEPWQRPDEQVLGLRACTRRLVALIKARTEAKNQLHALEQTKATPSIVLEDVRLSIVQLDIQIKRLREWALEVIDSDAVLKETFELLISIKGVAEASAIQLMGELLVLPEDMQAKQWVAMAGLDPRHNESGTSVNKKPRLSKAGNRYLRMALYMPALSASRYDPHVRGYYRHLIEDRGLKKIQAVCAVMRKLLHAIHGMLKHRRPFDSGRFYVFNEAK

SEQ ID NO: 48533 - protein, 458 aa, unidentified
MKKPGKKHTPKVPKLENLKHLNLHAAGLDIGASEIYACVPEDGDSPSVRVFQTFTVDLYALADWLAACGVTTVAMESTGVYWIPVYEILEARGVAVHLINARQLKNVPGRKTDVLDCQWIQQLHTYGLLRGSFRPDEDMCALRAYIRHRDTLIRYRSAHVQHMQKALLLMNVQLTNVISDITGVTGLQIIRAIIHGERDPHTLAAYRNEHCAKSEEDIAKAFTGNYRPEHLFALKQALELYDFYNQQITACDQEIEQKYAAFKPQVDLTETPLPSRKQRRNKPKGNEPAFDLRRDLYRLAGVDLTQVDGLQVLTVQTILSEIGLDMHRWPTVKHFTSWLGLAPYQDISGGKTLRTGTKKTTNRAATAFRLAAQSLHSSHSAMGGFYRRMRAKHGAPKAIVATAHKLARIVYHLLKYREDYVDPGADYYEEKYRDRAIRNLKRKARQLGLDLVPVTAQL

SEQ ID NO: 48534 - protein, 256 aa, unidentified
MDRYIGVDVHATSCTVAVVGPSGRKLGSHVVQTNGQALVELIRSIPRPRHLCLEEGTQSGWLHQVFSPHVDELVVAGIRVSRGPKSDQRDALSLAQALRTGAIETSVFKAPNQFALLRELARAYHVLTQDVVRSKNRIKSLYRSRGISTPGSSVYDPNDRSVWVTKLPSACRPSAILLGDQLDGLRALKKDAEKQLITESHRHPVCQLLETCPGMGPLRVAMTVPVIVTPERFRTARQLWSYAGLGIVMRSSSDCV

SEQ ID NO: 48535 - protein, 426 aa, unidentified
MKRTQNEKISQIKIDTLVVGIDIGKEVHYARAFNYRGIELAKLLIFSNTAEGFENLDRWMQDICKQQEKTEVIAGFEPTGHYWFPLGDHLKRQGHKLAIVNPFHVKRTKELDDNSPTKNDRKDPKTIAMLVKDGRYREVYIPEDIYQELREAVAERERLQERLIAIHNRVVRWLDIRFPEFTGVFKKWTGKAALLTLRTFPTPAKVLEAGEDKILATWRTEVRRSVGKKRAQALVKAASKSIGRTTGQVASEASLQNLLAEYELYHAQLEQLEQLMQELLLQVPNATKLLKIKGVGLVTAATFVGETGNIHRFEHPRQIQKLAGCNLVENSSGKHKGKTTISHRGRKRLRHGLFMTMIAILGKNQEFRELHHRNLTREKNPLNKMQSIIALCGKLIRVFYAILSNGVDYNPEKMMGDIQQPLKAAA

SEQ ID NO: 48536 - protein, 427 aa, unidentified
MAYRIAGIDVHKKMVAVAIADVEVVGTWRFDRRQIGTSPSQLRALAEWFVACEVDEVVMESTAQYWRPVWEALERFWQPSRRQRPGAAVRAGALHLAQAQSNEGHRGRKRDFPDAERLVKRLVAQELTLSFVPDATQRLWRTVTRRKYQVTCNRVQLQNRLECLLEEAHIKLSSLVADLLGPSARRMLRAIANGDTDPGAVVALGSRRLHATPDQLRDALGACTDLNPVYRRLIAMTLDELDVIETHLARLDEELAQLLREHQDAVARLAAVPGLGVDSAQQIIAEVGPRVATFATANRLASWVGVCPGHDESAGVNHSRRSPNGNRQMRRLLNQAANAAVKTKGSIFQLVYRRLVVRLGHAQAIGAIAHRLCRLVWKILHDAVVYEERGPAVTKHRAQRRAAKMVRELRALGYRVEPLPAPASGLP

SEQ ID NO: 48537 - protein, 400 aa, unidentified
MIDTGDIDVFLGLDVGKGEHHATAVTPAGKKTFDKRLPNTEPKLRELFAKLRAKHGTVLVVVDQPASIGALPLAVARDMGCPVAYLPGLTMRRIADLYPGEAKTDAKDAFIIADAARAMPHTLRAIDGQDDTIAELEMIVGFDDDLAGEATRVANRLHGLLTQIHPSLERVLGPRLQHPAVLTLLERFGSPAQIRKAGRRRLVTLLRPKAPRMAERLVDEIFTALDEQTVTVPGTDAAALIVPSLAGSLAAVLNQRKLLAGRIEELLGDHPLSKVLTSMPGIGVRTGARILIEVGDGSTFPTAGHLAAYAGLAPATRSSGSSIRGEQPSRRGNKQLKRAFFLSAFAALGDPASRAYYDKKIAQGKHHTQALLCLARRRADVLFAMLRDGTFYEPRTSGAT

SEQ ID NO: 48538 - protein, 408 aa, unidentified
MAIIGMDIHRAFAELVALEGKSRRRLGRIDMRRDRLAAFAAGLAKDDIVVVEATGNAAAVAEVLAPHVGRVVIANPKQVRAIAHAKIKTDKIDAAVLAQLYASGFLPEVWIPDENTQALRRQVTRRNQIVRQRTRLKNIVQSILHAHLIPAFPAVNMFGRKGRAWLAAQKLPEDEQLAIERHIREIDRLGEDLKVIQRDLAQYGLADLRVKRLMTIPGLDMIVATALVAAIGDINRFGAPQKLVSYLGLNPTVRQSGSGPSYYGRISKQGPGRARGLLVEAAWAAARAPGPLRAFFLRTRSRRGQHVAAVATARKLAVLVWHILTKQQDYLWVRPALHATKLRRLELTAGHAPARGQRGSAYDYNIKATRDQQRRRVQQAEKVYERFVAGWNRNGPKMRTSAAKEERQ

SEQ ID NO: 48539 - protein, 348 aa, unidentified
MRFYTGQHQHYCGIDLHARTLYLCVLDAEGNVLLHKNLPCDRQIFLDTIEPFRDDLVVASECIFNWYWLADLCADHDIHFVLGHALYMRAIHGAKAKNDKIDSHKTASLLRGGLLPQAYAYPSKMRPTRDLLRRRTHFVRKRGQLTAHIQNTFHQYNLPRPPGLLVYKHQRAPVPAAFTDPIVRKAVEADLALCETYDHLIRDLENTVLRQARIQDPNALLCLNTIPGIGKILSLTFLYEIHDIDRFDSVQRFASYARLIKCETSSAGKRTGSSGAKIGNAHLKWAFSEAAVTVLSHFPESKKLHTRLKRKHGNGKALSILAHKIGRTVYFMLKRNQAFDPDRFLMNA

SEQ ID NO: 48540 - protein, 408 aa, unidentified
MNAVGIDVSKGKSMVAALRPMGEVALLPQEFLHTEVGLEQMAYAIIALGEDTRVIMEATGRYHEPVAAALHEYGIYVCVLTPLFIKQSGGGSIRKVKTDKADAMKIAKYGLDNWVDLREYTPMDTVRQQLKLCSRQYNLYMKTVVSLQNNLISLTDKTFPGVNELFSSPERADGHQKWVDFVMTFYHCDCICRVSENAFAERYQKWCKRKGYHFSAEKAQDVYLGSCGHFTTLPKNDNTKLLITTAAQQLLAGKMTLAALRTEMTRLAKQLPEYDIVRAMYGVGETTAVQLMAEIGDVRRFPRRSSIVGFAGVDPAVDQSGKHSAKSVPTTKRGSPHLRKTLYQIVCTYLKKSPVDEPVYQFLDKKRSEGKPYFVYMTAAQNKFLRIYYARVKECLEAFDAQQDTSQR

SEQ ID NO: 48541 - protein, 431 aa, unidentified
MCFAPAFGDEEQSMGKINERCAGIDVGKRFLLCCVLTGAAHEEPRSHTRRFDATVLDLVRLRDWLAAESITHVVMESTGSYWVPVFNILEDHFIIVLANPEEVKNRKGHKTDRKDAEHLADLLRHDHVRASYIPPKPIRDLRDLTRRRLQLVQDATRERNRVEKLLEHVNVKIGNVLSDVFGVSGQSMLLALLEGKTEPEQIAQLARGQAKRKIPQLIEALEGHGMRDHERFLIRSCLRHLACLEEEVEEMDREILQRMQVPPFQGAFLRLQSIPGVGQLAAASILAETGTDLTTFPTAEKMASWAGLCPGNRESAGKKKGNQTTQGNCYLRTTLVQCAWAATRKRGCIFQTRFRELSPRRGQKRAIVAIAHQMLTVLYYMLKNDAPFNGLENAPRQRRRQRRAHHHLRCLRRLGISVHILGPTEYVPPTG

SEQ ID NO: 48542 - protein, 400 aa, unidentified
MMTPDDIDVWVGLDVGKSAHHAHALDHDGNTLYDKPLKQDEKAIRTMLGKLSKHGRVLLVVDQPNTIGSLPLTVARNMGIAVAYLPGTAMRRTAQLLPGDAKTDRRDAHVIAWAALKLPETLRDAGPDDETLAALKLLAGHDEDLAHESTRHVNRLRSLLLQTHPAFERALKGERITRDATLALLERYGGPMGVKRAGIEDVKDWAKSNGLRAGRIIDDMFKAIGEQTVTVPGTLMAETIIPSIAHDIKTIRDRRREVGRQVEKLLEDHPLLTVPASMPGIGVRTASNILLGIGGDIANFKSSAHLAAYAGISPVTGQSGTSIKGERPSRRGNKRLRNALWQTAFVASTKHPPSVAYYKRKREQGKHHNAAIICLARRRCDVIYSMLKNGTLYQEPALVA

SEQ ID NO: 48543 - protein, 293 aa, unidentified
MDAIVAGIDVSKDKLDIAVRPAGETFSASRDAAGLDAVIARLAPLSPSAVAVEATGGFETVVVASLAAAGLPAVVVNPAQVRSFAQALGRRAKTDPIDAMVIAHFTEATKPEIRPLPNEAAQLLADLVTRRRQIIGMIVAERQRQRHLVEKHLQKSIARLIKALEKELSALDQSIDDAVRGSPAWREKEDLLASVPGVGPTIARTLIAELPELGTLGHKKIAALAGLAPWTRQSGRWKGKSFIGGGRACVRAALFMGALVAARYNPALKALRQRLIDAGKPKLVAIIAVARKL

SEQ ID NO: 48544 - protein, 353 aa, unidentified
MLIIGCDFHPGFQQVAIFDNQTGEYQEKRLSHRQEAEQFYRSLAGQKVRVGMEACGHYPWFERLLAELGIELWVGDAAKIRASVVRQQKTDRRDAEQVQILLREDRFPRIWVPSLEERDVRQLLVHRHKQVQARTRTKNQLQALALSQGVQKKRKLWSVAGREELEKLELLPYAALRRERLLAVLDQLEVEIEKLNRQVEEEVKQRPAAGKLMTHPGVGPVTALAMVLTLGPAKRFENGRQVGSYFGLIPSEYSSGGRQRLGHISKQGSSFLRFLLVEAGQSAVRKDPELGRFYHRLAKRKHRALAKVAVARKLAVRLYLMLREDWTYAQLCKAVVQVSPSHSVVASQNRPLE

SEQ ID NO: 48545 - protein, 345 aa, unidentified
MGIVCQVGLDIAKNIFQVHGVDKHGKELFNKKLKRTGVLPFFANSPPCFIGLEACGGAHHWARKIAGLDVGHTVRLISPRQIKPFVLNNKTDAADARGICEVVGRPCTRFVNVKTVEQQDMAAWHRIRERKVKERTALVNQTRALLMEQGIVMPQGITCVRKFLPGIIENLENGLSFRARDYLSELYAELVDCDAAVAKYEARIVDVAESDAACKRLQKIPGIGPLTATAIVAHVGNAAQFKNGRAFSACLGLTPKEHSSGGKRKLLGISKRGNSYIRRLLIQGARVVTRYGLLRPEPQTPGQLWLQNLSGRRGKHVAAVALANKTARIVWSLLARGEEYAPPPA

SEQ ID NO: 48546 - protein, 345 aa, unidentified
MSMVSGVVGGVDTHADVHVAAAIDSNGGVLGIESFPVNTAGYEHLTAWLVGFGPVVRVGVEGTGSYGVGLTRHLHREGIEVVEVDRPNRQTRHRLGKSDPIDAEAAARAALSGTARVTPKRRDGAVEQMRVLMIARRSARRQRNQTLNQLRQVVFTSPDEIRTRFKDRYKTGLVSEAARMRPRKGSDPVTYTTYVVIRGLARRIRDLNDEMHTIDHALKDLIKDTAPSLLDCYGVGVVTAAALLVAAGDNPDRLHTERSWAHLCGVTPIPTGSGKTSGRVRLNRGGDRQANAALYQIVLTRMSSDSATRNYVRRRRAEGLSTPEIMRCLKRYVARQTFKHLPRAA

SEQ ID NO: 48547 - protein, 347 aa, unidentified
MRGAVHMQITTIGLDIAKNVFQVHGIDAAENVIVRKQLRRSQIIAFFEALAPCLVGMEACATSHHWARELTKLGHEVRLMPAKDVKAYVKRNKNDAADAEAICEAVRRPTMRFVRIKSAEQQGQLMLHRARDLLMRQRTQLINALRAHLAEFGITAAQGREGIKELLAIVAQEEGSRLPVDAHASLTVLAAQLQAVQTTIGSIEKRIVAQHRSNEASKRLETIPGIGVIGATTIAAVVPDPRAFRSGRDFAAWIGIVPRQDSTGGKQKLGPISKQGDQYLRRILIVGAHAVLRRARQQPETYPWLTQLLARRPFKVVAVALANKIARIAWALLAKGGTYRAPQLVAA

SEQ ID NO: 48548 - protein, 407 aa, unidentified
MEVLYPRCAGLDVHARSVTACVRIASGPDVTYQHRTVSTTTRGLLELADWLTAAQCTHVAMEATGVYWKPVWHLLDGHFRLVLANALHIRHVPGRKSDMTDAAWIADLLAHGLIRSSFVPPAAIQDLRDLTRTRKQLVGEIARHTLRIQKTLEDANLKLTHVVSDILGTSGRAILKALISGETDPERLADLTKGRLKASRAQLVDALQGRVTAHHRFIIDLHLTQIDALEAAVDKLERHVGTAMVPFQAAVSLLTTMPGVSDTTARVLVAEIGDDMTRFPSPGHLVSWAGLCPRLDVSAGKRHSTRIRHATPWLKTTLIQAAWAATRKKDSYLHAQFLRLKARRGPKKAIVAVAASMLTAAYFMLHNGVEYHDLGGRHFAERDKHETAKRLLRRLRDLGVEVEVKAA

SEQ ID NO: 48549 - protein, 410 aa, unidentified
MEAIVERVGGVDVGQATVVVTVLVGAAHERAKKETRTFRTVTRELLALREWLLAKGVTHVAMEGTGIYWRPVYELLEDAFDMILGNAHHIKNVPGRKTDVKDSEWLAELARHGLIAKSFVPPKPLRRLRELLRYRRKLVESRTAERNRLLKLLETANIKLASVASNVFGVSGRLMLQALIEGVATASATAALAQGRLRKKLAELEQALEGRLDEHHRFLLQLQLRRLDNVDADLASLDARIDEALTPYRDECARLQQIPGVSRVVAAVIVAELGTDMTVFPSAQHAAAWAGVCSGNHESAGKRLRAGARQGNVHLRTALVEAAVSASHAKGTYLRDKFYRLRARRGTKRAALAIGHKILIAAYHLLATHVPYRDLGATYLDGLDKRHTTRTLVRRLERLGYEVTLGPKVA

SEQ ID NO: 48550 - protein, 401 aa, unidentified
MAAVRDNAWVGIDVGKTHHWVCAVDADGKTLLSVKVANDEAGIVSLIAAVTALTQQLTWAVDIIGAPSALLLALLAQAGQPVRYASGRVVAAMSAAYVGEGKTDAKDARVIAETARLRRDLAIIDTDTDLVRNLAVLTGHRADLIADRVRMINRLRDLMTSVFPSLERAFDYSSHKGALVLLTGYARPDRIRRSGQTRLAAWLRTRHVRGFADVAARAIAAAKAQSVVLPGQDLTASIIAELAGNVLRLDERLKSLDDQIEELFQQHPQAAIIQSMPGFGPFLGASLLVGAGDLRAFPNAGHLAAAAGLVPVPNDSGRRTGNLHRPLRYSRPLRHVCYLSAQTSMMRAGPNRDYYLKKRANGRTHSQAVIALARRRIDVLWALLRENRTWTATPPQLAQAA

SEQ ID NO: 48551 - protein, 323 aa, unidentified
MESKESGMAGGLCIGIDVSKAVLEVAIGSAGEVRSVVNQDRAIGELAAQLLALKPELVVMEASGGYERLAAALMWEAGLPVVIANPRQIRQFGQGMGQQAKTDWLDARMIARWAEHRRPEVRALPDAQGRELRELLIRRRQLNEMLVAERNRLGQVLSKPIRKELTASIGSLERRLGQLDHELEQRIKKSDLWQRTRDLIQSVPGVGKLTSFMLIAELPELGQSDRRHLASLVGVAPFARGSGQLRGKRMIGGGRGAVRSALYMAALTASRYNPALRPFYQRLLARGASKKAALVAVIRKLLGILNAIVRDRTPWRPPCPVPK

SEQ ID NO: 48552 - protein, 416 aa, unidentified
MNERGTVAAGIDTHKDTHALCVIDLVGRVVATGAYAADGEGYDRIAAAIGDPRDCVVVGVEGTGSYGAGISRRLAELGYDVVEVVRPKREKRMAGRDKNDPADAERAARDALAGKASGAPKAGGGWVEALRFRMVARDAAVSESTRAANSAHALIVTAPAPIRGELGGMKTPALMKALSRRRRARDVVESSLWESLRSLSLSWIGAKKAAAAHEEAMREILLANAPALLDIHCCGTISAARLAVTAGDNPERVSGESAFASLCGASPVEASSGKVKRHRLNRGGDRQANRALHTIARQRMKRDSRTKLYVDKRTKEGKSRREIERILVRYIAREVYGALMRPMDAACEPYRASARAAKSERLRAGAAQAQASRALGVASARISEMERGRLVDAPLLQRYRSWLESLSAGERRESPE

SEQ ID NO: 48553 - protein, 342 aa, unidentified
MQITTIGFDIAKNVFQVHGIDAAENVIVRKRLRRSQVLVFFKALPPCLIGMEACATAHYWARELTKLGHRVRLMPAKDVKAYVKRNKNDAADAEAICEAVRRPTMRFVQVKSAEQQGQLMQHRTRDLLMRQRTQLINALRAHVAELGIVAAKGDKGVKELLTIVADEKDTRLPIDARASVIVLAAQLQAVQTLIGSIEKRIKAQHRSNEASKRLETIPGIGIIGATAIAATVADPTVFRSGRDFAAWIGLVPRQDSTGGKQKLGPISKQGDRYVRRILVVGAHSVLRRAKQNPEKYPWLTQLLARRPFKVVAVALANKMARMAWALLAHGGTYRAPELAEAA

SEQ ID NO: 48554 - protein, 464 aa, unidentified
MSDKHPFRTPRPRRSPSLLKRINPDAAGVDCGSAEHYVAVPVDRDEVSVRAFKTFTGDLHRLADWLIRCGVTTVAMEATGVYWLPLYEILEARGLEVVLVNARHVKNVPGRKSDVSDCEWLQELHSVGLLRGSFRPAAHIATLRSYLRHRESLVRSAVTVMNRMEKALLQMNLQLHLVISDLAGATGLRILRDIVSGERDPQRLATHRDVRCKASEDEIVAALTGHYRTEHVFALRQNLELFDVCQQQIQACDHEIEKVLRELASQSSAPDAPLPPRRTKSRTKNEPRFDMRAPLHQITGIDLAQIDAIAPYTALRLVAEIGTDMSRWPTQHHFTSWVTLAPRNRISGGRLLGSGARPAPNRAAMIFRLAAVSVGRTQTALGAFYRRLAYRIGRAKAVTATARKLAILVYRCLKGEIVYQDPGQATYDARYRASVIRRLRQRAESLGLALVERTTNGPLVDGVS

SEQ ID NO: 48555 - protein, 366 aa, unidentified
MPDSTTTHLPVAGLDVHAASIRLAVVREAELLDERTLPYDCGLVERELRRLGATRVCYEAGPTGFGLARHLRGAGLECDVVAPGLVPRRSSDRVKTDKRDARKLALLYQGGMLKPIWVPSAEQEAVRDLIRAREDARQDRSRARQRLGKFVLRRDRRLPGKGWTLARRQWLGRQAFEHVAQQTAFDDYLLACDLLDRRIETLERQIDEWAAHDSFRQLVGRLRCLRGIDTLTAIGLVAEIGDFSRFRTAPAFMAYLGLVPSESSSGERRRQGSITKTGNNHARRLLIEAAHNQRRRPARSAHLARRQAGQPAEVVARAQQAQLRLHKRWQRLSARGKHSNKIAAGVARELAGFVWAIATEQPLHAG

SEQ ID NO: 48556 - protein, 411 aa, unidentified
MGRVVIGVDPDKLSVTIEARDNREMLRATGRFGTDARSHRQLPGVARQWPGRIWAVEGANGIGRPLAQRLLAEGERVLDVPARLAARARVSGTGQGRKTDPADACAIVMVALRDKGLREVSTDPGLMVLRMLCDRRDVLSRARTQALNRMHRLFLGLLPGGAPVKKPVSQYQALLAPVRPRDLAGKTCRRMAAEELEDLHRLDAKLKAMKAELKAAVLATGSHLMDIHGIGPAGAARILAGVGDVARFPDRNHFASWTGTAPIDASSGQRIRHRLSRAGNRRPGHVLCIAGIVQLRHDTAGRACYRRKRAAGKTPMEAMRCLRRRLPDAVYRQLAADALVQEEASPGGHPGASLTSSAAGLSPDTGTSDQPLPGPAHPTLPPPPSKTPQPMAPAAAVPQQRRGHALDKRPS

SEQ ID NO: 48557 - protein, 344 aa, unidentified
MNKYAGLDGSWEETAIAVVDESGRVVREGKVASEIEAIDGWLRASGAVIVRLGLEAGPLSSWLYAGLRACGWPAVCIETRRLRAVTQAMPVKSDRKDAEAIAQVMRTSWYRAVHVKSDDSQRLRVLLRHRQILQAKRQDIDNELRGTLKAFGLKLGKVGQAGFAARVMELVAGEPWLERLTQPMLAARAALRQSFAELHKLLLKIVREDTVCRRLMTAPGIGAVNALAYKTAIDDPTRFRHSADVGPHFGLTPRLYQSGETEYSGRISKCGDAMVRSLLFEAATALLHRVKAASPLKLWARRLAKKIGVRKATVALARRLAVIMHRMWVDGTDFDPELGRAAAH

SEQ ID NO: 48558 - protein, 439 aa, unidentified
MDAYRKGKSSMSNLFISVGIDVGADFSFMSIALPNQTFVGKPFKIVHANRNSLEKAVVTIKEAEELHSMKSRIIMESTGIYHYPLFCYLRDKGFCVCVINPIITKNSTNLNIRKVENDKFASKNLALIGLKPDLKISVIPCDAVLDLRNLVREYYNLMDCRCAYVNKLRGVLKVSFPQYIGIFSKVTVQTSLVLLEKYPSPVAFMSAKKSNVIKIIRKTGRFSKSSAEKKYQSIIEAAKSAGIFGYFVPSNSTQIGLCVNFIKQYDQEIANVLSLMHKLVDKHADEAFVRQIRLIETIPGAGFLSAVTVICEIGDFSAFKSPKQLFAYFGLDPAVKQSGNFTGTNVKMSKRGSSIARRAIFTMALVGVGLTRKGDANNPVLRDYYLKKCQSKLKMVALGAVMHKICNIIFAVLRDNKEFSLISNEEHIKSYQDKLASGF

SEQ ID NO: 48559 - protein, 420 aa, unidentified
MTRKNNNKIISVVHPICCGLDVHKKMVSACIIITEPDGDQAFVVKEFSTFTDDLHRLKSWLSSHACPVVAMESTSVYWRPVHNVLEDAFKVILVNARHVKNVPGRKTDISDSMWLASLLRIGVLKGSFIPEKRVRQIRELVTLRKSYTRSLADYKRRVHKLFATANIKIDSVISDLFGKTGRNLIDTLSDIDTELKIEHVEQCAKGSLKRKVAELFRAIQGFFEAHHRFQLKMIMRTIEHLENEIESITLRLDQLLVPNQALIEKLDQVHGIDKKTAQSIIGHIGDTLTAFRSEKALASWGGLCPGNNESAGKRKSGRSPVRKHPFKELMIEIAWAAVRTKGSYYKDKYHRLKSRRGPKRAAVAIAHRITKAVYHIIKHEKSFVDLGEAYLMSKSTEKRIKALKMRARHLGFSLVPVEAN

SEQ ID NO: 48560 - protein, 340 aa, unidentified
MSKKYRFAGIDVSAGKLDVVIDNSRGAEMHKVFENNPKGHAAVCRFIRPGKTPARVVLEATGKYGVDLALALVEQDIEVCVINPLAARRYMQFRMRRGKTDKVDATLLKDIAGSKEFARWTPPASAVLELRNIVRRVRGVTKQMVSDKNQLHAARATATTPDYILEDMLDAIATHKKRIAGLLKHAKAVVEASQELQDRFDAFQSLSGFGAPTSLMLLGELYGLDRSLSTRQVVAYAGLDPRPTQSGTRDPARRISKLGNAHLRSSLYMPALTAIRHEPVVKAHYEAVLERSGVKKVAIVAVMRKLLHTAWGMVKSPAAFDPEKYSPKYAQLIEKSEKAA

SEQ ID NO: 48561 - protein, 422 aa, unidentified
MLEETQDREEIIERVAALDIGKAEVVACVRVPSPQNPGRRAQEVTTYSTMTRSLLRLADRLRELGVTRVVMEATSDYWKPVFYLLEAQQLDPWLVNARDVKHLPGRPKTDKLDSVWLCKVAERQMLRPSFVPPPEIRQLRDLTRYRADLVAVRTAEKNRVEKLLEDAQIKLSTVVSDIFGVSGREMLAALVAGEHDPTALAQLARTRMRVKIPLLEEAFTGHVTNHHRFLLRTMLARIDQASADIAAVETQIEELITPFAHTVERLDEIPGVGATAAHVILAEVGPDMTRFPTAAHLCSWARFAPGIRESAGKKKGRGTTGHGNRYLAAVLGEAAVTAGRTDTFLGERYRRIARRRGKKKAIVAVGRSILVIVWHLLSDPEARFHDLGPDFYDTRIGPDRKKRNHIRQLEALGYTVTLTPAA

SEQ ID NO: 48562 - protein, 371 aa, unidentified
MGRDSTTKFIGLDVHSKTISVAIADEGRKGEVRHYGTIDNTTEAIEKVIKSLTATGVELKFIYEAGPCGFALYRYLTGNGFKCIVTAPAMIPKRKSVRIKNDRRDALTLARLYRAGELTGIYVPDPEDEAIRDLVRARNDARLAERKARQRLNSFLLRNNLIYPRKTKWNRAYFYWLGFVVMKYPAQKVAIQEYINAVHECTERVKRLSDQIRLAVKEWRLAPMVKALQSLRGVSLITAAITVAELGDLSRFHHPKELMAYLGLVPSEHSSGESIKRGGITKTGNSHARRVLVESAWTYKHHARVTLPLIKRQQDLPKSICQISWKAQLRLCARYRRMMARKKPAQVVAVAIARELAAFMWAIAKEVEAAA

SEQ ID NO: 48563 - protein, 348 aa, unidentified
MAVTIVETCAITGGVDTHADVHVAAALDPIGGLLGVQEFPVSPAGYARLLGWLGGFGTVCLVGIEGTGSYGAGLARHITAAGIRVVEVDRSDRQDRRRQGKSDPLDAVSAARAAQSGRADGAPKGRDGAVEAIRALMVAKRSATGERTQTINQARALVLTGPDDIRARFARHGTAALVAGLASLRPRRGHVVGYATRVALRELGRRAQFLDGQLERLDELIAPLVTARAPGLLAICGIGPSTAALLLVAAGDHPGRLRSEAAWAHLCGTAPIPASSGKTIRHRLNPGGDRQANHALWRIVFTRMGSHPPTRAYVERRTHEGKSKAEIIRCLKRYAAREVYPHLRGPSG

SEQ ID NO: 48564 - protein, 409 aa, unidentified
MLFIGDDWAEDHHDIEVEDEQGRRLARRRLPEGVAGIEALHALVADHLPDDAEANQVLVGIETDRGPWVQALIAAGYTVYAVNPLQAARYRDRHGVSGAKSDAGDAHVLAELVRLDRAHHRPVAGDSAIAEHVRVLARAHQSLVWSRQRQTNMLRSMLREFYPGALDAFAGELDGRDALAVLAIAPTPADGRRLSRARVETALRRAGRQRYLATRAAEIVAALRADQLPARAGVEDAYGASVRALVAVISELRRQTLALAGAVEAGFGRHPDVEIYLSQPGLGPVLGARVLAEFGDDPARYADAKARRNYAGTSPITRASGKSSAVLARHVRNRRLADALDQQAFAALQASPGARAYYDARRARGATHHQALRALGNRLVGVLHGCLRRHQRYDEARAWQQHAVVPRAA

SEQ ID NO: 48565 - protein, 422 aa, unidentified
MTGDGTHQETSAGTIGEPLVVGRESPMSTVGIDIGGRTHVVARCRDGESRADHEILRVAQSRAGFQGLDAWLDRQPDPVTLVVMESSGHYWMPLASHLAHRAVPVAVVNPLAARYFAKSRLGRTKSDPADARSLAEMAMRDAPAVRDPLAGVELRQAARFAMTLVQEQARILQRLHRLVELGFPELGEVFEDPTCLTAREVLRLAPTAAAARRRRTATLADANGSPGHRRLGPAKAQRLHDLTIDSIAVPELDAEVAFEVGLLLDRFDLLERQIGAADAHVASLLDGELARRLQTIPGVGPATCAALIAEIGDIGRFETFDQLLAYAGVHPAERSSGRKGANPETSWHMSKAGNAHLRAAAYRIAMVGTIHNPVIAETYRRKRAAGKSKMNALGHCMRKALSIVWGVWRNGADFDPAWGSGT

SEQ ID NO: 48566 - protein, 437 aa, unidentified
MKKIRRHACGIDIGSKKVFVSAEGREVRSFGTFTCDFLELKNYLLDQEVETVAMEATGVYWVILYDILKEAGLDVWLVDGRQTRQVPGRKTDVKDCQWIQQLHSYGLLNRCYVATGKIKELRSYMRLREDHLRSASMHVNHLQKSLIEMNIRLPEVLSQVHGKSGMAIIEAILSGCRDPHELLSLCHTSIKKNKSELVLKALEGHYTESGLFSLRQAHEAYHFYKCQIAACDKQIELLLKEISKDKPAPPGGSAGRRKAIRHNRPNIDHLGEQMLKIFEGRDATRLSGITDYNWLQLFSEIGSDLSRWPTEKHFTSWLGLAPGQKNSGKRNRNVKRGKPNAGQIFRTTAQSLLNSKNLALGAFARRMRGRKGPALAIKATARKLAVQYWRLMVKGVDYVEQGIEYYEKIRTMQKHKHLQRLAIELHMDIIPLEKNTS

SEQ ID NO: 48567 - protein, 410 aa, unidentified
MEVLYQRCCGLDVHKETVVACLRVVSGDEVIREVRTFETTTASLMALSEWLAENGCTHVAMEATGVYWKPVWHILDDGDFQLVLANASHVKNVPGRKTDVNDATWLADLLAHGLIRASFVPDTQTQELRTLLRTRKQLVREKSSHILRVQKTLEDANIKLDSVITDVMGMSGRAMIEALIAGESNPTKLARLANYRLRASQEKLREALRGRVTKQHRFLLRLHLNQIDALDAAIATIDQLVQAGIAPFRFAVEHVMSIPGISDIGAQVIVSEIGIDMSRFPSEGHLISWAGMCPRNDESAGKRRSNRVRKGAPWLKTTLVQCAWAAVRKKDSYLKAQFLRIKARRGPKKAIMAVAASILTAIYHMLKDGTLYQDLGSNHFQTRSKGQQTKRLVKRLADLGYDVALTPLPG

SEQ ID NO: 48568 - protein, 412 aa, unidentified
MERIVERPGALDVHKESVTACVRVSGSDGKRVEHVETFSTTVRGLLTLHDWLAAHAVMQVAMEATGVYWKPVWAILEDDFDCLLVNARHVKQVPGRKTDVQDAAWLCQLLEAGLLKRSFVPPKPIRTLRNLTRYRKAQIGERQREANRLHKILEDTGIKLDCVATDILGVSGRAMLDALCRGTTDPAVLADLAKGKLRKKIPALQEALEGRFSSEHALVVSAILAHIDFLDEQIERLSDAVEEQLAPFAAAARLLCTIPGVKQRTAEVIIAEIGTDMTVFPTAGHLVSWAGLCPGHDESAGKRRSGHTRKGSKWLRIALLEAALAATHSNDTYLAAQYRRLKGRRGHRRASIAVCHSILAAAWHMLQTGEVYHDAGGDYFTRLNPELQTRRLIKQLEALGHHVTLETQPVAA

SEQ ID NO: 48569 - protein, 435 aa, unidentified
MDEVTDEPLYRNRVCGIDIGKAQMVATIRVPSDRDPARRSAETRTFATTKRGVLALADWCRSWQVPAVVMEATSDYWKGPFYRLEAEGFECVLADAKQVKNLPGRPKRDPSDSRWLAGCFERGAVTSCFVATPEFRIIRLHTRYRRDLIEERTRDKQRVEKLLESAAIKLSSVVSDLHGVTGRDIMDHLIAGERNPKVLAQLARAAARRKIAELEEALEGAEFFTAEHAGLLTAMLERIDRVTADIARLSEVIEQLLAPYEEQLQQAESMPGWRRRSAEDAIAETGVDMTRFPTGAHLASWGSRAPLDHQSGARKGRARSKKGNRYLAGVLGETAVAAGRTQTREGARYRRLARRLGKPKAQVAVGNTQLKVLHKLLSNPGMRHEDLGPDYYERRASLRRQIHHHVTHLESLGFEVTLCRTPDPQPGPAGQAHAV

SEQ ID NO: 48570 - protein, 389 aa, unidentified
MYYIGIDVAKRNHVVAIVDQHGEVLLKPTEFENSSPGFNSLYELIKSFILDRHYVGLEATGHYGDNLIRFLLDKRCDVRMINPLTTDAFRKQRIRKTKTDSIDCFIICNVLQTGHATKMTHKKFITREGKQLTRFRQELMTSLTMDKNQLQACLDLVFPEFNTVFKTKYSKAYIATLKEYPSAQTIATVHLTKLRNLILRASSNRISPELPNLLKEAAVNSIGEPNQVIELKIQMLIESIEMKIKQVDILTHKIEILSKELNSPIFTIPGIGFVTGFTILCEIQDISLFDTPAKLIAFAGCDPAVYQSGDYNAPTTAISKRGSKYLRLALYQAALPAATYNETFGNYYRMKRSQGKKHRCAQGHLVRKLLRIIFKLLQENIEFNPTLCI

SEQ ID NO: 48571 - protein, 313 aa, unidentified
MKTRILYAGIDVDDKAYHVSVFDKGKGTRLEFKCGPNPQLLLRAFNRHGLDKESLQVCYEASYVGYSIYRSLTIAGFHCQIAAPSLIPSQAGVRQKTDKLDSRKLAEYYAKGLLTFIYIPNEEDEAVRDMLRSKLFLTEQQTMIKNHINGLCRRLGLNYKQQTEKKSRWTRHHLEWLYSKTNKLKQHSAKFTFQILLKQFEDVNKNIELFDLEIENQAEASRFAKKVKVLAAFKGVKSTTALTLITELGDIRRFDHPKRVTSHAGFDIVEYNSGGKQKRFSISKLGNSNIRVVVCIKKAAECFSTESLRKKYK

SEQ ID NO: 48572 - protein, 521 aa, unidentified
MITIPVVTERCAGIDVGKRGLAVAVAAGPADKEAEIKTRSFGTTVPALRELQGWLRAEGCTTVAMESTGSYWIPVKNILEEDFKITLVCARKHRPKKGDKTDFRDAIDLAVHHRHGLLTGSYLPERGIVELRDLTRRRKKLMGNLRSEKNRIQKVLETANVKIGNVVSDVFGVSGQEILQALLDNRPITAEDMAGMAKKRLRQKLPQLTEALQDHHMNDHHRWLIDQSIEHAKFLDQQVEELEKRIEQHLEPYRRQYELLLTIPGIKETAAANVLAETGPYMDQFPTSDHMCSWAGICSGNNRSAGKSKSSHIKKANKFLLAALVESGWGAARKDGSVFQRKFRRWLRKLGKKKATIAICRSLLRVVWSVLKNERPYVEPDTTVLKTLEREKQVRHHAHRLHQLGADQKTIEALVHTLLEPPAPVPTGPTLGALDKPAAVQPPRRPKCAPANQRAGRRPPARGVLGFRIRTADKKQYAVIKEQPGASLTTRAQTTSRRKQRQAPKHKTGDSLPERPANRGG

SEQ ID NO: 48573 - protein, 412 aa, unidentified
MPDDQSLPNLSNLSWEVYVAFKIFRKNCCGLDVHKTWIYACMGITDTNGRTEYKQARFSSFTKGLQELADWLAKYDCNDVCMESTGKFWIPVFNILEKTCWVTLAYPKYTKPQKGNKTDHKDAKWICDLYMCDMVNPSFIPPPDIRQLRDLMRYRSKLTNIMTSEKNRALNCLTVSNLKLDDVFSDVFGKSSRSVIRYILEHPGETFQVAPFIDRRCKHLVEEIQAVIDGTISHQQAVKLRECLQHLDELEVHKTNVEKEILCLVQQYPYQLELLQTVLGFSGNIMTAIALISEIGADMSVFPSAKYLVSWAGCCPRNDQSSKKVKSTRISRAGVYLKPLLVQVAIQPFTANADKLSAAGALEIRCQICDGRFLSMWAALFIFLGCPLPPCPKNLHVHNGRIVILASVAWIF

SEQ ID NO: 48574 - protein, 457 aa, unidentified
MNRKRTKSKVDRTMPMVHPNAAAIDVGATIHMAAVSADRTPEPVRSFGTFTTDLHRLVNWLKECGVETVVMESTSVYWIPIFELLDARGFTVFLVNARDAKHVPGRKTDVSDAQWLQRLHSYGLLRASFRPKGQIAELRAYVRQRERLLEYAASHIQHMQKALTEMNLQLHHVVADITGTTGLRIIRAILAGERDSKALAHLRDYRCHASAETIEKALTGSYRAEHLFALEQALALFDAYHEKVSACDVRIEAVLKELSIGRSRGSGSLTSSPRRTDQTNAMAFDVRAALFALLGKDITQINGLGPYLSLKLIAECGDDLSAWPSAKHFTSWLCLAPSNKISGGKVLSSRTRRSGSRASALLRLAAVTVGRTDTALGAFYRRLSARIGKAKAVTATARKIAVLFYNAVRHGMEYVDPGASFYETRYRKRVVDNLHRRAKAFGFVLHPAEPTPSVAVS

SEQ ID NO: 48575 - protein, 321 aa, unidentified
MKNSKAEIFVGIDVSKNSFDLAFFPKHASLSFLYDDLHLKDLVQLLKQTAPHLVVLEATGGYEKKLFQTLKDAQIPVLIVNPKRVRDFAKSMGYLAKTDKIDAFVLARYASLVREGTLEMEADDELRSLKRRRDQVVKMLVEEKNRLKQASDLVRGRIKKHIEILEEEKEDLTKEIEKQLKKEAKFSDLSQKVGLLVSIPGVNLVTALSVLLEMPELGKVNRKEIAALAGLAPFNRDSGKFRGKRGIWGGRKKVRQSLYMAVLAGLRWNKKMREFFTHLTEDGKKGGKIALTACMRKLLTIMNQILKNETPWEEIPAKANS

SEQ ID NO: 48576 - protein, 428 aa, unidentified
MNYNTQNAKIASITEETLIVGIDVGSEMHYARAFDWRNYEYSKKPLEFSNTEAGFLTLKAWMEDIAERHGKTAVIPGMEPTGHYWFALGKFLQDSGMKPVHVNPHHVKKSKELDDNNPNKNDRKDPKTIAALVNEGRFSYPYIPTGIYAEIRSLSNLRFQTQEELTRIKNRIARWFSIYFPEYKDVYRDLKAVSGRMVLKVAPLPEDIIKLGAEGVNQIWRDAKLRGAGMKRARTLVSAAEHSIGSKEAPEAARMELKNLLSDMDVYASRLEELLQSIEEKLKEIPYIDKLMAIKGVGLVTVSGFIAEVGDIGRFDNPKQLQKLAGYAIVANDSGKHIGESRISYRGRKRLRYVLYEAAISLIGKNAEFREIHEYYRSRKENPLKKMQSVVAVACKVIRVFYAILTKGVDYDAEKLMGDIRRPQMQAA

SEQ ID NO: 48577 - protein, 345 aa, unidentified
MQLHTIGIDLGKTVFHLVGLNPRGEVVVRKKFSRKQLLVFTANLQVELIGMEACGGSHFLGRALREQGHEVRLMPAQYVKPYVKTNKSDYIDAEAIAEAVGRPKMRFVPIKSDDQLDLQSLHRVRERWVMRRTAVINQIRGLLLERGITVRKGRRHIDAALPGILEDASNQLSGALRVLLVQLKLELDHLQTRIDEVDTMINKAAGESEVCRRLVSIPGIGPVTATAIIAAIGNGAAFKKGRGFSAWLGIVPGEYTTGGKQKLLGISKRGNSYLRRLFVQGARAVLQQSAKQSSGLSTWLAQLTTRLHSNVAAVALANKLARMAWAVLAKNEPYRPPIVVGAATA

SEQ ID NO: 48578 - protein, 405 aa, unidentified
MSEIEQHERVEVFVGLDVGKGTHHAVALDRKGKRLLDSALPNDESKLRALIGKLKEHGQILLIVDQPATVGALPVAVAQAEGVWVAYLPGLAMRRIADLHAGEAKTDARDAYIIAEAARSMPHTLRSMKLADSEVAELTMLCGFDEDLASQITQTSNRIRGLLTQIHPALERVLGPHLDHPAILDLLERYPSPAQLAAVSPKQLANRLVKLAPRMGKTWATEIVQALSEQTVVVLGTQAAGIVLPRLARQLAALRIQRDEVAKEVERLVLAHPLHPVLTSMPGVGVRTAARLLVDVASRAFASAGHLAAYAGLAPVTRRSGSSIRGELPSRRGNKQLKRAMFLSAFAALRDPLSRAYYNRKISQGKRHNQALIALARRRCDVLFAMLRDGTLYNPPEPKMLLTTT

SEQ ID NO: 48579 - protein, 337 aa, unidentified
MYYTGIDLHRKTSFLTTVDSEGRVVKKGNLINDEPTILEYFISLDEDTQVVIESTATWYWLYDLLTAHAIPVVVSNPVKTKAIASARIKNDKLDSHMLAQLLRADLLATVHVSSLQTRQLKELLRHRHKLVRDCVRMKNRIHNIIAKNNLSVPVSDLFGKKGLVFLSQVQLPSYQRHQVDTYLGLYQQLKEHTVALTEQIKQAATRDSMAQLLMTIPGVGPITAMFIAAEIEDIGRFKSYRHLASYAGLVPRLDASADKQRTGRITKQGSPYLRTALVEAAQATTRTKSRLNVFFRKRIVRSGYQKAIVATAHKIIQYAYYILRDQTPYRDSIDALA

SEQ ID NO: 48580 - protein, 313 aa, unidentified
MSTASLFVGIDVAKATLSVAFGPTATAREIPNTETAWVRLAEELAPLAPTLIVLEATGGLERGVAATLAAAGLPVAVVNPRQVHDFIRCTGQWAKTDALDAQMLARFAEAVRPPVRPRPDAATEALQAAVARRRQLVEMLTAERNRRSSTPSALRAGLEEHITWLTKQIRSLDKELDTLLAASATWHEQDERLRSVPGIGPVVSATLLAELPELGTLNRREVAALVGVAPFSQDSGRWHGARSIAGGRASARAATYMATLVATRYNPAVAAFYARLRAAGKPAKVALVACMRKLLTILNALLKHKATWEPDHA

SEQ ID NO: 48581 - protein, 340 aa, unidentified
MHITTIGLDIAKNVFQVHGIDAAENVVVRKQLRRGQVMKFFTALQPCLVGMEACATAHHWARELTKLGHEVRLMPAKDVKAYVKRNKNDAADAEAICEAVRRPTMRFVRAKSAEQQGRLMQHRTRDLLLRQQTQAINALRAHLAELGIAAAKGREGLKQLLKIIADEKDARLPIDARASLIVLAAQLQALHTMIGSIEKRIVVQHRANEASKRLECIHGIGVIGASAITATVNDPSAFRSGRDFAAWIGLVPRQSSTGGKQKLGPISKQGDRYLRRILVVGAVSVLRRAKLNPEKYPWLTQLLARRPFKVVAIALANKMARIAWALLANGSHYQPRLATT

SEQ ID NO: 48582 - protein, 341 aa, unidentified
MDKLDFSGIEVSAEELVVALQRKGDRKALKTFPNTLPGHQAIIRHLSAAGRTVRVCLESTGLYALDLALALHRAGIQVMVANPRAVRHFAEALMKRSKNDRLDAGVLREFAARMPFQAWQPPATAALQLHALARRLQALTEMQTAEKSRLAAIQATATTPAALRRDLDRSLRSLRRSIARLSGEAVKIIDQDKELKLRFDLLLSVRGSIAATSAIQILAELAVVSPDLDVRQWGAYTGLDPRECSSGSSVHKKIRIRKAGNAHLRRALYRPALVAIRHQPHLRAFYQHLRAQGKLKRVALVGVMRKLLHAIYGMFKHQKPFDGSKVYSLPSPKISTEEVAA

SEQ ID NO: 48583 - protein, 420 aa, unidentified
MAMSPVHANAAAIDIGATLHVAAVGPDRDPEPVRSFGTFTGDLHRLAGWFKQCGVTTVAMESTGVYWIPVFEILEQRGFTVVLVNARDAKHVPGRKTDVTDAQWLQRLHEYGLLRASFRPEHRIAALRDYLRQRERLLDYAASHIQHMQKALMQMNLQLHHVVSDITGATGMRIIRAFVAGERNPVTLAALRDQRCKESAETIRQALVGNEREEHIFALAAPLPAPRHRTKQPNALNFPAREALHRILGVDLTQIHGLGPYLALKLVGECGTDLSAWPSAKHFTSWLCLAPSNKISGGKVLSSRTRRSSNRASALLRLAAVTVGRTETALGAFYRRLAGRVGKAKAVTATARKAVTATARKIAVLFYNTLRHGMGYSDPGASYYEDRYRQRVLANLKRRAKSLGYSLQLTEPTSAGAEVS

SEQ ID NO: 48584 - protein, 350 aa, unidentified
MKYIGCDFHPSFQQIAMLDQETGEVVERRLLHTEEARAFYEGLQGPVLVGVEASGNMHWFESLLASCRHPLWIGDAAAIARQEGRKQKHDRRAAALILKLMLENRFPRIWVPTVEERDLRQLLMHRQQLVRMRTRVKNQLQHIALNQGWQKKRKLWSEAGLELLRNLKLGPWTQLRRDTLLELLEELEEKIRPLDQAVAKEAEQREAARRLATHPGVGAVISLATVLTMGDVHRFADSRSWVSYLGLNPSEQSSGQRRRLGSISKQGNPFLRQLLVEGAATAARGDKDLARMYARLKAKKHHGVAKVAVARKLAVRLYWIARTKKSYPDVVRTQGSQSHPVVERKGRSLE

SEQ ID NO: 48585 - protein, 400 aa, unidentified
MISVGVDVSKGKSTVCILKPYGEVVSSPFEIHHVEKDMEDLDNLLSKLDGEVRIVMEATGIYHLPVVTFLHDKGYFVSVVNPFAMKKYAKDNSIRGAKTDRLDSIMIANYGIEKWFKLQRYEGTEETYAELKLLGRRYRYYMELHVKALQELTHVLDYVLPGIKKMFNSWNEANGKDKLSDFVERFWHFDFITSMSLEKFTEEYIAWAREKKYHRSRSKAEAVYELASSGIPTLSSSTPSTKMLVQEAVSVLRAVDSSLSLILTRMQELAKSLPEYSVVREMGGVGNVLAVKLIAVIGDVRKLHNAKALIAWAGIDPPPYESGQFIGSKRRITKRGSSTLRKVGYEVMRVLKSHSAPKDDAVYNYILKKESEGKSKKHAKIAGLNKFLRIYYARVMEVYQ

SEQ ID NO: 48586 - protein, 379 aa, unidentified
MSKKRFSHLRGERGQAFADLIRGIPSEQILCVSLDISKYFHVVMIHNGLGEIVKPTFEIDFYQSGFDQLCQAIDQAKAATQAQVVLVGMEPTSHYFENLARHLLQHSQPVTLVNSFAVKQNRDQQLMRREKTDPIDCAAIGDLLRRIDFWQCQTLQHLIRVCPDPHLLANSTPEQLVQLFKAQSYRLGRNTAAKIIARAQQALLPDPELVAIRRELLHHDLILLEAVQAHIAKLEQHLTDLVAQTPFQVWTHLKGLSAVQVASLAAAIGDPANYSYAGQIFRRSGLVSGRNDSGNRQRKGKGNRVLKVGDVYLRRALMSALNTLLLHQPLLSHYYRKLSRSKPAGVTRVATARKANSILWATLRDQYPVSLISCKGATM

SEQ ID NO: 48587 - protein, 349 aa, unidentified
MTEQRLSYIGERVYVGVDVHKETYTVTCVCQRQIVKTATVQADPASFAVSLLRWFPGATLYSAYEAGFSAFVLHRALTKTGITNIVVNPASIAVAANDKVKTDRRDAKKLAIDLADGRLRGIYVPTETEELARLLPRTRAQIVEHRATIARQIKAKLHQFGLITPASRRLISSRYLREIAAWSLPPALNVSLTLLADQWRFATRQLIEMRRLLRDQAKAHEEIEKVYRSVPGIGEVVARTLATELGDMSRFANERRLFSYTGLTPSEYSSGASVRRGHISRQGSSRVRHLLVETAWRALPRDRVLKEIFDRIAATRGKKRAIVAIARRLTGRIRACFRQGTTYAIGTYA

SEQ ID NO: 48588 - protein, 331 aa, unidentified
MAQNDLVVAGIDVAKDKVDVCIRSLSQRQTFPNTAEGRRALSRWLRKHRVHYAAMEASGGYERDWAKVLREAKIEVRIVDPKRVRSFARSAGRLAKNDTIDAEMIAWFAETFPDAPGQTCDAVRERLVQIVNARQYLLDVQTTLHNRNEHSTPDVVQKMQARMLKQIALEVARLETAITTLVEATAPFAELTGIIESVPGLGKITSASLIAAMPELGQVSDNVAAALLGVAPYDDDSGQRKGNRHIKGGRRKVRNVFYMACVGAATRHNPMLKAFYDRLIAKGKEKKVALTACMRKLICILNTMIARREKWDAARYKVNQPARLPPGACPA

SEQ ID NO: 48589 - protein, 340 aa, unidentified
MKKLYGAFGLHSSNNYLGISDEKDRRVYKKRLPNQPDVILAELEPYRNELVGVVVESTFNWYWLVDLLMKEGYRMHLANPAGIQKYKGLKYSDDQDDAFWLAHLLRLGILPEGYIYPKEDRPVRDLLRKRGHLVKLRTSLINSLQGIIHRNCGVNLNANKIKALKENNVAPLLGDQEDLALSGMVSKEAIDYLGRQIRKVENVVLSKAKLKEEYLYLLTIPGIGKILALTIMLEAGPIARFQKVGNLTSYCRKVPTKWTSNDKKKGKGNKKNGNKYLAWAFSEAAEFARRYDDQARAFYNRKTAKKNFMVAHSALAHKLARAAYYVMRDQVEFDPQKLFA

SEQ ID NO: 48590 - protein, 358 aa, unidentified
MAGKVTETAVVGGVDTHKDLHVAAVVDQNNKVLGTQFFSTTRQGYRQMLAWMTSFGALKRIGVECTGTYGSGLLRYLQNAGLDVLEVTAPDRMERRKRGKSDTIDAECAAHAAFSRIRTVTPKTRNGMIESLRVLKTCRKTAISARRVALQIIHSNIISAPDELREQLRNMTRMQLIRTLGSWRPDASEYRNVTNVYRISLKSLARRYLELHDEIADLDVMIAAIVDELAPELIKRNAIGYESASQLLITAGDNPQRLRSESGFAALCGVSPVPVSSGKTNRYRLNRGGDRAANSALHIIAIGRLRTDDKTKEYVARRVAEGHTKMEAIRCLKRYISREVYTLLRNQNRQLNSIPITA

SEQ ID NO: 48591 - protein, 338 aa, unidentified
MTQHKIIGIDLAKNIFFLFEINHKGKNLSRKKLQRSKLLNYVVSQSPCVIAMEACSGAHYWAREFVKFGHEVLLYPPQHVKSQRRKQKNDYNDAEAIAELALYQRHPAVPHKSIEQQDIQSLIRMRRLCVTERTRLINQVRGFIAEYGIVLPKGKTSFRKAIPEVLEDVENQLSPILRELLSRQYERYLYIDEQISWFEDKLNQTVKQFDNAKRLMSIPGFGPLTSQAVAVWLGSGKQFKTGRDASAAMGLVPRQDTTGGNVVLLGITKQGNTYIRSLLVHGARAALRRAKFKSDKLSKWMLDLQERRGPNRAAVALANKLMRIAWAVIAKNEEYQPA

SEQ ID NO: 48592 - protein, 330 aa, unidentified
MDASGVSAGGYHVSETTTERYGGVDVSKATLDVATWPDGEHQRFPNDPQGAGNAAAWLRARAVAGVSFEASGGYERELARALGRAGVPARREQPGEARAFARASGQRAKTDRIDAGVLARYAAQLRRPANLLAAGQDEHLEAVSRRRRQLVEMITAERNRLAAPGTDEWTRRLIERHLAELEEQLAAVEAELQRIVRADPGYRRRDALLRSVNGVGPTLSTILIASLPELGRLTRQQIAALVGLAPLNRDSGRRRGERRIIGGRGHVRTALYMPALSAVRANPVIRACYRRLRAAGKPHKVAIVACMRKLLAILNAVVRDARPWSPALGG

SEQ ID NO: 48593 - protein, 359 aa, unidentified
MSTQSKPFSFKGQKIFVGLDVHLRSWSVTVLSEQSVLKKFTQDPSPAALNKFLTNTYPGAEYYSVYEAGFCGFWIHWELQNLGINNIVVNPADVPTMAGERLRKTDAVDSGKLARSLRSGELKGIYVPDSVATEIRSLIRLRDSLTKDQTRHKNRIKAHLRYLGIDIPEEFCRPGRTWTNRFVIWLKGLKLETKYGKKTLDLLIAQYEDLRGQQLKMMKELRVLSRTERFDKPLQFLMSIPGIGQLAGLTILSEVDDISRFKDAAHFASFIGMVPMCHSSGEHDGTGNITVRRHAKLRWLIVEAAWIASRKDPVLSAAYVEYCRTMKPSKAIIKIARRLVNRIYFVMKHQQPYVNCYVS

SEQ ID NO: 48594 - protein, 312 aa, unidentified
MRKITTLGIDLAKDVFQLHGVDELGAVVLRRQVRRGQLMGAVAQLPPCLVGMEACASAHHWGRQLGRHGHTVRLMSPQFVKPYVKSQKNDQADAEAICEAVQRPSTRFVPLKSFEQQDFQTAHRARQGLMQERTAIINRMRGLLGEYGVILARKPATVRREVPEVLGDAQNDLTVVARELIAELFEHFRDLEQRIARIDAVIERLGSAHETVRRLQTVPGIGLLTATALVAAVGDARAFKNGRQMAAWVGLVPRQISSGGKARLVGITKRGDRYLRTLLIHGARVITTCAERQKRPAHQWLNAVRERRGNWG

SEQ ID NO: 48595 - protein, 338 aa, unidentified
MAIVFMGIDLAKNVFQLHGADADGLLLLSKRLRRDQLLPELAKQPPIMIGIEACTGAFFWQRQFEKLGHSVRIIAPQYVKPFVKYQKNDRNDAEAICTAMRQPNMKFVPTKNEEQQDIQALHRARSRLVNHRTALISQMRGLLLDRGIAIGVSINRARRAIPEILADQDNDLTDMAREIIAELYEFLAQIDLRVKAFDRRIEAVFRANAACQRIARICGVGPKTATAVIASVGDGREFKNGRHLAAWMGLVPRQHSSGSRQILMGISKRGDQHLRTLLVHGARAVVRVAVNRTDPMSRWINELRERRGVNRTIVAVANKNARIIWAMLRHDMEFQPAV

SEQ ID NO: 48596 - protein, 457 aa, unidentified
MTPHAGKRFRTSPPGDDLAVQHPQAAGIDVHAAVHFVAVPAEDVPPGFVNPEPRLPAGVRKFGTNTGDLEALADWLTAGRVTTVAMESTGVFWIPLFDLLASRGFHVILVDPRQTAHAPGRPKSDVLDCQWIRRLHSYGLLTGAFRPADEIVRWRGFQRQREMLIRYAAQHIQHMQKVLEEMNVKLTEVVSDIVGQTGMKILRDIVRGVRDPVKLAKHRHELCKATKEQIAAALCGNWRPELLFALRQALKLYDVYQKQLQECEGRIEECLRAMEDKSKGAPLPPPPRKRKSQKNEVRFGARVLLFKMAGVDLTQIEGISATTALVILSELGVDLSAFPHEKNFVSWLGLCPQHRGSGGKIFKRRTRRGANRVARALRMAAQGCHHAKNALGAFYRRIQARCGGAKAVVATARKLAERVYRMLRYGQEYVRQSQEAYQEAYQLRLVKSLAKKAASLG

SEQ ID NO: 48597 - protein, 317 aa, unidentified
MDYNHYIGIDMAKATFSACLAEGQEAEKWPNNKKSINRFFKHLAGNNYLNDNTMLGVESTGKYHYPLCIASRQAGYAIKVINPLIVKKQNLTTMRRVKNDNKDAQLIRYCLIQGHGYKYQETSEQFILKTLVRQRNAISNNKNRLKRQKEDIAYKEKAVQAKINNIYQELYLLLDQKQKQIEKELKKYDQPIQKLLQSIPGIGPVTAASFVSEVGDIRKFECPKRLVAYCGIDPRVHESGTSIKGKGYITKRGSKILRTILFNAASVAVLHDNMFRYYFQKKISEGKPYRVALIATMRKMLHVIHAVWSRGAPFVNK

SEQ ID NO: 48598 - protein, 339 aa, unidentified
MQVTTVGLDLAKNIFQVHGITSEGEGAFNRPLRRAQVLSFFEQLDPCLVGIEACGTSHHWARELSQLGHEVRLIPPIYVKPYVKRGKSDAIDAEAICEAVTRPTMRFVEIKSVGQQALLTLHRARNLIVRQRTQLINALRSLLAEFGVYIARGLARVISFAQGVVEGVELELPTVAQDVFRNLCQQLGALHEQVRWYEVRLRLEAKRDPRVRLLQTIPGVGAVTASALAASIGDGHQFRNGREFAAWLGLTPANKSSGGKERLGRITKMGDQYLRQLLVVGMTSLVRQVRSHPERANKWLTGLLERKPARLATVAMANKTARIVWAVLTKNEPYKPRTA

SEQ ID NO: 48599 - protein, 347 aa, unidentified
MRKIAYLAMDVHARNCVLGDMDGNGNFRGNRSFITRENNIIKALKAIKAKKKHLIMEAGPLSNWAAQLANDHVTRVIICDPRENALIYKSSQKRDKVDTKKMCRLLRLGEFKEVYRPENDQRAIFKAAVQHYLDLRNQLSALKNKIKAMYRQWGVIDVFTDSVYSTSGRDKFLNQLTQRPIYLQLKRLYDLMDHTAAIKKTAEKSMVSLGRNYPEINEFKKMPGMGPIGAHTFDAYIQTPHRFAKTNRLWRYCRLGVTDCTSDGKPLGYKRLDKSGVNELKALSYRAFLSAIKGDNEVKRFYLNSLQRTHDRKHARLNTQRKVLSVMLSIWKKGDAYRPELFLDPSI

SEQ ID NO: 48600 - protein, 341 aa, unidentified
MGRAIAVDLHKTSFTVCFYNSEEDHEFKTYGVNQRGIEFFKTNLRKTDEIAVESTGNTAYFVREVEEKVKRVRIVNPIQFKIIANSTKKTDDIDALTIARFLKRDLIPEVRMRTKEESQIASLIGTRDKFVKLRTALKNKVHNILTANGIITKREAFSSEKALDKILTLNLEDSYKFELELIIQEIKNLNQSIDKINNELKDRGQKLNGHKNLTSIKGISDTGATIFLNTIGNIDDFKSEKHLAGYFGIVPRVYVSNKTVQYGRITKQGNKIARTALVQSTLIAIRYSPYLRSFYDKIKARKGSGKAIIATSRKMLGIIYNTLKNNWVFEDFTKFKLAECA

SEQ ID NO: 48601 - protein, 343 aa, unidentified
MQTIATIGLDIAKSVFQVHGVDAAGQVVVRRQLKRRQVLAFFAKLPPCLIGIEACASSHYWARELQALGHTVRLIPPAYVKPYVKRQKNDAADAEAICEAVTRPNMRFVAIKTIEQQGCLVLHRTRHLLVRQQTATINSIRAYLAEFGIVAPVGRRGVEQLLEVIADFNDARLPEVARACVAALGVQLRQLKAQILELDRRITAWHRSSETSRRLNQIPGVGPLLATALVASITDPKVFRSARDFSAWIGLVPKQNSSGGKDKLGNISKRGDRYLRSLFTTGALAVIRYAKIHGTKHRPWLVALLARRPTKVAAIALANKLARIAWALMTKGSHYRQPAALRV

SEQ ID NO: 48602 - protein, 342 aa, unidentified
MESTTIAVDVAKEVLEVAVSHHPGQVRQQRRLSRAAFTRFFADQPPATVLFEACGSSHYWGRCLQQLGHRVVLLPPHATRPYVFRNKTDRADTRGLLEAFRNRDIRPVPLKSVPQQALTALHRLRSTWLAARTARLNTVRGLLREFGCVIPVGAHRVLPAAEALLGDAESGIPDALRPALAEACREIVDLESRMALVERQLTALADQTPAVARLRSIPGVGLITATALVAFVGDVQRFPSGRHFASYLGLTPREHSSGLIRRLGAISKRGDVYLRMLLTHGARSVLWTARSKRQHDRLRAWALEIQSHRGHNKAAIAVANKLARIIWAVWRSGSDYREVPAA

SEQ ID NO: 48603 - protein, 351 aa, unidentified
MSRKTEAGLACTIGIDTGKNTLHLVGLDAKGAVVLRDKLARGRIAARLANVPPCLIGIEAGMATHYVARELLVLGHDVRQVPPSYAKPFRQGHKNDFRDAHAIAEAVQRPSTRCVPVKTDAQLELQALHRVRSRLIGGRTAAINQIRSFLLERGITLRQGLRFLRQQLPQVLATRTDVLSPRTIRIIEDLSSDWRRLDERIEHVTEEIELLASDSEACRQLMTVPGIGPIIASAMVAAIGNGAAFAKGRDFAAWLGLVPKQMSTGDRTILGRITKRGNRYLRTLFMQGARVVLLRPTNWAKHSFGPWIAAAAKRLHHNVLATALANKLARIAWTVLAQGRSYEPRAVPGIV

SEQ ID NO: 48604 - protein, 389 aa, unidentified
MFYLGIDIGKNTHVASLVDDKKKVIFKAFSFSNSIDGAESLILKLESFKNELEIGMEATGHYWLSIYSYLVQKNFTVRVINPIQTDGWRQGIEIRKRKTDIIDSLLIADLLRYGDFVETSLSNEDYLSLRNLSRFRSYLVSSIGDLKRKTIALLDQVFPEYASSFSNIFGKTSKEILSTFSTPSDFEDINSEDLQSFLDNVSRKKFASRKLEELSKKASTSFGVNFCMDSFSLQIKMLIEQISFIQNQVSDVEKEIEILLEKLNSPITTIPGIGAVNAATILGEIGDIKRFSNPSKLVAYAGIDSSISQSGEFESTSNHMTKRGSPFLRRALFQSALRAEFCDPVFSDYYQKKISEGKHHLVATNAVARKLCHTIFAVLTKNEPYQVQI

SEQ ID NO: 48605 - protein, 357 aa, unidentified
MYSIGVDFHKAYSHMTVMDAQGHVVRAGKVLNTVEAVQAFVAPYRDNAQAVLEATRNWTVMYDMLERELRAVYLAHPLKVRAIAEARIKTDRIDSKILAHLLRCDLLPTAYVRPREQRISQQILRQRMFLVRVRTMVKNRIHVLIDRPLEVREVAAQFSDLFGGAGLAWLHAVTLADVERRLLNAELALFEAVQARIAESDRLVRNLATGDPRVRWVRTIPGFGRFFAVLVVHEIGTIRRFPTPEKLSAYAGLVPSVHASGGKVFHGRLTKQGNKWLRWAVVEAVRPAVTSDPDLRRYDERLRQRKGPNPAKVATARRRLLLAHRVLSQERPYRKSASVTIRPRPRTALMNPLPAAG

SEQ ID NO: 48606 - protein, 401 aa, unidentified
MNAVGIDISKGRSTVTVMRPFGEVVVSPFEVGHTSSELSELAKLLKSLDGETRVVMEATGNYHAPVAWLLHNAGLYVSIVNAKLVHGYGNNALRRVKTDRKDAVKLANYGLDRWLTLPRYIPEEDTRLLLKNCHRQYRQASKVQTMLKNNLISLLELTFPNVNRLFSSPVRADGSEKWVDFAADFWHCGCVCEHSERAFKNKYQRWCRKHGYHFSEEKAHDIYTKASGHIGVMPKSDTTKLLVEQAVSQLRAASAALAALKQEMQSLASQLPEYPVVMEMFGVGPALGPQLMAEIGDVRRFHSKKALVAYAGIDAPPNDSGDVTGRHKGMSKIGTPSLRRTLFLVMSVYLQQSPLNEPVYQFMDKKRAEGKPYRVYMMASANKFLRIYYATVKQYLDSLEV

SEQ ID NO: 48607 - protein, 369 aa, unidentified
MAKPITYVGLDVHKDTIAVALAEAGLRGEVREHGKIPNTPTALKALTVKPAPAGRELRFCYEAGPCGYGIQRQLTGMGHECAVVAPSLIPRKPGARIKTDRRDAINLAKLHRAGELTAVWVPDQAHEAIRDLVRARQAAVRTLRQARQQLSGFLLRHGCHYHRPAWTQLHRRWLASLKFDQAVNHIVLEDCIAAVEAAIARRDRLEAHIEAALPEWSLAPVVEALQALRGVRLVAAATLVAELGDITRFTNPRQLMAYLGLVPSEHSSGRTRRQGGITKAGNGAARRMLIEAAWSYRFPARIAREQLLRQERLAKPIRDIAWKAQERLCRRYRKLARTGKQPTVITAAIARELAGFIWAIAKQVQPMAT

SEQ ID NO: 48608 - protein, 344 aa, unidentified
MTDITRIGVDTSKAVFTLHGVDAANRPVLRINLSRAQMIPYFRKLPPTIVALEACGSSHYWARQLAGLGHTVRLVPPQYVKPYVKRGKNDRNDAEAICEAAGRPGMHFVPAKTLEQQAASMVLKVRDTLVCQRTALINTVRGHAAEFGLIAAKGKGKADVLFAAIEQQTDIPIEATEMFALFRQQINDINARIADLDARLHAAHKANPVSQRLAAIPGVGPITALTLAIEIDAAQFESGRHLAAWAGLTPKERSTGGKQRMGGISRAGNERLRRLLVAGATSVIRAASKPGSRQMTEWLRALLARKPRKLAAVALANKITRVAWALMKSGETYRRDATTGVAKA

SEQ ID NO: 48609 - protein, 430 aa, unidentified
MKSNTQNAKIEAITEKTLVLGIDVGSETHYARAFDYRGVEYSKKPFKFSNTEAGFVTFKAWVLDIKEKHGKDKVIPGMEPTGHYWFNLGKFLQDNEMKPVLVNPHHVKKSKELDDNHPTKNDRKDPKVIAGLVREGRYMIPYLPDGVYADLRTASNIRFQLQAELTRIQNRINRWFNIYFPEYKTVYGKPDAKSGILILKEALLPEDILTLGIDGVNQIWRDAKLRAVGKARAKTLIEAAEHSVGSKEGAVSARMEIRMLLEDYESRNIRLQEVMGLIEGLVNQIPMAEKLLEIKGVGIKTVSGFLAEVGDIRRFNDPKELQKLAGLALVENSSGKHKGKTTISRRGRKRLRYLLFEVAMSLVAKNPEFRELHNYYTTRRLNPLKKMQSLMAIAAKLLRVFYAILTKGVGYDPKKMVNDIRRPAAYAQAA

SEQ ID NO: 48610 - protein, 419 aa, unidentified
MNKLYVGMDVSQDDVKVYILDQEGNEATKRFCVDNNPAGAETISNNILECCRRLSINKVFAGLESTSVYGWHLQFYLADHLGLKPFDPMIISFNAKIVEAFKKSLGNLPKNDWIDAFTIAERLRFGRLPKTCPVDFRYLALQRLTRHRFHIVDNIVREKNYFLSNLFLKFSGLCQNRVFSTNFGATATQLFDEFLTLDDIAARPLDELVDFMVEHGKELFSDPKATATALKDAVRKSYRMNASVDNSLNFVIKSCLDNIQTLEKQKKAAEKAIAHEISSFNNQYLCLTSVKGIGPTIAAGLISEIGGISRFENDNALAKFSGLYWSEYQSADFVAEDTYLKRTGNEYLRYYFIQAADQLRKYVPEYSQYYARKFKEAKTHKHKRALVLTARKAVRLVFALLREEKLYKPPAPKGGTNEK

SEQ ID NO: 48611 - protein, 348 aa, unidentified
MVLIGCDFHPSWQQVCWLDVETGETGEHEVVHTPGEVEKFYRRFAAPALIGLESTGNCQWFVELVEQLGHEVWIGDAAKIRASEVRQQKHDRRDAALLLRLLREGRFPRIWTPSSEQRDARQLLIHRHKLVRVRAQVKNGLQHLAMNRGVQKKRKLWSAAGQQALRELPLRPWAGRRREDLLKLLAMLDGQVAALDLAVKAAAEQDANARLLMSQPGVGPITSLAFVLTLGDVRRFPRGKQVASYLGLIPREYSSGGHQRLGSISKQGNRFMRMLLVEAAQVAVQCDPGFRNEYLHRRHSKPSGVAKVAAARKLAIRLYWMLRTQKRYPEIVRIESSPRVALVVRHGG

SEQ ID NO: 48612 - protein, 343 aa, unidentified
MKITTIGIDLAKNIFQIHAVNEHGKAVLKKQIRRNKMILFFTNMEPCLIGMEACGGSHYWARQLEQLGHKVKLMAPQFVKPYVKTNKNDAADAEAICEAVRRPNMRFVSIKNGEQQALLSIHRARQGFVKARTAQANQIRGLLAEYGIVMPQGIGHVTKRLPEILEDVDKDLPGTFLHLLQRLGEHLKELDRQVDELEVQIQVWHRENVASRKLAQIPGIGPLTASALVASIGDAKNFDTGRQLAAWLGLVPRQHSSGGKSNLLGISKRGDAYLRTLLIHGARSVIRVAENKPDYEGSWLMLLLERRSKNIAAVALANKNARTVWALLVHDRNYKSNYKQLAA

SEQ ID NO: 48613 - protein, 348 aa, unidentified
MTVYIGVDFHARKQMLSYLTTEDGEIQQIELLHEEDDIRGFYARLRSEGAVIVGFESSGYAAWFEEMLEELGCEIWVGHAAQIRKCARRRQKNDRRDADLILELMLRGDFPRIHRYSRANREVLQQLRYRQRLVKMRTMTINSLRFMAASRGITLRGKLQSQRGQDRVLALALPAPMDQQRDELCRLLMELQQKIETVEEALTQTAAADVKVKQLRTHPGIGLLTGLGLVHTLASIERFANGRKVTAYAGLDPVEDSTGERRRMGSISKQGSRLLRSLLVEAGQVAARHDDELGQVYRRLLVRRGHATAKVAVARRLLVRAFIMLRDEIDFAEFQRRGVAARSSRRSA

SEQ ID NO: 48614 - protein, 358 aa, unidentified
MEETKVRIVGIDLAKRTYVAHMIEDGNPKSKVWDGKNDESGVLRLCSRLRAGDRVGMEACALAFHWAKVIQARVGCKVVVLNAGDLAVIYKSVKKTDFEDAGKLAWLMHRLPDEELPVVALPTEQEELRRAMVSELASKRRARTVLLNRLHSLFVRQGVVTIKKADLATLDKRKQTIGVLTGRTLVEAGRIEEELALVEAHNQQIQQEIRKELQEEPKVARLLSIPGVGPTTAMAFLAHVGDGSRFSRARQVSHFVGMTPRVDSSGETTRIGSITKRGCTAIRGLIVQAAWSATHSSMDHRLKQKYRELAARRGKGRAIVAIARRILELMWIVVTKDTDYWETDQESLNRKMAKLRAA

SEQ ID NO: 48615 - protein, 325 aa, unidentified
MQIYAIDVSKEHLDIFSKSEDGKIFQKRIKNSFNSICRLLSALEPKDLICAEFTGVYTNLLRHLSAMYGIKIALASGFDIKHSLGNRKGKSDKLDAERIWEYASRFSDKLNFVLPDSEMLQELKMLFNLRNQLVKSLKTLHTSHTMIKLNPYLSIAENSIRAQTEAFIKGQIKQTENQLFELIESKSEFSRNFALVTSITGIGKVTALELIISTGNFKRINSARKAAAYAGVCPYPNQSGNIAKKSRIHFRANKKLKSLLHICAKTICIHNKEFKLYRERKMLEGKHFYLVMNNVSNKLLRTVYAVVDSQKPFDPNLITIDPRFR

SEQ ID NO: 48616 - protein, 330 aa, unidentified
MQGRDIKEEKPMEKEKVYVGIDVAKASMDIAVHSTGQRWSFLNDDTGIAQAVTCLRELAPELTVMEATGGIELPLTAALVVAGVPVVIVNPRQVRDFAKATGRLAKTDALDAKVMAHFAAVVRPTPRPLPDVQAQEFSAILARRRQVVEMLTAEKNRLGTARKAVRERIRAHITWLEQELANLNQDMRRSVQESPVWREKDNLLRSAPGVGPILSATLLSELPELGTLNRRQIAALVGVAPLNRDSGTFRGKRTVWGGRATVRAALYMAALVATRYNPVIRTFYQRLCAAGKAKKVAIIACMRKLLIILNAMLKHRTPWGLTPQILVPCH

SEQ ID NO: 48617 - protein, 322 aa, unidentified
MRYIGIDVSKATFVVAYSSDKGGEIRTFNNTTTGIKQFIGALPKDSSIHCVMEATGNYSAMLLYLLNVAGIAVSMENPLKVKNFAKAMLSTIKTDKSDARLITLYGEKMNPRPFKVQGEAILRLRQKRTVIRQLTKQITAMSNLRGSLACLPVPDKGATHTVDETIKFLEKKRDRLQSELTDLVEVEFSRQLALLTTIKGIGITLATALIITTGGFTYFQNAKQVSRYLGICPTYEQSGTSVNIRGHINRNGDAYTRGLLYVAAWTASRFNTKCGETYTRLRQNGKPGKLAMIAVANKLVRQAFAVVTHDKEYVDGFVSNRP

SEQ ID NO: 48618 - protein, 351 aa, unidentified
MLLIGVDYHPGFQQIAFLNQDSGECGELRLNHGDGEAERFYRELQQRGVRVRVGMEATGFARWFERLLAELGFELWIGDPAEIKAKRVKKQKTDRKDADLLLKLMREDRFPKIWIPTPENRDLRQLLWHRHRLVQMRTRIVNQLWALAMNEGQHRKKKLWSEQGRAELEKLSLAPWANRRRRELLELLDRLNPTIEELTAAAEQEAKKRPDVLRLMTHPGVGPLTALAYVLIIGTPSRFARGKQIGTYAGMIPSEESSGDKQRLGHISKQGNALLRFLLVEAAQAAARVNPEWRRRYIHLAMRRHKSIAKVAMGRRLAVRLYWMWRNGCPYSPSLEFGSYAGQPGIVHGVK

SEQ ID NO: 48619 - protein, 341 aa, unidentified
MNELYAGMDLHSRNTYIGIMEKDSKKKVFEKRVPNHLSLILGLFEPFKDQLQGIVVESTYNWYWLVDGLMDAGYRCLHLANPSAIKQYEGLKYSDDRSDAFWLAHLLSLGILPEGYIYPKQDRPVRDLLRKRSFLVRHRTAHILSLQSMIERQTAQRMGSNKIKTLTSEDIKLIFDEEHLVLSARASSATIEFLTHHIKEIEKAVRARIKIRKPFEYLLTIPGIGDILTLTIMLEAGNIKRFPRVGNFSSYARCVSSNRISNGKSKGKGNTKNGNRYLAWAYIEAAHFAKRFSPRIGRYFQKKAARTNEIVATKAISNKLARASYYIIRDQVPFKEEALFC

SEQ ID NO: 48620 - protein, 317 aa, unidentified
MTIQGEKYIGIDVGKTWLDVAVWGAEEVWQVPNDDSGLEKIVDRLVEWIPALVAVEASGGYEQRVVQELILRGFAVAVVNPTRVRALAKATGKLAKTDAIDARLIAEYAFKIQPETMEAKEANEIRLKAMVSRREQLVQMCTAEQNRLATTHSSMKADVQEHIDWISSRIEALEEEIKKLLAFLPELKALADRLDTIPGVGFITAITVVAEMPELGQLDRQKIAALAGLAPFNRDSGKKRGKRRIFGGRKGVRRVLYMACLSAIVHNPNIRRMYNRLTENGKIFKVAITACMRKLLTIMNAMIRDQADWRPPTLISA

SEQ ID NO: 48621 - protein, 429 aa, unidentified
MRSYNQVIGSPVVFVAIDISKARHEVLIEAPDGKRRRLAIANTKADFDDLTALLHSYRVPCHIGFEATGDYHRPLASILGLQGFHLHLVSSIATNRTREALYNSWDKNDPKDAQVILHLLKTGGTQIYHDPLASGFNDLQEMANTYQQLSLRKVRLYHSIVTHFLPLYFPEAEAYMGTSRAEWFIHLLLLTPCPAAVLAHSKASFIRAASRIRGRKVDKARWLADFYETAKESVGLPVPTNSEAMRMFRLVLEEYAALCERRYQLEEHIEDKLGAHPDFRRLKTIPGVGPVLAMLILAEAGDLRRFSHYRKFLKYCGLDLCTDQSGKFRGTTRLSKRGNARLRYAFWMAGTGAVRMRQNSFREKFDNYLRSDPKNADVKRKAYTAVAAKVARVAFGLLKTGTDYRRFPEVAIPSGRIPSHRAVEALSTS

SEQ ID NO: 48622 - protein, 341 aa, unidentified
MNGSKNVVGIDIAKRVFQLHWIDQETGEIVSLQLKREQFLEHFANRQKCLIGMEACGGAQHWARKLTAMGHQVKLLPGKAVKGFVTGNKNDRQDARAIWTAVQQPHVKAVALKTEEQQAILALHRMRSQLVKFRTAQINGLRGLLTEHGEVMPQGKAGVRKGIVEALARLSDRLPAMVIDTLREQWARIGRMDEEIATIEQRIKLWLKNDDACRRIAEIPGVGPLTATAAVAIMGDAKAFKSGREFAAFAGLVPRQVGTGGRVKLLGISKRGDTYLRTLLIHGARSVLTHAKEPGPWVTALRQRRPLNVAIVALANKMARTIWAMLAHERTYQKEFVSQPA

SEQ ID NO: 48623 - protein, 335 aa, unidentified
MEITTIGLDLAKHVFQVHAIAADGTVVLKKRLRRGQVYSFFAALTPCLVGVEACATAHFWARQLRELGHDVRLMPAQYVKAYLKRGKNDAADAAAICEAVTRPSMRFVPIKGEDQQAALMLHRARDLLVRQRTQLINAIRGHLAEFGVIEAQGPWNVPRLLAGMEEADLPDPVPGLVRLLASQLEEVELRVDEIDTQIMAWHKASPVSQRLAGVPGIGPLVATAIAATMPDPTVFRSGREFAAWLGLVPRQNSTGGKTRLGRTSRQGNAYIRRLLVIGAQSALFCSKATKANPWIQALLAKRPRLVVAVALANKMARIAWALMARQTTYQAAAAA

SEQ ID NO: 48624 - protein, 375 aa, unidentified
MTNNTVFIGLDTHKKTIAVALAEDGRHGEVRYYGQIANEPSAVLKLVNKIASKYVKLHFCYEAGPCGYGLQRQIAGLKHECVVIAASHTPTKKGVHVKNDRRDALELARLHRAGDLTTIWVPDEAHEAVRDLVRARITAMEMTKKYRQHLQGFLLRHGRIFQGKTHWTKSHLKWIRDLMFEHPAHHILIEENLAAIRDSQDRLARLEQQIVNLLPTWTLAPVVQAIQAMRGVSLMAAVILVSEIGDFHRFTHPRQLVSYLGLSPSEHSSGDKIIRGRITKAGTSRGRRVLIEGAWAYRLPARVSNKIACRHDGLTKDVLDIAWKGQIRLCKRYRSMSARGKNKNIVVTSIAREMVGFIWEIARTIPVPTMVAHAS

SEQ ID NO: 48625 - protein, 339 aa, unidentified
MNQFTKKKHFIGIDISKDHLDLAIVKKDGYGIFKDKRVENSFKGYGRIKSWLTKEKLKLTDCLFCMEHTGTYGLLLFAWLGQMNIDYCVEPAIQIKRSLGLTRGKNDKVDARRIAEYALTNRGKLDRFSLPSKLLLQIKQLLTYRDQLIKIKVSLLNSLKNHIQYQQVLGSEIVSNEINDQIDDLVDRIDNIDRQIKELIKSDDELKKNFDLVTSVKGIGLVIATFMLVTTNNFTSFETGRKYACYSGIAPFESSSGNYQGKARVNPLANKKVKALLSSGANSACRWDPEIKAYYERKIKEGKHHNLVINAIKCKLVNRIFAVVHRQTPYVNIYQQKFA

SEQ ID NO: 48626 - protein, 450 aa, unidentified
MQFMKKKAGFPVLYPNAAGIDIASREHYVAVNPDAAEQSIRSFGSFTDDLHEIAAWLLQCKVDTVAMEATGIYWVSLYLILEEAGFEVVLVNAKHVKNVSGKKSDVKDAEWIRQLHSCGLLSKGFQPDHFTRTLRAYMRHRKNLTEMAATHIRMMQKALEQMNIKLQNVIADITGKSGQAIIKAIIDGEHDPQNLVKLLDGRIKATKESICKSLHGIWKTENLFELKQSFDLYHTYQEMIKECDLHIKRHIEEKASYCESDQIQSLYPVKKKYKTNKNNLNFDATDMLQKIVGTDLTEIFGITDTNATEIISEIGLDMSKWPTAKHFTAWLNLAPNNKVSGGKLLSSRVPRKRNKAGQIFKMAAFAVQRSKNWLAIFYNRIKMRSGTSRAVTATARKIAIIFYKLMKEKVRFCPLDRDQYLESFKVRQLKKLKQQATRLGLVLVPDNLVT

SEQ ID NO: 48627 - protein, 370 aa, unidentified
MLDTTTFVGLDVHARSIKAVSLDVMTGEVRCATFGYDAGAVAEWVRSVDPKARCVYESGVTGFDLQKRLSGLGVDRVVGAVSKMIKPSADRRRKNDRNDAEFLARMLSVGNVVEVWVPDDECEAARDLVRALDDAREDLRRQKQRLSKFLLRHGLVFDERTPSGQRKGNWTGAYWSWISSISFAEKADNDAFAFYVDAVRQAEEDKRRLEKPVADEAAKPRWKKRVDSLRCLKGIDVMTAADIVFEAGEFARFRNARSFAAWLGLTPSEHSSGESDRRGAITKAGNKHLRKALVEAAWHYLTCSARPKEPARGQAPDPGARRHAAKGVRRLAERREALLARGVHNNKANVATARELACWVWAVGLMAEEA

SEQ ID NO: 48628 - protein, 357 aa, unidentified
MAIGPRGSRIADGLFIGPGSLPERFGSLHKAGATKMTHISISKAEVEAPTAGIDVGKHRLQLRLSDGGTGDYGNDVDGHLALIAALRQRGVLRVGMESTASYSAKIAAALREAGFIVNVFQPKQVKAFAQFRLRRAKTDKIDASIIAQCTALSQPQATPDARLAGLCERLTLIEQIGDDIKRGKTRLEHVASAEIRAIHCEEIKRLTLRRRLAVRALVASVRRHDDLAERMALILSIDGIGELGALALVLRMPELGSLSREQAASLLGVAPFSCESGQFKGERHIAGGRARRTLFAAAQVACRRWNPALVALYKRLTAKGLHHTAAVVACTRKLVIYANAVLARRKPWTKSLEPTNA

SEQ ID NO: 48629 - protein, 405 aa, unidentified
MKIWCGIDWAEHHHDIAVVDEAGTLLVKRRIGDDLDGFGQLIGVLTDLAGPQHLEVPVAMETANGLLAASLLEAGYSLFAINPLAVSRYRDRYSPSRAKSDAADAYVLANILRTDPAAHRPVPADSEQAKAIRVLARAQQDAVWERQQAQAKLRSLLREYYPAFLAAFPDLADRDARAALAIAPSPAAAARLRRPSLRAALARNGRQRNLDHQVERILTELRVEHMRQPARVEAAMSAQALAHLRSLDAAVANAAALEASTAAEFATHDDAAIITSMPGLGPVLAARVLAELGDDHSRFADAKSLKAFAGTAPVTRASGLKRSVTRRVVCNKRLGQAGHLWAFSLLTSSPGARAHYDRRRAAGDSHNAAARNLANRYFGVLHHCLQNRVPYDEAKANPTPRAVAA

SEQ ID NO: 48630 - protein, 384 aa, unidentified
MSSRRRGPGPSHVLTTPDHAGNVVGVDPHKRTLTATVADPRGGILASGHFRVSGDGHRALEAWARQFGQIARWGVEGASSWGRHTAVFLVGRGYDVRDVCANRTPRSDRARQRGKSDTLDSERIARETLAHPLLPRAFKRAGQDSGPDELHELLSLWHNQRRSILTSRQHLLNEAEHMLCDLPLPLREQLPDTKAVRSRLAALAARNRRRRYDQPTTLRLKLLDEYRARIAKLDAQDKQVTAKLAALVKASGSTLGELCGLSTVLVSELLVEVGDPRRFTIGGFARFNASAPLAASTAEGPGEPVRHRYNPGGNRRVNRTLHLMAVTQLRCEPRAQAIYANARANGHTKKEARRILKRHLSDVIYRRMIRDLAQRAADHPLLAA

SEQ ID NO: 48631 - protein, 344 aa, unidentified
MEHFAGLDVSVKETSICIVDDTGKIVREVKVASEPDALLQVLKNNAYHFKQIGLEAGPLSQWLYSAFAEVNLPVICVETRHMRAVLKAQINKTDRNDARGIAQMMRAGLYRPVHVKTLRSQKLRMLLTHRKLLQSKAIAIENDLRGTLRNFGLKVGIVGKLKFETRIRELVENLPDLAVLVEPLLVVCRVLREQIAVLHRRLLVIVRDDDVCRRLMTVPGVGPVVALTFRATLDVPARFRNSRAVGAALGLTPGKYQSGESDHTGGISRCGDEMMRVMLYEAAQVMLVRSTRWSWLKAWAMQVARRRGMKKAIVALARRLAVIMHRIWVDGTEFSWSRQEAAEA

SEQ ID NO: 48632 - protein, 387 aa, unidentified
MTTDHLATALQTVVRVNDTKLFASLELSKSRWLVTVSAPGSEKLSKHVVIGGDGGALLNLLSRLRATAERRAGMAVQVVVIQEAGLDGFWVHRLLEANGIESHVVDPASIAVDRRHRRAKTDVIDGEMLLRTLMAWARGERRVCSMVRPPSPEEEDRRRLTRERGTLLKERTQHTNRIKGLLSGQGITDYDPLRKDRLARLDALKTGDGRPLPERLKAEIRREIERVDLVASQMAMVERERDALVGMKSDPAPETAAAVLVRLKGIGPELGSLIWLEALYRGFSNRRQIAAYAGLAPSPWQSGGTDREQGISKSGNRRLRHALVELAWFWLRHQPASALSVWFRARVGQGRGRIRRIAIVALARKLLVALWRYATQGVVPAGATFKA

SEQ ID NO: 48633 - protein, 427 aa, unidentified
MSESVIDLYSRAAGIDIHQSLAVVSAIVPIGDDPSKCRFVRNEFDTFTEQGLKSLVEFLSPLDVEMVLMESTGVYWMAPYDALLEAGINVAIGNAHEIRGMRGRKTDRNDADWLARVAKHGSFHPSYVPGREYRGLRSLARYATSLRGTLSSEKNRLGKLFNAAGYRLNSVFSDMFGTGGMICVRGVLNGERPEEILGKVPAPGRYKHTRGEMLLALGGKFEDGDLFAARSVLETIDHLEGKISECVGELERIVRDKEERKLELLQTIPGIDALAACLLLAELGGGGLEAFESAEALCAWAGLCPSQNESAGKSRPAKSRKGNKYLRRDVCECASSAVKTRGTTMRSKFQHFMQRGKGYKKSIMAMGRKLLTYVYYVLKKNQPYVDPKIDYQKQHAEKNFQRFAAQLRRCTTKYDIQIINRETGEAV

SEQ ID NO: 48634 - protein, 382 aa, unidentified
MTLSRPNGQSILIIIKRPLLSICREKVSVYTWVGNPIQPRRCLMPLYSGIDLHSNNLTAAIMNEAGKRILKKRLVNDRDVVVATLEPYRTELVGIVVESTYNWYWLVDALMDQGYRVHLANPSAIQQYSGLKYLDDNHDAFWLADLLRLGTLREGYIYPKEDRPLRDLLRKRFHLVKLRTSLIISLKNILSRNFGLQMGSSRIKEESLDTFISGLPEGDNVILVVRTSKASIDFLTVQIDEVESAVLKQTKNKPVYAKLLELPGVGKILALTIQLETGPVDRFPKVGNYASYCRKVQSRWLSNEKIKGKGNVKNGNRYLAWAFSEAAEHARRFDPASRKFYSHKLNQSNAAMAHNALAHKLARAAYYMMRDNVPFEEARMFA

SEQ ID NO: 48635 - protein, 464 aa, unidentified
MEWGICNRNRSRKPSGLDDRDAHTPNQIHNMKTTTKLNPINPNLLQITFDVGKEALYAYTELPLATNALDCVEETIPNRNLPILKALEHFKTLALQHGLAGLCVLCEPTGGYERRLLRLARQAGHFTAYLNAESVRKLRVVQSNDATKSDLKDPKTMFLLAKLGKTLTHRNLSGPWLVLRETHAYYQTQEAHNVALRCQIHRVLTQLFCEFSFKKDFLFGSPALPHLDQEFGLNPYRIVAAGQSAFYRKMKKHGVSLRTLERLWQDAQRSSLQRLEKGYSDLLEQQLRELFEDYWRCQQRLEAASQKMIGLLHELQAQGQVRLQARPGLINEGLLARVLAETGPLEDFASWSQLLRYAGMNLCERQSGTMVGRRRISKKGRSLLRKVLRQAVLPRVRKTDLYGPYYHGKKANGMVGQKAMMAVARKFLKLLWGLDRSAQGFIPRRVFCCASQFPAAVQPLVQAA

SEQ ID NO: 48636 - protein, 348 aa, unidentified
MKHFVGLDISVKTTSLCIVDLEGHIVQERKLATDPDVISAHLVATGLHIERIGLEAGAMSQYLYSGLAKADLPVVCVETRHMKKVLSAQLNKTDRHDARGIAQMMRVGLYRPVHVKSAGSQRLRTVLVARQLLRAKLLDVDNELRGLLRNFGLVVGKVTAREFESRVRELADGDVALMAVIEPLLVVRRVLGEQFSALDDMVVRIARRDEVCRRLMTVPGVGPLVSLTFRAGVDVPARFARSRTVGAHFGMTPRKHQSGETDRMGRISKWGDALVRTALFEAAQVLLTRVKRWCRLKAWAMQVARRRGHKKAIVALARRLGALMHRIWVDGSEFRWDVPRSTAEAPAS

SEQ ID NO: 48637 - protein, 343 aa, unidentified
MNEITTIGLDTAKSVFQVHGVDADNEVVLRRQLKRRQVLPFFRKLPPCLVGIEACSSSHHWSRELQALGHTVRLMPPKYVKAYVKNQKNDAADAEAICEAVTRPNMRFVPTKTKEQQSILMLHRTRQLFVRQRTALINAIRAHLAEFGIVAGVGRNGVDALLEIISDGKDDRVPDVARDCLGALGAQLQGTKAQILVFDRRILAWHRSNATSRRLEAIPSVGPQIASALVATITDPKAFRSGRDMAAWIGLVPKQNSSGGKEKLGGVTKAGNRYLRTMLMIGALSVIKRAKQLGYTNRPWLAALLARRPTKVAAIALANKVVRMAWAMMVRGEKYREPVALAA

SEQ ID NO: 48638 - protein, 349 aa, unidentified
MSQSLNSAIAVIGIDIGKNSFHVVGLDDRGAIVLRQKWSRGQIEVRLANMPPCLIGMEACVGAHHLSRKLQAFGHDARLMPAKYVRPYSKGQKNDFRDAEAIAEAVQRPTMKFVATKTAEQLDLQAMHRVRERLVSQRTGIINQIRAFLLERGMPVRQGLRFLRAELPRILATPPDVLSARMVQVISDLAEDWRRLDHRIDHLSNEITLLAHQDTGCERLMSVPGIGSIISSAMVAAIGTGDAFTKGRDFAAWLGLVPKQISTGDRTILGKISKRGNRYLRVLFVQAAWVVLIKPMSWERHGLKHWIEAAKKRLHRNVLAIALANKLARIAWAVLAGSRTFEANKLQAA

SEQ ID NO: 48639 - protein, 343 aa, unidentified
MDVHKRESQVCILSEAGEVVLETRIRTERGRLGAVLGGRPRARILLEASTESEWVAQALEGLGHEVIVADPNYTPMYATRRRRVKTDRRDARTLAEACRLGAYRCAHRTSAPRREVRAALAVRDALVRTRARYVTLIRALLRQQGIAVPSGSTEAFLRRLERVSLPRAQQRAIAPLVALLPALNTEIAAADARIGEAMAADPVPRRLATAPGVGPVTAVAYVATLDDVRRFGHPGQVAAYLGLVPQERSSGERQRRGALTKAGNGRLRALLVQAAWCIWRDRSPASERLRAWAQPIAARRGKRVAVVALARRLAGILYALWRDETDYDAQRVGRRRQAADAAA

SEQ ID NO: 48640 - protein, 409 aa, unidentified
MYDKTKYIYVGLDLHKEQHTAVIMDCFNEKLGEITFENKPSEFTKLITKCKKHCTDSKGIVFALENSYGYGRGLAAWLIERDYIVKDVNPALSYAYRKSVPQYKKNDSYDAQCVARVAINELNKLPDAMSEDMYWTLSQLVNRRANLKTHHIRLKNQLHEQVCVAYPSYKQFFQDIGRPTALYFWEHYPSPRLLRGKTVEELAEELIPVSHNQFSTRKCQIILDAVKADGDTTRDYQPERDEITRGLVKDVRHYVEQLEAVDKSIADFLPRFECPLNTIPGVSDTTVAKLLSEIGDIRRFPNADKVANFAGIAPVNFSSAGKGDDKHSKQGNRRLQGTIYFLAIQMIQLSSKGLPRNPAFYAYYQRQLARGKTKPQALILISRRLISIIYGMLKNKTEYVMPKVQDNLC

SEQ ID NO: 48641 - protein, 346 aa, unidentified
MLYVGLDLSRKRLDFDVLLPDGDRRERGAVPPDADGLASLVRRLGDANEPVLATIESMSGARFVHDQLELAGWDVRIADALKVKGLAPLACKTDKIDSWVLAELGRLSLVPEIWLPDPAVRAERERARFRLHLVRHRTALKNRVHSTLVTHGVPNPISDLFGTRGRELLARLSLPEPWRSTTQASLALIDLLDAEVSGIERELRALGVQHRYIPLLITCPGIAWVLAFTITSELGDISRFPTPTKFVGYTGLCPRVDQSGERDGRGPLRKNGPNYLRWALVEAAHTAVRYPCYQPTLARQTARHGRKRGRKIAAIEVGRKLAEAIWYMLSRNQPFAPAGAKQVLTA

SEQ ID NO: 48642 - protein, 372 aa, unidentified
MLIHYIDIAKRNFVIAVSSLSKTKTETNNPKGIAHTIEYLKKHKVALVVTESTGGLEIPAAKAIHRAGIAVIIANPRQTHQFAQSQSLTKTDAKDAKMPAFFAQMKAQKEDWQTMPYHPPTEAEEVLEALVNRRNQSADMRTAEKNRLHQVHETQVGSVKQLIAHFDRLIDESDKQIDDHTHTHFDGKAQVAEQIKGIGSITTATLMAMLPELGRLSHKRIASLVGIAPHPRKSGEAKFKSRCFGGRSAVLKALYMATVAATRFEPLIRDFHQRPLSEGKPYKVAVTACMRKLLETFAKFLSLPTAETQTQVFVYFRPKYLLILPKYPLNPPRTPDNQASGLLFRRQRAHLACWPLSKGSNTSPSDGFAHSL

SEQ ID NO: 48643 - protein, 338 aa, unidentified
MEHFTGIDLHSSNSYIAIIDNDNKRVFKKKVKNDLQNVMHVLEPYREQIKGIVVESTYNWYWLVDGLMDAGYKVHLANPSAIKQYEGLKHSDDVTDAFHLANLLRLGILPEGYIYPKGERPVRDLLRKRLQLVQQRTALILSFENLLTRNLGTRINVNEVNKLREEDVEDIFQQEYLVLSGKASIATINFLGTRIEQIEKAVHKVAKLRREYKPLMTVPGIGKILALTIMYEAGPMERFAKVGNYASYCRCVGSKRISNGKQKGKGNRKNGNKHLSRAYVEAAHNAIRHYEYVKRYHQRKMAKTNNVVARKAIAHKLARACYYIIRDQKEFDPGKLFV

SEQ ID NO: 48644 - protein, 319 aa, unidentified
MDGSIALFAGIDVSKRSLDLCLLPDDRRQSFAYDEQGLAQLSQALPAPGTCRIAVEATGGYQRQVVAELVNAGHQVAVVNPRQVRDFARGLGILAKTDRIDAYVLARYSQQAEPRTVAQISEKAVELEQLVVRRRQLIQLQTAETNRKHTSPSKAVRSSTQQVIAMLGKQIKQLEAAIFALVESDDDWKDKMNRLGSVPGVGVVTAASLLAELPELGQVNRQEIAALVGVAPFNRDSGRFRGKRSIWGGRASVRSALYMAALTARTHNPILRAFAKRLEAAGKPFKVVITACMRKLLTILNTILKDGTSWNLEKSLVNA

SEQ ID NO: 48645 - protein, 312 aa, unidentified
MAQTVKAAGIDVSKAWLDVAIWPTREEVRVSRDATGFSTLICWLEEHDVTRVGLEASGGYERDPIDALQAAGFEVAMLNPLRVRRFAQAKGRLAKNDRVDARTVAQFTLIMLDRDPVPRRRDLDPLVELLTFRRQLNGWCTDCVNQREHLRDAALRASVTRRLASFRRELVKIDRKLADMIAANDDWDALARRLRTVPGVGPILAASLIALLPELGTLSRREIASLVGLAPFDDDSGDHRGERHIKGGRKSVRDALYMAALSARRHNPMIAAFAARLAGKRPKVILTACMRKLLVTLNAMPRDGTDWRLATA

SEQ ID NO: 48646 - protein, 314 aa, unidentified
MYDYIGIDVSKKVLNIFDGKKDFIFDNKENLSSFKKYLKKRYPDFSSLVILFEATGIYSYHLKAFCATHMIKAYIINPQASHHFAKSLGTRSKTDTTDARTLWAYHRLIVDKDIRIPKVDPIATTLSSYLVSYRLTLKQKLALANHLEGIKDKALYHLLKKEEERLCKLEQELLIQMDTYIKKYPQLNEDYQRLLGISGIGQKTAIGLLTLFQTYPDTNRNQITALIGLDPIQRQSGTSVHGRSRISKHGNQMMRKCLYMPTLVSIKYNQKIKIFYDRLVLKHKLKKVAVIAAMRKLLLIVHAIYKNKTVYVPG

SEQ ID NO: 48647 - protein, 369 aa, unidentified
MTDRTPSKASNPTLTSVQMPTTVGLDLSDRVSHYHVQRGDGVKLLEGKVGMTRAQLAKLFQDWKGCRLVIEAGGHSPWVSRLGTECGLEVVVANPRRVELITKSDRKTDRKDAKLLAELGRTNKDLLAPIRHRSQQAQADLAVLRSRDEVVRMRTALINHMRGVLKSYGLRAPKVSAAAFGARVVDSVPAELAAALQPILRLIAALNGEIKAFDKALEPLGAERYPVTQLLRQIVGVGPLVSLRFVLTLEDPARFANTRSVGSYLGLVPRKRSSGDANPQLRITKAGDGGMRQLLVLAACYILGPFGPDCDLRRFGFKLIGPGTDKRAKKRARVAVARKLAVLMLHLWRTGEAYDPLHLAKKLGEPLAV

SEQ ID NO: 48648 - protein, 331 aa, unidentified
MTFKTYVGIDVSKLTLDVFIREKQIHRQFRNDANSFISMMQWLEKQTMQSMNSTLICFEHTGLYSLPLAIFLEERQIAFSMIPALEIKRSLGVTRGKNDHIDSKRIAEFAYRFRDKISQTKLPARDITKLQSLLNLRDRLSRSLGGYKVSKNEILRAMGENTVPELISSYNKMIIVIKEEIRLLEKTIRTIIKENEKLRTSFELITGIKGVGLIVACNLIVYTHNFTRFDNWRKFACYSGIAPFDYQSGTSVHGRTKVSSIANKQMKKMLHLAAMCAIHTDAELREYYCRRLAEGKSKMTVINIVRNKIIARVFAIVKRGTPFVDIKRYVA

SEQ ID NO: 48649 - protein, 407 aa, unidentified
MEILYSHCAGLDVHAGSVTACARLAVGGQVTYQHCTVPTTTAGLLELGEWLTAHGCTHVGMEATGVYWKPVWHVLEGDFTLILANAMHIRNVPGRKSDMNDATWIANLLAHGLIQSSFVPPAPLQQLRDLTRTRKQLMRELTRHTQRIQKTLEDANLKVTHVMSNIMGVSGRAILDALVTGETDPERLADLTRGRLKATRTELVHALHGRVTDHHRFMIKLHLTQIDALDAAVQDIDARVGDALGPFRAAVSLLTTMPGLSDTAARVLVAEIGTDMTRFPTAGHLVSWAGLCPRLDESAGKRRSTRTRQATPWLKTTLVTAAWAATRKRDGYLRAQFLRIQSRRGAKKAVVAVASSMLTAAYYMLRDGVEYHDLGGQYFVHRDKEEMAKRLIERLRNLGVVVEVKAA

SEQ ID NO: 48650 - protein, 345 aa, unidentified
MEHYAGIDVSLESASLCVVDATGRIVREAKVASEPDVLIGWFRGLEFAVTRIGLEAGPLSQWLYAGMREAGLSVELLETRHVRDAFKAMPVKTDRKDARGIAQLMRLGWFRSVHCKSLPAQEVRALLTARKLLQTKNHDVEMSLRGVLRGFGLKVGRTTPRTFVGRIRELVAGHATLSTVAEALLAARGTLFEQWQKLEKRLRSLAREDRRVRLLMTAPGVGTIVALTYASAIDDPGRFRSSKAVGAHFGLTPKKYQSGETDVTGRISKIGDGGVRTALYEAANVILTRPVKDSTLKSWGMRLAARTGMRKAKVALARKLAVVLHRMLADGTSFLANKAAAAVAR

SEQ ID NO: 48651 - protein, 425 aa, unidentified
MNYKQNEKINQVKESTLVVGIDIGSTTQYARAFDWRGIELGKVFTFSNSREGFEAFKAWMQHLQDKYRKSDVIVGIEPTGHYWFDLGAYLEDEGILLVMVNPYAVKQTKELDDNSQSKNDRKDPKVIAKLVTEGRYSAPYTPDGVHADLRIMVANRKRLIREMTQIKNRFARWFAIYFPEYTDVFGDYEAQSSMLLLKKVCTPEAIVELGAEKINQIWRDAKLRAVGMKRATTLCETAKRSIGLKKGSSAARYEMKLLLEDYEYKKAQLDAVMEEIEKLCRKIPESEQMLAIKGIGVITVAGFLAEVGDVRRFESPRQIQKLAGLSLRENSSGKHKGQTTISKRGRSKLRAVLFNAAIPLIAKNPEFKSLHEYYTTRANNPLKKKQSVIAISCKLIRVFYAILAKGVTYDAQKLISDIHRQPQVA

SEQ ID NO: 48652 - protein, 338 aa, unidentified
MQQTTIDLNTATFIGIDTHPSEHTALAMSRFEEEKGVLRFENTKAGIAAFLHWLPTLETQAKNVVIGVEGSGGSGHALVSYLLPLYEHIYEVNPLYTKQRRAFGTRGRKSDPVDAKLVAEVLTRKLPELPKLTKHGLSSRLVSLKKTVWFHEEKARHGARLKNQLQRLKREHRLCVNPDEKRILALTIREKRTELQSVKRVKKKLADEMAILLKGHGEHLTTMKGISTITAAKLVARIGGIERFPSISKFLQYAGIAPKEKSSGRVKRHVQNNKGNRSLNTTFYWIALNQVRWHAEAKAYFDKKLKEGKTKKHALRCVMKRVACIVYGMLKSGEEYRG

SEQ ID NO: 48653 - protein, 353 aa, unidentified
MNSLTDLREVVDVVIGVDIHVHTHSAAVVDTATGGVLGEVTVEATVEGYAELVEFANGFPILRAWAVEGTGGHGAGLSRHLLETSEIVIELDRPKRAARRNGAKSDPLDAIRAAREAMARPTLGTPRRGGERQALSVLLAARRSAINASTEAQLQVFSLVIAAPEPIRARFRGQKLAAMLNTAAKLRVHSSWDVETTSTVVALRTLARRAHAMLKEARELQKAMLAIIRSWRPDLLEEFGVGPIVAATVLCAWSHPGRVHSEAAFAMLAGVAPIPANSGQVTTRYRLNRYGDRNLNNALHTVVQSRIQYQQATRDYVARRTAEGKTGREIKRCLARYVARDLYRLLENGPAAA

SEQ ID NO: 48654 - protein, 481 aa, unidentified
MVIQNKTQNNDSSFLPKSTKIADAVDSAIQESARQSIMESINLNAAGIDIGSRSHFVAVPADRDAQPVQEFPSFTPDLERLADWLTECGITTVAMESTGVYWIPLFELLESRGFDVKLVNAHHIKNVPGRKTDVADCQWIQQLHTFGLLSGSFRPDDDICVLRAFMRQRANLVRYCGSHIQHMQKALNLMNIQLHHVISDLTGVTGMTIIRAIIAGERDPQVLAENRDSRCKEPIEVILKSLQGNWREEHLFSLRQAVELFDVYQQKIEDCDQQIAQILDGLDPQTDEEAPQPLRKAPIARNTPDINLHERLFHIAGVDLTRIDGLNPHTILKIFSETGSDMSRWPSAKHFASWLGLCPGNHVSGGKQTGKSNTIPSANRAAAAFRIAARSLANSQSALGGFYRRQKSRLGAPKAITAAAHKQATIFYTMLKNKTPYDAPEANYYEEQYQKRVMANLKKRANLMGFDLVEQPTDDIQSCPA

SEQ ID NO: 48655 - protein, 398 aa, unidentified
MISVGIDVSKGKSTICILKPYGEIVSSPFDVEHTDNSLLELSKMLLRLDGETKVVMEATGAYHMPILSYLKDQGLFVSVINPLVMKEYRCKGLRKAKTDQLDAKMIANYGIDHWFHLVDYTPDSEVYQTLRLLGRQYAHYMRMKIESIQVLSNMMDYTMPGIRTLLKGYSDRNGKNKVADFMEYYWHYDNITKKTESQFVKSYISWAKKRGYHQSESKALKIYALAKNGIPTLRSTSPSTKMLVVEAARVLKEIENTLRTILTQMQELARDLPEYPVVRAMNGVGDVIAPRLIAEIGDVRRFYSRKALIAYAGIDAPPYQSGQFTGSNRHITKRGSATLRKIGYEIMQCLKSFKPPEDAVYLFMMKKESEGKAPKVAKMAALNKFLRIYYARVTEVYT

SEQ ID NO: 48656 - protein, 402 aa, unidentified
MFYCGIDIAKYKHEATVIDQAGAAVQESISFANSKEGCEKLLALFQRLDISKEGLLIGMEATGHYWLSVYGYLLEQGFEVKVINPIQSEAFRKMYIRQTKNDRKDSFIIAQIMRFGQFSATNLSEEVIVAMRQLSRYRLALVDTCGDCKRRVIALLDQVFPEYDSLFSDTFGVTSKEVLSQYPTPEDMLTVSIRKLTTLLEKASHGRFGKEKAEQLKAAAASSFGVNFAKDAFAFQIRQLIEQLEFLERQVAELEEQIFSLLKQTGSYITTIPGIGDTLGAIILSEIGDIHRFDAPNKLVAFAGLDVRVTQSGEFTGTRQKISKRGSPYLRRAIWLAASRAAFCDPILSEYYQGMRARGKHHLTAVGAVSRKLCNTIYTILKEDRPWQPIPPKGKKVSNYTE

SEQ ID NO: 48657 - protein, 347 aa, unidentified
MRFYTRQHRHYGGVDLHARSMYVCVLDRDGNVLVSKNIASAPGPFLELIAPYREDLVVAAECMFTWYWLADLCAREGIAFVLGHALYMRAIHGGKAKNDRIDAHKIAGLLRGGMLPQAYVYPQAMRATRDLMRRRNYLMRQRAELLAHITNTNHQYNLPALGVRPARPAERSGLLEHFAEPQVRRSVAVDLSFVEHYDRELPALERYLESNAQAHDPLGLAIVRTIQGLGQVLGLSILYEIHDIGRFARVQQFLSYGRMVKPTKESGGKILGHSSRKIGNAHLKWAFSEAAVCFLRANPRAQALRARLAAKHGKGKSLAIIAAKLARAVYFMLKRREPFDPERFFAH

SEQ ID NO: 48658 - protein, 427 aa, unidentified
MPYRIAGIDVHKAMLAVVVADVEVEEAWQFTRRRFGATPSELRLLTKWLLEHEVEEVVMESTAQYWRPVWDALERDWQPTQRGRGDAGPTTGALHLAQAQSNQGRRGRKRDFPDAERLVKRLVAHELTLSFVPDVSQRLWRTVTRRKYQLTRNRVQLQNRLESLLEEAHIKLSTLVSDLLGASARRMLRAVATGETDPAAIAALGSPRLRATPEQLCDALGAATDMPPLYRRLLTMTLTELDLLESHMQQLDEELAALLRVHQDAVQRLAAVPGFGVDSAQQIIAEVGPTAMTFPTAKRLASWVGACPGHDESAGINHSHRAPSGNRQMRRLLNQAAHAAVKTKGSIFELLYRRFVVRLGHAQAIGAIAHRLCRLIWKILHDGVTYEERGPAVIKARVRRRAAKMIRELRSLGYRVESVTAPSSNRA

SEQ ID NO: 48659 - protein, 432 aa, unidentified
MKVSEKVVEINVNHILNIGIDVASRKLDIHFECPIKVNSREVYRDQIANRSDIIASSLEKYRSLAQEKGYQNIRIVCEPTGPYSINLLNVAQSLNCFTAYANPESVAKSKVIETNECGKTDPIDAEIINNLAERNKVLTHRTYSKEYANLRVLNSHYEDLDRSYVSARNQVHKTLKMLFPDFSMKVDTVFSKTGQTLYKFYGFSPWRITAQGFKHFNNKLRLNAKGVRNSTIQKIWDDAIATCKYNCSDIAWSLSERLGDHYEDYLRYKDRKDRLKKQMITILKEIRKEEPTIAKASTNFVSEFHVARLLAETGPLSDFNTHKELLNYIGMNLRERKSGFYTGKTKLSKKGRPVARKVLSQIVLPLVHRKRLYGPAYHSIKKRTGKPGTLLMTNFMRKFLKSFFGIYKSKSEFDENRLFIDAGAYNKLFKSA

SEQ ID NO: 48660 - protein, 388 aa, unidentified
MLAAADRTDASTAIQTDLPAIFASLELSRSAWLITSLSPGAGEKMSKHSIRAGDVAGLLMRLAQLKEKARGRTGRDFPIIAIQEAGLDGFWIHRVLQSKGIESHVVDAASILTSRRRRRAKTDGIDGETLVRTLLAYKRGEPRVCAMVKAPTPEEEDRRRICRERKTLVGERVEHVNRIKGLLFAQGVSEYEPLKRNRRARLEELKTGDGRPLPAHLKAQISRELDRLELVLPQLKAVEAERDALLKPVSEGCPAPAAMLAQLKGMGPEFTAILWSEGLFRSFSNRRQLAAYAGLAPTPWQSGSVAHEQGVSKAGNPRLRTTMIQLAWLWLRHQPTSALSVWFQQRVQSNGSKMRKTMIVALARKLLVALWRYSTSGVVIEGAVMKTI

SEQ ID NO: 48661 - protein, 343 aa, unidentified
MTVTVLGGLDLHRAQLTFDYVDSVTGEVHTGRIAPANRVVLRKWLERFDQLGDVEFVLEGCTGWRYVVEEMVAAGVTAHVAEPAETAALRGRKSKAKTDKADARHLRQLLLDGRVPESWIPPTYVLEARALVRLYKDLVDERTGWLQRVHATLLHHGVPAVGGSLVTKAGRQLVAVADLPAAGRYAVDTGMRQVERLTDEMLPLRQQIIAIGSRQPGCKALQGYYGIGPLLSVAIWEELGDCRRFGSSDDAVRHTGLDVTVWSSDNKRTRGHLAKQGPPVLRWALYEAAVYAARPSSPDHAEYRRLRQRLEPHLVLITIARKLARRCYHTLRNVGGDAFPAAA

SEQ ID NO: 48662 - protein, 390 aa, unidentified
MDVMHPVCCGIDVHQKSIVCCILDGPLTSNEPKKYQTTFGTTTKELKAALDWLLEHQVTHVFFESTGQYWIPLFNIFSDSDLELILANPQHIKNVPGRKTDVKDAEWIAQLGRCGLINQSYIPSQEVLQLRYLTRYRLSVKQRLTQIKNHIHVILQRANIKITSYLTDIFCKTGQALLTLFIDGEVINEDNVESCIHGRIKASTRQLIEAMEGKLSTVDRFLIKECMEEYQLQKKISDELNKAINEYILEHFSEEYQLLLTIPGISDNCCATILAEIGPNVDAFKTEKKLASWAGMCPGSNESAGVKRSSHTTQGNKYLKQALVMSVLSVQRAKEETFSLFYQRISSRGSKMKAIIACGHKMLRIIYKILQSHQPYNSQKALGLRQQTNA

SEQ ID NO: 48663 - protein, 338 aa, unidentified
MNRIVVGVDIAKRVFQLHWVEAETGEIVALQLKRERFLEHFANRSSCLIGMEACGGSQHWARSLQKLGHEVKLLSGRMVKPFVGGNKNDAADARAIWTAVQQPGIKVVAVKSEEQQAVLALHRMREQLVKFRTAQINGLRGLLTEYGEVMPQGRAGIKRDIPGALGRLSDRLPAIVIETLREQYARLGELDEQISQIERRLRQWQREDSATQRIAAIPGVGLLSATAAVATMGDAKAFKSGREFAAWLGLVPRQTGTGGRVRLLGISKRGDKYLRTLLIHGARSVLTSKSPPEWVSELMKRRPKNVAVVAMANKMARTIWALLAYERAYQSGYVSQPV

SEQ ID NO: 48664 - protein, 421 aa, unidentified
MKRIRDRVAGLDVHKDSVVACAQVRQGPEVTVHKARFGTTTAQVAELAEWLADLGVTTVAMEATGVYWKPIYYGLEGLFEELWLCNAQHVKNVPGRKTDMADAEWLADVAAHGMVRPSVVPEPAMREVRELTRYRKSLVDERVREVQRLEKELQDAGIKLSSVASRLMTKSGRAMVEALIRGERDPKVLANLAQGKMRRKIPHLEQALVGRFSAYHAVIARQVLAHVDFLDASVAELDQAVRERMGPFEGQVSLLVEMVGWGRGTAEVFLAETGGDMARFPSAQHLASWCRICPANNESAGKHKAMSKKPGKTWLGRALIEAAKAAARTNGTYFAAQYRQVARRRGPNKAAVAVANSMVVTAWHILTTGEHYHDLGPDFFRAHLDPMRAAQRKLADLRNIGWAVTTNPDGTITVAPPELAA

SEQ ID NO: 48665 - protein, 430 aa, unidentified
MKSNTQNAKIEAITEKTLVLGIDVGSETHYARAFDYRGIEYSKKPFKFSNTEAGFVTFKEWILDLKERHEKDKVIPGMEPTGHYWFNLGKFLQDNEMKPVLVNPHHVKKSKELDDNNPTKNDRKDPKVIAGLVREGRYMIPYLPDGVYADLRTASNIRFQLQAELTRIQNRISRWFNIYFPEYKTVYGKPDAKSGMLILKAAPLPEDILTLGIDGVNQIWRDAKLRAVGKARAKTLIEAAEHSVGSKEGAVSARMEIRMLLEDYESRNTRLQEVMVLIEELVRKIPMAEKLLEIKGVGIRTVSGFLAEVGNISRFNNPKELQKLAGLALVENSSGKHKGETTISRRGRKRLRYLLFEVAMSLVAKNPEFRELHNYYTTRRLNPLKKMQSLMAIAAKLIRVFYAMLTKGVDYDPKKMVSDIKRPAVYLQAA

SEQ ID NO: 48666 - protein, 432 aa, unidentified
MKSGKYNSTNVDNLDQKEIDSQIRGDTLMVGLDVAKTKEYAALGDETGKEYCVINWKHPFGSRRFADSVDELKPSSVQIVMEPTGSYGDPLRYLAYQRGWEVWRMAPKRVHDSKEVMDGVPSIHDAKAAHILLWLHRQGLTERWPPRGASRRKIRTLTRRLSRLQKDWQRQLGYLESEMARYWPEILQVWELKRATLLGVLMKFGGPRKLVDNEPEVRAYMKKKGGHLLKEERIEEVMEAAHNSLGVPTLESERVSLINLAKRADQLRRDRKKFKRKINDLIEGETIQQVGEEVGLPTAAVFWDEIGPFGDYESVDGLIKAFGLNLKEQSSGKYNSPLHITKRGPSESRAALYLATWRKINSDPLFQAWHRNKLDRDGGPKKANKNVSVIALMRKYLKGLWHVARGESFDSTLLFDVDKLKSESTSTVASTI

SEQ ID NO: 48667 - protein, 409 aa, unidentified
MASAQKVEPPGYNRWDEKSRSPERDAVRSQVIEALEAQEIKETGMKKISTTTVEAFRKMQKLTIGLDLGDRSSWYCVLDESGAAVLEQRVSTTPKAMKEVFGGMPRSRIALETGTHSPWVSRLLSELGHEVIVAHARNVRLIGESRRKDDRLDAKTLARLARIDPQLLSPVKHRSAKAQAHLTVIRARAGLVRARTALINVARGLTKSYGERLKGCNARNLNSQKAQGLSPELRDALEPLLEAMESLSERIGECNQRIESIAQEHYPQSALLKQVKGVGTLVALTYMLTLEDAHRFSKSRDAGCYAGLQPGRRNSGQSEPQMRISKEGDAYLRGLLVQSAHHILGPFGADSDLRRWGLKLAERGGKNGKKRAIVATARKLAVLLHHLWVTGEVYEPFHSRQRATLAATA

SEQ ID NO: 48668 - protein, 432 aa, unidentified
MGQERSRSRQPSGKHAKHTSLLERVNHNAAGIDCGSETHYVAVPPERDPDPVRSFKAFTSDLHRLADWLEACKIKTVALESTGVYWIPIFEILEERGFEVVLVNSRHIKNVPGRKTDVLDCQWIQQLHSVGLLRGSFRPAAEITSLRAYLRHREKLVQSAASHVQRMQKALVQMNLQLHNVISDITGVTGMRILRDIVAGVTDPMALAAHRDPRCRASQDEIVASLTGNYRAEHLFILRQHLELFDTFQRQIQTCDGEIESLLHKLAAKQSTPKTPVPSPRSKPRFYDNEPRFEIRDPLYRLAGADLTQIDAIGPYTALKIITEIGTDMSRWPTYKHFTSWLTLAPKNKITGGRLISSKTQPSANRVATVLRMCAMVVGRTSTALGAYYRRIAYRIGKPKAITATARKLAILVYCTLNLLSAGHEGDIRWRR

SEQ ID NO: 48669 - protein, 387 aa, unidentified
MSQTVAAPIPAAVDHERTLVLAIEVSNKSWVIAAQVPGLPHTKAKRTIDPEAEALLAAIAAYRARAAATGRSIERVIAVYEAGWSGFWLARWLMRHGVEVYVVQPSSVPVDRRIRRAKSDGIDSELLLRTLLAWLRGEPRVCSMVPVPDEADEDARRCVRERSELISERIGLTNRIGAILATLGVSDYNPLLRNRGRRLAELRTALGEPLPANAHAKLKRLLARLELVLTQIAELERERDAVVETEASDGASKMIQQLTALRGIGVQSATVLVREAFVRRFANGKALGSYAGLASSPYSSGGIDREQGIGKAGNRRVRTVMVELAWLWTRYQPGAAQVCWFRERVASTGRRVRKIMVVALARKLLIALWRFVIDGVLPEGAVLKPAA

SEQ ID NO: 48670 - protein, 400 aa, unidentified
MMTPDDIDVWVGLDVGKSAHHAHALDHDGNTLYDKPLKQDEKAIRTMLGKLSKHGRVLLVVDQPNTIGSLPLTVARNMGIAVAYLPGTAMRRTAQPLPGDAKTDRRDAHVIAWAALKLPETLRDAGPDDETLAALKLLAGHDEDLAHESTRHVNRLRSLLLQTHPAFERALKGERITRDATLALLERYGGPMGVKRAGIEDVKDWAKSNGLRAGRIIDDMFKAIGEQTVTVPGTLMAETIIPSIAHDIKTIRDRRREVGRQVEKLLEDHPLLTVPASMPGIGVRTASNILLGIGGDIANFKSSAHLAAYAGISPVTGQSGTSIKGERPSRRGNKRLKNALWQTAFVASTKHPPSVAYYKRKREQGKHHNAAIICLARRRCDVIYSMLKNGTLYQEPALVA

SEQ ID NO: 48671 - protein, 421 aa, unidentified
MEDWWGGNSCFYHAMIGGGIDMDERQRFKWFLGIDVSKETFDASCINTKGERLFNLSASMDRKGFEELMKRFSTLSIPKESVLVGMESTACYHINLYSFLVSLGYTVMVINPLLISNFVKLQLRKTKTDKKDAYVIAQFLLLNRDSLSQTILSSDISDLRDLSRQRESLVDQMSSIKSEIKRLLTMTFPELEHISGIFTKSMLRLLCQYPSAASIKQAKRSKIAKVLIPGSYGKQTDVSVDRIVKAAQVSVGTSSATKEIILRQKVSLLIQLEEHLQELTDMLIELCQGKIQGDMDILTSMKGIGEKTAVNFLIEIGGDIKQFESHKKLIAMAGLDPALYQSGKIDRKGRISKRGNRHLRRVIWLMTTKVIQFNERFKQYYLKRRKDGLPYKKAVLATAHKLIRVMFAMLRNKTLFDARMN

SEQ ID NO: 48672 - protein, 410 aa, unidentified
MSFALPDALFFTGIDWAAETHAVCVMEAGGKIAAGFTIEHSADGIAALIRRLARYGAPGDLPVAIERPDGRLVDLLLEAGHPVVPVKPNAIKAWRDGEVLSGAKSDAGDAAVIAEYLRLRAHKLKAAAPYSDQTKALRAVVRARGDLVEMRVAATNQLSALLEAHWPGAKAIFADVESPISLEFLTCYPTPAAAAHLGEKRIAAFCAKHGYSGRRTAAQLLARLRSAPAGATGEALTEALRDAVLAAAGVLTALNSSVKALDRSAAAHLGEHPDGAIFTSLPRSGQVNAAQVLAEWGDCRQAYEHPGSVAALAGCTPVTRESGKHRAVHFRWACNKRFRVAITTFADNSRHASPWAAKIYHNARASGKNHPHAIRILARAWIRVIWRCWHDGIPYDPARHGAASRLAEAA

SEQ ID NO: 48673 - protein, 360 aa, unidentified
MSQNDFKTSETIQPQEASPVKHPISVLGIDIAKRIFHVVGMNERGQIVLRKRLARNALMPFIATLPPVLIGMEACGGAHYWARRFREHHHEVKLMAPQFVKPYVKSNKNDMRDAEGIGEAVTRPTMRFVPTKDVDQQHIQAVHRVRERLIGARTALVNEIHGLLHEYGIVVPKGVSKFRQTVIGKLEADKAKLTPLSQEMFGKLVDEFAVLEKQLAYYQEKLEALATTHPECQRLMTIPGIGPLTATALVAAVSDASAFKNGRQFAAWLGLVPRQHSTGGKERLLGISKRGDSYLRKLLVHGARTTIRWVGRKTDRRSQWIRQLVERRGKNRTAVAVANKNARIVWALLTSHQDYQLATG

SEQ ID NO: 48674 - protein, 421 aa, unidentified
MKTITIHSDRTRAGQPETRWDIAVDVGEGALDWYGEAADQAYKGHLDNRSEAILACLEHLKAEARRLGFGGVRIICEATGGYERRLLRAARQLGCATALVSGEAVHNMQVVENNDTGKSDTKDPRTILLLAKWKKTLTDRPLKNEWLLLRELNARYDRLERDSSRCKNRIHKLLVSLFPDLSFKKDWLFDSHAAEAVVELYGLNAAAIIADGRERFTSKLRRRHVGLKTIGRLWADAQRSLLISSDPAWLELLADDIRALFAELAVLRTRRQATREHMIALVGRLQARGETRLHAHPDLISPFMLARVLAETGPLSDFSDFRQLWRYGGLNLRPRESGTMKGQPRQAKRGRARLRHVLAQAILKRVVHGQLYGEYYHRKRGAGMCGGKAMTAVARKFLKLLFGLEHSATAFDPQRVFQSAA

SEQ ID NO: 48675 - protein, 485 aa, unidentified
MRRNKQSTARKATKAPKATPSPSGRGWDQMNRKQRREMARKIQAQDLSLEVVHPDAAGIDIGNEAHYVAVPPARDSQPVRRFGCTTVELKEMAAWLKQCGIRTVAMQSTGVYWTPVYDILEEAGLEVYLVNARETKNLPCKKTDVQESQWLMKLHTYGLLRNSFRPPQEIRQLRTYWRQRNDLVQSAGRYIQRMQKVLTQMNVQLANVISDLSGATGQAIVKAILAGERDPQTLAALRDVRVKASEEQIARSLEGNWQEDLLFVLQQEQDGYEFCQKQMAECDKRLEQYLQQRADRSAGADLPEETRKGRRRRKKGNAPQFDMREALFRMAGVDLTRIDGIDVMTAATILSEAGWDMSKWPNEHHFVSWLRLCPDNQISGGKVIGKGRLPTTHRLTQALKVAASSLLRSDSYLGAQFRRLRTRLGAPVAIKAMAAKLARLVYRMLRYGMQFVDKGAWYYEQKHRQRQISSLKRKAAELGFQLVAA

SEQ ID NO: 48676 - protein, 365 aa, unidentified
MQQTGVLAQVTTERGTPDLTVGLDISDSFTQLCLIDVAGAVVEEGRVRTTNAALRRRFAALAPARMALEAGPHSPWVSRLLAELGHEVIVANARQVRLIGHSYRKGDRSDAEQLARLARLDARLLAPIRHRGLQAHEDLALVRSRDALVRARTQLINHVRGAVKAWGAILPRTTAHAFHRKVDEHIPAPLRPALSPLLEVVGELTRRIAAADRAVEELCGTRYPETGALRQVVGVGSLTALTYVLTIEDPGRFAASRDVGPYLGLVPRRRDSGNRTSQLGISKAGDPHLRRLLVACAHYILGPFGPDSDLRRWGQRYATSGATNARKRAVVAVARKLAVLLHALWVGGEIYEPLRHAATEEARSA

SEQ ID NO: 48677 - protein, 413 aa, unidentified
MTMENLIIVGIDWANQDHVFHLQVDGNRPVTGSFKQDPEEIEQLLEGWRKRFPGCTFAVAIETSKGPLINALVNYEDVMIYPINPAALANYRKAFAHGGGKNDPSDAKLLADFLQHYRQQLKPLRRDEPITRELGALTEDRRRLVDQRTAAGNELKAVLKRYFPAVLELEPAKIYADFLLRLVLKYPTLAAAQRAGKVRLRKLFYGLGKAEKIEARVEQLMAAKPLTEDETTLRVEARRAVALGELLQTYNQQIAIYDKAIKELVVQHQDYELFKSLPAGSHATQARLIAALGDDRSRYESAEALQAASGIAPLTTQSGKQRFVSSRWACSKFLKQTFHEFAGLSIMRCTWARAYYAMQRAKGKSSQMATRALAYKWQRILFSCWQSRTAYNEAHYMERLRATGSPLLAFIVE

SEQ ID NO: 48678 - protein, 362 aa, unidentified
MRIIGCDLHARQQAVAMLDTTTGEVVSMTLKHEGNNVREFYSKLPRPVRVGIEATGSMQWFVNLMEELGIECLIGHPAEIRAAEPRKQKHDRRDADLILKLLAENRFPAIWMPSKELQDLRALVRHRHQWVRMRTRIQNALQSIALANGLRRGPALWTQGGQHAIASLPLAPHTAYRRNELQAMYKKFEAEIEKLNQRVEEQASQRPGARLLMTHPGVGPVTALATEVFLGDPARFADGKALASYAGIIPREYSSGPRQRLGGLSKQGNPLLRFLWGEAGAHAVRRDPELKRFYRRKLVQKGLGKSRVAVARKLGIRLWIMLRDQIEYNEFCRRGQKQQKSSDACAGMPETAYGAKSHRTCD

SEQ ID NO: 48679 - protein, 339 aa, unidentified
MKQEVITVGLDLAKSVFQVHAIGRDGAVLVRRKLRRAEVIGFFADLPGCLVGMEACASAHHWARELIALGHEVRLMPPAYVKPYVKRGKTDAADAEAICEAVTRPTMRFVAVKTVEQQAVLMLHKSRDLMVRQRTMLINALRGHLAEYGIVTGVGAGGVTAMLKVLHEQQEKLPTHARSALHALAAQLRALASEIDRLEAQIIAWHRADDTSRRLATIPGIGPITASAISAAVPDASLFRSGRQFAAWLGLTPRANSSGGKERLGGITKQGDGYLRRLLVVGATAVMRMARKNAARQPWVAQLLERKPAKIATVALANKTARIVWAVMSRNEVYAASAA

SEQ ID NO: 48680 - protein, 385 aa, unidentified
MQASTQTSTICTPTREQSATFFVAIELSLKGWLVCIHSPDRDRLSHYDIGAGDCDKLLALIEQARARVTRALGVKPEVVSCYEAGYDGFWLHRVLVAAGVKNHVFDPASIAVERRGRRVKTDRIDNESMIRTLMAYLRGEPRVVRVVRVPSPAQEDARRLMRERERLVKERTAHVNRIKSLLRTQGLAAGHPKRADWLTWLEAQCDHRGRPLGQCLVAELKRQHQRLRMICQQVKALEDERASAMLQALVTKATALTRLKGIGPNFATNLTGEVYWKDFENRRQVASYVGLAPSPWQSGGLSRDQGISKAGNRRARCTAIQLAWLWLRHQPDSELSQWYRARVGDARGRLRKIMIVALARKLVVALWRYLETGLVPTGAVFKKGK

SEQ ID NO: 48681 - protein, 496 aa, unidentified
MRVNHWRSSPRLWRGELSRLEECSSSFILGLKPQNMKNKYSNPKNKKVKKIVLQENWEKINPNACGIDVGARELWVCVPSDRDPESVRCFGTKTPDLQEMAQWLKACRIDTVAMEATGVYWIASFQLLEREGFKVVLVNPRQVKNVTGKKSDVMDCQWIQKLHTFGLLGASFRPADPYCVARTYMRLRDDLVSGSTTQIQLMQKALHQMNIQLSHVLSDISGCSGQAIIEAIMAGQRDPIALAELASRRVKSTKAEIAKALIGDWRPEHLYCLAQAHQMYLRYQLDINQCNAKLADELEKLPNKVDAKLQPLPPKLDRKKEIDEKLRLGLYCKFGVDVTAIEGIGPTAALTLLTEVGADLSAFASEKRFCSWLGLCPDNRISGGRVLSSRTRRVVNRMADVLRMSATTLKSSQSAMGAFYRRMVAKLGPAEGITAVAHKLARLLYSLIKHGHAYVRTGMEQYEQKNADRKMKALRKMAESLGVQLLEPQPITTGVS

SEQ ID NO: 48682 - protein, 352 aa, unidentified
MPGLPHAKAKRTVKPTVEALIAAIDGYRSRAAPAGRIVERVIATYEAGWSGFWLARWLARRGIETHVIQPSSVPVDRRARRAKSDGIDAELLLRTLLAWLRGEPRVCSMVPIPSEADEDARRSIRERTELVAERVSLVNRIGAVLATLGVQGYDPLRRDRRQRLDASCTALGNPLPTNARAKITRMLDRLELLLQQIAELDRQRDAVLEDDAPDKAGEMIQQLATLRGIGVQSATVLVREAFVRDFANGKALGSDAGLSATPYSSGSVNREQGIGKAGNRRLRTVMVELAWLWQRYQPDSANVRWYRERAGTTGARMRKVMVVALARKLLISLWRFVTQGLVPDGAVMKPAS

SEQ ID NO: 48683 - protein, 426 aa, unidentified
MHIASIGIDLGKTTFHLVALGERNKILLRKKFSRAQRLAYTANLPASLIGLEACAGAHFLGGMLREQGHQVRLIPAQFVKPYRKSNKNDFLDAEAIAEAVTKQNMRFAQLKTQEQLDGQAMHRVRDRLVQRRTALLHEIRGFLLERGIPFAAQPIHLRKNLPGVIEDGERNLSPRLRWRLDRMWQEWKPIETEVQAIREEIERISNADARCRQLRQIPGFGPLISTATVAAIGNGAAFRRGRDFAAWVGVVPRQYSTGGKQKLYGIRQRGHVDLRRMLIHGARAVLFRVQYDTGGFGQWVHRLAQRAPHNKVVVAIANKLARIAWAVLSSGRDYRHQPLRQLAAAGWPLKRRYAWKAQNAFHFSTATTTDVRDSSTKLCCGEQKTRRTAQWRAGKPDGENASLVTEGFIRTGARASSSSARRAFST

SEQ ID NO: 48684 - protein, 354 aa, unidentified
MIIIGADYHPGFQQIAFVDTDTGELQERRLEHREEAETFYRELAAQGIKVRVGMEASGHARWFERLLGELRFELWIGDAAEIRAKRVRKQKTDRQDAQLILRLLLEDRFPQVWVPSWENRDLRQLLWHRHRMVQARTRIMNQLQAVALNEGLRCQKRLWRDTGREQLQSFKLAPWASRRRHDLLELLDRLTPTIAELTQAIEQEAEKCPAVQRLQTHPGVGALTALAFVLIIGRADRFACGKQIASYLGLVPVEDSSGQRRRLGHITKQGNSLLRFLLVEAAQVTVRGDQEWRRKYFHLALRRGRKIAKVAMARRLAVRLYWMWRRGWDYEQLKNFGSHAGQPGNPDGVQSSTE

SEQ ID NO: 48685 - protein, 347 aa, unidentified
MEHVAIDLGRPNSVLAEFDSAGAKQWTRFRLEPAMLRRLFEGRPKCRVLIEASTDSEWVAQLLEGLGHEVVVADPNYAPMYGERNRKIKTDNRDAAALLDANRLGIFRRSHRRSAEQARIMGLLSVRDGLIKTRTGFINLVRAQLRRHGFKLRSGSGESFVSRVDELELPASLKALIQPLLSLMPKLNEQLAQIDRQMAQQGRSDPRVELLQSAPGVGAQTSVAFMALVDDVARFPKAHKLESYLGAVPSEWTSSEKRIQGGITKRGDSRVRYLLVEAAWSILRRHDPQCLELQRWAQAIANRRGPKVAVVALARRLAGILYAMLRDNRPFDPTRIGSHHRPRRKAA

SEQ ID NO: 48686 - protein, 396 aa, unidentified
MREQQNNRQERTIIGLDLGDRWHRFCVLGESGQVVEEGSVANNRVALSELSSRYPGALVVMEAGCHSPWVSRHLEQAGCEVIVSNPRKTRAIYQHERKSDRRDALMLARIARMEPALLYPVRHGSEEAQQDLLRIKLRDSLVRARVGLINSLRFTLKSLGYTIANPSTERFHKVIQSALPESVVQMIAPSMQAIEELSLRIKLLDWEIRTLAHTKYPETSWLEQIPGVGPITALYFVLKIGDPARFERVREVGAFIGLCPRRDQSGENDPQLRISKRGDAYLRRLLVSSAQYILGPFAPPSALRQYGLALAAGATDPQGPHTEDEVYHVVSGRGSITVGDEVRPVTAGSIVFVGADVPHRFHDIDEELVVLVVFGPAEYTHRVDHQRGQPHGAAPA

SEQ ID NO: 48687 - protein, 462 aa, unidentified
MAKSRAKPRRRNQAAPTALPRVNPNAAGIDVGGAFHYVAVPADRDDQPVREFAAFTGELYRMAEWLKACGIETVAMESTGVYWIPVFQVLEERGFEVKLVDARQLKRVPGRKTDVSDCQWLQQLHSFGLLAGAFRPDDQVCVLRSYMRQRAMLVGYAGQHVQHMQKALVQMNLQLQYVVEDITGATGMRIIRAILSGERDPHRLAALRDERCKSSAVTIAKALQGDWRQEHLFALAQAVELVEAYQAKVAACDERIQAHLQTFTDRSDGQPLPKGPPPRADRHDLSFDATAELYRMTGMDLTAINGLQAHTVLKVLSETGLDMSKWPTSKHFGSWLGLAPNNRVSGGKVLSRRTARNANRAAAALRVAAQALHHSKSALGAFLRRKAAQLGMPKAITATAYKLARIIYAMLTEGTEFIERGQDYYERAYQARVLKNLSRRAKELGFCLVKPDQSAAPQPAYA

SEQ ID NO: 48688 - protein, 365 aa, unidentified
MTVIHYIGLDVHKKTISYCIKTAAGQIVQQGRLEASRAAVRGWAEGLRVPWHGAMEATLFSAWIYDTLKPYAEKLVMGHPARMKAITAGKKKSDAIDARTIADLLRCDLLPSCYVMPPELRDLRRLLRYRNLVVQQSVRMQNKMAGLLMESGTAFDKDKLRGKKYFTELLKSLQEVPESVKDLLRMSRGSMEMFQSTQKQLVERLLSEPALEQRVERLMTIRAVGPITALTWALEIADPHRFASIADAVSYCGLTAAFRSSAGKQQRGPISKQRNAWLQSVLIEAAKLAPRWNPQLAALHAHELERGHPNRATLQVARKLVAYLLAVDKSGQPFQVHTPPPPASTKAKNKTRRKNDKAAALLPAA

SEQ ID NO: 48689 - protein, 408 aa, unidentified
MKDSGKRYIGLDVHKHYLIAIAVDDELNVVLPVRRVELSHLESWMKKTLTKQDDVVLEMTTNTWQLYDELCAYAGSVLVVHPPHVALITRSQVMNDKIAASILARLLAKGLLVGVWVPPQEIRELRGLVAQRKKMTGLATQAKNRLHAVLQRHHLAPAEGNPFQEAQSAWWLALPMGKLEQVNIQSDLETLRFAESQRDRLTLMMEEIASQEEQVTRLLHLPGFGVVTAVTVWAAIGTIQRFADPQHLVGYAGLGTRVHDSGMSSRSGRITKAGRRDLRVVLIEAAQVAANSHPHWKAELARLQPRLGRNKAIVAIARKLLVAVWYILAQHKTDRFVQPEAIAQKFLKFAYQLGKENRPAGQSAAQFVRQRLDTLQLGSELTSIAWGSKKPIPLPPPANKVSDVPNTK

SEQ ID NO: 48690 - protein, 360 aa, unidentified
MRGRNQGGKTAVRGEEVFVGIDVHKESWQVTVRAEGEEVFHGRIPGQYDALQKILDRFRGSKIKVGYEAGPCGFGLHDQLREDGVEVMVAAPSLIPVESGNRVKTDKRDSRKLARLLEGNLLKPVYVLSEEERMHRELLRTRQQIVGHRSDVARQIKSKLLFHGISSESAEKHPWTLKYVQWLKGLSLACPYLQESVGVLIDLYEYLSKQLRRINRRVAELSRADKYREKVKLLRTVPGVGLLTGMEVLVELQDVKRFRSSEEIASYLGLTPSEYSSGEKSRQGRITRSGNWRLRSALVESSWVLIARDRWMRMRYMKLKARKGAKRAIIAIARRLIIRLRSILLSNVPYRGGKPLIQGV

SEQ ID NO: 48691 - protein, 440 aa, unidentified
MSKRAYRATRVNDVNWDQLAQGKEGLDITLGVDVGKYSLWAVCRWADGRFERPWRVQNPGEIPTLLTLLKGVSAGRRLVVAMESSGTYGDALRQALADNQIELQRVGGKAAHDYAEVFDGVPSQHDGKDAAVVAELAALGKAMPWEYQPADPWEQELAYWVEWMVAHRQMLTIWQGRLEGLLARHWPEATQVLKLSSGTLLRVLKRYGTPQALAADGEAAKLLARWGGAFLAAEKIEQLLAGARASVGVRLGEWQQRQIQNYAQQALAARQEANRAERRLRSLAEGHAVLQAQGKVVGVPTACVLWVSTGDPRKYHAAGAYRKAMGLNLVERSSGTYQGKLRISKRGSSRTRQWLYFAVLRLVQKCGVRSWYEAKKAHDEADARRALVAVMRKLAVALYYVGVHNEEFQPRRLFGRIRRHRGSPGEQKSRTKRRSRAEQL

SEQ ID NO: 48692 - protein, 420 aa, unidentified
MRRMLERCAALDVHKKAVTVSARTPGAGERREERMAEFETMAADLLALRDWLKELGVTHVAMEATGVYWKPVYYALEDDFELLLVNAQHVKNVPGRKTDTQDAQWLCQLLECGLLRASFVPPKPIRALRDLTRYRKALIKERQQEANRLHKVLEDAGIKLSCVATDVLGVSGRQMLSALLSGTRDPAVLADLARGKLRSKIPALQRALAGNFQAHHALITSQILSHLEYLDEMIAQVTEEVERRLAPYARKAELLRTIPGVAERTSHVIIAELGPDMDRFASDRHAASWAAICPGNNESAGKRRSGRPRKGNPYLRVALTESANAAIRTKNTYLRAQYEQIKRRRGHKKAIIAVAHSILIASYHILKDQVPYHDLGGDHFARRADPDRLAKRFVAQLERLGHTVTLQPTSTSTAQAVAAT

SEQ ID NO: 48693 - protein, 430 aa, unidentified
MKSNTQNAKIEAITEKTLVLGIDVGSEMHYARAFDYRVIEYSKKPFKFSNTEAGFATFKEWVLDLKERHEKDKVVPGMEPTGHYWFNLGKFLQDNEMKPVLVNPHHVKKSKELDDNNPTKNDRKDPKVIAGLVREGRYMIPYLPEGVYADLRTASNIRFQLQAELTRIQNRISRWFNIYFPEYKTVYGKPDAKSGMLILKAAPLPEDILTLGIDGVNQIWRDAKLRAVGKARAKTLIEAAEHSVGSKEGAVSARMEIRMLLEDYESRNTRLQEVMVLIEELVRKIPMAEKLLEIKDVGIRTVSGFLAEVGDISRFNNPKELQKLAGLALVENSSGKHKGETTISRRGRKRLRYLLFEVAMSLVSKNQEFRELHNYYTTRRLNPLKKMQSLMAIAAKLIRVFYAMLTKGVDYDPKKMVSDIKRPAVYLQAA

SEQ ID NO: 48694 - protein, 386 aa, unidentified
MKKDSIAKLQVTKSQIRRMAAKQRLTVGLDLGDCSSRYCILNEAGEKASEDQLPTTKAGLDSLFAKMAPCRIALEVGTHSPWVSRHLAAMGHEVIVANPRKVRLITQSVKKNDRMDAEQLARLARVDPKLLAPIRHRGPEAQADLAVIRARAELVDARTKLINAARGLTKPMGERLKSCDADYVKESLADGLSEATQRVIRPLLKSVEEMTKEIGMYDKEIEKIEKRYPETKLLKQVKGVGTLVSLTFILTLEDAERFAHSRDVGPYLGLTRKQRDSGDSQPELGISKAGDVLLRRLLVKAAHCILRDGAPDTDLKAWGLTKVQAGAKTGSGKKGSKRRKKKAVVAVARKLAVLLHKLWVTGEVYDPQYNRKAVEAAKAKEKAAAA

SEQ ID NO: 48695 - protein, 342 aa, unidentified
MTAIGIDTHKATLAACAVDELGRPVGEATFANDRAGHVAFIAWARSIAPEATIGVEGSSSFGAPLARTAQGAGLCVREVPPHLSRVERLRTRRPGKSDPGDALAIARVTARESNLPPIRLPDRTTELRLLLEAREDLVAESTRARNRLHAHLLTLAPGYGGTVTNLVAAHRRATAGRLLRGIGGVQAELARGLLLRLAHLDREVKALTIRIGLLVAGHPLLGLPGAGPITAARLIAEVGDVRRFRSADALAALAGVAPIPASSGQVQRMRLNRGGNRQLNRAFYVIAVIQSRFFPPAKAYVTRRMEVDGKSWREAIRALKRMLVRPVFRLLLEGAELQMEAA

SEQ ID NO: 48696 - protein, 309 aa, unidentified
MDAVYVGIDVSKDRLDVHVQPSGESFSVARDGEGVAVLIARLQPLAPRLIAVEATGGFEIIVAASVGGAGLPLAVVNPAQVRHYAQALGKRAKTDAVDAEVIARFAEATKPEPRPLPDDATQLLADLVARRRQIIVMMVAERQRATRLPKRLKKSCERVIRMLEKELAELDREIDTAVRGSPAWCAKEDLLASVPGIGSITARTLIAELPELGQLDRRKIASLAGLAPFTRQSGKWRGKAFISGGRASVRTALFIATLSAARHNPTIRAFYKRLTAAGKPKMVALIACMRKLLTILNAVARDQKPWQNA

SEQ ID NO: 48697 - protein, 372 aa, unidentified
MKNTTVGIDLAKNVFHLCAANGRGRVLWRKKVTRQGLESLLAELPASTVAMEACAGSHYWARQCREHSHVPRLLSGKFVKPFVKSNKNDVIDAEAIAEAAQRPTMRFVPVKTIQQQDIQALHRVRERLIHNRTALVNQCRGLLLENGIVIRQGRHHLQRQLPQVVENASGELSQPLVVLIRELSEELTGLNERIGVVERNLKQTARNIEPCARLMSIPGVGYLTATATFAAVGSGSDFKNGRHMAAWLGLVPRQVTTGGKPKLLGISKRGDAYLRKLLIHGARSVLISRTDLGSPQRWARKVAFRSCSNKAAVALANKNARIAWKLLRSGESFRPDYLDKGGGGGKSKRPRAAALPGSLGPRRFLPRSESRS

SEQ ID NO: 48698 - protein, 398 aa, unidentified
MIYVGIDVAKSKHDCCILNEKCEVLSTFVFTNDKQGFENLIAEIGKYSTDCDFSDTRIGLESTGHYSINIQNYLLHKRLCVKIYNPLQVNLLRKARTLRKTKTDKSDCKFLATLLLTDDSKSYSSTVLPISELRNLTRSRHRLISMRSKLKQSLSRLITILFPELPSVVWSVHQKSSYALLSEFPTADAIATANIVRLTNLLSANSKGKYGREKAEQIRELARSSIGFDSFSVGFELQQTIRLIQNLQIEIDLLDKEIKKIMREINSPILTIPGIGYTLGAIILSEIGNIENFTTPAKLQAFAGLDPSIYQSGQYNANNTPLVKRGSTYLRYGLIQAARLVAYRDVTFATYYEKKLGEGKHYFVALTHVAKKLLRVMFHLLKTNQPYELQLPQFRITA

SEQ ID NO: 48699 - protein, 346 aa, unidentified
MPIVDSSRPITGGVDTHLGNHVAAALDANGGLLEVQSFPNNTAGFVALHDWLRAFGPVGRVGVEGTGAYGAGLSRYLQSCGLVVIEVDRTNRQVRRMRGKSDPVDAIEAARAALSGRASGIAKTGDGNVEAIRALLIAQRSGREARARCLNQIRHLGFTSPDRLCEQFRDVPKAHLAARAAALRPRADSDPVLHATKLAMRTLGRRALAISDDMHDLDVVLAELVTATAPALLACHGVGVDTAAILLVAAGDNPERIRNEAAWAHLCGVAPLDASSGKHRRHRLSRAGNRQANHALWRIVFTRMGSDPRTRVYVERRTEEGLTKREIMRVLKRYVARETYQLLPRS

SEQ ID NO: 48700 - protein, 379 aa, unidentified
MGHHSEAFVGIDTSKLRNAVAIAEAGRRGELRYLGEVDTRETATRKLVAGLAAKYRKLTFCYEAGPTGYGLQRLIESLGHTCIVAAPSLIPKKAGERVKTNRRDAEGLARLLRAGELTAVWVPDERHEAMRELTRARDASRQDLTRKRQQVSSMLLRLGRHYPGIRTWGARHRAWLANQKFVHPEQRLAIEELLLAERQAGERIARLEQAIRSAVADWSLAPVVPALQAMRGIDLVSAVTILAEIGDLSRFASPRQLMAYLGLVPSERSTGESVKRGSITKAGNGRARRVLVEAAWAYRHPPRVGYEKQAQVAAAPVRAREIAWKAQVRLCKRFRTLSRKGKKSTVVATAIARELAAFIWAINREVSGPIEAAETSRRA

SEQ ID NO: 48701 - protein, 338 aa, unidentified
MAIVTIGIDLAKNVFAVHGVNEAGKPVLVKPTVARGKLLELIASLPPCTIGMEACSGAHHWARLFMAHGHTVRLMAPKFVAPYRLSGKQGKNDAADAVAICEAVQRPHMRFVPIKTVEQQGQLCIHRVRQGFIEQRTATINRIRGLLSEFGIVLPLKAATIRREAMAHLEDLPGWANTVIGDLLNEVSHLDKHVEQYDQHIEQIAKEDSRTQQLMRLPGVGPTTATAILAMIGNGHEFKCGRQFAAWLGLVPGQYSSGGKARLGHITKAGDSYMRSLLVLGARAVLNSAKNKSDSTSRWAVALAERRGYWRAIVAIAAKNARMAWASLTLGERFAMPA

SEQ ID NO: 48702 - protein, 386 aa, unidentified
MTRPSNVLLRAINYDHTLVLAIELSNKSWVLAAQVPGFPQTKAQRTIEPNKNALLAAIDGYRARAAAVGHSVDRVIVTYEAGWSGFWLARWLIAQGVEVHVVQPSSVPVDRRLRRAKSDGIDAELLLRTLLAWLRGEPRVCSMAPIPDEADEDARRSVRERTELLSERVGLTNRIGAILATLGVNDYNPLLQSRRRRLAELRTGLDQPIPPNALAKIERLLARLELVLAQIAELERERDKVPAADVSDRAGQMIQQLTSLRGIGVQSATVLVREGFVRHFSNGKALGSYAGLTSTPYSSGGIDREQGIGKAGNRRLRMVMVELAWLWQRYQPGAAQVAWFHNRVGSNGRRIRKVMVVALARKLLIALWRFVIDGVVPQGAVMKPSI

SEQ ID NO: 48703 - protein, 438 aa, unidentified
MSMTFARLLDPCFEDEDDPFRHYDYRGEPLEDRLYLPCGIDPHKKVCHAAFVHPLPHRQEILSHREIQNQHLSEALWLVEEGQRLAVPFQATPLYIFEASGPYWRPYRLFLHQLGLPTATVSGRQTRRAGGTGTRKKRNDLQAAFLAAKVFKQGESHASRIPPEPLATLREYTRLHLFFVEQSVAIQNRMFDLRYQIHPGFDDLFSKPVMPTTLALAKEELVHPVQLLQADPETLTEVIYQASNGKLGAPRAEAILRSARHTFYPPYAPQAQSFNLKLMAHAHEYIIHHLLPPLRARIEEGLAEIPFPHHLLDIPYFGPIVTATFLAELGSPFWFRTVDSVVAWFGLDPSVSESADHTTGISRLTRRGTKYGRRIMWLVARNWSRYVSQGNRMFRKERDENKLPYDAAICIIAAKLVRVAFAMARDGSHFDMSMAFPN

SEQ ID NO: 48704 - protein, 400 aa, unidentified
MFVGWDWASTTHDITVIDATGAVVDRWAPPHTEHGLTQTITRLARHGHPADLPVAIERPSGLVVDRLLAAGHPVVPIHAAAFHAARPRWGAASAKSDPGDSYKLADYLRTDGHRLRRLQPLDDATRHLQALIRLREDHIKAKTAASNQLNALLDAAWPGAAAIFSRLASDIALAFLQAYPTPQAAARLSQARLAGFCRRHSYRGGRSPAELLQRLWAAPTPPVGLDPETLTELVNAQVRLLRTLLATIADLDRAIGAALLGHTKAKLLAPMPYIGEINLGQIVAEVGPILDRASSAEHAIAECGAAPVTRASGKTRTVGFRWAANRHARTALHAFADNSRHGSPWAARLYADARRRGKRHPHAIRILARAWLRVMWACWHTNTAYDPTKHRAEQRLAAGT

SEQ ID NO: 48705 - protein, 478 aa, unidentified
MKKPSRKPGKASKAKANRDPGGSRINPDHEPNGAGIDVGAEFISVAVPEKCGEAPWVRDFDTFTGELEKAARWLLSCGIKSVVMESTGSYWIPIYDVLERHGIICLLVSAHSLKNVPGRKSDCVDARWLQLLHSCGLLRGAFRPPATMLGLRSLIRHRAGMVRESTQHLQRMDKLLTEMNLRLKLVISSLHTDTAQRIITAIAEGERDPARLAALRDERCKHSLAEIKAALTGNWKEASLWLLRLEHQAWQHSRRQIAELEAEIQRMLEASEPVLPVESASPEEAPQLKEKLQKKALPSHLETVIQQSRRLFGCNITTLPGISAEKTLELMGELGSREVLLKNFRDEHRFAAWIALAPRPDISGGKQLAGKKHRKMSVVGRIFDGAAFPLGRGHGLLDAEIRRRKAAGGKSWGIRVIAHKLARIFYAMVKNRCDYNENLAFPDRDIKLEKSRKHLEKKAAAMGFVLVPAKAEADQTGA

SEQ ID NO: 48706 - protein, 387 aa, unidentified
MSEMFNPHAPATAYDHNTTIVAVLELSGKNWLLGAVAPGLSRRTKRSFEARNVEAVVRALEQAKGESAKARFEVARIVVGFESGRDGFWIARALQQRGFEVYVMHAASIAVERRGKRAKTDRLDVDLLLTTLMGWLRGEPGRCTMAPVPSEEEEDLREAGRRRETLVHARLKVENQISSLLIRQGIEGFKPRLKNAETKLCELRTFDGRSLPANTMNSLRLLLAQHRLLSAQLKEIEEARQRVVNVAKPDRLQRMILALARVVGVGVETATVLVHEVFSRSFKDRRALGAFVGLTGTPYNSGSSKTEQGISKNGNARVRRMLSQLAWRWLGHQPESALAQWFNARLGGAKGRMKKVLIVALMRKLVIALWRLAETGEIPIGARLAAR

SEQ ID NO: 48707 - protein, 412 aa, unidentified
MDTYCGIDWAEGHHDIAIVDQNGKLLARKRISDGPAGLTELLGLLAGHGDAPGDLIPVAIETPRGLLVACLRATGRHVYHINPMSVARYRDRHSVAGRKSDHGDAVVLANVLRTDMHAHRPLPADSELAQAIAVLARAQQDAVWDRTQAHNKLRSHLREYFPGFLAAFPAASGSITRPEARAILAAAPAPAAAAALTEARLRALLRKAGRSRGIDAEAARLRAAFTAPQMRQLPLVEDAMGQQSLALLGQLNAACAAASDLEQAVTRSFNQHPDAGIITSFPGLGILTGARVLAEIGDDRSRFQDAKGLKAYAGAAPITRASGKSTSITFRRVKNNRLNAAGYSWAFSALTASPGARAHYDRRKDAGDRHAAAQRNLFGRLLGCLHHCLTTGQHYDEDTAFPNPAKKIPAAA

SEQ ID NO: 48708 - protein, 411 aa, unidentified
MELLHRRCCGLDVHKETVVACLRLVADGKVTTEVRTFQTTTADLLRMSEWLAANECTHVAMEATGVYWKPVWHILDDGDFVLVLANAAHVKNVPGRKTDVNDAMWLAELLAHGLIRASFVPDAQTQEMRNLLRTRKQLVREQSSHVLRVQKTLEDANIKLDSVLTDLMGKSGRAMLEALIAGETNPAKLASLADRRVKASPEEFREALRGRVTKHHRFLLRLRHQIDALDAAMATLDAQVESNLEPFRTAVEQIISIPGIKNLGAHVIVSEIGIDMSRFASAAHLLSWACICPRNDESAGKRRSNRMRKGGTWLKTTLVQCAWAAVKKKGSYLQAQFYRIKARRGPKKAIMAVIASILTAIYHMLKDGTMYKDLGSDHFDRRSTDQQKNRLVKRLADLGYTVEIKPIAATA

SEQ ID NO: 48709 - protein, 344 aa, unidentified
MTDVKYIGMDVHQASISIAVVDGGGTLLMQSTIRTQASTLLEFLCGLKGALHVTFEEGTWSGWLYDLLAPHVAQVVACDPRHNALLKSGNKSDKINARKLAELLRAGMLKAVYHGQRNSHRLKELSRSYLTLVHDGTRVMNRLKAIYRSQGIHGAGQRVYSRAEWLEQLREPGLPQRAAFLYQQLDGLQALRKEARRLLLTESRKHPAHRLLLSVPGLGLIRVALLLALIQTPHRFRSKRQLWAYASLALITRTSADNRLVQGSLPRSRKPIAIRGLNQNHNHDLKEIFKSAALRACRLPGPWRDCFSQTSRAGNEAGVGSLDHGTQARRCGPHSLEEGRTLQR

SEQ ID NO: 48710 - protein, 399 aa, unidentified
MALKIVYQICCGIDVHKTFVVACIASTNKQGVTTYKRHRFSTFTQGLKELLQWLLDNHCKDVCMESTGKYWIPIYNVLEKDCNIVLAHPKYVKAIRGKKTDKKDAKWIADLFKHDLVAGSFMPPADIRQLRDLMRYRFKLTCFMSSEKNRLQNCLTVSNIQLASVVSDTFGKSSQRILDKILENPDDTSFDIEPLIHGSMKKKLPELELAIDGFITPEQAGKLKVIKKHFEDLESRKAELEKLILALASPYQQELDLILTAPSFKNKFTAIGIISEIGVNMEAFPSAKHLCSWAGLTPTNNESAGKKKSVRVSKAGCYIKPLLVQCANSVVKSEKHPEIRNRYLRLRKRRGHKKAIIAIARMLLTALYNMLKKKEPYNAELYRKSDALPVNREITIEQV

SEQ ID NO: 48711 - protein, 369 aa, unidentified
MNASVIYVGMDVHKDTIVIAVAREGREAAENWKTIPNDGLRLRKALKLLLKNGEVLKVCYEAGPTGFGLCRRLREAGIDCIVVAPSLVPGKPGDRVKTDRRDARRLAHFLRSGDLTQVYVPEEAVEAIRDLERARDDAKCAERVARHQLSKFLLRHDRHWESTTWTWKHRDWIRGQKFDYPAQQRVLEDYLKTVEDLGERVARLTTSLEELVQTTTLAPLVKALQAFRGVQLVSAATIAAEVGDLRRFATPGQFMAYVGLVPSEDSTGKRRRQGAITRCGNGHLRRILVEAAWHYRHAPLMSKELRRRNQGVADGVRRIAWEAQKRLNKRMYHLIHKGKSVNKVVIALARELAGFIWAVGQEEMLLEVA

SEQ ID NO: 48712 - protein, 412 aa, unidentified
MQTLVERGCGLDVHQATVVACLLIIRNDDTVQKQMRTFGTTTRELLNLREWLLSQGCTHAAMESTGVYWKPVYAILEGGLEIVVANAQHVKKVPGRKTDVKDAEWIADLLCHGLLRSSFVPPKAIRELRDLTRYRRKLVESQAAERNRLLKLLESANIKLASVATDVFGTSGRLMLRALIAGKATAQEMAELARRKLRSKIPQLQLALEGKLEGHHRFLLKLQLDRLERAEGDLAVLEQRIQEKLEPYAAQLALLREIPGVDWTLAAVIIAELGVDMSVFQSVSQLASWAGVCPGNNESAGKRKSSRIPKGNVYLKTALVEAAHAAARTKGTYLRDKFYRLKARRGYKRAVVAIGHKILVSVYHMVSQNVSYNDLGDLYLDKLNKNHLTRNLVHRLERLGYSVILAPQQKAA

SEQ ID NO: 48713 - protein, 343 aa, unidentified
MEYYAGIDVSLKESSVCIVDAKGKVVREVKVASEPEALVRYFDELELPVCRIGLEAGPLSHWLHAGLVAAGRDIVLLETRHVKAALSAMTVKTDRKDARGIAQLLRMGWYRPVHAKSVASQDTRAVLVGRKLLQGKLLDVELSIRGILRGYGLKVGEVSRGRFEARIQELIAGHATLETVIGAMLVARAALWREFTRLHREMLKIARADKICHRLMSTPGVGALVALTYRSAVDDPTRFGKSSTVGAYFGLTPKKYQSGETNRDGGVSKVGDAMVRTALFEAAHIMLTRATRFSSLKRWALEVAKRRGMKRAKVALARKLGVVLHRMWMDATDFRWGATAMAA

SEQ ID NO: 48714 - protein, 319 aa, unidentified
MAQNGLVVAGIDIAKDKADVSIRTLSQRQTFPSTAEGRRQLISWLRKHKVTKAVMEASGGYEREWARAIREKAIEVRIVDPKRVRHFAQSAGRLAKNDGIDADTISWFAEIFGEAPSQAHDAARETLQQMVNARQGLLDIRTMLSNKGEQDVPEPVQKSHARLLKTIAVELAKLEAAITALVKATPHFAKRAEIIESVPGLAATTAAGLIAAMPELGEVSNEAIAALLGVAPYDDDSGKRQGQRQIKGGRRKVRNLFYMASLGAATRHNPMLKTFYHRLIAKGKKAKVALVACMRKLIVILNTMIARGEKWDASRYPVS

SEQ ID NO: 48715 - protein, 370 aa, unidentified
MQFIGIDLHTNKFTCSYRDENSSVDAKKGKRTETFDLNERGLAAFYQTLTDETYVLVEATITTFSFVRLIQPLVKEVIVANTYELKQISLARTNTDKIDANILSRIIKMQVLSGEQAVSPVTIPPENIQELRSLFSTYRLYRKQTTQMKNRIHSLLKEKLYGFTQEEIFDQKSREKIRKIESGTVLSFQLNELFDLLESMEAHIEPLKERVMAQAEPYLREIEILTSMKGISVFIAIAVIADIITVNRFKNSKTFTSYLRSAPRVSNSNTSKSVLGTNKKGRKLSATLIVQPLHHMRAASPKINRWYTELIQYKKPGLVRTGLRRKVFTEIFYMLKKGEYHYWRDKQNHEAKMSQYRNFLKKRKFLLEIA

SEQ ID NO: 48716 - protein, 416 aa, unidentified
MNKDNNSGNRKRNSKPGQSGNAGQRETKDVLAELVERLREKLNPKVVAKSPATERPRSALKPNLDRLTVGVDLGDRLSNYCILDLEGETLGEGQLRTTQEDLAEFFQSLHKARVVVEVGTHSAWTQDVIAGCGHEVVVANPRLMEGSKRRKRKNDRIDANKLARLGRVDPQSLYPMEHRSTEVRQDLILLRARDALVAVRTELINTTRGLVKSMGQRLGKCSSRSFAGRAEEELPIAIRESLLPLVQIADALNDCIKEYDGKIDELANQKYGHTKLLRQIKGVGPITALAYVLTLEKAERFAKSRDVGPYLGLAPKQEDSGESQPQLGISKAGDRMVRKLLVGSAQYILGPFGPDTDLRRYGLRLCERGGKNAKKRAVVAVARKLAVLLHRLWVTGEVYEPLRNHLSLASVTTAAA

SEQ ID NO: 48717 - protein, 264 aa, unidentified
MEQFIGCDAHKKFSVFVAVNEKGHAGEALRVVHDRQLYREFLTRLPAHSVIAVEAGGSYSWLVDEMEQLGHHPKLCNPLEAKRRMGLTHKTDKLDARGLAILLRNGTLPEVWIPPSELRDQRELLRLRIFLVRLRTRVKNRIHGTLARHNVQVPGADLFGVAARLQLGARLPELPVHCRAAVEEELATVDFLETQIEAAEHRLEAIMKVSVEADLLKTLPCVGPILSMVLMLEIGKVDRFPTAAHLASYAGLVPRVYSSGGHNF

SEQ ID NO: 48718 - protein, 393 aa, unidentified
MLHSSGVSLDTTDAVALASERSEEAKATAADGRSLTLECCNADTVREPDRRRPLVNSPYSRLSRDKLSSSHLQGRDTSKMSFQHFIGIDVSKAKLDLAFDEQATTTVVPNDPKGIDELVDLLPEAKSCLIVIEATGNYERPLAVRLVEAGHVVSVVNPRQVRDFAKAIGQLAKTDKIDARIIALFGKLTRPRAVAKTKQLQGELDQLVTRRRQLIGTRTAEKNRQGQAVSGAVRKSIQRVLDAINNDIKMIDREIQKLVQSDDDWKHRAELLGTMPGIGDVTSATIIAELPELGDLNRREIASLVGLAPFNRDSGQMRGKRSIFGGRGSVRSALYMAALSARRYNPAIAAFSKRLTEQGKPPKVVIAACMRKILITLNTMVKTNTTWENPQNA

SEQ ID NO: 48719 - protein, 361 aa, unidentified
MNSDKYVGLDVDQAMVVAHVTNDKGEFVMESFLETKGDGIRQFFRSLEGRVHVAFEEGSLAAWLYEIIRPLVSQTVVCDPRANKLIHSGNKGDRVDAKHLAKLLRMGELHPVHHGEESVRGLKELVHGYDRLVRDNTRAMNRLKGLFKGQAIGCRGRAVYRQETREQWKQKLESEALRARADLLYKQMASLKPLRDEAEKAMIKEARKHGAYKLLVKLPGVGPIRAATIIAAVGAPHRFRTKRQYWAYCGFGVVTHMSSEYEIIEGRRQRRKKPVQTRGLNENFNRMLKTAYKGAALTAIESEPFNKYYQRLIDNKMRPEMAQLTVARKIAAISLAVWKKGERFDPARVNQAEQCTGDDKR

SEQ ID NO: 48720 - protein, 434 aa, unidentified
MDRVIIGVDPHKKSVTFEARDSREILRGTGSFPTGAGGCRLLIRYARQWPERIWAVEGANGIGRPLAQRLLASGERVLDVPAKLAARARVFDTGQGRKTDAADAHAIVMVALRDKGLREVASDPELAVLRLLCDRRDELSRARAQALNRMHRLFLELVPGGAPVKKSASQYKALLASVRPHDPVGKMRRRMAAEELADIEHLDVRLKAMKAELKTAVLATGSHLMDLHGIGPAGAARILADVGDIARFPSRGHFASWNGTAPIDASSGQHIRHRLSRAGNRRINHVLYMAGIVQLRNDTKGRRCYRRRLADGKTPMEAMRALRRRISDAVYRQLVRDARERAAGQAGPGGHSGASMSSSAADHAPVVGSSDQPLPGPATPTLPPATNGGKTSGPGTGGTPRRRARGVNVERPAGRTTLTPTSAVASSKASRTSY

SEQ ID NO: 48721 - protein, 342 aa, unidentified
MTAASPTLFVGIDIAAKTLAAAWLRPGEAVSRPITLTQSPHGFATLHERLGQTGCPPPETHVVMEATGSYWIALATTLVHMGYRVSVINPAQAHHFAKALLKRAKTDAIDAQTLAQLAALLQPALWTPPPTVYYEVQQRLAQRDALLDVQRQLMNQLHALLFAPLVVASVKARMEELIETLGQQIRALDAEVSAALAADAAWAASAARLQSIKGVGLITAAWLLVTTLNFTICSTPEAAVAYAGLAPNPYESGTSVRGRRRIGHTGNGRMRTALYLATLSAVQHNPVIKAFYERMRAAGKPPKVARCAAARKLLHIAWAVVRNEEDFDPEYAQRHIQQPVAA

SEQ ID NO: 48722 - protein, 444 aa, unidentified
MQYQKVLQMLNCTPYLSVGLDVGADFTWMSIMLPNGTLTGKPFKIVHSDPHSRELAVTKIKEAQEMYSLKSRCFLESTGIYHIPLLCFLRDKGFDCSVINPIITKNSTNMNVRKLHNDKFDSKKAAKVGLDASLKTSIVPDNAIIDLRNMVRDYYYYKDMQSAIVLKLNAELKVSFPAYLQVFSKITTLASLKLLETYPLAADMLAAPKDEVIKIIRETARFGEKYALSKYNALHAAAEDATVFGRALPSNALRIKLYIETYREYQKHLDSILEELHKAVDELQGKPAHDQICLIQSLRGVGFLSAVVLIAEMGSFDLFSSPKKLYAYFGLDPAVKQSGKFNGDKVHMSKRGSSLARRILHMVSLNNLKIDKGTKMPVNPVIHSYYTDKCKSKKKNVAVGAVMHKICNIIFAMLRDNKPFEMITPQEHCKLYKEEHSPKSDDVA

SEQ ID NO: 48723 - protein, 416 aa, unidentified
MNSPAKSTSQRFLALDLHKHYLVVGGVNFRQQVVLNPRRISLEKWPAWAKANLLPSDAVVLEATTNAWDIYDQIVSLVARVVVAHPPKVKWIAEARVKTDRLDVLRLAHLLAADLIPEVWVPPVEVRELRALMAHRRRLVQMGTRARNRLHSLLHRHNLKPPAGKIFAQKHREWWQKLDLSPTQLMRIRHDLATLDHVQGQLAEIEQELSRLSTAEPWADQVPFLLQLPGFGLIVSLTVLAAIGDISRFSHPKKLVGYAGLGASIHDSGEKHRTGRITKRGRKELRWVLVEAAWRAADTHPYWKAQYERLERRSGSTKAAVALARKLLVAVWYVLTQRTSDRHADPDKVAFKYIMWSWKLDDVKRNGLNTRQRTRYHLMRLQLGEDLTHILRGGHRYPIAPGEELRALLPELQAAD

SEQ ID NO: 48724 - protein, 398 aa, unidentified
MEAARGVVLGFDVGRYSHHMTAIDARTGEVVASRGVEQTEPDIREAIEPYALGDAAVVVDQPGDLSSLLLAVARDMGLGVGFITPRAMAKGIELYGGELKSDAHDSFVIADLAARIPSLVRPVPERRADVEELASLMSYDRELTDDVRRAASRIHELLLATCPALGAVYAGQRVKQRLPLAMLARFGGAGGLSAAGRGEVEGWARGQPRCGARGLAFVGSALDAVGSQGVATTSSPFYDELLRIEAASLRSALDAREAVGARVDELLGRIPDAQVLLSMPGVGRVTAATFVSEVPDVGAFASAAKLAAYAGLAPRVRQSGRSLNSVTRPRAGNRRLKRALVLSAARSVDFCEESRAYYDRKRSEGRCHYSAVVALARRRINVMYAMLRDGKRYESRLG

SEQ ID NO: 48725 - protein, 376 aa, unidentified
MQEMYGLLPLAGEYGIKLKAYTNQLLPGVHTMNKYNVIAIDLAKNIFQVCIMSKDGKILLNKAMKRNKLKEWLAIQAISLVAMESCGGASYWARLAVSLGHEVMMIPPRQVKPFRTGQKTDANDAIAIAVASRAPTIKPARYLTIEQQGLQSIEKMRDMLDKQKLQLSNQIRGLLLEFGIIINKSVSSFKQRLPEILEDAENELSVAMRQTLFQMWELYTQLGKEFEVIDNQLRQLCGQDEDCKRLMQLEGVGPISAVRLKLQLAHGEHFQNGRQASACIGITPKQHSSGGKVKIGSISKVSCDRPLRSCLFLGARSVVSKLKNRPAKTEKERWLKALIERRGINCAAIALANKTVRTAYALLKNNTDYKPMLIAV

SEQ ID NO: 48726 - protein, 345 aa, unidentified
MNPTTIGLDIAKRCFQVHGIDADGEVILVRALTRQRLLPFFSGLAPCLVGIEACATAHHWARELRALGHEVRLIPPAYVKPYVRRNKSDARDAAAICEAVGRPSMRFVPVKSAEQQASCSMTRVRDRLVSQRTGTVNALRAHLAEFGIVAAKGIGRARALSAIIEDPEDGRLPDVARSSLSVLAAAIVALDEQIAALDGQIRAWHRNSETSQRLASTPGIGPLTAATFTAAVPDPACFRSGREFAAWLGLTPRQHSTGGRTRLLGISKRGDKRLRRLLIVCASSVLQGLERRKEGFANAPWLARLKASKPPMVVIVALANKLARIIWALLAKGTTYQPSRGFLGA

SEQ ID NO: 48727 - protein, 372 aa, unidentified
MGKSIRYVGLDVHADTIAVAVCEGRGEGRSLGTIPNRPEPIRKLVKRLEPVSTLRVCYEAGPTGYALYWQLTGLGVKCEVVAPTLVPVKAGDRVKTDRRDAEKLARSYRSGDLTSVWVPDAAHEALRDVVRAREAAKKDQLRAKHRLSKFLLRHGRRPPEGTKAWTGKYWSWLSTVRFEYAAQEATLLDYRTEVERAGDRIERLEKAIDEAVQGAPAQMKAVIEALQALRGVAKITATTLVTEVGNFSRFVKPKLLMGYGGLVPSEHSSGNSKKQGSITKTGNAHLRRVLVEAAWTYRHRPKLCGKHKQRQQGVSEEIKGISWKAQQRLHSRYWRLTSKGKVAGKAITAVARELVGFIWAVGVQAEREAAAA

SEQ ID NO: 48728 - protein, 440 aa, unidentified
MLVDAVKDADGLKDVESAEGQQGDAFVALLAPQSVWSDRRRCADRGLSCERPKDAQFRATSGGEPVMKEKLRFLGLDVHAETIAVAVAEPDGEVRSLGAIPNRAESIRKLIKKLGPADKLRACYEAGPTGYVVYWQLAELGVECEVVAPTLVPVKAGDRVKTDRRDAEKLARCYRSGDLTAVWVPDEGSEALRDLVRAREAAKQDQTRARHRLSKFLLRSGQKPPSGVRSWTRPYLIWVAQLRFSQIAQEFTRQDYLHEVEHMRERVARLEQAITEAVKLASPELQQVINDLQALRGIADISAVTIAAELGQVSRFDSARQLMGYCGVVPSEDSSGKRTRRGGITKTGNAHLRRIVVEAAWSYRRPPGVWYGLRRRQESISEETKEIAWKAQHRLHKRYMKLGAAGKDQRKIVTAVARELLGFIWAIGIRAETVVRQQAA

SEQ ID NO: 48729 - protein, 339 aa, unidentified
MGLYTGFDLHSSNTFVGIIDEDGKRIWKKKLRNDPSLISSTLKPFKEDIVGIVVESTYNWYWLVDLMMEEGYRVHLANPARIKQYSGLKHGDDEDDAFWLAEMLRLKILPEGYIYPKEQRPLRDLLRKRSHLVRLRTSLIISLQTILARNIGKKMNASHVKALQTDHVTPLFSGNDDLSLAGKVSKDAIDSLTMQIKAIEVVVEKRMDIRRPYDLLLSMPGVGRVLALTIMMETGPIERFPQVGNYVSYCRKVPAARFSNENKKGTGNRKNGNKYLSWAYAEVAELARRFDPEVRAYYDRKQRRTNAPVAHNALANKLSRAAYYIMRDGVSFMPDKMFA

SEQ ID NO: 48730 - protein, 430 aa, unidentified
MGLIVPSAMHAERDEQPVSYEWFVGIDWGSQQHQVCVLDRARRRVGARAVDHDGASLAQLAAWLWTLSVGQPQRVSVAIEVPRGAIVEGLLERGFHVFAINPKQLDRFRDRHSVAGAKDDRRDAFVLADSVRTDRPSFRRLQLDAPHLLLLRELSRAEEMLLEEFRRSANRLRDQLHRFYPQMLQLCSAADEPWLWDLLQLAPTPAYAALLSEEQVQRVLKAHRIRRVKAPEVLACLQAPALPIAPGAAEAAQAHCGFLLPCLRVLAEQLQACSQQVDTLLCTLADEPGEGQSPSDVAIVQSLPGVGRKITAWLFAEAAQPLAERDYQVLRTHGGVAPITKQSGKRRQVVMRRGCNLRLRHALYHMARVAMQRDAHFSSVYAALRAKGQRHGQALRNIGDRLLRILMAMLRHRTCYEASRMRREPVVQMG

SEQ ID NO: 48731 - protein, 460 aa, unidentified
MPRKKGKPKSDRAMSMVHPNAAAIDIGATLLMAAVRADRTPEPVRSFGTFTTDLHRLVEWFAECGVETVAMESTSVYWIPIYELLDARGFAVFLVNARDAKHVPGRKTDVSDAQWLQRLHSYGLLRASFRPKGQFTALRAYVRQRERLLEYAASHIQHMQKALTEMNLQLHHVVADITGATGLRIIRAILSGEHDPKVLAGLRDYRCHATVETIEKALTGSYRAEHLFALEQALALYDAYHEKVSACDARIEAVMKDLSIGRGHDTCALTPSRRRTDQVNGLAFDVRSALFALLGKDITKIDGFGPYLSLKLVAECGDDLSAWPSAKHFTSWLGLAPNNKISGGKVLSARTKRSGSRAAALLRLAAVTVGRTDTALGAFYRRLSARIGKAKAVTATARKIAVLFYNAVRHGMEYVDPGASFYETRYRKRVVDNLHRRAKAFGFVLQPLEPAPPAPGGAVS

SEQ ID NO: 48732 - protein, 667 aa, unidentified
MSHSRPQRARAAAHLATGPEAGAHATTPPANTPARPTAGNATAVAASVPIGVGIDTSRYGHYATFLRADLQPAAADLKLVESAAGYQQLRERLEAIAHKLGGHVHFHVRLDLAGRYADNLLAFLHTLGTQPAEATPLADATFTISCGDPQRNKNYRVAIFGHKKSDPVESAACARYALTEKPKPTPALTPQLRLLCQIASRLESQARQDTRLINQLHNLLARAFPELALVVNDLSAGWVLTLLDRYPTAAKLANARAASLDKIPYLPHEHIPILLRQARSSVGCLSGPAAEELVRDLVRQVKEARSRHHALEKLLVNAYHDLPFVNHLDTIKGFGEVTAAILTAKIVDRQRFAEPAKLVGHFGIYPVEAASGIDRDGNPRVPVRLIMSKRGNDLVRRYLWMAALSAAQHNPAVKPLYQRVRAKHPDQPSIAIGHVMRKLLHIALAVWKTGKPFNPEHYPWDKPAHLQPKAEVPAGSPTHAERPATPGADSAQAAGHKKPVRAPERSVVTAACATTTLPQAPAADNVPPAADGVARPAATTTPDRGRALTPTGDQAATPWIDFEHLKSQLPLERVLEHLGVLATLRGKANQRRGPCPVHAQNGQGKGRTFRVQLDRGVFHCFDPQCGIKGDVIDLWAAVKKLNLRDAAVDLVQTLHLEPAPRTEKRPG

SEQ ID NO: 48733 - protein, 349 aa, unidentified
MKRTTIGLDIAKRVFQAHAVDPDSGEVRRTKLQRSEVLQHIAQMHPALVAMEACSSAQHWAREIRKLGHEVMLISPQFVRPFVKSNKTDAADAQAIWTAAQRPEMRSVAVKTEEQQAVLALHDIRTRLQKSRTAAINQLHGLMGEFGVELPRGWRTMLPQAATALDSESSPVPALLQTQLRFQLMEIRSLTARITEVEGRISAWMRQREDCERIAAIPGVGLLTATAAVATIGEARSFRSGREFAAFLGLVPRQRGTGGRVKLLGISKRGDRYLRTLLIHGARAVISVRKGKYASEPNTWLDRVLQRRPTNVAAVAQANKMARQIWALLAHGRIYEPNHGVSEAAATPA

SEQ ID NO: 48734 - protein, 380 aa, unidentified
MNENGTVAAGLDTHRDTHALCVIDRVGRVLRTGTYSADAAGYGEIASAIGEPGDCAVVGIEGTGSYGAGVARRLAELGYDVAEVVRPRREKRMAGRDKNDPADAERAARDALVVTAPAPVRERLAGMRTPTLMKELSRRRRARGELERSLWDSLRSLAPAWRAAKEAAAEQEAAMRSILEANAPALLDVSGCGAISAARLAMAAGGNPERVSGEAAFASLCGASPIEASSGKVKRCRLNRGGDRQANRALHAIARQRMRRDDRTKAYVEKRAKEGKSRRETERVLVRYIAREVYRAIMHPMSASRASSEGAARSARAARVRMGVAQSQAASALGVASARISGLERCVLIDETLLQRYRGWLESIASDGRWKSIESTLDSK

SEQ ID NO: 48735 - protein, 460 aa, unidentified
MNSKRSKSRNSSKMPMVHPNAAAIDVGATMHMAAVRADRAPDPVRSFGTFTADLHRLVYWFTECGVETVVMESTSVYWIPIFELLDARGFTVFLVNARDAKHVPGRKTDVSDAQWLQRLHSFGLLRASFQPKGQIAELRAYVRQRERLLEYAASHIQHMQKALTEMNLQLHHVVADITGATGLRIIRAILAGERDPEALACLRHYSCHSSAETIAKALTGSYRAEHLFALEQALALYDAYHEKASACDARIEAVLKELSIHRGHGHGSAPRASRRRNRTDQANALAFDVREALFALLGKDITTIDGLGPYLSLKLIAECGDDLSSWPSAKHFTSWLGLAPSNKVSGGKMLSSRTRRSGGRAAALLRLAAVTVGRTDTALGAFYRRLSARIGKAKAVTATARKIAVLFYNAVRYGMDYVDPGASSYETRYRTRVVNNLHRRAKAFGFVLQPLEPKVGAAVS

SEQ ID NO: 48736 - protein, 311 aa, unidentified
MTYVGIDVSATQLDGATLDGPLAPHANTAAGIAALVAVQRALRPTLLVLEATGAYHASVTSALVAAGLPVAVVNPRQVRRFAESVGQLAKTDRLDAALLARFAAAVQPPVRALPDAATQELAALVDRRRQLTEMLTMERNRLPVARRSVRPSLQQTIKALERALAALEDETDRWIKASPVWRERDDLLQSFKGIGPQTSRALIARLGELGTASGRQIAALVGVAPFAQESGRWRGQRRIRGGRADLRALLYMATLTATRCNPAIKALYQRLVAAGKPKKVALTACMRHVLVILNAMVKNNQRWQAPMPATA

SEQ ID NO: 48737 - protein, 526 aa, unidentified
MATTRKTGKAGTRRRSVRPMIQKPSGAFHARVQKVGPEHFGVVCVDCHKGQSKFFVCDFYGNIQLAPTSLDHNRLALDAAIAKIRDTFAAHSIQDSIVVVERTGRYHHVVKQAFREAAFDTRVVHPFATKQNRQPADPGNKTDDADLRAMHRAAVNGFALCEPEWGVSWRSLQLLVRHRRSLVEKSSSVCCQIREHLDAALPGLASCIDKLWESQVAWHLIERFPSAAAMQQAGLDRLDQSLRQAGIRFQRRTLETILAWAKQAAPAEPTAHINHQLVLALNADRLQKAQEIKLLERRIAQELASTPYILLLSIPGVNVVSAAEFAAEMGPIENYPTARAITGRAGLYPSRYQSNKVDLANGPLVRCANRRLRFAILLIADNLILCNQHFRVLANQWRVAGKDARMTHIKVASRFCRIAYQMVAGRKVFRHPCLQQRGYILQKLSAFHVEHDSPVDQIMTDLRHATEQIPVKEHAAEAKPLHEQLNELMRKKGPQPLRDILPVVLARLGLGSIQSPESGEADLPSP

SEQ ID NO: 48738 - protein, 334 aa, unidentified
MLYAAIDIHKSVLQVALLEPATGEVSDARMPATREALRGWALPLRGSVVAVALEATSGWRWVWRELSVLGFEVQLAEPAQARALRGRKRKAKNDRLDARWLALLLAKQMLPQSWIPPEEIQRLRDLTRLRQALRHDRTRWLQRLHAVLAHEGWPCGRGELASASGQRWLAGLKLDPHVRALVDAQLAMVRASAEQINAIDVELRRLARSDRRLLALQTLPGVGPVLACHLLAELGEARRFRRARQLVRAAGLDPVVHDSAETKRRGKLSKQGSPQLRWALVQAAHGAARRAGSDEQRRQRALTPRIGSQRAALTNARAIARHAYHVLAAAETAA

SEQ ID NO: 48739 - protein, 342 aa, unidentified
MQIASVGIDLGKTTFHLVALDERSQVVMRKKFSRKQLLAFTANLQGSLIGLEACSGAHFLGAALRRQGQDARLIPAQFVKPFRKSNKNDFLDAEAIAEAVARPNMRFVPIKTDEQLDLQALHRVRDRLVQRRTAVINQIRGFLLERGITFGRGPAQLRNRMAEVLEDAENALTPRLRTLLDRLWVEWKQLESDIEVAAEEIEQICHGDEACRRLRSIPGVGPLVATATIAAVGNGAAFRKGREFAAWLGLVPRQHSTGGKARLLGISKRGNLYLRRMFIHGARAVVFRVRHDTGGLGQWVQQLATRATPNKVIVAVANKLARIAWAVLFRGEDYRHPALAQV

SEQ ID NO: 48740 - protein, 338 aa, unidentified
MKLYGAIDLHSNNNVTVLIDEQDQVVYRKRLGNDLSLISEQLSPYASSLQGIVVESTYNWYWLVDGLMDKGHRVHLANTAAIQQYEGLKYTDDNSDARWLAHLLRLGVLPQGYIYPKQERAVRDLLRKRSQLVRQKTANLLSIQNLYTRNTGLSISANRIKKLTSEQVEDLFTLGDVALAVKANLSVMRCVEAEIKTLEQVVRERIKLRAAFRYLLTVSGIGQTLALTIMLETGDIGRFPRVGNFASYCRCVGSEKMSNGKRKGKGNTKNGNKYLSWAFVEAANFAIRYEPLIARFYQRKKAKTHAVVAIKAMAHKLSRACYYVMRDEVRFDVARAFA

SEQ ID NO: 48741 - protein, 405 aa, unidentified
MSVYMGIDWSEKKHDVTFLNEAGQIISQLTLSHSPEGLLKLEQTRQALGVCPAECLVGLETAHNLIIDWLWSRGYRQIYVIAPTVVKSSRGRYNQSGARTDRHDSRLNADLVRTDRPRLYPWRPDELLTRQIGAKVREINDLTKTIVARSNRLRAILVRYYPAALSVFSSLSSQIALEFVRTYPTPAAAADLSWSQFEAFALAQGYPHPKQLPDCYLRLQQAQLAATPETVLIYQAEVPWLAEELLRWVQHKTQALRQLRQLFGQHPDQAIFASLPGLGELLAPALLAKFGDDRQRFPSPASLQALAGTCPVTDQSGQRRLIKFRRGCDHEFRQICQQWARHSLETSLWAKAYWQQIRPHCQSDQHAYRCLANRWLAVAWKLWQTGQTYDQTYHLQQRMIRAKAR

SEQ ID NO: 48742 - protein, 273 aa, unidentified
MQVTTVGIDLAKNVFCVHGSDANGKAVVRKQLSRRQLPRFVANLPRCMVAMEACGGAHYWTREIEKLGHQVRLITPRFVRPYVKANKNDASDVEAICEAASRPSMRFVAIKSAAQQDVQAVHWVRQQLVKARTGLANQVRGLLAEHGIVLGRGFAQLRRALPVIIEDRDNGLSAVMRDLLGEIGERLRFIDGRLRKYDSTVQRLFRQDERCQRVAAVEGVGPVTATALVAAVGNASDFRSGRELAAYLGLVPSHRASGGRTVLLGISKRGASQ

SEQ ID NO: 48743 - protein, 415 aa, unidentified
MDTLYQRVAGLDVHKKTVVACVRVTQPDGSVEEHTRTFGTMTEDLLQLADWLSVASVTHVAMESTGVLWKPIWNLLDGGDWELLLVNAHELKQVPGRKSDVKDSQWIAQLLACGLLRSSFVPDRPQRDLRDLTRHRAQLVGEHTRCANRIHKVLQDANIKLSSVATDILGKSGRDILAALVQGQDAPEALAELARGKLRKKLPDLQRALCGEMTPHHQFMLAQLLDHLGHLEEQIARFDERIASALRPFDEQAHLERLDLIPGVNRQTIENVIAEIGVDMRQFPDADHAASWAGICPGNEESAGKRKRSKTTKGNVWLRRALCEAAWAAGRTKHTYFGMLFRRLAARRGKKRALVAVAHALLVVIYHLLKDPQLNYQELGEHYFDTLDPIRLRRHLVKRLESLGYDVTLTQREAA

SEQ ID NO: 48744 - protein, 349 aa, unidentified
MIIIGVDYHPSDQYMAFVDTETGEYGERQLSHSEGEAEKFYRELAARGVSVRVGMEATGYSRWFERLLAELGIEVWIGDAAEIKTKRVRKQKTDREDARLLLRLLRENNFPRIWVPSPENRDLRQLLWHRHRMVQMRTRIMNQLQALAMNEGQRRKKKLWSEAGRAQLEKLPLAPWASRRRKDLLELLDRMNPTIEGLTATIEQEARKRAEVLRLMTHPGVGPITALAFVLIIGTPERFKCGKQIGSYVGLIPCEDSSAGHQRLGHITKQGSSLLRFLLGEAAQAAARWDADWRRRYMHLALRRQRNIAKVAMSRRLAVRMYWMWRNSWEYSEWVGSHAGQLGLRHGVN

SEQ ID NO: 48745 - protein, 363 aa, unidentified
MTSMIPAAEVVQRRHRVVIGVDTHKYVHVAVALDEFGGVLDAQRFAADRAGYAQLIDWAAGLGRRLTFAIEGTGSYGAGLTAAVRRRDIGVIEVLRTDRRDRRLRGKNDTLDAENAARAVLGGHATAVPKAGDGVVEMLRQIKVAKDIAVKARTAAMISLKAVIVNAPPELRETLQPLSKMALIDRCAGLRPGPVTNVAAATKHTLRSIARRWQQLHEEIKTHEALLTELTGQLAPQLVTAFGIGADTAAELLIVAGDNIDRVRSEAAWARLCGVAPLPASSGLTKRHRLNRGGHRQANAALYRAVIVRMQHHDPTRTYVARRILEGKSKSEIIRCLKRLLARETWALLRPLRSAPGTAPAVA

SEQ ID NO: 48746 - protein, 338 aa, unidentified
MDIKYLGIDLAKNVFQLCGMSRGGAVVLSKRLRRKQLLTFIANVPQCMIGIEACGGAHYWHRQFESLGHTVKIISPQFVKPFVKGQKNDGNDAEAIAIAMQQPTMRFVPPRSEEQQDMQSLHRARQRLVNCRSAAACQIRGLLLERGVTIGVSITTLRRAVPEILEDAENGLTPSLRATVYELYSFICDLDDRIKYFDREIEVVFRHSSACQRIAAIPGVGPKTATAIVAAAGNGAEFRNGRHFAAWLGLVPRQYSSGDRQVLLGITKRGDRHLRTLLVHGARAVVRTAPRKTDRHSQWVNDLHERRGANKTALAVANKNARIIWAVLSSGEPYRAAA

SEQ ID NO: 48747 - protein, 339 aa, unidentified
MELYAGIDLHSNNSVVVVLDEKDRVVYQKRLPNSLDKIVQALAGCGSPIKGVAVESTFNWYWLVDGLQQAGHVVHLVNTAAVKQYDGLKHSGDFEDARHLAHLLRLGILPTGYIYPREERAVRDLLRKRAQMVRTRTTQILSMQNLLARNLGASASGNQLKNWDDQAIDDLNVLPEQKLALKANLAVMACADQEVQALEREILKRAKLRQDYQHLLTVSGIGKVLALTIALETGDVKRFAAAGNFASYARMVNSRRESNGKTKGTGNTKCGNKHLAWAFIEAAHFAVRYDESIKRFYQRKCAKTGLAVVAIKAVAHKLARACFHVMHDGESFDVKRAFG

SEQ ID NO: 48748 - protein, 413 aa, unidentified
MEVLYRRCCGLDVHKSSITACALLREKGRVQTERRRFTTMTHDLQNLATWLRQLGVTHVAIESTGVYWKPVWNVLEGQFTIILANAQHIKNVPGRKTDANDSEWIGDLVQHGLLRSSYVPSEIIRDLRDLTRGRARLSQEASRIASRIQKVLEDANIKLSSVASNTLGKSGRAMLDAIVGGEIDPERLADMALGHLRAKIPQLRLALEGRVREHHRFLLKRLLHQLRFIEGEIDLLDQRLEEIGQQEPAIAAAVLRWTTVPGVDRVSAWSLAAEIGIVMEQFPTAAHLASWSGLCPGNRESGGKHLSGKTRKGSPWLGRMACQCAWAAARTKNTYLSLQFRRLAAKRGKKRAIIAVAHSILIIAYCMQKNQCEYRDLGSDYFDRLNADGLKRYLVRRLEGLGHKVTIEASGGA

SEQ ID NO: 48749 - protein, 338 aa, unidentified
MRKFIGIDLHSNNSVVVITDEEDRVVYQKRLPNDPEVIEAALAPHREEAVGVVVESTYNWYWLIDGLMDRGYQVHLAHTTAIKKYEGLKYSGDFADAAYLAQLLRLGLLPEGYIYPREQRAARDLARKRMQLVRQCTAQVLAIEGILMRQTGARKSSNAIKRLSAEQVEELALVPDAALAVQANRAVSEVLQQQIEVLEQRLKERVSLSPEHRLLRTVPGIGEVLATVIMLEAGPVARFAEVGNFASYCRCVDTQRESNGKKKGEGNGKNGNKYLAWAFVEAANFALRYCPQAKSFYERKKRRTHGVVAVKALAHKLARACYHILREQKPFEVKRCFA

SEQ ID NO: 48750 - protein, 429 aa, unidentified
MNYNTQNAKIASITEKTLIVGIDVGSETHYARAFDWRNYEYSKKPFAFNNDEAGFAAFKAWMEDIAEKHDKEAVIPGMEPTGHYWLNLGAYLQEQGMKPVHVNPHHVKKSKELDDNNPNKNDRKDPKTIAGLVNEGRFSYPYIPTGIYAEIRNLSNLRIQTQEEITRIKNRIARWFSIYFPEMKDVYKKPDAVSGMMVIKKAPLPCDIKDLGVDGVNQIWRDAKLKGAGIKRAGTLVSAAEHSIGSTEAPGSARIEIRNLLDDYEVYKNRMDDLMQEIEAKLSEIPYIDKLMEINGIGLKTVSCFIAEVGDIRRFDNPKQLQKLAGYAIVADSSGKHNGESRISHRGRKRLRYALYEAAISVIGKNKEFREIHDYYRTRKQNPLKKMQSVIAIACKLIRIFYTILTKGVDYDGQKMLSDIVRLETIMAA

SEQ ID NO: 48751 - protein, 412 aa, unidentified
MAAPSMQPNRFVALDTHKRYLVFGAVDAQQNVVMQPHRVYLDEFSSWADRNLQPTDAVVIEASANTWHLYDQLQPRVASVTVAHPMLVQWITKTRVKTDRRDTIKLARLLAAGFIPPVWVPPQAVRDLRALVAHRCHLIHLRTAARNRLQSLLQRHNVVPPAGDVFSTSRLEWWHALDLSVAEKLMASQQLALLDSLKPLIANVEAELLRQSTMEPWARQVPCLLQLAGIGPITAMVLLAAIGDITRFASPKELVSYAGLASSVHLSGQVQHTGCITKQGRKEIRWAMVEAAWVAVGKDPHWRAEFQRLERRIGAGKAIVAIARKMLVVVWHVLSRQAGDRRADVAFLARKLMNWGTQAGVARKRHISRAAFVREQLDMLGLGPGLESFVFNNKVVELPPSKATCAQAPALT

SEQ ID NO: 48752 - protein, 319 aa, unidentified
MFVGIDVAKAELVVSVLPSGERFTVGNEERRVHTLVERLRAVAPTLIVLEATGGYELLAVAALVAAGLPVVVVNPRQVRDFARATGQLAKTDRIDADILARFADVVRPPVRPIATDDAQELEALLTRRRQLLEMLQAERNRTGQVFGTGKRLVKKSLKAHIGYLERELRITDTDLGAMIQASPLWRERDALLQSVPGVGPVLSRTLLADLPELGRLSRREIAKLVGVAPLSRDSGTMRGRRFVQGGRATVRAVLYMAALVATKRNAVIRTFYLRLVAAGKPKKLALVACMRKLLTILNVMVRTTQPWTTETSANVLIPA

SEQ ID NO: 48753 - protein, 337 aa, unidentified
MNITRVALDLAKNLIQVHAEDAAGRVVVRKPLRRGQLLRFFRDLPLCAVGMEACASAHHWGRQLQAMGHRVQLLPPQYVKPFLLGQKNDANDATAICAAMSHPQVPRVTVKTVAQHDLQALHRIRAMKIKQRTALINQTRGLLAEYGIVIAVSPAALRKAIPGLLEDADNGLSFDFRQLLAELYDDLVAIDQRVTGLSQRIELEVRRNDDGKRLLEIPGVGPLTASALIATVGDARQFNSGRQMAAFLGLVPRQHSSGGKTRLLGIHKRGDSYVRGLLVHGARSVLRTATDKPDDRSRWLINLAARRHRNIATVAQANKTARMAWAILTREQRYRSN

SEQ ID NO: 48754 - protein, 326 aa, unidentified
MFYLGIDVSKNKIDCCFFYEKDSQKKKNKIFPNQTKGFDALNLWLSNLKVDPQQTIVLMEATSIYHEPLAEFLFSKDFNVCVANPARARYFAKSMSKLNKTDKVDSEVLAQFAMTSDLHYWKPLAPHIKLLNALLERRAVLLEDLLRERNRLEKADFINLVEPVLASIQASIQYLQCQIKDLDQQINDHIDQNSDLKKDRKLLCSIPAIADQTSLLMLSFFHSHTFEKASQAAAFVGLVPIHRQSGSSVRGRSQLSKAGSAKIRSGLYMSAVVATQHNPHIKELSERLLSNGKSKMMAIGAAMRKLIHICFGVLKHQQPYQANYST

SEQ ID NO: 48755 - protein, 367 aa, unidentified
MAGGTEDKEHAMSQKLDTSPAVIGIDIGKNSFHIVGQNQRGAVVLRQKWSRGQVEARLANLPPCLIGMEACVGAHHLSRKLQALGHQARLMPAKYVRPYSRGQKNDYRDAEAIAEAVQRPTMKFVATKTVDQLDLQALHRVRERLVSQRTGIINQIRAFLLERGIAVRQGLRFLRLELPGILATRADVLSPRMMRVLEDLSGDWRRLDTRIEGLTSEIEALARQDQHCERLMTVPGVGPIISSAMVAAIGTGDVFSKGRDFGAWLGLVPKQLSTGDRTILGSISKRGNRYLRVLFVQAAWVVLVKLGPEKWERYGLKSWIEAAKKRLHHNVLAIALANKLARIAWAVLNKGRAFACIKTDAMASCPA

SEQ ID NO: 48756 - protein, 478 aa, unidentified
MARARKQVVRRAAEAEPGKQVRPAAQGDLLITHRHAAGIDVHAAEHFVAVAPEDVPAGFVSPDRKLPAGVRKFGTNTADLEAIADWLKACGVTTVAMESTGVYWIPLYDLLASRGFEVLLVDPRQTKHAPGRPKTDVVDCQWIRRLHSYGLLTGSFRPGDAIVRWRGFQRQRETLIRYAAQHVQHMQKMLEEMNVKLTEVVSDIVGVTGMKIIKDIVRGERDPLQLAKNRHESCKRTEAEIAAALYGNWREELLFGLEQALELYEFYQQQLRACEAKIEKCLRSMKDQSDGRSLPPSLRQRKPEKNEVRFGARALLFRMSGVDLTQIEGISETTALVILSELGIDLSAFPHEKNFVSWLGLCPQHRGSGGKIFKRGTRRGANRVARALRMAAQGCHRAQNALGAFYRRIQGRSGGAKAVVATARKIAERVYRMLKFGQEYVRQSQEAYEQAYQLRLMKSLAKRAAHLGYKLVPETIGT

SEQ ID NO: 48757 - protein, 356 aa, unidentified
MLNDTKYIGMDVHQATISVVVLDCTGHLVMESVIETKAATILQLLHGLSGSLHVTFEEGTCAAWLHDLLKPHVAKVVVCDPRKNALLKAGNKNDRIDARKLADLFRSGLLSSVYHGENGVRTLRELARSYLALTRDTTRVMNRLKAIYRSWAVPCAGQRVYAPRYRSEWLGKIAETAVRRRAEIYYQQLDALRSLREQVRRDLLAEGRKHSAMKLLRQIPSIGPIRAVLLIALMQTPHRFRTKRQLWAYCGLALKTSTSGEYRIVEGQLKRSKKFLAIRGLNANHNHDLKNIFKGAATRAAAVPGPFQEFHAGLVARGMKPTMARLTLARKIAAITLIVWKKGVGFDAEHLKQQAA

SEQ ID NO: 48758 - protein, 343 aa, unidentified
MSEMKITGIDLAKTNFYLFSINAYGKSAGKIKLSRSHLLNWLAQQPPMTVAMEACGASHYWAREIQKLVHIAILLPAQHVRAYQRRQKNDYNDAQAIAEACQHGTIRPVPVKTLDQQDIQTFLKMRQLISMERTQLINHLRGLLAEYGIVLNKGATELRRMLPSLLEDAENELTDVMRALLHRQYTRLITLDDELEWYNVEQKKYVHQDSVCKRLLAIPGFGPLVSQAIKSWMGDGKQFKRGRDASAALGLVPRQFSTGGKQVLLSITKCGNQYVRSMLVHGARAVLFRAAEKTDPLSVWVNRVREKRGFNRAVIALANKLLRISWVIIARNELYLPAVMKNQ

SEQ ID NO: 48759 - protein, 333 aa, unidentified
MYHYIGIDVSKATLQVHIPLLEEDLLIENSSSALSDLYQKVKSIEDLEAVFVYESTGSYSTLLEAFCQRKKVKCFKVGAYQSASFSKTIKNRNKTDKVDAKMLSAMQILAKSKDIKVPYRDKSAHKLRSFIKYYQSLNKEKVRAKNYLEGATHNLEDSFVLNRIKRKIKQIDVEISEVIEKCLVIIKANAEYYEAFNNIISIKGVGEKSGIILLYLFLRYPNTNRQQLTALCGLDPVVVESGSSVKKQSRISKQGLSLVRSILYTPILSTVRYNDEMKSFYEALVDRGKPKRLAQIAVMRKIVLLAHSLYKNNQSYNPYKYLENIEGESKMDS

SEQ ID NO: 48760 - protein, 410 aa, unidentified
MGRCIGLDVHRDFCEVAIWQDGAVGRAPRVAARREALEQFARALGAEDRVALEATGNALAIARIIRPHVGEVVIVNTRRLAAISQSKQKTDRHDARTLAQLLAAGMLQGSWQPDETTRALRRRVARRAKLVTHRARAKNEILAVLHRNLKARPPMTDPFGVAGRTWLAEQSLPADERDTIAAALRQVDFHSEEITVIERDLAAFVLGSADARRLMTVPGVGMITVAAFLAHVGDIARFGDPRRLVGYLGLDPKVRQSGNGPAHTGRISKEGAAIVRHVLVEAAHTTVRSPGPLRGFYERTRARRGHQIAIVAVARKMCTLFWHLLTRGEDYAYALPTSTAKKLRGVELKAGATRRQGSPGQPRQPLNRDQRSAQERQTAEHAQAAYQRTVADYHLQQRQRAKNTKTAART

SEQ ID NO: 48761 - protein, 408 aa, unidentified
MNTTLYVGIDVSSKSNVVYVMLPNGDKHSNFSVANSHDGSIQLVKRILSALTSHSLDTVLIGLEATSVYGDNLVYFLREDATLAPFNRKIYVLNPRQVKQFHDAYNDLPKNDYVDSFVIADCLRFGRINKEVYIGDYHYKALQNLTRARYFAVQNLTKEKQRFINVLFKKYSTMTQEKVFSNTFSTTALAVYDEFESAEALANMDLQELTDFIIEKGKNRFPDPDAVAKAIQKAARSSYRLPKTVNDSVNQVLSISLASIKALDAQIKEFDKAIKAQMELLPNVLISVPGIGPVYSAGIMAEIGDINRFENQAKLAKYAGLAWKQYQSGGFESETTRLILSGNRFLKYYLCEAALSLVRCDKEYSDFYHLKYKEVNRYQHKRALALTARKLVRLVFRLLKDNRLYRPA

SEQ ID NO: 48762 - protein, 345 aa, unidentified
MEEKMKHFVGLDVSMKETAVCVVDDHGQRIWEGSVASSADAIAMIIRQKAPDLVRAGMETGPQAVWLWHALRERGVAVDCIHARRAAAALKLQANKTDRNDAFGLARLVHSGWYEPVAIKSFDRYRMRAVLTARERIVRMSTTMINQIRGLAKSFGLTLSAGKGQVFEQSVRRALPSDAVLRDLFESLLTVLSGLKDQRRAFDRQLARFAREDEACRVVSSAPGVGNLTAIAFVTSVDDPARFRSSCDVGAYLGLTPRRYQSGEVDIGGRISKAGDRLTRKLLFEAATVILYRASPSIALKQWGLRISARSGSWKARVALARKLAVTLLTMWKTNTMFENRSFAG

SEQ ID NO: 48763 - protein, 436 aa, unidentified
MNQTKLNRKTIVSDGGDFAALIGLDWASQQHALCLYDCATGKRESSTLEHAPEAIAQWAHGLEQRFGGRKIALCLEQAKGALINALLEYSFLVLYPINPATAARYRQAFKTSRAKDDPSDAQVCLELLLHHREKLTPSLVNDGATRELSRLLEARRSLIDLRTLLTNMLRDALKSYYPQALELAGQDLFAPLGCQFLLKWPSLGQLQKARTESVRKFYYAHNCRRMEVIEKRLHSIASMIPLCRDPALIEPAIVQVKMLARQLLQLGIALKEYDSRIEQLFTQHKDASIWESFPGAGPTLAPRLCCAFGSERSRYQSALAIQQYSGIAPVIERSGKNQHWVHRRWGRPHFVHQSFFEYASQSVLHCSWAKVFIQDQIARGKAYPTAVRALAFKWQRIMFVCWRDRLPYNETIYLNSLKRRGSHLTSKLNHELPKAA

SEQ ID NO: 48764 - protein, 338 aa, unidentified
MAILYLGIDLAKNVFALHGVDEAGKPALVRPSVARAKLLEVVAALPPCVIGMEACSGAHHWARLFQDLGHTVRLMAPKFVIPYRLSGRRGKNDAADAAAICEAVQRPSMRFVPVKCLEQQAQLCVHRVRQAFIEQRTGTINRLRGLLSEFGVVLPLKAATVRREAAACLEELPGWANLSIGDLLSELHHLDERIAAYDQRIAQLARQDERARRLMRLSGIGETTATALLAMVGNGHEFKCGRQFAAWLGLVPGQYSSGGKNRLGHITKAGDPYLRSLLILGARAVLVSARGKSDSISRWAIALAERRGYWKAIVGIAAKNARMCWAMLSRGEQFAMPA

SEQ ID NO: 48765 - protein, 338 aa, unidentified
MRSYAGIDLHSTNSYLGIIDTDDNRLFGKRLPNELDTIQSALKPFGKGLAGIAVESTYNWYWLVDGLQSAGFKVHLANPSAIKQYEGLKHTDDQWDSFWLAHLLRLDILPQGYIYPKKDRPTRDLLRRRLMFVRQRSAQILSLQSMTTRNLGVNISANEIKKMKEASVQRLFDDPDLAFTAAAHISTISFLKTKIRDIEKRILAKAKLRPQFVTLNTIPGVGNILALTIMLEVGDIGRFAKAGNYSSYCRCVKSEKISNNKKKGEGNRKNGNKYLSWAYVEAAHFAARYCPEAKRFYQRKKAKTNGAVATKSLANKLARASYYMMRDQVPFDKEKLFC

SEQ ID NO: 48766 - protein, 306 aa, unidentified
MLRPDGRHRTKKFANTTKGHDELVSWLKGHKIDHAHICIEATGTYMEPVAECLYDAGYIVSVINPALGKAFAQSEGLRNKTDTVDARMLAEFCRQKRPATWEAPHPLERALRALVVRHQALTDMHTQELNRTETAREVQRPSIDAHLLWLEAELKRLEKQIKDLTDDDPDMKHRRKLLESIPGIGEKTSAVLLAYIGLKDRFAHARQFAAFAGLTPRRYESGSSVIGASRLSKAGHVSLRRALYMPAMVATSKTEWGRAFRDRLAANGKKGKVILGAMMRKLAQVAYGVLKSGVPFDVSRHNPVAA

SEQ ID NO: 48767 - protein, 344 aa, unidentified
MKITTVGIDLAKNVFQIHAVDERGKTALKKQLKRGQVAELFANLPVCLIGMEACGSAHHWARKLAGFGHTVRLMAPQFVKPYVKTNKNDAADAEAICEAVSRPNMRFVPIKNIEQQSVLALHRVRQSFVKARTAQSNQIRGLLAEFGLVVPVGIANIAKRVPELIEDATNELTGSVRLLIARLMDHLKELDRQVDELEAQIKSWHRASDASCKLEKVPGIGPITASALVATIGDAKNFDGGRQMAAWLGLVPRQHSTGGKSNLLGMSKRGDTYLRTLLIHGARSVIFRAQQKVGKVGWLNELVQRRNKNVAAVALANKNARIIWALLANDREFQSNYKTASMAA

SEQ ID NO: 48768 - protein, 313 aa, unidentified
MTLPQNTIGCDVSGRRLDVYLHPAARSCSFSNDSAGIAALIGLALEHRAFVVLEATAPWDQPLVRALEKAELSFHRANPRRARDFARSIGMLAKTDAVDARMLALYGVNLDLPATAPASPERLKLQGLNSRRDQLVAMRKAERIRLKGVADPVVTESLEAVIALLDVQIRALERRIVSAIKNACDLAQDAALLRSAAGVGPVCAAVILASLPELGRVDRRAIAALAGVAPIARESGLMRGKRHVQGGRKRVRNALYMAALAAIRTGRWKQHYDHLRSRGKAPKAAIVAIARKLLVALNTAIREQRPILNAQTT

SEQ ID NO: 48769 - protein, 371 aa, unidentified
MEESSKTVYVGLDVHKDSIAVAYAPEDRGAEVVALGTIGTRQCDIGKLIRKLQSKGAALVCVYEAGPCGYWLYRYLTRKGFACHVAAPSLIPRKPGDRVKTDRRDAITLARLMRSGDLTSIYVPQVEDEAMRDVSRGREDAMRDLKATKHRLKAFLLRQDIRYEGRANWNAAHLRWLATVVCPTPAQQIVFQEYVRAVTEQAERLQRLERELHEAVKGWRLAPVVEALQALRGIELTGAVILGAELGDLTRFDTPRQLMSYLGLTPSEDSSGARRRQGGITKAGNGHARRALVEGAWAYRYPAKVSRHLQLRLEKLPAEIQAISWKAQVRLCKRYRQLTARGKHVNQVVVAIAREMAAFAWAIARLVPLAA

SEQ ID NO: 48770 - protein, 415 aa, unidentified
MDVQMKHACGLDVHQATVVACLLSVLDSGKVKKEIRSFGTTTRELLRLRDWLLGQGCTRVAMESTGVYWKPVYTILEGSLDLTVANAQQIKNVPGRKTDVKDAEWIADLLLHGLLKPSFVPPKPIRELRDLTRYRRKLADSQSAECNRLLKVLETANIKLASVASDVFGVSGMEMLDALAEGTATPAEMAELARGRLRGKIPQLEPALDGRMEEHHRYMLKLQLRRLRDLDKDLAELDARIQEKLKPYQKQVELLREIPGVDWILAAVIVAELGVDMKVFGSSGRVAVWAGVCPGNHESAGKRRNVRVTKGNVHLKTALVEAAHAAARTKGTYLRDKYFRLKARRGAKRAVVAIGHKILVAIYHMLSGDVSYHDLGDLYLDKLNKHHLTRNLVRRLERLGYRVTLQQQAVEQPAA

SEQ ID NO: 48771 - protein, 348 aa, unidentified
MRQETKVYVGLDVHKEFCQACVMNKSGLVISNERFLSNQDALDKFLDRFDKAKFVLESTGIWEFIYEGIEKRGFEVVLAHPLKVRAISEAKVKTDKVDAETLAHLLRADLIPRSHVPPRDIRNLRQLVRHRAYLVRQCTSIKNRIHAELLRRGIRRPDDLKKTFTFKHVEWMRSLGILTIDSSLNCLEGIQEQIREVESFLLAEYNSMKDAQLIATIPGIGFYGALLILAEIDDIHRFSHPEKLCAYAGLVPTVHQSASKVSYGGISKDGSKYLRWILTEAVHIHVRVCPDSRLSRFHSRIARRRCKQIAVISTAKKLLHTIYWMLLKEEEYHSHGLNPVEKAATLIA

SEQ ID NO: 48772 - protein, 365 aa, unidentified
MNKCHSNTELSSHEGTRSQFNGGKCAIKLGIDVHQDFYVVVEQVDGTNPKPPQRFPKRAFLRWAARLKENTGAEVHAVYEACGFGFSLQRQLSSLGVQCHVVCPQKLDEQNRRVKTDGLDAKALVLKLDRFVQGNRSALALVRVPTEEEEQKRAIHRQREQLVKARKQLEAQGRSLMVNHGLEPVQSWWKPRAFAALPVPQWMKELLANSQPILVALQQKIASLTIQLQSSATPKQPRGLGLMTSVIIDREIGDWRRFSNRRQIGSYTGLCPGEYSSGNTRLQSCVTKHGNPRLRAALVELAWRLVRFQPNYKPIVKWRQILAKGALATGAARKKAIVAVARQLAVDLWRIKTGRLRAEELGLIN

SEQ ID NO: 48773 - protein, 358 aa, unidentified
MVDKVTEAAVVGGVDTHKDLHVAAVVDQNNKVLGTQYFSTTRQGYRQMLAWMTSFGTLKRIGVECTGTYGSGLLRYFQNAGLEVLEVTAPDRMERRKRGKSDTIDAECTAHAAFSGIRTVTPKTRDGMIESLRVLKTCRKTAISARRVALQIIHSNIISAPDELREQLRNMTRMQLIRTLGSWRPDASEYRNVTNVYRISLKSLARRYLELHDEIADLDVMIAAIVDELAPELIKRNAIGYESASQLLITAGDNPQRLRSESGFAALCGVSPVPVSSGKTNRYRLNRGGDRAANSALHIIAIGRLRTDAKTKEYVARRVAEGHTKMEAIRCLKRYISREVYTLLRNQNRRINSIPITA

SEQ ID NO: 48774 - protein, 431 aa, unidentified
MHCKNINQLIPMKEWKEITHYAGFDWARDHHVVVIVNGQGQIVADFQFDHSLEGWNQFRQNTAAFAPLAVAIETSQGIAVDQLLQGGYSVYPVNPAAAQSYRQRKAPSGTKTDHVDGWSLGDALRVDGHGWKALQPMDELTCELRLLARDEVALIEQRTLLVNQLQQALVEYYPAALEAFEDWTQPSAWDFLVEFATPQALVNAGKRRWEKFLHTHRLWRPETVEKRLAIFPRADQFTASAPITKAKSQLALSLCKLLRTLRQQLDEYRKQIEALFARHPDHDLFGSLPGAKKVLAPRLLAAVGSDPSRYSSHQVLQCFAGTAPVSFQSGQIDRAKVRWACDKFLRYTVHLWADCFRKASAWGQAYYQKKRRDGMTHACALRCLGQRLLKIVFRMISDKKPYDAELHARNQQKHGSWVLALVDKPAPQTGE

SEQ ID NO: 48775 - protein, 377 aa, unidentified
MSEITRLMELIVRVGVDLAKNLIQVHAVDASGRRVVSRAFKREQFMAWCSQLPQGCLVAMEACSSAHHWARRLRTIGLDARLIAAHFVTPYRMEGRSGKNDATDAAAICEAASRPSMRFVPMKTTEQQGVMSLHRIREGLKEERTACINRIRGVLSEFGLVFAKSPKALRAELADVIEDASNELSMTARLVVQRAYEHWRELDEHLRWCDRQIGQHVRSSPEAKRAAQINGIGEIGASATVAGVGDFKQFKSGAQFGAWLGIVPSQNSSGGKTSLGRITKRGDEYLRTLLIQGAKSAVMSAGKRDDPISRWLVQLTARVGWQKACVAMANKNARILWAVMTREQRYDPRHVSVKPQAKVPVSQHAAMAPLPQANCPA

SEQ ID NO: 48776 - protein, 354 aa, unidentified
MSGEKYIGLDVHQATISVAVVDSQGKLIMESILETKASTILEFLAGLRGTLWVTFEEGTWAAWLYDLLKPHVAKLVVCNPRKNAALRQGSKSDQIDARKLAERLRLNDLKPVYHGETGVRMLRELARSYLTIVKDLSRVMNRLKALYRSWAIPCAGRDVYYTRHRRGWLDKIPEAGTRRRAEQLYQQLDMLQHLRQQARREFLAESRKHTITAKLRQIPSLGPIRSALAVALIQTPHRFRSKRQLWTYSGLGLETRDSGEYQFVKGQVRRKKQVWIRGLNKDYNHDLKGLFKAAAVRASVQPGPLREFYQRSLAKGIKPTMVRLTLARKIAAITLTLWKKGENFDAEKLKSQAA

SEQ ID NO: 48777 - protein, 461 aa, unidentified
MTFSPCRSHVLGGGVTGSGGIDRPLIRGMTTGFFAGREALRNVDVAIGAVGRPGEDDRRTHVIDVSDIGAFLGLDVGKGEHHATAVTPAGKKAFDKRLPNSEPKLREVFGKLQARHGTVLVVVDQPASIGALPLAVARDMGCPVAYLPGLTMRRIADLYPGEAKTDARDAFVIADAARVMPHTLRSVDLEDETIAELEMIVGFDDDLAGEATRISNRLRGLLTQIHPSLERVLGPRVQHPAVLKLLDQFGSPAQIRKAGRRRLIALIRPKAPRMAERLVEEIFTALDEQTVVVPGTDAAALIVPSLANSLRAVLDQRKLLATRIEELLENHPLSKVLTSMPGIGVRTGARILIDVGDGSSFPTAAHLAAYAGLAPTTRSSGSSIRGEQPSRRGNKQLKRAFFLSAFAALADPVSRTYYDKKISQGKHHTQALLCLARRRADVLFAMLRDGTFYEPQPAPSA

SEQ ID NO: 48778 - protein, 412 aa, unidentified
MDVMVERGCGLDVHQAMVVACLLTGPPGRGPQKEIRSFRTMTAALREMREWLQENGCTHVAMESTGIYWQPVYAVLDGAFELVVGNAHHIKNVPGRKTDVKDSEWIANLLRHGLIRSSFVPAKPVRELRDLLRYRRKLVDACAAERNRLLKLLETANIKLSSVASDVFGVSGMAMLRALIAGTVTPAEMAGLARGRLRHKLAELELALEGCVEDHHRYLLSVQLRRIEAAEYDIKELDARITAKLEPYDEQLQRLMRIPGVDWFVAAVIVAELGIDMTVFPSAAHAAAWVDICPGNYESAGKRNGGNIRKGNRHLKTALVTAAVAASRKTGSYLKDKYFRLRARRGPLRAAVAVGHKILIAAYHMLATGAPFKDLGADHLDTAYRQRATRTLVRRLNRLGYKIALIPTQARA

SEQ ID NO: 48779 - protein, 416 aa, unidentified
MTDSHTTPEAAILVAVDIAKDHNEVLIELRDRHNHRRRFRVANTLEEYERLVAYLRQFDAPALVGFEATGNYHRPLAYFLHARGFELRLIPTMALARTREAMHNSWDKNDPKDAQVILHMLKTGLSQTWHDPLVSGTNYAQELSKTHHQVTLARTRVWHRLRNHYFPLYFPEIEHFIRSDHSGWLIQLLLRFPTPGSITSLASEDFVAQAWSLIGRKVHKSALLAEIYAAAERSIALPVTPDSAAVAMLRLVLEEYLALGRMRESIAQQAEIVLASNPDRRRLMTVPGVGPLTALTILAEAGDLRRFAHYRQFLKFCGMSLSTQQSGRFRGISRLSKYGNARLRTAFWMPAKTAVRMRENSLRRKFDRYVRANPVDADLRRKAYSAVAAKLARIVYGLIKNGTDYRPFFEEAIPGG

SEQ ID NO: 48780 - protein, 464 aa, unidentified
MTDVKRGNKRKPTTKAGPTTLPVLQPMVAGVDIGSTEHWVCGPARADGEPNVRVFGTTTAQLKELANWLVEQDVKSVAMESTYIYWIPVFELLESRGLEVVLVNARQLHNVPGRKTDVSDCQWIQLLHSCGLLRGSFRPTEAISRLRALQRQMANFVAERSRCVQWMQKALDQMNVQVHRAVTDLTGTTGMAIVRAIVAGERDPARLAAHRDRRCHKSVEAIAQYLTGTWREEHLFNLAHALGLYDVLQGTIASYETQLLAQLAALQPPERQQADVPRHPNPTKEKTIRHRGEQPLRTSLWRFAGVDLTRIDGIRAVAAQTVLTEVGPDVTAFPSEHHFVSWLRLCPRVPISGGKPLKKRRNGMGANRIAAALRMAALGIQRSKTALGASFRRIARHKGKAVAVFATARQLARLIYRMLRYGQDYVDIGEEAFEAKFQARRLAGISEAARSLGFTLTKNEAAAG

SEQ ID NO: 48781 - protein, 346 aa, unidentified
MLHVGLDLSRKRVDVCLVSDQGELIDQFPAPADRDGLYGLTRRVAVYNQPVRGVVESMNGARFVHDELVKHGWEVLIADAQKVKGLAPLACKTDKIDSRVLGELSFRDLVPAIWLPTPGLREERERSRYRLHLVKHRSTLKNRIHSTLIAFGYQRSMSDLFGVSGRRLLGELDIPEPWRGHVDASLELIDDLDRRIGAIESELKRAGADHRYVPILTTAPGFGWVTSFTVACELGDISRFATPVKLVGYTGLCPRVSQSGDVDLRGPVSKHGPRYLRWGLMEAATHACGHPLYKERYQRLRRRHGRQRGPKVAQIDLSRQLAEAIWYMLTRNQPFAPAGATVRLAA

SEQ ID NO: 48782 - protein, 339 aa, unidentified
MPVTIGLDIAKRFFQLHAIDTDSGQIERLKLRRAEVVPFFANRRPCLVAMEACGSSHHWARELRSLGHEVRLIATKFVRPFVKNNKTDAADAQAICEAAQRPEMRFVPVKNEHQQAILCLHSMREGLVKARTAQVHQIRAAFYEFGIELPDGRHWCVKSLPAAFTRLEGKIPGTVVDALQMQLELIRDLTLRVDEIERKLEAYKQSDERCQRLLKVPGVGLLTATAIVAGVGNANEFRSGREFAAWLGLVPRQSGTGGRVRLLGISKRGSSYLRALVIHCARAVVARQKKHSIWLEQLLARRHWNVAVVAQANKIARTIWAVLAHGVSYEQNHRAVQTA

SEQ ID NO: 48783 - protein, 425 aa, unidentified
MNKDVLSTLFVGIDVSSASNYFCAINFEGKHILDFSITNDLPSSEIAVKRIFNALQENDLKFVTLVLESTNVFSFHIANFLASNNSLFNFNSKVFVINPKESSNFRKTYSDIDKTDPQDAFVLADMARCGRIKQQPYKASQLFALQRLTRQRFHLVKTIMREKAYMMSNIYLKFSSLYISKKEDEPFSNMFGNTSKSIIADFTPDDIVNMSDEDMINFIMDKGKSRFSNPEKNIKLLKKIARDSYRLDKLAYDPINVAISSSFNTINALEDNLKVIDKAIEKNVKGLCDNEFTILKSIPGIGDVYAAGIISEIGSIEFFKDNNALAKYAGLTWRKTQSGYFEAETTRMTKTGNKYLRYYLIEAVSSVKNHSSEFKDFYTRKYNEVSRGAHKRALALSARKLVRLIFGLLHHNQLYSATKLDNRLN

SEQ ID NO: 48784 - protein, 285 aa, unidentified
MTLYIGVDFHPHQQTVSYCNTESGEVEQTTLFHNPELVRSFYEQMPKAVVGIEASCTARWFELLMNDLGHELLVGNPTLIRARARSRHKSDRRDADLLLDLLLKNEFPALWRRSLEGQSVLELLRFRHALVKHRTQVCNRLQALAHAAGLPRRGIQTKRARSALLKANFTETQSFERDQLLEILDDLSGRIKIIEDSLAERAAGDPDVERLLTHTGIGLLSALVVVHTLGDVSRFPSSKEAVAYTGLDPLERSSAGKTRYGARRTSRKQRSAAPARTGDACRRSL

SEQ ID NO: 48785 - protein, 367 aa, unidentified
MKKVSTAATKQSRNISGQKLTIGLDLGDRNSWYCVLDETGRIQLEQRVRTTAKGLQEVFGAMPRSRIALEIGTHSPWISRLLSDLGHEVIVANARKVRLIGESRKKDDRLDAQTLARLARIDPELLYPVKHRSARAQADLMTIRARASLVRARTGLVNAARGLAKSYGERLRGCNVRNMDPEKAEGLSPELQRALEPLLATIEELSERIVEYNDRIEALAQTRYPQVELLKQIKGVGTLIALTFLLTLEDPHRFGKSRDVGGYLGLQPGRRQSGESEPQLHISKEGDPYLRTLLVQGAQHVLGPFGIDCDLRRWGLKLAERGGRNGKKRAIVATARKLAVLLHHLWVSGEVYEPLHNSSPATVAAAA

SEQ ID NO: 48786 - protein, 415 aa, unidentified
MKNYSELTHFAGLDWAKDHHDANIVDRQGQVVARFRFAHSGPGWQQWREKIREYPALGVAIETSQGAAVEQLLASGVTVYPVHPKAAKAYRQRQAPSGTKDDELDAWSLGDALRMDGSHWRALSPQDAVIEELRLLCRDEEELIGQRTALVNQLQAALQEYYPAALEAFDDWTAPYTWAFVKAFPTPQQLVQSTVHRRKVFFHMHKLWRAGTAEKRLEIFTRADQFCGGAAVTRAKSRLALALCHSLDALQRQLDEYRVAIEKLFAEHPDHDVFGSLPGVGAKLGPRLLSGVGADRKQYPDVQGLQCVAGTAPVSFNSGQIQRAKIRWHCDRFLRHTVHLWANCSLKRCAWAAAYYAAKRKDGKSHACALRCLAQRWLKILWKMWQTHTPYDPEYHARNQQRHGSWVLQLNPKTA

SEQ ID NO: 48787 - protein, 360 aa, unidentified
MAVKKNNIMKTQTTALIPKIYIGIDVHKKSWTFHYQTDLFDGKTITQPANPNTLVDWVQKNYPAHEVTCAYEAGFSGYSAARLFQKQNWNVLVLNAADIPRPQKQNVVKTDKIDCRNICKQLKNEALKSITIPEEQRESFRSLFRERNNFVMGLRHIKLQIKSYLMYCGITIPEEFDNASWSKNFMEWIRQQNQTYETGTLKINYLLKRYDFMYQETLSISNQLRAYAKKHYKKDYDLLRSVPGIGGITASAILAELGDLRKYNRFDDLASIVGFVPGIYSSGDTTIVKGITPRAKKLLRSYIIEASWQAVRFDPVLQEYYRSHYGKQPNKIIVKVARKLLSRIHAVIKTETPYQIGVIK

SEQ ID NO: 48788 - protein, 353 aa, unidentified
MGDQSIQSEVILGVDTHLYTHVGAVISDTGKLLGTLAVSTDSAGYLKLLTWAKSLGRLRRAGVEGTGTYGAGLARVLHEHEIGVLEVNRPDRANRRFQGKSDPTDAESAARAVLAGSATAIPKAQSGAAEAMRAVSVARRSAVKAKTQAINQVRALLVCAPQEIRERLWKGKPAECIDGCARLRSLGTTPLLHTLAATLRMLAKRWLMLAEELKELDAMLERLTSQHAKRLRQQFGVGPHTAAVLIGVAGDNPERLRSEAALAALCGASPLEASSGKTTRHRLNRGGDRSANNALWTIAMVRMRSDPRTRAYVARRTAEGMSHKEIHRCLKRYIVRALYPLILADLADSARFT

SEQ ID NO: 48789 - protein, 415 aa, unidentified
MYYVGIDIAKSFHVVSVIDDEETKVINKPFKINNDAKGFEKLLTVLNSITLDKNEFTIGLEATGIYGENLQEFLKSKAYLVKLLNPFQTTRYREQITLKKVKNDEIDSLVIALLLKSGKFSSGYITDDEYQSLRTLYRNRATIQTDMKDVKKRILTQITVTFPELEGFMKPFSVTGLVLLDKYPTAHHYKHSSVDRIMKLFRHIQGNNFTQSKALQLLELSKESIYSGKAKDARAIAIRSTIRLLQMYLSELDIIEAEILSLLQNSSVETTVDEAGIEIQKTDTLLHNLKTIPGVAEKTIAALISECGDLTRFPSIPKFIGYLGLFPTENSSGNSKYIGHLSKRGSPLAKHALYMSAVSCLIHNTQLKQLYDTKRSQGKSKKEALIAVSRKIATIIYSIFKYNVPYDPNRVFAKS

SEQ ID NO: 48790 - protein, 454 aa, unidentified
MGKPRVVPDEDHEVVYERVAAVDVAKASGVVCLRAPDPARPGRFASRIWDHVPATRAQIAGLGRELPGHGVQVVTLESTSDYWRIWYYVLESTGLAVQLVSASQAKNLKGRPKTDRLDAMWLARLTQHGMLRPSFVPPAEIRRVRDFTRARTDLVAERARCLQRLEKLLEDAMIKITSVAKDGLKARSVVAMVQALIAGERDPRVLADLAKGPLRGKRAQLAEALDGLFDSHHGVIAQMLLGQVAFLDGQITQMEEQAIAALARVPRSWGVDPDGETGPQAGTSAGSPVLAAARRLAEIPGVSEWLAVVIIAEIGLDMAVFPDPAHLVSWMGLCRSAARSGTRHGKGKPKKGNSYARAAAGQAAIGAARTATFLGERYARIARRRGGGIAQAAVARSIMIIAWHLLADPAARYHDLGADYCANRINRDKKIRNHIRGLHALGLTVTITAAGPAA

SEQ ID NO: 48791 - protein, 373 aa, unidentified
MSKSSVAYRSFVGVDLHKTVVTLVAVDAHGEKIAQLTAPTKCIDKITDWLRSLPEPVWMAVEACPFVEWFIDRFRWCVFQMDIADATELARLRGKRRKTDPNDAHDAAIRLADGRCPLGFIADEELMQLRKLGRHWRQLSRLLSRTKHAMRSLLHAANLAGPKVLDAASGHRWILAEQHLLKPVQQQMFEDFLNTLALVELQRERLRRQITFANRSEPFRATTELLKTVPGIDEVWACIIAAEIGPFDRFPNADALEFWAGLTADLKESAGRRQSGHITKAGSRTLRWALGKAAITLCFSDAKQEATRQRLIKRTGGIKPKANVAMARRLLRILQAMVRKKTPYHNARPVARNLAANKARAAKRARKAGKEAA

SEQ ID NO: 48792 - protein, 340 aa, unidentified
MQLYTGIDLHSSNSYVAIIDETGKQVFKKKLPNDPEQILSALAPYKETIIGIVIESTYNWYWLVDTLMAEGYKVHLANPTEIKQYKGLKYSDDQHDAFWLAEMLRLGILPEGYIYPKEDRPIRDLLRKRSHLVKLRTSLIISLQNIICRNNGFRLKTNDVKALKADRVAPVLDQNEDLALAGKISKESIDFLTRQIKAVESVIENRMELREHYKKLLTLQGVGKTLGLTIMLETGPISRFAQVGNYCSYCRKVSTKWISNDKKKGKGNKKSGNKYLAWAFSEAAEIARRYYPEARAFYQRKMQKTNAMIAHQALAHKLARAAYYIMRDGVSFMPEKIFRS

SEQ ID NO: 48793 - protein, 367 aa, unidentified
MKKSSKIFVGMDVHKESIDMTVAEVGGEVRRWGQIGGERAALEKAVRKLESQGGKLHFVYEAGPCGFWIQRLIAARGHACWVVSPSLIPKKSGERIKTDRRDSEQIARMARAGELEPIYVPGEADEALRDLVRTRDDAMIAQRRARQQLKALLLRNEVRYSGKSSWTQAHRRWLAEVKLAQPVQQIAFEEYVDAVEVASGRVERLTRAIETSTEGWRFAPVVEQLQALRGVQFVHAVTMICELGDLARFDNPRQLMAYLGLVPTENSSGERRRQGAITKSGNRFARRALIEAAWAYQHPARVSPVIARRQKGLPKRARDIAWKAQLRLCARFRKLCARRLNKNKAVVAVARELAGFVWAIAKDVKIS

SEQ ID NO: 48794 - protein, 346 aa, unidentified
MTTNNVTIGIDLGDRKHSACVLSTAGEILAEEAITNTRECLTAFAQKHPGATFVMETGTHSPWVSRLLQALGHAVIVANARKLRAISQSTTKSDEEDARMLARLGRADPALLSPVQHRSESAQRALVQLKVREALVRSRVNQMNSVRFLVKSLGLVVPRGVKATAFVRQFRARADAATAALVEPLLQTIDALNAQIKQLDVRLEQMADEQYPVTARLRQVDGVGPLTALCFVLTVETPARFPHTRDVGAYLGLVPRRDQSGLTDKQLPITKAGNGQLRCLLVNCAHYILGPFGPPSHLREAGERIALRGGKSAKKRAVIAVARKLAVTLLALWKSGAEYQPLLQAA

SEQ ID NO: 48795 - protein, 436 aa, unidentified
MNVSEITGKSPTEGIAAWVGLDWADQQHVICLYEVQSGQSEITRLEQKPEAFQSWLSQLRQRFGGAKVAIVLEQARGAVIYALLGLDFVVLYPVNPQALANYRKAYSSSGAKSDPADAVLLMEMVRHRPECFRPWKPDDADTRSLQLLTENRRQLVNQKTAFTNQLTSLLKSYYPQALELAGDLGSLQACDFLKRWPTLGALQQARPAQVRKLYLDYGRPRPEQLEQRLEQIRRARPLTEDPAVVLSGSMMVQALAAQVCSLIATLERFDQQIAALFRKHPDRLLFEHLPGAGAALAPRLLAAFGTDRDRFQSAQEIQQLSGIAPVTEQSGKQRWVHWRWACSKFLRQSFHEFADHSRKWCRWAKALYQQLRRRGQGHHAAVRVLAFKWIRILFHCWKTRTCYDESIYLKSLEKRNPSLWTEIQALPPRVRKPKAA

SEQ ID NO: 48796 - protein, 343 aa, unidentified
MDYYVGLDVSLEQTAVCVLDEDGRVVMERSVASHPGDIGACLADLTGTIKRVGLEAGPLAPWLYGGLAERGLPVFCIEVRQMKAFAKASPVKTDRRDARLIAQAMRTGLFKATHVKTDYSQRVRLLLRHRQSMVWRNKDLINTVRGTLKAFGIRTGGGKNTLYARRVREAIDDPMLLAMTEPLLAAYEDGLRTLAAIDKMVLDIVKKDAICRLLMTVPGVGPVTALTFRTGVDVPWRFDSSRLVAAVFGLTPRVHASGEMEQVGRITKCGDAMVRAMLYEAANVMMTRCKADNWLKSWALGIARRRGARKAKVALARRLAVVLHRMWSDGTEFSMERPAAMNN

SEQ ID NO: 48797 - protein, 410 aa, unidentified
MSESPYAFYVGVDWASETHQFTVLTPERRLEAERRIEHTGRALGEMADWLTALADGEPARIAVAIEVPRGPVVETLLERGFHVFAINPKQLDRFRDRHSPAGAKDDRRDGFVLADSLRTDRPAFRQVHVDDPLLIQLRELSRAEEELQTELRRLSNRLWEQLQRFYPQVLRLSPAVDEPWIWALLQLAPTPVAARALRRATLARLLARHRIRRVTAATVLAELHSPALRVAPGTTEAAREHIALLLPRLQLLHEQRGRCARRIEQLLDALEGSDAEHRDVTVLRSLPGVGRVIAATMLAEAARPLAERDYHAVRTQGGVAPITRQSGKSVLVSMRYACNHRLRNALYHWGRVSAQHDPSTRRHYRALRQRGHGHARAIRGVIDRLLAVLMAMLRTGTTYDPARRRVPAAA

SEQ ID NO: 48798 - protein, 315 aa, unidentified
MKPALAQNVGVDIAKDTLDVAILPAGESFRVANDPGGHRALIKRLGRFEISRIVFEATGAYHRLFERALAEAGLPFVKVNPRRARRFAEATGKLAKTDRCDALMLARMGAALELEPCLPASKIAQSMKELVSARDALVKDRVAALNRKAVALDPLIKRQLAQRLRQIDRQIQAIDNRLRTLRGSDPDLTLRVDILTSIPGFAEPTANTLVVEAPELGRLDNSQAGSLVGLAPIASDSGQTNRRRSIRGGRPRARRALYMPALSAIRFNPEFKAKYQAMITAGKPPKVAIVAIMRKLFILANALIRDQRKWTTAAP

SEQ ID NO: 48799 - protein, 336 aa, unidentified
MNYCLNVVFYTIEPRTPFHIHCQDRRGKAVYRKKFTRPKLIEFLATCPATTIAMEACGGSHFMARKLEELGHSPKLISPQFVRPFVKSNKNDFVDAEAICEAASRPSMRFVQPRTESQQAMRALHRVRESLVQDKVKTTNQMHAFLLEFGISVPRGAAVISRLSTILEDNSLPLYLSQLLLKLQQHYHYLVEQIKDLESQLKRKLDEDEVGQRLLSIPCVGTLTASTISTEIGDGKQYASSRDFAAATGLVPRQYSTGGRTTLLGISKRGNKKIRTLLVQCARVFIQKLEHQSGKLADWVRDLLCRKSNFVVTCALANKLARIAWALTARQQTYVA

SEQ ID NO: 48800 - protein, 410 aa, unidentified
MELRHARCCGLDVHKKTVVACLRLAADGKVSTEVRTFGTTTAELLRLSEWLAANECTHVAMEATGVYWKPVWHILDDGEFELILANAAHVKNVPGRKTDVNDAMWLAELLAHGLIRASFVPPAQTQDMRTLLRTRKQLTRESARHVQRVQKTLEDANIKIDSVLSDVMGKSGRAMIEALIAGETNPVKLASLADRRVKASQEELREALRGRVTKLHRFLLRLHVDQIDAVAAAIAKMDAQVEAELAPFHAAIEQVISVPGIKKLGAEAILAEIGIDMSRFPSDAHLLSWCCICPRNDESAGKRRSNRVRRGCVWLKTTMVQCAWAAVKKKDSYLQALFYRIRARRGENKAILAVAASMLTAIYHMLKDGTMYQDLGRNYFDQRSKETQKQRLIKRLAELGYAAEVTPIAA

SEQ ID NO: 48801 - protein, 308 aa, unidentified
MTTIHTGLDIAKLNLQLHLVGRMHDLPNTAAGHRRLHKLLAAQPGAHVICEATGGYERDVVAALHEACVPVSVLNPARVRHFARATGQRAKTDHIDAAVLTAYGKALQPKPTAPRTEQEQQLAELIRRRVQVLEILVAQRQQAQRLSLPALRRQAQSLVRRLERDLEQIEVQLRALRTQVATLDERVQKLEAITGVGTITALGVLAELPELGTLNRRQAAALAGLAPHPRESGQWHGRRSIGGGRAPVRRALYMAALVAARSNRQLKEFYQRLRAAGKPAKVALTAVMRKLIVLMNHTLKHPNFVPQN

SEQ ID NO: 48802 - protein, 451 aa, unidentified
MLKTISRADYAWSVAESAIRSMRHLHDIDDTGECCNFAIDNYYSQPKDNGTGRFTIQGKGKDPFTFFDRPVSVGSKAWIRFCLIALRFVGNEPASKVHQKDNAKMKKIFVGIDISKEKLNVCLMRDMDIIHEDEFENTVKGVRKWLRQMVKTTGCCMNEVMLCAEFTGRYIYPLTVACHDENAFLWMEDPTRIKNSLGLTRGKSDPIDARRIAEYAARYQDKAMAYKLPEKELASLRILMTDREQVLSDRKKYAAQLNDQKRFMSDEDYAMQCKIWKSIIKELQKQLDSIDKKVDELVAENKRASHQMELLKSVDGVGKRVAIAMIVCTDAFTRFDNARQFNCYAGMAPFTYTSGKSIQSKAKVSQRANKHIKSILHMAALSVATRIKTGEYAEYYKRRCSEGKHPLCVLNIIRAKIVSRMFAVIKRDKEYVRNYERVSIEKNLSTPLQIS

SEQ ID NO: 48803 - protein, 335 aa, unidentified
MTKKAQSELANFAGIDVGAQQLHLVRRSNGVSSKPQAFANTPRERRELAKKLAKVPNLIVCLAATGVYHQDLALALHDAGMRVMVLNPKVAHHFAKVLRRDSKTDPLDADTLAQYPERMPFEPWARPSTAALQLRAFSRRIEAVKDKKRAAKNQLHALRFSPETPKSVLQDALKEIEQLEQRLVTLTKEARTVIASNPTLHGCYELLLSVKGIAQTSAIALLGELAMLPAGLTHKQWVKFAGLYPRHNDSGTSVHKQPRLSKAGNLHLRKGLFMPALSARTHDPHVQAYFEHLVAAGKKPLQAICAVMRKLLHAIHGMFKNNQPFDNTRFYALPA

SEQ ID NO: 48804 - protein, 426 aa, unidentified
MQPHYNCVCGVDVHKEFLQVCILKQDESPEIMRVFNNFSGVQELKQRVEEEGCECIACESTGVYWYRLYLAFEGQTRIIVGNAYQIKSIPGRKTDVRDAQWIAELAMNGLINPSRVFPKDDRELRELTRSRESVVRSRTQIKNRIHRIFDSAGIALGKGVKDIFGRSGVHLIWGLLNRADPEEVITTIPSARVKKKADLLREILSGSLSDLQIILIKKNLEMMVHINDHIQTLDEQIIARMMEQDSIRDVEIACSIPGVSVTTAVTVLAEIGNYHDFENAEKLASWAGLVPSVYQSAGKNCSGKITKHGSEHLRWILVQAAKAAGRTVNSTFRKFFNRIAYRKGGNTATVALARKILCILWHLLMNKELYVDPLKNPKSTKQPVVLKFSKNSRSDVQQAIDFIIECGFKVIYPDSTLDQKFLGGSS

SEQ ID NO: 48805 - protein, 402 aa, unidentified
MYYLGIDVSKASHQCIVLDALGEALGKSFTVHSSKDDFTKLVKKLSELNIPKTDITAGLEATGNLWENIYIFLKDRGFKVILLNPFQTNKFHQAMMKKAKTDSIDALVIAGLLRSGCAASSYIPDEDIQSLRDLTRLKDGYLKDMKTYKRKAYSLLNLVFPEFLNLVKDPFNISCTEILSKYQTASDFKNVRPKDLLKVARGHQGNNYDEAWADKVISSAKDSIYSGKASKARSIVLKSLVLNIKNLKEQIDALDNEIQNILKPDDGLSNDKIDNLLTIPGVGPKTVAVFLAEVGDIQRFMSCKDFIGFVGLYPKIEQSGSSLDKARLTTKGSRILKHALYMASVASLIHNPYLKNVYKNKLSQGKSAKQALIVVSRKLACIMYSMLKNNVVYNPERVAIAV

SEQ ID NO: 48806 - protein, 389 aa, unidentified
MKIFVGIDIAKLNHFAAAISSDGEILIEPFKFTNDADGFQLLVSKLESFDKNSIIIGLESTAHYGDNLVRYLVAEFYQVCVLTPIKTCQMRKNNVRKTKTDKVDTFVITKTLMMQDDLRFITFFDLDMMDLKALGRFRQKTIKQRTRLKIQLTTYVDQVFPEIQYFFKSGLHQNAVYALLKEAPSPKEIASMHMTHLANLLKVNSHGHFTKEQAKELRVLAQKSVGANDSAISIQITQTIQQIELLDSQLEKIEAEMTDIMKFNDSVIMTIPGIGYINGGMILGEIGDIHRFSNPNKLLAFAGLDPSVYQSGNFQAKTTRMSKRGSRVLRYALVNAAWNVVRNNATFKAYYDAKRSEGRSHYNALGHCAGKLVRVIWKMLTDEVEFNLE

SEQ ID NO: 48807 - protein, 368 aa, unidentified
MVDKVTKAAVVGGVDTHKDLHVAAVVDQNNKVLGTQYFSTTRQGYRQMLAWMTSFGTLKRIGVECTGTYGSGLLRYFQNAGLEVLEVTAPDRMERRKRGKSDTIDAECAAHAAFSGIRTVTPKTRDGMIESLRVLKTCRKTAISARRVALQIIHSNIISAPDELREQLRNMTRMQLIRTLGSWRPDASEYRNVTNVYRISLKSLARRYLELHDEIADLDVMIAAIVDELAPELIKRNAIGYESASQLLITAGDNPQRLRSESGFAALCGVSPVPVSSGKTNRYRLNRGGDRAANSALHIIAIGRLRTDAKTKEYVARRVAEGHTKMEAIRCLKRYISREVYTLLRNQNRRINSKTAGITAQWNASSGV

SEQ ID NO: 48808 - protein, 346 aa, unidentified
MKIVGCDFHPGHQQIAVLDTGTGEVEELKLMHADGQAEGYYRGLEAGALIGMEAVGNSLWFEQLVERLGHELWIGDAAQIRASYVRRQKTDRRDAGHILRLLMEHRFPRIWVANEKQRDQRQLLVHRHRLVEMRTRIKNELQHLALNQGVQKKRQLWNSRGRAELEKLPLKGWTARRRADLLSLLEMLETRVAELDDAVSQAAFGDPQARLLMTQPGVGAITSLAFVVTIGDVSRFQRGKQVASYLGLIPSERSSGSKRRLGAISKQGNMFLRTMLVEAAQSAVRHDEEFRKQYRHRCHHKPTGVAKVAAAHKLAVRLYWMLRTQTPYPQIVHNEGSPSHFVVGAS

SEQ ID NO: 48809 - protein, 340 aa, unidentified
MNTMTLLGIDIGKHSFHLHGQDSKGHQVLRKKTNRGQLLSTLAQLPACTVVMESCGGAHWLARQIGALGHEVKLIAPQYVKPFVKGNKNDFIDAEAICEAASRPAMRFCSIKTAEQQTLSALHRVRESLIGHRTMATNQIHGFLLEFGISLPIGVTALHRVPALLDDPQHPIPVRLKGVVMRLHRQIQQLNDEIKDIESDLKQQLKEDDAGSRLQSIPGIGPITASAVLADVGDASNYRSGRDFAASLGLVPKQYSTGGKTVLQGISKRGDKHIRQLLVQGARALMQHIDKREDALGPWVRELLTRRHANVVACALANKLARIVWAVLAKGGQYRPHPNV

SEQ ID NO: 48810 - protein, 392 aa, unidentified
MVISVGIDVSKDKHDCFIVNSEGEVLADVFTIQNTRDGFNFLLQKIQDCTTPQDKIKVGLEATGHYSYNLLGFLLDNGLPTYVLNPLRTNLYRKSLSLRKTKTDRVDARTIASMLLSDAGLKPYTDTAYHNEELKSLTRYRFDKVKERAKLKSSVSRLVCILFPELEKLVPSLHTASVYTLLEEFSGAKQIAAAHLTKLKALLETASKGRYKRDMALEIRDAARNSIGSWMPAKSLELQHTIRLIRELDVEIAEIEEQIQSIMDELCSPITTIPGLGFRMAAMILAEVGDFTRFDSPDKLLAYAGMSPSTYQSGQLKNCYPHMEKRGSRYLRYALYNAAKYVCHWDASFCAYLAKKRAEGKHYNVALSHAAKKLVRLIFALQRSGQPYCPTA

SEQ ID NO: 48811 - protein, 346 aa, unidentified
MEMIGIDLHKRESQICIIDQSGVVREKRIVTSRERFSAILGDRPRARVLIEASTESEWVARHIESLNHEVIVADPNFAPMYAHRSRRIKTDKRDARTLAEALRMGAYRSAHRLSDKRRHIRAELAVREALVRTRTRYIALAKSLLRRDGYRVLSSMSRNTAQRISELPLSEQLSQELRPLLDILEPITMEIDAADFRITQLMAGDSVVELVATVPQIGPLTASAVVATADDIGRFHSSEQFGAYLGLVPREKSSGEKLSRGRITKAGNSRARSLLVEAALRIMRSKSDDTAALRSWVSRIAARRGKRIATVALARRLASIIYAVWKSGEKYDPRKLRGLTQEAAAG

SEQ ID NO: 48812 - protein, 338 aa, unidentified
MTIETLGIDIAKTVFQLHGVNRSGRIVMRRRVMRDQLLAVIAQIDPCTIAIEACTGAFYWQRKFEQLGHQVRIISPQYVKPFVRRQKNDGNDAEAICTAARQPHMRFVPKKSIEQQDIQALHRARQRMVNHRTAVVSQIRGLLLDRGFAFGKSITRARRIIPEILADLENELTDLAREAIGELHDLLQDLDRRIASFDKKIERVFRQSEVCQRIAKVKGVGPKTATAVVAAIGDGTEFKNGRLLAAWLGLVPRQHSSGDKRVLLGISKRGSQHLRTLLVHGGRAVVRTAGNKSDPINRWVNQLRERRGYNRAAVAVANKNARIIWAVLRTGEAYGSAR

SEQ ID NO: 48813 - protein, 349 aa, unidentified
MSNQQCTAVTYGIDLGKTWFHVVGLDHTGNPIKRAKLNRASIIRFFINIPAALVGMEACPGSQWLARKLQALGHQVRIVPAQFVKPYVKSNKNDTIDAAAIAEAITRPTMRFVQIKQCDQVDLQALHRSRDLLVSTRTRLINQMRAFCLEYGVAMRNGVGAFKVALPPVLSDESNDLTPGMRELLVDLAQELSTLEDRIAQFTRKINAQADASDIARRLATIPGVGQLTATALVAAVGDARQFKTARDLSAWLGLTPAQYSTGGKTHLTGISKRGNSYVRKLLIHGARSCSMHLDRTKDRLGLWIEALEGRLHHNKMVVALANKLARIAWVVLTKPGALYERRVPQLVT

SEQ ID NO: 48814 - protein, 400 aa, unidentified
MDLLKTVFGIDVSSRKSNVCIMVNGQKVDDYAISNDMVGFNQLLDDLKQVTKPQIIFEATGVYSRRLQAFLDMHELRYVMMNPLEAKRKTKDDLHQNKTDKLDALYLAKLQSEHPQRLAYVQSKEYQELMANNRIYEQASHDLITNRNRLHKAIQLTFPEIEHLMVNPRGKNYWSIVLRFPHPDIVLETKEADIIDFLKGLSGIGKKRANDIMQSLIRLAKVACPAVKKDSAHIRGLEMAINNILSAEEACQTALKEMTKLAPKRDLEILTSIPGIGENTALRIISELGDIQLNAFVGVDPQVYESGNLTAHLSISKRGTAIGRKVLYLAINQIQSAKKAGNPSHIADYYEKRKRSSETASHKKAAIASIHKLLRTIFALIKNDQLYSYDVAKHNQRLLS

SEQ ID NO: 48815 - protein, 413 aa, unidentified
MKQWQERRHFGALDWASDHHDLVVVDRTGELVESVTFAHSGPGWQELRARLKPYPGLAVAVETNQGAAVQQLIEAGLAVYPVNPKSAQRYRERKAPSGVKDDQLDAWSLADALRLDGHGWRVLVPEDPLIEQLRLLCRDEIALIEQRTALVNQLLQALREYYPAALEAFDNWTKEYTWRFLESFPTPERLQSAGKRRWEKFLHTHKLWRPDTAPKRLEIFARGTAFSGSPAQIAAKSLLALSCARVLLTLERQLLTYRAAIEKLFAEHPDSSLFGSLPGAGPKLAPRLLAEMGDKRDRFRGPQSLQCHAGTAPITIQSGQIRRHRLRRACDLTLRSTVHQWADHSRKTCPWAQTYYRAHRAKGQSHACALRCLGQRWLKILWKMWQTRSPYNEALHTRNQTKHGSWVLQFKPA

SEQ ID NO: 48816 - protein, 330 aa, unidentified
MKNYVDVIGIDVSKLTIDAHIHHRALHRVFSNTCKGYKALLLWTETYLKEQCYFFCFENTGHYSANLSVYLSENNVDYVEESPLAIKRSAGIVRGKTDRLDAAMISRYAWLHKEELVLSSPKEKDIQELGRLLSFRDQLVRDRTGKMSSLKEMRTLLNSPSTDACCKIIKKTMHYLTKQIDSLEERIKVLLKLDESLQKNYELLNTIKGVGLILSCQLIYHTRNFKRFDSWRQFSSYCGIAPFEHSSGTSIRRKNRIHHIGDRKMKVLLTLASVSAIQYDKELKQYYKRRLSEGKPKMLALNNVRNKILSRVFAVVKRGTPYVELQRFAA

SEQ ID NO: 48817 - protein, 391 aa, unidentified
MVCVGIDVAKDKHDCCILDSEGTPLVDCFTIPNNMDGFKSLLQTIQDCSQKSDKIKVGLEATGHYSYNILGFLLDNDLPVYVMNPLHTNLYRKSLSLRKTKTDRVDAKTIATMLLSDVDLKSYTDTAYHNEELKSLTRYRFDKVQERAKLKQSVSRLVTILFPELEQLVSSIHGTSIYALLSEYPGAKQISEAHLTRLANILVKTSRGHYRKDKATHIRDAARTSIGSVMPAKSLELKHTIKLIQELTSEINEIEDAIRKIMDELKPPILSIPGMGFHSAAMILAEVGDFSNFNSPDKVLAYAGCSPSTYQSGKLTNCYAHMEKRGSRYLRYALYTATKYVCYWNPVFTEYLTKKQAEGKHYNVALSHATKKLVRLIYALQKSGKAYLAVT

SEQ ID NO: 48818 - protein, 400 aa, unidentified
MLSIGIDVSKGKSTVCGMKPGGEIVYAPFEVQHTREGMSELVSLLHNSGEEVRVVLESTGSYHCPVVAALLENGIFVSVVNSLRMKRFCSQSIRKVKTDRIDAMQIALYGLAYWQELQPTRLPEDTYRELQLLARQYYQMTSMLIKAKVDFNALCDQVLPGMQELMSDHAGRHKLSDFVLRYRHTTHILEMGETRFRKDYCKWAEKKGYRNCERMAVLIFATAQNGIPVLPNAPSTQIVITEAIRVLHTVEASRDAILTQMQALAKTLPEYSLVREMPCIGDTLAPRLIAEIGDVRRFHSKRALIAYAGIDAPPYQSGKFCANNRHISKRGNRYLRKTGYEVMQSYVMHKPANDPIFTFIEKKRGEGKSGKLAMVAGLNKFLRVYYGKVTELYRSLPAIE

SEQ ID NO: 48819 - protein, 360 aa, unidentified
MPIAVADGRPMHLWDTKPVGEPGSPSAVPLNPNSRQGRLRRQSPLRQGWDQMETIVGIDVSKDRLDVAVLPQGEAFAVDNDDAGIGELTGRLKAIGADAIALEATGSFETQAVAGLSSAGLTVLVVNPAQVRAYANAIGRKAKTDPIDAAVIAAFVLATKPEIRPLRDAETQALSELVARRRQIVQMIVAEENRLRMVLARQAQKSIKRLLAALRRELESLDADLDDHIRKSPIWRVRESLLVSVPGVGPTTARTLLAELPELGSLDRRQIASLAGLAPWTRQSGKWKGKSFIGGGRGKVRAVLFMAALVASRHNPGLKAFRDRLVAAGKPKIVAIVATMRKLLTILNAIIRDAKPWQNA

SEQ ID NO: 48820 - protein, 339 aa, unidentified
MKLYGAFDLHSSNSYLGISDEQGKRIFKKKLPNDPATIKETLRPFKAEIEGIVVESTYNWYFLVDLLKEEGYRVHLANVMKTQQYSGVKYSDDKNDAFWLVEMLRLGILPEGYIYPKEERPIRDLLRKRGHLVRLRTSLIASLQNIIARNLGSRLKSNDVKVLTTDRVTPLFQGNEDLALAGKVSKEAIDFMTRQIKTIESTIGDRVQLSNPYDRLLSIPGVGKILAFTIQLETGAIDRFQKVGNYVSYCRKVPSGRFSNDKKKGTGNRKNGNKYLAWAFSEASDHARLFDAESRKYYQRKLQKTNAPIAHNALAHKLARAAYYIMKDGVLFMPDKAFA

SEQ ID NO: 48821 - protein, 340 aa, unidentified
MQVSTIGLDLAKNVFQAHGVSAEGKVVLKKQLRRGQVLSTFAKLPPCLVGMEACAGAHYWARELRKLGHDVRLMPARDVKAYVKRDKTDAADAAAICEAVSRPSMRFVALKTPEQQGRLMQHRVRDLLLRQRTQTINALRAHMAELGLVAATGRQGLGLLLAILADAKDERLPQDARASLKLLASQITALQAQIDTLDKRLHAQHRQCPASRRLETIGVIGATALAATITDPKAFKSGRDLAAFIGLVPRNNSSGGKQRLGPISKQGDRYLRRILVVGAHSILKQARTRPDKHPWLARLMARKPGKLAAVALANKTARIAWAVLARGESYRAPTAPAAAG

SEQ ID NO: 48822 - protein, 373 aa, unidentified
METNVESGTSRETVYAAIELSKKTWVLGIALPDRDRPSIHRITGGDLGALVARLRVAAREDRRIVVCYEAGYDGFWLARALAERRVECRVLDPASIQVNRRARRVKTDRIDVLALLRALIAIDRGERHVCAVVRVPSVEEEDARRSHRERQRLIRERTGHINRIKGLLFAQGIRGIEPKLRRTQIDFAALVTGEGHPLPQRLRCELEREYARLDLIETQLREVEKERDTADAQDPAVERKRQMLVALQGVGGTSAAILAREVFARSFASGRHLGSYLGLTPSAYDSGSTTRCQGISKAGNSWARRILIEVAWLWQKYQSASPLSHWYMQRTAGQSSRIRRIMLIAMARKLAISLWRYVETGLVPEGVVLAAAR

SEQ ID NO: 48823 - protein, 397 aa, unidentified
MTKKHTQTTLDVSIEYAVIGLDLAKYDVSLAAVTLNEGEVILIDRVTYAELYEIADKLSPTLFAVEPCNGYSQLNLELEARGHEMRVISGKAVKMWIDTHMSGQKTDINDALALARLTADPDLRPIRAKSLEECRIMTVQGVRQQLVGQRTKTIVSFKGFAQAWGIGIPAGRRNLKKMREAVEAKAELMGAAAVSALTTMLDRVKTLDDQIHQLDKDLEALVSANANGRLLKSVMGVGTQIAGRFITVVGDVKRFEKPRSLVAYIGCVPKNFITGHVNKPRQKKSSAPDLRSKGQGRISLRGDKLLRSLLMQGAACIYMQYCKRRLPDCQLTKWIDKQLAMRKPYGKIMVSLAAKLIRIAWAVLFYGEKFDIHRAGVPRSVLAAMAGQSSNEDAAAA

SEQ ID NO: 48824 - protein, 345 aa, unidentified
MEIHTIGIDLGKTVFHLVGLNLRGEVVVRKKFSRTQLLRFTANRQVQLIGMEACGGAHFLGRTLREQGHEVRLIPAQYVKPYVKTNKSDYIDAEAIAEAVGRPTMRFVPIKTDDQLDLQSLHRVRERWVMRRTAVVNQIRGLLLERGITLRKGRCHLDAALPGILEDATLKLSGALRLLLAQLKLELDQLALRMEEADGLIKKTAQDSEVCQRLDAIPGIGPLTATALIAAIGNGAAFRKGREFAAWVGLVPREHSTGGKQTLLGISKRGNGYLRRLFIQGARAVLQFKEKQSPGLSAWLAQLTSRTHHNVAGVALANKLARMAWAVLAKNELYRPPVLASAAAS

SEQ ID NO: 48825 - protein, 356 aa, unidentified
MWQTEGVLVLHTVAKQGSPHLFLIEPERLDGSCIPHDARQGMEECVSEFIGIDVSKARLDMAQHNGGEFVFENTEADIGRLCERLKALSPELVVMEASGGYERLCVAGLVACGIAVALVNPRQVREFARATGVLAKTDRLDARVLAHFAAAVRPPVRALPDAQFQALEELLARRRQMVAALVAEKNRLAQVRTRVVKRTLREVAHTYERLLELIDSELDELIKASPLWREKEDLLRSFKGIGPVSARTLLAELPELGRLNRRQIAALVGVAPIARESGSWRGRRSIWGGRGQVRAVLYMATITAMRANAQIRVFYQRLRQAGKPTKVALVACMRKLLTILNAMVRNSSRWQCPALD

SEQ ID NO: 48826 - protein, 340 aa, unidentified
MKLYAAIDLHSTNNVTVVIDEQDRVVYQKRLPNDMALILNELSVYQAELQGIVVESTYNWYWLVDGLMEQGYKVHLANTAAIQQYEGLKYTDDNSDARWLAHLLRLGVLPEGYIYPRADRPVRDLLRKRSQMVRQRTTNLLSIQNLLTRNTGSSLSANRVKGLDVQQVDELLPDGDLALAVKANLSVMSSADEQIEILERTVTQRVKLRPQFRFLKTVPGIGEILALTIMLETGDIRRFASVGNFASYCRCVGSQKISNSKKKGQGNTKNGNKYLAWAFVEAAHFAVRFNSKIKSFDQRKKAKTKGVVAIKAVAHKLCRACYYIMRDRVAFDVTKAFGQK

SEQ ID NO: 48827 - protein, 350 aa, unidentified
MPSTPNTSTPSIMIAIDPHKRSWTAAAVDARLQPLATIRVPVSRDGYRTLLRFARRWPDTAWAIEGASGRGAPLTVRLRQDGITVLDVPAKRAARVRLLSTGHGRKSDEADAVSVGVAAHTFSSLKTAEIDSATTALRALVEHRDDLVKTRTQTINRLHTVLTHLIPGGASRDLNAERAAELLRTVRLRDTAGKTLRALAADLISELRGLDRRIDKAVHGIEIAVKTCGTALTELHGIGALTAAKIVSRVGSIHRFNSPAAFASYTGTAPIEVSSGDVVRHRLSRAGDRQLNYCLHVMAITQIRRDTPGRTYYLRKRANGKSHSKAMRCLKRRLSDTVYRQLLNDADTTT

SEQ ID NO: 48828 - protein, 445 aa, unidentified
MLRIVYKQVGGLDVHKKTVVATRMRVTAEERVEWETETFGTTTPDLFQLHDWLYAWELSHVAMESTGDYWKPVYNILQDSFAVWLVNAQHVKHVSGRKTDVKDSEWLAELMLHGLLKASFIPPKLQRALREMTRYRTTLVQERARVVNRVQKLLEGANIKLSSIATDIMGISARAMLAEIAAGQTDAAWLADLARGRMRNKIPELEKALTGLVQPHHRFLLAKQLGHIDFLEEQIEEISVEIGQHLERMSWPGERSQPGTDAEAEEGAQVADESELPLTWDAAVALLDTIPGVDRRVAEVMLAEMGLDMSRFATADHLASWTGLAPGNHQSGARRYSGRTTKGNRSLSSVMVQAAWAAVRTKDTFVKARYHRLAARRGKKRAIVAVAHSLLVSSWHMLTYQQPYHELGADYFDERKKESKVNYLVRRLEKLTGGSVSIELQPAAA

SEQ ID NO: 48829 - protein, 334 aa, unidentified
MENIALIGIDLGKNSFHIHCQDRRGKAVYRKKFTRPKLIEFLATCPATTIAMEACGGSNFMARKLEELGHSPKLISPQFVRPFVKSNKNDFVDAEAICEAASRPSMRFVQPRTESQQAMRALHRVRESLVQDKVKTTNQMHAFLLEFGISVPRGAAVISRLSTILEDNSLPLYLSQLLLKLQQHYHYLVEQIKDLESQLKRKLDEDEVGQRLLSIPCVGTLTASTISTEIGDGKQYASSRDFAAATGLVPRQYSTGGRTTLLGISKRGNKKIRTLLVQCARVFIQKLEHQSGKLADWVRDLLCRKSNFVVTCALANKLARIAWALTARQQTYVA

SEQ ID NO: 48830 - protein, 346 aa, unidentified
MDHFAGLDVSVKETSVCIVDDTGKIIREVKVASEPEALLAVLKNPAYHFKRIGLEAGPLSQWLFSALAEAELPVVCVETRHMQAVLKAQINKTDRNDARGIAQMMRVELYRPVHVKTLRSQKLRMLLTHRKLLQSKAIAIDNDLRGSLRNFGLKVGMVGTVKFEARIKELVENFSDLASLVEPLLLVRRVLREQIVILHRRLLAIVRDDEVCRRLMTVPGVGPVVSLTYRATVDVPARFRKSKAVGAVFGLTCAKYQSGEIDRSGRISRCGDEMMRVMLYEAAQSMMHSRKWSWLKAWAMQIARRRGMKKAIVALARRLAVIMHRIWVDGTEFRWTREQATAEAAA

SEQ ID NO: 48831 - protein, 411 aa, unidentified
MRVHHNVCCGIDVHKKSVTACLMWGPAGKEPEFEIRRFGTMTRELQNLAEWLKQAGCEAATMESTGSYWRPVWNVLEGQIAKLILANAQHVRALPGEKTDRKDGKRLAELTRYGQVRPSYVPPRAILELRDLTRYRSKLLSAGSSERNRIQKVLEDANIKLGSVLSDVFGVSGQKMLQALVKQDSVATAKVAQLAQWSLKPKIEAIQQALEGKLTDHHRFLIDVSMRHMRFIEEQLIRLDEEIQRRLQPYQEEYALLQTIPGIKETGAARILSEIGADMSPFADGDHLSSWGSVCPGNNESAGKKFQSKIRKGNVHLLSALTECAWAATKKKDCHFRNKYYRLKSRRGSQRAIVAIDHAMLKCVYVVLSQRKPYEEPKPTSLTEAQKQRKASSLCRQIGALGYDVKIQKTA

SEQ ID NO: 48832 - protein, 321 aa, unidentified
MTYIGIDVSKATFVVAYSSTKGSKTKSFKNTAKGIHEFIQTVSADEHHCVLEATGNYSSLLVYLLSEAGITVSLENPLKIKNFARVMLSVTKTDETDARLIAMYGEKMQPAPYKLRNDSILTLKQKRTVIRQFKKQLVATKNLKGSMEVLPFFDPKCKKSIEKTIDFLEKQIKGLEEELASLALDEYKKQMGLLTSIKGIGITLAAALIIATGGFTYFDNAKQLTRYLGLSPTYQQSGTSVNVKGRINRNGDSALRSQLYVAAFSSLRCNTECKACFDRLRSNGKPGKVAVIAVANKLIRQAFAIVTQERPCINGFKSART

SEQ ID NO: 48833 - protein, 370 aa, unidentified
MRTVALDLGNRISFCEVSQGRVIARKTVGKLTDLMAELGPGTPPARAAFEACREGWYVFDQLRAWGHDPVMVDTTRVKRLGIGQHGRKTDRIDAEVLARAVESGSLPVAHVLSPHRRALRKQLSVRKGLVEMRTGLISTIRGLLRANDGIRLGGCEAEQFHKHVQKASLNEEQRLLIKPLVELLEQLGPKIDEVDNQLEALSAQEPIILNLKTTPGVASVVSAAFVSVVDNPGRFRTAHQLEAYLGLVPLEKTSGKRKLGSITKQGNPYLRSLLIQSGWTILRKNDPNDPLNLWAQGVLARRGKQVAVVALARRLVGVLWALWRDGTVYDPGHIGHQSARGVERAAQSDALRAAALRRAARKTLRSAKKA

SEQ ID NO: 48834 - protein, 343 aa, unidentified
MDQYVALDVSLKETSLCVLEANGAVSFEGRVPSEPAQLARAIRTRAPRAIKIGLETGATSVWLWHALRAEGLPVVCMDARHAHAALSVRPSKSDRSDARGLADMVRMGWYREVQIKSLAAHERRTLLTARQRLVTIRVDLDAQIRGMLKTFGLLVGPGNSDAFVRRAEALAEGHPLLAPVLGCLAEVRRHVAAQIAKLDREIARIVRADTILCRFTSVPGVGPITAIAFLSAIDDPSRFRRARDVGPYLGLTPRRHQSGEVDRAGRISKCGDAFTRRCLYEAANVLLTKVQRWSPLKAWGVRLAKRVGGKKARIAIARKIAVILRCIWVDGTQFWWTKEAAVA

SEQ ID NO: 48835 - protein, 347 aa, unidentified
MRFYTQQHRFYCGIDLHAKHMFICVLDAEGKIVHHQNGDANPHHFLRAIAAFRDDLVVAVECMFTWYWLADLCSREGIPFVLGHALYMKAIHGGKAKNDKIDAHKIAALLRGGLIPQAYVYPPQMRATRDLLRRRCHFMRKRAELLAHIQNTTSQYNLAPLGRKIAYKANRAGVAEHFAQAEVRRSIELDLSLIDHYDTLLNDVELLLARTAKIHQPHNFHRLRTVPGIGKILALVILYEIHDIARFASVGDFVSYCRLVKCAKLSDGKHYGYSGKKIGNAHLKWAFGEAATLFLRANPMGQLLFSRLCQKHGKAKAISILAHRLGRAVYHMLKRQQAFDLKKFCMT

SEQ ID NO: 48836 - protein, 344 aa, unidentified
MSIMHYIGFDIHKKVISFCEKKVDGTVVNQGVICANRASLTEWAQKRTAEWVGAMEATLFTGWIYDFLLPYALELKVAHPAMLQAITAAKKKNDAADAEKIADLLRCNLLPECYMLSEEQRNLRRTLRYRNFLVREAAKMKTKTAGLLMEVGAEYNKEKLHGAKYFQELLDRLDYVPESVLSLLQMTRSNMESFAKMQKSLICALQSDPRISNRVELLMSIKGVGEVTSLTWVLEIGDVERFSRISQAVSYCGLCSAQKESAGKNYRGPISKKRNKHLQTVLIEAAKLAPRWNPRLAELYEREYAKGNRNRATLAVARKLVAYMMAVDKKKTPFEPREVLPKAA

SEQ ID NO: 48837 - protein, 345 aa, unidentified
MEPRYYIGLDIHKRKISYCVKDSGGKVYSEGSLPATRLDLDVWMKTLPQPWSAAMEATMFTGWIYDHLKPHAAALKVAHPLMLRAIAAAKKKNDRTDANKICDCLRCDFLPECYMAPTAIRERRRTLRYRNLLVRQMVQMKIKISSLLMEAGVSYNKQRLHKAGYFRELLATNPDINEGLKPLLQQCRETVVRLQKTESAMVRSLERDSLLMDRVERLMTIPAVGPITALTWALEVGDVQRFSSIKKAISYCGLCGAEKSSGSTVQRTPLSKQRNKHLQTTLIEAAKMAPRNSSELAMLYDREKQKGNANRATLAVARKLVAYLVAVDRRQKEFLTVESENRTAA

SEQ ID NO: 48838 - protein, 400 aa, unidentified
MISVGIDVSKEKSTVCILKPYGEIVSKPFEVYHVEQELSELATMLLRLNDEVRIIMEATGIYHLPVLSYFKEKGFFVAVINPFEMKEYRCQGLRRVKTDKQDAIAISHYGIDHWYRLKEYEAQENIYTELKLLGRQYCHYMRMRVESVLELTHLLDYTMPGIKTLLQGWNEKNGKDKLGDFAEEYWHYDNITKKSEKQFIDSYLKWAKKKGYHQNQDKAIKIYALAKEGIPTVSSNTPSTKMLVQEAVRVLREVDHTLMTILTQMRSLAKSLPEYPIVRAMGGVGDVLAPKLIAEIGDVRRFHSGKALIAYAGIDAPPYQSGRLVGTERKISKRGSSNLRKIGYEVMRSLKTHKAPEDAAVYEFILKKEREGKSKRAAKIAGLNKFLRIYYARVMEVYRK

SEQ ID NO: 48839 - protein, 344 aa, unidentified
MEAHVSVVGLDIAKSVFQVHAVDSVGKPIIRRRLKREEVETFFRKLPPALVALEACPGSHFWARLLREVGHDVRLLPAQYVRPYVKTNKSDAADAEAICEAVTRPTMRFVPIKEEIQQEVLVLHRVREMLIRQRTQLINSIRGHLAEFGIIAPNRAHNIGLLTKLIEDEEFDELPAVARHALRYLVEQLREVKTKLFRIDRDLMKIVKGSDACRRLMTIPGVGVVTATALVSSMREPSDFKSGRHFAAWLGLVPRQHSTGGKESLGGISKRGDGYLRRLLIHGSRSIMRWRGRSWTWLAKLRDRRPANVAVVAVANKTARIVWALLKFGGTYGHPGDGATMRAT

SEQ ID NO: 48840 - protein, 314 aa, unidentified
MKSYNNFIGIDIGKFSFFVASFDSNIVHEFENNDEGIKKFLLKYKKLFKKSLCILEATGGYEMFLLLILCDKEIDVHRANTRHVKNFIRSYGNAAKTDRLDAKALARYGAERFKELKLFTPCSKQFLELYCLSQRRNDLMQMLIAEKNRKQAPRAEWIQTSCDVLIQTLEQQIKEVDIAINDLIASDERIANKKKVLMTIPGIGPIVANEIITMLPEIGTMNRRQIASLSGLAPRANDSGNKKGYRTVAPGRNQVKPKLYLAAMAARNSKSRLADYYYGLISRGKPKKVALVALMRKIIVIANAKVKEIEINYA

SEQ ID NO: 48841 - protein, 342 aa, unidentified
MGEVSIIGVDLAKNVFQVHGAAADGRPVFRKKLSRPQFARFMTQQPPCLVAMEACASAHHWAREMARHGHEVRLIAPHYVKPFIKRQKNDAADAEAIVEAALRPTMRFVEPKSADQQARAVAFRTREQLVKQRTEAVNALRSHLYEFGHIAPEGIGYLPRLNRVVEDPDADIPDLARDICRMLLEQIVHLTDRINALKARIAAMSNEAEMPRRLQTMPGVGPITALAVETFAPPMEQFRRGRDFAAWLGLVPRQHSTGGKQKLGKTSKMGQRDIRRLLVIGATAVIRWASRRGAPKGSWLARMLERKPIPVVAVALANKMARGIWAMLSSGEDYRGPVLIGA

SEQ ID NO: 48842 - protein, 372 aa, unidentified
MRDDSVAYVGFDTAKLRHAVAIAEDGRTGEVRFLGEIESTEAATVKLVKKLAGRYRQLTFCYEAGPTGYELYRLIKQLGHDCIVVAPSLIPKKPGDRVKTNRRDALSLAKLLRAGELTAVWVPDARHEAMRDLTRAREAAVGDLTSKRQQVLSLLLRLGRHYAGKRNWTRMHMNWLAAQKLEHAEQRITFEEMLLAVREAQDRVTRLEQAIRVALPDWSLAELVTALMAMRGFDFVSASSFLAEMGDLSRFPTARDLMGYLGLVPSEQSTGEKVRRAGITKAGNRRARHILVECSWSYRHPPRLGKEKLGKVANAPRDVREIAWKAQHRLTGRYRTLVRNGKKPTVAITAIARELSGFIWAINRAVRPAMTG

SEQ ID NO: 48843 - protein, 432 aa, unidentified
MKNDNRKYLSVGIDVGADFSLMAIALPSQELLGKSYRIFHNSKRSLDGAIDRIYSVMEQYDLPARIFMESTGIYHFPVYHKMREAGLDAYVLNPLVTHASKDINVRNIHNDKFDAQKIALLGLRPDLKTSIVPSDDVAAMKAILREYYAMKKETSMYICRLKDQLRQVFPQFIPVFSKVNGVAAMAVLYEYLTPDSILAAGADELDRFMKTVISKGPLHIRKKAEALVEAARDAQNFGHGNTGVFYLIRHYIEMIRLLDAQTKQILTQVKVLLKEQKNSQMAKQVRLLQSIPGIGFLSAVTLVCEIGDFSAFKRPKQLFAYFGLDPAVRQSGNFSGADLKMSKRGSPYARRCIYVLAIQSVSLRVDGTAKNPVLRSFYEEKCKSKSKMTALGAVMHKVCNIIFAVLRDERPFVLITPEEHRTAYFSASVKAA

SEQ ID NO: 48844 - protein, 407 aa, unidentified
MDVVIERACGMDVHKDNITACIITSEGKEIQTFSTKTVFLLELVNWIKQHQCTHVAMESTSVYWKPIVNLLEAEGIEFLVVNAQHMKAVPGRKTDVKDAEWIAKLLRHGLLKASYIPDRNQRELRELVRYRRSIIEERARQHNRIQKVLEGANIKLGSVVSDVMGVSARDMLDAIADGEENPEKLANFARRTMKKKKDELELALKGYIGPHQRLMLKIILGHIDFLTEQIELLDQEVAKRLAPQQEDIERLDSIPGIARRMAEQILSEVGTNVKAQFPSAAHMCSWAGLVPGQNESAGKRKSAKTKKGNKYLRSALTEAAHSVRGSKNYLGALYRRTASRKGKKRAGIVVAHAILRISYYLLTRKEMYVDLGEDYFDKQRQQSIVRHSLRRLESLGYTVTLEEPKAS

SEQ ID NO: 48845 - protein, 383 aa, unidentified
MKSVCGLDVHKDSVYLCILSEFGELIEKVFGVLTYQLEEMRDLMLHHHVVEVSMESTSVYWIPIWRVLSPHFKLNLANPYFIKQLPGRKSDVKDAQWIAECTMKELIRGSFVPPETIQQLRQYDRRIFDLNEEIVRKLSKLDAVLQRCNIRLSNYVSNVDSKSYKAVVRAISQGITAPEELVKLIHGRIINHHGVDVITASLKGVVSLAEIDMISQLRDELDMAEAHKEKCQARMLEICEREFPEELRRLQTIPGIKERTATSLIAEIGTDMNKFETANHLASWSGLKPRNDESNKKIKSRSITHGNVYLRKTIIECAWAACRTKDCFFSRFSYHQTQVRKKNKMKVLVAVARKMLIAVWHVLHDNTIYIDFTTDRKTSRTKG

SEQ ID NO: 48846 - protein, 352 aa, unidentified
MVIGVDAHKRTHTLVAVNQLGHKLGESTVEATDSGHERALRWAQTTFGPGPALWAIEDVRMVSGRLERFLIDAGLTVVRVPTQTMARTRASARAPGKSDPIDAEAVAHAALRYPELPRACHEPVSYEMKLLIDHRATLIKQRTATINRLRWRVHQLDPEYDCGPNLKADIHRERLRDWLSETQSGVLAEIAATDVDELSRLNQLIRPLERDIEIRIAEVAPNLLAVQGCGSFGAARIVAETANVTRFRTEAQFAMHVGVAPLPYWSSNNPHVHSARYGNRQLNAAIHVIAMSQLRSGGIGRPYYDKHIAAGDSTKSALRRLKRRLARVVFNAMRKDYALRTGAEPGPAVGAP

SEQ ID NO: 48847 - protein, 343 aa, unidentified
MNQYIGLDISLKETAISIRQDGKRIWRGRCPSDPKLLARMIRMHAPHARRVVFETGPLSTWFYHALTAERVPAICIEARHAQKVLNETLNKTDANDADGLAQLAEAGFYKVVRVKAFDSMLTRTLVGARNQLLSISVQLSNQVRGLMKTFGLIVPKGTGRVFDGHVKSLLDGNDDLARIILPLLDAWRDIRRRAAELDRQLLAMARQSQAVKRLMTIPGIGTITAVSYVAAIEDPDHFRTSRSVGAWLGLTTRRYQSGEVDYDGHISRRGDNRLRGLLYEAATVLLTRTGARAECRLKAWGLKLRERLGFKRAAVAVARKLAVIMHSMLKTEEVFNASAGATA

SEQ ID NO: 48848 - protein, 274 aa, unidentified
MNQEKYIGMDVHQATISVAVMDASGKLIMECLLETKAATIVEFIRGLHGTLSLTFEEGTSAAWLHDLLKLHVSRLVVCDPRKNALLKDGNKSDRIDARKLAELLRGNQLHPVYHGEHGVRTLKELGRSYLTITQDVTRVMNRIKALYRSWAIPCAGATVYAPRHRAEWLSKITEPGVRVRAERLYQELDLLQPVRLEARRELLAESHKHSGVRLLRQIPSIGPIRSALLVALLQTPHRFRTKRQLWAYSGFAVETHDSASTARCAANCNATASA

SEQ ID NO: 48849 - protein, 632 aa, unidentified
MLNYTTLCRRVQALEVQLPIVHDGEPIHLMVDSTGVKVYSDGEWKVRQHGYSKRRAWREVHPALDSSTAQVRAAPMTHQDVAEGNVLAELLDQIPDDEQLDVIVVDGAYGSKCRHCRAQRPRFRRAKAPLICPRARRGATMRSMRSPESATANRRRAAATIPLLSSRPDNSGFWPARPGMIPAPVAIIIRAWWAAVIADWGGRDIPSPSVTWMPRLATVVAGQSVHFAQTAMQYTQQRDAVDVFVGVDVGKGRNHAVTLDRSGRRRYNKALPNDKVKLRALIAELKTHVRLPFVVDQPSTIGALPVAVASAEGILVAYLPGLAMRCIADLHAGEAKTDAREAAIIAEAERSMPHTLRSLRLADEQLAELTMLCGFDDDLAAQVTQTSNRIRGLLTQIHPAPERVLGLRLDHPAVLDLLERYPSPAALAAAGKKTLANRLTKLAPRMGKNLAAEIVQTLNEQAVIVLDTQAATIVMPRLAQQLAALRKQRDEIATDVERLVLAHPLWPVLASMPEVGVRTAARLLTEVAQKAFASAAHLAAYAGLAPVTRRSGSSIRGEHPSRRRNKVLKRALLFSAFAILRNPVSRAHYARKIQQGKRRNQALIALARRRCDVLFAMLRDGTIYQPKSVSTA

SEQ ID NO: 48850 - protein, 351 aa, unidentified
MIVIGADPHKQTHTFAAVDAATGEQLGCETVKAASAGHERALAWGRELGGERVWAVEDCRHVSGRLERFLVGRGERVVRVAPKLMAGARQSARERGKSDPIDALAVARAALRERPERLPGAYLDERALEIRLLVDHHDHLVGDRSDEQRRLRWHLHDLYGSELEIPAGALDRSKWLEKLARRLARGEQPARVRIARELVRSIRERTRRIRELEREIAGLVSDYAPQLLDEPGCGPLTAAKLIGELAGAERFKTDAQLARSAGVAPVPVSSGRRDRHRLDRGGNRQFNLAFHRIAVTKGRICPQTAAYLTRKQGEGKTRMEALRCLKRHLARRIHHLMTDHANTPAQPLALT

SEQ ID NO: 48851 - protein, 471 aa, unidentified
MKWYLGIDVSKGYADFCLLDEQLREVTAPFQLDDEFEGHAGLYRFLAEKTGEIEGLEIYVAVESTGGYENNWYATLKRFGGLLPVKVARLNPAGVKYHSEAVHSRVKSDQTSARWIAEYQAKYPEQVRYEYDETLLPIRRQWGAIRLFKKQRQQLVNNLHQVLYDANPELLVHCKTGIRDHLLRVIEEYPTAKKLARAHMRKLAALPQVSEFFAHQLIENAKRSVAADQSTVTEQLVVTLVQQIRNLDEVIERSLQAILREYRPPEIDLLITIPGIGELSALGLLMEIGPVERFPSAKQLAAYCGIHPQYKESGDSRGHVRMSKKGRKEPRRILFINAFNAVRFDPYLKTYYERHLANGKSKLCATGIVMHKLLRIVYGILKSGQPYSPEIDRINSEKKKPATQPELPNTRRYQPYADNAPISKRAAKKRRQPMSKGEDKSPCTGSTAAISENKRILQPVNCATDFYTEKT

SEQ ID NO: 48852 - protein, 348 aa, unidentified
MTMVGGFDVHRKQITFDYVDDDGLVRWGQIRPATRKTLRAWLGEHCPDGDAEFALEGWTGWRYVTEEVASAGVGVHLGDPAEIAGLRGPKKRAKTDRADARLLRTLLLEGRFPESWIPPAHVLEVRTLGRLYCTLMDERRAWQQRIHAQLFHQGCPPITALLSAAGREALARAELSATGRQYADTALRRIDELSTEIGPLRTQLVNFGRRQVGCQALQAHYGIGWLCAAIIWAEIGDARRFTSSDQLVRFAGLDVTVYSSDGKRSPGHLSRQGSPELRWAAFEAAKCAARRGSPDYAYYHQLAAKRDGHNGKNPTLAVERKILRRCYHTLRELGDAALALPIPEEVAA

SEQ ID NO: 48853 - protein, 343 aa, unidentified
MNISRVGVDLAKNIFQLHGVDRQGKTIWKRRLSRDKWLHELFKTVKPGTLIGMEACAGAHHWSRLLQNAGYEVKIIPPQFVKPFVKSNKNDANDAQAICEAMVRPNMFPVQVKTIEQQDIQAIHRVRNEIKAHRVAKGNQIRGLVCEYGLVAPRELSSLRKAIPVWLDDTENSLTSCFKQLLRSLWDDLSYLDDRMNELNKQIKKIAQQDPIVKRLQQLQGVGELVATALVATVGDGTQYRKGRDMSAALGLTPRQHSSGGKEKLLGISKRGDSYLRCILIQGARSAMRTVKNKDDRFSRWVVNLQSRRHSNVVAVAMANKIVRMAWAMMTKGSDYDPNYHPS

SEQ ID NO: 48854 - protein, 351 aa, unidentified
MSHNLSDAVAVVGIDIGKNSFHVVGLDSRGAIVLRQKWSRGQVEARFANMPSCLIGMEACVGAHHLSRKLRTLGHDARLMPAKYVRPYSKGQKNDFRDAEAIAEAVQRPTMKFVATKTAEQLDLQALHRVRERLVSQRTGIINQIRAFLLERGIAVRQGLRYLRAELPRLLAAPPDVLSPRMVGVIEGLAEDWRRLDERIEHLSGEITALAHQDAGCKRLVSVPGIGPIISSAMVAAIGTGDAFSKGRDFAAWLGLVPKQISTGDRTILGKISKRGNRYLRVLFVQAAWVVLIKPQSWERHGLKPWIEAAKKRLHRNVLAIALANKLARIAWSVLARGRSFEARPVMASAA

SEQ ID NO: 48855 - protein, 341 aa, unidentified
MTEVSTIGLDLAKNVFQAHAASVSGAILFRKKLRRDQVLAFFAAQPRCLVAMEACASAHYWAREIAKLGHEVRLIAPTYVKPFVKRQKNNAADAEAICEAAQRPTMRFVAVKSEAKQASAVVFRTRDLLVGQRTQIINAIRGHLAEYGLIAPQGPSHVDQLIAQIEDPSSGIPDPARSCLAVLVETLRALQGKIAALDAEIAARAKRDDGARRLMSIPGIGPLIATAIEALAPPVETFRSGRDFAAWVGLTPLQRSTGAQERLGKISRMGERTLRRLLIIGARGVVRWARRKGVPAGSWLARMLARKPPMLVIVALANKMARIAWALIAKGGSYRAPAVAA

SEQ ID NO: 48856 - protein, 421 aa, unidentified
MLRRIAAIDIHKKVLMVVVVKVIGEAKDAIGQALKFECIRFGTPASERARLVEWLKQQGVTEVVMESTAQYWKPIWMDLEPHFAKLHLAQAESNKAPKGRKNDFRDAKRLARRLLCEELRLSFVPGPEQHMWRTLTRSKQQLVRDRVRLQNQVESLLEEMRIKLSSVISDLFGVRGRRILTAISKGETDPVKLAGLGDQRLQCNRQELADALTGSPSQMQVEVLKLFLARLELLDQQIQSLDKLAAERLKIHEDAVIRLAEIPGFGADSAQQIIAEVGADAQVFPSSSGFSSWVGFCPGSNISAGENHSSQCPKGNRFVRCLLTEAAQAAVKKKGSHFQAIFRRFLPKLQYNGAICVVAHRLACVVWKILHDGVRYIEQGMETTPQSRKRRAQKLVKALRNLGYRTTITPLVETPTPEPAG

SEQ ID NO: 48857 - protein, 319 aa, unidentified
MAQNGLVVAGIDVAKDKVDACIRASSQRRMFESTAEGRRQLIAWLRKHKAAKVVMEASGGYEREWAKALREKKVEVRIVDPKRVRHFAQSAGRLAKNDTIDADTIAWFAETFSEAPGQAYDAEREKLMQMVNARRGLLEIETMLTNQGEHLVPDVVEKMQARLLKKIALEIVKLETAIAAMIKATAHFAELAAIIESVPGLGSGTAAGLIAAMPELGQVSNKVAAALLGTAPYDDDSGKRRGQRQIKGGRRRLRNLFYMGCLGAATRHNPVLKAFYRRLIANGKEKKVALVACMRKMIVILNTMIARRQKWNPCLYTVS

SEQ ID NO: 48858 - protein, 409 aa, unidentified
MAMEMVNPRCAGLDVHKKSVWACARVEGEAFIEPFGTCTRELLRLGDWLAGHGATVVAMESTGVYWKPVWNLLEERFRLMLINAQHIKQVPGRKTDVKDCQWIAELLGHGLLRASFVPPRPQRELRDLTRQRTQLLGDRARVVNRIQKTLEDGNIKLASVATDITGRSGRAILDALVAGTHTPEQMAELVHKRMEAKKPLLREALAGRVTDHHRFMLRQFLAQIDDLARMIESFDQRIEAVMTPLEREAVERLDEVPGFDVRSAENVLAEIGTNMSRFPTPGHLASWAGMCPGNNESAGKRKSGRTRKANRWLKGALTQAAWGASRTRRSYYRAQHQRLSVRRGVKRATIAVAHSLLVTTHCLLSKPGPYTDLGPHYFQTLRTPEQRAEQLIRKLERLGYLVQVERPAA

SEQ ID NO: 48859 - protein, 389 aa, unidentified
MFVEDDTGRRLGGGRLADGVEGIARFHEVVGGHVDDPGDVVIATETDRGLLVNALVAAGHTVLAVNPMSTSRYRERFTTSGAKSDPGDARVLAELARSDAHLHRPVAGDSDLATAIKVLARAHQSMIWTRQRQADQLRSTLREFYPAALTAFDELAGRDAAAILAIASTPVAARQLSLSKIGAALRRAGRQRRVEQRAVEIQTALRSEQLHAPDPVADAMGATVTALVAVITELNTQIANLETQLAASFEQHPDAKIIRPLPGLGMTLGARVLAEFGDDPNRYVDAKSRKNYSGMSPITKASGKPRAVLARYARNRRLADACYLWAFATLTASPGARAFYDQHRARGDTHNRALRALANRLVGILHGCLNHGTLYDEHTAWAHRQQQAA

SEQ ID NO: 48860 - protein, 423 aa, unidentified
MVLVDTADREEIIARVAALDIGKAELVCCVRVPGNGPGGRRAQEVTTYSTMTRSLLVLADRLAELGVKRVVMEATSDYWRAPFYALEAAGFETWLVNAKDVKHLPGRPKTDVLDAVWLCKVAERQMLRPSFVPPVDIRELRDLTRYRIDQVGVRTAEKQRVEKLLEDAGIKLDVVASDLFGVSGRAMLAALVAGQRDPHVLAEMARGRMRVKRPQLVEALTGRFTDHHGYLLSKMLARIDAINVDIADLDDRIEAQLSPFAPQLAALVEIPGIKATTAAIIIAEIGIDMTRFPTAAHLAGWAKFAPGVKESAGRKKGTGSTGHGNRYLARALGEAAAGAGRTNTFLGERYRRIARRRGKKKALVAVGRSILVVIWHLLSDPQIHYRDLGPDFYDTRLGAQRATRNHIRALQALGYNVTLEPAA

SEQ ID NO: 48861 - protein, 314 aa, unidentified
MNVTFVGIDVSKEKFDIHVRPIDQSEMFSYDDEGLNKLVDLLKRVHPQVIVLEATGGYERRLVAVLLTHDLPVVVINPQRVRHFAKATGQIAKTDRIDAAVLSLFAQTLQPEPRSLPDAFSEQLRDLLARRRQILEMIVAEKNRLETSRKPIRGQILQHIKWLEKRLVSVDRDLNDQIQSSPTWKTKDQLLRSVPSIGPVGSSSLLIQLPELGTLNRHQIAALVGIAPINQDSGRFKGHRITQGGRASVRSALYMCTLVATRHNPLIKAFYQRLVLAGKPKMVALVASMRKLLTILNSIIKHNRSWNPSYAEKA

SEQ ID NO: 48862 - protein, 387 aa, unidentified
MQKLHDNGKASPAAFMQDSTLIAVIELSLSSWLVAGLIPGVSREPLKKLEPNPEDLLKLLHGWRDEAIKAGRLITRIAVAYETGRDSFWLARWLQERGIDAHVIHANSVTVSREHRRAKTDRLDTAMLKRGFLGWLRGERGHCTVAIVPTMEEEDAKRPHREREGLVHEQTRVVNRMKSALIQFGVRNFNPKLRKASVKLETVRTPEGKSLPPNTIAALRRDMERLRIIKEQIKAIEQARLQQFAQKPEALANRMIYLLVRIYGLGLETADLLVHELLSRTLRDRKAVARYAGLTGSPDESGSKRREKGLSRSGNARVRKIMIQLAWRMVKFQPDSALVQWFKQRTENAKRSRKPMIVALARKLIIALWRYANDGVIPAGFRLHSAA

SEQ ID NO: 48863 - protein, 414 aa, unidentified
MKLFVGIDVSSEELEACFMDPEGDTLETLKVENNLHGASHLRDRIVAAADKLPASEIHIGLEATSVYSWHPAMYLHEDASLQERKTKVFTINPKLINKFREAYADMDKTDRIDAWIIAERLRFGRLTTTIVMQEQYIALQRLTRMRYHLVHNLTREKQYFLQNLFYKCNAFRSEVDSSVFGHAIMEMLSEKFSLDEIADMEVADLADYLKEKGKNRFPDPEHVARCIQKAARASYRLSKVVEDSIDLVLGTSIQAIRSIQSQLKELDKAIERILAGIPGAQCLRSIPGIDRVYAAGILAEIGDIERFSDQAAVAKYAGLTWRKHQSGGFEAENTKRIRSGNRFLRYYLVEAANSVKNRDPEFGEYYRKKYNEVPKHQHKRALVLTARKLVRLVDVLLRNDQLYTPRRKVNSAKE

SEQ ID NO: 48864 - protein, 676 aa, unidentified
MRRKGSPLAPRWDDVASETKASSRAVGESSDSASTKKLTKKAPATKKAPASKKAPATKKAPATKKAPATKKAPATKKAPATKKAPATKKAPATKKAPTKRVTKGRMPIEERKDANVLAAGKRPSSPSSPSSAASKVEPTQASANRGCLRAAPGGSGGALALRCARRPVASAGDGQTDASGGGSRLRLIAEKPPQPRMRMADPSTTELSSDGAPKSSKTHGPREGSTVEDLIVSQPSVQSEQVLAGRKVSALALGASMRKIPPTRFVGLDMGNKVELCIVAHDQVIRRATITREDDYKEHIGPGTERALVVLEACREAWYLYDLIVGWGHEVWIVDTTRVRKLGIGEHKRKNDRIDAETLARAAYEGRVPRAWVLSHSSQALRADLQTRRLLVSTRTSFVVAIRGQLRAQGLRIASCKTRDFVKKLDSTDLSPLLREQIEPLVAVLRTLNPQIDQIDKKLDEHLAELPVVGLLTTARGVGRIVAAAFISVIDTPGRFQNAHQVQSYLGLVPSEYTSGKRKLGAITKMGNAYLRAMLVQAAWALMNMRCSDPLKYWGMRISKKRGKRVAVVAVARRLAGILWAMWKNNKGYNPELLGKQSARGKRKEAAETQTSATHLAICAEQARNHKQTTESQTSAVPKSGTVTDAAGSRRKSAAGSRRKSAAGSRRKSAKTRATA

SEQ ID NO: 48865 - protein, 342 aa, unidentified
MQVSTIGFDLAKNVFQVHGIDANEKVVVRKQLRRGQVIAFFEGLAPCLVGMEACATAHHWARELRTLGHDVRLMPAKDVKAYVKRNKNDAADAEAICEAVRRPTMRFVTVKTVEQQGRLMQHRVRDQLMRQRTQLINALRSHMAELGIVAAQGREGLKDLMAVVADRNDSTLPVDARVSLMVLAAQLQACQTLIGTLEKRILAQHKSNEASRRLETIPGIGVVGATTIAAIVTDPKAFRSARDFAAWIGLVPRQDSTGGKPKLGRISKQGDQYLRRILVVGAHAVLRRARLHPEKYPWLTALLARRPFKVVAVALANKMARIAWALLAKGGTYRAPQLVAAV

SEQ ID NO: 48866 - protein, 423 aa, unidentified
MTSMTLDPPLTNLLPPDAELVAGVDTHKNTHHVAILDLVGRPVADREFRADGRGYAQIVTFLHAHGDVVRVGVEGTGSYGAGLARALTAAGLTVVEVARQDRQARRRRGKSDPLDARQAAVAVLAGTDTAIPKSGDGAVESMRILLAERRSAAKARAQVMNQIHALLITAPELVRQAFRALSGQRLVNTLAKTRPGTIMSPDPEVVARQTLRRFAVRHLTMQAEIDLIEQQLEVLVRQVNPTLLSLSGVGPVTAATLLVAAGDNPERLGTRASFAALAGVAPIPASSGQRTRHRLSRGGNRHANAALHRIVLLRMRHREPRTMAYFERRRSEQLTDRDIMRCLKRHVANEIYAALLNPATDNPIGRELRARRQAVGIPISVLAATLDVPYQRLRRLEIGTRADPELEARATAVLEQISPPLAA

SEQ ID NO: 48867 - protein, 298 aa, unidentified
MKVTTVGIDLAKNVFQLHGVNEAGRPVIKKQLRRDQVAAFFINLPLCLIGMEACGSAHYWARKLEGFGHTVKLISPQFVKPYVKTNKNDAADAEAICEAVARPNMRFVPIKNIEQQSVLSLHRVRQGFVKARTAQANQIRGLLSEFGLIIPQGIGHIANRVPELIEDASNELPGSFRLLVQRLLNHLKELDTQVDELESQIVRWHRQSAASNKLAQVPGIGPITASALVASLGDAKNFDSGRQVAAWLGLVPKQHSSGGKRIAFIGRRKDVCRWHDSWPASDKPRWTEPPPKAIAIGD

SEQ ID NO: 48868 - protein, 468 aa, unidentified
MDAVVERCAGLDVHKDTVVACVRAPGRGGRREGHSHGFPTTTAGLLALADWLAAHAVTLVGMEATGAYWKPVYHALEDGFECWLLNARHPRNVPGRKTDVADAAWICQLVEHGLVRPSFVPPAPIRELRNLARYRKAQIEERTREAQRLDKVLQDAGIKLSSVASEILGVSGRTMLGALVAGERDPAALAELAKGALRRKLPALGEALVGRFSAHHALLVAEILAKLDYLEETIGRLSAEIERVVAPFGPQVELLRTIPGVDRRMAEALIAEIGVDMSRFGTAARLASWAGICPGQHESAGRQRHGTTRKGSKWLRAHLTQAAKGRLAHQGHLPVGPVRPPRGPPRPCPGHDRRRPLDPGGRLPHPRARHARRGPWRRLVHPPPLARAPRAQAGPAARGARLLRPARGACRLKSDFHLRALDACHTSIGWFVWIVVAGSKRRLTARRRSRAARAWKLSAAARSSTKLR

SEQ ID NO: 48869 - protein, 421 aa, unidentified
MSKSQIVVGFDCGEDGHSAVLLDAAGEFEERFGVANERGQIQELLAELLLAVRPDKRLVVVVESKRSHGRIVSDVAVELGCDLRQVNTVALNHYRDLEGQPRKDDEWDAYLAARMVFQKMGGCREATEVTEEERALSRLTRTHKRLVDDRRKHLARLRAVLLELAPEMLHSSWEGPQPGRKAMLYLLERWPGFEGLERAQLRSIEKILRQCRYGSRATHVAKLIREVARGISIAGEERHAFTLELDLLVRQIRFCDEAKDRLRAEIVQRVEQHPVGQKLLGMDGNGPVITGVLVSELLPVARASTEPKSATYAGVTPLSRKSGKSLKSDKLTQGVNQRVLHALYTSSVVAIKHSAIDRAYYQKKLRGYKGHPKPHVAAFIALSRQRHKVIYKLMTTEARYDKEVLIAAHLARLDQEGTAAA

SEQ ID NO: 48870 - protein, 368 aa, unidentified
MKQVTTYVGIDAHKKDLFLAMLVGTKAAPVSWTAPNEPKAVKRLVRKLERAAPGPVRVFYEAGPCGYALQRQVTTSRVSCEVVAPALIPRKPGERVKTNRRDARKLAELGRAGLLTAVQPPTPEDEAVRDLARARDDAREDLQRCRHRLGKLLLRRGLHFAGRNWTRAHRQWIESLTWAHAAEQVVVDDYLLAIDHTETRLVELDRQLAQIAEREPYREPVGWLRCFRGIDTLTAMLILAELHDFRRFASAPALMAYLGLVPGEDSSGEKHRRGPITRTGNALVRRLLVETAWHYQHRPGVGVTLTRRRKGQPSRVIAIADKAQQRLCRRFRKLAAEHKPAPKIAVAIARELAGFLWAALQPAPATVN

SEQ ID NO: 48871 - protein, 349 aa, unidentified
MEIDTIGIDLGKTVFHLVGLNAAGGVVVRRKFSRTQLLRFTANLRVRLIGMEACGGSHFLGGRLREQGHEVRLMPAQYVKPYVKTNKNDYIDAEAIAEAVGRAQMRFVPIKSDDQLDMQSLHRVRDRWVGRRTSVINQIRGLLLERGITFRKGRRHAEASLPGVLEDPENGLSGPLRMLLAQLQSELRQLQSQIDEADTLITRAAGDHEACRRLMAIPGVGPLTATAVVASIGNGAEFRKGRSFAAWLGLVPEQRSTGGKQKLLGISKRGNSYLRKLLVHGARAVLQCRDKQSPSLSAWLSQLAARAHTNIVAVALANKMARIVWAVLSKGEAYRPPLSAISAEALACN

SEQ ID NO: 48872 - protein, 425 aa, unidentified
MNYKQNEKINQVKESTLVVGIDIGSTTQYARAFDWRGIELGKVFTFSNSREGFESFKAWMQHLQDKYRKSDVIVGIEPTGHYWFDLGAYLEDEGILLVMVNPYAVKQTKELDDNSQSKNDRKDPKVIAKLVTEGRYSAPYTPDGVYADLRIMVANRKRLIREMTQIKNRFARWFAIYFPEYTDVFGDYEAQSSMLLLKKVCTPEAIVELGAEKINQIWRDAKLRAVGMKRATTLCETAKRSIGLKKGSSAAQYEMKLLLEDYEYKKAQLDAVMEEIEKLCRKIPESEQMLAIKGIGVITVAGFLAEVGDVRRFESPRQIQKLAGLSLRENSSGKHKGQTTISKRGRSKLRAVLFNAAIPLIAKNPEFKSLHEYYTTRANNPLKKKQSVIAISCKLIRVFYAILAKGVTYDAQKLISDIHRQPQVA

SEQ ID NO: 48873 - protein, 371 aa, unidentified
MKKSITFVGLDVHKNSIEVALADAGREGEIRHYGAIAGDIDSFGRLLRKLVSTGKELHFVYEAGPCGYEIYRYLTAKGFDCVVVAAPAGDPTKGGRKRIKNDRRDAMTLARLHRAGELTYVFVPREDDEAMRDLTRAREDASNAQRVARQQLTGMLLRLGFRYSGKTSWGLAHFRWLSGIKMPTPAQQVVFQEYIHAIKETSDRLERLTRQIEELAPAWRMFPVLQAYQALRGVSLIVASTVVAELGDLTRFDNPKHVMAFLGLVPSEHSSGEKTRKGGITKAGNGHARRVLTEAAHAYQFPARVSRALLQRQEGLDKTILDIAWKCQVRLCSRFRRLMAKGKNRKTVVTATARELIAFMWAIAKQIPVSA

SEQ ID NO: 48874 - protein, 315 aa, unidentified
MAEVTIQANVGIDVSKEWLDVVVLPSGETWRTENKEEAIRELVKKLEQLTPERIVLEATGGYEQMLAVQLYLAGLPLCRVNPKRTRYFARSLGQLAKTDKLDGKVLALFGERVKPPLTRLPTEKEQVLSAFITRREQISNFLVAERNRLHTAPKKLHASLNEYITWLKHELKQLECAIDDFVNDDPDFKEKSDLLVEVQGVGKKTAAKLIADVPELGDCDRKQIAALGVAPYNRDSGRKTGQRYISGGRPDVRSILYMATLTATRYNPVIRAMYQRLPKVGKKKKVAIVACMRKLLTILNAIIRDRSHWNLAFSA

SEQ ID NO: 48875 - protein, 353 aa, unidentified
MKQYIGCDAHARYSVFVSVDETGRIGPPVRVDHLGRGLRDYLQGLEKETPVAVEASGGWYWFMDELEAAGLDARLVNPLEAKRRIGGRNKTDRLDARGLAILLRNGTLPEVWIPPAELRDLRGLMRARLAFRSHTTVLKNRIHAALKRYGTLDAEGASDLFAKKQRLRLSLAIGRLPEETRRASLHEWELLDEVERHIGELEVRIRERIGCVGWVRLLKSLPGVGEILGATIHLEIGDVNRFPTAAHLASYAGLVPTVHASGGKSFHGPTSKQANHYLRWAFVEAADCILMHRQRYAGHHALLLYDRVKANKCHGKAAVAVARHLAEASWWILRKREKYRQPHAAVESSSKNG

SEQ ID NO: 48876 - protein, 402 aa, unidentified
MNSVGIDISKGRSTIAVMRPFGEIVISPFEVRHTDSELSELARRLKSLNGETRVVMEATGNYHAPVAKLLHDAGLYVSVVNAKLVHGYGNNDLRRVKTDRKDAVKLANYGLDRWLTLPRYVPEENTRLLLKNCYRQYRQYSKVQTVLKNNLISLLDMTFPNANRLFVSPARADGSEKWVDFVAEFWHCECVSERSLKSFVNKYWRWCRKHGYNFSEEKAHAIYDEASGHIGVMPKSETTKLLVEQAVSQLSATSAALAALKQEMQSLPSQLPEYPVVMGMFGVGPILGPQLIAEIGDVRRFYSKKALVAYAGIDAPPNDSGDVIGRHKSMSKVGASSLRRTLFLIMSAYLQNSPPNEPVYQFMDRKRSEGKPYRVYMMASANKFLRIYYATVKAYLETLEQF

SEQ ID NO: 48877 - protein, 365 aa, unidentified
MQKISTMRTSGKNIFKGKLTIGLDLGDRSSAYCVLNETGEIVFEHKLATTPEAMKQVFGSMPRCRIAMETGTHSPWVSRLLTALGHEVIVGHAQKVRLITKSRRKDDRLDARTLARLARIDPELLSPVKHRSAQAQLHLTEIRARAVLVSARTALVNAARGLVKSYGERLRKCGTQQFSWETTSGLSTGLREALEPLLREVESLNERIQEYDRRIEKMAKQTYPETALLKQVKGVGDLIATTYVLTIEDPHRFRKSRDAGCFVGLQPGRRNSGESEPQMRISKEGDEYLRTLLVQGAHYILGPFGKDSDLRRWGQKLSARGGKNAKKRAVVAVARKLAVLLHRLWVSGEAYEPLRNSQKAMSTAA

SEQ ID NO: 48878 - protein, 372 aa, unidentified
MLGWTAPLPRVGCLITRSAARFEQQEVDMTITVIGLDLAKNVFQVHGIDENGRVVLRRKIRRSDVLPLFCKLAPALVGMEACHTSHYWAREIAKFGHDVRMMPAQFVKPYVKSQKNDAADAEAICEAVQRPTMRFVPVKSENQQAALMLHRTRDLLVRQRSSLISSIRAHFAEFGIVVGQGIRNVERLLALLGAEGDKRLPALAAEMLCVLAEQLREIAGRVREVEIKLLAWHRTNPASRRLESIPGIGPITASAIIATVADPRQFKSGRQFAAWLGLVPQQRSSGGKERLGGISKRGDGYIRRLLVHGARAIVGWRKRSATHVTPWIARLLERRPMNVATVAYANKLARIAWAIMSHEDRYNPARAFAGVA

SEQ ID NO: 48879 - protein, 354 aa, unidentified
MSQQLSTTIAVIGVDIGKNSFHVVGLDQRGAIVLRQKWSRGQVEPRFANMPPCLIGMEACVGAHHLSRKLKGLGHDARLMPAKYVRPYSKGQKNDFRDAEAIAEAVQRPTMKFVATKTADQLDLQALHRVRERLVSQRTGIINQIRAFLLERGVAVRQGQRFLRLELPRILAAPPDVLSPRMVRVIEDLAGDWRRLDERIEGLSGEIEAIARQDAGCERLMSVPGIGPIISSAMVAAIGAGDAFAKGRDFAAWLGLVPKQISTGDRTILGKISKRGNRYLRVLFVQAAWVVLIKPKSWERHGLKPWLEAAKKRLHHNVLAIALANKLARIAWAVLSKEREFEYARTDEMTSPSA

SEQ ID NO: 48880 - protein, 363 aa, unidentified
MTMTNVICVGCDSHEKTLVNMIGVNREAGQQWSVANTQRGRQRLIARLKEKADEIGGAEIVFGYEASSQGFVLHDELKAAGIECIVLAPTKIERSSKQKRNKNDKFDGQHILNIIRSHVLAGTELPAIWVPDAQTRDDRETVRMRHDVTEKQTVIKTQIQMLLKRHSIEKPVEVGKSGTKSYRRWLKAMSESQPGAGFRSALQSLIRQLEFSEAELRRLDQDVNQLYEMPHLKPVVEALDQEVGVGRLAAVTYAVEVGDFGRFRRRQQIGAYWGLTPSSNESGEVDDRKGHITHQGSARVRRMLCQSGWSRAKHDPGERAAYQRLVEKNPKRKKIAMVAIMRRLAIRLWHVGRKAQLEMTKAA

SEQ ID NO: 48881 - protein, 324 aa, unidentified
MNKSTIYLGIDISKSVFDVFVSSGEFYQFENNKVGFKKFLKILNEDCHCVMEATGYYHQQLAYYLFEKGIAVSVENRLSVKRFGQMQLSKVKTDKADAKLICMYAQNVELKPWEGESKSLRECLQIIRLIDSYFKQSTALKNKIHGEKTLGNPSSNVVRSLKRSLKSLQKEIKQLEDKLTELVKQDHQELLTKIETIPGIGRRTASMLIVLTSGFTRFEKASQLCSFAGITPIIRESGSSIRGKARISKMGNQKLRNLLFLCSFTACQHNKACREIYERLVAKGKPKKVALMAVCNKLLKQAFAITESGLVYDENFRSQKPELI

SEQ ID NO: 48882 - protein, 341 aa, unidentified
MAEVCTIGLDLAKHVFQAHGADASGAVLFRKKLRRAQVLSFFATQPPGTVAMEACGSAHHWAREIGKLGHAVRLIPPAYVKPFVKRQKNDAADAQAICEAAQRPTMRFVAPKSEQAQAAALVFRARDLLVRQRTQIINALRGHLAEFGIVVAQGPAHVSSLVRAVEDPAEPVPEIARAILSVLIEMLHRLDGRISLLDREIAQRAKEDVTARRLMTIPGVGPITATALTALAPPAETFKRGRDFAAWIGLTPLQHSTGGKQKLGATSKMGERTLRRLLIIGASAVLRWAARHGAPAGSWLSRMLARKPPMLVRVALANKMARMVWALMAKGGVYRAPAVSV

SEQ ID NO: 48883 - protein, 326 aa, unidentified
MHILGSDLAKKTFDVTLLTPTGARHHHTFPNTPAGFRELWRWARAHAARSVRACMEATNGYWEALAQYLVEQDATVHVVNPARIKGYAMSQMLRNKTDKQDSATIAAFCAAHDLTAWVPPTAAQRKLRALLRHRDDLIASRIQQTNRLEDTTDPDVRASLSTVVATIECQLRAIQQQITAHLHAHAELREQHDLMDAVPGIGPVTAQKLVAEFSDLASYTSAKAVGADAGLTPANYESGTSVRRQPRLSKMGKASVRAALYMPAITVMSRNTEFKAFAARLAARGKSYGVILGAVMRKLLHIIYGVVKHKAPYDPQKVLGSAASTT

SEQ ID NO: 48884 - protein, 392 aa, unidentified
MDKAWVGVDAGKEFHWAHVLDASGRELLSRRVENDEADIARLIQDEALLLAEEIVWAVDQPGGSVALLLALLWERNQRVLYVPGLTVDRARDAYRGESKTDARDAHVIADQARMRPDLGELEPGEEEIAELQLLLARRRDLITDQSRTITRLREALLSLFPALERALDLNSKGPLTLLTHYQTPAQLRRAGHKRIATYLRNRSVKGSNKVAHKALSAAKAQSVTLPAQEVASRIVAELAAEILALKERIESIDEEIGQRFFARPEARILISLPGMGPTLGAEFLVAVGDVSAFESADRLAAYAGLVPVARDSGKRVGNNKRMRGGNKTLKRVFYQSAFSSLRSTPESRIFYERKRAEGKRHTQALIALARRRVNVLWAMLRDGTTFESRSAA

SEQ ID NO: 48885 - protein, 342 aa, unidentified
MNLPVRIGMDTSKSVFQLHGVDENEVVVVRRQFRRAEMIRYFERLPPVLVAIESCGSSHHWARLLQSFGHEVKLIPPQYVKAYVKRGKNDAADAEALCEAVTRPSMRFVPVKSKEQQAACMLMTVRERLVSVKSQLSNAFRSYAAEFGIVGPAGRQNVTALIKRVLEDDSLPEMARDLFRLQAEEYAAVQARLAKIEAKLMKWHREDDVSRRIATIPGVGPIGSSMLSMKAPPPETFRSGRDFAAWLGLTPKDHSTGGRQRHGGITKAGDSALRSTLIVGATALLRHIRKGRHKPTPWLASLLERKPPKLVAVALANKFARIAWRLMISGGVYNRPVAATPI

SEQ ID NO: 48886 - protein, 415 aa, unidentified
MESSSNTEFAAFVGIDWADRKHDVCLQAAGSGKRERSVLPHRPESIAQWAQGLAQRFGGRLIAVCLEIAKGPLVYALQRYPFLVLFPVNPTTLAKYRETFCVSGAKDDPTDAEFALELLLTHPERLTRLHPQSAPMRVLQQLVEQRRALVDDVRRTTNRITDALKQYFPQALEWFADKDTVVFCDFLTRWPTLKHAQRARQARLRAFFQEHNVRYPHIIEQRIQAILAASALTSDLAVIEPNRLLVEALVQQLRVLLSAVQRFDREIAELAPTLPDYALFNSFPGAGPVFAPRLLAAFGEQRERYPTPAEVQKYTGIAPVTERSGNKCWVHWRLQCPKFLRQTFVEWAALSIPHCFWAKAFYEQQRARGSSHQAALRALAFKWIRILHCCWQDRTPYDEAKYLNALKRRGSPLLN

SEQ ID NO: 48887 - protein, 315 aa, unidentified
MVNVPCFIGIDVAKAQLDIAIRPSGERWAVPNDASGVTMLVDRVQALQPTLIVLEATGGLERAATGALATAGLPVVVVNPRQARDCARATGQLAKTDALDARALAHFADVIRPTPRPLPDAQTQELRALLGRRQQLIGMRTAEQNRLAWTSERLTQDIKAHIAWLNTRIATLDDDLETMLRASPLWRENDDLLQSVPGIGPVCARTFLLELPELGTLTRQQIAALVGVAPLNCDSGTLRGRRTIWGGRAHVRTVLYMGTLVATRFNPQIKAFYQRLLAAGKIKKVALTACMHKLLTMLNAMLKHRTSWQAQEVQN

SEQ ID NO: 48888 - protein, 422 aa, unidentified
MLAKTQDNEEIIERVAALDIGKAELVCCVRVPDEDHRGRRLQEVESYSTMTRSLLGMADRLACLGVRRVVMEATSDYWKPVFYLLEAAGFETWLVNAKDVKHLPGRPKTDKLDCIWLCKVAERQMIRPSFVPPPEFRRLRDLTRYRADLVAARTAEKNRVEKLLEDAQIKLSVVVSDIFGVSGRDMLAALVAGERSPTVLAQLARRTMRRKITVLEEAFTGYFTDHHAFLLGRMLARVDAISGDIAGLDARIEEQIAPFVATVARLDEVPGINLAAAHAILAETGLDMARFPTAGHLVSWAKYAPGVKESAGKKKGKNSTGHGNPYLARVLGNAAAATARTDTFLGERYRRIARRRGAKKANVAVGRSILVIIWHLLSDPDARFHDLGSGFYAARIDPERRRRNHIRQLEALGYNVTLEPAA

SEQ ID NO: 48889 - protein, 348 aa, unidentified
MRFYNRQHRHYCGIDLHVKTMYVCILDATGQVLVHRNVDSTPEAFLATIAPYRDDLVVAAECMFTWYWLADLCAVEGIAFVLGHALAMKAIHGGKAKNDKIDSYKIASLLRGGLLPQAYVYPAAMRSTRDLLRRRLHLVRKRGQLLAHIQNTRAQYNLPAFKRRLAYPANRDGIREHFADPSVRKSVDVDLALIDQYDGLINDLEVTLVRDAKRHDADTFHRLRTVPGIGKILALTILYEIHDIRRFDRVQEFASYARLVKGQKQSGGKMLGTSGAKMGNVHLKWAFSEAAVLFLCHNAEGKRLLAQIQKKHGKGKALSILAHKIGRAVYYMLARGTVFSMEKFLHAA

SEQ ID NO: 48890 - protein, 370 aa, unidentified
MSVRRILAKTINTDLEYEAIGIDLAKNCVSVALLTTNGEVVCIDRLDYSELEKSAQVLCPTTFAMEPCTEMNYLVQKLEAWGHRCLVIGGKNVQNYVENHYSGQKTDLNDAQALAFLAQDTQLRTIKAKDMEQRKYASLTTLREQYIKQYRQTIVSLKGICQAWGLNISKGISGKARLKDLIENHAAFPEELKESLVDMVTHAQTAQKALNKITKTLELLAKNDKVCQLIQTIPGLGPICSCRLRATIGDIQRFKNLKDFPAYYGLVPRSIATGHNEKKGRITHRGDKTMRSLMVQGAGSVVNMATKGKLKSKQLTKWILKKQKEKMPWGKLVCAVAAKLLRIVRAVLISRKPYNPKIAGVAKCSLPKGT

SEQ ID NO: 48891 - protein, 311 aa, unidentified
MGIDVFVGVDVSKDRLDVYLSPSGESFAVTRDGNGVEELIERLGGLGQVMIGVEATGGFETVVTAGLAGAGLMVAVVNPAQVRAFAQALGQRAKTDPIDARVIAAFVQAVRPQVRPLPDDEQRLLSDLVSRRRQIVQMISAECQRQKRAVEPRLKKSLTRLITALEKELAEVNSEIDDSLRGSPIWRAKEDLLVTVPGVGSTIARTLIAEMPELGQLDRKQIAALAGLAPWTRQSGKWKGRSMIGGGRASVRAALFVAAMVAARWNPVLKDFHQRLIIAGKPKMVALVAVARKLLTVLNAMIRDNKPWLAA

SEQ ID NO: 48892 - protein, 412 aa, unidentified
MEVIVDRCAGLDVHKDQVTACVRSWAGDRRRRSETRTFLTFEASLRDLRDWLIGERVSGVVMEATGVYWKPVWYMLEDAGFELLLVNPHHVKAITGRKTDVRDAAWLAQLLECGLLSGSFVPPRPIRELRDVTRYRRRLVEDHGREELRLQKLLQDAQVKLDSVVTDINGVSARLILNALCDGERDPVVLADLAQRRLRVKIPQLRQAVPGRFNDHHAVLVRELLAHLDYLDAAIARLDARVDELMGPFVAARDRLMTIPGIKKRTAEIVIAEIGVDMGRFPTPAQLASWAGVCPGNNESAGKRRHGRTRHGDPWLASALIEAAWGAARTRGTSMQVRFWRIAKRRGTEKAAMAVAHHLLIVVWHLLADEITYQEMGPDYTTRFDDPGRRQRQLVHQLEQLGLKVTVQPAAA

SEQ ID NO: 48893 - protein, 390 aa, unidentified
MEEVRHDQHGNTAVFVTGGVDTHGHTHHAAVLDCIGRQLGDREFPTSPAGYRALLQWMSGHGVVDRVGVEGTGTYGVGLARHLREAGVHVVEVDRPDRRARRAQGKSDPLDAYSAARAALSGRASVVPKVRDGKVEAIRAIRVARSSAVKARTQATNQLKALIVTGSPGFRQQLRHLSTPLIIAHCARLRPSPDLGDPEQATKTALRRLARRHQQLTQEITEADRELHQLVRDVAPALLDLPGVGSEVAGQVLISIGDNADRLKSEAAFAHLCGAAPIPASSGRTHRHRLNRGGDRSANNALYVVVLGRMRHHARTRAYVERRTHEGLAKPEIIRCLKRYVAREIYNTLNLTTPTKKPEQLTCQTIGVRFPRFPGGSRSWSDWAKGGAEL

SEQ ID NO: 48894 - protein, 345 aa, unidentified
MEMTTIGLDIAKRVFQAHGVDASGKAVLRRKLGRAEVLGFFKGLSPCLVGIEACGTAHHWAREIRALGHEVRLMPASYVKPYVKRGKTDAADAEAICEAVTRPTMRFVPIKSAEQQAVLMLHRTRELLVRQRTMLVNALRGHMAELGIIAPQGIARVADLLVVLMGEDEARLPTLARLALRGLAAELDAVGRRVKEVEAAILAWHKDDEASRRLATIPGIGPITASAIVATITDPTQFHSARQLAAWIGLVPRQNSSGGKQRQGGISRQGDRTLRQLLVLGATAVIRHARTKNTPDTAWLRGVLDRRPARLASVAQANKTARIVWAVLVRGGSYRAPATAQAVAA

SEQ ID NO: 48895 - protein, 341 aa, unidentified
MQIATIGLDIAKNVFQVHGIDAAERVVIRKQLRRRQVLEFFKALPPCLVGMEACATAHYWARELMKLGHLVRLMPAKDVKAYVKRNKNDAADAEAICEAVRRPTMRFVGVKSAEQQGRLMQHRTRDLLLRQRTQVINALRAHLAELGIVAAQGREGLKQLLKIIADEKDARLPIDARASLIVLAAQLQALHTMIGSIEKRLTVQHRANEASKRLESVPGIGIIGASAIAATVTDPNAFQSGRDFAAWIGLVPRQDSTGGKQKLGPISKQGDRYLRRILVVGAHSVLRRAKQNPEKYPWLTKLLARRPFKVVAIALANKMARIAWALLASGGHYRPRLAAAA

SEQ ID NO: 48896 - protein, 340 aa, unidentified
MTIIIGIDPHKATHTAVAIGSDESELATVTVRATRQQTDKLLSWAEPFEERTWAIESAGGLGYLLAQQLVSVGEQVLDVPATLASRVRVLGSGRSNKNDPNDARSVAIAALRSPGLRSVSIADHAEVLRLLAKRNGDIGDHRTQVVCRLHALIAALEAGGIAKELNASDANGLLGSFEPSSPAEHTRHQLALELLADVRHLDGQLAESKQRIKVAVSASGTSLTEVFGIGPVIACALLGYTGDVSRFASRDQFAAYNGTAPIEVSSGGRVAHRLSRRGNRNINHAIHMAAICQIRHTHSDGRAYFDRKVAEGKTKREPIRSLKRQISNTVYRHLVLDAAK

SEQ ID NO: 48897 - protein, 475 aa, unidentified
MNLKGTKKKNQVSNANIFEQQELLKKIEVVRENLTASTWHELETKGKFDKNAKLSFICDDMLILGCDVGSETHYLRAIDTRGRELSKSAFSFSNNVDGFSKAKEWAVKIAAEYDKKQIVLGLEPTGHYWFCLATWMISNGISVVQVNPYAVKQTKELEDNSQLKDDAKDPKLIANLVKDGNFGMPYLPEQLYADLRRLSMFRDQLNEDRIRSINRLHRELKIYFPEYKEALGKTEGTFSLELLKQAPFPDDLAALKEDGIRQIWHNAKLRGRGYSRAGEILEYAKASVGIREGKETGKLVVQWFVQKILELDEELALIETQINQKCLEIPHTDKVLEICGIGENTLSGMMAEMGDISRFDDVKETQKLSGLGLVASSSGKHKGETRISHRGRKRLRYWLFQAAKSAVAHAEEFKELHVYYTTREQNPLKKMQSLIAIACKLLRIIFTILKKGIKYDPRKMLKDIRRKSRQESLAA

SEQ ID NO: 48898 - protein, 320 aa, unidentified
MMAQNGLVVAGIDIAKDKADVCIRALSQRQTFPSTAEGRRQLISWLRKHKVTKTVMEASGGYEREWAEALREKDIEVRIVDPKRVRHFAQSAGRLAKNDVIDSDTIAWFAEIFGEAPSQAHDAAREKLQQMVNARQGLLDMKTMLSNKGEHDVPEPVQKSHARLLKTIAVELANLEAAITATIKATPHFAARAEIIESVPGLAGTTSAGLIAAMPELGQVSNEAISALLGVAPYDDDSGKRQGGRQIKGGRRKVRNLFYMACLGAATRHNPALKAFYRRLIAKGKKAKVALVACMRKLIVILNIMIARGEKWDASRYAVD

SEQ ID NO: 48899 - protein, 420 aa, unidentified
MPIATCGIDWAQDHHDVAIVDTDGQLLAKRRIPESIAGFTELTAMLAEAGDNSSDPIPVAIETPRGLLVAVLRASGRPVYPINPMSVARYRERTSMSGKKSDHGDAVTLANILRTDADQHRRLAADTELAQSITVLARAHQDATWRRTRASNELRSLLREYFPGFLHTFADRPGAISSAEARAVLAIAPTPAKAARLTKPQIVAALRRAGRHRGMTSLAATIQQRLRTPQLRHPTLVEDAFGIQALAVLATLDAEYDSVDRLGEATAAACNEDPDHQIITSFIGLADLTGARLLAEIGDDRTRFADARALKVFAGSAPVTKASGRSIRITHRHVKYNRLAAVGFVWAFVASGCQGPTRAHYLARRDHGDRHPAALRHLYNRMLGQLYHCLQTAKPTTRSRPTDHPHASRTSRRLTLNKSA

SEQ ID NO: 48900 - protein, 343 aa, unidentified
MEHYAGIDVSLERSSVCVVDATGRIVREAKVASEPEALVGFFRRLGLPLARVGLEAGPLSQWLHAGLAGAGFEAVLLETRQVKAALSAMIVKTDRKDARGIAQLLRMGWYRPVHRKSPPAQEVRALLVGRKLLQGKLLDVELSIRGLLRGFGLKLGEVSKGRFAVRVRELVAGQPTLERVIGPMLRAREALRSEYLALHRAVLAIVREDAVCRRLMSVPGVGALVALTFASAVDDPARFRRSRDVGAHFGLTPKRYQSGETDVTGGISKVGDAMVRAALYEAANVMLTRAGRFSTLKRWALEVAKRRGARRAKVALARKLATVLHRLWADGSEFRFGKEAAAA

SEQ ID NO: 48901 - protein, 374 aa, unidentified
MKNVSIFVGLDVHKESIDIALVDGDRHSVVRYFGTIGGGLADLEKAVKKIKKAHPEVSLHFVYEAGPCGYGIYRYLTKAGHECMVVAPSMIPKRSGNRIKTDRRDSIMLASLHRAGELEAVYVPREEDEAMRDLVRARQDAVKAGRVSKQQLKGFLLRHGIKFTGKGDWKQTHMVWLAGLAMPIPAQQIVLQEYINTVKDCTSRIARLTSQIQDVLPSWELAPVVRALQAMRGVSLQVSVTTVAELGDLKRFDNPRKLMSYLGLVPSEHSSGGSRRTGSITKAGNGHVRKALVEAAHTYRLKARIGKELLARQEGLPKQICDIAWKAQVRLCSRFRKMEARGKKHQTIICAIARELCAFMWAIAKEVKPITACI

SEQ ID NO: 48902 - protein, 418 aa, unidentified
MSRRLLSRPLGRCIGLDVHLDFIVIAICEEGKVWSAGRVPSTPEGIATLIESLLPSDRVVLEVTGSSREIARLLEPHVSKVIVVSPGDTGISQARAKTDRLDARTLAKLLWTGELEAVWMPPEWTSRMRRRLSRRQQLVWARSRAKNEIHAVLMRRLKGRPPVSDLFGVKGLKWLRGLQLPVEEDETVKACLRHIEFLDSEIEQVERLIATEALQSPQIKRLMTVPGVNVICAAIFLAAVGDIHRFKSSRPLVAYLGLDPRVYQSGSGPARGGRISKQGSPQARWALVEAARSVTQQPGPLHAFYERIRARKGHNAAVVAVARKLAVLFWCMLTREEDYAHQQPSLTAQKLRRLEVRAGAPTLEGKPTGVWATRERMRQAEKQLAAQAEASYKRSIADWQATKPKKAKAGASVTPERA

SEQ ID NO: 48903 - protein, 411 aa, unidentified
MHYKQKHIYVGIDLHKKTHTAVVINCWNEKLGEIQFENKPAAFDELVAYVKQFKKRGMTPVYGLEDVGGYGRSLAVYLIENKQIVKEVNSALSYAERKSYPTTHKSDSWDADCVGKILLNKLDMLPDANPQDIYWTIGQLVTRRYGLVKAGIALKNQLHQQLSYHYPSYQKFFSDIDGKCALAFWQAYPSPHKLDGTTVEQLAIFLQKASNNACSTRKAEEIQSLVQADGDTKRTYQEQRDFLIQSHVRDLKFKKEEMAFVEDELRLMMKRLDYQLETIPGIEVVTAAYLVAEIGDVRRFSSADKLARFAGIAPVIFSSAGKGSNQKSKQGNRVLHGLFYNLAVQQVQVSKGSKIARNPVFLEYYKRKLAEGKTKGQALVCIMRRLVNIIYGMLKNKTAYKLPEVVEKQAV

SEQ ID NO: 48904 - protein, 368 aa, unidentified
MKDVTTYVGIDAHKKDLFIAMLVGTQATPLTWTVANEPNAIRRLVRKLEREAPGPVRSCYEAGPCGYALQRRMTTTRVVCQVIAPALIPRKPGERIKTNPRDARKLAELLRAGLLTEVQPPTPEEEAVRDLCRARDDAREDLQRSHHRLGKLLLRRGLHYSGRNWTRAHRQWIDRLEWVHAPERVVVDDYLLAIDHLEARLIELDARLTAIAATEPYREPVAWLRCFRGIDTLTAILILAELHDFRRFQSPRALMAYVGLVPGEDSSGETHRRGRITRTGNALVRRLLVETAWHYQHRPSVGVALTRRRKGQPTRVIAIADKAQQRLCRRFRRLAEQHKPAPKIAVAIARELAGFLWAALQPAPTSAS

SEQ ID NO: 48905 - protein, 365 aa, unidentified
MKIIRQCVGIDCSKDTLDVAISFLDETFHQQVFSTQVFENNEKGFKRLTKWIKKNCHQDLLYQTVVEATGVYHERLAYALTEQGFPIAVVLPNKIRNYCRSTDVRTITDKISAMQIAEFGLVKKLNNWTPPDKVYAQLKGLCRERVQLLATKNSTGNQLHAYRHAATDSHGTAKRAAHRIKLIDAQIQQIENEIEKVVNEHSLLKEKIKKICTVKGLGLVTVATVIAETNGFNLIRNCRQLACYAGYDVVQKQSGISVNKKPHISHKGNKYIRRALYLPAFTAVKHDERMEKLYNRLFDRQKIKMKSYVAVQRKLLLLIYTLWKKNEVYNHLQQLHSINNLEQQKNAALTELVYDRSMDYAHMQI

SEQ ID NO: 48906 - protein, 355 aa, unidentified
MSKKSVVCSANINTKTTNANANTGANTGLSATCFIGFDVAKSKLDWSFINAQGIEQDYGTLPNKVDDIRELLFTLTGLYDNETFNCSVEATSTYHFPLLEACRLLNNLPCLVYNPILTKQQINGSVRGKKTDRSDAFLVARVGWSGGGRLHVPEPYMITKYYARSCQKLSAIGGSFQRYKNHFTELLDGKLTPDTIKALDNIQRSIKEAKKQMCKELVESAKGETFTRLQTIPGIGEYVAGSIIGELQDVSRFPKSKHLVAYAGLDTKIRQSGNALNSTGKLTKRGSSYLRHSLFIAANVARQHDEQFRGMYDKKRAEGKTYKEATCAVSRKMLKVVRSVWLNEKDYELPEEHKK

SEQ ID NO: 48907 - protein, 467 aa, unidentified
MSHRRLVGIDLGIATAHTVRVLDGEGIVVAKRRAWPTADSLAAVEAAALAGCPEDTRLEVVIEPTGPAWPPIAVFFCARGHQVFRVSSQKAADLRRFLSRHAKSNGIDADTLARLPLFDPAGLRPLQLPGAERAALDRRVRAADRLTQAGADHKRRIKDLVRQLLPASPLTGELGMADLAVLERYADPHALIRLGMTRLTALITKASHHQQGAERALQWQQAAQASLALYDSHPAIDFAGLAAEVATEVRLLRATCAELAAHAAEREARYQAVDPAGLARSLPGIAEVGGPALAACMGDPARFATGKKFRSFTGLTPKASETGQTDRKGQPMSKAGSSLLRTTLVRAADTARKQDPQLARIYYLQMTERGKDHLGALCVVAAALAERAWTVMRRGTPYVICDTGGQPVTPQQASTIIARDWTVPPEVRARRRSKKTGKAPRKSSKDSANGAASPAAPLHLVTGGPSS

SEQ ID NO: 48908 - protein, 416 aa, unidentified
MKKGQNTRGYQRYMALDIHREYLLVGAWNEEKEWVLTPRRVSIEKFPEWAKKNIRTGDIVVLETTTNVWTIYDIVAPLASRVLVANAAEVSEIANARVKTDKEDIKRLLKLLVGGIVPEVWVPPMHVRELRAFTSYRARLVKTSTMIRNRLQSLLHKHNLMLSEAGLLDQTWWESQKNISSLEKLQIRQELTLLQEVEKLKAAVDEELQRQSTSAMWGKPALQLMQLPGVGYIVAMTVLAAVGDISRFENASKLVGYAGLGAGVHDSGKTHKEKKITKKGRRELRWAMVEAAWRAVGMSPFWKAEYEKYLDRMRKPNQAIVVIARKLLIAIWHVLSKEETDIHATEEDLAYKMLLLSWSLSEDVRLGLTYKQFAKYALMKLGVETDITRFVRRNVPRRLAPREEVLARMTELGLNA

SEQ ID NO: 48909 - protein, 348 aa, unidentified
MKYIGLDCHKQYDHATMIDTETGEVKARKLAHIKEEFREFVGDKTGTRVVIESCRDWSRTYELSKDLVEDIILAHPLKVKAIASAKVKTDAVDSRTLAQLLMADLIPEAHLRKAENRVKQRVIRHRTFMVVMRTRVKSRIHNLVDSQLLSPEALKAKPKNLFSKKGMKWLTSLEWAKEEDNRLVESHLRVMEAINQEISITNDMVKEIYEKDRDAQLLITIPGIGITLGMLISTEIDGIERFHSPSKLCSYAGLVPSTHSSGGKTYHGKITSEGNRWLRWALVEAAVPASYADAEIKERLDTLRKKKGANVAKTAMSRWLLKVVYHVLKERRPYITDYNVMAKAGAAF

SEQ ID NO: 48910 - protein, 424 aa, unidentified
MQIVYRRCGGMDVHKKSVVVCLLLIDEQTGEERKQRRTFGTTTRALLELAAWLKLWGVEVVAMESTGVYWKPVWNVLEEELGADCELMLVNARHFKQVPGRKTDQKDAEWLAELQQHGLVRASFVPPPATRQLRDLTRSRASLMEDHTAVANRLQKLLEESNIKLSSVASNVLGVSGRRMLKELAKGNRNAAELAELAVQRLREKIPQLREALEGRMSAHQQQMLSDYLQQLEFVEQQVEQLDRRIEEHLKATGQMEAVELLDTMPGVNFVVAATVVAELGPDMKQYRTADHASSWAGMCPGNHISAGKRYSGRTNKGNVWLRRALCQAAWAASKSKNTYLAVQHKRWQARRGKKRSIVALGHRMLVIAYTMLKNGTPYRELKPEECKSQNNRPPNPEAVVRRNVRQLNALGYQVTLTSATPPS

SEQ ID NO: 48911 - protein, 320 aa, unidentified
MMTQNDLVVVGIDVAKDKVDACIRTVTERRTFPTTASGRRSLIAWLRKHQVGKAVMEASGGYERVWAKALRQTALEVRIVDPKRVRSFAESAGRLAKNDRIDAEMIAWFAETFSEAPSQVEDPAHEEIKALVKGRKSLIDLRTRLEMQKEHEVPALVGKAHARLLKKLASEIAAIETAIGAKIKATPAFAVRAEIIQSVPGFAEATALTLLAGLPELGQVSNEVAAALVGVAPYDDDSGKRHGQRCIKGGRRWVRNALYMPCVGAATLNNPVFKAFYQRLIAKGKEPKAALIACMRKLIVILNTMIARGEKWDPKRYQVA

SEQ ID NO: 48912 - protein, 484 aa, unidentified
MTGKHFKLSGKPAGFTIAAGIDVHKYKLQVFILGRLGREDKPLGEQTFGNDATGRTELCRYLQSYYPDELVMEKTGKLSNPVLDALTKHRGWKQGVPRISIVPPDAIKRFPGEKHTDPNSALKLAMLGISGLMNAMPIPSEAGQRLKLLTRESEGYTSQSTAIINAIKDMLAGLGYTLPDFTLTSTWGLALLKLLLADGIDGNIARVYELLEGGHLNLHSSSKKALLDRKAKYLQYSYLSISHFDARYLKRQLFALEMVEALKASNTEQLEDTVNETPLVKSRVQAIEHVGGISSPGAAGIIAEVDDIGRFMSWKQFALYAGRAVAPDESGEHVGKPHMTKRCNHHLKRIFKQAGLTACFKLQEDSDIKRYALRQLGKHPRVPMVACANTSAKIVKIVYKILHDNVIYDPFHDIMNKNGNSPLSNPTSIDEKAFRLSEARKRANRFRKFTRQTLEDLPPGEMKSMLTRVLEILDKALDTTGVKK

SEQ ID NO: 48913 - protein, 337 aa, unidentified
MDIKVIGLDLAKNVFQVHGMSGSGQPLLRRQLKRREVREFFTKLPPVLVGMEACGGAHYWGREIESLGHRVKLMNPKYVKPYVKTNKDDRADAAAIAEAATRASVPQVPMKQAWQQDLQSVHRVRSQLMRERVAVGNEIRGLLGEYGIVVAKGVSALKRAVPEILEDGQNGLSGLMRGLIAGQYARWGVLDLQIGEVTHKLEHLAREHEGCSRLMEVPGIGVLGASALVAQANDARHLKNGRELAARQGLVPRHCGTGGKERIGHISKCGDGYVRTLLVHGARCVLRHAPKKTDRLSRWALEVSRRRGPNIAAVALANKMARIAWVLLARGERYQPQ

SEQ ID NO: 48914 - protein, 343 aa, unidentified
MRLFVGLDVSLEKTAVCVLNEHGRIVKEAEVASEPEALARWIATQPGSIAAVGLEAGPLSQWLHRGLSTAGLDVVLMETRQVKGALKAMPIKTDRRDAEGIARLLHLGWFRPVHCKSVSAQEVRALLSARKAVQQSMISLEMSLRGLLRNFGLKVGAISRGRFECRIRELAAGNAMLEAATEPMLRGRAALRRELAEFERRVRGLAQGDEVCRRLMSMPGIGAVVALTFRSAVDDPARFTSSRKVGPWAGLTPSRNQSGERDVSGHITKAGDANLRRALCQAATVMMNRGPSTWLRTWAVQVARRRGRKCAMVALARRIAVVLHRMWRDGTVFQAEAPISHAA

SEQ ID NO: 48915 - protein, 454 aa, unidentified
MAQGNGLTRGDRNRNQRIEALRQVVRRDRAVLAVDLGEDKQAAVLVDHEGRVLARKIVKAKVFELGGLLAWAADRAVAAGFAGLAVACEPTGHRWKALMGLADAAGHGFVCVQSLAVARAREGDDYTRDKTDHRDAYLIGKLVIRLDCYLPERADETWARLRHLGARRFALVADVISCRQQVSDLLACAWPAALAVAARPLESTTWLAALGMITDRCNGDPARLRKMGYGKFLAAIRRELPRWGAKKACHKIVKGLWEALTDAAGVRAQRRGALERVHLLMTDWRSLLARLADTEGRMIDALDELGLTELVTSIDGLSAVGAAVILAETGDLSRFASARSVVKHAGLNPAENTSATLTGKTRISRRGRPGLRVAAWRAVWVGMRHNRVLRARYAHLTGRQDGNRLSGGQARVACAASLLRWLYAVVTTRQTWDARIAAGTIPARPGTAAITAAA

SEQ ID NO: 48916 - protein, 341 aa, unidentified
MLIIGCDYHPSVQQIAWVDTATGECGERRLTHCGEAEQFYRDLKQKGVRVRVGMEAWGHSRWFERLLAELELELWIGDPAQIRAKQVRKQKNDRRDAEHVLKLMLEDHFPRLWVPTPENRDVRQLVLHRHRLVQMRTRVMNQLHAIAMNEGVRRKRGLWTQQGRAQLEALSLPGWTSRRRQELLELLDRFNPTIEELTEAIEHEAQRRPEVERLQTHPGVGPITALAYVLVLGTPERFACGKQVGSYLGLIPCEDSSADRWRLGHISKQGNALLRYLLVQSAMSAARVEDDWRRKYVHLAMRRHHAIAKVAMARKLAVRLFWMWRRGWDYQQLQQFGSHVG

SEQ ID NO: 48917 - protein, 344 aa, unidentified
MEITTVGLDLAKNVFQVHAINSASEVVVKKTLRRVQMRRFFEQLDPYLVGIEACGTSHYWAREITKLGHEVRLMPPAYVKPYVKRGKTDAGDAEAICEAVRRPTMRYVAIKAPEQQAALALHRTRDLFVKQRTQLVNMIRSLLAEFGIEIRRGIEQALMLAKRIAAHEVPDIPPLAAKVIAALAGQVLDLQARLGEIERELLVWHRSNDIAKRLATIPGIGTVCATALAASVTDPHQFRSGRQFAAWLGLTPLQHSSGGKERLGRISKMGDKYLRRLLVVGMTSLIRRAKYKPEAVDPWLADLLSRKPARLVTVALANKAARVVWALMVRGGVYRMPAGVTTPV

SEQ ID NO: 48918 - protein, 370 aa, unidentified
MATTVRYVGLDVHKASITIAVAEPDRAPAQLYTTVPNDWPQLRKALTRLSPTLSALRCCYEAGSIGYHLVRRMNKAGIDCMVVAPSLVPTQSGNRIKTDRRDAKKLAHFLRSGDLVSVYVPDDECEALRDLERAREDAVRAQRVARQHLQNFLLRQGRPYHSTQWTWDHLDWIRKQKFDNPMRRQVLCDYIKVTEDAGARLKQVTADLEQHAQQTRLWPLIKALQAFRGIRLVTAASVVAEIADFRRFESARKFMAYLGLVPSEHSSGDSNRRGRITRCGNRWVRTLLVESAWHYRFPPKMSRQLRARSQGVAPGVQRIAWKAQHRLHRRFYRLTARGKRPQQAIVAVARELAGFLWAVGQEKEFLIDAT

SEQ ID NO: 48919 - protein, 414 aa, unidentified
MDVVHTHCAGLDVHKKTVVAAVSVPDPAGGGHKETRTFSTMTADLLALSDWLSSQGVTHVAMESTGEYWKPVFNILEATIEVVLVNAQHIKAVPGRKTDVNDAEWLAELLKHGLLKASFVPPEGQRDLRELTRYRTTFVRERATLVNRVHKALESANIKLTSVATDVTGVSGRAILAELIQGQASAEAMAGLAKGRLRAKRDELIKALEGRVKPHHRFVLTELLCQIDNLDEAITRFDEQIQAYCRPFEEAVQHLDTIPGIARQTAEIIVAEIGIDMSRFASAAHLAAWAGVAPGNDESAGKRRSGKTRKGDRALGSALNQAAHAAARTKNTYLAAQYHRLAGRRGKKKAIMAVAHSILVIAYHLIQRREDYRELGGDYFDKRRPEATANHLVKRLEALGYTVNIQSQTASVTA

SEQ ID NO: 48920 - protein, 368 aa, unidentified
MGKKSSKLYVGMDVHKESIDIAVAEEGGEVRHHGQISGDMNALWRAVRKLESSGRELVFVYEAGPCGFGIYRGLTGRGHSCWVVAPSNTPRRVRDRIKTDRRDSLKLAGLARAGELTPIYVPDVRDEAMRDLVRAREDAVVMQRQARQRLAALLLRNDVRYAGKTAWTAAHRRWIAELRLPQPAQRLAFEEYVQAVEEASARVQRLSQCIEQELAHWRWRPVVGALQGCRGIQLIHAVRIVAELGDLSRFSHPRQLMGYLGLIPGEDSSGEHRQQGAITKAGNSSARRALVEAAWAYQFSAKVSALIARRQADVPKAALDIAWKAQVRLCARFRRLAARGVNRNKIVVAIARELAGFVWAIAQQVKPV

SEQ ID NO: 48921 - protein, 337 aa, unidentified
MKYSGIDLHSNNSVVTVTDEEDRVMAEKRLPNDLAKILRLLEPWREEIAGVVVESTFNWYWLVDGLQAAGFKVHLANTTAIKKYEGLKHSGDQADARYLAHLLRLGILPTGTILPPEQRAVRDLARKRMQLVRSRTTHILSVENITARQHGARIKCNEVKRLTAETVDQMALPEDVAFAIKTNVAVIATLSKQIDLLEKRLQERITQRPEYELLTSVPGIGRVLATTILLEAGPIDRFAAPGNFASYARCVDSVRTSNGKKKGEGNTKNGNKYLAWAFVEAANFARRYNAEAKRFYERKKARTNNVVAIKALAHKLARACFHILKERKPFDVTRCFA

SEQ ID NO: 48922 - protein, 342 aa, unidentified
MQITTIGLDIAKNVFQVHGIDAKEKIVARKQLRRSQVIAFFKALPPCLIGMEACATAHYWARELVKLGHEVRLMPAKDVKAYVKRNKNDAADAEAICEAVRRPRMRFVQIKSPEQQGQLMQHRTRDVLIRQRTQIINALRAHLAEFGIVAAQGNAGVNELRVIVADERDTRLPIDARASVIVLAAQLEALECVIGAIEKRIKMQHRSNEASQRVETIPGIGVIGATAIVATVADPTIFRSGRDFAAWIGLVPRQDSTGGKQKLGPISKQGDRYLRRILVVGAIAMLRRAQENPGKYPWLTQLLARRPFKVVAVALANKMARTAWALLAHGGTYRAPELAEAA

SEQ ID NO: 48923 - protein, 377 aa, unidentified
MKAPSTRPAAVLGLDVGKSSHWACLIDRDGEVLASAPVRNREAELDALFASAPAGTLVVVDQFRNIGSLAVRRARAAGLGVAYLPGLAASRAAGLFAGEAKTDERDAAVIARTALGVPDSLSGIPGRGEALEAARALSSQRDHVVACATRDKNRLRAVLLESCPALEAAVDLSDRRWLELLAGFGGAWGIARSGAEGPRAEAAGEAAAASTAPPPALVEAENRQVRFLAARISEALDEAGALEAETAALLEGDETYACLLTVPGIGPRTAAQLAVSVDIGRFPDHDHLASYCGIAPRVRSSGTSVRSVRASRRGDARLKSLLIFSCNSLVRSSGRYGEYYRACRARGMGHGRALKAVARKRLRAIYAVMRDRVPYRE

SEQ ID NO: 48924 - protein, 335 aa, unidentified
MDTTGVGGPARPAALHVGIDVSKDKLDLARSDSGAAESFPNDAGGVAGVVRLLAGLGPALASAVVESTGGLERPLLEALLDAGLPAALVHPGRVRHFAKALGVQAKSDPIDARVLMRFGQLASPRLAERRTRGQAELADLVACRRQLTATRTQQLNRRSSTSSKVARRSLDAVIATLDRQVESLDRQIRRLIDADDDFKHLDGLLRSVPGVGPVLSATLAAQLRELGDAGRREAAALAGVAPYDDRSGRRDGPRHIRGGRTALRCVLYMAALSAIRFNPVIKAFATRLRAAGKLKKVVVVACMRKLLTLVNAMVRDGLTWHQLDVVRKLQPTLDR

SEQ ID NO: 48925 - protein, 345 aa, unidentified
MQNMYYIGLDVHKRTISYCVKDGSGTIHAEGTIPATRFDLDRWMKTLPQPWTAAMEATVFTGWIYDHLQPHAAALKVAHPLMLRAIAAAKKKNDRIDASKICDCLRCDFLPECYMASTAIRERRRTLRYRNLLVRQMVQMKNKIGMLLMEAGVSYNKQRLHKAGYFRELLATSPDIDEGLCSLLRLCRETVVRLQKTESALVRSLERDSLLMDRVERLMTIPAVGPITALTWALEVGDVKRFPSIKKAISYCGLCGAEKSSGNTVQRTPLSKQRNKHLQTTLIEAAKMAPRNSPELAMLYDREKQKGNANRATLAVARKLVAYLMAVDRGHRNFQVVETNNCIAA

SEQ ID NO: 48926 - protein, 465 aa, unidentified
MPNTRKKHARLQRPPDPTAGLPPLNRHAAGIDVGSAEHDVAVPPDRSPEPVRRFASVTADLHALADWLHACHIDTVVMESTGVYWIPLFQILEARGFAVHLVNARHAKNLPGRKTDIADCQWLQKLHTFGLLNSSFRPTDDICVLRSYLRQRDTLISAAATCIQHRQKALTEMNVQLANVISDISGVTGLAILRALLAGERDPAMLAAFKDDRIKASTHTIAKSLEGNWREELLFHLRQSLELYECYQQKIAECDTQIEAHLLTFDSKIEGSAPPLPTPKRRPKKARRHEPHVDLHTQLYRISGVDLTRIDGIEVLTAQTLIAEIGLDMSRWKSEKHFASWLGLCPDNRISGGKVLTRGTRDVVNRAADALRLAAQNLLHSKSALGAHYRRLRARLGAPKAITAMAHKLARLVYRMLKFGQQYVDKGIEHYEARFRQQRLQWLQRQARELNLQLVPNQPVPSPVS

SEQ ID NO: 48927 - protein, 369 aa, unidentified
MEEYSEAFVAFDVAKKKHALAIAEGGRTGEVRFVGEVENSPATIERTIKKLGKKYDRLHVCFEAGPTGYGLCRQVRDLGHDCMVVAPALIPKRPGERIKTNRRDAVTLARLHRAGELTAVWVPDVVHEAVRDLVRARGTAADDLRRKRQQLLSFLLYHGRIYEGGGHWTLAHRRWLARESFEHPAQQIVFQEKIDAIEDAAQRLRRLDEELRAVVPTWSMARVVEAYQAMRGASFLVAVIFAAEIGDVRRFDTPPQLMAFLGLVPGERSTGDKVRRSSLTLAGNRRARRALVEAAWTYRYPARVSEALRLRLEGLPKAVRDIAWKAQIRLCARYRRLSAGGKKPPVVVAAIAREMAAFLWAIGREVAPP

SEQ ID NO: 48928 - protein, 372 aa, unidentified
MEERSKVHVGLDVHKDSITVGAAEAGPERGRVVGKTAHDVNKLLKMLTKLGQPEQLHIVYEAGPTGYGLQRALQARGYVCEVIAPSQMPRRPGDRVKTDGRDGVQLAECSRAGQLRAVWVPDPADEAIRDLARAREDAVNSRTKVRQQLKGFLLRHGLRYGGKTSWTIAFYRWLAMLSFEAGASQTAFTEYWLAVQAADERVKRLTQALEASVTGWRFEPVVAALQALRGIDVVSAIGLVAEIGDLSRFDHPRKLMGYLGLVPSEHSSGDWVSRGSITKTGNAHARRLLTEAAWNYRFKARIGRQALRRQETLSEQVRAMAWKAQLRLTKRFAVLLGRGVQANKVCVAVARELAGFVWAIGMAATHEQSAQH

SEQ ID NO: 48929 - protein, 341 aa, unidentified
MQHIAIDLGSKESQICIRTEQGEILHEGKVQTSSLDRYLKRQPQSRIILESCAEAFRIADFALGCEHQVRVVPATLVRSLGVGARGIKTDRRDAQVLSEVSCRIDLPSVHIPTDVARQRRSMCGTREILVASRTSLICCVRGWARTQLLKVRSGESETFTKRVLDAAATTPDGIPEYIERLLTSINSLHEQIAAADKELEQLTEQEPICQLLMSVPGVGPVTSMRFVAAIDDVSRFANAHAVQAYLGLTPGENSSSTRQQRTGITKAGPAPVRRTLMQAAWNIRRLRPMDPISQWAMEIEKRRGKFVATVAVARKLAGILFALWRDGARYEPNHQLRKAAK

SEQ ID NO: 48930 - protein, 411 aa, unidentified
MDKIYDKCCGIDVHKKLIVACFRCGKKQEVREFGATTRELLELADWLKDGGCEMVAMESTASYWKPLYNILESSDLNAIVVNARHMKAVPGRKTDVKDAEWIADLLQHGLLQPSYIPDKDQRELRELVRYRKSLVGERTRELNRLQKMLEGANIKLSGTVSDINGKSARSILEYLLTGKSIDGSKYDEMYEQKIIAHNLKATKEQIVDDLNGVMSPLQRRMMKELLVHLDELNIHIKNLDDEIDNFMKPEEKQASQAIQDVTGIGNTSAQAIISVIGSDMGRFPTDRHISSWAGLCPSDNESAKKRKSGKTRKGNALLRTTLITCAHAAVKNKKSYFYAQYVRISAHRGPKRAYVAVAHSMLISIYHILKDGVVFKDLGADYYNQFNKERKINAYLKKLKALGWEAPIVAA

SEQ ID NO: 48931 - protein, 315 aa, unidentified
MTQTNMTTAGIDTSKAKLDIAVHGRTERWRVANALPGWRALAANLTKADVTRVGIEATGGYERGVVEYLRAAGLTVLVLQPLQVKAFGRVHLRRAKNDALDAELIAACTAAIDQLRMVPDTRLTELAGYLTFLEQTEEDIARFKTRLEHIDEPGLRRIVNSDITRLKARKAAQIRDIAKRLRAHDDLAGRLDLVLSIPGIGERTALALLIRMPELGQVSREEAAALAGLAPFDDDSGQHRGQRRIAGGRGRLRRSLFAAALPAAYRWNKALIALYARLKARGKAHNSALVACARKLLIYANTVVQRGTPWTEKAA

SEQ ID NO: 48932 - protein, 370 aa, unidentified
MAQPTPLFVGLDVHKDSIAVAHAQGQSADPPVFVGAIGPRQADLDKLIRRLQGKTPELVFAYEAGPCGYGLHRYLTGQGFTCQVVAPSLIPKKPGDQVKTDRRDAIDLARLLRSGDLTRVYVPTVEDEAMRDLCRARDAARLTMKNAKLRLKAFLLRLGRQYEGRADWTDAHRRYLAKVVCPTPTQQIVFQESVRAVDEQVDRLHRLEAELLERAPAWRLYPVVQALQALRGVQFLVAITVVAELGDLTRFDSPRQLAAFVGLIPSEYSSGPARRQGGITKAGNGRARRALIEGAWAYRHPAKVSEHIQRRIDTLPKPIQDIGWKAQVRLCKRFRRLTARGKHSNVAVTAIARELIAFMWAIAKEVQITT

SEQ ID NO: 48933 - protein, 412 aa, unidentified
MDEVVEFCAGLDVHRDTVVATVRFPQGRQRGSETKTFGTDTAELVALGDWLISHQVTRVGLESTGVYWKPVFYLLEDRIEQLWLLNAQHLKNVPGRKTDVVDSAWIAQLVEHGLVRPSFVPSPPIRELRDFTRHRRALSEERTRMVQRLEKVLQDAGIKLTSVASTVLSKSARAMLEAMLAGESDPVVLAELAKGRMRSKIPALTDALRGSFRVCHHGVLVRQILAHVDFLDAQLAEIDEQITTRVATFEPIIERVQTIPGVARKCAIGMIAEIGVDMSVFATPAHLASWAGICPGNNASGGKARSGRTRHGPVALKTVLTEAAQAAARTKNTYLGARYHAIRGRRGTFKAVGAIRHDILIAYWHIVTADVGYQDLGVDWVARRRSREHQIARLAKQIEKLGAAVEITMPAA

SEQ ID NO: 48934 - protein, 357 aa, unidentified
MNDLIRIGMDTSKSVFQLHGVDSCEQPMLRKKIRRQQVVGLFGKLAPTRVGIEACGAAHHWARALGALGHEVVLLPPQRVKPYVPRNKNDAADAEAICEAMSRPRMRFVPVKTAEQQAALMLTGVRDQLIARRTQLSNAIRGYAAEFGLVAAKGLDKIEPLLARIATDTTLPALAKELFAALAEDYAELKLRLRTIEAKLMAWHRQNEPSRRLAEVPAIGPIGASLLVMKVPDPQAFRSGRDFAAWLGLTPKDHSTAGKQRLGVITRAGDEALRSVLVVGATAVIQHARHGRGHPSPWLIALLKRKPPKLAAVALANKTARIAWKLMVSGERYDRAAAAPRSVASPAARTEAQQLQR

SEQ ID NO: 48935 - protein, 457 aa, unidentified
MAAKNTRYRKKIVKLDALKQINVNAAGIDVGDSEMYVAVPEDRDEQFVRVFGTFTRDLAAIAQWLKECRVTSVAMESTGVYWIPLFEVLVDHGFDVVLVDARKVKNVSGRKTDIEDCQWIQQLHTYGLLRGCFLPEQSIRALRDMIRHRGNLLRYRAVHTQHMQKVLQLMNLKLTNVLNDITGSTGMKILRAIVEGKTDPRYLAQFRDPHCRRSREDIEQSLEGNYRPEYIFQLAQLLSLYDDYSSLIAKVDQETEQMYRDLPSLIDPIAKPIKPMKRNSKRKVKNAPDYDLRSQLYRITGVDLTQIDGFNASTAQEIIADIGTDMTKWPSSKHFCSWLRVSPENKKTGGEVFSSSTKKTKNRANKALRMAAFSLAKAKCALGAFYRRVRAKHGGPAAITATAHKLARILYKMLRFKVEFVDPGEDYYLQKHKTQILRNLEQRAKSLGYRLSPALSQ

SEQ ID NO: 48936 - protein, 338 aa, unidentified
MNLSRIGLDLAKQVFQVHGVDRHEHVVCRRQLKRAQVRDFFRQLPPCLVAMEACGSAHYWARELRELGHTVRLIAPQFVKPYVKGDKHDAHDAEAICEAASRPSMRYVPVKSAEQQAVQSMHRVRSRLVRARTALCNEVRGLLGEFGLIATRRGRAATMALLETVMATEPASLPAPMGELLRELKDKLQTLEARIARLERQIQAHVRGDARIQRLLAVEGIGPISASAVAASAGDTRQFRTGRQFAAWLGLVPRQHSAGGQQRLGNISKRGDTYLRTLLIHGARAVVRCCANKTDARSRWLQGLLQRRPANVVAVALANKNARILWALLSRETCYRPG

SEQ ID NO: 48937 - protein, 389 aa, unidentified
MKIFVGIDIAKLNHFAAAISSDGEILLEPFKFTNDADGFQLLVSKLESFDKNSIIIGLESTAHYGDNLVRYLVAEFYQVCVLNPIKTCQMRKNNVRKTKTDKVDTFVIVKTLMMQDDLRFITFFDLDMMDLKALGRFRQKTIKQRTRLKIQLTTYVDQVFPEIQYFFKSGLHQNAVYALLKEAPSPKEIASMHMTHLANLLKVNSHGHFTKELAKELRVLAQKSVGANDSAISIQITQTIQQIELLDSQLEKIEAEMTDIMKFNDSVIMTIPGIGYINGGMILGEIGDIHRFSNPNKLLAFAGLDPSVYQSGNFQAKTTRMSKRGSRVLRYALVNAAWNVVRNNATFKAYYDAKRAEGRSHYNALGHCAGKLVRVIWKMLTDEVEFNLE

SEQ ID NO: 48938 - protein, 343 aa, unidentified
MQTVTTIGLDIAKSVFQVHGVDAAGQVVIRRQLKRRYVVAFFQRLPPCLVGIEACASSHYWSRGLQALGHSVRLMPPAYVKPYVKRQKNDMADAEAICEAVTRANMRFVPTKTPEQQSGLMLHRTRHLFIRQQTSVINAIRAHLAEFGVIAPIGRKGVEELLRVVADPNDKRVPEVVRACLAALGSQLLSLKKQILEFDRMILAWHRSNQTSKRLNCIPGVGPLLATALVASVGDPKSFRSGRNFSAWIGLVPKQHSSGGRERLGSISKQGDRYLRSLFVAGALAVIRYAKLHGTNHRPWLTTLLARRPTKVAAIALANKLARMAWALMTRGERYNYPVALRP

SEQ ID NO: 48939 - protein, 414 aa, unidentified
MNDNEIIRNQQFRQLKEVIRGSDQHLIIGIDVAKEKHHAFMGTATGKSLLRRLIFENNFEGFGKLMTHVEAVKVQNGLPLSVFGMEPTGNYHKALGSYLINGGHQVVLVAGQAVKNNRILLDGRWDKHDTKCAANVADLISQGKCLFYDSPPEAIVQLRSLLSFRKRLKKEEHSLRMRIRNSLLAKHFPEMDRYFGQCLSENLSIVYWCLDPKKIAAMDFGRFFQLVTTRERGLAQQRRLKAIWQVAAASIGCAVDRASQFEAQVLVEKILQVQKEIKDTQQLIETISQQFMEYHLLLTIPGFGPYVASLVLAVIGDAWRFGSAKQVLKMAGFDLSAERSGKKGKEAVPVISKKGNAALRYGVYQAAFIASTRNFDFVCAHPVQIYLDLKGYPERAKEAAAMVRQESLKWGRNA

SEQ ID NO: 48940 - protein, 330 aa, unidentified
MWSAGVVATYSVPTTAIGYEQLIEWAGSFGRVSRAGIEGTGTYGAALARHMRERGVQVLEINRPDRSRRRLHGKSDPTDAENAARAVLAGDAHAIPKAQSGVVEAMRAVSMARRSAVKAKTQAINQLRALLVTAPEAIRATLWKVKPEHCIARCARLQSLGDTPLLKALTDTLRLLARRWLSLAKELRELDSALEQLTKRVGSRLLAQFGVGPQTAATLLVTAGDNPDRLRSEAALAALCGVSPLEASSGKTTRHRLNRGGDRAANNALWTISMVRMRSDPRTRAYVARRTAEGRSTKEIQRCLKRYIVRELYPLILADLADTVRRPNLT

SEQ ID NO: 48941 - protein, 480 aa, unidentified
MDRRLVGIDLGIASAHTVRVLDGGGREVCRRRCEPTAVSLVVIEQAALVGASAGTRLEVVIEPTGPAWLPIAVFFSARGHAVYRVSSQKAADLRRFLSRHAKSNGIDADTLARLPLIDPQGLRVLELPQAARAALDRRVRACDRLTMQAAEHKVRLRDLVRQLMPLTPLTGDIGQADLAVLEQWADPRELLRLGQARLTTVIVTASRNHQGAARARVWLTSAEAAVELYADHPAVAFADLAAEVATEVRLIRAIEAELAIHAEERETAYRWADPGQLARTLPGLGEVGGPALAAVIGEAARFPTGAHFKSYLGLSPRASETGETDRKGQPMSKAGSRLLRATLVRAADHARKQDPQLAKIYYVQMVERGASHLKALCVVAARMAERAWAVMNRRMPYVVCDTTGQPVTPDQAKKIIADTWTVTADVRARRRSRKTTKAGKAPQQVHTGHDRSDARGADNEATFPTHDRLHQHRTRQHARP

SEQ ID NO: 48942 - protein, 352 aa, unidentified
MIIGVDPHKSSHTATAVEPSTNTPVASIRVDASLAGYRELMRWAATQFPERRWAIEGARGLGRHLAQWLVARDEVVLDVPSTATARVRELSRGSRRKTDVIDAAAAACVAALHGDARPVVGEDHTTVFALLEERRANLAAQRVRVANQLHAVLRDLVPGGAALAITAKSASTMLRMVRPVSPCEKVRKHLAQDLVRDLRTVDVLLSDIERRMSDALDDHGSELRRVDGVGAVTAVRLIGRTGPASRFPTPDAFATYAGVAPIEVASGDRTRHRLSRAGDRQLNSAIHLIAVTQVRMRHSIGRRYYDTKIAEGKSRNEAMRALKRRLANHLWRLMTADERRARSPIAGDEIAA

SEQ ID NO: 48943 - protein, 426 aa, unidentified
MKVMHDRVAAIDVHKDMVKVAVRVPGGKRGTRPTDVLEFRAFYGVLQEMGRELRRRGVSHVVMEASGVYTDPVYYALAELDFTEVMVINPAHAKALKGHKTDARDAIRLLDLYECGLLSGSYIPAPELKEVRDLARYRMKTVQARTSEIQRLQKTLETAGIKLSSVVSDVTGASARAMIQALIAGERRPGVLADLAHTRLRAAGKKADLSMALGGRFTGHHALMCRLHLDQITILDQAVAGLDAVIAPKVAAYAREAQLLKTLPGFGDVIVAGWLGAIGPAPHQHFATAQRLASWATVCPGNYMSAKKSKGGRTGDGGAYIKPLLIQAAWAAVKVPGRLQARFHRLVRKFGGPKNKGAVKRAITAIAHTLLKIAYQVLKTGKPYEDLGADFYDSRQTAQAKQDYLVRQLQKLNPGCVITITPAEAA

SEQ ID NO: 48944 - protein, 388 aa, unidentified
MNYAGIDVSKYKHDCCIITEFGDVINEGFTFTNNAEGFGRLQKELEQCGTGNVRIGFEATGNYGINLKLFLEGLGYEYMEINPLLVKEYIRSNTLRRTTTDKLCARAIAGYISEKKYRPHPTSFYSKFALKQLTRLRNSLVTGRSRYLIQITNVLDCIFPEFKPLFGNKFSVTALYIIANYPSPEAIANMNSRSYDILRRKSRGKFSMDKFVKLKTLAKNTVGVFDECYRIELETLLDLYSQIDSKIGELETDITEIIQQINPPTSSIKGIGIISAAVIVSEFGDFSRFVNPDKMLSFAGLEPGYFQSGTAEHNGRMVKRGSSSLRCTLMNCSRSIRLHNEVFATYFQKKINEGKPFNVAINHVAKKLVRLIFALETKGELFDPAKLR

SEQ ID NO: 48945 - protein, 341 aa, unidentified
MKNLFIGVDFSKEKVDVAIIFADGLTETAARVFNEFKTTVSGYKQLVKWVEQNSYGIDSSLWLFCGENTGDYSKGLCNFLYGKGYDMWLENAKSIKDASGLRRLKSDRADASMIAEYAMRNYDKAVMYEPLSESLAQLRELFLYRQMVVRHRCSFQVRRGEKRLTMEKSPIKTMISQSGRHIVSELNKEVEKIDKRITELIKSDEELTEVFTIVTSVPGIGTQNAVCLMVYTDNFRRFNYDSRKIACYYGIAPFGKDSGTSVHSDPHVHYMANRQIKAMLTQAALAAVNFNPIMARYYMRLVERGKKKQVALNNVKNKLVHLITAMVRNRQLFSPEYKISA

SEQ ID NO: 48946 - protein, 441 aa, unidentified
MPRYVGLDVHKQLIEACFIDEQGKQLQRCRVAVTRQSIQTFVTHCLQPTDQIVLEATTNTWAISELIRTHVAKVTIANPLKVKAIAEAKVKTDKIDAAVLAQLLRCDFLPEVWIPDQTTRLLREKCAHRAALVADQTRLKNRIQSLLAQRLIPVCIPVLFNGRGRNWLSKLELNAQDRAAIDGYLRVLDQIESEEIALEKTLAQLSYDNDQVRLLMTLPGVGPAGAQALYAALGDWHRFKDGSHAASYLGLSPSTRQSANHCHHGSITKAGNSLARWLLTQAARQVVQHPGPLGVFFRRIHQRKNFNVAVVATARKMVTIAFLMLKNGEPYRYSLPAPTQRKLSAFRVAATGSRRSKSKHRLPMQSREPGTRVDSIPSLNEVYHSENLPPIVKADALQSAERRMLEQMEIADFPERIQVVQMRTRKCKKHAPKPNPNQLSK

SEQ ID NO: 48947 - protein, 404 aa, unidentified
MAVIIGIDPHKGSHTAAALDKTEGVLGELRVRSAATQLEHLLAWAVLWPERTWAIEGAGGLGYLLAQQLIAAGERVVDVQPKLAARVRLLATSSTNKNDPNDARSVAIAALRSPEAKEVQAEDHAAVMKLWAKRRHDLVSARTRVVCRLHAVLCELVPGGFSGQLYASRAAKMLDQLEPGNAVAAARHELGRQLLEDLRRVDEQMLETKKRIALAVAASKTTLTEIFGVGPIVAATVIGYVGDATRFASSDRFAAYNGTAPIEVSSGPRKIYRLSRRGNRRLNHAIHMAAVTQIRNLHSEGRTYYDRKVAEGKTGKEALRALKRRISDALFRQLLIDTQQARKSIMGPGGQTGNDSVACVTDSHPDGRLFGEATPEPGTTLRPAATAIRSKRSRTASRKIERAS

SEQ ID NO: 48948 - protein, 360 aa, unidentified
MIGTMTWAAMDVHARSTYAASLDVLTGELTRRRFDTGAVEPVVQWLAGLPAPVRACYEAGPTGFGLYRAAAGAGIDCQVIAPSKTPRPSGERNKSDRRDTDLLLRQLMAGALTPIAVPSAPFEAARDLARAREQVRADLMRCRHRVSKLLLRHGRVYDRKAWTQAHRRWLATQSFGQVNTELAFIDNLAACDGLLARKDALDQRLARVAREPEFWPFVSRLRAFRGLDTLSALVIVLEVADFTRFARAVQLGSWLGLVPSRQQSGESDVHGQITKTGSKYARRILVEAAWHYARPPRIGRTLADRHDGVADHILQIAWRAQWRLHRIHKRMRARKKPANVITVACARELSCFLWAAAIAP

SEQ ID NO: 48949 - protein, 346 aa, unidentified
MSHPSGFLLIAGIDIAARSFTVVTHLFGQTPSAARTFPQTPAGYSAMERLLAATGVEPDATLLVLEATGSYWTTLAVTLHSAGYRIAVVNPAQVHKYLQSLPRRSKSDPKDAEGLTRFGGERSLPLWSPPPQVYHELHQRLVARDGLVTMRTQVRNQQHALAQWPVVVEAAQQHLSEVIAMLEAQLKGLDKEIAEVLADGAWAASAAHLQSIPGIGLVTAAWLLVGTLNFTLCATPEAAAHYVGLAPLEHSSGTSVRKRASIGHGGNGRVRTALYMASLTAARYTEGIKQQYERLVAAGKPKKVARCAAARKLLHLAFAVVVKGQDYDPSYQNPPSSAVGTLKRAA

SEQ ID NO: 48950 - protein, 345 aa, unidentified
MKQLAVIGIDVAKNVFQVHGTDAAGHSVLTKKLSRSQMIEFFAKLTPCLIGMEACSSAHYWGRRLTEMGHTVKLMPPQYVKPYVKTNKNDAADAEAICEAVARPNMRFVSIKNIEQQAVLALHRVRQGFVKARTAQANQIRGLLSEFGLIVPQGIGYIASRVPELIEDAGNELPGSFRMLIERLLDHLRALDHQVVELEAQIVSWHRQSAVSSKLAQVPGIGPITASALVASLGDAKNFDGGRQVAAWLGLVPKQHASGGKQKLLGISKRGNTYLRTLLIHGARSVIYRAQNKPESCRWINGVVSRRNKNVAAVALANKNARIVWALLANEREFRPDYTTAKAAT

SEQ ID NO: 48951 - protein, 419 aa, unidentified
MNKIETKKQRIVNTKTLIVAIDIGKTTDTGYCRCPSGKDIKPFEFSNNAGGFKKLWDRICWEKTSHHLEEVVVGFESTGAYGEPLMHYLKEKPVKLVQVNPMHTKRMKELEGNSPGKTDRKDPRVIADIIGLGHALSVIIPEGAPAELRRLTLARERSLQRRTALYNQLQDLVFILFPEFLQVMKEVKTKTARYLLRYHPTPQDIVKCGFETLASILKRVSRGKLGRGRAQVLYEAAGESVGLQEGKKGILLEMEEILSGLEACNRFIEKVEEEMVRSLQAIPYSDSLLSVKGIGEVTVAGLIGEVADFRQFHTLREILKLGGLDLFEISSGKHKGNRHISKRGRPLLRKLLYFAALNTVRKGGVMHACYQRHLEKGMPKTKALIAIARKLLGILFALVRNHSQYVENFSQKEDLKLAA

SEQ ID NO: 48952 - protein, 416 aa, unidentified
MRTLKLTLKGFKMYYVGIDVAKEKHYVCILDDTGEYAVKPFWIYTDVLGLRELIKRFGDLSLDNDDFLVGLESTGAFSENLYEYITDSDYKAVLLNSYQTAKFRDFRTAKKVKNDTIDAYVIAELLSTGKYKESHISNDAYHSLKVLGRTKKSLMDKIKTIKREISTVMATVNPEISRVFPNIFTKTALEVIKVYPTATDLAQATPKKLTRLFRHIKGNNFSEDKARFLIDLAQTSVYAGRACKARASLLSSYIRVLELYCQEKKEIEALIKQLIDEEIDTIDNSVENLQSIPGVSDKTISAILGECGDLRRFTSAKAFIGYLGLYPTQYQSGNSLSVGRLAKRGIPIAKHALYMAAVGSVLHNPQLNKLFRDKVSSGKSKKEALIILSKKIATIMYSIVKYNKPYKPHRVFIPNR

SEQ ID NO: 48953 - protein, 348 aa, unidentified
MTLVGCDLHSRKQQVAALDTTTGEVLEQELAHDGDAVERFYRALRPPVTIGIETTGYTQWFHALMHRLGHTVLVGEAGRIRAMVVRKTKTDRRDARHLLDLLKHDRFPTVWMPDPDTRDLRALVAHRVRLVRMRTMVKNGLQAIALNQRLALRSALWTQRGLAQLRGLALPPHTTRRRDDSLELLAWINVRIDQLDAQLAAVVDADPRARRLLTHPGVGPLTALTTVLVLGPVTRFPDGKHVVSYVGLAPAINASADKQHLGKITKQGNALLRWVLGQAAPQAARADDELRRRYFAVLHRRGRPKAKVALARKLLVRLYVMLRDQIDYEEFRRRGRAGQASRAPVTVT

SEQ ID NO: 48954 - protein, 321 aa, unidentified
MNTFYLGIDVAKAKLDCALRLANGKYKNKVIDNNLPGFKLLSEWLVKQQVTTLQVCMEATGVYWEAVAEYLADQGVLVSVVNPAQIKAFGKSHGVRSKTDQIDAQSIALFCSEHHPKAWQAPTPGERALRAMVLRLESLQVMRTQESNRLLVARDAVKPGIASHIEWLDKEIKALAKKISEHLDSDPDLKDKQALLDSIPGLGERTIATYLAFYANPADFGNARRAAAFAGLEPRHHESGSSVKHPPRMSKIGHAFLRKAFYMPAMVTLYKTAWGKRFRERLAAAGKPPKLIIGAMMRKLIHVAFGVLKSGKMFDPALHGC

SEQ ID NO: 48955 - protein, 344 aa, unidentified
MDYYAGIDVSLEYSSVCVVDASGKVVREAKVVSEPEALIGWFGSLGLELARIGLEAGPLSQWLYAAMKQAGLAVELLETRHVSDAFKAMPVKSDRNDARKIAQLMRLGWFRPVHCKSTTAQEIRAMLTARKLVQSKLLDLENSLRGILRGFGLKVGKTTRTKFAGRIEELVKGHPNLQTIGQALLRARAVLLAEFNGFEKRVRAMSRLHDKARLLMSTPAVGPIVSLTFACAIDDPSRFTSSKQAGPHFGLTPKKYQSGETDYTGRISKHGDASVREALYEAAHLMLTKPIKGCSELKSWAMRIARRAGTNKAKVALARKLAVIMLRMLKDNVPFNPAAKPATA

SEQ ID NO: 48956 - protein, 423 aa, unidentified
MKGEIFFMKIVRPICCGMDVHKNIIVATIGITNKKTRITEYIQETFSTLNPDLLNLKQWLINHKCFDACMESTGKYWIPIFNILEDEINIYLTHPKYVKAIKGKKTDKKDSKWICDLFKHDLIKFSFIPPKEIRALREISRYRYKLVGMRSSERNRYQNCMTVSNIGIGSVFSDPFGKSAQAIMKEVLESDIIEDEKILKCIHGSCKNKDKILDSIKHCNIETDQRFKMNESMTHMEELQVHIDNCEIEMMKRAAPMFDQFMHITQLPGISTLSAILIISEIGVDMKQFESDKQLTCWAGLAPANNESANKKKSVRISKAGQYLKPLLVQCALGAIKDKEGYFGIKYSRIKKRRGHKKAIIAIARMMLVSIYHMILTGETFNPSDYESFRNPKPPIKQQDLTEESAIEFLKKSGFDVSKLTKQ

SEQ ID NO: 48957 - protein, 337 aa, unidentified
MSVYVGIDVHRKRSQVAVVTEDGTVQLNKNVVNGSEPMLRLIGDLPSGTPVAFEAAFGWSWLAELLEDYGFDAHLVHPLRCKAIASARLKNDKVDAAILAQLLRADLLPEAWLAPAKVRQLRALLRHRVSLVRLGTQLRNRIHAVAADHGYDRSASYWTGPGRGWLAELDLPAASREIITDCLAVIDALAVLTDRIDGELHQHAKADPRVKALRTLPGVGEFTALVIVAEIGDITRFPSARKLASWAGLTPTVRGSDLKVRHGHISKQGSVWLRWAMNQAAQTAKRSPEFAATYSSIAKRRGKKIATIAIARKLLTRAWHLLAEMETAEASTPLRRP

SEQ ID NO: 48958 - protein, 428 aa, unidentified
MKNRNVQKLEAITPGTLIVGVDIAKETQWARFVDYRGLELRKAFKFKNHKNGFDSILASIKAICKNRRLDDVIVGMEPTGHYWKPLANYLLIHEVNVVMINPYHTKRAKELDDNSQTKSDKKDALTIARLVRDGRYYEVYMPQDIFAELRVLGNSRISLMKRSNALRNTITAVMDEYFPEIVTVFKYPLKGKAAMQILKSCPFPLLILKLGIDGVLAEIKKAVKKTVGRKKASQLVETAKSSIGVGYGLVSAKLKLGLMIEELELLTKQLEQLEKAMEKALTDTGYGELILSIPGIGVVTAASLLGEIGDPMRFDHPRQICKMAGYNLIEDSSGKNKSKTKISKRGRKNLRSVLYQMARTMVAVNAEIKELYQYLKTRPNNPLKKKQALVVISKKIVTVIYNLIKKQTEYQAELVLGEFRKNQIRQAA

SEQ ID NO: 48959 - protein, 403 aa, unidentified
MVVFCGIDWAEHHHDVAIVNAVGEVVAKRRINGITGFTQLTELLCVYAERPADVQVALETDRGLLVAALRAAGYRVFAINPKAVDRYRDRYAVSGAKSDAADALVLANLLRTDAARHREVANDSAQVEAIAVVARAHQDAVRVRLRDTGRLRSLLREFFPAALTAFPNLATRTALQILAAAPTPSQAQALDREQIRALLGAAGRICLRASEVERLHQTFAAEQLHHRPEVEEAMGVAVRAIVATLLGIDAAIAELEAALAARFDNHPDAEILRSLPGLGVVLGGRVLGEFGDDPTRFLDPASRRRYAGTAPVTRASGKSRVVLLRRARNQRLADACRWWAFNAMQHSPGAMAYYRRRRAAGDTHEAALRRLGSKLVGQLHHCLEHREPYREDIAWPASLPTAA

SEQ ID NO: 48960 - protein, 371 aa, unidentified
MTETVKYVGLDVHKETIAVAVADGEREGEVRFVGTVANEDDAIRKLVKRLTGPGVTLNVCYEAGPCGYGLHRLLTKLGQNCIVIAPSMMPRRPGDHVKTDRRDAMTLARLLRAGELTAIWIPDEAHEAVRDLIRARRSAQDDAIGAKQTVRSFLLRHDRRFGGKAAWTKMYWRWLSEQRFDFPHQQLAFEEMQKRVLEAQARVGRLEAALTEAVDAWCFAPLVRNLQVLRGIRLVSAATLVAEVGDLTRFDNPKQLMAYVGLVPSEHSSGARTKRGRITRAGNAQARTMLIEAGWSYRLPAREKRRYRERVIDLSEDIQAIGWKAQVRLCQRYRRLAATGKPQPKVTTAIARELVGYAWDIARRVSPAIAG

SEQ ID NO: 48961 - protein, 367 aa, unidentified
MNHIIYCGVDFHARQQTICCLKTETGELTCHELKHDDKEALRQFYAELGGPVIVGLEASGYTPWFEQLLEELGHQVWLGDATEIRRRARRRQKNDRRDAELILELLCHGEFPRIHRPSPESREILRMLRYRHKLVKVRTLIKNSLQSLSIQAGLSLQAHLFTRQGTQQLAALAMSPVMRQQRQQWLELLQELNQRITATEEWLKQQALSDPRISLLRTHPGLGLLSSLGIVHTLIPVSRFPNTRKVAAYGGFEPMERSSADKKRYLGISKAGSRLLRFLLIEATQTAVRTDPDLQRFYRRLVPRRGKPKAKVAVARKLLIRSFIMLRDEINYAEFQQRAIAARLAREFARPNVPVPLIGQPASPAKD

SEQ ID NO: 48962 - protein, 385 aa, unidentified
MSAHPTPIQAAAQLQANTLFASLELSKARWLVTVSAPGSDKLSRHQVPGGDGQALLELLWRLQAAAARRTGAPVMIIVIQEAGLDGFWIHRLLVQNGITSHVVDPASIAVNRRHRRAKTDKIDGVKLLRTLMAWMRGERQVCTMVQPPSPEDEDRRRLARERARLLKERIQHTNRIKGLLSGQGIPDYDPLHRDRRRCLAALTTGDGRPLPERLKAEIGRELDRLEMVVSQLTVVERERDALVARTAEADACAAPAALARLRGIGPELAALLWLEALFRRFDNRRQIAAYAGLTPSPWQSGGIDREQGIAKSGNPRLRRAMIELAWFWVRHQPGSALSRWFVERVGTARGRVRRIAIVALARKLLVALWRYVTQGVVPQGAVLKA

SEQ ID NO: 48963 - protein, 414 aa, unidentified
MALKIVHQICCGIDVHKTFVVACIASTDNKAVTTYKRHRFSTYTKGLNELSKWLCENGCTEVCMESTGKYWIPIFNVLESTCNITLAHPKYVKAIRGKKTDNKDAQWIADLFKHDLVAGSFMPPLPIRQLRDLMRYRAKLTNFMSSEKNRLQNCLTVSNIQLGNVVSNTFGKSSMMIIDKILENPLDTSFDLEPLVHRSLHKKLPELQLAIDGFITPEQAGKLKIIKQHHTDLTERKSDLEFIILSLSVPYAEEIDLILTVPSFKNIFSAITVVSEIGVNMDMFPTAKHLCSWAGLTPTNNESAGKKKSVRISKAGCYIKPLLVQCANAVVKSEKHPEIRNRYLRLRKRRGHKKAIIAIARMLLTAIYMILKKKEPYNPDLYRKSDALPVDREITVEQAILIAKTQGYRIKEAS

SEQ ID NO: 48964 - protein, 415 aa, unidentified
MALKIVYKICCGIDVHKTFVVACIASTNDKGVTSYESHRFSTYTSGLKTLLQWLLDRNCKDVCMESTGKYWIPVYNILEKDCSIVLAHPKYVKAIRGKKTDKKDAKWIADLFKHDLVSGSFMPPADIRQLRDLMRYRFKLTCFKSSEKNRLQNCLTVSNIQLGNVVSDTFGKSAQAILDKILEDPADTSFDLEPLVFKSLKKKLPELRDAIDGYITPEQAGKLKVIKAHYENLEARKAELEELILALATPYQQELAILQTAPGISSDFTAIGIISEIGTNMEAFPSAKHLCSWAGLTPTNNESAGKKKSVRVSKAGCYIKPLLVQCANAVVKSNKHPEIRNRYLRIKKRRGHKKAIIAIARMLLTALYHILKNGENYNAELYRKSDLPPVDREITVEQALMIARNQGYKIKSATA

SEQ ID NO: 48965 - protein, 341 aa, unidentified
MTEITRIAIDTSKAVFTLHGVDATDRPVLRRNLRRRELLTFFEKLPPAEVVLEACGGSHHWGRALAALGHRVRLIPAQYVKPFVKRGKNDRNDAEAISVAASQPSIGSVPVKSAEQQAAVMLLSVRELLVRQRTQLINALRGHAAEFGVVAPLGEKGVAALQAEIATADEAAVPGAAKQAIALLGGEADRVEARLAAIEAKLMQQHKADPLSRLLATQPGIGPIGALSFALRVDPAQFKSGRHFAAWLGVVPRERSTGGKQRLGGISRAGDERLRQLLVLGATAVIRCAKPGRPGASPWLLNLLSRKPRKLAAVALANKMARIVWAMMTSGEAYRGHPVAA

SEQ ID NO: 48966 - protein, 343 aa, unidentified
MQTVTTIGLDIAKSVFQVHGVDADGNVVVRRQLKRRYVLAFFQKLPSCLVGIEACASSHYWSRELQVLGHTVRLMPPAYVKPYVKRQKNDAADAEAICEAVTRRNMRFVPTKTAEQQSCLTLHRTRHLFIRQQTAIINSIRAHLAEFGIVAPVGRGGVEQLLKVVADANDTRLPEIARACVAALGSQLLALKAQILAFDRRIMAWHRSNETSKRLDAIPGVGPALATALVASIGDPKAFRSGRDFSAWIGLVPKQNSSGGKDKLGSISKQGDRYLRSLFTAGALAVIRYAKLHGTKHRPWLAALLARRPTKVAAIALANKIARMAWAMMTRGERYKEPVALAA

SEQ ID NO: 48967 - protein, 351 aa, unidentified
MAETLKSAVAVVGIDIGKNSFHIVGQDRRGAIVLRQRWSRSQVEARLANVPPCLIGMEACVGAHHLSRRLQALGHDAHLMPAKYVRPYSKGQKNDFRDAEAIAEAVQRPTMKFVATKSVDQLDLQALHRVRERFVRQRTGIVNQIRAFLLERGIAVRQGPRFLRIELPRILATPSDIVSPRMVHLIEDLAGDWRRLDERIEGLSREIEAMARQDAGCERLMSVPGIGPIIASATVAAIGTGDTFAKGRDFAAWLGLVPKQISTGDRTILGSISKRGNRYLRVLFVQAAWVVLIRPKSWERYGLKGWLEAARKRLHRNVLAIALANKLARIAWSVLARGRGFEASRLTQVIA

SEQ ID NO: 48968 - protein, 375 aa, unidentified
MKEKVRFLGLDVHAETIAVAIAEPDGEVRSLGMIANRAESIRKLVKKLGPVEQLKACYEAGPTGYVLYWQLAELGVACEVIAPTLVPMKAGDRVKTDRRDAERLARSYRSGDLTAVWVPDEGSEALRDLVRAREAAKQDQLRARHRLAKFLLRVGRRPAAGMKAWTAPYMAWVRQVRFAQVAREATMLDYLHEVDHMAARVKRLEQAITEAVKLAAPAVREVVKGLQALRGIAEISAVTIAAELGSITRFDTPRQLMGYSGAVPSENSSGKRTQRGNITKTGNAHLRRIAVEAAWSYRLRPGIGPALRKRQEGVPEEIKEIAWKAQVRLTKRYARLAAAGKDQRKIVTAVGRELLGFIWAIGIKAEAASELRTAA

SEQ ID NO: 48969 - protein, 349 aa, unidentified
MTTMTSTAAAVIGGVDTHADVHVAAACDQLGSVLGTQAFPTTIAGYRQLLRWMRSFGDVRVIGVEGSGSYGVGLTRFLLEAGVELREVLRPNRQVRRRHGKTDVVDAIAAARAVISGEASARPKSHDGAVEALRALKIVHRSANKSRTQALNQMRDLITTAPDELRSELRGLRRRQRIAVCAAFRPGDRDDLLSITKLTLRTLARRIIELDEELAMLNTRRRRITNAIAPKLVAAHGIGPDTATGLLLAAGDNPHRLRNERSWAALLASNPIPASSGKTIRHRLNPGGDRHGNSALWRIVVVRMSSDPRTKAYVERRTKEGLTTAEIIRCLKRYVARETFDLLPRELLV

SEQ ID NO: 48970 - protein, 387 aa, unidentified
MATGSVEREVRTFKTTTKDLLALSDWLAEHGCTHVAMEATGVYWKPVWHILSDGDFVLVLANAAHVKNVPGRKTDVNDATWLADLLAHGLIRGSFVPDEQTQEMRNLLRTRKQLVRECSRHIQRLQKTLEDANIKLDSVISDIMGLSGRAMIEALIAGESDPERLAQLAHRRIKAPPEALCEALRGRVTRHHRFLLRLHLKQIDAVNVAIDDIDQEVDAQIEPFRTAIQLLITIPGVSELSACVILAEIGHDMNRFPTAAHLISWAGLCPKNDESAGKRRSTRMRKGAPWLKTTLVQCARAAARKKASYFQAQYHRLRARRGDKKAIGAVASILTTAYHMLKYGTLYEDLGPDYFDKRGKGKHVHRLINRLQNLGFAVQITPVEAAA

SEQ ID NO: 48971 - protein, 406 aa, unidentified
MKQIVSVGIDVSKGKSTVCAMIHPNTIIKESFEVLHTVEEMSMLADYIGSLDGEIRIVMESTGHYHLPVAQFLYQKGFFVCVENAYIIRQFSRIMLHGAKTDPLDAKKLAKYGLAYWSELKPYKFHPSCYTELSLLSKQYQTYIKLLIAAKQNVIHLMDEMLPGFKEALDTASSVQFSKVKYVDFAKEFYHVDMIKTMGKEIFRENYKQWCKEKGYRFQSEKADELFHLAEDGIPTLPTEFPSTRLCMEVATEQVSQLGYALEQILSQMQNLAKTLPEYQTIRQMGGMGEKLCVRFIADIGDVRRFHNGKALVAYAGIDAPPYQSGQYTGTKHRISKRGNSALRKTGYEVMKSLKSHPPKTDTRVYDFIIKKENEGKSKKQAKIAGLNKFLQIYYARVIEIYKNIV

SEQ ID NO: 48972 - protein, 340 aa, unidentified
MSEITTIGLDLAKHVFQVHGIDAEGATVLRKRLRRGQVLAFFSRLPRCMVGLEACATAQYWARELGALGHEVRLMPAQYVKAYVKRNKNDAADAEAICEAVQRPTMRFVPIKTAEQQAAQLLHRGREQLVRQRTMLVNALRAHLAEFGIVAAQGLRNVAQLIAIVRDASDLRLPDVARQVLQVLAAQLEHIETAVAALEKQLMAWHKTNVVSQRLASIPGIGPIIATAIATTVADPAVFRSGREFAAWLGLVPRQNSTGGKTRLGGITKRGNRYLRRLLINGASANLLRSKATKADPWVIGIRRRRPPLVVAVALANKTARIAWAVMLREKEYQPRAVAA

SEQ ID NO: 48973 - protein, 340 aa, unidentified
MFYVGLDIHTKRIAFCVLSDQGQLVQRGQVRGLDEVLRILEALPDRFEVCYEASCGYGHYHDLLQPLAARVVVAHPGRLRLIFRSRDKNDRKDAERLAKLLYLGETPAVHVPSQEVRTWRELINCRGQVIAKRTRAKNALRALLRGAGVVPPRHPALWTKAGLSWLRQLELPTPSQQLRRDLLLEEIETLLRQVRRIEQQLNQQAQHTPAVAQLRSIPGVGIRTAEAVAAFVDDPDRFRNAKAVGRYFGLVPCQDQSGDRNRLGHITRESAPVVRQLVAEAAWQARRRSPTVRAYFERVQRGDPQRKKIALVATAHYLVRVMWALLERGSTWEENAAQAK

SEQ ID NO: 48974 - protein, 404 aa, unidentified
MAETRDKVSFSGFLGVDISKGSFDGCCIDGEGKVLFHVSLPMNRSGFEKLVTRVCATSLSKMSILIGMESTACYHISLFSFLMALGYRVSVINPLLISNFMKLQLRKTKTDKKDAAVIARFLSAHGASLPQTVADSHIADLRELSRQRESLLHQMTAFKCDIKRVLSISFPELERTMGIFTQTTLRLLCRFPSARALAQADRDELARLLQNETRGRNTPVSAETLLKVAQSSVGTANPSKELILRQKASILVHHEEHLQEITSTLIELCQSALEQDVQILTSIRGIGNKTAASFLIEMGGEIQRFETHNKLIAMAGLDPSVSQSGKYEGHSRITKRGNRHLRRVIWLMTIRVIQFNDLFKSYYRKRIEDGLPFKKAVLATAHKLIRIIFVLLTRKTLFCHQVTS

SEQ ID NO: 48975 - protein, 338 aa, unidentified
MFIIGIDPHKGSHTAAVIDSDEQVVGEFSLRADCRQRDRLLRFARSFTPRVWAVEGATGTGHLLAQQLVGAGETVVDVSPALSARVRLLDAGRKDKNDAHDARSTAIVALRHRDLAAVTVEDHRQVLRLLARRHHQLNAGRTRAVCRLHALLAEMLEGGLPRNLSVNRAVSALQRFQATDLVGAERERLVLELLDEVRRHDRSLVEIRDRIVRAVQLADTTITDIVGVGPIVACYLLGYSGDMRRFPTAGHYARYNATAPIAASSGPNPRHRLNPRGNRQLNHAIHMAAVTQVRNDTPGRAYYLRKQAEGKNRKEAMRALKRRISDVVYRQLRVDASR

SEQ ID NO: 48976 - protein, 399 aa, unidentified
MIKDHELVDIFIGVDVGKSNHHAVAIDRAGKKILDRALPQDEAKLRAIIQAVAGKGRVLLVVDQPSTIGALPVAVAQAEGILVGYLPGLAMRRIADLHPGEAKTDARDAAIIAEAARSLPHTLRSLVVADEQAAELSMLCGFDDDLAKQATATSNRIRGLLTQVHPALERVVGNHLDHPAMAELLIKYPTPAALRRTGQARVATLLARYAPRAGKGWAADVFTALGEQTVVVAGTNAAGTVLPQLAAMLKQLRTAREEILTQVEALVEAHPLHTVLTSMPAVGVRTEARILTEVAGKDFKSAGHLASYAGLAPVTWRSGTSIRGDHPSKKGNKSLKRAFFLSAFAALKDPPSRAYYDRKRAEGKRHNQALIALARRRCDVLFAMLRDGTFYEAPTTKAA

SEQ ID NO: 48977 - protein, 395 aa, unidentified
MISVGIDVSKGKSTVCILKPGGEVVKPPFEMEHAVENLDSLVSLINSFDEETRVVLEDTGHYHIPVASYLSSHGIFVCCVNALRMKKFCAQSIRRAKTDKIDAVRIASFGITYWSELTRAYDTPDTYDELRFLARQYYQITSILVKAKVNLSNLLDQFMPSISSLLQNQKDNHKLTEFVDRYIHFQTILEMGEKKFTADYCKWAKKKGYRCNERKAAEIFALAQNGIPSLPNSKSVKIAVREAIKVIHSTEESRNTILAQMQEICKTLPEYSVVRDMNCIGDVLAPRIIAEIGDVCRFKNKHSLIAYAGIDAPPYQSGAFNASERKISKRGNSYLRKTGYEIMQSLIKHKPTDDPVYDFIQKKRSEGKCGKEAMIAGLNKFLRVYYGKVMELYSK

SEQ ID NO: 48978 - protein, 324 aa, unidentified
MTGIICGVDVSSASLVARMGRDGAQAVFPNTAEGIAALAAFCQAHQVEGVAMEATGGYEQQPLILLSAHGLPVAILNPRAVRRFAEGMGLTEKTDAIDAGLIAWFAEVKRSTPCPPPSPHQQHRRALVTRLRQLTQLRTAQRNQRRLITDPAVLAAIDELLTPVERQTRTIGEEIATLIAADPLRTQLDREFRSIKGVATRTVAPLMAEMPEIGTLSNKSIAKLAGLAPLARDSGKHQGKQQVRGGRAAVREILFVVASVAGRYEPDFIAFHQRLTVQGKPPKVVRIALAHKLLVRLNAKAREVRHHMKVLHTPPQPALSALRI

SEQ ID NO: 48979 - protein, 347 aa, unidentified
MSLIKAIGIDLAKLVFSIHGVDECGKAKLKQTVKRNKLLETIANIPPCIIGMEACSGAHYWAREFTKYGHDVRTLYLLRLASKFVIPFRQSEKNDANDAEAICEAVTRPKTRFVSIKSEEQQAVLCLHRIRQGQIKDRTAMINRLRGLLSEFGIIMPKGRYPAQKHIVAILEDTDNALPALARELLNDLWQSIKLQNQDILKSDRKLYALANQMKDAKRLMTIPGIGEVTATAVVATVSDAKHFSTSRQFAAWIGLVPKQYSTGGKPTLGRISKRGEKHIRTSLIHGARAVIANCTNKMDRTSLWIKALIERRGFKRAVIALAAKNARLIWSLLQSGNEYQVNYVKT

SEQ ID NO: 48980 - protein, 341 aa, unidentified
MSVIAPVFSFGLNGYTGIEARMTRRGGEKTMQPVIGIDISKDTLDAYRLLDDMHIQVSNDKLGHRALIRWIGQTDTSLIVFEATGAYHRELEARFAAADLPYAKVNPRQSRRFAEVTGRLAKTDRVDAIMLAKMGAMLGLQRQEPPSDEIVDLREFLAARRALMKDKVAAKTRLQTTTQDLLRRQISIRLRQIEVQIAQIDAAMSKKVMQNEALSQKLAILVSIPGIADVTAISMIVEMPELGTLDGKKAASLAGLAPVSRQSGKWRGKEHIQGGRTFVRRAVYMPALVAVQRNAQLKAKYNQLIEAGKPPKLALTAIMRRLIVLANALIRDRRQWSEMRP

SEQ ID NO: 48981 - protein, 344 aa, unidentified
MQVSVLGIDLGKNVCSIVGLDVSGAVVLRRRVKRETLIGLARKLPPCIVAMEACCGAHHLGRLFAGQGHEVRLMSPEYVRPYIKAQKNDDRDAEGIAEAATRPTMRFVELKTQEQLDMQTLHRSRDRLIGERTALINQARAVLLERGIVVPQGKRRLAEDLNTLMSDPEAGGLSSRMRVLIADIHLQWQELDRRIEIFDAEFMAFMKENDDARRLVTIPGVGVTIASALIAAVSKAETFDHGRDLAAWLGLVPRQSTTGGKPTLLGISKRGNKYIRRLLIHGARSILRFIAERDTALGLWVKELLLRVHHNVAVVALANKLARIAWAVLRRGDRYTARGTPVSA

SEQ ID NO: 48982 - protein, 361 aa, unidentified
MFTERTSVGLDVHARSVVAAAIDGVTGEVFRARLTPGNEEILGWVRALPGPSVVVYEAGPTGFGLSRAFTAAGIRCEIAAPSKIQRPAGDRVKTDARDAMLLARLLRMDEIVAVAVPSVEQEDARDLVRAREDVRGDLMRSRHRVSKLLLRQGIVYYGGHAWTGTHLAWLRAQHFDTPGLALAFDAEHEAVLAAEARRDRLDEAIEAMAADSQFTPVVRRLGCLRGVATLTAFGLAVEIGDWDRLTGASIGAYLGLVPTESSSGQSRSQGSITKTGNTHARRLLVEAAWHHHKPYRTPGATMRARWELAPAAARARGHAGNRRLHERWLRFTERKKRPVVANVAIARELAGWCWSLAVMDP

SEQ ID NO: 48983 - protein, 355 aa, unidentified
MLYLGIDQHARQITISLRDDNGDVVQARQVSTQPTKINEFFQRLTRERLQGDTQFVAVLEVCGFNDWLIRMLRDYRCAKVILIQPDERKKRKTDRRDAAALSELLWVNRDRLLHGKPVRGLRQIDIACTTDQENRRLTTLRKDAGRARTRLVNKVRQILRRHNLQWEMPTKKFPTLAAIAWLKKLVLPEIDRLEMDHLLADLEQVQQRLGDLEKVIAERCGDSEDAALLATIPGVAAFTATSLACRVGRVERFPRSHSLANYWGLTPGCRNSGEANQRLGRITKAGSNMARWLLAQVTHKVLRKDPRLREWFKRIKRRRGATIARVAVMRKLATIIWHMLSKRISYQQCRQLATQ

SEQ ID NO: 48984 - protein, 443 aa, unidentified
MKALPILDPKAVGIDVGSEKLHVSIGGDAPRVFGTFTGDLEALQGWLKQQAVRSVAMEATGVYWLYLYEVLEACGLAVVVVNGRHVQNVPGRKTDMADCQWLATLHAHGLLRGGFVPPAHIRQLQDYQRLRADHVIGAAAQVQKMQQALERMNIKLHDVISDLTGVSGLKVVRAILKGERRPGELLALCDEQIQKNKSAAVKESLRGCWKKEQLFGLRQALELWETYKQKIADCDREMEGLLEQMAGSPQDGAGGFMGPLKLAPAKVLSKNTPAIKRCQELLARICGGHDATQIPGLGEHMVLQLVSEVGTDMTRWDDEKHFTSWCGLAGGHRQSGKRKGNIKAHRNRAGRMFCAAARSLAQTVDKALGGFYRRMRGRLGGLAANVALARKLALLFYRLLRYGMDYVEKGLKAYEARVLETEQRLLRKLAKKQGFVLIPVDLK

SEQ ID NO: 48985 - protein, 323 aa, unidentified
MEKIKQFLGIDISKNTFDVYHPKSGHAQFENNHKGFGAFAKTLDQISHCVMETTGSYHYQLAVFLYNHEFAVSVVNPLVIKRFIQMKLQRTKTDKSDAKMIYQYGVEQMVEPWEPEPYYIEVCKMLHSATESYFKQSTALKNKIHSLSSKGITQGILIRSLKRQVLRLKKEIKSLEGEIEKLIKQHDQQLYTNLSMIPGIGKKTALLLISTTNGFRRFETSGQLPAYFGLAPTERSSGTSINGRSRISKAGNPKVRNYLFLCSFTACKRNPQCKALFDRIVAKGKSKKLALIAVANKLIKQTFAVAKSGIPYDSNYRSVLTIV

SEQ ID NO: 48986 - protein, 349 aa, unidentified
MEGYAGQQFVGIDLHRRRSVIVRMTEAGEVLESTRILNDAERLASVLGRCGETPDVVMEATYGWYWAADVIAGTGARLHLAHPLGVKAFEYRRVKNDERDATDLADLLRMGRLPEAWIAPPVTRELRELVRHRAKLVALRSHCKAEIHAVLAKCGVQVSMTDLFGVAGLELLTRVALPGIYRGRIDSLRRVMDTLDFEIEVCAGLTRARLSTDPGYVAVQSIPGIGPTLAAVFVAEIGDVHRFTGPQQLASWAGLTPKHHESDAHVHRGRITKQGSRLVRWAAVESVQVLPKTSTIGAFRARIGAKRGRNIGVVAAARKQLGHVYYALRDHHVRALQHDAQHHPKACAA

SEQ ID NO: 48987 - protein, 324 aa, unidentified
MRRVIGMDIHRTFAEVVFWEDGKLRPAGRVSMTRAGLEVFGRSLGKEDEVVIEATGNAMAVVRVLSPYVRRVIVANPLQVKAIAHAHVKTDKIDAGVLASLRPAGFLPEIWLPDADTERRRRLVARRNQVVRHRTRIKNEVHAILHAHLVPPCPHAELFGRLGRIWLSRQLIPDDEAAAIERHLRELDRLGEDLAGLDREIAQAAVDDPAVKRLLTITGVNLIVAAGLVAAIGDVRRFADPQKLVSYVGLNPRVRQSGLGLAQHGRISKRGRSHARAMLVEAAWAAAKAPGPLRAFFLRIRARAATRLPRSPSPASRPCCAGTC

SEQ ID NO: 48988 - protein, 343 aa, unidentified
MDHFAGLDVSVKETSICIVDQTGRIVGEVKVASEPEALLQVLMNPAYHFKRIGLEAGPLSQWLFSALGEAGLPVICVETRHMQAVLKAQINKTDRNDARGVAQMMRVGLYRPVHVKTLRSQKLRMLLTHRKLLQSKAIAIDNDLRGTLRNFGLKVGMVGKVKFEARIKELVENFPDLAVLVEPLLVVRRVLREQLGILHRRLLAIVRDDDVCRRLMTTPGVGPVVALTYRATVDVPARFRNSKAVGAVFGLTPPKYQSGEINRTGAISRCGDEMMRMMLYEAAQSMLVHSARWSWLKAWAMKIARHRGMKKAIVALARRLAVIMHRIWVDGTEFRWTKEVAAA

SEQ ID NO: 48989 - protein, 421 aa, unidentified
MRIIGCDLHARQQTLAMLDTATGEVVNKTLAHEGESVKEFYSTLPGPVRVGIEATGSMQWFLQLMEELGIDCQVGHPATIRAAEPRRQKHDQRDAELLLKLLVENRFPSIWRPSQELLDLRGLLLHRHQWVRLRTRIQNALQAIALANGLRRGSSLWSASGQRAIVSLPLTTHTAQRRSELQAMYARFAAEIEQLNQRVLEQAGQRPTAGLLMTHPGVGPITALATDVFLGDAKRFRDGKALASYIGIIPREHSSGGRQRLGGLSKQGNPLLRFLWCEAAVHAVRRDPELRRFYRRKLVQKGLGKARVAAARKLGIRLWIMLRDQIDYHEFCRRGQRQQKSGGACAGMPGERYGAKSHRLIDEATRLPAGSSHNSSWSIVTEEMFGGQHRIDEAETARASWGDTSETTQPQRRDSRVTGQV

SEQ ID NO: 48990 - protein, 467 aa, unidentified
MAARKQKQKRMSAQVVEDEDYQLRYEVVAGIDVAKESAVVCVRMPPAEGRKHRRSLLQAVPATVPAITELAAELTAAGVQMVSMEATSDYWRVWFVVLEEAGLAVQLVSSSQARNLPGRPKTDKEDARWIARLTEMGMLRSSFVPPPEIRALRVYTRHIWDLTADRTRYWQRLEKLLEDALCKLTSVVSKLAGHQTARAVIEKMIEGERDPRALAALGQGRMRNEKLPALAEALSGMRFGPQHAHAAASLLRSIDLLDAELRDLQERVTAHLAAIPGSWGVDADGVTGPQAGRAADAAALPAAERLDEIPGLGRESAMALIAEIGLDMSRFPTPEALVSWAGLTPTARQSGPRSGRGKKGHGNTYAKRIAVLAAYAAANTDTFLGERFGRLASRPGGGGRKKAGCAVARSILIIVWHLLNDPAARYRDLGSDWHARHTDRSRKARNARRQLEALGYDVIITLREDAA

SEQ ID NO: 48991 - protein, 402 aa, unidentified
MFYVGIDVGKRHHEVGVIDNQGHPVGKTLRFANTKAGSEKFLEYINQHKLTSDNSVIGLEATGHYWLSIFSFVHKLGFKTTVFNPLQSDALRHFYIRKTKTDVQDAYLIAQVIRIDSPDETPFIEEDLLRLRHLERLRYNLVEQASDIKRKVISLLDQVFPEYEQLFSDTFGKSSTELLMNYTLPEEILEVDTKKLANLLKKASNGRFGESRALNKANQIRESALNTFGITIGTDVFKLQIQLLLEQIQLIEKHLSEIEQIMIEISNRQKHYLTTITGISDVTSCVILGEIGSIKRFERPEQLVAYAGLDASVHQSGDFNSQNTRISKRGSPYLRRAIWQAAFVASNHDPALSLHYQRLRKRGKSHGTAVGAVARKLTHIIFAILRDNKPYEPRPQPDPSTT

SEQ ID NO: 48992 - protein, 333 aa, unidentified
MTVQTDKFSAGIDVGAEELLLVIRKNGTSCKPQKFANTPVVHVRLAEKLSKLPGIIVCLEATGVYHFDLSIALHDAGVALMVVNPKASHNFAKALMKNSKTDSVDAETLAQYAERMDFVAWTRPSNEKIAIRSFARRIDALTRQKTAAMNHLHALAASQETPKAVLRDVKLAISQLEKRIDRLAKEALILIEKQPDLERVFQLLTGIKGVAQTSAIALMGELLLLPPGLSHREWVKFAGLDPRTFDSGKSVHKKARLSKTGNRHIRTALYMPALSAKQHDPHVKAYFQHLVDNGKKPLQAVCAVMRKLLHAIHGMLRYDKPFDNTRFYAIPAE

SEQ ID NO: 48993 - protein, 319 aa, unidentified
MNKVSHDQIMGIDVSRDWLDTYCLPDGFRLRLPNTADGHLQLATVARERCALVCFESTGGQEWRLWASLDAVGVQTRQLPPAQIKAFAASRGTRAKTDRIDAELIACFMAFRPEAGRQLPHKKLRLLRALTSKRGQLVETRKRLLAQIKAHAKLGTNHLFGGMNDELKDLLNHQITELEKQIEQTIATDASLTETAKILRSIPGIGPVTSTMLIAEMPELGQISGEQAAALTGLAPIAHDSGTLRGKRAIGGGRRLLRHVMFQAALVASHHNPVLKPFADRLRKAGKPHKVIITAVARKLVTIANALCKSRQPWAAQIT

SEQ ID NO: 48994 - protein, 324 aa, unidentified
MSPHARKGATDIMSEAKVFVGIDVSQATLDVAIRPSGECFQIENTEEAIFKLAKRLFRLAPDRVVLESTGGLEVPAVSILAAKKLPVVVANPRQVRDFAKATGRLAKTDRLDALVLAHFAEAIKPEIRPLATKEARELEGLIRRRRQLIEMVVAEKNRLLTSEGLALASVETMIDALKRQIEELEDNINTRLKNNEVWREKDILLRTVKGVGPVLAMTLLADLPELGRLSRKEIAALVGLAPLNRDSGTLKGIRTIWGGRTNVRNALYMATLIATRHNPAIRAFYERLTAAGKKFKVAMVACMRKLLTILNAMVRSGEPWRCPA

SEQ ID NO: 48995 - protein, 355 aa, unidentified
MKYYKNIQDFVNQKNVFCGIDIHYHHWELCFVCDGEVVERIRIKSNYMLLEMYLKQYTTAKKIKIVYEAGFSGFWLCRKLIDHGYDCIITPPGKAPKSADKVKTDKRDAEKLAFYLSANLLKSVYIPPKQVESDRRVIRRRSQLVKKQTRAKNHIKSFLHLHGIKTPEDINKNWSNNYITWLESLDFEYESENFTFSQLIRCYRYIRNEILELTRYLRNLSRKEKYYSHFIKLTSLQGIGLITAMTYLLELYDLKRFKNEKCFSSYLGLTPSQFSSGEHVRSGHITREGNAHLRRVLIESTWTVIKHDPLLRDKYERIKAKGVNGKKAIVAVARSLAVRLRRCLLDQTDYVTGVC

SEQ ID NO: 48996 - protein, 429 aa, unidentified
MNHSASATPPIVAWVGLDWADQQHDICLQASGSTDLEHAVVEQQSQALQLWVAELRRRFPQGAVAIALEQSRGALFYALMHYEFLLLYPIPPKALADYRRALYPSGSKDDPTDAQLLLEFLRKHPERFRPWVADDVETRQIALLSEHRRQLVDDGTALSNHLTALLKGYFPQALEWAGDLTAPLAWDFLAQFPSLEQAQRASRVELLKLYRAHARRTPEQLEALGVQIRTALPLTTDRAVIESSVLVVQTLLGQLRVVQAGVKGLERKLRDLFAAHPDQAIFQSFPGAGKALAPRLLAAWGSNRQRFEGADNMQCFGGPAPVTVRSGKTQWVHRRFACSTFLNQTFHEFAAQSRLHSPWAKAYYQQRREGGAGHHAAVRALAFKWIRIMFRCWKDGTPYDESRYQQALKRRGSPLAITLSRLATPPARA

SEQ ID NO: 48997 - protein, 329 aa, unidentified
MKKQFIIGADISKLTIDVHCHGQTEVTTISNDAKDYKQLLRWLKKQITTEFSSVIVVMEYTGIYTYNLERFLHEHAIDYVKRPALDIKRSAGIKRGKTDKADAMMISKYGWQRREELKPMQPVSETQQQLQQLMAYRDKLVADQASYQSRLKELKGQMRENMNIRIAESTEYIMQVLAEEIKQTEASIEEVISTEKNIQTNYNLLTSVRGIGFVNAVHLLIVTENFTRFTEVRKFACYCGVAPFECKSGISIRGKTKTSHLANKKIKSLLTMAAKNAINHDPDLKAKYREKVEEGKPKKVALNIIRFKIIERVFAVIKRQTPYILSQAA

SEQ ID NO: 48998 - protein, 351 aa, unidentified
MYYAGLDLHRKYFTLCVLTSEGQVVCDHRRLPADLEPLTSILREVGGPVTVTVEATLQWAWLHDRLTAAGFTVQVAHPQQVKLISHARCKTDPIDARKLAELTRVNLLPALWVPSPQVRSWRQLIRGRAALVRWRTRAKNRIHGCLAAEHLRVATTDLFGRAGREWLGRAPLSPAARREIEVQLAVIAALETQITGYDAEVKRIATHPDAQRLQTIPGIGSFGAALLVAEIGTIGRVATAHELAASAGLVPSTRSSGDKISHGGVSGASNHWLKWILIEAVQTLKQVPGPVRFHYERLLRAKGKPKATVAAARKLCTYIYWMWTQELSYAAWLETEMKRAGCPMHTLASSA

SEQ ID NO: 48999 - protein, 332 aa, unidentified
MQLLAVDLGKQSFHIHGITGDGEIISRKLSRAKFLDAVKRLNPAVVAMEACASAHHWGRALEAHGCTIRLIHPRFVKPFVKGAKNDAVDAEAIYEAASRPTMRFVPVKTLAQQDLQMLHRMRDRVVCERTALINHIRGLLGEYGVVLSAGAFRFRKQIIDTVASAPLSELASDLFSALISKFRALDERVADLDRKLVAICRDNERCRRLATLPGVGPVIATALVAAVDDGRHFSSGRAMAAWVGLVPRQYTTGGKPRLGGIGKKASHYLRRQLIHGARAVLLTISRRNDRLAKWAQELLTRAGHNKTAVAMANKTVRMAWAMLRTEKDFQMA

SEQ ID NO: 49000 - protein, 412 aa, unidentified
MPVVIDARLLKQREIFGLDDGLASFSELLLQDFDRGHLSLAFTFQPDALITTFVGIDAHKKDLFVGMFAGAVPTPVTWQVANEPTAVRRLVRKLEREAPGPVHVFYEAGPCGYALQRQMTTARVTCDVIAPSLMPRKPGERVKTNRRDARKLVELGRAGLLTVVQPPTPTDEAVRDLARARDDAREDLQRCRHRLGKLLLRRGLHCAGRNWTQAHRRWVDSLTWTHAAERTVVEDYQLAIDHTEARLLELDARLKECAEQEPYREPVGWLRCFRSIDTLTAMLVWAELHDFRRFSSARALMAFLGLVPSENSSGEKHRRGRIPKMGNALVRRILVEASWHYQHRPGVGRALAARRTGQPPRVIAIAEKAQRRLCGRFRRLLAEHKPAPKVAVTVARELAGFIWAALQRPAVA

SEQ ID NO: 49001 - protein, 357 aa, unidentified
MERILKQSLGIDVSKASLSLSFGTLYGNLKKEFVSHPDIGNDVSGFKSLRTWISKQVDRKEGFYVIMEATGVYHQRVCHYLYGLGYNVCVMQSGRVKRYAQSLDQRSKTDALDSRMLSMLGLERELRLWSPPSEELQQLKLLGRERSSLLKDRTTEINRQSAIDSSSCLGKRASKRHQRRLRPINEQIAAIEQEMRGLVKGDAVLRERIGHLESIPGVSFISAATVVGETLGFESISNAKQLTSYAGYDVVLKESGRFKGKTKISKKGNSHIRAVLHMPSMACVRFNPTLKLFYSRIKPNKAKPMVALVAVQRKLLVLMYTLWKKEEDYDAEFEKKKQQRPEVLAAQDSAQIKLSAS

SEQ ID NO: 49002 - protein, 344 aa, unidentified
MDHFAGLDVSVKETSVCIVDDTGRIVKEVKVASEPEALLKVLGNPIYRFKRIGLEAGPLSQWLFSGLAEAGLPVVCVETRHMQAVLKAQINKTDRNDARGIAQMMRVGLYRPVHVKTLRSQKLRMLLTHRKLLQSKAIDIENDLRGTLRNFGLKVGMVGTVRFEARIRELVEDLPDLAALIEPLLIVRRTLREQIVILHRRLLAIVRDDEVCRRLMTIPGVGPVVALTYRATIDVPARFRKSKSVGAVFGLTCSKYQSGEVDWSGKISRCGDEMMRVMLYEAAQSMMRSKKWSWLKAWAMQIARRRGMKKAIVALARRLAVIMHRIWIDGTEFRWTREQAAAAA

SEQ ID NO: 49003 - protein, 345 aa, unidentified
MEPMYYIGLDVHKRKISYCVKDSGGKVYSEGSLSATRLDLDVWMKTLPQPWSAAMEATMFTGWIYDHLKPHAAALKVAHPLMLRAIAAAKKKNDRIDANKICDCLRCDFLPECYMAPTAIRERRRTLRYRNLLVRQMVQMKIKISSLLMEAGVSYNKQRLHKAGYFRELLATNPDIDEGLRSLLRLCRETVVRLQKTESALVRSLESDSLLMDRVERLMTIPAVGPITALTWALEVGDVQRFSSIKKAISYCGLCGAEKSSGNTVQRTPLSKQRNKHLQTTLIEAAKMAPRNSPELAMLYDKEKQKGNANRATLAVARKLVAYLVAVDRRQKEFLTVERENRAAA

SEQ ID NO: 49004 - protein, 313 aa, unidentified
MTASPVFIGIDVSKDRLDLALRPTGERWTSPNTERGIRMVCRRLRTCAPALIVLEATGGLELPLTGALAAAELPVVVVNPRHVRDFAKATGRLAKTDAIDAAVLAQFAEAVRPPLRPLPNAATQALSALLLRRRQLIAMLTAEKNRLGLAPTPVRKGITGHIRWLEGRLADLDEALAHTIRESPIWREKNDLLQSTPGVGPVLARTLLGSLPELGILTRQQIAALVGVAPLNRDSGRFRGTRRVWGGRAHVRAALYMSALVATRFNPVIRVFYQRLCAAGKIKKVALTACMRKLLTILNAMLKHQTPWTIQCA

SEQ ID NO: 49005 - protein, 410 aa, unidentified
MEVLYPVCCALDVHQASVTACLRAPGDGPQRRQQVRTFGTTTPELLRLAGWLTAAGCTHVAMESTGIYWRPVYNILEGSFELSVVNAQHVKMVPGRKTDVRDSEWLAQLLELGLLRRSFVPPAAQRELRDLVRYRKRLIEERAREANRVQKVLETANIKLASVVTTVLGVSARAMLKALIAGEQAPEQLADLAQRRLRRKRAALGEALTGRVTAHHRFLLDHLLRHIEFLDGAIAACDRQVETLTAPHAEALTQLDTIPGVARRTAEVIAAELGCDMTRFPTAGHAASWTGLCPGNHESAGKRLSGRTRHANRTLRQALVESARGAVRKRDSYLAAQYRRLVKRRGDKKAIVAVAHSILVIAYHVLRDGQPYRELGGDYFERLNADRLTRYHTKRLAALGYTVTLTKDAA

SEQ ID NO: 49006 - protein, 416 aa, unidentified
MKIVRPICCGMDVHKNIIVATIGITNKKTRITEYIQETFSTLNPDLLNLKQWLINHKCFDACMESTGKYWIPIFNILEDEINIYLTHPKYVKAIKGKKTDKKDSKWICDLFKHDLIKFSFIPPKEIRALREISRYRYKLVGMRSSERNRYQNCMTVSNIGIGSVFSDPFGKSAQAIMKEVLESDIIEDEKILKCIHRSCKNKDKILDSIKHCNIETDQRFKMNESMTHMEELQVHINNCEIEIMKRAAPMFDQFMHITQLPGISTLSAILIISEIGVDMKQFESDKQLTCWAGLAPANNESANKKKSVRISKAGQYLKPLLVQCALGAIKDKEGYFGIKYSRIKKRRGHKKAIIAIARMMLVSIYHMILTGEKFNPSDYESFRNPKPPIKQQDLTEESAIEFLKKSGFDVSKLTKP

SEQ ID NO: 49007 - protein, 345 aa, unidentified
MEHFAGLDVSVNETSVCIVDGTGRIIREAKVASEPEALLAVLKGDVYHFKRIGLEAGPLSQWLYSALGEANLPVVCVETRHMRAVLKAQINKTDRNDARGIAQMMRAGLYRPVHVKTLRNQKLRMLLTHRKLLQSKAIAVDNDLRGTLRNFGLKVGLVGAARFETRIKELVENLPDIAALVEPLLIVRRVLREQIAVLHRRLLVIVKDDEVCRRLMTVPGVGPVVALTYRATVDVPARFRNSRAVGAVLGLTPCKYQSGESDYTGAISKCGDEMMRVMLYEAAQILLMRSTRWSWLKAWAMQIARRRGLKKAIVALARRLAVIMHRIWMDGTEFRWTREQATAAA

SEQ ID NO: 49008 - protein, 419 aa, unidentified
MLYDSRVHMDRTFVEFLPSSAHLLGGVFMTYFIGIDIAKYKHDCFIMDQDGSVIRDSFSFSNDSAGFCLFLSVLDSLDPSYEKRIGFESTGHYGLNLKCFLEEHDISFMEINPILIKRFSSATTLRRTKTDKADAALIASYLTTVEYITYPTQSYHIRNLKSLTRSRDALVKLRSGQLVMITNVMDKIFPEFKPFFNKSLKSSTAMYLLRNYTVPSKMASMNSESYRKMSSKLKKTISYARFSKLRELAKNTVGREDPCLTFELNTYLDIYQSLDFKIKEMEAHIEEEFKKIHSHIQTIKGIGWMSAASIYSEYGGIENFQTPNQMLAYAGLDPSRSESGEHAYKGHMVKHGSSHLRYVLLNCAEMVILHNPVFYDYYRKKREEGKHHRVALSHVARKLVRIIFFLEKNNVDYDPKKMR

SEQ ID NO: 49009 - protein, 311 aa, unidentified
MGVDVSKEFLDWARSDQPNTWQLGNDPAGIQRLVGMLRQIQPACIVVESTGGLERPLTTALLEANLPVALVNPARVRFLAIGLGILAKTDPIDARVLARFAQLATPRLLEKRPAIQSELDALVTCRGQLVKSRTEQSNRRQSTLSKSARKALDAVLAVLDKQIDKLDRQIRDRIDSDDNWKHLDEIIQSAPGAGAVLASTLLASVPELGKIEHRQLAALIGVAPFNQDSGRSKGKRAIKGGRADVRSVLYMATITAMRSNPVIKALGKRLLAAGKLPKVAIVACMHKFLKLLNVMVRENITWNQLNLVKNA

SEQ ID NO: 49010 - protein, 331 aa, unidentified
MEHIAIDWGGRQSQICVRSSDEAIVDTRRVPTALLGEYLAKRPSGGRVIIETCSQAFSIADQAKAIGHDVRVVPSTLAPALGVGERRTKNDRRDAEVLSRVSCRVDLPSVHIPSQESRRRKSICAARDALLRSRTLLINAVRGWLRIDGRMVRATPEHFPDRVRTACESVPSSIEQLLVALDTINQQIRAADREVLTVARTDELCRRLMTVPGIGPVTAVRFKAALDEQSRFADAHKVESYLGLVPGERSSSDSQHRLGITKAGPTALRACLVQAAWAARRCKNTPLMVQWSKEVEKRRGKNVAVVALARKMVGVLFAMWRDGTRYDKSRA

SEQ ID NO: 49011 - protein, 322 aa, unidentified
MFCGIDWASQAHAVCVLDQAGRKVSAFQVPHTAEGFQQLTGRLRRLGDPSTVPVAIERPDGRLVDLLLEAGHPVVAVQPAAIAAWRKAEVPSGAKHDPSDAETIADYLRLRRHKLRELVPFSAHTRALRAVVRTRDALVDQRVAATNQLSASLEAFWPGARHLFADIESPIALAFLARYPTPESAAGLDQRRMQAFLTKHGYCGRRPAAELIKRLRAAPTGLAGTVEVEARRDAVLALVGVLGALNSAIKDLDRSIVAHLGEHPDGPIFTSLPRSGRINAAQVLAEWGDCRPAYDSPDAVACLAGAAPVTRRSGKHTSVSFR

SEQ ID NO: 49012 - protein, 349 aa, unidentified
MKILAIDLGKYKSVACNYVTTTGTARFASVVTHVLELDRLLLRESPDLVVIETCSIAGWVHDLCCQRGVKCQVANPSSEAWKWKNVKRKTDRDDALKLAQLAALQQLPTVYVPAPATRQRRALLKYRQSLITRRVAIQNHLRAIVQREGILLDRGRRAWTVAGLEAIQQLARPLEECSAEELWRGEVALELQALRAVTKLLLEVEHKLEACAASNESVKLLRTIPGVGRCTAEVVVAYLDNPQRFENGRQVSAYAGLVPKQFQSGETDRQGRISRRGPSLLRKMLVEAGWVLLRYNPWAQRLMQRLSRGQKTRRKQAIVALARKLLVRCWAMLRDSTEWHEPPPATATA

SEQ ID NO: 49013 - protein, 403 aa, unidentified
MDHTRIEVLVGIDMAKAEHFAHAITTNGDELFARSVSNDEAAIGALIDAASEAGKVALVIDMTASVAQLLLSIAADRDVPVAYVTGLAMRRAADLYAGSAKTDPRDAFVIADYASRNLDRLTWLDVTDELLIELRVLNGRDVDLAGDANRSINRCRDAMVAVSPALERAVGSRLGQPGVRDVMAKFSTPTALRAAGRTRIRNTIRKRSPRLANDVTDQIWSAVEAQTVTLPAEEAWGEVISDLLGDLDRVQSRRDELAGSIEEVFLSHPLGQVLVTLCGFGPRTGARTLAEIADPHRFDNGGRLAAYAGLAPTNRRSGTSINGTFQHRGGNHRLKNAMFLAAFVATQHDPAAKAYYERKRAEGKKHNAAVICVARRRCDLILAMLKTATPYDPDRALPTQIAA

SEQ ID NO: 49014 - protein, 341 aa, unidentified
MASYYVGLDVHLKHTSVCVLDGDGKRIKRLTIRGPWRKIAEELKRLPGKVAVCFEASTAYGCLHELFSEVAARVVVAHPGQLRLIFRSKKKNDRADAEKLAKLLFLGEVPTVYVPSQDVRAWRQLVEYRRRLIAKRTRTKNALRAILRTVGQRPPREFGLWTRLGAAWLAQVELPQLTALQRDLLLEELAMFERQVGRAEKELERYSRDNPAVALLRTIPGVGLRTAEAVVAYLDDPSRFASSKQLGSYFGLVPSQDQSGSTNRLGHITRSGPSVVRHLLSEAAWRSIQCSPTIGRFHERIQQGNPERKKIALVATAHYLVRVMYAMLRDNRPWEEQAVAA

SEQ ID NO: 49015 - protein, 454 aa, unidentified
MSREPVEIEAEDDEQLVERVAAIDVAKASGQVCTRVPHAQVAGRRVTKVWNVGATTNAISALAEQLAAEGVERVVVESTSDYWRPFVYLLQAGGVTVWLVNAREVKQVPGRPKTDTKDSVWLAKLNERGMLRPSFIPPVEIRRLRDYTRLRFDLVGERSRHAQRLEKLLEDALIKLSSVASDILGVSGRAMIEALIAGERDPELLAELARGPMRAKKAALVEALTGRFDTHHAELARMLLDQIDALSATIDALTLRIEALIAQIPAAQAAAVDQAPGTSGPAGGQTPAPLAAVARLDEIPGIGRYAAQVIIAEVGLDMAQFPTANHLASWAKLSPRTIQSGARSRPGKTGKGNRYLKAILGEAATAAAKTDSFLGERYRRLVKRRGKLKALVAVARSILVIVWHLLANPTTRYHDLGSDFYASRIDKARRTRHLVRQLQALGHTVTLEAPPMAA

SEQ ID NO: 49016 - protein, 316 aa, unidentified
MHTSSVWIGIDVAKDWLDVARAGERTVARFANDAAGVAALVLTLHDWSAQSVVLEATGGYELAAVTALQGAGLAVAVVNPLQVRHFARSTGKLAKTDALDAQLLALFGERMQPEPRPQPDPTSQELASLLARRRQLVEIQTGERNRRATMPPRLHAGLDEHLKWLAEQIDELDRGVQKTIAEDPASQAKASVLRSIPGVGPVVAATLVGFLPELGTLDRRQIAALAGVAPLNRDSGHRTGGRRIWGGRGAVRAMLYMATVTGIVHNPLLKPVYDRLCARGKPTKVAMVACMRKLLTIANAMVRDGTIWTPSLVAAT

SEQ ID NO: 49017 - protein, 484 aa, unidentified
MAQGTRWVGLDAARVSALVAGQTQNDGLVKGEAAGRLPIVMGLDQHRAQITAEWIDLSSGEISRGRVVPADRASVRKFLKRFAGRDLEVALEATTGWRFVAEELERVGAGVHLAEPAETSGLRGPKKRPKTDWADARHLRELLLIGRLPESWIPPDHILDLRARVRCRHTLSHQRTECQQRIQSVLYHHGCPQRRALMTVEGREWLDAQPLPAAAREQITVAVAMINALDVQVAPLTARLYDYAKRQTGCKALIAAYYGIGGLTAVTILAELGDTRRFENSRDVVRYGGLDITVKQSDQHRAPGHLSRQGPPALRWALYEAAQQARHPRSPDREYYLQAAERIGGNRACLALARKLLKRCYHTARARAQTPQTLLPHPARPRRSRPDARVTPPLLSFVRAKSSITRCAAAGSRRPAADTHVDGLERPSGRNALPQRDHNRSGRRRAHPGASHTTGRAGPHPAVRVASRKRRYGSANPLRPCLAQ

SEQ ID NO: 49018 - protein, 346 aa, unidentified
MCSLPVFVGLDYHDSSVRVVVQDTDGSELGNADRTNHWKAIADFGDRFGRPVRAAIESCCGAADLAEELVSCAGWSVALAHPGYVQRMKQNPDKTDCQDAQLLADLERVGYLPRVWLAPRYIRELRHVVRYRLQLTEQRRATKLRLRALLREQRCHAPEGLNAWTKAWLHWVRQTAELSEQGRWLAEQHLEELARLAIRIHEVEKRLEHLTTNDVEVQRLQQQPGIGPVTAWMIRAEIGHFDRFRTGKQLARFCGLSPRNASSGQRQADAGLIRAANPALRTVLIEAAHRLVQYDPSWQKFAQRLRARGKPGSVVAAAVANRWMRRLYHEMKTSSGELAVAVGPAQ

SEQ ID NO: 49019 - protein, 340 aa, unidentified
MQITTVGLDLAKSVFQVHAINASGEVVVRRALRRAQVLPFFGKLEPCLVGIEACGTSHHWARELARLGHAVRLMPPAYVKAYVKRGKTDAADAEAICEAVARPTMRFVAIKSVDQQAALSLHRARDLLVRQRTQLVNLVRGLLAEFGVAIPRGITNVLAFARRLAAGEAPEVPDLAAKVVGALAAQALAVQDQVHRLERELMAWYRSSTLARRIATVPGVGLLGATALAATVTDPGQFRSGRQFAAWLGLTPRLNSSGGKERLGGISKMGDRYLRRLLIVGMTSLVRQAKCGPGTTDPRLAQLLARKPARVATVAMANKAARVIWAIMTRGGVYRAPQAA

SEQ ID NO: 49020 - protein, 409 aa, unidentified
MFYAGIDIAKRNHEAAVIGKDGQALVESLSFPNSQAGCEKFCQLLERLSIPKQELIIGMEATGHYWLAIYAYLTEKSYTIHVINPIQSDAFRRMSIRQSKTDAIDALLIAQIMRFGRYSSTALSEENIVALRQLSRYRLALVDICGDSKRRVIALLDQVFPEYERLFSDVFGVSSRELLLRCQTPEDMLDISTEELAALLAKASRGRFSEQKAEEIQAAAATTFGISYAREAFAFQIKQIIEQICFSEQQLEQLEAQIADILRRTNQVIATIPGIGETLGAVILSEIGDIHRFETPAKLVAFAGLDVRVNQSGEFTGTRNKMSKRGSPYLRRAIWLAASRAAFCDPTLSDYYQSLRTRGKHHLTAIGAVSRKMCNILFVILRENRPYEPLPPKPAIHQLSEPEPPSVTK

SEQ ID NO: 49021 - protein, 359 aa, unidentified
MLVERTCVGLDVHARSVAAAAIDGVTGELSQARLTPSHDHIRSWIEQFDGPVAVVYEAGPTGFGLYRALNPVGVRCVVAAPSKLQRPPGDRVKTDAKDAVHLARLLRLGEITAVTVPTVDQEAARDLVRARDDCRGDLMRARHRLSKLLLRHGFVYSGGQAWTGVHDQWLRRQRFDHRATTMAFESGYEAVTAITARRGRLEKAIAELAAGSEFTPIVHRLGCLRGIATLTAFALAVEIGDWNRFTGNSIASFVGLVPSEHSSGASRVQGSITKTGNTHVRRLLVEAAWQHRPAYRPGKVMRDRWDLADPAARARGDAGNRRLHQRWVQFNLRRKRPVIANIAIARELAGWCWSLAVMG

SEQ ID NO: 49022 - protein, 338 aa, unidentified
MKLYVGIDLHSTNSVVVVQDEEDRVIARRRLANDLRTVTAWLEPYREAMAGVVVESTYNWYWLVDGLQAEGYDVRLANTAAIQQYEGLKYSDDQSDARWLATLLRLGLLPEGHIYPKEERPVRDLVRKRSQLVRHRTAHILSIENLIIRNTGRRISANAVRHLTDEEVDVLLPEPDLALAVKSNLAVMQCLQEQIERLEKTAQARVRLREAYQGLLTVDGIGKILALTIMLETGDIKRFAGVGNYVSYCRCVKSVRMSNHKKKGKGNAKNGNKYLAWAFIEAAIHAIQYNGRVERFYHRKAAKTKRVVALKAIAHKLARACYHIMNDGVSFDVTRAFG

SEQ ID NO: 49023 - protein, 361 aa, unidentified
MKKPAQHLIAEVPRRQAKVGITIGIDLGDVWSHYCTLNQDGEVVDRGRFRTTPKAIEKWFTDVAPARVAMEAGTHSIWISAQLQELGHEVIVANVRELRAISHSDRKSDQVDAEKLARYARLDPNILRPISHRTVEQQQALTLIRARALLVRLRTAAGNAVRGLTKSCGYRMPASATTCFAQRSLAVMPPGLAQALGPVLQQIAEMTVKIKLYDRQIQQLGQTEYPETQALLKVHGVGHLTALTFVLTLGSKERFGRSRDVGCYLGLRPRRSQSGDHDPQLGITHAGNAYLRSLLIECSNHILRPHGRDSALRQWGLRLAARGGKQARSKAVVAVARKLAVLLHHLWSTQAMYMPFYEQAA

SEQ ID NO: 49024 - protein, 330 aa, unidentified
MKNWNFILGVDVSKLTLDIHCAELNEHIKIANGTEGFKGFKKWVKELRIDLEKSIIVMEYTGGYEYKLIQFCESLSIPYTRIPGLAIKNSLGITRGKTDKVDSKRIAIYADEKIKSISPDKPLNRRILQLKEILSFRKRLVRTNAGLKASLKERLFMYDITSKDIIKKITEHSIKKNNADIKKLDISMEDLVKDDPAMLKNFTIIKSIKGIGPVNALMTIAYTENFTSFSNPRTYAVYVGVIPFDHSSGTSIYGRKRVSHIANKELKQELNQAAKTAIQWDKELSAYAYRKLQSKPYPIVLNNVKFKLILRMFSLVKRGALYVENYEKAA

SEQ ID NO: 49025 - protein, 352 aa, unidentified
MTQSAAFVIGGVDTHGRSHHAAVVDEAGRILGSAEFVASTAGYRRLLGWMRCYGDPARIGVEGTGTYGAGLCRYLQAEGVQVVEVDRPDRRMRRRQGKSDAIDAEAAARSVLAGTATAVPKNRDGIVESIRALRTARSGAVKARSAALNALHGMIVAAPAELRSALEGLPRSALVRTCAALRPDRQRLAGPTQATKVALRSLARRIVMLDAEVDELDVALSQLVHRAAPRTIALRAIGVDHAGQLLVTAGEQPERLRSEGAFAHLCGVAPIPASSGRTQRHRLHRGGDRAANRALHLAVVVRMRCCPRTRRYVERRTAEGLSKPEIMRCLKRYLAREVFRTLTADLLELRGA

SEQ ID NO: 49026 - protein, 397 aa, unidentified
MDIKPQLERAVGIDVHKEKLIVCFYVRDQVYEVKEYGTFTCDLYQLRDDILHYKIADVIMESTGVYWVALCAILTTAGIKTHVVNAYFVKNMPKEKTDKKDAKWLCKLLVNGQIRDSYIAGEDQRCFRDLCRNRTGYSHQITQVQNRILKVLERRNIKIRSVVSNMSTQTSKDIVKALSEGETDVEKLISLCLGKLKKKKELMRKALQGVLTPHDCSLLKMLLADIAHFENNIAVMEQDIKKHTDKINPQLIKNLDDVAGIAQKGAEIILAEIGDNVDAWETADKLAAWTGTAPGNHETANTKKYVGRRSGNTYLRTAMVQTAWSVVRMKNSYWRALFSHLNKRMHVKKAILIIARKLVKVIYKVIKGVITYKEYGAEYFVKQLQQRVQQNRPILSR

SEQ ID NO: 49027 - protein, 410 aa, unidentified
MEPIVERCCGVDVHQARVTACLLVGLANQRPRKVIRQFRTFTADLEALRAWLESEHCTHVAMESTGVYWKPVYAVLEGSFELIVGNAQHIKNVPGRKTDVKDSEWIAELLRHGLIAKSFVPPAPIRELRELVRYRRKLVESRSAERNRLLKLLESANIKLSSVVSDAFGVSGMDMLHALLQGQQTPTEMAQLARGCMRRKIAELELALHGKLQDHHRTLLHLQLRRLQQVDRDIAEVDDHLDHALAAYREPHQRLMQIPGVDRVVAAVLIAELGTDMRVFHSAGHLAAWAGVCPGNNQSGGKPKPTRARQGNILLKTTLVEAATGAAHTHGSYLGDKFHRLRARRGYKRAALAIAHKILVAAYYMLAQAADYRDLGETYLDQRGHRAITGNLVRRLERLGYRVRLEPKAA

SEQ ID NO: 49028 - protein, 355 aa, unidentified
MEYFAGLDVGVKETAICVVNSAGAVVLEASAETTADAIHQALEGYARRLRRVGHEAGALSPWLHRGLQRLGLEVVLLETRHVHAALKAQRNKTDRNDARGVAQLVRSGWYRDVHVKSDDSYRLRLLLTHRRTLKRKFLDLENEIRHSLKVFGVKLHAAGRGSFEAHVRDAVAGDAFLAAMAEPMLRARAALWAEYTRMHALVVQITVNDAICKRFMAIPGVGPVTALAFKTAVDAPERFARSRDVGAHFGLTPKREQSGTSIDFDGHISRQGDKEMRTLLYEAASCLLTRSKVWTSLKAWGMKLARHRGHKRAVTAVARKLAVIMHAMWRDGTDFRFAAAPTVQPEAPTTALAPA

SEQ ID NO: 49029 - protein, 361 aa, unidentified
MVQTMTWAAMDVHARSTQAAAVDAVSGELLRARFGGEVESVVEWLVGLPGPVRAVYEAGPTGYGLARAAARRGIRVDVIAPGKTPRAAADRIKTDRRDAELLVRLLMAGSLRAIHIPSPAMEAARDLIRAREDVRCDLMRARHRVSKLLLRHGHVYPREKSTWTAEHRRWLASRGFDEANTELAYIDALAAVDGLIARRDALAERLSHVASDAELWPIVARLRAFRGIDTLTALALVCEIGDWHRFARPDQLAAWVGLVPSLSQSGESRQSGQITKTGSRHARRLLVEAAWHYQRPPRIGATLKNRQQGQPDHILEIAWRAQHRLHRVHQRLRQRGKHPALVTVATARELTCFCWAAATAP

SEQ ID NO: 49030 - protein, 344 aa, unidentified
MLHVGLDLSRRRLDVCVIDDTGELVTQTASPPDADGLRHLAARLSGLRVRAVIESMTGARFVHDTLEEHGWEVLVADAQKVKGLAPLACKTDKIDARVLAELSWRDLVPAIWLPDPAIRRERELARYRLHLVRHRTTLKNRIHATLMTFGHPCPVSDLFGHAGRELLDRLQIPEPWRRNVDASLELIDDLELQIARLTVELQRQGADHRYIPLLVTAPGFGWINAYTVASEIGDINRFASPAKLCGYTGLCPRVYQSGNTDRRGPISKQGSRYLRWALFEAALHACTHPVYAERYQRTKQRLGRHRGPKVAQIDLSRRLTEAIWHMLTRNQPFAPAGARFRLAA

SEQ ID NO: 49031 - protein, 329 aa, unidentified
MELHRLGIDLGKTVFHAVGLDHRGEVVLRRKFSRRQLLQFTINLKVALIGMESCSGAHFLGRALREQGHDVRLIPAQYVKAFVKTNKNDFIDAEAIAEAVGRPTMRFVPIKSDDQLDLQSLHRLRERWVMRRTAAVNQIRSLLLERGVTLRKGRKHVDQELPRILENAELKLSGAVRTLLAQLKVELDQLAERIAAMDRVIDQTSSEHEGCKRMQAIPGIGPVTATAIVAAIGTGQAFGKGRDFAAWIGLVPRQHSTGGKQKLLGISKRGNPYLRMLFVQGARAVLQKRSHQTSGLSSWLEQLTSHKHGNGPYICSGAYNKSYCFIDSR

SEQ ID NO: 49032 - protein, 351 aa, unidentified
MIIIGVDYHPSFQTIAFLMEETGEYGEQELNHSDGEAEKFYRDLNQRGVSVRVGLEATGYSRWFERLLAELGFEVWIGNAAEIKKKRVRKQKTDREDARLLLKLLLENRFPRIWVPSPENRDLRQLLWHRHRLVQMRTRIMNQLQAVAMNEGYRWKKKLFSQQGRALLEKLSLAPWASRRRKELLELLDQLDPKIAELTAAVQQEANQRPDVLRLMTHPGVGPVTGLAYVQVIGTPDRFPCGKQIGSYIGLIPCEDSSAGKQRLGHLSKQGNALLRYLLGEAAQAAARCNPDWRRRYVHLAMRRHKNIAKAAMARKLAVRLYWMWRNGWDYSQLVSFGSNAGKLATGHGVK

SEQ ID NO: 49033 - protein, 347 aa, unidentified
MLHAGLDLSRRKLEVCLLSEEGEHLDQLAVAPDADSLRTLARRIGEVHGEPVLAVIESMTGARIVHDTLEQEGWGVEIADAQKVKGLAPLACKTDKIDSQVLATLSHRDLVPAIWLPDPRVREERELARFRMHLVKHKSALKNRIHSTLINFGVPCPVTDLFGLEGRRLLERLQVPEPWRGNITASTLLIDELEDQIEAINRRLKDGHADHPYIPLLMSVPGIRWVLAFTIAAEIGEIERFASPVKLVGYTGLCPRVNQSGERDHRGPLTKHGPRYLRWAMLEATMHALRHPAYADRYERNKRRLGKQRGPKVAQIDIARKLTGAIWHMLSRNEPFAPRGADFRLAA

SEQ ID NO: 49034 - protein, 367 aa, unidentified
MPKIAEQALPVTGGVDTHADVHVAAVVDQVGRVLGTEAFRADASGYRAALAWMGSHGELAKVGVEGTGSYGAGLARYLACRGVAVVEVIWPNRQARRQRGKSDAADAVAAALAALNGEAAGVPKSRDGAVESVRMLRVARCGAVKARTQAGNQLRDLIVTAPDKVRQQLAGLPRARQVQVAARFRPRDLADPCEGAKAAMACLARRHQALTSEIAQLDAALEGLARHAAPGRLLARPGVATQVASTLVVTAGDNPGRLRSEASFAALCGASPVDASSGKQVRHRLNRGGDRQANSALWRIVVTRMAHDPRTKAYLARRTAEGKTKKETIRCLKRYVAREVYKALTASAWPAGRPTGPEQDPLAQLLT

SEQ ID NO: 49035 - protein, 306 aa, unidentified
MEVVYRCCCGIDVHKKIIVACLNQGGEQSLREFGTTTSEIKSLATWLTESGCEIIAMESTGVFWKPLYNLFELMDLDAIVVNAAHMKALPGRKTDVKDAEWIADLLRHGLLKASYIPSREQRELREITRYRKSLTEERCRETNRLQKILEGANIKLDSVVKDINGKSARKLLEKIIEDDVPTSEEEISKMIHGRMRSKLGQLVTAIEGITTPLQRKLLAQVIDHIDDLNRRIADLDKLVQDYMDEYEAAITALCDIPGIARRSAEVILAEIGLDMSRFPSAAHLCSWAGVCPGNCQSAGRRKHGRF

SEQ ID NO: 49036 - protein, 415 aa, unidentified
MKKHNYRAKKVNDINWPQLRQQFTGQALVFAVDVAKQQQFALLSNTELSESVLIQWNQLEQTAGLINELKQLNALITVVMESTSTYGDAMRYQFRQAGFTIHQASAKRVHDAKEIYDGVPSLHDAKAAWLIAHLYQDGLTQPWHELGDKERELNAYRREYELHESQHKRNQNRLEAFLSRHWPEVLPLLALDSVTLESLLIDYGSPEQIAACAEQAAKDMRGWGKHCLSTEKIDAVIHSAASTLGQPCIEAERRYLQALAEELRHNRTQAKNAKLALEAVVKAEPELKEMGLTVGIVTTAILIGLHLDPRHFGCARSFLKALGLNLKEKSSGQDHGKLKLTKRGSALARKYLYFAALRLINSDPVISAWYQNKVDPRAKLKTVIALMRKLAKALWHVARGQRFDARKLVMTTVVN

SEQ ID NO: 49037 - protein, 348 aa, unidentified
MVTDELDAVIGVDTHRDIHAAALVRPTGAVVSQTQIDTTGEGYQALLDFALQHAPGPRLVWAVEGTRSYGVGLTRFLHAHGQVVVEVDHPKRPTRGRAGKSDALDAVRAAREVLARDHQAIPRQDGDREGVRVLLVARASAVTSRTAAINSLKALVLTAPDPLRDRLRHHAAAAQAGVCAKLRRSPHRSPSDQARVLALRTTARRVLALSAEIDELERELAMMVKQWAPQLLAHTGVGVVVAAQLLVSWSHRGRVRSEAAFAMLAGVAPLPASSGTVVRYRLNRTGDRALNRALHLAVLSRIAYDDETKAYVARRLAEGKTKPEIRRCIKRHLARRLYRAMQALPDQT

SEQ ID NO: 49038 - protein, 480 aa, unidentified
MSTRTTRTKTTTDPPKAPPRPRAARRLRVTNPHAAGIDIHSDIHWVAVPPDHAPAPPPDHPANLPAHVRAFGACTADLYQLADWLAACGVRTVAMESTGVYWIPLFELLEARGLEVYLVDPRQSRHAPGRPKSDVLDCQWLQRLHSYGLLTASFRPAERVVVLRAYLRQRQMLLRYAGQHVQHMQKALEQMNVKLTEVVSDVTGVTGLAIIKAILAGERDPDGLAGRRNVLCKRTRAEIARALEGSWRAEHLFALKQAVALYEFYHQQMRECDAELEAHLRTFADRADGRPLEDRPGYKRRSRRANDLAFEAVRERLYRMAGVDLTVLEAVDEGPALVILAEVGTDVSRFPTAKHFTSWLGLCPQHQGSAGRIKSRGVRRGANRAGRALRLAVRGCHHAKNALGAFYRRVQARAGAPKAIVATARKLAERVYRLLRYGEQYVRRDAEEYEAAYRARVVKGLARRAGELGYRLEPTAPTGT

SEQ ID NO: 49039 - protein, 351 aa, unidentified
MIYVGLDLHKRYITACAIDAVGQLVAEDRRLGTELAALGAWLGRLTAPVTVVLEATLYWAWLEQQLTALGYTVLVAHPYQVKLIWQARTKTDPIDARKLAELARVHLLPAIWIPDAATRAQRQLLRGRAFLVRQRTVLKNRIHAYLTAENLRCPALDLYSRAGRAWLATVGLPPVVRRQVDLLLANLDLLTTQIGGLDKYIQRHVRQDPVAQRLQTIPGVGPFGALLLQAEIGPIQRFRGAPELAAYAGLVPSTQSSGGKTHHGPVGRGSPWLKWIVIEIIQAHKLAPGPVGQHYHKLLRAKGKPKATVAAARKFCTYLYWMLKEEWSYTEWLRQHDRPEVRPMQPLGSVA

SEQ ID NO: 49040 - protein, 423 aa, unidentified
MEVMHRRVAGLDVHKETVVACVRLMKGRKATRECRSFAATTTGLLELLAWLTASRVTDVAMEATGVYWTPVWKILNEGDFELIVANAAHIKRVPGRKTDINDAMWIADLVACGLIKASFVPPESIQELRSLMRTRKQLVREQTRHVQRLEKTLEEANIKLGAVISDLMGVSGRRMIEAMIAGEDDPHRLAALARRSLKAAPHTLAEALHGRLRAQHRFLLQLHLQQWDAIDAAIRQIDREVAAQVARLDAEAEDGQAPFCELIDRLSGIPGLSGLSATTILAEIGRDMSRFPTAGHLVAWAGLCPAQNQSAGKRKSARLRRGAPWLKTMLVQCAWAAKRAKNSYYSAQFHRLRSRRGPQKAICAVAASLLTAIYHMLKAGAPHRDLGADYFDRRSPEAKAKRLVTQLAKLGFTVQLQPLAEAA

SEQ ID NO: 49041 - protein, 316 aa, unidentified
MRASAAFFVGIDVSKEQLDIAVRPSGESWTVAHEEASCALVARLRDLAPTLIVLEATGGWEVPVTGALAAAALPVAVVNPRQVRDFARSTGLLAKTDRLDAQLLAQFAEVLRPAPRPLPDAQAQELTALLQRRRQLVEMLTAEKNRLPLAARRIRPQLQAHIAWLHQQIAQFDEDLRQLIRSSPLWREKDDLLRSTPGVGPVLATTLVAALPELGTLSRRQIAALVGVAPLNRDSGTLRGRRTVWGGRAQVRAVLYMSTVVAVRHNPVLIAFYQRLRAAGKAPKLALTACMRKLLTILNAMLKHHRRWAPVRAQHA

SEQ ID NO: 49042 - protein, 421 aa, unidentified
MADVDKVTVISSLDIHKRSVVGHVLNVFFDKNENKFVAESRAVKQVPRSLTGLGDLADFLREFNIHTVVMESSGPYGLMVYYFLESEGFDVWMVPARDNKSRGGKKTDIEDAKRLAQNFVAGSIRAYKLPSDPKVRALRTYVRARKKLVDQLVALKNMIIKTFDEACIDIKSIFSSLGKGFLMFLEGYLKGDSLDKIIERWPRLGKKREMLEIIMKTRLSEASLASLSSYLIIAKTIMKEIEKLDARIESLLAEFSDEVRLLLTVPGVGFKSAAVILAEIGNIKRFASAKKLASYAGLVPTVYQSGDEIIYGKLRSECNRRLRWILYEAALNAVKVSPWLRSFYERLIARGKKKKQALIAVARKIAVGIWHILTKHVPWKEAVRKNVRMPKKRRVPKVTVREALRILREAGYIVIKAKGSL

SEQ ID NO: 49043 - protein, 401 aa, unidentified
MKEFNAQAIGLETASALETVWQFRAVRDYPAYIGLDVHKETIVVGVAEPGWGEPMDRGKIANKPKAVAKLVDRLSREYGGELLLFCYEAGPCGYGLYRQLVGLGHDCQVVAPSQIPRKPGERIKTDRREARKLARLLRSGDLTSVWVPDEEQEAMRDLTRARDDLKAQERKARQQLNAYVLRHGHAWPANKTRWTKTHYNWLETRRFPHDWQQVVLQEYIDAVRAASRRVAEITAQMERVLPQWSLAPVVDSLVALRGIDKLAAMVLLAELGDISRFDSPKQLMAYLGLVPSEHSSGPRRRQGGITLTGNRHARRMLVESAWSYRFPARRTAHLKRKAVHASNEAKAIAWKAQKRLCGRYRTLIQAGKNAQLVCVAIARELVGFVWDIVRHEMPKLRQAAR

SEQ ID NO: 49044 - protein, 365 aa, unidentified
MEEGITFVGQDAHKVAISLSALFPGREAVTLACGNEKSAVQRMVKKIQRQARGEVRMCYEAGPCGYALQRWIEECGVKCVVVAPSLIPHKPGDRIKTDRRDAKKLAELYRAGLLTEVHPPSERDEAVRDLCRAREDAHEDLVRARHRLSKLLLRRGWIWHEGKKAWGQGHRLWIRSLRLECPEDQLVLDDYLLAIEQVEARLKTLDDEIERVSLEERFAPVVKALRCFRGIDTLTAMSLVAELHDFMRFDSARGLMAFLGLVPSEHSSGGKEQRGEITKAGNSHVRRLLIEAAWHYRHRPSVTSLKKRRDGQSPEVIALADKAMTRLNRRFNRLLQRGKARPKVVVAIARELTGFVWAAMRLRTA

SEQ ID NO: 49045 - protein, 352 aa, unidentified
METAYDGRQIVGMDLHRRRSVLVRMTEDGRRLGMARITSSPQELQAQIARAGTSPKVVLEATFGWYWAADTLAGAGAEVHLAHPLGVKAFTYRRVKNDERDAADLADLLRMGRLPEAWIAPAGVRELRELTRYRHKLVHLRTSCKDQVHGVLAKRGVPVTCTGIFGTAGSAWLDGLGLPQPYGGKVTSLRHLTGELTGEITTLSAVIADLLAQHRGYQVIQQLPGIGPVLAAVIIAEIGDVTRFKTAAQLCSWAGLTPRHRESDTKVTRGHVTKQGSRLLRWAVIEAVQRIPRDSVIGSVKDAIIARRGKEAKNIAKVAAARRLLTLVFYGLRDGQIRCLSQAPAGPPGPVA

SEQ ID NO: 49046 - protein, 391 aa, unidentified
MVWTAPYGIECARMRLLHGVMVWTAPYGIECARMRLLQSQTREPSVNQIIRIGMDTSKHIFQLHGVDSAERPVLRRKLRRSEVLAFFAKLPPTVIGMEACGAAHYWARELRKLGHEVKLMAPQHVKAYVKRNKNDGRDAEGLCEAMSRPTMQFVPVKTEEQQAALMLAGVRQQLIARRTQLSNAIRGYAAEFGLTTAKGLDKIEPLLTRIALDETVPALARELLAIHGQDYARLQIELKAIEVKLMAWHRANACSRRLAQIPGVGPIGATALVMKTPDPRAFRSGRHFAAWLGLTPKDHSTAGKTRLGKITRAGDEMLRSLLVAGATAVIQQVRRGRGRPSAWLLALLKRKPPKLAAVALANKVARIAWKLMTTGESYDGARMPGAQAFAA

SEQ ID NO: 49047 - protein, 426 aa, unidentified
MPFAALDLHKKIVEAVLLDDDGAPAWRGRFPATRPALENFARAHLSPQHRLALEATTNTWAVVALLEPFVAEVVVSNPPRTRAIAEAKIKTDRVDALVLAQLLRSDFLPRVWKPDPATRHLRSLCTERANLVADQTRLKNRIHAVLHQRLIEAPAGDLFQPASLRWLEQLELDAVGRQTLDRHLRQLRRLEEELTALTDGLASEAHADPRTRLLMTLPGVDFPVAQTLLAALGEIDRFPSADRAAAYLGLVPSTHQSAAHCYHGPITKQGNSHARWMLVQAAQSVARHPGPLGVFFRRLQKKKNRNVAVVATARKLVTIAWHMLHANEPYRYAQPVTLEAKFSRLRIRATGKRKRTAPAKGTPRAAAYGSGKPPRAAPSLDQVYAAAALPALPAAAPGERRMLEQSGAASFAEQIRKPKRVPRRCA

SEQ ID NO: 49048 - protein, 356 aa, unidentified
MQTQVTKKIDFKGKDLFIGIDVHKKSWSVTILVGGMEHRTFTQPPDPRTLYTYLQKMFPGGTYYSAYEAGFCGYGIHRALNDLGIKNIVINAADIPTSQKDQIHKLDPVDSRKIARALEKGLLRAIHIFDRDREELRSLNRTRFYLMRDLRRSKNRIKSFLQYYGIPIPFEYDNSLWTLKYIAWLKQIKMKTLSGQDAFSNLISSYEYHRQQILILSRQIRTRMREYDNELYNLLKTVSGIGPLTSSALITELGDINRFPHINHLSSFVGLVPRVKQSGESSYNGGMTFRCNEYLRTLLIESSWQAIRLDPALMQYYQQHITNNKGQKVIIKVARKLLNRIRYVMKTRQPYVTGVA

SEQ ID NO: 49049 - protein, 417 aa, unidentified
METRSGGRELQRRENLLYVGIDLHKETHTAVMVNCWNEKLEVVVIENKPSEFKKLAEKVNKKSNHLGLEPIYGLENAYGYGRSLAVWLIENDYIVKDINPALAYDQRKSAPMYRKNDEHDAYCVATVLINQLHTLPDAKPKDNEWTLAQLVNRRDLLVKDGIRFKNGLHEQISMAYPSYSKFFSEIDGKCAMYFWKTYPSPVHLQEKIAEDLTIEFKEISPIIRGDKAELILDCVKNDGNTYREYQESRDFITTSLVRDLEHQREELAGLDKEIEKILLSFDYKLTSMPGIGTSIASKLIAEIGDIRRFPNADKLARFAGVAPVKFSSAGKGKEQSSRQGNRQLHGLFYFLAVTMVSRPKNGAPNHPVFYDYYMRKIGEGKTKSQALVCIMRRLVNIVYGMMKNKTEYQEPLPEKEQ

SEQ ID NO: 49050 - protein, 412 aa, unidentified
MNPVVGLDVSKGESQVQAFLDKGKPYRKSFSIKHTLDGLDRLLEFLREIEKLADGKQPSVILESTGQYHMPVIQFLEEQQYVYIIVNPLISHRARSTNLRKVKTDAIDAYQLCELYYKEELEPYKKRGIHLLNLRNLTRQQETVSSTAVQTKLQLQSILDQIFPEYRGVFGDLYSKISLQILSIFPTSKEVLSVSESDLTNKIAELCTTRSEKWAKEKAIKLREAALRNPFQNNLYQSHIFNLRMFINIVLQYQEHLSKLAAEIDALAKEIEEYEIIQSIPGVGEKIAATIISEIGEIERFNHPKKLVAFAGIDPSVYSSGRFTASINRITKRGSSRLRQALFMAVQCGIRDARKQKTSEEIIPRNKKLRKFYDKKREERKPFRVAIIACANKLLHWIYALLKRKEAFQNAV

SEQ ID NO: 49051 - protein, 337 aa, unidentified
MDYFAGLDISMDETHVCVLDREGVVVHESKTASTAEAIAGELAKAPSCRRIVFETGRMAPILFHGLSQLGLPVICVESRQAYQALKSLATHKTDRNDARGLAHLARTGFFKPVHVKSLSAHALRSLIVARKKLVGQRVTLENQIRGLAVVFGIRLPRALTAAFIDKALQASEGIAGLSAAMRGLIAARTAVMAAVAAIDADMRRMARASAPCRRLMTIPGVGQLTALAFVAAIDDPSRIRRSRDVGAYLGLVPRRYQSGEVDYVGSISKCGDRRVRTLLYEAANVMLTRYKGQLKLKDWAFAIAKRSTMRKAKVALARRLAIIMHAMLRDGTEFTSA

SEQ ID NO: 49052 - protein, 352 aa, unidentified
MITIGVDAHKRLHVALALDEAGREIGQWQGKNSAAGWRDLAQWAGAIAANRQWGIEGAWGYGRGLAQHLVALEEIVYEINPRWTAQGRRRARKPGKTDRLDARAVALMVRQEASTLPQVAPEDQTAVLDLLTRERDAAVGEATRLRNQIHALLVYLDPEYESRLPTLKSRAGLAALETYVSFSHDSLSKARAAAVRRLAQRLRLALSQAEELAVQIKDAASFFSSLTQLCGINLLTAGAIAGVLGPGHRFHTDAQLASYAGAAPLEASSAGLVRHRLNRGGNRRLNAILYRIVLTQAHHSEEARTYLNRKVAQGKSKREAMRALKRYIARAIWRLWQECYPIGITRLEAFVA

SEQ ID NO: 49053 - protein, 344 aa, unidentified
MEITTIGLDLAKSIFQVHGVDAAGNVVVRRALRRSQVLPFFTRTPRCLVGIEACGTSHHWARELIALGHDVRLMPPVYVKPYVKRGKTDAADAEAICEAVTRPTMRFVSVKSRDQQAALSMHRTRDLLVKQRTQVVNMMRGLLAEFGIDIPKGLERALMMAREIVDGAAPDVPPEAVKIIGTLSQQALDIHARLREIDRDLLVWQRSSDVARRLMTIPGVGPVGATAFAATVGDASQFRSGRQFAAWLGLTPLQMSSGGKERLGRITKMGDKYLRKLLIVGMTSLVRRAKYKPETVDPRLADLLARKPVRVATVAMANKAARVIWAIMTRGGTYRSGHMPALAA

SEQ ID NO: 49054 - protein, 430 aa, unidentified
MSYRIAGIDVHKKMLAVVVSDVEIESEYQFERRMFGSNPEQLRSLAAWLIEQEVEEVVMESTAQYWKPVWEALERYWKPIREKREGAGRRSGTLHLAQAESNRGRRGRKRDFRDAERLVKRLVARELTLSFVPDSEQRLWRTVTRRKYQLTRDRVRLQNQLESLLEEGHIKLSSLVSDLLGLSAQRMLKALADGETNPAALAALADQHLRATPEQLCDALGACTDLKPVYRRLLKMVLEQLQFLEQQIGQLDQEMASLLSQHQDAVQRLAEVPGLGVDSAQQIIAEVGPTAATFPSQKCLSSWVGACPGDDESAGVNYSHRSPKGNRHMRRVLNQTANAAARTKGSIFEVVYRRSVPRLGHNQAIGAIAHRQCRLIWLILHQGVRYEERGPAVTKRSKQNRTTRMIRQLRSLGYRIEPPNPQHPSPAQGK

SEQ ID NO: 49055 - protein, 388 aa, unidentified
MAKQNQAVTFEEVVERGCGLDVHKKEIVATVSGTGIESETRTFHSTTRSLTELKEWLLALGVTHVAMESTGVYWKPVMNILEPGGFTIMVVNARHIKYVPGHKTDKKDSAWICKLLRAGLLKGSFVPGREQRDLRDLTRYRRKLVQQQASEHNRMIRIFEDANLKLSSVFSNIRGKTCTAVIDAVISGETDPVKLAEMCTHWRLKSTQEEISLAVEGCFTEHHKFMIRAIRTSIKSIESEIEHLDKEIERRMQPIDDEMKQLCEIPGMDTKAIRELLAEIGVDMEVFPTAEHLTSWAGLAPGNNESAGKKKFTHQPRQQGDESHNDRMCVVCDTNKEHLLLRPIQETCRKTRKETRIGRNCRRNAKGGLPHAQRRHILCGIRRGLHGF

SEQ ID NO: 49056 - protein, 462 aa, unidentified
MKLYLGGDVSKGYADWVILSEKKQTVLENFQLDDTYAGHCKLYSALEAYFGKHLGLEMYAAVESTGGYENNWYNTLKSYQKVFNLKVVRKNPLGVNYNRRASMKRNVTDAISAVSIAEYMINHPENIAYDQDEKWKTLCRHWNFVEMQKQQRVQTINQLETILYSANPTLMRYKKGDLPNWLLELIIQCPTADKLAKAKPERLAKIPYLSLVRAKELVTEANQNIASATDRNAEILVTQIALQIKSFDQNIKSQMQLIERDLICPEIELLKSFKGISTISAIGLMLEIKTIDRFPTVKGFSCYFGLHPKFKQSGDKIIGVRMSKQGSKNMRKILFNIAKGAITYNPLITEVYEKKTSHGMSKMAAIGVCMHKILRIIYGMLKNKQAYNPLIDKQNYERSKEKQQDKLQQENTNIDKSRRYQEFDVKAPISRKQTKKRREHDLSQCEINSQSPGSTCSSETKL

SEQ ID NO: 49057 - protein, 343 aa, unidentified
MDEISMIGLDLAKHVFQVHGVDASGGVVLRRQLRRSAVEKFFAQLPPCTVGMEACGGAHHWARVIGRYGHQVRLMPPAYVKPYVKRNKNDGRDAEAIYEAVGRPTMRFVPVKSVEQQATLAVHTTRALLVRQRTMIANSLRAALSEIGIVAAQGIEGLRELMAKLEAPNEEVPEIMRGALLLLAKHWRALDADERALERQIAKAARADREARRLMEVPGVGPIIASTVLAKVPDAKVFRSGRDFAAWIGLTGRDHGTGGKHRPGRISKQGDRMLRALLISGASAYLRHQRTRGVSDPWLRDLLARRPYKVVMVALAAKTARILWAMLVKGEPYRDRASAPAAA

SEQ ID NO: 49058 - protein, 339 aa, unidentified
MQLYAGLDLHSRNTYIGIMDKEFKRVFRKRVCNNLPLIIKTLEPFQDQLEGIVVESTFNWYWLIDGLMDAGYHCVHLANPSAMKQYEGIKHTDDQHDAFFLAQMLILGILPQGYIYPKKDRPVRDLARKRLFLVQHKTSHILSLQSLISRCCGQRVSANDIRKFTVEDLQQLLTEQHIVLSAQANLETIVFLKQQIQRLEKAIQKKVKLNKAFQQLLTVPGIGLILAMTIMLEVGDIGRFPKVGNFASYCRCVSSKRLSDGKSKGHGNRKNGNRYLSWAFTEAAHLSRRYNVLFRSYYNRKLAQANTSLATKALSNKLARICYYIMRDQVPFRGNLLSQ

SEQ ID NO: 49059 - protein, 413 aa, unidentified
MDVVHPRCAGIDISKTDAKVCVRIQGRGSKRTASTVTTWGAMTNQILALREHLLEQKVTCVVMEATSDYWRPFYYLLEEHLEVMLVNAREVRNVPGRKTDVSDAAWLADLGAHGLVRASFVPPEPIRILRDLTRARTVITQERTREIHRLEHLLEDAGIKLSSVATDITGVSGRLMLEALIDGSDDPAAIADLAKRRLRVKIPALTEALTGHFTAHHAFMTRLFLDRIDAHTADIDRLSARIDEAIEPFRAARDLLTSIPGFSTTVAEIVVAETGGDMRIFPTAGHLASWAGTAPGSHESAGRVKSTKTRPGNRYLKGALGTAALSVSRSKGTYFSAKYRRIAPRRGPMKALVAVEHSMLLAVWNMLSNGDLYRDPGADYFTRRTPTKTRARAVAQLEALGYRVTLAPLPDTA

SEQ ID NO: 49060 - protein, 344 aa, unidentified
MPIVGGLDIHRKQITFDYLDTATGEVRRGQIAPADREHLAAWLAGRFTGQDVHFAVEGCTGWRYVAEELAVAGVTAHVAEPADTAALRGRKRHAKTDKTDSRHLRQLLADGRLPECWIPPSHILECRALLDTYHDLRVEHTAWTQRIHAALFHQGAPQLGGQRLRTGEGLAALRAAAAGLSPAGQLQIAVALDKLAALDRHLDELRRRLLEAARQLAGAKELHARLYGVGPVTALALVCWLGGAGRFSSARKAVRFAGLDVTVYSSDGKRSPGHLSRQGPEVLRWCVYEAGKTHARGSAPDYRYYATVKDRIDGKRAAISEARKIIRQAVHILAELGDGALAPA

SEQ ID NO: 49061 - protein, 316 aa, unidentified
MTYRGIDISQDWLDADLPGGVRRFAQTPASHAALLAAWPAETTAIVEATGPYGLRLLAAWHAAGQPVSVVNPLSVRRFAHSGLRRAKTDRTDAALLTAFGQALTPPLHQPPARWLSQLQQRQALLDLLKGQRTALRNHAHALALAPWPDPTSTAALAAQLGQLEQQIADLEQQLAADAQAQAPADYARLVSVPGIGPGTALALLLVGPGLRAFAGARQAVAYAGLCPRTYESGTSVRGRPRLSKLGDGRLRRRLYVAAWSASRHNPACAAHYQRLLAAGKAKKQALCAVAARLLRQAWAVLHHNQLFSPDCHLKFG

SEQ ID NO: 49062 - protein, 359 aa, unidentified
MEAQVKKIDFTGQNIYAGFDVHKKSWKVTVMAEDTFYKTFTQPPNPEVLYNYLKRNFPGGNYHSAYEAEFCGYWIHDKLTSFGIKSMVVNPADIPTTDKERVQKEDKRDSRKIARSLSSGTLIPIYTPTVQTQRDRSLLRTRAMLAKDMARYKNRIKSFLFFYGISIDDAFAQSKKHWTKRFMSWLESLEIDGESGKEALQILISECKNLRTSILKVTRQVRELSQTATYQEQVTLLESVPGIGLITAMTILTELETIDRFNNIDKLCGYIGLVPSTRSSGEKEKSGDITPRGHGVLRAAIIESSWTAIRNDPSLMKSYLIYCKRMDSNKAIIKIAKKLLSRIRFVLVNKKSYECLIGN

SEQ ID NO: 49063 - protein, 425 aa, unidentified
MNYKQNEKINQVKESTLVVGIDIGSTKQYARAFDWRGIELGKIFTFSNSREGFEAFKAWMRHLQDKYRKSDVIVGIEPTGHYWFDLGAYLEDEGILLVMVNPYAVKQTKELDDNSQSKNDRKDPKVIAKLVTEGRYSAPYTPDGVYADLRIMVTNRKRLIREMTQIKNRFARWFAIYFPEYTDVFGDYEAQSSMLLLKKVCTPEAIVELGAEKINKIWRDAKLRAVGMKRATTLCETAKRSIGLKKGSSAARYEMKLLLEDYEYKKAQLDAVMEEIEKLCRKIPESEQMLAIKGIGVITVAGFLAEVGDVRRFESPRQIQKLAGLSLRENSSGKHKGQTSISKRGRSKLRAVLFNAAIPLIAKNPEFKSLHEYYTTRANNPLKKKQSVIAISCKLIRVFYAILANGVTYDAQKMLSDIHRQPQAA

SEQ ID NO: 49064 - protein, 368 aa, unidentified
MDTLFVGLDVHKLSISVTTAEDGRDGAVRFCGEVANTPEQVRKLAGRLSRSGSRLEFCYEAGGCGYGIYRQLTEMDHGCLVAAPTLIARKPGDRIKTDRRDSQMLALQHRAGGLTAVWVPDEVHEAMRDLVRARGDAMMALMRARQQLLAFLLRHGRTYPVGKPWTLRHRRWLAGQAFEQDAHRIVFQDYVEAVWAAQDRRKQLEARISAMLAGWSLSPLVEALRALRGLDTISAVSFVAAVGDLGRFENPRRLMAYLGLVPSEHSSGDRIRRGGITKTGNREARRMLVEAAWSYRYPPRVSTGKTDVVSRQPKVVRDVAWKAQVRLCDRYRRLSAGGKRPTVVIAAIARELSGFIWAIGQEVRPAAP

SEQ ID NO: 49065 - protein, 412 aa, unidentified
MRRVIGMDIHRTFAEVVVWEDGRLRPHGRVDMTRSGLEGFARGLTKEDEVVVEATGNAMAVVRVLSPYVARVIVANPLQVKAIAHARIKTDKIDAGVLAQLRAADFLPEVWVPDPETERRRRLVARRNQVVRHRTRVKNEIHAILAAHLVPPCPHAELFNGPGRAWLAGQVLPDDERATVERHLRELDRLGEDLEVLDRDIGSAVVDDPAVKRLLTIAGVNVTVATGLVAAIGDVRRFSSPQKLVSYFGLNPRVRQSGLGLAQHGRISKIGRAHARALLVEAAWAAAKAPGPLHAFFVRIRARRGHQVAAVATARKMAVLVWHLLTKEADYLWARPALVAQKVRALELQAGRPAKKGNKRGSTYAYNVKELRDREKAIAEQAERAYEHLVASWRSKPGRKRTGAATAVEPSG

SEQ ID NO: 49066 - protein, 415 aa, unidentified
MKKHSNSLKNSEPDAKRVKLGETAQRNSREVMTELVAKLARQFDGEVLPAVDGKKGGRDAVRPNLNRLTVGVDLGDQWSNYCILGLSGETLAEGQFRTTREETSEFFRGMATSRVVVEVGTHSAWVREVIAGFGHEVLVANPRLMEGSKRRRRKNDRIDANKLARLGRTDPKSLHPIQHRSTEVREDLLVLRAREALVASRTELINTVRGLVKSMGARLSNCSSESFSEKAAAEIPDEVGETLQPLLRLIATLSDEIKIFDRKIEKLASEKYMHTKLLRQVGGVGPLTSLGYVLTLETPLRFARSRDVGPYLGLVPKQEDSGDSQPQLGISKTGDQMLRKLLVGSAHYILGPFGPDTDLRRFGMRLCERGGKNAKKRAVVAVARKLAVLLHRLWASGEVYEPLGYGAKLVRSAAA

SEQ ID NO: 49067 - protein, 345 aa, unidentified
MTIVGGLDIHRKQLTFDYLDTVTGEVKRGQIAPADRAHLRAWLARFAGRDDVAFALEGCTGWRYVAEELSAAGCAAHVAEPADTAAARGRKRHAKTDKTDSRHLRQLLAEGRLPECWVPPGHILECRALLELYHDLRAEHTAWVQRIHAVFFHQGAPQLSAGALRTEQGTAAVRAAAAAHLSPAGQLQVATALDMLTCLEGHLEELRHRLLVTARQLTGAKVLTARLYGVGPVTALAMTSWLGGAGRFSSSRKAVRFAGLDITVYSSDSKRSPGHLSRQGPAVLRWTVYEAGKVHARSCAPDHAYYAAVKDRKDGKRAALSEARKIIRQGCHILAELGDDALSAA

SEQ ID NO: 49068 - protein, 463 aa, unidentified
MKNHSAAAVGGSVAGFRTIHPDAAGIDIGGGSHFVAVPPGRDPEGKDVREFSAFTEDLQRMAQWLKDCRVKSVAMESTGVYWIPAFELLEAEGFEVRLVDAHQSKSMPGRKSDVLDCQWIRELHACGLLTAAFRPEQEVSVLRSYLRQRAMLVQYAAHHIQHMQKALTEMNLKLAEVVSDVSGVTGMRIIRAIVNGERDPRKLAALRHERCRNPAELIAKALAGNYREEHVFALQQALQLYDYYQSKIQECDLKIKAQLERFEDRSQGANPPPPDQRKVQGNEPQFDLRGALFRMAGVDLTEVDGLEAYTVLKVLSETGVDMSRWPTIKHWTSWLGLCPGSHISGGKRFSGRTKPCANKAATALRIAAQTLWHSKSALGAFLRRMKMLLGPAEATTATAHKLARIIYTMLKTKTPYHDLGQDYYEEKYRERALRNLKRRAKEFGLILVQAVDPQTAAPASVPS

SEQ ID NO: 49069 - protein, 387 aa, unidentified
MTVRTVIDLPAATHGETVRCLFAIELSRMSWVIAFNTPLSEKISRRTLIGCKWKRLLELIEEVRARVSRETGRAVEVISCYEAGYDGFWLHRQLSTHGIRNYVIDPASLQVDRRARRVKTDRIDTERLLRSLMAYLRGEPKVWSVVRVPSVAEEDARRLHRERDRLVSERVQHVNRIKGLCALQGIYDYNPLRPQAMAGLEQLRTTQGGALPPRLKSEIKRELQRLELVVEMIATLEAERNAIVEDEASTHINAKKIHNLHKLKAIGPEFAAVLVGEIFHRDFNNRRQLASYVGFAPSPFQSGNVAHDQGISKAGNRKGRTTGIELAWLWLRYQPDSDLSVWFRTRVGTTKGRIRRIAIVALARKLLVALWRYLETGVVPRGAVLKG

SEQ ID NO: 49070 - protein, 294 aa, unidentified
MHLRPSGETFAVARDGEGLEALVAALRRLDVALVVLEATGGFELTVAAALAGAGLPLAVVNPRQIRAFARATGRLAKTDALDAEVIALFAERIRPEPRPVAGEQAQALSELVARRRQLVEMIGQERNRSRQARSRRVQKSLAATLKVLEAQLAALDRDIDGAVRGSPAWREADDLLTSVPGVGDVTSRTLIADLPELGQIGRRRIAATVGVAPFNRDSGQWRGQRAISGGRTDVRNTLYMATLSAIRCNPVIRAHYQRLLDRGRPKKVAIIACLRHLLTILDAILRTKKPWQIA

SEQ ID NO: 49071 - protein, 338 aa, unidentified
MSLYCGIDLHANNSYVVVSDLEDHVVLGRRLPNDLERVLRALEPYREALAGVAVESTFNWYWLVDGLRQAGHTVHLVNPLAAQQYQGLKYADDRSDARWLAKMLHLGILPTGWISPPEQRGIRDLLRKRTQLVRQRVACRLSLRNILERTTARRLTGAALERLSPEQLSDWIEDENVCLSMTTTLAVIETLDEQIELIEGVVFEQACQEAAFSVLTTIPGVGPILASTIQYETGDLSRFAGVGQYASYCRLVRSERLSNERRKGQGLRKNGNAYLSWAYHEAAHFAVRYQPGARKWYERKRSKTCALVAIRALAHKLARAAYFMMRDQVAYEPARLFG

SEQ ID NO: 49072 - protein, 400 aa, unidentified
MLSIGIDVSKGKSTVCGMKPGGEIVYAPFEVQHTREGMSELVSLLRSSCEEVRAVLESTGSYHCPVVAALLENGIFVSVVNSLRMKRFCSQSIRKVKTDRIDAMQIALYGLAYWQELQPTRLPEDTYRELQLLARQYYQMTSLLIKAKVDFNAICDQVLPGMQELMSDHAGRHKLSDFVLRYRHTTHILEMGETRFRKDYCKWAEKKGYRNCERMAALIFATAQNGIPVLPNAPSTQIVITEAIRVLHTVEASRDAILTQMQALAKTLPEYSLVREMPCIGDTLAPRLIAEIGDVRRFHSKRALIAYAGIDAPPYQSGKFCANNRHISKRGNRYLRKTGYEVMQSYVMHKPANDPIFTFIEKKRGEGKSGKLAMVAGLNKFLRVYYGKVTELYRSLPAIE

SEQ ID NO: 49073 - protein, 507 aa, unidentified
MHAGDVAGLYESAQAVGRRVGDIDGLVLGVEWCDGQDRAEHLFLRDRAVGIDVNQQGRFDVVTTGHVGCKLIRRCGMSTAHWLGGFFLQGPVQRRLLMSVLGNPLDPSTVIVAVDPGKAFNRVWISDGSGLLVDPMSLPVSREGVSGLELALGGRGGGEPVIAVEATGSLHRAWASELERRHPGSVRVFAPSETKAARIQLGSGRFKSDDRDCAALTYLVRQGLGRRYREQSAVDALRAAVRHRRGVVADRKAAQQRLHDQLNVPCPGLSAPAGHGRALALETPTGLAVLACAAAFAGRAPKSRSLICRAPGRLTVATADYWVARWRQCLPPPADAAARAQRLGRDLDRYRRLLADITELDAQISELLAVTDGQVLTTLPGVASIRAAAFAAHSLPIERFPDAEHLYSATGLAPALYQSATLNRRGRISRQGLAEHRDALVGIAWGLSKQSPSFAARDAELRARGMAPIQARVALARHACRLAYRLLRTQQPFDEQRYRRGRLSRER

SEQ ID NO: 49074 - protein, 339 aa, unidentified
MRLYCGLDVHSSNTRVGIVGEDGQRVYDCRLANDLGLILEHLSPMKEQIEGVVVESTYNWYWLVDGLMEADYRAHLANPSAMKMYEGRKHTDDRHDAFWLADLLRLGILPEGYIYPKADRPVRDLLRKRSHLVKLRTSLMLSLHGIVARNCGVRLKGNVLKALKEDRVSPYLEHNEDLHLAGRKTKESIDHFTGAIHQIEHYILTRVKMRDEYMGLISIPGVGKVLALTIMLETGPASRFASAGHYASYCRKVPSVRLSNSKVKGRGNRKNGNRYLAWAFSESAALARRYSPQARRYYDRKRQKTHPAAAHNALASKLAKAAWHIMRYQDVFMPEKVFV

SEQ ID NO: 49075 - protein, 318 aa, unidentified
MQTSLDIGVDVASKSVMVACAAHSFAPRNVANAHGALRIWLQTLPAGSRIGLESTGTYHELLANLAHAAGLTVYVLNPREIKKYAQAVGHRGKTDRLDAEVIARYVAHEHAELHAYVPRSAAQRRLDQLLKRRAKVVALQTGLRQTWRGVPGLQAELAAVATAYSRLLARIDSLVEELLTELVQVRIDAARTGSIPGYGRRGSVAVAHALQQLPFSSADAFIAHTGLDPRPQDSGEKRGRRRLSKRGPPALRAVLHMCAMSASRTATWAPYYQRQLAKGLSGTAALAILARKMARTAYAICKNKTVFDPARLSPAPLT

SEQ ID NO: 49076 - protein, 418 aa, unidentified
MTRRDDSRIIRIVHPICCGLDVHKESVSACIIFPDDKGEEQYDVKVFGTFTDDLMRLRDWLAEHNCPVVAMESTGVYWRPVHNVLEDSVDVVLANARDMHNVSGRKTDIGDSKWIAGLLRHGLLKSSFIPPQDVRQWRDLTRLRKKYVHTVGDYRKRTHKLFESANIKIDSVVSDLFGVTGRNLMQLLVADRKLTLSDIQTCVRGKLKGKEAELFRSIQGFFTDHHRFVLKMILETIATLEVQIEALDLQIRCAMKEHEALLDRMKQAPGIADVASREILAEIGPILDSFPKDTSLVAWCGLCPGNNESAGKRKSGRSPVRKNHLKTIMTEVAWAAIKKKDSYFKDKYYRLKARRGAKRAIVAIAHRILLGIYHVIKDGVDFRDLGGDYLTLRNKSQKVFHLRKQALAMGFDLVPQTV

SEQ ID NO: 49077 - protein, 338 aa, unidentified
MTIIATGIDLAKNVFAVHGVSAGGAVQMRQPKVARGKLNALIASLPPGVVGMEACSGAHHWARQFQAHGHTVRLMAPKLVTPYRMSGKRGKNDAADAAAICEAMQRPNMRFVSIKTEEQQAQLMVHRARQGFITERTACINRIRGLLSEFGVVLPLKAEVVRRQAREHLEDLPGYANLVIGDLLSEVAHLDERIAQYDKHVHAIARQSTPAQQLMQLMGIGETTATALVAMVGNATEFSCGRQFAAWIGLVPGQYSSGGKTRLGRITKAGDAYLRSLLVMGARAVLNAAKNKTDSISRWALAVEQRRGYWKAVVAIAAKNARLAWAVLTKGEAFKLPA

SEQ ID NO: 49078 - protein, 347 aa, unidentified
MTIMVDTQRALTGGVDTHADVHVAAVIDPQGGLLGVESFATDLAGYKQLSGWMCAFGKIGLVGVEGTGSYGAGLSRHLHQVGLVVVEVDRPNRQERARQGKSDSLDAIEAARAAQSGRAFGVAKTRDGNVEAIRALMVARRSARESRTKAMNQIRQLVYTAPDELRERFVGVPSWRLAEGVAILRVHADRDPVRMATKSALGTLGRRAVALGEEGKRLDVLIARLVDKVAPELVELVGVGPDTAALLLIAAGDNPSRLRSEATWAKLCGVAPLEASSGKVTRHRLNRGGDRQANSALWRIVLTRMSCHEPTKVYVARRTAEGKSKREIMRILKRYVAREVYHYLPRD

SEQ ID NO: 49079 - protein, 406 aa, unidentified
MNHNERIVMNHTASSNNTAATNHTASIAWLGLDAHSKNCVLGHLDDQGHELQWWKFPTQPQQLLAHLQAIPATDKRLMLEESNLARWLGQLLKPHVQQLVVCDARRNRLISHDPHKHDRRDAFALARLLRLNEFKSVWQPTDPQRVLFKRSAKAYELAVQRQTRLKLQLKALFQHWGLFPTGSTVFSESGRAVWLKQLPYDALRSQAGLLYELLDQALASQSQSRRLLAQAGRQFPEVKRLRTVPGIGLVGAHLFVAYLQDPKRFTKFSQLTRYCRLGIRDRTSDDKPLGYQQLDRQGVGTLKAISYRAFLQAAKRRAGPVWDFYQLSLRHTRSTTHARLNTQRKILLALWTLWLTGREFDPAKFSRAQPIDVLTPRAGGPSVRRLAQAQVTGRNGSRLEIQTIMR

SEQ ID NO: 49080 - protein, 334 aa, unidentified
MSSVTVFVGLDYHQAFVQVCVMDAKGSVLSNRRCDNSARLIVNSVKAYGERVVAAIEACCGAAALADELLAAGWQVSLAHAAYVNKVKQSPDKTDWSDARLLADLLRVGYLPRVWLPPANLRQLRHVVRYRQQLAEARRNAKLRVTALLRTHRVEYGVRRWTKRWIAAVRSCEALGTEGNWVVGELLDEVERLQQQLNVVEARLAALTADDPFVQKLLSYVGIGLVTAVLLRAELGDMSRFRSGKQLSRFVGLSPRNTSSGLKQADAGLIRAGNPQLRAVLIEAAHRLQRLDPRWATLGRQLRRRGKPGSLVAAAVANRWVRWVYHQLRDVQVS

SEQ ID NO: 49081 - protein, 350 aa, unidentified
MIIIGCDYHPGFQQIAFVDTDSGEWNERKLGHREEAEQFYRQLEVRGKKVRVGMEASGHARWFERLLTELQFELWIGDAAEIRTKRVRKQKTDRQDAQLLLTLLVEDRFPRIWVPNEENRDLRQLLWHRHRLVQMRTRIMNQLHVLALNEGVRRKKALWRPAGRAQLQSLVLARWASRRRQDLLELLDQLTAKIQELTRALEQEVEKRPVARRLMTHPGVGPLTALAFELVIGTPERFGCGKQIASYVGLVPWEESSGDRRRLGHISKQGNSLLRFLLVEAAQVTVRTDPDWRRRFLHLAMRRERRIAKVAMARKLAVRLYWMWRKEWNYEQMRKFGSHVGEPVHRQGAS

SEQ ID NO: 49082 - protein, 335 aa, unidentified
MSVKETSVCIVDDAGKIVREVRVASEPEALLQVLANNTYHFKRIGLEAGPLSQWLYSVLAEAGLPVICVETRHMRAMLKAQINKTDRNDARGLAQMMRVGLYRPVHVKTLRSQKLRVLLTHRKLLQSKAIAIENDLRATLRNFGLKVGMIGPVKYEMRIRELVENLPDLAVLVEPLLIVRRVIREQLGILHRRLQVIVRDDDVCRRLMTIPGVGPVVALTYRATVDVPARFRNSKAVGAVFGLTPAKYQSGENDRTGAISRCGDEMMRMMLYEAAQSMLVRSAKWSWLKAWAMKIARHRGMKKAIVALARRLAVIMHRVWVDGTAFRWTREIAPA

SEQ ID NO: 49083 - protein, 343 aa, unidentified
MKLSYVGVDLAKNVFQLHGVDRSGKAVWRRRLRRHQWLGALMEAADSSCVIGMEACTGAHHWARQLQAHGYTVKLIPPQFVKPYVKSNKNDANDAEAICEAMTRPHMRFVAVKSVDQQDIQATHRIRAELKDQRNAKTNQIRGLVAEYGLVAPQTLLALRAAIPDWLEDAENGLTDYFRSLLHGLWGDLLALDDRIKELDKQIEQLANGNEVTRRLQQLRGVGPMVATALVATVGTGEQYRKGRQMAAALGLTPRQNSSGDKHRLFGISKRGDAYLRTLLIHGARAVMSQARHRDDRLSRWVTDIAKRSHPNVAAVALANKTARMAWAMLQHGTDYDPALAVS

SEQ ID NO: 49084 - protein, 450 aa, unidentified
MSNGNGVSRGDRNRNARLDRLRALVPVTNAIVGIDLADKKQMVVVCDHDSKVLARRTYRCRAWDLGTALDWAHERAAAKGFAGMTVSCEPTGHRWRVLAQLAADRSMPFVCVQPAVSSWSRRAEDLTHDKTDEKDAVLIARLTAQLRCYEPEPVDETWGRLRHLGARREQLITEISGQIQQMRDLLECVWPAALECAQQPFRSRTWIAALTVIVDRDGGEFDRTRRLGLARFERAVLREISKRGGQKPCRRIARSVFAALSDLAGVIAHRAGALERVQLLLEDWRTAHHRLADTEQRMTGVLDELGLTGLVTSITGISAVGAAAILAQTGDPRRFTTARALVKHAGLAPREKLSGTFTGRTKLTGQGRPGLRLAAWRAVWGAQRANPVYGARYRHLTTREHNRLKPTQAQTVIAAAILRHLHAVITTGQAWNPSIATHGTRSAIRTTAAA

SEQ ID NO: 49085 - protein, 342 aa, unidentified
MQVTTIGLDIAKNVFQVHGIDASEKVVVRKQLRRSQVLAFFKALPPCLVGMEACATAHYWARELTKLGHRVRLMPAKDVKAYVKRNKNDAADAAAICEAVRRPTMRFVQIKSAEQQGRLMLHRTRDLLMRQRTQVINALRAHLAELGIVAAQGREGIKELLTIIASEEDARLPVDAHASLVVLAAGLQAVQTMIGSIEKRIIVQHRSNEASKRLETIPGIGVIGATAIAATVPDPKAFRSGRDLAAWIGLVPRQDSTGGKQKLGPISKQGDQYLRRILVVGAHAVLRRARQQPEKYPWLTQLLARKPFKVVAVALANKMARIAWALLAKGGTYRAPALAAGA

SEQ ID NO: 49086 - protein, 362 aa, unidentified
MKKYSTTIGLDLGDKYCDWALMVDDSKDIQEEGRVRTNKEALKRKFAALAPARVAMEVGPQSPWISRLVTECGHEVIVANPRKLKMIFDNDKKSDKVDAAILARVARFDPELLAPIQHRSEATQLALAKLRARDAAVGARTKLINAARGLAKAAGHKLPKCSAPCFHRKGIEELPESLRPALAPLAEAIGQLSKTIKDYDTEIERMCREDFPETELLRGIAGVGALTALAFILTIETPERFAKSRDVGAFIGTTPRRDQSGGKDPSLGITKAGDPFLRRTLVQAAHYILGNRNIQDSELRQWGLRLAGPLDAKGKHNKRLKKRATVAVARKLAVLMHTLWRNGEVYEPFHQQALREERKQAA

SEQ ID NO: 49087 - protein, 343 aa, unidentified
MEYYVGLDVSLKRTSICVVNQTGSIVQEGVVDSDPEAIASFVRSRAPGTVRIGIETGPTTTWLWTELHRLSLPVICIDARHAKAVLKMQVNKNDRNDAAGIARIMQTGWFKEVRVKDLDSHAVKALLASRALLVKIKRDLENQVRGLLKNLGLVIGRAKFNVFAVRAEGLIENRPELVAAVRPLLAARRAIEQQVEDLDRKVHKLARRDVQVRRFMTVPGVGPITALCFKATIDDPTRFKRSRSVGAYIGLTTRRHASGEIDWSGRISKCGDAMLRMYLFEAAGVLLTRVPKWSRLKAWGAKLTKRNGLRKAKVAVARKLAVILHRMWIDGTEFNWSTKKAAA

SEQ ID NO: 49088 - protein, 369 aa, unidentified
MQKTIKNIGLDVHKNSISIGIADEGRDGEVRYYGKIDNDMNQLDKVIRKLISKGAVLRFVYEAGPCGYAIYRYLTKNAMDCVVIAPSKIPQQSGNRIKNDRRDCLSLARLHRAGELTPVYVPTEEDEALRDLVRAREDATRAVRTAKQQLGAFLLRHNVVYSGRTKWTKAHFNWLTDIAMPHPAQQIVFQEYIDTVTNCCNRVQRLTEQVRFQSRQGRQHKLIESLQSMRGISLIVAATIAAELSDLTRFENPEKLMAFLGLIPSEHSSGDRVRKGSITKTGNGHVRRALVAAAHAYRFPARKSRAIRKRQEELPEGVIDISWKAQCRLCTRYQYLMAKGKNVNVTKTAIAREIAGFSWAIAQELSKAA

SEQ ID NO: 49089 - protein, 350 aa, unidentified
MKVTTIGIDLAKNVFQVHGVDEQGKTVIKKQLKRHQMAEFFVNMPTCLIGMEACSGAHYWGRKLTAMGHTVRLMAPQYVKPYVKSQKNDAADAQAICEAVGRPSMRFVAIKNVDQQSVLALHTARRGFVKARTALANQMRALVGEFGVVIPKGLSNVTSRLPQELEDASNELTAVVRLLLQQLLEHFKEIDTQVKKLEKQIRVWSRQDEQARRIEQIPGIGPITASAVVASLGDVSLFEDGRQVSAWLGLVPRQHSSGGKTVLLGITKRGDSYLRVLFIQGARAAIQAAQRSAEGPPAWLAKLLARKHPNVAAVALASRNARTVWALLAHKRDYDPKHGLDKCISAALAA

SEQ ID NO: 49090 - protein, 415 aa, unidentified
MTTLFVGIDVSQSVAQVCFLDQVGQVLGQFKIANDLPGAEQLVRRVTSVAKERNLVNVVIGLEATGLLGWHLRTYLSQVPDLQPLHPKVYVFNAKVVAGFKKAYPDLPKTDAVDAWVIADRLRFGRLPRPHEEGERFEALQRLTRARYHLVHNLVREKNRFLSTLFLKFSAFVQQEPIKRTFGTTALAVLTEFTTAEEVAAQSLEQLTQLIMDRSRNRYGDPQEIAAAVQKAARASFRLPKAMADPVNQVLACQINVIRAMEQQIRELDIAIERLLSTVPQTLHSVKGLGPVYTAGIIAEIGSIDRFPNEAALAKYTGLYWTKYQSGNFQAENTRMTRKGNTYLRYYLVEAANSVRMHDAEFRRYYSLKKAESKTHAHKRALVLTARKLIRLVDCLLRSNRLYKPPQGRLQTGGR

SEQ ID NO: 49091 - protein, 371 aa, unidentified
MKSIVYVGMDVHATNYTLSCYMVENDRCFATVQVEPNYKEILKYLENVQKNVGEPCEFHCGYEAGCLGYSLYHQLVDHGVDCIILAPTTMPNYKKNEIKTDRRDAMKIARCLAFNTYRAVYIPTKEDSNVKEYIRMRDSHKLALKKVKQQILAFCLRYDFRFTIGKSYWTQKHLAWLRSLSMDALMREVLDEYLQTYQNLMDKLERFDKRIAELAGGKTYAEKVKKLSSFIGIRTHTALALIVETGDFTRFAKAKQYAAFLGLVPGEQSSGDKQKRTGITRAGNSHLRKLLTEAAQCYGRGRVGFKSKALKERQYGNTPETIAYADKANARLKRKFYRMVLSNNKKHNVAAAAVARELSCFVWGLMTGHTA

SEQ ID NO: 49092 - protein, 349 aa, unidentified
MVADELDYVIGVDTHLDEHVLAVIAAPSGVVVAQRSIHASARGYAAALRFAADKANGARVWAIEGTGSYGAGLARFLAGAGETVLEVSRTPRAERRLRGKDDALDATRTARAALASETLALPRSGQRREALRLLLVARRSAVDVRREALGQLRGVIVTAPDKLREELRGLPVGRLLDRCSRLRRSRSASADELATRLVLRSLARRIQAATLEAAELERELLGHIRALAPPLLEEPGVGPIVAAQLIVAWSHPGRLRSEAAFARLAGVAPVPASSGKTTRHRLSRGGDRQLNRALHTVALHRRQHDPQTKDYIARRIAEGKSRRDATRLLKRYLARHLYRLLQQQAPQMT

SEQ ID NO: 49093 - protein, 345 aa, unidentified
MKITTVGIDLAKNLFQVHGIDERGKAVLRKQLRRAQVAVFFGNLPPCVIGMEACASAHHWARTLQRFEHTVRLMAPQFVKPYVKTNKNDVADAEAICEAVGRPNMRFVPIKSIEQQAILSVHRVRQGFVKARTAQANQIRGLLGEFGLVIPQGIINVTKRVPEILEDASNELPVPFRHLIDRLTEHLKELDRQVKEFEREIIAWHRSSELSCKLEKIPGIGPLAASALVASIADAHSFKNGRQVSAWLGLVPRQSSSGGKPTLLGMSKRGDAYLRTLLIHGARSAILAAKNKVDNTEGWLTHLLKRRHPNIAAVALANKNVRTVWAILAHGREFKADYVPTRMAA

SEQ ID NO: 49094 - protein, 443 aa, unidentified
MLLHNAIGIDPDSMACVASLVTREGSKPLTKRFLLTAKGRNNLAQFIATVPGCLVGIEGRRGQSSPLESFFHASGIPFYCIPALKIGNYRKAMVGVNKNNENDARAVAEFLLDVEAKGQLEAYREEETVDQELRILARQRLDMSMQITQHVNQLWKFLKLKANDLYLALKGNDDNETTKTKLNSTRILLLISTVPELSSWVNLSEQDILEHSGGKKVRGWENLIQIIRSSSRYIDPVSFGAQLILRHTAETLIRLQEQESELDHQLKVEVKKRPLATALVDRYKGMGIFTAALMLEEIITIRRFANDDKLASYAGLTKRDHSTGTNTHQVQPGSCNTRLKSAFINLAKGYLLNNKGTHLEKYHQYLLKRGMSRMEALKRIARALAREVYRFLKLTEKQVEIKKGETVALDSASGFSPRTTSNTSPPLDSLTPKESGYKQGGFT

SEQ ID NO: 49095 - protein, 373 aa, unidentified
MPKYSTAFGMDVHLRSTTVCALDADTGEAVTRRFPGNPWGEIAGWMDGFPGPSLAAYESGYLGFAPQRELAGLGVECVVAAVSKIPRSAADSASKNDRNDAARMAKAILAHDISPVWIPSPEVEGIRDLAGAYGGATARLATAKQRLLAFLAKRGVGYGGTTPAGNPRKYWTYDFLRWLDKVRPEDDGGVRTLAALRNEVEAAAEARADLLSEYRAAVDASPIAAEVAALQSIKGCAFALAAAFSAEVGDFTRFRSGRQVTAYFGLAPSQRSSGDSVRLGGISGAGNALVRKLAVEGSWCYAAARHQPKLMPRDTGVPLEIRMHGRKGSERLLRRREEMLARGVPAAKANAATAAELVRWLWALGMMCREGAE

SEQ ID NO: 49096 - protein, 410 aa, unidentified
MKVLNRRCAGLDVHKAEVVACARVFAGRKVVQEVRRFGTTTRELMALGDWLESLRVTHVAMEATGVYWKPVWHVLDERFALILANAQQVRNVPGRKSDVNDATWIADLLAHGLIAASFVPPRPIRELRDLTRTRRQAVGEVVRHQHRIDKILQDANIKLSSVLSDPMGVSGVRMLKAIIAGESDAGKIAELGSSRLECPRGALIEALSGRVSEHHRYLLGWHLRQIEQLEGDIADLDARIEAQIAPFRATIERVMGVPGVKETAAPAIIAEIGTQMSVFPSAGHLLSWARIVPRLDESAGKKRSRRVKKGGAWLKPVLVQCARAAVRKRGSYYGAQYRRLKARLGDKKAIIAVAASILTAIYHIVRDGTAHRDLGADYLARREHDKAAIARRLAQRLRALGYHIDLRAAA

SEQ ID NO: 49097 - protein, 355 aa, unidentified
MSEEKYIGMDVHQATISVAVMDGSGKLIMGCLLETKAATIVEFIQGLHGTLSLTFEEGTSAAWLHDLLKPHVSRLVVCDARKAALLKEGNKSDRIDARKLAEMLRTNQLHSVYHGEHGMRTLKELGRSYLTVTKDVTRVMNRIKALYRSWAIPCSGTTVYASRHRAEWLAKIVEPGVRVRAEHLYQQLDSLQPLRLEARRELLRESQKHAAVKRLRQIPSIGPIRAALLVALLQTPHRFRTKRQLWAYSGFAVETHDSGEYRYVRGKPQRNRERITVRGLNDNYNKDLKNLFKGAAISASTSPGPLHNFYVARVEKGMRPTMARLTLARKIAAISLTLWKKGVKFDPKQLHQQAA

SEQ ID NO: 49098 - protein, 324 aa, unidentified
MSLPCLGIDISKLKFDICLSREGGKFRHKVFSNSPAGFSQLSVWLAKYKLGRVHACMEATGTYGEALATYLHEAGHLVSVVNPAVIKAYGQSRLSRTKTDKADATLIAQFCSERHPPQWQPLPAEIRELQALVRRLDSLLEMRQMEANRLEVSTAARAVTESLVGHLAFLDEEVARIESLIRTHIDNHPGLQEQRDLLLSIPGIGLTTAAKLLSEILDVKLYGSARQLAAFAGLVPRIHESGSSIKRKARLSKTGAPRLRKALYFPAIVAIKHNPQIRALGVRMKGRGKCPMQIIGAAMRKLVHIAYGVLKSGRPFDPEMAKTA

SEQ ID NO: 49099 - protein, 395 aa, unidentified
MFIVGIDIAKRSHEAIIIAEDGQVVRKAFSFRNNCTGYNLLLEQVRRLTLVKSQIVFAMESTAHYWLALYARLLKDGYTVMVLNPIQSHSLRELYIRKAKTDARDSLIIADLVRFGRCKASNVPQDKILALRELCRSRAYLVDMAADLKRKLIALLDRIFPEYESLFESVFSKASIAVLSKYSTPQKVKNANLRKLTDLLMESSNGHFGEWKAHQLKEAACSSFGIDDSGGVYSTLLGMFLEQILSLTAQADSLEKQISVFFQEFNNPLTSIPGVGTVLAATILSEIGDITRFSSADKLLAYAGLDPSVKQSGEFKSNQNRMSKRGSPYLRRAIWLASTVAVHRDPMFQTYYEKKISEGLHYMNVIGHVSRKMTAVIFAVLRDGQPYQPILQSAG

SEQ ID NO: 49100 - protein, 342 aa, unidentified
MQITTIGLDIAKNVFQVHGVDTEENVVVRKRLRRGQVIAFFEALTPCLVGMEACATSHYWARALTKLGHEVRLMPAKDVKADVKRNKNDAADAEAICEAVRRPTIRFVQVKSAEQQGRLMQHRTRDLLMRQRTQVINALRAHLAELGITAAQGREGIKELLAIVADDRDQRLPTDARASLRVLAAQLQAMQTLLSSLEKRIMAQHRANADSRRLETIPGIGIVGATAIAATVTDPKVFRSGRDFAAWVGLVPREGSTGGKRKLGPISKQGDRYLRRILIVGAIAVLRRAQENPGKYPWLTQLLGRRPFKVVAVALANKMARTAWALMVHGGTYRAPELAAAA

SEQ ID NO: 49101 - protein, 383 aa, unidentified
MRPTCEDDFTPEEEVLAVALELASGSWKIGFQDGKHAKPAVLTVSAEQASLRLQEVEREIAKIRRKWHVSPAARTVVLYEAGQDGFWIQRALSARGIKTLICDPSSIPMPRQHRPAKTDRLDAIKLVSCLRAWLRGEYDRMHLIRIPEEQDEAQRHLSRERGELVKECTQHRDRIRKLLRTLGCWDSVQGDIGKRLRQSQYSRHDGTSLPVELRERLIRESERLELAEKQLNELEDELAHQLPEQTQNKIANLQKLKAVGLIGATRLVLELFWRHFDNGKQVGACIGLVPQPYDSGESHVDQGISKRGNRKVRSLMIEMAWFWLRYQPGSSIAKWYAAHAGGSAASKRSKRSAIVAVARRVAIALWRYLEHGIVPEGAALKAA

SEQ ID NO: 49102 - protein, 361 aa, unidentified
MVGTMTVVGLDVHARSTQAAAIDLLSGELRRQKFGPGTEPVVEWLSGLAGPVRAAYEAGPTGFGLARVAAAAGVDVMVVAPSKTPRARGDRVKNDRKDAELLARLLLAGQLKAVTVPPDWLEAIRHLARTREQVRRDLGRARQRVSKLLLVEGRVYPGVTTWNQEHRRWLAAQQFRFESTELAFIDLLAAVDGLAARREVLDGRLSRLALDERLWPTVSRLRAFRGVDTLTALLLHLELGGDWQRFRSPRQLGSWLGLTPSLDQSGESLTQGGITKTGSGIARRLLVEAAWHYLRPPRIGVTLQNRQTGQPAHVLQIAWRAQHRLHRTHQRMRSRGKPGNVTTVAVARELAAFLWAAATAP

SEQ ID NO: 49103 - protein, 419 aa, unidentified
MKSQAPAAFAAFVGLDWADAKHEVCLQAAGPAQREFLSLAHSPEEINAWVQTLRTRFNGQPVAVCLELNKGPIVSALRTYDFLVLFPVNPLTVAKYREAFTPSRAKDDPTDAELQVEILLKHRDKLTPLRPQSPTMRALAQLVEQRRRLVGDKVRLTNRLTSALKNYFPQVLHWFPEKDTAIFCDFLSRWPTLKAAQLARRTTLEGFFRAHLVRSTDLIATRIEAIKSARALTTDDGVIAPNVLLVHALVAQLRVTLQAIADFDQAIAQRAQDHPDFPLFDALPGAGAVFAPRLLVAFGEQRERFTAADELQKYAGIAPVTERSGKKSWVHWRLQCPKFLRQTFVEWAAESTRHSFWAQVYYQQQRDKGKAHQAAVRALAFKWIRILYRCWQNRTPYDESIYLQALNRRSAPLLHNLAK

SEQ ID NO: 49104 - protein, 320 aa, unidentified
MTISNSQVVVGVDVAKDEIVVYRADQQKTQVVTNERAALKQWLKKLPANSAIALEATNTYHLDATEMAHEMGHDVYVIDGSRLNRYRDGIGIRAKTDALDAVLLARYLSKESDRLRIWNPPPKAYTQLKSVLRRRAELVQHRVALKQSWKDEPLLKEALANYLANIEQTEKDIQSLLRSIISEAGMEAQVKRCQAVEGVGVLTATAAVTAFMRGEFSDSDGYVAFLGMDPRVRQSGKKDQRRCLSKRGDSEFRRLFHNSAMAASRSATWKPYYQSYLARGLKGTEALVILARKLARVLFALMKNQSEYKPNSMLGGSPQT

SEQ ID NO: 49105 - protein, 318 aa, unidentified
MANQIAVGIDISKKAMDVAIGHEQPTAIFSNDGAGHQALIEELKNHQVSLIVMEATGQYQLACACALQAAGFAVVVINPRQARDFAKAMGRLVKTDSVDARMLAELAQVLNLRPDRDRFIKPMPDQAQQYLHALVLRRRQLVRLLVSERQRKHMAHAEVAQDIAQLMDVLSRQLEALDRRIAEHLAQHQPNLAALLKSVKGVGPATAATLMSELPELGQLKARQICALVGVAPMNRDSGQARGKRFICGGRATVRSALYMAAIVAMRHNAVIRHCYERLLAAGKPKKVAIVACMRKLLIIMNAMVKSGRPWSDQLAQA

SEQ ID NO: 49106 - protein, 391 aa, unidentified
MCTGHTPAISSAEASVNHDSTVFVGLDVHKESITVAYAIDMADVELLGKIGTLKADIDRLCKRVQSKARHVRVVYEAGPCGYGLYRELVERGFDCVVCAPSLVPKKPGERVKTDRRDAVKLVRALRAGDLSAVHVPDVEDEAFRDLARTWAAAKADLRQARQRLKSFLLSHGVRYSGNANWGPEHRRWISVFAFPNHWQQLAFDECRRTIEDRFAQCKRLEATLHEAVVGWRFYPAILGLQTMRGIQFITAVGMLSELGDLSRFEHPRQLMAWLGVTPSEHSSGERRRQGSITKNGNSYARKLLVEAAWSYRYPARVSPEIQRRHEGIPKRILDRAWDAQVRLCRRYRKLAARGKNVNIAVVAVARELAGFIWDISKLAMSLAVTRNEQPA

SEQ ID NO: 49107 - protein, 402 aa, unidentified
MNAVGIDVSKGKSMVAIMRPFGEIVSPPFEIKHTTSDINSLVELINSVEGESRIVMEHTGRYYEVLAHQLSKANLFVSAINPKLIKDFDNDSLRKVKSDKADAVKIARYTIDKWQNLKQYSVIDELRNQLKTMNRQFGFYMKHKTAMKNNLIGILDQTYPGVNTYFDSPARSDGSQKWVDFASTYWHVDCVCKMSKNAFINHYQNWCKRKKYNFSQSKAEEIYGKAKELVPVLPKDDITKLIIKQAVDQLNSVSTTVESLRTLMNETASKLPEYPVVMAMKGVGTSLGPQLMAEIGDVSRFTHKGAITAFAGVDPGVNESGSYEQKSVPTSKRGSSDLRKTLFQVMDVLIKTHPQDDPVYQFLDKKRAQGKPYYVYMTAGANKFLRIYYGRVKEYLSSLPES

SEQ ID NO: 49108 - protein, 334 aa, unidentified
MEQITTVGIDLAKRVFALHGVDGAGRVVLRRTVKREELVEVIARLSPCLIGMEAGSGAHEWARRFQAFGHTVRLMAAKFVTPYRRNGKNDGNDAEAICEAVSRPGMRFVPIKSAEQQAVLTVHRVRQGFVEERTSTINRIRGLLAEFGVVLPLRSVTIRRQAREAAETLPHIARRAIEDLCAHLRELDARVLAYDREIDQQARQSEAARRLMKIRGVGPLSALAIVATVGTARDFRSGRQFAAWLGLTPKQHSSGGKSRLGNITKRGDAYLRTLLVLGARSVLNTAMRHKDRISRWVLALQTRRGYHRALVAIANKNARIAWALLNRNQELRTA

SEQ ID NO: 49109 - protein, 385 aa, unidentified
MTAATRKEQYSKATFGAAATLYFAFELGVDEWKLGFTTDLTTKPRVRTMPARDLPRLAAEITAAKQWFGLPEQASVRSCYEAGHDGFWLHRHLMTVGIDNRVIDSSSIEVNRRQRRAKTDGLDARKLLTMLLRYHAGEPRVWSVVRVPTVEEEDRRQLHRELRTLKQERTRALNRMQGLLATQGLRLPKGQRREMGKRLDAMRLWDGSALPAGLRARLQREWDHVQFLHAKILELQRERAQAIKHGRDAALDKVRQLMRLRAIGENGAWVYVQEFFGWREFNNRKEVGAAAGLTPTPYESGTEKRERGISKAGSRHIRAVAIEVAWAWLRYQSDSQLSRWFGERFSRGGPRARKIGIVALARKLLIALWRYLKDGTVPEGALLKA

SEQ ID NO: 49110 - protein, 354 aa, unidentified
MTSILAGKVEFVIGVDTHRDSHTAAIVAAATGGVVKQVKVSTDASGYRELQAFADRHTTGRRVWAIEGTGSYGAGLSSALLGNGQWVVEIDRPARPARRDGAKSDDLDAVRAAREALGRDHLATPRARGDREALRVLTIARQGAVVARTKAISQLKAFIVNAPQSLRDQLRHDSSDEQLRRCARLRTHPTHSIEHRATIRAIRGTARRALALAAEAAAYETELNQLVVAICPALLERPGIGTITAAQFLISWSHPGRIRNEAAFAALAGAAPIPASSGTITRHRLNRAGDRQLNRALHTVAMTRLRIHEPTQAYTARRTAEGKTPREIRRCLKRAIAREVFRIMTRHAQDAVAA

SEQ ID NO: 49111 - protein, 412 aa, unidentified
MDVMVERGCGLDVHQAMVVACLLTGPPGRRPQKEIRSFRTMTAALREMREWLQENGCTHVAMESTGIYWQPVYAVLDGAFELVVGNAHHIKNVPGRKTDVKDSEWIANLLRHGLIRSSFVPAKPVRELRDLLRYRRKLVDACAAERNRLLKLLETANIKLSSVASDVFGVSGMAMLRALIAGTVTPAEMAGLARGRLRHKLAELELALEGCVEDHHRYLLSVQLRRIEAAEYDIKELDARITAKLEPYDEQLQRLMRIPGVDWFVAAVIVAELGIDMTVFPSAAHAAAWVDICPGNYESAGKRNGGNIRKGNRHLKTALVTAAVAASRKTGSYLKDKYFRLRARRGPLRAAVAVGHKILIAAYHMLATGAPFKDLGADHLDTAYRQRATRTLVRRLNRLGYKIALIPTQARA

SEQ ID NO: 49112 - protein, 385 aa, unidentified
MATPAATCKDQATTQQPTLFLAFELGVTTWKLGFTTGAAQRPRERTMPAGAIHVLQEEMARAKQRFGLPHDARVVSCYEAGRDGFWLHRYLVAQGVENCVVDSSSIEVNRRQRRAKTDRLDVHKLLTMLLRHVAGEQRVWSIVRVPSVEEEDRRHLHRALATAKRERTRVINRLKGLLAAQGLVMPHGRDFQQQLESLRLWDGAPLPAGLRLRLGQEWEHLQVLAQRIAQLEAERRAWLQTSEDAAMKKVRRLLTLKGIGTNSAWVFVMEFFGWRAFRNGKEVGALSGLTPTPYASGTTAYERGIAKAGNYHVRAMAIEIAWGWLRFQPGSALTQWYQQRFGHGSSRLRRIGIVALARKLLIALWRFVEAGVLPDGAALKAAVHI

SEQ ID NO: 49113 - protein, 419 aa, unidentified
MAQNNDNGIMNVVHPICCGLDVHKEKISACLIIGNVFGGQRAEVEEFGTFTDDLIRMRSWLCENDCAIVAMESTGIYWRPVHNVLEGYMEVILVNARHIKNVPGRKTDISDSKWLAGLLRHGLLKGSFIPPKEVRDWRDLTRLRRTYVESLGDYKRRVHKLFECANIKIDSVVSDLFGVTGRNLMKLLVESSSQIRPEEMESCLRGKLKAKREELFRSIQGFFTDHHRYLLSSLLRTIAGLEREIEAINGRLRKVMQTREPLLEKLMEVSGISEVSARAILSEIGPSMDPFRSSAALCSWAGLCPGNNESAGKRHSGKSPVRKHHLKTIMIEVAWAAVKVKGSYYREKYYRLKARRGARRAIVAIAHRLLKAIYHIIRDGVSFRDLGEEFFNQTNASASSVNRLKKQAHKLGYMLIAQV

SEQ ID NO: 49114 - protein, 412 aa, unidentified
MQDILTCAMGLDIHRDVIVACLAKGELGTDPEIEIRSFSTLIPEMRKLRDWVLEAECRYVAMESTGIYWQPIYEMLEPCFDGQISILVVNARHMKNVPGRKTDMRDAQWIATLLRAGLLKGSFIPDKTFRELRHLTRYRKSIVRDITAQKNRIDKFLQSSGFRFTAFLSDAFGASGRNIIRHLMEYGNISREALDRCLKTQTRKRIDEILIALNGSLSEHQRGFLRMIFGHLEALEQHRHTVEDAITKEITKHEEALSLLCSIPGIDVTAAAAIIAEIGTDMSAFPDSQHICSWAGLSPGNNESAGKRKSAHINKGNPYLKSMLCEVGWVISGKRSLYLSGWYWRIKQRKDAKRATIALARKLLALIYTMLKTGSPYNEDCFEIRRKQSERKRASRMVNELQKLGYFVVAPG

SEQ ID NO: 49115 - protein, 410 aa, unidentified
MDTLFTRVAGLDVHLKEIQCAVRCRQSSGKLLATTESFGTMTRDLRALADYLRSLGVTHVAMESTAVLWKPVWNILEGLFTLLLVNPRHLKKVPGRKTDVSDAAWLAELLAHGLIRASFVPDGQTQELRALLRTRKQLVRERTRHTQRIHKTLEDANIKIDGALSDILGKSGRAMLEAMIAGESDPVRLAALAHRNVKASQGELEQALRGRVTAHHRFLLKLHLGQVDHLDGAIATVDGEVEASLAPFRTAVELVSTIPGVSALSAEVIISEIGLDMGRFPTVGHLISWAGLSPRNDQSAGKRRSTRMRKGAQWLKTTLVQCAWAAKNKKSSYLQAQFRRLLSRRGPQKAICAVAASILTAAYHMLKDGTCYQDLGPEHFNRRSKTTHSQRLVRQLQRLGYAVEIKPIAA

SEQ ID NO: 49116 - protein, 421 aa, unidentified
MLAETQDNEEIIARVAALDIGKAELVCCVRVPREDRPGRLQEVQTYSTMTRPLLGMADHLRGLGVTRVVMEATSDYWKPVFYLLEAAGFEAWLVNAKDVKHLPGRPKTDKLDAVWLCKVAERQMIRPSFVPPPEIRRLRDVTRYRADLVAVRTAEKQRAEKLLEDAQIKLSVVASDIFGVSGRQMLAALIAGERDPKVLAQMARAAMRGKITALQEAFTGYFTGHHAFLLEKMLARVDALDADIAALDARIEEMITPFTAAAQRLDEIPGINAIAACVILAEIGIDMARFPTAGHLVSWAKFAPGVKESAGKKKGRNNTGHGNSYLARVLGNAAVSAGRTDTFLGERYRRIARRRGRKKAVVAIGRSILIIIWHLLADPDARYTDLGSDFYDTRINPERRKQNHIRQLEALGYTVTLEPAA

SEQ ID NO: 49117 - protein, 341 aa, unidentified
MSKVTVYVGLDYHKDSIQVCVLDPAGKVLMNRSCRNDAIEVARLVAAFGDDVRGAIEACAGAADLADELIGRHGWDLSLAHPGYVNRMKQTPDKSDFSDARVLADLIRVGYLPRVWLAPEEVRQLRSLVRYRQQLVNERRATKLRVTALLRDARVVEPGPGRWGRAWMAWLKATGALGAQARWVVDKHCANLDRLGREVAEVDARLKQVTAHDPVVARLQGCPGVGPVTACVLRAEIGRFDRFRTGKQRARYCGLSPRNASSGQRQADAGLVKAGNEFVRATVIEAAHRLIRYDDRWKALAVSLRAAGKPPCVVAAAVGNRWVRWLYHQVRGEPLAGRPAA

SEQ ID NO: 49118 - protein, 365 aa, unidentified
MRIDIGVDLHTTQFTVYARGEEKSGVNGQYLTNEEGYRTFLRKLGAWTRSGHDIRIGVESTGTTRYFKHRMEEKGYPVIVINTMKFKVIHESVKKTDRHDAATIAEFLSKDMLPESRLCSEASEHLRRLLKVRSTLVRARVTVKNQIHGLLVSMGMEDTKASLQSKRGRQRILDTLAGAGNGLVVQPLCATIDRLSENVKAIEGEIEKLVAGDRVVELLQTIPGCGPVTACTIRAYTDDIGRFSSDKKYASYAGLAPWVQCSNETEHYGRITKRGPEELRTAFVQLVMGIKRSRQSASWRLMERYEAMKRVKGSGKSIIATARKLSRIVWVMLTRGEEFNVSLMTDRTLERLSNSMRAAVVSLSA

SEQ ID NO: 49119 - protein, 371 aa, unidentified
MAQSSKTLYVGLDVHKDSIAVAYAPEDRGADVVSLGAIGPRQCDIDKLIRTLHSKGAALVFVYEAGPCGYWLYRYLTRKGVRCDVVAPSLIPRTPGDRVKTDRRDAVMLARSMRSGDLTSIYVPQIEDEAMRDVSRGREDAMRDLKAAKYRLKAFLLRQDIRYEGRATWTAAHLRWLADVVCPTPAQQIVFQEFVRAVTEQQERVQRLETELRDQVTRWRLSPVVEAIQALRGVELTSAVILVAELGDLTRFDTPRTLMSYLGLTPSEYSSGARRQQGGITKAGNTHARRALVEGVWAYRYPAKVCRHLQLRLETLPAEVQAIGWKAQVRLCKRYRQLTARGKHVNQVVVAIAREMAAFAWAIARLVPLAP

SEQ ID NO: 49120 - protein, 345 aa, unidentified
MEEVTIVGVDLAKNVFQIHGARADGSVAFRKKLSRLQFHKFMAALAPCVVVMEACGGAHHWAREMMRLGHDARLIAPRYVKPFVKRHKNDANDAEAIVEAATRPTMRFVEVKTEAQQERAIVFRAREQLVNQRTELVNTLRAHLYEFGYVAPHGINYLGRLEEIVADDNTDIPIAVRDICHGLIEQIGDLSARVDELKKRIDAMSREAETTRRLQTMPGVGPILSLAIEAFAPPMESFRRGRDFAAWLGLVPLQKSTGGKQRLGKMSKMGQRDIRRLLIIGAMSVVYGATRKRPPEGSWLARMLARKPRMLVAVALANKMARGIWAMLTKGEDYRGHPVTPPQMA

SEQ ID NO: 49121 - protein, 414 aa, unidentified
MTEQIHVSAGLDLHKKFILATLLSDTGLKKQLRFERTELGLLALKEWTIENKCEIVACESTSDYWVPVYEMLEGHVTVIVGNARDIKMFSHKKTDKVDSELIAQLALKGMIRPSRVFPREHREFRSLVRLRHKLVQKRTDIKNEIHHILDSELFRLSSVLTDLFGKSGTLILRGLVNGMPMDEVIAMLPPRVRKKTDQLNEIVQTTVSPGAIFRLNHCLNLIKCMNEEIDVLTKGILQLANENFRHEMKILKSVPGIGNIAAFTLIAEIGDFSDFPSGDKLASWLGIVPNVYQSADKLRTGSITKRGSDHARWILTQVAHAATRSHNNVFRRFYDRKKPIIGTGKAIIALARKIATLIWHLITNDEFFNHEDEGAFNTSKLVKVSIPSIVTLEEILKISKEAAIVLKEPDPGYG

SEQ ID NO: 49122 - protein, 326 aa, unidentified
MRPEECCGKPSAFGEDAEGYAYLFHLLGAPKDCLVALEATGHYWRNLLVSLVTKGYEVAVLNPLRTRRFAEEELERTKTDAIDALGIARFAAQKRPAPTMLPEPAAEELRELVRLRERLLGDLGDQLRRLHRAVDLGFPEFTNHVRTLESDLAISILSRYPTATAYRNVSPKKLARLCYDGRHEVGEQLARALVNTAKNSVGRHHSDTYRREIAYACEDIVALRGRLRELADDIKQKLEQHDLGKLLTTINGVGAQTAAYLIAELGDPARFHNAAALASYVGVAPRLRQSGKRRFSGTGVVRIGKARRRKARSQTCSQAVRQMLFD

SEQ ID NO: 49123 - protein, 340 aa, unidentified
MQAIRFGIDLAKTVFQVHGVDAAGKVVVAKQLRRDQVVKFFAKAPPALIGMEACGSAHYWARELRALGHEVKLIPACYVKAYVKRNKNDARDAEAICEAVSRPTMRFVPIKSVEQQCARAIQRTRALLTRQRTQLGNALRGHLYEMGITAGEGAAGLLSLVERIEAADAAIPAALLGSLAALARRWRAVGEEADGLREEICAQVKTSEAAGRLMKIPGVGPISAHAAIAAIGDGSQFASGRDFAAWLGLTRKNYDTGGKHRNTGHISKAGDRALRSLLVLGASAWLRHVRAKPEKGSAWIRGVLGRRPVKVAVVAQAAKTARIIWALLRSGKSYRAPLAA

SEQ ID NO: 49124 - protein, 325 aa, unidentified
MVKLYCGMDIHKENLAGCIMDENGEITREHIFPFSRGAIERFLYDIPSSEITIAIEACGIWRGAYKVLAELGYDVKLSNPKKTHDIACKKKTDKVDARILADLLRTNYLPEVYIPDETVLKLRDLTRHKSTLTRLRVEVQVKIKGYLLRKGVKYDKLWNEKALSELAEKDPDIRNLINVYRSLKEEEKEVMRRVRKTARNMRKANLLMSMTGIGELSSLMVLAEIGDIKRFKTPKELVSYAGLCPGIYQSGDTERNVRNNAVNKWLKWILYECSGRAVMLDPRLQEYFYKVKQRKGFKTARRAVARKMLTIIWYMLTNEEPYRVS

SEQ ID NO: 49125 - protein, 339 aa, unidentified
MELYVGMDLHSRNTYFGILNEEFKRIFKKRVKNGLPMILNTLEPFKDEVKGIVVESTYNWYWLVDGLMDAGYVHIHLANPSAIKQYEGLKYTDDPHDAFWLAKLLALGILPEGYIYPKESRPVRDLLRRRSFLVRNRTRYIHSLQSMIERYANLRLSGNDLKKLEMKDIEDILKEEHLVLSGETCLENIKSLTRQINRIQKAVKSKMRIHKPFDLLMTIPGIGEILALTIMLEVGDIGRFPSVGDFTSYCRCVPTDRRSAGKSKGKGNSKNGNRYLAWAFVEASNFARGFNERFRRYYQRKASKKNKIVATKALGSKLARISYYIMRDQVPFREEAAFC

SEQ ID NO: 49126 - protein, 315 aa, unidentified
MTTSSGKFVGIDVAKDKLDIAVLGERKASQVTNDEAGITKLIKKLERQEIELIVVEATGGYQRAVVLGLYEAGLSVAVVNPSRVRQYARASGLFAKTDKLDAFNLAEFGKQMKPRRFEAKSEAGREISALLVRRRQLEEMLKAEKSRLRTVPPKMRGSVERMIETLKEEIKRLEKELNQFMKENEEWQAQEQILTSAKGVGRITATTLLAELPELGKLDRKKIAALVGLAPMNADSGKKRGYRKTKGGRVEVRNVLYMSTLVATRYNPLIQAQYQEMLRRGKVKKVALTACMRKFLTILNAMMRDQVPFRQRDIA

SEQ ID NO: 49127 - protein, 354 aa, unidentified
MSKTANVQIAVIGIDIGKNSFHVAGHDKRGSIVLRQKWSRGQIEARLANLPACLVGMEACVGAHHLARKLATFGHDTRLMPAKYVRPYARGQKNDFNDAEAIAEAVQRPTMKFVATKTSDQLDLQALHRVRERLVSQRTGIINQIRAFMLERGIAVRQGIRFLRAELPIILASRTDVLSPRMLRVMEDLAGDWRRLDERIENLSREIETIARQDAGCDRLMSVPGIGPIISSAVVAAIGSGDVFSKGRDFAAWLGLVPKQISTGDRTILGKISKRGNRYLRVLFVQAAWVVLIKPMSWERHGLKSWIEAAKKRLHHNVLAIALANKLARIAWAVLAKGRGFEATRTISGSTQPA

SEQ ID NO: 49128 - protein, 341 aa, unidentified
MLYSGIDLHKRSLVIHTLDADGTTTREAQLKSDRGAVLAYFGTLAGPHRAVVECVQSWYWLRDLLGPTGIDLRLAHAKYVKAISYAKVKTDRVDARMLAQLLRTGLVPEAHMIGAEHRETRDLLRSRLQLVTRAVRCRHAVGSLLEKYNVPTPEELPELARMQAALQEEQRTLIRTHVRRVEAVLKTRLLPTPDVQRLVWIPGIGKLSAYALVLEIDTISRFPTVRHFHSYCRLVPGADNSAGKVRHKRSRDGNRYLKQVFHTAAIRAAQYHPEIRQEYRRLSRRKGKIVARALIAKELASIVYWVLRKQEAFNGKFRGHVLTAKPAVWPRLASPESLTDV

SEQ ID NO: 49129 - protein, 410 aa, unidentified
MEVLHTHCAGLDVHKDSVVACVRRMVEGKVTTHVRTFKTTTQELMALSEWLSTKAATHIAMEATGVYWKPVWHILSDGEFELILANAAHVKNVPGRKTDVNDAAWLADLMAHGLIKASFVPDEPTQQMRDLLRTRKQIVRERSSHIQRIQKTLEDANIKLDSVVTNILGLSGRRIIEALIAGQTVPQALATLAHRSIKATTDELEASLRGRVTRHHRFLLKLHLDQIDAFDATIARIDEEVNANVEPFRVAIEMLSAIPGVGDLSATVIVSEIGIDMSRFETAGHLISWAGLCPKNDQSAGKRRSTRMKKGAPWLKSTLIQCAWCASRTKGSYLQAQYLRIRSRRGAKKAVCAVAASILTAAYHMLKNGALYQDLGASYFDNRAKDKQALRLVNRLKNLGFEVQITPLAA

SEQ ID NO: 49130 - protein, 429 aa, unidentified
MEEIDDADLVVERVAALDLGKAGLDACVRVPHTHHPGRRMQELRSYGTTTAQLLELAALLRHWHVQRVVMESTSTYWKGVYYLLEAEGFDCWLVNAREVKNVPGRAKTDRADAVWLAKVAERGMCRPSLVHPPDIRRLRDLTRYRRALVQDRTRERQRVEKLLEDAQIKISSVLSDLHGVTGRAMMDALINGQRDPHTLAQLAKGSARKKTARLEEALRGFFTDHHAMILQMMLANSDRLSAQIAELDGRIEEALSPFCAQSARLADVPGVDVMAAAELIAEVGVDMTRFPSAAHLVSWAKFCPQTHQSAGKSKSQSRGKGNPWLAGTLGRVVFANSRSETFLGARYRRLARRRGKQKAIVATGNSLLTVVYHLLLNSDARFCDLGPGYYESRINKHRRARDLATQLQALTGQHIVIRDGKAVITDTAA

SEQ ID NO: 49131 - protein, 314 aa, unidentified
MNHVTIGIDISKAHLDAHAAPDGRTARFTNDAAGFRKLIAWIGPGARRIAYEPSGPWHRDFEDALLKAGLPLYAINPYHVRCFARSRGRRAKTDAVDARTLATMAGAIGNLRPTEAKSRSDRDLSELQLVRDALVGDRKSIGNRGKHLRHPVAKRLNEQRLAQIERQLKRVEAETRKLIETREELKRRFEILTSIPGVSNVTAAGLIAHMPELGTLTGPRAASLAGLAPVTRESGSWKGRSFIQGGREKVRRLLYMPAVAAIRCNPDLGAKYTALRDAGKPAKVAITAVMRKLIVLANALVQQDRLWTPKPAAP

SEQ ID NO: 49132 - protein, 412 aa, unidentified
MVSHIRVLYERCCGIDVHKKMIEACILTSNSQERQRFGTTTREITRCIAWLKQHDVPVVAMESTGVYWKPLYNLFEEAGIQVILANAHNMKAVPGRKTDVKDAQWIASLLRHGLLKASFVPDRHQRELRDLLRLRTAKIQERSREIQRIQKILTCANIRLSSVVSNVVGATSRAILEAIVAGQKDPQGVASIAAGSQLRASQEVLTEALEGHLGELGQTMLVLQLEALDFLDRQIAQIDTQVDRLAADDERFKRALELLDGIPGIGIRIAQVIIAEAGLDMSRFPSAKHFAAWAGMAPGNNESAGKRKSGKTKPGNPHLRSHLVQAARSLSHRKDCFLADQYHRLRARRGSKRATIAVGHSILIIAYCMLKRDEPYMELGSNYHTEKRKEHRLKYLVHEIGKLGVGVSLVAR

SEQ ID NO: 49133 - protein, 339 aa, unidentified
MSIVMGLDQHRGQVTGEWIDTETGEVERTRVSPADRAHIRKWLSRFRGQELEVALEATTGWRFVVEELRRVGAVVHLAEPAETAARRGNKKRPKNDRADARHLRELLMIERLPESWIPPDHILDLRARVRLRHRLKEQRSEWQQRIQATLYHHGCPQRRQLMTGDGREWLDAQPLPATARETVAVALAMIEALETQIAPLDKALRSYARRQAGCKALMAHYGIGELCAVTILAELGDCTRFSSSRQAVRYAGMDITVYESDRRRAPGHLSRQGPPALRWALFEAAQQTRRRTASPDRDYFEQAAERIGGNRACLSVARKLLKRSYHTLRELGEQALAPA

SEQ ID NO: 49134 - protein, 314 aa, unidentified
MNPAHIYVGIDVAKDRLDVAQRPGIEAWEVTNDDRGIADLVARLKALRPTLVVLEATGGIELPLVGALAAVGLPVVVVNPRQTREFARATGRLAKTDAIDAQVLARFAEAVRPALRPLPDAASQQLSGLVARRRQVIEMLTAEKNRLRTAAPAVRDHIKEHILWLERSLSDLDSELGQAIHSSDIWRAQDNLLQSAPGVGPVLSTTLLAELPELGSLNRKEIAALVGVAPLNRDSGTLRGRRTVWGGRSQVRTALYMAALVASRFNPVIRAFYQRLEAAGKPKKVALTACMRKLLTILNAMMRHQTPWQICSTS

SEQ ID NO: 49135 - protein, 347 aa, unidentified
MNFYNNTHPYYCGIDLHARLLYVCIIDNDGTTLVHKEISADKGKLFTILEPYIGNIVVGVECMHCWYWVSDFCHDQGIDFILGHALYMKAIHGGKAKNDRIDSFKIASLMKGGNFPLAYNYPQEMRSARDLLRRRTRMVRHGAELKAHVANTTSQYNLPPNKVNLKNQDAREKLKSTFPDPVVQKNIDLDMAILDCYSKELKQVEIFIENQAKQHNAAHLHILKSIHGVGRILALTILYEIGSITRFDSVQKFASYSRLVKCKAESAGKSYGTQGNKIGNAHLKWAFSEAAVLFLRGNKKAQNYLLKLQKRMSKAKALSALAHKLGRCVYFMLKNNTVFDESKFLKG

SEQ ID NO: 49136 - protein, 355 aa, unidentified
MCAKKTGSIEDLAVVGVDIGKDTFHLVGFDRSGQVVLRKQIKRLALDATFEKLPRCVVGMEACLSAHFVSRRLRDMGFDPRIIPATYVKPFNKGQKNDYNDAEVIAEAALRPNLRTVPEKSQDQLDLQALHRVRARLVSRRTATINQIRAFLIEQGIAVRSGLRALRNSFEAILEQRRDEISARMRSILIGLYGDWLWLDDRIAAVSTEIEEISCTEENCANIMSIPGIGPVISTALVAAVGRGDAFDRGRDFAAWVGLVPRQFSTGGRKILGRITKRGSRYLRMLFVQAAKVIMMRPHRWQAFSFGAWLERAVSRMPRNKAAIALANKPARTAWSILRHGTRFDTPRDLAMEAI

SEQ ID NO: 49137 - protein, 365 aa, unidentified
MKNSQNEKIKAVTDKTLVVGIDIAKEYHYARITDSRGIELRKPIKVNNSQEGFVNLLEIVEKVKQKYTAEKIIIGMEPSGHYWRSFGWYLKLHESMPVIVGVNPYHVKQSRELDDNSQTKSDKKDALVIAHLIREGRYFYMYFPEGEYAELRILNEERQRVMKQINRASNIIIAVLDEYFPELALVWKDVICVTSLTIMKEIAFPAEILKISKTELIAVIKEASNGTEGEKLATGLVKAAHNSVGVQEGQRAAKSRLLRLIGELEYYQVRLTDVEKELEAVMAKSDLSEILQSMKGVGTVISAAFLGEVGEISRFDDWKQVRRLAGLNLVENSSGQQKSKTKISKRGRPYLRHMLYMAGISGCPA

SEQ ID NO: 49138 - protein, 309 aa, unidentified
MSSWVGIDVSKNTLAVWVRPSGVNFIVCNSSEGHQALLLNLAEIQVERVLLEATGGYERAVMGCLVQAGHSVVRINPRRARAFAQAMGKLVKTDPVDAGVLAHLAQVIEPSACQPVSLARDELQELVRRREQVVKLRDDERRRLTLARSGVVQESLQTNISQLNEQIARLNSAIEAAAHRTDNQLVKQLSAIAGIGPVTVASLLAYLPELGQLSRRQIAALAGLAPYNNDSGQHSGKRCIKGGRASIRRVLYMATRSVIRCHSSFGARYASLRARGKCAKVALVACMRVLLIRLNAMVRDHSSWRAEAV

SEQ ID NO: 49139 - protein, 339 aa, unidentified
MTKATTIGLDIAKQVFQVHGADKAGRAVLRRKLRRSEVSRFFSEQPPCLVGIEASGSAHNWARVLGGLGHSVRLMAPQFVKPYVKSQKNDANDAEAICEAVTRPTMRFVPQKSIEQQDLQCLHRVRSRLVANRTQLINQIRGLLAEYGVVLPQHPGQVRRGLPAVLEDAESQLTGFGRELFQNLYEELAQLDEKIGDADARIQTAFQSTPDCRRIAAVEGVGPLIATAIVAAISNGHAFENGRQFSAWLGLVPRQNSSGGKSRLLGISKRGDPYLRTLLIHGARSVVYRAKAKTDKRSLWINDKQQRLGTSKACVAVANKNARIIWSLIAREKEYQRAA

SEQ ID NO: 49140 - protein, 406 aa, unidentified
MRVVHERCAGLDVHKSSVVACAMLPEGKQLRTFGTMTGHLEQLAEWLHGLGVTVVAMESSGVYWKPVFNILEVAGFELLVVNARHIKAVPGRKTDVKDAEWIADLLRHGLLKPSFIPNREERELRELTRYRRTLIEERAHEVQRLQKVLEGANIKLEDVISNVVGLNGRRFLNALIEGDYDPEVVAATANYGLQRKQELLAQALHGTFGTHQRFLLDQLRSHIDFLEQRIAALDQEVQSRTRPFEPLIARLDQIPGLGTRAAQEILAEIGTDMSRFPSHRHLASWAKVCPGNNQSAGKRRSGYAGKGNRWLRSILVECAWCATRKKDSYFKAQYHRLAARRGQKRALLAVGHTLLTVIYHLLRDGVLYQDLGPNYFDQRDRSQIARQAIRRLERLGYHVSLTEGAA

SEQ ID NO: 49141 - protein, 338 aa, unidentified
MEEVSIIGLDLAKNVFQLHGARPDGSVAFRRTVSRSKLLSFFAAIPRCLVAMEACASAHHWARQIGALGHEVRLIAPIYVKPFVKRNKNDAADAEAIAEAASRPTMRFVAVKTVEKQAAGVAFKTRDLLVRQRTQTINAVREYGVVAPNGPVHVARLVDAMHDPESGLPASILGVCRLLLDHITTLTGQIGVLEKELRERARADETARRLMTIPGIGVICATAMEALAPPPESFRKGRDFAAWLGLTPKQNSSGGKTRLGGTSKMGQRDLRRLLVSGAIAQVRWAMRKGAPEGSWLARMMGKKPRLVVAVALANRTARIAWALMAQGGVYQASRLAGA

SEQ ID NO: 49142 - protein, 457 aa, unidentified
MTRERKTRGKRIARRFSTVNPAAAGLDVGSTFHVVAVSADRDDEPVRTFQSFTTDLHALADWLHEVGITTIAMESTGVYWIPVFEILEQSGFEVLLVNARHTKNVPGRKTDVNDAQWLQQLHECGLLRASFRPRDTIVGLRGYLRHQARLGDYAASHIQHMQKALMQMNLQLHHVVSDITGVTGMKVIRAIVEGNHDPAALAEFRDCRCKASKRTIAEALTGNYREEHLFALRQSLDLYDFYQAKIAECDEQIEAALHRLNVDRKTPIEPLPEMRHARNRKEPRFDLRSALYTLVGADLSQIHGFGPRTVLHLVAECGDDLSKWPTAKHFTSWLCLAPGNKISGGRVLSSKTRRSTNRASVLLRIVAVNVGKTQTALGAFYRRLAARVGKAKAVTATARKLAVLFYNAMRFGMKYVDPGQNYYEERYRQRVLRNLSRRANEFGYSLIEDGAVESGVS

SEQ ID NO: 49143 - protein, 339 aa, unidentified
MKLKRVGLDLAKNVFQVHGVDEQEQVRCRRQLRRAQVLPFFRQLPPCLIGMEACGGSHYWARELGQLGHTVKLMSPQLVKPYIGEQKNDANDAAGICEAVGRAKMRFVAVKTVAQQELQVLHRVRSALIGQRTATVNQIRGLLMEFGVVVGQRIEVLRRALPEVLEDAENGLSATMRQTFAGLRQDLVGLDARVAELDGQLARVAKNDAACVRLQTIPGLGPVSATALVGAVGDGRQFKNGRAMAAWLGLVPRQDSSGGKPRLLGISKRGDRYLRSLLIHGARAVQRTCANKTDGRSRWLQALSRRQHKNVATVALANRNARVAWALLQDDKASYQAPQ

SEQ ID NO: 49144 - protein, 277 aa, unidentified
MNPKNYGGIDVAKKNFVIGIYGQDKTKTEANTPKGHAKAVEYLQKHNVDLVVLESTGGLEVPLANALHAADIRVVIANPQRTHQYAASFSLGKTDHLDAKMLADYAQALDSRKMADDMCYAPTSEEALALEALVKRRSQLVEMRKMEKNRLEQTHASQKASVVAMIKHLGELIAALDKEIDQSNRGGFNGKGEILSEMKGVGRITCATLLSMLPELGKVPHKRAALLVGVVPPPRQSGRKKRKAAASAAGWWYETRYTWQRWRRRAVSRRSRRFTRS

SEQ ID NO: 49145 - protein, 348 aa, unidentified
MFAIINLKYKFMKTSEKKFDFFVGIDVSKVTLDITILNPQSGKLQHKLTDNNDDGYKRMRKWLTAEHNVEFQRTLICMEHTGLYTRSLERFLHENNACVWKESSLHIKKSLGLTRGKNDRIDSMRIAEYAYRFCDKADIKGYCPSGIQLLRDLLTTRERLNKSLKSIMVSINELKRVDIRQAVDLETYQLAAIRGLKESIREVEEAMLETVEKDTLLIKHWELATSIPGVGNILAIKLMVYTQVFTRFESVRQLACYCGVAPFEHRSGTSINGKTGVSKFANMDLKSTLHLASLSAIQHNPDLKAYYHRKVNEGKSKMSVINAVRNKLLSRIIAVVNRQTPYVVLTQT

SEQ ID NO: 49146 - protein, 481 aa, unidentified
MRRLMGIDLGIASAHTVRVLDEAGREICRRRCEPTVVSLSAVEAAALAGAEAGTRLEVVMEPTGPAWLPVAVFFIGRGHSVYRVASAKAADLRRFLSRHAKSNGIDADTLARLPLVDPSGLRALQLPSAERAALDRRVRACDRLTRAATQHKVRLRDLVRQLMPATPLGTDISRSDLAVLQQFADPRVLLAAGLATLTEVIAEASKNRLGVDRAQEWIDAAAAAVELYRGYPAMPYQDLAAEVASEIRLLDAIEAELADHAEQREHAYRWTDLGQLARSLPGLATISAPVLAAVMGNPARFPTGAHFKAYLGLVPRASETGNTDRKGQPMSKAGSRLLRTTLIRAADNARRQDPQLAKIYYTMMTERGAEHIKALCIVAAHLAERAWIVMNRQMPYVVCDTTGNPITTEEAKKIIADRWTVPAAVRAQRRSTKTKAGKAPQQVLTGHDKSDARSADKTRRPSPRRSSPPAPDPVKPTRHGH

SEQ ID NO: 49147 - protein, 394 aa, unidentified
MRYFAGIDVAKDVHWLCVIDENARVLVDHALHNTQEDIDSAIAELRGFKDELVIGLDVMGSIAAFLEAALIAEGFSLAHVPGIAVNRARAGYTRGEMKSDPRDARVIAEQVRTRPDLRRFAVDDETTIAIRVLIGHRRDLVEDQTRRISRLRRVVGGIHPGLEKALDFTTLGPLHLMTRFVTPAEIRSAAMAGLMAHLQARSGLRNRKPIAEAALAAAKAQHTVVPGEAAYAEVARELATEALAVKARLLRLDEELGALLERHPDAALIRSLPGMGAILTAEFIAAAGNITRFRSADAMAAAAGLAPVMRQSGKSRSWRRTFGGDKDLKRVFYQSAFCACSTGDPISKAFYARKRREGKRHTQALIALARRRVTVLWTMLKNRSEFDPQRAMAA

SEQ ID NO: 49148 - protein, 274 aa, unidentified
MIKIIGLDIAKNVFQVHGIDETGQPALRRKLRRAEVLRLFSHLEPAVVGIEACHTAHYWGREIAALGHEVRLMPPQFVRPYVKSQKNDAADAEAICEAVQRPTMRFVPVKGADQQAVLLLHRTRDLLIRQRSSLISAIRAHFAEFGVVVGQRMRNIDRLLGLLVDEGAALPELARRMLAVLADQLRDVAARVAAVEGELMAWHRANDVSRRLATIPGVGPITASAIVATVGGATQFKSGRQFAAWLGLVPQQRSSGGKERLGGSRSVATGTFVG

SEQ ID NO: 49149 - protein, 414 aa, unidentified
MSVVRWVGRAVGLDVHRDFCVVAICEEGRVRSAGRVPSTPEGIAVLAESLLPSDRVALEVTGSCWEVTRLLEPHVNRVVVVSPDDTGIASARAKTDRLDARTLAGLLWKGELEAVWMPDERCRVLRRRLARREQLVHGRSRAKNEIHAVLQRRLQGKPPCSDLFGVKGREWLAGLELPLEERESVDAGIRHVEFLDTEIAAVEKLIAQQALSWPEIKRLMTVPGVNLICAASFIAAVGDAQRFMTSRRLVAYLGLDPKVRQSGEAPARSGRISKRGSPSARWALVEAAWSTVLQPGPLHAFYERTKARRGHGKAIVATARKLSILFWCMLTRGEDYAHQQPSLTRKKLRRLEITAGAPKYTRAVAGTWSTNVMMRDAERELAQQAERSYRRMVNDQRAGAPARKVGASATPERA

SEQ ID NO: 49150 - protein, 400 aa, unidentified
MRTVFGIDVSKASSEVAILVNGERVHGYTMPNDIIGFSHLLKDLKTVSNPEIIFEATGVYSRRLQAFLEENSYDYTRLNPLEAKKQLDGLRVRKTDKIDAEKLASSQFVLNRMPTYVQEKVYQNLHDLSRFYQNLTEDIVRTKNRLHKVLQVAFPEIENLLSTPTGEQYWNLVSIFPTNHWVLELSEVELKETIRQSTSKRISENRVGNLAEKLVGLAKQSYSAISKTSPMIEEVKYNAQELIRLTNRREQVLEQLIELAKPLPEYEILLSIPGIAETTATSVIGELGDIRRFTSANQINAFIGIDLKHYESGDFLGQEHITKRGNPYARKILYKCIHNIASASHTNPCHIADFYEKRKRQSQTTSTKPHTIASIHRLIRTMYYLIMHNKLYDYTLAQSH

SEQ ID NO: 49151 - protein, 321 aa, unidentified
MTQVSTAIAEAHREDGTISVALELSKARGLVGIALPRSSKISRYGVTGGDTAGLLKLLQAARAKAAQLGFAEARVVSCYEAGYDGFWLDRWLKQHGVDNRVLDPASIEVDRRARRAKTDRIDLDKLMRVQWALDRGEPRACSVVGVPSVAEEDAKRPHRERQFRVRERVRHVNQIKGLLSKEGVRGLDPGRPDFVRRLSAATTPDGRALPPHLLAELRREHQSLRLAIAQIAELEAEERARIAAPKGDPNTAKIANLIGLRGIGLASAVPLVREAFYRAFDNRRQVGCYFGLTGTPYCSGATAREQGISKAGNPRARGIAI

SEQ ID NO: 49152 - protein, 464 aa, unidentified
MATSSRQPTRVRLEELHCVHPHAAGLDIGSEEIVVAVPPDRDPRPVRSFRTFTPDLNALVAWLVACRIDTVAMESTGVYWVPIYEALERQGIIPYLVNARHVKTVPGRKTDWNDAQWLQKLHMLGLLQASFRPDADMCVLRTLLRHRAQLIEHRAPHIAHMQYALTQMNLRLSVVLTDIMGTTGQAIIRAIVAGERDPVVLARLRHPRCASPEETIAKALSGTWQAEHLFILQQALELFDSYTAKIQICDAEIERQFSLLKPRFESDEPAPALPAAKPNSKSKNAPSFNARAEVARISGVDLVAVTGIAASTAQTILSEIGTDMRRFPSVKHFCSWLGLAPHNDISGGKVLRRRTLKVTSRANQAFRAAAQSVARSDSTFGAFFRSMRARLGPQQAIVATAHKIARVVYHLLKYREAFNPESAAAYTCKRREREVKQLTRRAQKLGYTLTPADSASAVSTPSPS

SEQ ID NO: 49153 - protein, 339 aa, unidentified
MNITTLGIDLAKNIFQLHGADGKGNAVLKKTVTRNKLTEVIATLPKCRIVMEACGGANYWARKFKEYGHDVRLISPQFVKPFVKSNKNDRNDAEAIVEAASRPSMRYVSAKTVEQQDLQSLLRLREGCIEMRTKMHNQLRGLLVEYGIAIPKGTHHLHKALPKLFDRNNENELSIGLKEMLEMQYRLLAAMEEQITTYEKKLKAIAKTNEACQRVQKVEGIGPITAVALAATIGNPNDFKNGRHFAAFIGLVPRQHSSGGRERLLGISKTGDGYLRQLLIHGARSVVLYSGKKMDTRSRWINELKMRAGANRTCVAVANKNARIVLAILKNEEAYRPAI

SEQ ID NO: 49154 - protein, 344 aa, unidentified
MEQYVGLDVSVEETSVCVIDGAGKTIRELKVPSEPDALLAALTEDAFAIRRVGLEAGPLSQWLYGALAEAGLPVICVETRHMKAALSAQIQKSDRNDARGIAQMMRVGLYRAVHVKTLASQKRRMLLTSRRLLQAKALDIENDLRGTLRNFGLKVGLVRTVKFEARIRELVAPHPDLAVIAEALLIARSVLREQIAVLNRQLLAVVREDEPCRRLMTVPGVGPVVAFAFRATVDVPARFKNSKAVGAAFGLTPHRYQSGEIDRMGRISKCGDAMMRTLLFEAAQALLTRTRKWSWLKAWGMKLARHRGMRRAIVAVARRMAIVMHRMWRDGTEFRWTSAPTTTA

SEQ ID NO: 49155 - protein, 363 aa, unidentified
MRTVHYIAMDTHSHTTDICMKTRANAPGRKWHVETTIPALRAVIESIKHPRYLTFEEGPLASWLYRNLKEEADKVVVCDPRKNALISKGGDKDDAIDCGKLADLLAGDFLTPVHQTQDLGREVFKQLVSRYHERVARRVSESNKIVGWLRRWGVVVTAKRFKEKADRRELLGRLPSDGEVAPVRTALEQMFLGYDQVRRQEDRLRGELTRLAKQEEFAVRLEALPGISWVRASTFFVYVDTPWRFASKQALWKYLGIGLTRTTSGSGFEGLRVERMVNRRLKSMILGAARTIIEANKENDPFALQHRNWIKSGISPRNARRNVARSLSGVAWGMWKNGGVYDPARVGVRASEQVVSCGKQSDR

SEQ ID NO: 49156 - protein, 355 aa, unidentified
MNDRKYIGLDVHQATISVAVLDSAGKLVMEAILETKAETILQFIHGLRGSLHATFGEGTCAAWLHDLLKPHVAHVLVCDPRKNALIKVGNKSDRIDARKLADLLYLDKLHPVFHGEAGNRALKELARSYLTLTRDTTRVMNRLKALYRSWAIPCAGQRVYAPRYRSEWLAKITPAGVHRRAEIYYQQLDALRSLREQVRRDLLAEGRKHKAMNLLRRIPSIGPIRAVLLIALMQTPHRFRTKRQLWAYCGLALKTSTSGEYQIVEGRLRRSRKFLAIRGLNTNHNHDLKNIFKGAATRAAAVPGPFQDFHAGLVARGMKPTMARLTLARKIAAITLIVWKKGVDFDAEHLKQQAA

SEQ ID NO: 49157 - protein, 338 aa, unidentified
METYAGIDLHSSNNFVGVINDKDKILYGKRHQNRLDDVLRALDPFKDSLQGVVVESTFNWYWLVDGLQDHGYEVHLANPSAIQQYEGLKHTDDPWDSVWLAHMYRLGILPEGYIYPKEHRAVRDLLRRRLLFVRHSTSHILSLQSMINRNLGFKMTNNEIKKLKPTDIESLFDCSNLVFMANNSLCAIEFLKKIIKDIEKKVKSQVKMRKEFEMLLTIPGVGNILGLTISLEVGDIGRFPKVGDYSSYCRCVESKRLSNGKKKGENNKKNGNKYLAWAYVEAAQFARRYCVKAQSFYQSKEAKTKPVVAIKALSNKLSKASYYIMRDQVAFDEDKLFS

SEQ ID NO: 49158 - protein, 380 aa, unidentified
MKKDIRHLGLDVDSEKIAVAVAEPGGEVRSLGTIPYREDSVRRLVKRLGPASRLRVCYEAGPHGYSLYWQLSKLGVHCDVVAPTLVPVKSGDRVKTNRRDAEKLARCYRSGDLTPVWVPDAAHEALRDLVRAREVAKKDQLRARHRLGKFLLRRGLRGAAGMKNWTSKHLLWVKTLRFEHVAQEATFLDYLHEVEHAAERVTRLEQAIDKAIESTPTEMQALIAGLQALRGIRRVSAATIVAEVGPLSRFSRPKQLMGYSGMVSSEDSTGSSVRRGAITKTGNAHLRRIVGEAAWAYQHRPAMSTLLKKRQEGLSEEIKEIAWKAQHRLCSRYRRLMTKGKLRQKVATAIGRELLGFIWAIGMQVEKEQQGYTKGRGRAA

SEQ ID NO: 49159 - protein, 387 aa, unidentified
MSQVSDLSRSLVPFDQNITLTVVVELSEASWLVAGLIPGVDRQPVKKQEPEPVALLRLLERWRVEAVRAGRTIGRIALAFEAGRDGFWLARWLQARDIEVHVVHSTSVAVSREHRRAKTDRLDTAMLMRVFLGWLRGERGHCRMVAIPTLEQEDAKRPSRERESLVGERTRIVNRMKAALARLGIRGFKPTLRKAPQRLDALRTPEEVSIPPNTLDEIRRDMVRLAVVREQIDVIERARLARLEQAPAAGPHAMVRLLARVIGVGLETADMLVQEVLSRNLRDRRAVARYVGLTGSPDESGRRRREKGLAKAGNARVRRGLIQLAWRFLRFQRDSTLAQWYRTRTGGPKGARKTTMIVALARKLLIALWRMVTIGEIPAGAALRQVI

SEQ ID NO: 49160 - protein, 355 aa, unidentified
MDSTKYVGMDVHTEAITVAVRNSAGKVIIESTLETKTSTILEFIQGLHGNLHVTFEEGTWAAWLYDVLKPQVTKVVVCNPRKNALLKNGNKGDKIDARKLSELLRLNHLKPVYHGEHGIRTLKELSRSYLTISKDLGRVMNRLKALYRSWAIPCAGRQVYAPRHRSEWLSKITEEGVRRRAEYYYQELDALQTLRQQLRRDLLSESRKHTAAKLLRQIPCIGPIRAALLIALIQTPYRFRTKRQLWSYSGLGIETHDSAQYRFVRGQLQRSKRPQQLRGLNKDHNHDLKNIFKSAAIMATISAGPFHDFYEALLVKGRKPTMARLTLARKIAAITLIVWKKEVRFDANHLKPQAA

SEQ ID NO: 49161 - protein, 314 aa, unidentified
MTNNRFVGIDVSRTSLDGFVRPSGETWTEPNSPQGHALLVRKLTKLGPALVVLEASGGIQRPLARALGQAGVPVAVVNPRQVRDFARAVGCLAKTDTLDAEILAWFGEAIKPDPQPVPDPEVQHLSDLVSRRRQLVEIAAGEKNRLGTAAPEIRPGIERHLRWLEGEVEGLEQEIARLEREDPRWRERETLLRSVPGVGPVLSATLLGCLPELGQLNRKKIAALVGVAPFNRDSGARSGKRSVWGGRGNVRTVLYMGALTAVRCNPVLHSFYHRLLASGKPTKVALVACMRKLLVILNSMLHHNTPWNPEIARP

SEQ ID NO: 49162 - protein, 416 aa, unidentified
MKSPTNESFTAFVGIDWADKKHDVCVQPAGSEMREFSVIPHKVEMINDWAQSLIQRFGSPIAVAVELSKGPIVYALQKFDCFVIYPINPLSLARYRETFTPSRAKDDPTDAEFAVDILLRHPDRFKPLKPQSMEMRALATLVEQRRMMVDEKKRITNRLRTALKQYYPQVLDWFDHIDTPIFCDFIRQWPTLIQVKRARKNTLETFFHQHNMRFAQVLADRLDAIKTATPLTMDDAIIIPYRLQVQVLIEQLSVTLEGIKQFDQATESIASKHPDFHLFDALPGAGPALAPRLLVAFGEQRDRYLNAADLQKYAGIAPVTERSGKKHWVHWRWQCPTFLRQTFTEWAAQTINKSFWAGQYYYQQRAKGCSYQAAVRALAFKWIRIIFRCWQTGKPYNESTYLKALEHRGSPLLKQA

SEQ ID NO: 49163 - protein, 334 aa, unidentified
MQTATLIGIDLGKYSFHVHCQDRQGNALLRKKFSRSQLATFLATYPACTVVMESCAGAHYMARTVSQLGHRVKLIAPQFVRPFVKSNKNDFVDAEAICEAASRPSMRFVTPRTEDQQAMSALHRVRSSLIRERVKTTNQMHAFLLEFGISLPRGSAVIKRLPSVLEENGIPPYLERLLARLHTHYGYLSEQIKEIDNELKTHLNEDETAQRLLTIPGVGPVTASLLATRLGDGKNYASSRDFAASTGLVPRQDSTGGKPTLMGISKRGNKVLRSLLVQCARAFMRRLEHNSGRLAEWVKKQLASHHSNVVACALANKLARIAWAVTAHQTEFSK

SEQ ID NO: 49164 - protein, 370 aa, unidentified
MSQSSTLFIGMDVHKDTIAVAYVAQEHGAEVTYLGTIGTRQCDIDQLVRKMQSKAKHLIFVYEAGPCGYWLYRYLTKKGYDCWVVAPSLIPKKAGDRVKTDRRDAVQLARLARSGDLTVVYVPTVDDEAIRDLTRAREDALSDGKDAKFRLKAFLLRHDIRYTGRANWGPAHLRWLSEVVCPTPAQQIVFQEYVRAVTEHAERLQRLDQELQEHVRAWRLHAVVEALQALRGVQFTVAVTMVAEIGDLTRFDTPRELMKFLGLIPSEYSSGERRHQGAITKAGNTHARRALVEGAWAYRYPAKVSRHLQLRLEKQPKMIQDISWKAQVRLCKRYRHLVARGKHANIVTVAIARELAGFMWAIAKQLPVAA

SEQ ID NO: 49165 - protein, 370 aa, unidentified
MLDTTTFVGLDVHARSIKAVSLDVMTGEVRAATFGYDAGAVAERVRSVDPEARCVYESGVTGFDLQKRLSGLGVGCVVGAVSKMIKPSADRRRKNDRNDAEFLARMLSVGNVVEVWVPDDECEAARDLTRALEDARDDLSRSKQRLSKFLLRHGLVFDERTPTGRRRGNWTRAHWSWIESIRFAEGADNDVLAYYVDAVRRAAEEKARLEGLVEAEARKPRWRRRVDSLRCLKGVDTASAADLVFEAGEFSRFGNARSFAAWVGLTPSEHSSGESDRRGAITKAGNKHLRKALVEAAWHYLTCSGRPKEPARGQAPDRGARRHAAKGVRRLVERRESLLARGVHGNKANVATARELACWVWAVGLMAEEA

SEQ ID NO: 49166 - protein, 397 aa, unidentified
MYIVGIDIAKRKHEAAVIDGEGTVIIKPFSFTNNCSGYNRLLAMLAKAKLPLDEVSFAMEATGHYWLALFTRLQKEGFRVQVINPVQTNSIRSFYIRQAKTDPRDALLIAEVIRFGHFSESTLHPENIYELRELCRGRHAIVSMQADVKRKVVALLDQVFPEYETAFTNMFGDTSMAILQTCPTPKELSEMPLEELCHLIEVSSHKRFRMAKAQELQALARNSFGFAMAGDVFSTMIRLYAKHLDFLKQQVREMDRKIAEIMDTLDTPITTITGIGPTLGAYILSEIGDISRFSSAAKLAAYAGIDPTMRQSGEYNGVRNRMSKRGSPYLRHAIWLAASSAVLHDPALKLYFQKKRDEGKPYMASVGHACRKMVSIIYAVMRDNKAYTPCIPNEISV

SEQ ID NO: 49167 - protein, 345 aa, unidentified
MKIVGCDLHTRYQQIAMLDEETGELVERRLEHGNGEAKEFYTYLAGPVRVGIEATGHTRWFEQLLAELGHELWMGDAARIRAAEVRKQKTDARDAALLLDLLLSGRFPRLWRPAREERDLRHLLWHRQKLVWMRNAVGNQLHALAMGEGLCRKKQLFTKKGRCELEALKLDAWASRQRQELLRLLDQLDASLAQFDQAVNEQAAANGDAVRLMTHPGVGPVTSLAFVLIVGPAARFGRSKQLVSYLGLNPSEHSSGGKQKLGAISKQGNPMLRGLLVEAGHTAARMDPELRQDYQRLRLRRGGSVAKVAIARKLAVRMYWMLRREVNYTQLVRTQGSSRATLVQQ

SEQ ID NO: 49168 - protein, 423 aa, unidentified
MSKKKQTVAGLGAIYARVCGMDVHKEVVVACVRILDMKDGTVQSTLRRFGTMTADLLELRQWLAQEQVTHVAMESTGVYWQPVFNILEGHFEVWVVNAQHIKKVPGRKTDMKDAEWIAQLLQCGLLKPSFVPDRQQRELRDLTRQQSKLVQQRNAVVNRIQKVLETANIKLGSVATDVLGVSGRKMIEALIAGEKDVSKLADLAEKRLRHKIPQLQRALEGEVGEHHRFLLRRLLDQYDFFEKEIARMSERLAAIAPPSFRAAIKRLDEVAGVAERGAQALLAETGTDMSRFPSHKHFASWAGRCPGNRESAGKRKSGKTPAANRHLDAVLTEIAHAAVRKKDSYFKSQYHRLAGRRGKKRAIGAVKHSILVTIYFMLRDNKSYTDLGADYFDKLNPQQQIRYHVRKLNELGQNVELSLRPAA

SEQ ID NO: 49169 - protein, 319 aa, unidentified
MSKRSIVPSDTVVAGVDVSKARLDVVLWPLSESFSVDNDAAGWRVLRRRLQAAGARRLGLEASGGYERGVMEAVVDDGFDVVLLQPLQVRAFARFRGQRAKTDRIDAALIAECTAQAKSLTCMRPLACKKAADLLTLYEQTAADLARLRNRVERFRDGELAALLTEPIAYLKAFRQTLLDRLRRLVRTHDQLAHRVALLQSIPGIGFLNAISLAAWVPELGELTRQQAAALLGLAPFNHDSGTWQGDRHIAGGRARPRRLLYMAAVAAARCDPDIGAFYRRLVGKGKPHNVAIVAVMRKLAAAANTVLKRNAPWIPVAP

SEQ ID NO: 49170 - protein, 388 aa, unidentified
MLLPIDLSKKSPTTFEQGATLVAVVELSLKSWLVAGIVPGIDRHPLKKFEASENRLLALLGHWQQQALNAGSRIKRIVVAFEAGRDGFWLARWLRARGIEAYVIHPTSVAVSREHRRAKTDRLDTELLKRAFLGWLRGETHHCRMVAIPTLEEEDAKRPNREHDTLVRQRTRIINRIKSGLVRFGIQNFKPTLRKSAERLAKLMTPEGMRLPPNTVAELHRDMERLRFIRDQIKAVEQARIKDLKTAPKTQSNAMVLLIARVFGIGIETADMLVHEILSRNLRDRRAVARYAGLTGSPDESGDRRREKGLARAGNARVRRGMIQLAWRFLRFHSDNPLAQWYHKRTADARGSTRKTMIVALARKLLIALWRMVTTGEIPRGLKLRAAA

SEQ ID NO: 49171 - protein, 450 aa, unidentified
MATVMIGIDPHKGSHTAVALTAAEEPLGQLRVRAAAAQAERLLAWAQAWPERTWAIEGAGGLGHLLAQQLLAADERVLDVPPKLAARVRLLATGNINKNDPNDARSVAVAALRSPGVREASRDDHAAVLRVWSKRHKDLGRARTQVACRLHAVLCELIPGGVSKQITAGQAARLLEAITPAGAVEAARRELAAAFLADLRGIDAAVRDTRSKLTVAVAAAGTSLTALFGVGPVTAAAVLGDVRTVSRFPDRNHFASYNGTAPVEVSSGGRKIWRLSRRGNRRLNHAIHMVAVTQIRHRHSEGRAYYEKKLAEGKTRKEALRALKRRISDTIYACLQADAARAAATAAASEPGRATGEPLCLQGGRLTPRTPALRISHSQARNQPTTPARDPAAASLSRAAAIPREQAARSRTGRSPAARRRPQGVLDQAAGEPIMPAAGKGRRLGPRSPG

SEQ ID NO: 49172 - protein, 356 aa, unidentified
MDQLTTVGIDLAKDIFAVCVLDSTGAVLQRRVLRREAFMRWAEQLSPCRVAMEACGSSHHWGRWFAARGHTARLIPAEFVKPFRPGGKNDAADAEAIAVAARQPTMRFVAIKSVEQQAILAWHSVRQGWQEERTALLNRTRGLLAEFGVVIARSADRLLSALPILIEDARLPDPVRAMLLEVREQLVALNLRLARCDQQIATHARCSDVARRAGELLGVGPLTSSAVAATVPDAKVFRNGRQFGAWLGLTPRQHSSGGRTRLGHISLRGNVYLRTLLVQGARSTLQSALRADPTHASRLQRWIRQLHERKGYHKTLIAIANKHARMLWAMLAKNEHYDADAWQRHPMYAPLAPAAV

SEQ ID NO: 49173 - protein, 361 aa, unidentified
MQTANRREMLFVGIDVHKDTHTAVGLTPFGEKIFEMTIGNEAEDFISLVEKTKVEANKIGLIPSFGLEDVHSWGERLSSFLVEEKLPVVAVAPILVDHRRSKTTHPEKSDSLDAQGVAEVMIQRIDTLPVYKLTEEAQKAKQIRELSLEREWLVKERARLKNQLHILLHRIHNTGYRTKFKDPFSKKALRYWSRSIPKNADTILAQRTKRALRRILDLREEIQEIEDELDAMMKENGQTLSTASGCGTVIAAEIIGEIGDVNRFHSPGALAKYAGCAPREHSSGKTIRWRKTRSGNRRLNRAFHRMALSQISRSGNDAARAYFKRKISEGKTKAQALVCLRRQLVNVVWMMLKHKTEYRYP

SEQ ID NO: 49174 - protein, 407 aa, unidentified
MPEQAVTTHVVGIDIGMESCTMSCLTKDKRQVIKSTPFANTLQGFDWLFERLEGLEVAPKHVLVGLEATSRYGENLLQALLKRGYQVCLLHPAQMHAFAQQRGLRAKTDRLDAVTIARALLSGEARFGYVPSEQVATYRELMRLQKQLSDDVVRYKNEIHALLVVLFPEFTQVFVDPTRPTALAVLMRYPSAQAIARTEVETLSKFLHELAPRHYGRPTAQELVGLAKSSGSPGVAVAARSSSLRILCDQLDHTQKNLEQLQREIDQLLNQDPKATGMLGVPEFGPTTVAVLRAELGDLTRFTRIDQVVAYVGLDLQVKQSGKWKGQTKLSKHGSGRVRRILYLAALRSIHLEASPFGAYYQRLVARGMKKGMAVVAVMRKMLIVAVHLIQTEERYDPRKVARQAGS

SEQ ID NO: 49175 - protein, 341 aa, unidentified
MIIIGVDYHPSFQQIAFVDSETGDYGEQRLGHPEEAERFYRDLAGQGKKVRVGMEASGHARWFERLLVELQFELWIGDATEIESKRVRKAKTDREDARLLLRLLMEDRFPRIWVASWENRDLRQLLWHRHRMVQARTRIMNQLQAVALNEGLRCKKRLWREHGRKQLESLRLMPWASRRRKDLLEFLDRLNPTIADLSQAIEQQVEKCPAAQRLMTHPGVGSLTALAFVLIIGQAERFRCGKQIASYVGLVPLEKSSGNRRRLGHITKQGSSMLRFLLVEAAQVSVRCIPEWRNKYVHLALRRGNKIAKVAMARRLAVRLYWMWRNKWDYESGIVRDAIFR

SEQ ID NO: 49176 - protein, 420 aa, unidentified
MSFKIFRKNCCGLDVHKTWIYACIGITDTNGRTTYKQTRFSSFSKGLKELSTWLAKYQCTEVCMESTGKYWIPVFNVLEKEDVSVILSHPKYTKPQKGNKTDRKDAKWICDLFMCDMVKPSFIPPADIRHLRDLVRYRFKLICMITGEKNRAQNCLTVSNLKLDDVFSDVFGKSSRSITEYILKHPGDLFDVTPFVDRRCKTPIEEIQAAVDGAISPEQAVKLRQCLNPIDELEKHLEEIEQEILRLSDKYQAALDLIRTVPGFDKNPMTAIQVLSEIGGDMSVFPSAKHLVSWAGCCPRNDQSNKKIKSTRISRAGSYFKPVLVQVANGLLRSKKHLEITDRYKRIKARRGHKKAIIAICRMLLTAIWHILSDLKPYTAEGFRESRPVNESKVLTTSQALNLLKQRGYIIKDDLAPAMN

SEQ ID NO: 49177 - protein, 329 aa, unidentified
MEYGLVAFDVGARSHAFAASVGGKETTGMLDNTPEAIARFAADQQRRCGQLRVVMEATGIYYLDLALQLVEAGVEVMVVNPKASHHFARAMSQRSKTDAQDARMLLAYLQRMDFVPWQPPAPQLLELRQLGRHLCRLAEQQVRLKNQLHALRSTRTSPAVVVKDLRDELARLERRIERMQAEALRRVRTDAALTECFDALDSIIGVGTTSALALMAELLVLPRDMNSRACVCHAGLDVRVHQSGTSVALAPRISKHGNKYLRRALFMPAMTAVSHDPHARAFRDRLLARGKEKMQAITAVMRKLLTAAWALIRNPGQYDGSRLYATQGG

SEQ ID NO: 49178 - protein, 315 aa, unidentified
MALQASPVILGIDVSKDGLDVCQHGSDRVERIDNHAKAIQALLKRYSLAALAVEATNTYHEKLVDLAHRQGVTVYLISGYQLKCYSESLGQRMRTDTVDARLLARLLDREIDQLRPYEPRSRQQIQLRRLLKRRALLVKQRLQLSQSLAGMGLDASLKSLQRRYREILILIDKRLTSLAKTLGWPADLARLRSIPGIGPLTALALLEAWRSGSFTHRDPYIAYLGLDVKTKDSGKHRGRRRLTKQGNPEVRRLLFNAAMAATKNGQHFAPTYHALQSRGLSKIQALVIICRKLARLAFALLKNQSSFNPEACPAT

SEQ ID NO: 49179 - protein, 355 aa, unidentified
MNSLRYVGLDVHRDTISAAVLNESGRLIQQSILATRAAAILEFIGGMRGTLLVTFEEGTHSAWLFDLLSRRVAKLVVCNPRKNALMKSGNKSDAIDARKLAELLRAGMLSAVYHGEKSPLEIQHLARSYTMLTEDTTRVMGRLKAVFRGQAVACAGKKLYGKRHRDEYLAELGTGALRRRAECLYQELEALQQLRRQARHDLIVECRKYPETKLLCSVPFLGPIRAAVLIGRVQTPHRFRTKRQFWAYCGLALEMRDSGEYRMVDGQVERRKRPALIRGLNWNHNHELKNLFKAAATSASASNGVFREFYLGLLRKNMQPEMARLTLARKIAAIALKIWKKGEAFDAEHLKLQAA

SEQ ID NO: 49180 - protein, 394 aa, unidentified
MIGLEHVIYVDYGRRRGDRSHRATNMRRPIMTNNITWVGMDDSAKTINLAIFKGQEINPREELVVINDSTGLGRMAKKLKTLPGEVRCVYEAGINGYYLQRYLAKHEIACDVAAPSLTPRRVGNRVKTDKLDAKALARLYRAGELTCIVIPQHEQESLRDLIRAREDALEDQLRARHRLARFLMRRGWRYRDGKNWSQGHLRWVKSIRFEDDRDQMVLDEYRLTLSEQTERLDRLNKKIEEVAKHPTYNTRVRYLMALKGIRVLTAMTIIAEALDLRRFTDAPAFMAAIGVVPSEESSGEVERRGRITRTGNSHIRRVMIESAWTYQHSSVSGKTVQNRRKGLPAEVLDIARQCDKRLHQKFRRMASRGKDRQKIAVAVSRELAGFVWAIGKVA

SEQ ID NO: 49181 - protein, 434 aa, unidentified
MEVVYSRCCGLDIHKKLLVACRIVPGSDGRPCKEIRTFGTMTEDLLQLGDWLAAEQVTHVAMEATGIYWHPNYNLLEACFELLLVNAQHIKAVPGRKTDVKDCEWIADLLRHGLLRPSFVPPRPQRECRERTRYRTTLVRERGAEVNRLQKTLEGANIKLAGVASNILGTSSRKMLEQLIAGTTDGVALAELARGRLRAKLPQLQQALTGQVGPHQRFLLARQLAHIDALEQLITEVSTEIGQRLHAATGFQPPAPQAPPRATAADAPVPLAAIAQRLQTIPGVGQRAAEIVIAEVGVDMRRFPSAAHLASWAGLCPGNHESAGKRRSGKPRHGSPWLRTLLVEAAQAASRTKQTALAARFQRLIGRLGYKKALLALAHTILRIIYALLKHGTTYQERGPLVDDQAREAAIRRGIRKLQALGVTVTVTPAPPAA

SEQ ID NO: 49182 - protein, 353 aa, unidentified
MGIVVALDVHRKQVTYKALDRETGEVKRGRIAPAARADVREWLARFAGCEAEFVLEGTTGWRFVVEEIERAGHRAHLADPAETAAKRGRKRRAKTDNADCDLQLRLLLAGELSESWIPPAHLLELRTRVRMRKTLVDQRTAWQQRLQAQLFHQGVPAGLRPRTRAGREALARAELSPAGRELVSLALRMIDAIDRELAPLDRQLCSFARRQPGCRALVARLYGVGPVCATAILAELGDACRFARSDDAVRHSGLDVTVYQSGEKRAPGHLSHEGPELLRWALFEAALSAARAGSPDHAYYLQVAERIDHNRACLSVARKLCRRAYHLLRELGDEALAPVAGDPQAEAAIAAAA

SEQ ID NO: 49183 - protein, 302 aa, unidentified
MTKAFQIKERFCITNEVVVLGTLISKLKESYPHLTIGAESTGICHLPVLHACEELNLDCKIINPILTKQILQSSIRKRKTDADDAVRIAKLLMQNEGRVMTYQEATDKSKILVRTALKLGEMNQALRLHIKHVEVLLGQAPEPLLREGASMKENLKTLKKEAIKSVPKEQRKLLESIPGIGSWLASTMLAEIGDIKRFPDGDALIAYAGLDPQIKQSGANLNTHGKITKRGSKHLRRALTCAAGIAKMHDPELKKYYTDKRSEGRKYREVLCILGRKVGFRVFAVLKRGTPYEKRELQEERK

SEQ ID NO: 49184 - protein, 317 aa, unidentified
MNKEEKIYIGIDVSKPILDVTFLPNKKYMQFKNNLAGIEHLIKKINKFPNALIVMESTGGYEKLLAIRLFQAGHNVCVMNPRRIRDFAKSMGILAKTDKLDSDVIALFASKIEPAPNFDFDEEKNLLSENNARRRQLMGLITMEKNRLDKASPKHIKGIERVIKCLTKELNKVDEEQQKLLESNTEFAEKATILTSVKGIGSVTARALLAELFELGELGAKQISSLAGLAPFNRDSGKFKGLRTIWGGRASVRCALYMATLVATRHNTVIRAFYQRLLAAGKKKKVALTACMHKLLIILNAMIKNKTFWREPTPLHA

SEQ ID NO: 49185 - protein, 387 aa, unidentified
MEVRVVSTPSAGADNEPVHCYVAIELSKSSWIVGFQTPLTNKTSQYQVKACDANALLELIERIRTRVARELRRPIEVMSCYEAGYDGFWLHRVLKAHGIHNHVLDPASLQVNRRARRAKTDRIDADRMVRALIRYLRGEPEACSVVRVPSVEQEDAKRLHRERRRLIAERVQHVNRIKGLCATQGIYHYAPLRKDRLARLDDLRTGDGRALPTRLKAEIARELKRLEVLLEMIATVETERDVILTSAASTHLNAGKIKMLAKLKAIGPEFATILVGEVFYREFANRRKLGSYVGLGSSPFCSGPVDRDQGISKAGNPTARSMMIELAWTWLRYQPGSALSIWFRERVGNLKGRPRRIAIVAMARKLLVALWRYLQTGLVPTGALLKA

SEQ ID NO: 49186 - protein, 411 aa, unidentified
MDVTVERCAGLDVGKEEVVACVRTPGEGGRRRQEIRAFPTFTAQLEELAEWLGAEGVTEVVLEATGQYWKPVWYVLEDRGFELLLVNARHVKMVPGRKSDVADAAWLAELLEHGLLRGSFVPPPALRELRDLTRYRKRLTQQHTAECQRVQKVLEDAGIKLDSVASNVLGVSGRAMLKALVAGERDPEVLAELARGTLRNKIPLLRQALYGRFSDHHALLVRLAMEHLEHLEAMTAALDAEVDRVMAPFAEARDRLDTITGVGKRAAECIIAEIGVDMARFPSAAHLASWAGVCPGNNITGGKRRSGKTNKGDRWLSEVLYECAWAAARSRKTYLGAQFWRLAGRKGKKKAAVAVSHSILVIAWHLLSRGVDYDDLGGDWFTRGTDPERRKAALVKQLQALGYAVTIRPAA

SEQ ID NO: 49187 - protein, 352 aa, unidentified
MKYYIGCDAHKKYSVFAGISEAGEIIPAQRVEHDRESYRSFLQSLPPASQIAVESVGNWYWMVDEMEKAGHVPALTHPAKAKLMMGQLNKTDKLDARGLAVLYRNGTLPAVWIPPGELRDRRELPRMRMTMSQVRTRFKNRIHSTFAKYGITFDEVSDLFGSRGRKLLEKSLEQLPPETRLSVQEQLWLLEQVEQSIKKAEKRIGQVIKMDDTMQLLQTLPGVGPILSIVIALEVGSIDRFATAENLASYAGKVPRVNSSGGKTFYGKVRPDVNRYLKWAFTEAANAIVLHQNRWPDRHVVRLYQRVRKHKGHAKAVTAIGRHLAEATYWMLKNNEPYHEPGRKQMVSHSQG

SEQ ID NO: 49188 - protein, 335 aa, unidentified
MSLYYAALDLHSNRSVLVVIDEEDRVVWRGSLPNDLELVLMALVPYREQVVGVAVESTYNWYWLVDGLMEAGYEVQLVNPAAVKKYEGLKHQDDTTDAYWLAHLLRLGILPTGYIYPRERRGLRDLARKRLRLVSQQTAHILSLESLYNRCLSRSLSASQVRKVEAEELGDPYWAQAALSSQQILQTLGEQIDRIEKQLKQALESEQEYKILQTIGGVGEVLAATIWLETGDLSRFRKVGQYASYCRCVDSKKTTNQKKKGEGNRKNGNQYLAWAWQEAAAGAIRWQSKARSFYQSRKAKKGAWVAHKALAHKLCRAGYFMLRDQVEYCSARLFG

SEQ ID NO: 49189 - protein, 413 aa, unidentified
MSRKKAEVELHYERCCGLDVHKKLIVACFRDGSTNTVRDFGTTSGELREMAEWLIECGCEMAAMESTGSYWKPVYNVLELFGLDVMVVNAQHVKNVPGRKTDANDATWMATLLAQGLLKPSYVPGREQRELREVTRYRKSLTEERTREVNRLGKMLEGANIKLTSIVSDVLGRNSRKLLAAVLDGESISELTIEGMITRQMSRKATLLVAAMDGVASKTQRLLIRAVLDHIDDMTRRIADLDEIIKNEMDDYDRAIEQLDTVPGIGEASAQVILAEIGLDMERFPTAGHLAVWAGVCPGNNQSAGKRKYSPTRKGNNTLKATLVQCAQAAVQKKDTFFRAQYERLVARRGKNRAKVAVAHSMIVAIWHMLKSGSNYKDLGGSYYNSFNPKKKISMHLKKLTELGWTPPTPALA

SEQ ID NO: 49190 - protein, 435 aa, unidentified
MGSKLQKIHAQGAGIDVGSRQFFVGIENQEVKSFDTFTNGCYQVVEYLQQHSITSVAMEATGVYWITLHDMLRDVGIEVDVVNGRHVKHVPGRKTDVKDCMWISELHSYGLLKKSFIPEAQVKEMRHYMRLRENHIEQKVKAVQRMDKALVMMNIRLSSVVSDIQGQSSLRIIEAILKGERNADVLLTLCDKRILNRKAKQMQECLKGFYKPEQLFALKQSWEQYDFSEKQIADCDVCIEKLMETLTINKPEPVLNEKPKRIYHNKPNVKNLHKMVQQLYDGKDLTVLPGITSYSLLKFFSVTGNDLKNWKTENHFAAWLGLAPNQYQSGKMKKYRRIKMNTEAGQILKECVQPLLRSKHVALGIFGKRISSRRGPSIAIKAMARKLACWIYRMVNNGLAFVENGIKQYEERQKKDTLKWLEKKAKELNLILTPC

SEQ ID NO: 49191 - protein, 416 aa, unidentified
MRKKDYVEFEQVVERGCGMDVHKETVVVTIRGKGIKTITKSYSTYTRSLIKLKEWLKRQGITHVAMESTGVYWKPIFNVLGDDFEILLVNARHVKNVPGHKTDKRDSRWLAKLLLSGLLKGSFIPERPFRELRDLTRYKKKLTNQVAADKNRFLKILEDANIKLSMVLSDVFGVSGTKMINHILVYNDYRPEDLMQYVHGRVKASREDIKEALTGYITPHHRFMMNTILGNIAKIESTIAEIDEHLKVVLEPYKLEKELLETIPGVGPDVSIGIIAEISTNMEHFPDHKHLASWAGMSPGSNESAGKNKSGRTTFGNRNLRGFLTEGGWAASRTKNTYFSAKYKNLVGRRGKKRAIVALGHKILIAAYFIIKDKVEFKELGEEHLNNFRRDKLLAYYKKQIERLNPDINIGQEEAA

SEQ ID NO: 49192 - protein, 339 aa, unidentified
MELYSAIDLHSNNSHVAIIDDQQNRVFYRKLANDGKLIANAFAPYRERLKGIVIESTFNWYWLADLLIEKGYPVHLANPCGIQKYSGLKHADDKHDAFWLAQMLVLNILPEGYIYPKEDRPLRDLLRKRAHLVRVRTSLILSLQNIVMRNHGIKIRSNDLKKLTQDPVAELFKDQEELALAGRASKETIDFITRQIQRIETAARSKALLKEPFSKLLTLPGVGDILGMTILLETGPIERFKAVGHYVSYCRKVPSRWTSNEKVKGKGNTKNGNRYLSWAFSEAADHARQTHEPSRNFYNRKLNQTNASVAHNALAHKLARAAYYIMRDHVEFEEDKMFR

SEQ ID NO: 49193 - protein, 474 aa, unidentified
MMIPLSRLPSDHLRKEALMARRSKAKGTRRRTKLHIIYTRAAGIDVGSTFHVVAVPPELSAEPVQTFQSFTGDLYRLAHWLVDIGVTTVAMESTGIYWIPVFDILEAHGLEVLLVNAQHVKTVPGRKTDVNDAQWIQQLHTYGLLRGSFHPAQDWSALRVYLRHRERLVEYAAAHIQHMQKALMQMNLQLHHVLSDITGTTGMKIMRAIVAGQHDPAVLATYRDARCKASAETIRAALTGHYRREHVFALRQALELYDSYQARIEACDQEIQSTLESLQHDEISMDTLPAARHKKRQSHEPQFDVREALFRVLGVDLSQIDGFSAYTALKLVGECGMDMSRWPTEKHFTSWLTLAPGNKISGGKVLNTKTRRSANRAAAIFRLSAMNVGQTNTAFGAFYRRLASRSGKAKAVTATARKLAVLFYNTLRYGMAYEDPGAAYYEDRYRERVLTGLHRRAKQFGYKLTEVSALEGVS

SEQ ID NO: 49194 - protein, 357 aa, unidentified
MFFIGIDLHKRQSQICILDEQGQVHYEARVPTSRPDLADVLRSYLPARVVIEACPPSEWVARHLESLGFEVVVADPGFAPMYATRDKKIKTDKRDARMLANACKLGAFKPAHRLSDAQREVRTFVQVRQTLVQTRTRLTNQISGVLLAQGFVMATGAPENFTKRLERLDLPDALNAVMEPLCSLLGPLNERIEQLDKELASRAAHDAQAVRLQTIDGIGPLTSLLFVAVLDGAHRFEHAHQVMSYLGLVPREKSSGDKQMRGSITKAGHPQMRVLLVQAALRIQRLQKPQTARLHEWAENIKERRGKRIATVALARRLCGVMWAMLRDGTEYQAEPPRRTAGVGQGSGDNPRRALAA

SEQ ID NO: 49195 - protein, 319 aa, unidentified
MQNIIIGVDVSKDSLDVYVRPTSVRKRFANNADGIAAFVIWARPLAAHRILFESTGPYQIAAVDALLADGLPGVVVNARQVRAFANAMNYLAKTDTIDAAVIAHFGEVAVTKVRPLESEEIRTLRELCDRRGQLVHMLTMEKNHRHSAAVARASAKVLQSIDRHIASLEKQIHALEQCLDRLIENSPVLKARNEILQTITGIGPQVARILLVHLKELGLFTRQAIAALAGLAPFNNDSGDHSGQRHIRGGRGKVRIGMYQAAIAAIRHCPRMKAYYAEMKAHGKPSRVAIIAIARKLLVLANAMIRDMTPYQKPANSVC

SEQ ID NO: 49196 - protein, 458 aa, unidentified
MTRKRSSGAGKKNKRVLEQINHNAAGADMGAREVWIAVGDHVSDEPVQKFGTTTSELRRSGEWMRSCGVDTVAMEATGVYWVAAFEIYEEYGLNPVLVSSRAIRNVNGMKKSDYIDCQWLHLLHTFGILQGSLRAEAEMIELRAYMRQRRMLTERASEHIQHMQKALVLMNVRLDQAVSDITGVTGMNILRAILEGKRDPKELAKLRDPACAKSEEQIAEALTGHYREEQLFALDQALKLWDFHHHLIGECDKKIQAVIEKLPIKAERTTLPKARGKRGKPRKNEVQFDARTLLYERLGVDLTQIAGLHILTILSVISECGFDLTRFPTAKHFCSWLGLSPGTNITGGRVVSARSRRTANRAATALRIAAQALADSNTELGAFYRRKKGQIGPEKAITATAAKLARRIYDSLRTGRPYSDRGPQFYDLIDRERSLASLQKRARRLNMRLVPIDQQEAA

SEQ ID NO: 49197 - protein, 342 aa, unidentified
MKKQSGIFCIGVDVSKLTLDVSLVLAEGLLRHSRGSIVIANTPEGLKELRIWLKQQRVVFNETTKVVMENTGMYHRLLVSWIKRWGFHYCVDNAARIKWSLGITRGKDDKVDSQRIAMYAAKNLQELHWNNASEERLMLLKDLLTTRETVLQQIQQLRVPLNERKQYLDEKLIQEMELLLSPALTGLKESLKKLDTAIQKAIAADTELSRLYRLALSVPCIGPQTAAALLCDTRAFTGYQNTRQLSSYCGVVPFGYRSGTSIRGKNKVHPMANKNLKRLLHMCVLSGIRKYPEFQDYYERKIAEGKHVMSVINALRNKLVIRVAAVVKRGEPYVDNYVSKAM

SEQ ID NO: 49198 - protein, 335 aa, unidentified
MEASYYIGIDISKQRLDWQINDTQNTELATGQASNTPKGIHKMIGQWKRGKISLDELIVCFEHTGPYGLLLATILEQSGICYVMVSAAEVQLSLGIRRGKSDPIDAGRLAEYLWRFRDRLAPSHLPSKMLLELRGWLLWREKLVKMRTALTNGIKANSLTSQVADLDEINEQMQSQHDGLTTQLKQVDRKILSLLRRYNAIEGQYDLLVSIPGLGPIIAGWLLVYTEGFTRFANARQLACFVGSAPFPRQSGQHKSPDRVSQWRCQRLKSLLGNGVHSAIQYDPELRGYYKRKCDEGKHPQSVRNAVICKLLYRVFAVIDRGTPYVKIQQHKAVK

SEQ ID NO: 49199 - protein, 370 aa, unidentified
MSKGTLYVGLDTDKKHIDVAVAEPLPGGEVRYWGKIANTSASVEALIKKLGKGGRSLVVCYEAGPCGYGLYRQLSAKPGVTCEVVAPSLIPRRSGDRVKTNRRDAVALARLRRAEELTAIWVPDEAHEAMRDLVRARATAVTEVTRCQQHIGSFLLRQGIAYGAGAPWSKKHRQWLGTLKLEHPAHRLMLAEMLLALDQALARRRRLSEHIEELLPNWSLAWLVEALQALRGYRLVNAATLVSEIGDPRRFESPRKLMGFLGLNICERSTGEKQRRTRLTKTGSKRGRKALIEAAWTYKTPPTRAKAVAPGVPAAVREIADKASHRLSRRYRHLLRHGKLKQVAVAAVARESLGFIWAIAHAAAPAAAPH

SEQ ID NO: 49200 - protein, 353 aa, unidentified
MTNDKYVGMDVHSATTTVVVLNASGKSVSESTMETGPEQFRQFFKGMSGAVHVTFEQGIQAAWLYQMIRPLVAEVIVCNPRDNKLVQTGNKSDKIDAHKLATLLRMGELKPVYQGDARTRGLKEAVRSYSALAKDTGRVMNRIKAIYRGQGIQCEGTEVYRPQLRQQWAMKLADSNTRSRLELLYRELDCLSGLRKSARAELVKQVRRQPAYKILAQVPGLGRIRIAYIIAIVSTPFRFRTKRQFWPYCGLAVVTSSSSDYQVIEGKLHRSKKPIGTRGLNRNFNRDLKMVFKGAAQHSCRREPFKQYYDRLIANKMKPELARVTLARKIAAITLAVWKKGESFDADRMMQNA

SEQ ID NO: 49201 - protein, 341 aa, unidentified
MRKFIRIGVDLAKNVFQLHGIEREDGSPFQRKLTRVKFREFFSRLTPCRVGMEACGSAHYWARVLGAMGHEVVLIAPAYTKPYVKRGKNDAADAAEICEAMSRPEMRFVPVKSADQQAVLMLHKTRDLLVKQRTMAVNALRGHLHEFGLIAAKGIHRVQELVALALADEGLPEEAKEAVTLLAGQSEQLDMKIDALEKQIAKASGKNPMSRLLKEIPAIGPLISSAMAASRPDPNVFKSGSDFAASLGLTPSQHSSGGKERLGSITKKGNRYLRKMLVVGCTSVLRVAHKYKGALAEWIIAIKARKPERVAAVALANKLARICWAVLSTGESFREELYARA

SEQ ID NO: 49202 - protein, 359 aa, unidentified
MLDMALSGGLQITSANQQEWRPQLIIAIGVDTHKDQHLAVALDALGQLLAEITITTDTAGYRAFVDWLGELDGEIRVGIEGAGSYGAGLCEHLQDHGVEVFEVERPRRRERRTGKSDRLDALLAAKKVLAGDGLSTPRASGKRLALQMLLAAHRSVVGERSRLYNQLQALLISAPGALRERVGPARNGAVLAERISGMRTRPTASLQENTTLQVLRDIANRARALDQQAKDYTSQIETFSRDLAPRLLDEPGVGPICAGKLIAFDPARFKSEAAFARANGTAPQPASSGKTIRHRLSRSGDRQINTAIYTIALSRSVHHAPSRAYMQRRITEGKTKREAMRSLKRHLSRHLYNQLTKRP

SEQ ID NO: 49203 - protein, 409 aa, unidentified
METMHDRCAGIDIGKRSLTVCAITPGPRGEPVRETRSFGTLTSDLLRLADWLADREITAVAMESTGSYWKPIWNLLEDRFELLLANAAHIKAVPGRKTDVRDAEWIADLLRHGLLRASFIPARPDRELRELVRYRTTLVRERASEINRLAKVLEGANIKLGSVSTNLGGVSGRSMLAALSAGVDDAEALADLARGRLRAKREALIEALAGSVGAHQRFLLGTQLRHLVDLDGLIESLDAEIASRLATAGAVIERLATIPGIGRRTAEIIVAEIGLDMARFGSARQLASWAGMCPGNYESAGTSHGGRTRRGSPWLRSTLVSCARSASRTHTYLGAQYRRLAARRGARRAFVAVGHTILGIVYHVIRSGRPFEDLGPTYFDRRDADRVTKRLTRRLEDLGYDVVLRQAHG

SEQ ID NO: 49204 - protein, 403 aa, unidentified
MIGNDVSLIINGLKAQCCTMAATTRPRRSSMGKVEVGFAKGKSIYVGIDVHKRDWAVTVLCQGEEVYHAVIDSDPGALIKILKRFEASDVHIVYEAGPTGYWLHDALVEAGFDSMVTPPSLVPQIGGRVKTDQRDSRKLASMLAGGFLRRVHILTPEERAHRQLLRTRNQIEHHRRQVQNQIKSMLLFHGKTAPETQKERWSEGHVEWIESIEWEYPVLKTAMESMLKMYRELTEEYKHLTYEIEQLALTEKYRERVGLLTKIPGIGTFTAMAILVELQNVERFRRADQLASYLGLTPSQHSSGERIRMGHITRCGNREVRTRLVESSWTLIRYDAQAKMTYERIKHQTGSGRKAITAIARRLALRVRRVLLDNEPYRLVGGGHLATGRDKTREAKRYLLKRV

SEQ ID NO: 49205 - protein, 401 aa, unidentified
MISVGIDVSKEKSMVCMLRPYGEVVASPYEIQHTGSELKRLCERILALGEEVHVVMEPTGTYHLPVLSHLHQAGIFVSIVNPLVMKRYAGAVLRKGKTDKIDSVRIANFGIDNWFKLQEYHPLDETYEELKFLGRQYAHYISIKIESALTLASILDRTMPGIKHLLQAKRSEKPTKDKLCDFVEEYWHYDNIIAMSEKEFINDYCRWVKEKGYHRNPAKAEAIYQMACEGIPTLPSNTPSTKMLTLEAIRVLREVNKTLQAILSQMQVLATALPEYSVIRTMPGVGDVLAPRLIAEVGDVRRFHSGSALVAYAGIDAPPFQSGTFTGTKRNISKRGSSLLRKTGYEIMKCLKASKPTQDSAVYDFILKKEAEGKPKKVAKIAALNKFLRIYYARVKEVYQA

SEQ ID NO: 49206 - protein, 359 aa, unidentified
MLGVLTSNAKKEAPVSEQYAGRQIVGMDLHRRRSVLVRMTEAGEQLETVRISNDPEYLRQVMARAGEHPEVVLEATYGWYWAADTLAELGATVHLAHPLGVKMFSLRRVKNDQRDAADLADLLRMGRLPEAWIAPPATRELRGWVRHRAKLVGLRSSLKCQIHAILAAAGVQVPMSDLFGAGGRQLLTSARLAPESRARVDSLLRLIENLDFEIDLFATLVTRRLREHPGYRALLQIPGVGPVLAAIFVAEIGDITRFQRPEQLASWAGLTPKHHESDTTVHRGRITKQGSRLVRWAAVEAVQRVPAHTDLGALRDRVAARRGRNIGVVAAARELTELVFFGLRDGDIRRLSTPPQPAA

SEQ ID NO: 49207 - protein, 443 aa, unidentified
MSRKRHTHLRGERGQAFADKVRGIPLDQILCVSLDVHKYFHVVIIHNALGEIVTPSFEIDIFRSGFEQLCRAVDEAVVRTGARVILAGMEPSSHYFENLARHLHKRPQPVTLVNSFAVKKNRDQHMMQYEKNDDIDTASIGDLLQRGEGSPFNPPTGIYLQLQHLGRVRFSKVKMRTALQNQIIGHLDRIFPGLIIIGDEAKERYDPLFATDFWECQTMQHLIRVCPNPHTLVAMSPHDLIQAFHVRNYRMGPVRATKIIAYANKVLLPDPELAAIRCHLLPHDIALLEDVEHHIAQLERDLYTLLAETPYLVWTKLKGLSNTQIASLAGAIGDPANYRYAAQVFRRSGLVPGRSDSGTRQRKGKGNKVVKVGDVYLRRALMNALATLILHQPVLRDYCNKLKASKPAGVARVATARRAMGILWAVLRDRRSETLILKKGAKM

SEQ ID NO: 49208 - protein, 367 aa, unidentified
MKKISTAGARQTKNFREQKLTIGLDLGDRSSWYCGLDEAGEVVLEQRLGTTPKAMKEVFGEMPRSRIALETGMHSPWVSRVLSELGHEVIVAHARNVRLIGESRRKDDRFDARTLARLARIDPQLLAPVQHRSAQAQADLMVIRARAGLVRARTSLINTARGLAKSYGERLRGCNVRNMNPEKAEGLSPELQAALAPLLGAIESLSERIYEYNQQIEKIAKESYPQVARLKQVKGVGTLIALTYLLTLEDAQRFRQSRDAGCYVGLQPGRRNSGQSEPQLHISKEGDPYLRTLLVQGAHHILGPFGADSDLRRWGLKLAERGGKNGKKRAVIATARKLAVLLHRLWASGEVYEPLRNHHREVLPAAA

SEQ ID NO: 49209 - protein, 346 aa, unidentified
MKKHSAKGEVKVLGIDLAKQSFQLHGVDESGQTVLRKKLTRNKLSAFVANLPPCVIGLEACGGAHHWVRVFKEFGHTVKMMAPQFVKPYVKSNKNDSVDAEAICEAVQRPNMRFVPEKSIEQQDMQSLHRIRSQLVDRRTAQSNQIRGLLLEYGIIVPQGIHHVRNQLPLILEAADNGLSDLSREFLHELYEELVHLNERIDALEKKLLRLSAQNEDCQRLLTIPGVGLLSATALVAAVGDVSNFKNGRELAAWLGLVPRQHSTGGKATLMGISKRGDCYLRTLLIHGGRTVVRVAHRHQDRRSRWVSELEQRRGKNISAVAVANKNARIAWALLSKKTTYQATAA

SEQ ID NO: 49210 - protein, 398 aa, unidentified
MLAVGVDVSKGKSMVAALTEHGELVMRPREYGHSESEMGALIAQLQIYDEVRIVLEATSHYHFPIVKRFQSAGLFVSVVNPFLMKKYLDGSIRKGKTDKKDAIKIATYCLEKWHKLTPHSPLDKQYDELRFLSRQYNQTVSMRVKGKVWLSQLLDQIMPGIKTIFKGEHRNPDKNVLYDFIEKYGHYENVLTLGMEKFMTEFTAWAKEKGYRYATSKAEQIYLLAQNAIPSRAADSSGCLALMQCVFTLKQSEHACNAILAQMREIAMTLPEYGIVRAMSGVGDRLAPRLIAEIGDVRRFTSAKALNAYAGNDAPPYQSGQYEGTRRHISKRGSKSLRKAGYEAMKALKTVKPVHDDAVYRFMLQKEAEGKPKNVAKMAGLNKFLRIYYARVSEVYGA

SEQ ID NO: 49211 - protein, 403 aa, unidentified
MNAVGIDVSKGKSMVAIIRPLGEIVAAPFGIKHSASDIKSLVNLIHSVEWESRIVMEHTGRYYEVLAHQLSKADLFVSAINPKLIKDFDNDSLRKVKSDKADAVKIARYALDKWQNLKQYSVMDELRNQLKTMNRQFNFYMKHKTAMKNNLIGILDQTYPGINTYFDSPARSDGSQKWVDFASTYWHVDCVRKMSLHAFIDHYQKWCKRKKYNFSLSKAEEIYGKAKELVPVLPKDGITKLIIKQAVDQLNSASVTVEELRSLMNETASKLPEYPIVMQMKGVGPSLGPQLIAEIGDVTRFTHKGALTAFAGVDPGVNGSGSYEQKSVPTSKRGSAALRKTLFQVMDVLIKTMPQDDPVYQFLDKKRAQGKAYYVYMTAGANKFLRIYYGRVKEYLSSLPESE

SEQ ID NO: 49212 - protein, 415 aa, unidentified
MEPVLDRCAGMDVHEKKVDVCIAHGPLEKSPKFEIRTFATMTSDLEDLKSWLKKFNVTTIGMESTGVYWKPIFNIMEGEFTIVLANAQRLKAIPRKKTDIMDCKRIAKLLRYGLLPNSFIPPRDIRELRDLNRTRRKLVGMMTSEKNRLIKVLESSNIKLSSVVSKISGVSSMAMIRSLLEKDKLSKEEISQLAKGSLKKKVDLLEKALNGKVTDHHRFLLKMHMDNLDHFARQIEKLDEQIERKMIPFQKESNLLQSIPGISKVSASAILAEIGTDMAQFPDEAHLSSWAGVCPGNNESAGKKKSGKTQKGNSFLKGTLAEAAWSGSKVKGSTYSAFYHNIVRRRGKKRALVALAHRMLMDIYRVLKTETPYQDTGAKEANERATQKKERSMIRLLEKAGYSVVRACTPEIAAA

SEQ ID NO: 49213 - protein, 345 aa, unidentified
MDKVRTIGLDLAKNVFQVHGIDETGQVVVRKQLRRAEVIRFFSKLPRCLIGMEACGSSHYWARELVELGHAVRLIPASAVKPYVKHGKKNDATDAAAICEAVGRPHMQWVPIKTEEQQAVLMLHRARELLVGQRTTLVNALRAHLAELGIVAAQGFAAFKTLTVVVHDDTDVRLPMIARSALKLLARQIEEVSDRINVLEKDILTWHKSNEASCRLASIPNIGPITASAVVATVGDDVERFASGRRFASWLGIVPSQNSTGGKTCLGRITKAGDRYLRTLLVTCATGAVRYANRKVPGGDWFAKLLAKKGKGKVRLVTVALANKFARIIWALLKKGTTYQAMAEA

SEQ ID NO: 49214 - protein, 308 aa, unidentified
MPLWIGIDVAKDTLAVHVLPLDQLLSFPNTAQGHQRLCDHLAGQCVGNALLEATGGYERAVMTALATAGIPVTRINPRRARAFATALGTTAKTDPLDAALLARMAQLVQAPAPIPDPLREQLRMLVQRREQLVQQRDDERRRLHQATLAMVRACLIEQIGDLRRRIQRMNQAIKQVRCQLDDALAHALGTVPGIGEVTTASLMAYLPELGTLDRRQIAALVGLAPYNVDSGQHCGKRRIRGGRATIRRVLYMACWSVVRTQASFKERYQQLRARGKPAKVAITACMRVLLIRLNAMARDRTPWREVIG

SEQ ID NO: 49215 - protein, 379 aa, unidentified
MDHAITGTPAETILHGALELSKNSWLLALQLPDRAQPSLYSIRGGDTEGLMAKLMAARDRWAKVSGKAPSIVLCYEAGYDAFWLARFLKARGIECVVVDAASMQVNRRARRAKTDRIDVGMLLRALIAWGQGDRHVWSVVRVPSVDDEDLRRSHRERDRLVRERTAHINRIKGLLFGQGIRGINVKSKYKTLQIDKLVTGDGRPLPPRLASEITREIARLALIQEQIAALERERDQAPTPCKATEKKRVQLMSLTGIGPAIAAVMTREVYYRQFDNRRQVAGFLGLATSPHDSGDLERSQGISRAGRGQVRGTIIQAAWLWLKHQPKSAITRWFVQRTAGQSGRIRRIMIVAVARKLAIALWRFLEQGLVPQGAMLANR

SEQ ID NO: 49216 - protein, 407 aa, unidentified
MDVIIERACGMDVHKDNITACIMTPEGKEIQTFSTKTVFLLKLVDWIKEHSCTHVAMESTSVYWKPIVNLIEAEEIEFLVVNAQHMKAVPGRKTDVKDAEWICQLLRHGLIKASFIPDRNQRELRELVRYRRSIIEERARQHNRIQKVLEGANIKLGSVVSDIMGVSSKNMLYAIAEGIDDPEQLANMALRTLKRKKDELELALQGYVSPHQRLMIKTILTHIDFLTQQIDMLDQEVARRVNPYQEDIERLDSIPGISTRMAEQILAEIGTDIKKQFPSAAHMCSWAGLVPGHNESAGKRKSAKTKKGNKYLRSALTEAAHSVKGSKNYLGALYRRTAARKGRKRAGIVVAHAMLRISYYLLTRKEMYVDLGEDYFDKQREQSIVRHVLRRLEGLGYSITITKPEGS

SEQ ID NO: 49217 - protein, 375 aa, unidentified
MATIARLGIDTSKSLFQLHGVDEREEAVLRKQVRRGQFLGFVAKLAPTKIGVEACGASHYWARQLQALGHEVMLLPPQHVKPYVGRNKNDKIDAAAICEAMSRPRVRERFVAVKSAEQSAAQMLLGTRDGLLHRRTQLSNTIRGHAAEFGLVTPKGLAHIKPLLERIAADDTVPALAKELFAALGEEFAELAPRIARLDKKLKAFQRSDELCRRLVEVPAVGPVIASSMVVKIGNPAAFRSGRRCAAWLGLTPRDHSTAGKMRHGGITRAGDEGLRAALVSGATAYIQQVKRGRTRPSPWLAQLLKRKPEKLAAVALANKTARIAWKLMVSGERYDRARAEAREGLGATQHRGSTPSPSLHPHTADQGASTMTVA

SEQ ID NO: 49218 - protein, 342 aa, unidentified
MEIIKQVVGIDISKDTLSICYGTLTVEQELKTTNPILFDNNEKGFKELIYWAKKTKRSTDRPLYFVMEATGVYYENLAYFLKEKHQKVSVLLPNKTKNYSKTLDIKSKTDKIDTRMLAQFGLERQLRLWQAPPSLIKTLKALTRERQSIKALAVQVKNQLHAKEHSYQPSKQTIKRLNQQLSLFDKQISQIEKQIKELVGKDPDIDERIKKVTQIEGVGLMTAVSIIAETNGFALIENTKQLASYAGLDVVHNQSGLKKHKTSISKKGNRFLRKALYMPALAACRYNPKLKKFYVRLVKSKNNKKIAIIAVARKLLILIYTIWKKNVDYIPNYNPMATLKIR

SEQ ID NO: 49219 - protein, 391 aa, unidentified
MIYIGIDVAKDKHDCFITNSDSEVLFKAFTIFNNLDGFNDLYQKIESVMDDVTKVKVGLEATGHYSYNLLGYLIDKGLPTYVINPLHTNLYRKSLSLRQTKTDKVDARTIASMLMSDVNLKSYSDTFYHNEELKSLTRYRFDKVKERAKLKTSVSRLVCILFPELEKLVPTLHIASVYALLSEFPSAKHVATAHLTRLTNLLSESSKGRYGKDTAITFRDSARASIGSNMPAKSLELKHTIKLIQELDSEIDEIENEIKIIMDEINSPILSIPGINYRMGAMIIAEIGDFNRFDSPDKILAYAGFSPSTYQSGQLDGAYAHMEKRGSRYLRYALYNATKYVCHWDPTFAAYLAKKRAEGKHYNVAISHAVKKLVRVIYHLEKTKQQYIKVA

SEQ ID NO: 49220 - protein, 384 aa, unidentified
MQNKVRFLGLDVHGETISVAVAEADGEVRSLGVFANRAESVRKLIRKLGPVEQLRACYEAGPTGYVLYWQLSELGVECAVIAPTLAPVKAGDRVKTDRRDAERLARSHRAGDLTPVWIPDAASEALRDLVRAREAAKQDQLRARHRLSKFLLRQGQHPTAGVKAWTIAYMSWVRQLRFAQPAQDAVRLDYLHEVEHMSERIMRLEESIREAVQQAPPQLRAVVQGLQAMRGIALISAVTIASEMGAVSRFPSARQLMSYSGTVPSENSSGKRTQRGGITKSGNAHLRRILGEAAWSYRRKPAVGPALRERQKGVPEAIRQIAWKAQVRLCKRYARLQAANKDPGKIVTAVGREMLGFIWAIGLEAESAIQATRCVKNNCKSKSS

SEQ ID NO: 49221 - protein, 349 aa, unidentified
MVTIGVDLHKRTHTLVVADPAGRQLATRTVPATAAGHVEGLRWATGWHERSWALEDCRHLSRRFEADLLRAGEAVVRVPPKLMAGARRAARTRGKSDPIDALAVARAALREPNLPVAQLEGVAREVQLLLDHHDDLVAERTRIQNRLRWHLHELEPGNEPAPRSLNRARVLRALEARLAESTGVVARLASALVARCRQLTAEITELDAELALRTIELAPSLLALPGCGVLTAAKLIGEVAGIGRFRSRAAFAMYNGTAPIPAWSGNPDRHRLNRSGNRQVNAALHRIAITQMRLPGRGRVYFEQRRADGDTKKEAIRALRRRISDEVYRRLRLDEHRARPFANGLEAAA

SEQ ID NO: 49222 - protein, 402 aa, unidentified
MRVFIGVDPHKLSATIEVVDDREAVLATGRFGTDKTGYAAMRSRVKAWPERTWAVEGSNGAGRPLAQRLLADGERVVDVPAKLSARARLFDTGHNRKTDAHDAHAVAVVAVRTPALRVLSYDVEIETLRMLVDRRAELSRTRIQTVNRLQRLLSELTPGKAKKDITTLQAKAILASMRPRDLAGKTRKRLAAEQLAELVIVDKKIKALNKELKVMVLASGSTLMDLPGVGPVVAARTLADVGHVARFADRNRFASWTGTAPIEASSGEIVRHRLSRAGNRRMNHMIHIAAATQIRLDTPGRAYYRRKLAAGKTRAEAMRCLKRRISDAIYRQLCADATAALVERVNAGPGGQGGASLQSSAAGSHPHTGTSDQPLPGPASTTLPTPTAARKSTISKPLQPAS

SEQ ID NO: 49223 - protein, 440 aa, unidentified
MSKRAYRATRVNDVNWDQLAQGKDGLDIALGVDVGKYSLWAVCRWADGRFERPWRVQNPGEIPTLLTLLKRVSAGRKLVVAMESSGTYGDALRQALADNQIEVQRVGGKAAHDYAEVFDGVPSQHDGKDAAVVAELAALGKAMPWEYQPADPWEQELAYWVEWMVAHRQMLTIWQGRLEGLLARHWPEATQVLKLSSGTLLRVLKRYGNPQALAADGEAAKLLARWGGAFLAPEKIEQLLAGAGASVGVRLGEWQQRQIQNYAQQALAARQEANRAQRRLRSLAAGHAVLQAQGKVVGVPTACVLWVSTGDPRKYHAAGAYRKAMGLNLVERSSGTYQGRLRISKRGSPRTRQWLYFAVLRLVQKCGVRPWYEAKKAHDEADARRVVVAVMRKLAVALYYVGVHNEEFQPGRLFGRIRRRRDSPGEQKSRTKRRSRAEQI

SEQ ID NO: 49224 - protein, 498 aa, unidentified
MATGESTTTQQAKQRKAYRRRKARGQARAARAQEAEAARVEGLPVTQAHAAGIDIGSRSHWVCVGCCGNDGDDLIQEFPAHTEGLHQILAYLRQHGVVTVALESSGVYWIPLYELLEANGFEVLLVDPSYTKQVKGRPKTDRRDCQWIYRLPGVGLLAGAFRLDEKTCQLRSYLRQRANLIRYAGQHIQHMEKALEQMNLKLTESVSDITGVTGRAIIQAILKGTRDPHKLAKLRNRRCKASEAEIAQALNGSYRDEHLFALRQAYEAWQFYQKQVGALEEQIELQLGRMKQDRALRPLKPRPGNGGRKPNQPRFDVRSALYYVVGIDLTELEGIGEQTALTIISEIGPEVSRFATVKHFCSWLGLCPQLQKTGGRVRSSRTRPGVNRAAVAFRLAANGLYASQGALGAFLRRQKARLGAPQAVTATAHKLARIVYLALKHGLAYVRQSQEEYEVRLRDQQIKAVKRKARQLDLEVIDKQASTPAAGAAAAGAAAARC

SEQ ID NO: 49225 - protein, 343 aa, unidentified
MQTITTIGLDIAKSVFQVHGIDAGGQVVIRRQLKRRYVLAFFQKLPPCLVGIEACASSHHWSRELKALGHTVRLMPPAYVKPYTKRQKNDAADAEAICEAVTRANMRFVDTKTPEQQSGMVLHRTRHLCMRQQISVINAIRAHLAEFGIVAPVGRNGVEELLDIVSNPSDKRVSEIARMCLAALGTQLRRLKEQVLEFDRMIRTWHRSNEMSMRLDGCPGVGPVLATALVASVADPRTFRSGRNFSAWIGLVPKQHSSGGKNKLGSISKQGDRYLRGLFVVGALAVIRYAKINGTKHRPWLTALLARRPAKVAAIALANKIARMVWAMMARGERYKEPIALAV

SEQ ID NO: 49226 - protein, 347 aa, unidentified
MNKPLYFVGIDVASATFTSAVGQMGEKWQIVVRPAQFANVYDSFPKYLAWLQEHEVKPDNSVICMEATGVYNEVLAHFLVANQYAVAIEPPLKVKRAFHPAGHKSDPVDSCQISEYAYRFWDELSSWAPRHELLEQIKTLLTTREQFVVEKTGHMNSLTALKRKAIHTPLAEKMHEKAISELKEHIRQIEEEIQRLIDQDPDYRTLVGLLISIPGVGLLLAAHMLVVIQSAPLPLSPKFLAAFIGICPYEDSSGTSLRHAATSRHYGPPALRKLLFLAALSICAHNPQFRTYFLRKVQEGKPKQLVINNIANKLLKVMVAVVRTQTAFIANYRSVNPGLLSMALTKS

SEQ ID NO: 49227 - protein, 454 aa, unidentified
MKKQDSYDYYVGIDCAQNKHDFAMKNNQDKFLIKKGHFSNTLQGYEKFLNTVLSKCLDKDRILFGMEVTGIYGTNLFERLKSEGYHVVMISPDSVKKYRDYKCLNKTDKIDSGCIAELLLNGDAQIVHVEKNGYTDLKAYIRRRNALKVTCTQETNRFLAKVCLYFPDLLKVFPSGRATLKAIFSIYPTPHSIIEADFDELVSVLQKASKNKFGVDKANELIHAARNSIVVRKSISDGELYNIHSLIDSIDSLESEIRNLEKIIDSKAEEFPAYHVLLTLTGCGKITAATIVAEIGDISRFHKASQIVSLAGLYGDNSKSGSSVNKRGKISKKGSRYLRHAIYMVAEFARRNNPIFKAYFIKKKNGDRTKHTLAVNAVANKLCKVIYSLMKNQSTYIIQYRDLAKLSESTQNEFFQNAETDFSAKTRRKKYLYEDEYGELHEFVFKSLKTALIE

SEQ ID NO: 49228 - protein, 343 aa, unidentified
MDHFAGLDVSVKETSICIVDDAGKIVREVKVASEPEALLAVLKNLVYHFKRIGLEAGPLSQWLFSALAEAGLPVICVETRHMRAVLKAQINKTDRNDARGIAQMMRVGLYRPVHVKTLRSQKLRVLLTHRKLLQSKAIAIENDLRATLRNFGLKVGMVGTVKFEARIKELVESLPDLAVLVEPLLIVRQVVREQLGILHRRLLAIVRDDDVCRRLMTIPGVGPVVALTYRVTVDVPARFRNSKAVGAVFGLTPSKYQSGQNDRTGGISRCGDEMMRMMLYEAAQSMLVRSAKWSWLKAWAMKIARHRGIKKAIVALARRLAVIMHRMWVGGTEFRWTREVAVA

SEQ ID NO: 49229 - protein, 309 aa, unidentified
MKQSVVYIGIDVAKAHLDVAWAGTFRRLPNERSGHAVLVRWIKQSATPVQLICEASGGYEQGLLESLEKSEVKVTLVQAVRVRQYARAAGILAKTDQMDAKVLAAFGSAMQPPPTPPLCAEQKRLRQYEAQRRHLSRVLVAEQNRLAQLSCAELRTLSRALISKIKKQIETIDTRIGDLIAQDQTLREKAQKLTAIRGVGVRTAALLLAQMPELGQLNRRQAAALAGLAPFNHDSGSIRGKRAIFGGRRALRSGLYMAALSAARFNPILSRFYRRLRANGKPHKLALTAVMRKLLLALNQTLKPIPSLA

SEQ ID NO: 49230 - protein, 459 aa, unidentified
MNRKQRREMTRKMQNEDLTLEVVHPNAAGIDIGNESHYVAVPPSRDNQPVRRFGCTTTELKAMTDWLKQCHIHTVAMQSTSVYWIAVFDILEGAGFEVYLVNARETKNLPGRKSDVQESQWLMKLHTYGLLRNSFRPSPEIRTMRTYWRQRNDLVRAAGRHIQRMQKALTQMNIQLANVLSDISGMTGQAIIKAILAGERDPHQLAGFRNSRVQASEEEIARSLEGNWQEDLLFVLKQEQNGYEFCQQQMAECDGQLQNYLQQREDRTHGASLPEEKRKGRLKKKRSNKPQFDLRAELFRMTGTDLTQIDSIDVRTAMTILSEAGWDMSKWKDEHHFVSWLRLCPDNKISGDRIIGKGRLATNNRATIALKMAASTLRKSNTYLGAQFRRLRTKLGTPVAIKAMAAKLARLVYRMLRYGMQYVDQGAEFYQQQHRNLQIKSLKWKAAKLGFQLIETPAA

SEQ ID NO: 49231 - protein, 346 aa, unidentified
MHSVGIDLHRRRSHVAMIDDQGRELRTRRVINDGPAILALLAEIDGECRVALEATYGWEWLADLLEEAGYELHLAHPLRTKAIASARVKTDAVDARTLAHLLRADLLPESYIAPRELRDLRDLLRQRVVLTQMRSALKNRVHALIARQGVQQTHADLFGAGGRRFLDELELRPDPRARLETLLRLIGDFDREIDALAREIDARAKHDPRVDMLCQIYGIGRYLGMLIVAEIGDIERFPTARHLCAWAGLTPTVRSSDAKARLGHISGLGSKALRWALVEAAQKAVQGGGPLRADFERIAKRRGRKIAKVAVARKILTLCFYGLRDGEIRCLKPSGRANAMKVMAPS

SEQ ID NO: 49232 - protein, 373 aa, unidentified
MPRYSTAFGMDVHLRSTTVCALDAETGEAVARRFRGNPWGEVAEWMSGFPGPSLAAYESGYLGFAPQRELSALGVDCVVAAVSKVPRSAADLSSKNDRNDAARMAKAILSHDVTPVWVPSPEIEGLRDLAAAHDAATARLAAAKQRLLAFLARRGYAYGGTTPAGNPRRYWTYDFLRWLDKVRPADDGGIRALAALRNEVEAADETREAVLAEYRAAVAAGPLSAEVEALQSIKGCGFALAAAFASEVGDFSRFRSGRQVTAYFGLAPKQRSSADSVRLGGISGAGNALVRRLAVEGSWRYAQAGHQPKLMPKGSGVPLEIRMHGRKGSERLLRRRGEMLERGMPQAKANAATAAELVRWLWALGAMCREATE

SEQ ID NO: 49233 - protein, 392 aa, unidentified
MEPVVGVDVAKGSSVVQAFRKRNEPYGKAVDIVHGTSGFEQFAEMLGTLQVETGVAPVVVLEATGHYHRALVSYLDRSGYTYYIVNPLQSKRAKGAQLRKVKTDAMDAWHLAEMYYRGDVKPHRTWDETFTELQHLTRQHEFVTGIFVQAKLNSRALLEQVFPAYEQVFYNVFSTTSLTVLAHCLEGDAEDWRAVIQGSVEKSHSKRWANEKAGKLEELLCHWREARRSPSQSKALLGMVSLLLTMIRQLDELEKQMEDMAASLPEVELVKSIPGIGTKLAAAIVAEVGDVRQFSDAKQLVAFAGLDPGIFSSGKFTATSTRITKRGSKRLRRSLYLAVQCGMRKNANARIRSYYEKKRKEGKPYKVAVIACANKLLHHIFAILQKGQPYQV

SEQ ID NO: 49234 - protein, 362 aa, unidentified
MKSITIIAFDQHAATTVAAVLLPGQRTPALHSLTSDSPTILRFVRRVVGANGAVRCCYEAGPCGFELQRALTAAGSPCEVIAPSLIPRRAGDRIKTDRRDAGQLAVLYRAGALTAIHVPTDQEEAVRDLLRCREDIRVDLLRARHRLGKFLLRHGRRFTATTSTWSPRHHAWLRAQTWPLPALTQTHEAYLRAVDETVARLRAVEAQLQTLVTLEPLRTRVQQLRCFRGMDDLTALTIAAELGDARRFPSARGLMAYVGLIPSEHSSGPRRARGPITKTGNAHIRRVLVEAAWHYRHHPFIGKQLRRRQTGAPEGARRHAWRAQQRLYRRYQRLAARGKPKQHVVTAVARELTGFVWATLTQ

SEQ ID NO: 49235 - protein, 464 aa, unidentified
MATLRIIGIDLAVTAAHRAIVLDSASNQFVSHVISFHANPAEIEGVLAIARKGAPANTRVIAVLEATGMAWFTVGTYLHRRGVEVYRVNGRQTADQRKVYHRHAKSDRIDARVLPRLYLNAAERITRLFLPEPRIMELQRVCREVTRLSQQISASKNRLLAIDNFAWLGIKDLLPPYEAPARWLRRQWYNPWQVYQAGSEALKQAWLQSHADPEQDLSWVEALVAQAQQVMAFYGEPAPIDYPRLQAFLGREQARLEQVEAQKHLLQLKMLRPLYRQLYPQRYLESLPGVGQDSAAVFIAFVGDIRRFPSLNDFLGWSGMIPFSSQSGQGQTRGLHITQAGPDLLKRTAFLTANIARLYDPQIAVVYYDQMVNKGKHHLQAVCACATHLLTRVFVVLRENRPLELRDVDGSPISKQRARAICQQHYTVPEQVRRQNNHRVRTQRAEQRLEQRTQRRQLKQRSKG

SEQ ID NO: 49236 - protein, 351 aa, unidentified
MIIIGVDYHPSFQEIAFMDQQTGECGERRLNHSDGEAEKFYRELQQRGVSVRVGMEATGHARWFERLLAELGFELWIGDPAEIKTKRVRKQKTDREDARLMLKLLLENRFPRIWVPSPENRDLRQLLWHRHRLVQMRTRIMNQLQAVAMNEGYRWKKKLFSEKGRALLKKLSLASWASRRRKELLELLDQLDPKIAELTAAVEQEAKKRPEALLLMTHPGVGPITGLAYVLVIGTPDRFPSGKQIGSYTGLIPCEDSSAGRQRLGHISKQGNSLLRFLLVEAAQAAARCNPDWRRRYMHLMMRREKRIAKVAMARKLAVRLYWMWRNNWQYSQLVEFGSNAGKLGTVHGVK

SEQ ID NO: 49237 - protein, 472 aa, unidentified
MFTALLSSPRVRLGSLTNTQGLPLHRLTYITFEELKLHIPLGNLTLREMRMNTLTKHVFTAFVGIDWADTKHDICIKPATEDVREFSVIPHKVEDIEEWAQAMKARFGGPIAVALELSKGPLVYALQKYDYFVIFPVYPTTLAKYRIAFTPSRAKDDPTDAELALDLILNHPERFQPLKPQSKEIRALAMLTEHRRKLVNDKIRITNRIRNTLKQYYPQVLEWFDRIDTPIFCDFIKQWPTLVQVKKARKTTLTKFFHTHNSGRAHLLEKRLASIKSAMPLTEDDGVIIPNRLQALVLVDILHLMLTSIRRYDDEIAAIATKHSDYTLFDSLPGAGPSLVPRLIVAFGEQRERFNSADEIQMYSGVAPVTERSGKKHWVHWRWQCPTFLRQTFVEWAAQTINKSFWAGAYYRQQRDKGCTYQATVRALAFKWIRILFRCWKTHTPYDESVYLKALKRRGSPLMNQVASSINT

SEQ ID NO: 49238 - protein, 405 aa, unidentified
MLDSSFGMDVHRDTVVIAKLGESIRETRRFGVEAEELKGAMDWLRKDGCMHGVMESTGVYWVPVYTVFKEAGFTMYLANAYQVKSIPGRKSDQKDAEWLAYLLRAELIKPCYIPDERYEELRTLTRLRTKLTQTQTSFKNRVHKILQLCNIRLASKVSNLFGSSGMIILNAVMSGGDVDAAIDTCHSRIKAKREEIKKSIMGTLSETDIFELKICLDNVRLLDEQARQIDERIASKIDGELVEKLCKLPGIAPYTAAVAIAEIAEAGRFEDGNHVAGWTGLAPSRYQSAGKDRRGHINKQGNSWLRRAMVQAAKAAAKSSTEFAEFYSRVAGRRGKSIATIALARLLLTRAWSVIRTGVEYTSGTFRKKARYKLRRSKDGGHYEPDEISGVLSQASAAVAGMGDI

SEQ ID NO: 49239 - protein, 325 aa, unidentified
MTRIICGVDVSSKSLEARVGQQGAAGSFANNPEGIAQLLAFCHARQVDLVAIEATGGYERQAFALLSEQGLPVAILNPRAVRQFAQSMGRLEKTDRIDASMIAWYAEVKQSPPACVAPRSQQHLRALVTRLRQLTDIRTAQLNQQRLVTDRAVQASFQKLLAVLARQIRTLEQSIAALLEQDPLWRELDRAFRTIKGVAGRTVARIMAEMPEIGALSNKTVSKLAGVAPLANDSGQHQGKRMVRGGRAAVREILFIVASVAGRYEPDFIAFQQRLRAAGKPPKVVRIALARKLLVRLNAKAREVRQRLATLQPDPMAQPAACEAY

SEQ ID NO: 49240 - protein, 374 aa, unidentified
MEHAITYVGLDVHKDTIAVAIAETGRRGEVREHGKIANTPTALRGLVSRLTRSGAALQFCYEAGPCGYRIQRQLTAAGHGCVVVAPSLIPRKPGDRIKTDRRDATNLAKLHRAGELTPVWVPDPAHEAVRDLLRARLAAVRGLRQARQQLSGFLLRHGHHYNRPAWTLIHRRWLAGLKFEQAVHHIVLEDCIAAVEAATARRDRLEAHIKAALPEWSLAPVVQALQALRGMALVAAATLVAELGDITRFANPRQLMAYLGLVPSEHSSGGTRRQGRITKAGNGAARRMLIEAAWSYRFPARISRELLLRQEGLARSIRDTAWKAQERLCRRYRKLARAGKPPTVVTTAIARELTGFVWAIAYQVESSGALIRRS

SEQ ID NO: 49241 - protein, 340 aa, unidentified
MSEVSIIGLDIAKSVFQVHGADASGRALLRKKISRVKLLPFFAELPSCRVVLEACGGAHHWARELAKLGHNVQLIAPAYVKPFVKRQKNDAADAEAICEAAQRPSMRFVPVKSEDQQAAAVIFRGRDLLVRQRTQISNSIRGHMTEYGWIAPKGLAHLSKLSALLDDPQAIPQGARSILMILLDQIAALDSQIAILDKEIARRAREDETARRLMTIPGIGPITATAITALAPPPGTFAKGRDFAAWVGLTPRQHSTGGKQKLGAISMMGERTLRRLLIIGSSAVVLQACKRGAPKGSWLEQMLARKPRMLVTVALANKTARIVWALLTGEEVYKAPVAAA

SEQ ID NO: 49242 - protein, 348 aa, unidentified
MRYYVGLDVHQNQWTIYVMDASGRKILVRTIRGTWKDVMAFLRTLDGPFSICFEATCGAGFLYDQLKTVAEKVVVAHPGKLRLIYAAKRKNDALDAEKLAKLLLLDLVPTVHIPKAKVRSWRALIEYRRKLMGQRTVAKNRLRALLRSEGQLAPKRLWTKVGLTWLKGVSFAVDGDALRRDLLVEELATLDERVRRVTKELDRLGHADANVRLLMTIPGVGIRTAEAFCAYIDEAKRFTRTKTVGSYLGLVPTQDQSADKNHLGRISRQGPSVVRWLLTEAAWEGTRRSPRIRAFYERVRRNDPDRGKIAVVAAAHYLARVMLAMLQSGEAWQEDRGSGVSQGYRKVG

SEQ ID NO: 49243 - protein, 355 aa, unidentified
MDRTKYIGMDVHQASISIAVRDASGKLVIESLIETKAATILEFLQGLKGTLWVTFEEGTSAAWLYDLLKPHVVKVIVCDPRKNALLKTGNKNDRVDARKLSHLLHAGLLTPVYHGESGVRTLRELARSYLTLTKDLTRVMNRLKALYRSWAIPCVGEKVYSPHHRSAWLEQLSEAGVRRRAEQLYQQLDILLHIRREARRELLRESRKHPAHELLRQIPQLGPIRVALVIALVQTPHRFRTKRQLWAYCGLALQTRSSGEYRFTAGQLQHSKKLPALRGLNSNHNHDLKNLFKSAAIHVSTSTDAWGDFYRSLLDKGMKPAMARLTLARKMAAIVLTIWKKGERFDPGELKRQAA

SEQ ID NO: 49244 - protein, 438 aa, unidentified
MSNKVIFNLDDLFISVGIDVGADFSWMSIALPNQQFVGKPYKILHNKMSSLTTAVSKIKEAEELYSLESRIFLESTGIYHYPLFCYLRDKGFNCSVINPIITKNSTNINIRKVHNDRFDSKKAALVGLKSDLKVSLMPSDLALNCRNLCREYYDLMDHRSAYVNKLQGELRMVFPQYLDIFSKVTTNTALTLLETYTSPSAFIEADKQEIIDTIKSTARFGITYAQNKYHAIIQAANEANEFGYIIDSNIKRIRLYSSFIRKYDEEIANILNALHELVDTNKDTDFVRQIHLIETYKGAGFLSAVSLMGEIGDFSAFSKPKQLFAYFGLDPAVKQSGKFEGTKIQMSKRGSAIARRVIHTLALQSISTSRTGEAKNPVLRDYYLKKCELKPKLVAMGAVSHKVCNIIFAILRDKKPFEIITPQEHIKQYNAAKCDIAA

SEQ ID NO: 49245 - protein, 316 aa, unidentified
MSQPQLFVGIDVAKAQLDIAVRPTGDRWAVTNDETGMAALVAPLQTMAPTLMVLEATGGYQRAVVAALAAAGLPVVVVNPRQARDFAKAIGQLAKTDVLDARTLAHFADAVRPTPRPLPDAQTEELRALLARRRQLVAMRTAEQNRLDGASQRLRVDIQAHLTWLDTHLATLDDDLDTALRASPIWREHETLLRSVPGIGPVCTRTLLLDLPELGTVSRQRLAALVGVAPFHRDSGTMRGVRATWGGRAHVRTTLYMSTLVAVRYNPVLKRFYERLCAAGKAKKVALTACMRKLLTILNAMVKHQKPWHVQEEPIA

SEQ ID NO: 49246 - protein, 339 aa, unidentified
MEYKCIAIDISKHVFTLDGVDAQEQPVLRRNLKRSEFEMFFSKVPATEVVLEACGGAHHWGRVLGAMGHRVRLLPAQYVKPFVKRSKNDRTDAAAICEAASRPGMSSVPVKSAQQQADAMILKHRELLVGQRTAAINALRGHAAEFGVIAAKGTAQVKPLLATLAADEAIPAVARAIFARIGEHIDQLNQQIDALEAELLALHKASQVSRSLAEMPGIGPAIAISFALTVSPQHFASSRHFAAWLGLTPKEHSTGGKQRLGRISKAGNERLRQLLVVGATAVIRHARPDSKTASPWLLKLLERKPRKLVAVALANKMARMAWAILAKGDIYREPAARAA

SEQ ID NO: 49247 - protein, 359 aa, unidentified
MVYLGVDLHRKVSHVVALDEAGNVTLSRRLVNDPAEFRRVFGELEPEPIEVAFEATYGWGWFADLLADAGVAAHMAHPLATKAIGAGRVKNDAIDARTLAHLLRTNLLPEAWIAPPEVREARRLVRMRASLVRVRSRLKCQVHAICADLGLPIEVSDLFGVRGRELLESLALPAVTAGRLDANLRLIDALGGEIRLADREIVRHFRADPRIRRLTPIPGIGFLTAAMIVAEVGDVGRFGTPNRLCSWAGLTPTERSSADHTQRGHISKQGSRWLRWAMVEAAVAAARGHSLQRFFGPIKERRGTKIARVALARRLLSLAFYALRDEAGCRAFPVLAHPSRSTRARSPYGMASPDGRDFD

SEQ ID NO: 49248 - protein, 359 aa, unidentified
MKYYAMKYYTSTTKFNCGIDLHARQMYVCVMDRDGKKLVHTNIRNNDFEFFLKLVAPYRHDLTVCAECMFGWYWLADACQAAGLHFVLAHALYLKAIHGGKNKNDRIDSEKLAHLLRTNLIPPAYVYPAAKRPLRALLRQRILYVWRRSELLSRIQSHQLAYNRPTCRQNLYNRDAWTEQLLASEPDPVRQLALQNDLALIGHYDAQLASLEKALLKLTKQTASRDFNLLQTTPGIGDYLGLTLLHEIGDIARFPTVKDFLSYCRLVKGTVASAGKLKGLRGAKLGNPYLRWAFGEAAVIAKRDPAIIGPLAQRLEARLGNKFKANTVLAIKLARAVYFMLKNKTAFDPDRLVAVLSKN

SEQ ID NO: 49249 - protein, 357 aa, unidentified
MTQVKKLDFTGTIIFCGVDVHKKNWRVNIQDSEFELEDFSQNADVVLLHKHLNCKYPGATFKVCYEAGFSGFSAQRWLSNHGINCQVVNAADVATSDKEKRQKSDKIDARKLCEHLQSKKMKGIYVPLLRWEHGRSLVRARAKIVSDQTRCKNRIWQLLHFSGLVLPKDYEAGQYWSSHFIKELQAIDCGTDELKITLGLFIKDYQQTRALLLEATRAIRKLCKQSRYQKEITLLRSIPGIGEINAAVMLFELQDVTRFKSFDNLCSYVGLVPNTSDSGETKKTKGITNRSNHYLRTALVESSWSVVRKDPALLMMYKKYCRRMEKNKAIIRVAKHLLSRINYVLKNKKEYVTGVVE

SEQ ID NO: 49250 - protein, 330 aa, unidentified
MKNVQHIIGADLAKKSIDLHCHLFKSHFHIDNAESGFELMIQWIEKQQIDLSVTMIVMEHTGLYSYCFENFLIQRQIKFVKVNALAIKRSIGLVRGKTDQIDAARIATYGYEKRNKLAAEVPLENDLKSLQMLYSTRERLVKHRAALTCAIKEYRHIGIQEKDLILQSQIKIVKELDKQIERLETEVKTIIEKQESLKRNFLLLKSIKGVGNVLALATIIKTNNFTRFANARKFSCFCGTAPFEHTSGTSIKGKTRVSHLADKKMKTLLDLSAKSAIQYDKELREYYLKRVELGKSKMSTINIVRNKILYRMFAVIKRQSPFVQDYLQAA

SEQ ID NO: 49251 - protein, 362 aa, unidentified
MVKNEVRVYGLKHQKEKRSMDHFAGLDVSVKETSVCVVDDAGKIVREVKVASEPEALLTVLTNPAYHFKRIGLEAGPLSQWLFSALAEAELPAVCVETRHMQAVLQAQINKTDRNDARGIAQMMRVGLYRPVHVKTLRSQKLRMLLTHRKLLQSKAIAIENDLRGTLRNFGLKVGMVGKAKFEARIKELVEDIPDLVTLVEPLLIVRRALREQIVILHRRLLAIVRDDEVCRRLMTTPGVGPVVALTYRATVDVPARFRKSKAVGAVFGLTCSKYQSGEIDRSGRISRCGDEMMRVMLYEAAQSMLRSKKWSWLKAWAMQIARRRGMKKAIVALARRLAVILHRIWVDGTEFRWTREIVTAA

SEQ ID NO: 49252 - protein, 428 aa, unidentified
MADPANATPACNLVAIDIGRYGNAVLIEATSGKRHRFKMANTAADFGRLLGFLHGLPGNCRVGLEPTGDYHRPLAHRLLRAGFEVVSINSVALSRYREAIFNSWDKNDPKDAGVILEMLRRGDVQRYVDPMVVGTHDLQELAKTYYQVSRARTKVQHSLINHGLTLYFPEMHRYWCTTRNDWFVRFLLQFPTPAHVRSLSCAEFVDAAWDVVGRKVNKRAKLEEIWEMAGATAALPHAPDSLAVETFRITLRRYQQLNALRAELEVRAEQALASNEDFAHLKTLPGIGSVIAMTVLAEGGDLRRFGHHRQFLKYCGFDLAKNQSGTQRGKEQLSKRGNARLRLAFWLAAVAAVHMKENSFRAKYERYIRAAPEDPDLRRKALTAVAAKMARVAHGMIKKNQPYRQFFEQSLPSGSIPLSAAVGAHATP

SEQ ID NO: 49253 - protein, 345 aa, unidentified
MELHTIGIDLGKTVFHLVGVNLRGEVVVRKKFSRKQLLHFTANLRVKLIGMEACGGAHFLGRALQEQGHEVRLMPAQYVKPYVKTNKSDYIDAEAIAEAVGRPRMRFVPIKTDDQLDLQSLHRVRERWVARRTAVINQIRGLLLERGITLRKGRCHVDAALPGILEDASAKLSGALRVLLAQLRLELAHLETRINEADAVINKTAGENEACRRLVAIPGIGPVTATAIVAAIGNGAAFRKGREFAAWLGVVPREYSTGGKQKLLGISKRGNSYLRRLFVQGARAVLQQSAKQSSGLSAWLAQLTSRTHRSVAGVALANKLARMAWAVLAKNEKYRPSMLAGAATA

SEQ ID NO: 49254 - protein, 349 aa, unidentified
MDHIGVDVHKRDSQIYILAEGGEVVEQRIRTEPERFAAVLGARPRARLLIEASTDSEWVARCLEALGHEVIVADPNVAPMYATRSRKVKTDRRDARALAEACLLGAFRPAHRLSDPQRHVRGRLGVRDALVQTRTRYISLIRALLRQHGYRVPSGSAEGFTQRVQSLPLPGRLRSVVAPLLAVLRPLNQQLAYSDATIERLAVHDPRVRRLRSVPCVGPVTAAAFLAVVDDVGRFHHAHQLEAYLGLVPREYSSGETQHRGPITKAGHSYTRWLLIQAAVSILRRPSPETEALQTWALRIAARRGKQIAVVALARRLAGILYALLRDGSVFAPQRGRPPRPTAAALVTV

SEQ ID NO: 49255 - protein, 430 aa, unidentified
MSVQSLPVSLNTFSEGCVMLKIVYPICCGMDVHKSFLVACIASTDRQGATTYKSKRFSTFTGDLRRCAVWLSENDCKDVCMESTGKYWIPIYNILEPTCKIVLAHPKYVKAIRGKKTDKKDAKWIADIFKHDLVSGSFIPPADIRQLRDLVRYRWKLTNFTTGEKNRAQNCLTVSNIKLDDVFSDVFGKAASAITGRLLENNKPFDVTPYLTKGIKASVEEIQSAVDGEMCDEQAEKLRIIRSHMDSLELCKLNLESLILSVAEKYLPQLNLVSTVPGIQSFSAIAVISEIGVDMSVFPTSKHLCSWAGLTPQNNESAGKKKTTRINCAGAYIKPLLVQCANAVVTSKKHPEIRNRYLALKKRRGHKKAIIAIARMLLTVIYNILKKNEPYNPELYRKSDLPPAHREVSVAEAVFILQRQGYIVSAAPVP

SEQ ID NO: 49256 - protein, 379 aa, unidentified
MQHFIGCDLHTRYQVVAWLDQETGEICGRRLEHAGKEVERFYAQFGRGAVVGLEATIPALWFERLLEGLGHEWWIGDAATIRAHEVRAQKYDERDARNIEDLLRTGRFPRIWVPSREERDLRQLLVHRLKLVRARTQVMNQLQALAISQGLCRKRKLWSAKGRAELEKLELLPWAARRRQELLEWLDQLDTSVAELHHALVQAGHERPEVELLRTHPGVGPVVGLAMVLTLGPVERFANSRKLVSYLGLNPREHSSGGRQRLGAISKQGNSLMRWLLVEAAQTAARYDPQLRRIYQRLKMRRSSGVAKVAVARRLAVRLFWMLRTRQKYAQLVRTSGSPSSAVVAQKAQPKLCLGAGPPGRRPGDCTVNHGPSQGGSHR

SEQ ID NO: 49257 - protein, 389 aa, unidentified
MLLDHPSDGPTAIRTHIGAIFTSLELSRSTWLVTSLSPGKGEKMSKHSILAGAIAELLKLFADLKRKAEARTGQSYPIITIQEAGLDGFWLHRVLQQEGIESHVVDPASIATPRRRRRAKTDRLDGETLLRTLLAYKRGEPRVCAMVVAPSPEEEDRRRLCRERRTLIEERITHVNRIKGLLFAQGISDYAPLRRDRRARLEALRTGDGRELPSHLKAQIGRELDRIELLVDQIKAVEAGQEALLAAATNATGKQGTPEPVAMLLALKGVGANFAAVLWSEAFYRQFSNRRQVAAYAGLAATPWQSGGIRHEQGVSKAGNPRLRTTMIQLAWLWIRHQPQSALTRWFKERSQQGRKRAIVALARKLLVALWKYLTHGVVIEGAVMKPAA

SEQ ID NO: 49258 - protein, 349 aa, unidentified
MTLVGCDLHTRKQQVAVLDTETGEMDERQLSHAGDAVEQFYRALPGPVTVGIESTGYALWFHELMQRLGHTLLVGEAAKIRAMVVRKTKTDRRDALHLLDLLKHERFPLVWIPDPATRDLRALVTHRMRLVRMRTMVKNGLHAIAMNRRLTLGPSLWSQRGLAQLRDLALAPHTTQRRDESLQLLTWLTARIEALDDRVAAAAQADPGARLLLSHPGVGPLTALTTVVVLGPVARFPDSKHVVSYTGLAPAVHASADTCRLGQITKQGSPLLRFVLGQAGLIAAHAEVDLTRHYRTLLRRRGRPKAIVAIARKLLVRLYIMLRDQIDYEEFRRRGRTPRGQEVPPPALA

SEQ ID NO: 49259 - protein, 357 aa, unidentified
MEQSNRISFKGQNIYIGIDVHLRSWSVTILSETSVLKRMSQGADPDALHRFLASHYPEAEYHSVYEAGFCGFWIHDRLTELGIHNIVVNPADVPTMSSEKLRKTDAVDSRKLAVSLRARQLKGIYTPNSETLEIRSLIRLKNLITKDMTRQKNRIKSQLRYLGIEIPAEYLEPYSNWSKRFLNWLKEVDMRTPSGRHSLDILIMQFEALRKQKAEMTRELRGLSRTERFEETLKLLMSVPGIGQTTGLAMISEIVDITRFANAEQLAAYVGMIPMCHSSGDHEGVGDITLCKHAILRSNIIEAAWVAIRKDEAMQLCYLNNCKRMVPSKAIVKVARKLVNRIYFVLKRRQPYVYAVA

SEQ ID NO: 49260 - protein, 404 aa, unidentified
MWYVGLDWADTHHDVVVLDEAGRRVGSRRFAHTHDGLNELKQFLLGIAASPEDLACIVETSHGLLIAFLLEAGIPVYPVNPKTANQLRKAAGAKTDQIDAYLLAKTGRFDLAELRRLVPDSATVQELKTLTRDQDALIQTQTRLVNQLTACLKEYYPAALHLFAKVQQRSTLVFLQAYPTPQAAQAASLEEITATLRLGKHTNPTRVAPKIFEELHRPQLVASPVIVRAKSRLMLSLVKQLLVVIQEIAGYDAAIRPLFLRHPDQEIWSSLPRAGKRLAPRLLAEWGEDRNRYADATSVQTLAGTAPVPFQSGNYAKAHKRFACVKPLRNVLHQFAWQSTRQEAWALAYYQRKRAEGKTHSMAVRALANVWVRIIYRMWVNKTSYQTATFEAAKRAHASRPHAA

SEQ ID NO: 49261 - protein, 369 aa, unidentified
MGKSVLYVGLDVHKMSVDIAIAESGTGETRYYGRIGGDLEALDKVIRKLQAQGAELRFAYEAGPCGYQVYRHLTAQGYSCLVAAPALIPRRPGDRLKNDRRDALNLARLLRAGELTAVKVPDEDDEAMRDLTRAREDAISVERRAKQRTAAFLLRHGRRYPGKTTWGRGHWRWLLQQAMEHPAQQIVLQEYLDAVREASARVLRLTGQIRELIPQWRRAPWVAAYQALRGVSLIVAATVVAEVGDLSRFHNPKELMAYLGLVPSEHSSGATVRRGRITKTGNGHARRVLVEAAWAYRLRARVTRPLLQRQEGLPEIVRQLAWKAQLRLCARYRRFLARGKAKQTIVTAIARELAALIWDIGRAVEPVTA

SEQ ID NO: 49262 - protein, 346 aa, unidentified
MLYAGLDLSRKRLDFHLLDGEGATVERGATPPDADGLLRLSERVAGHGAPVRAAIESMNGARFVHDRLELAGWQVEIADAQKVKGLAPLACKTDRIDAWVLAELARRDLVPAIWLPDPLVRAERERARWRLHLVRHRSSLKQRVHAVLLTHGKPCPVSDLFGVRGRQLLARLDLPDPWQGTIEGSLRLIDELDREIGECERELRRLGADHRYVPLLCTVPGISWVLAYTIAAELGDINRFPTPRKLVGYSGLCPRVYQSGQRDLRGPLSKQGPRYLRWALVEAATHACTHPAYRDRYQQTKARIGKQRGAKVAQIDLARRLSEAIWHMLIRNQPFAPKGATDPLAA

SEQ ID NO: 49263 - protein, 342 aa, unidentified
MEHYAGIDVSLECSSLCVVEANGNISREAKVASEPAALIAWFRSSGFELERIGLEAGPLSQWLFAAMRQAGLAVELLETRHVRKAFEAMPVKSDRNDARGIAQLMRLGWFRPVHCKSMSAQEARSLLTARKLVQSKLRDVENSLRGILRGFGLKVGKTTELKFAGRIEELVANHPHLQVITKALLSVRAVLRTEFAAFEKQTRKMAQSDARTRLLMSTPAVGPIVALTYASAIDDPARFKSSKQAGAHFGLTPKKYQSGETDYTGRISKIGDSSVRTALYEAAHIMLTKPLKGCTQLKSWAMRIARRAGMSKAKVALARRLAVIMHRMLADRTPFNPDAAVT

SEQ ID NO: 49264 - protein, 390 aa, unidentified
MDARTMNDLPPAATHDGVVRCPMAIELSKKSWIIAVNTPLSDKISNYTVKDWNGLRELIDKIRTRVGRELKQPVEIVSCYEAGYDGFWLHRLLEQAGVRNYVIDPASVQVDRRARRVKTDNVDVTKLLRSLMAYLRGEPKVWSVVRVPTVAEEDDRRLHRERDRLISERVRHVNRIKGLCAVHGVYHYEPLRSDRMERLEQLRTGDGRQLPPRLKAEIWRELQRLELVLQMIKTIEKERNAMALGRAPSTYGNAKKVQQLVKIGSIGPEIATVLVGEVFFRQFNNRQEVGSYVGLTPSHFQSGPSSRDQGISKAGNHKARTIMLELAWFWIRYQPDSPLTIWFRERVGTAKGRIRRIAIVAVARKLLIALWRYVETGMVPTGAKLKTSNR

SEQ ID NO: 49265 - protein, 328 aa, unidentified
MNNATTFVGLDVHARSVKACAFVPETGETIGKSFGYEPGEIASWAASLPQPAKCVYESGATGFHLCRELNAMGVDCVAGAVSKMHKPAADRGRKTDRRDAQFLAVQLALGVVTEVHVPDPECEGARDLTRALADARDDAVRAKQRLSKFLLRHGFVYDGKNAAGQRRSRWTRDFRAWVGRIDLGDASAMATLDHYRECVREADARKAALDEKVKSLSQKPRWKPSCDALKCLKGIDAVTAVSIACEADGFSRFATASGFAAWAGLAPSEHSGGESQCRGGITKAGNKHLRRLLVEAAWHYKGASRSPKDLAKGQSVDAATRRHANAGV

SEQ ID NO: 49266 - protein, 338 aa, unidentified
MALYCGIDLHSTNCWITIIDEDRKVVQESKFGNDLAAIMRFFERHRAELEGIAVESTFNWYWLVDGLMDAGYRLHLTNTCAIKQYDGLKYTDDRHDARWLAHLLSLGILPEGYIYPKQQRAVRDLLRRRAFLVHKRTSFLLSMRGAFECRTGMRTTSNDIKKWTPADVEQHIADPLEALGITCLLDPMTAMDGQIKILEKEALKRGNLRAEFRGLKTVWGIGKVLGLTITYEVGDIGRFAKVGNFASYCRLVKSDRLSNGKRKGSGNSKNGNPYLSWAFSEAAHFAVRHHEPAKKFVQRKRAKTNGIVAIRALAHKLARASYYVMKDNVDFDPDKMLH

SEQ ID NO: 49267 - protein, 351 aa, unidentified
MKKVVRQVLGIDVAQKELVVCLGRMHDDLYAELYASKVFPNTPKGFLALYEWVGKQTVAGLAVRYVMEATGVYHESLAYFLVDHGAEISIVLPNKISNYARSLTTKTVTDKTASEAIAQFGLERNLEKWEKPIPIYKKLKQLTRERDQVVGERTMVKNQLHAEQAEAEPNKTSVIRISKRIELLNKQEKEIVAELRILIKTDPKISDLVILLCSLTGVGFLTAVIVLAETKGFDLIRNRRQLTSFAGLDVIEKQSGTSVKGKPKISKKGNRYLRKAMHHPALAAIQHDERFKAVYMRLVSKHGIKMKALVAVQRKLLELMFTIFVSNKKYDKDYFKNQLALKTEEQYQTAA

SEQ ID NO: 49268 - protein, 415 aa, unidentified
MEQIFMIKENYIYVGIDLHKETHTAVMIDCYNQKLGEITFPNRPADFPKLVAKVKKCNTDGKTIVFGLENAYGYGRPLAVWLIDKGYFVKDVNTAISHRQAKHRGAMYRKSDSDDAEAIALATLNMLDKLPDACPNDAYWSLGQLVHRRDNIMKQRTRLVNQLHEQLCIAYPSYKSFFNDISRPTALYFWEHYPSKKYLKGKSVEDLRAELVPVSHNKCSTKTCEKILDAVASDKVKNNAYQDARDMVTLSIVSDLQHYDSQLAEVDKMLEQMYKMLGCTLTTIPGVNVITAVKILAEIGDIKRFSNANKLAQFASIAPLHLSSSGKGKDVATKQGNRRLQATIYFLAIQMVQVSSKGTPRNPVVRAYYEKRKAEGKTSQQALICISRRLISVIYGMLKNGTEYRMPVVESAGEK

SEQ ID NO: 49269 - protein, 347 aa, unidentified
MEHVGIDVHKNESQICHLTELGELLEQRIATRRDRFAALLGQTPRARILIEASTESEWVARCLEDLGHEVIVADPNYAPMYATRSRRVKTDRRDAQALMEACRLGAYRPAHRTSDAQRQVRAELAVRDALVRTRARFISLMRALLRREGLRVRTGMASSFPRRLAELTLPEPLGTAITPLLAVIETLNRELDAADARLAQHAAADPVVRRLQTVPNIGPVTALSFVATLDRVERFRGPHPAAAYLGLVPGERSSGEQQRRGPITKRGNSRTRWLLVEAAWGMIRHAHPDTAELRAWAARIAARRGRRIAAVALARRLAGILYAMWRDGTNYQPQRVRATTQETAMVS

SEQ ID NO: 49270 - protein, 337 aa, unidentified
MKLYCGIDLHSSNNVVAVSDEQDRPRYEKRLSNDLDTVLAVLKPFKGELVGCVVESTYNWYWLVDGLMAAGFPVRLAHTGAMAQYAGLKYTNDFSDARYLAHLLRLGILPTGYIYPKEERGLRDLLRRRLLLVRQKTLHHLSLQSLIARHSGQRLTANEIKQLETTQIAAYLDAPILLGGQITLQARCWLDEAITRIERELQKHIQPREDYQLLQSIPGVGPVLGTTIALKTGTIQRFPSPGNYASYARCVKSEKISNGKYKGQGNKKNGNKYLAWAFMEAAHYGAIWSAPIKRYYQRKQAKSHILVAKKAVANKLARACYHMLKRGEVFDVTRAFG

SEQ ID NO: 49271 - protein, 337 aa, unidentified
MDSHKDTLAVSGVDAAGGQQQAQVFPNTGEGHRRLVTWLQTQPGVVRVGIEGAGGYGRAVAIQLVQAGLVVVEVTPSLTVRERRRLRQRGKADPTDALAIARVTAREPDLPPVRGQDLAEDLRLLVDYREQLLGERTRIANRVHADLVALRPGYQQRLPELRSQRAAGLVRRLLAGQVGVRAELVRRRLDQLDRLDAEIRQLKRRIGQLVEATGTSLVQVRGVGPLVAARILGEVGDVRRFGDRHKFAAANGTAPIPASSGRVQRHRLNRGGNRRLNRALYVVAITQARSDHPGRAYVARKQRQGKTRREALRCLKRRISDAIYRQLLADLQPSPAP

SEQ ID NO: 49272 - protein, 323 aa, unidentified
MSKYTLGVDVAQQMCEWAVIDTTRSVVASGQVPPRPKALARWLQDLASFPIIRAAVEASGGWEKPVAQAIWEHGIPLVVANPKRVHRLREALGWAKTDGLDAHLLAIYALLHQETTPQPSVHRQTVQAWLKRREHLVEMRRRERQRLRRTTDEAIRKSLERSLAFLKEELAQVEQALEKAAAAWEQAEPSIARTRQLLETMPGIGPRISLVLLAWLPELGHVSRGEVAALTGTAPMANDSGQKRGRRRVREGRKRVRRYLYLGAMAAVRRPGPLQATYQRLLEAHKPKPVALVAVMRRQIVILNAMVRTGKPWEPKLAMPRNR

SEQ ID NO: 49273 - protein, 388 aa, unidentified
MNTNTLQSVQSNDTDLDNTVYFIGQDLHSNNVYVTVMVNQIREDSTNYGKVVASRRITLRKGQKEYIDFMSRFCEGKRHVAVVESTYNVYWMNDLFEERGWNLLIADPSTVSRDKTKACNDKTDATFLADTLRNGSCHVTRLLPSEVRYPRDLVRIRQTLIQQRARAKTIIKNLWMNIKGYPLTTKEMNQFLDEYVETHEVNEAFGGKNRSGPKARFYFEEIIFLNKEIEILEEEIKELVPLKGDVLRLMREMKGVGEVCSRILITEIGDIRRFGSAGSFVSYCRLAPTAKLSNGKSKGMGNARNGNAYLSWCMTEVANLMVHYNEQAHKCYERLLKRDTQHLRVKAIRSVAAKIARAIWNVLSKGVCFDVERCFGTGAKNFSRKIAI

SEQ ID NO: 49274 - protein, 400 aa, unidentified
MIDTGDIDIFLGLDVGKGEHHATAVTPAGTKAFDKRLPNTEPKLRELFAKLQAKHGTVLVVVDQPASIGALPLAVARNMGCPVAYLPGLTMRRIADLYPGEAKTDAKDAFIIADAARAMPHTLRAIDGEDETIAELEMIVGFDDDLAGEATRVANRLHGLLTQIHPSLERVLGPRLQHPAVLTLLERFGSPAQIRKAGRRRLVTLLRPKAPRMAERLIEDIFTALDEQTVTVPGTNAAALIVPSLAASLTAVLDQRKLLAGRIEELLGAHPLSKVLTSMPGVGVRTGARILIEVGDGSTFPTAGHLAAYAGLAPATRSSGSSIRGEQPSRRGNKQLKRAFFLSAFAALGDPASRVYYDKKIAQGKHHTQALLCLARRRADVLFAMLRDGTFYEPQPAAAR

SEQ ID NO: 49275 - protein, 457 aa, unidentified
MNANNARFQSASKIRISLLLIVLQCPMKGGDFMKNNFLSTLFVGIDVSSKTNVLCALDFQGNKLLNLKALNNQPGAESILESILDCLNSNSLKFVVIALESTSFYSTHIANFLSSNEVLLAYSPMVYCLNPKTIANYRKSFVDMDKTDPLDAYVIADFARCGRIKSQPWRGAQFLALQRLTRHRLHLVEAIAKEKTYMVSNVYLKFSQLAVLEKPDKPFSNTYGATSEAVLTEFLSLEDIAYSSIEDLVAFLKDKGKNRFSNPVGTAELLQKAARDSYRLDKVLYEPLNIAIASSFNVIKALQTEIKEIDKAIEKNIKGINTTEYQSLISIPGIGPVFASGILAEIGSITSFSSNDALAKYAGLTWRQKQSGDYSADETNMTKTGNKYLRYYLVEAANSVRNRIPEFNEYYHKKFNEVPNHQHKRALALTSRKLVRLVFGLLTKNQIYSNSKVGEVQ

SEQ ID NO: 49276 - protein, 413 aa, unidentified
MSVTPEATRPRVCAGLDWAKDDHVVCILDPDGEVLDRFTVEHTAAGLKRLVRRLLAAEVVEIGIERGDGPVIDALLATELTVLVISPNQVKNLRSRYGSAGNKDDRFDAYVLADVVRTDRRRLTPLTRSTPATQALRSSVRARRDLVAHRVAAANQLRAHLQVVFPGIVDLFAHLDSAISLSFLERFPTQTKADWLTADRLAAWLKKLAYSGRTDPAVLHQRLLAAPRGTTGAETGPHAATTLAFVAVLRSLNTQIATLADSIAEQLDVHPDAHVVTSLPRSGTVRAARLLAEIGDARGRFPTADSLACLAGVAPSTRQSGKVKAVTFRWGCDKELRDALCDFAADSRHANPWAADLYNRARARNHDHPHAVRILARAWVDIIWRCWQDRATYDPSQHRAFQRVLNEHHQIAA

SEQ ID NO: 49277 - protein, 411 aa, unidentified
MIFVGDDWAEDHHDVVVLDEAGATLAYRRLPEGVEGVGRLHALVAEHAQDPAQVAVGIETDRGLWVASLVAAGYRVYAVNPKVAARYRERQSNSGAKSDRADAKMLADLVRTDRHLHRQVAGDSEEVAAVQLLARSHQRLLWSRQRQLNGLRAQLREYYPAALVAFGDDLAHHDSLAVLARAPRPEQGRALSLSALQASLRRGGRQRNLERRAREIQEALRAPQLTAPATVTRAYGAVGASTIAVVTEMTRQIKALEAELKESFESHPDADIITSLPGLGPILGARVLGEFGDDPNRYQDARSRKNYAGTAPITRASGTKKVVLARFVRNRHLGDAVYLWAFASISNSPGARAYYDSRRANGDGHNCALRALANRLVGILHGCLAHHEPYDEVTAWGHRAGNAPDGTAQAA

SEQ ID NO: 49278 - protein, 447 aa, unidentified
MVFILILKITSMKKVLKVIHPHAAGIDIGSRNFFVDAGEEDVKIFPTYTEGCHAVRDYLLSRNVTTVAMESTGVFWVILYSVLEEAKIEVYLVNGREVRNVPGRKTDIKDCQWLRQLHAYGLLTKSFIPNDNIRTLRSYMRLRQDHIRSSATQVHLMQKALTLMNIRITEVLADVTGASGLRIIERILSGERNPEVLVELCESNILNRKREKVLKALQGEYKDEHLFALRHAHTSWLHFNALVVECDKEVEILLQRITEDHPTVEIKNKRKPVRYHKPEIKNLHVPLLKLTSGKDPTTIAGITDYSFLQIVSEVGTDMNAWKSEKHFVSWLKLCPQRNSSGQMTKRIKVKHHNKASMLFRNMAQGLLTSKHIAIGSFGRRIRAKRGSSVAIKAIARKLACYYYRVMTKGEAFVEKGIEAYELHLKEKQKRYLEKLAFKLNMQLVPST

SEQ ID NO: 49279 - protein, 390 aa, unidentified
MEKQTAVAPTAVAGEVVRIFLALELSRSSWLVASHTPAADKISRHKLAAGDIDGLLALIERLRTRVEQKTGQPVQVISCYEAGYDGFWLDRKLKAEGVVNHVMDPASIQVDRRARRVKTDAVDADALLRALMAFCRGERKVCSMVRVPTRDEEDAKRLSREREQLIKERVRHVNRIKGLCATQGIYDYQPLKADRLERLDELRTGDGNPLPDRLKNEIRRQLERLKLLLELIGTVEAERDAVVKADKPASEADRRIRALAKLRGIGPEIATVLYNEVFYRQFANRRDVAAYVGLTPSLFASGDLRHDQGISKAGNPRARATMVELAWLWVRHQSGSDLTGWFLSRVSGIKGRIKRIAIVALARKVLVALWRYLETGLVPTGAMLKADKQG

SEQ ID NO: 49280 - protein, 395 aa, unidentified
MDRKLCLGGAGESRRRPPAVLPVSGWSVVRAKPVHPRNLKFVGEPMVNAQRTPSSNRVTRTVANVMSEHQQGREAVAAPRANAGIDVSKDWLDLAWADRTERFANDAAGMESLTALLRQQDVDLVVLEATGGYEAAAAAALQAAGLAVAVVNPRQARDFAKAMGVLAKTDKVDARVLRDFANVLARHEKRSQFLHEVPDEKRAHLAALVTRRRQLVEMRSMESQRMAITRDKVARKSLNHVILVLDQQLTQIDRDLDQFTKEHFEDLRKLLSSPKGVGAVLTHTLIAALPELGRLDRSAIAKLVGVAPLACDSGKHRGKRKCWGGRSDVRNVLYMATVAAVTHNPIIRTFHQRLKATGKPGKVVMVACMRKLLTILNAMVRDGTTWNDALHAKTA

SEQ ID NO: 49281 - protein, 364 aa, unidentified
MDQNNKVPGTRSFSTTRQSYRQMLAWMTSFGALKRIGVECTGTYGSGLLRYFQNAGLEVPEVTAPDRMARRKRGKSDTIDAECAAHAAFAGIRRVTPKTHDGMIESLRVLKTCRKTARSARRVALQIIHSNIISAPDELREQFRTMTRMQLIRSLGSWGPDASEYRNVTSVYRITLKSLARRYLELHDEIADLDVMIAALVDELVRELITHNAIWYENASQLQITAGDNPQRLRLESDFAALCGVSPVPVSSGKTNRYRLNRGEDRAANSVLHIIAIGHLRTDDKTKAYVARRVAEGHTKMEAIYLTRSLFITAQSKQADQQHPDNGLLLEWRPGQPVRQRRLAALLPDQQPSTGHKPAWQLSG

SEQ ID NO: 49282 - protein, 352 aa, unidentified
MEQFIGCDAHKKFSVFVAVNERGQAGEALRVMHDRELYREFLARLPPGSAIAIEASGHYSWLADEMERAGHHPKLANPLEAKRRMALTKKTDKLDARGLAILLRNGTLPEVWIPPSEVRDQRELLRRRMCLVILRTRVKNRIHGTLARHNVQVPGADLFGVEARLRLETRLPELPVHSREAIVQELATLDFLETQIESTEQRLEAIMAVSVEADLLKTLPCVGKVLSMVLMLEIGRVDRFPTAAHLASYAGLVPRVHSSGGHTRMGQICRNVNRNLKWAFVETGNLVVINQRRLAGSHVVRLYDRIKRGKNHQKAVVAVARHLAEAAWWVLTKQEVYREPRDARKALSSTHG

SEQ ID NO: 49283 - protein, 340 aa, unidentified
MESFAGADLHKRVTQLAVLRDGQPPSQFRFPNDPNTVHGVLKKLPRGTKIAVEATGSWWWFVEKARELGHEVCLSHPKQTKAIAHARLKSDKVDAVMLAQLLKADFLPTVWIPGERERYVRELLAHRARLGRTRTAVINELHAVYAKRNIEVPGMIWHRIRPVAWRAEELSGYGPRIVTENAELLKLINQQIQNLDKELAKAGQEDPQANRLMTIPGVGVATGVAVSCWIGDIRRFPNAKKLVSYFGIAPKVRQSANREIHGHISKEGSGMVRWLILQAALVGIRMSKGPGRGQYLGVSRRRGKKIARIAVARKLLGTIYHMMREEIDYEEFVRRGSNAQ

SEQ ID NO: 49284 - protein, 335 aa, unidentified
MLYAAIDIHKRAFQAAVLDPESGEVVEERFAADRESLARWAEQWRGRVEAVAIEATTGWRWVWRELVERGFEVRLAEPVQTRALLGRRRSAKTDRLDARWLARLLAKEMLPQSWIPPEQIQQLRDRTRLRKALAEDRRRWGQRLHAYLLHEGWPCSRSNLLRPPGLRWAAALQLCEHARLQVDSLLAVMAALQEQLDTVDGELRRFARGDERCQALQSIYGVGPILACHLLAEIGEASRFQRAEQITRLAGLDPVVDESGESRRRGHLAKAGSPHLRWALVEAAVHAHRPTAPDLAFYRATRQRRDTTVARLTIARKIGKRAFHALRELELTAAA

SEQ ID NO: 49285 - protein, 435 aa, unidentified
MEEVEDEPLFCDRVAGIDIGKATVMVTIRVPSEARAKGRQQETREFGTTRRELLALADWLRGWQVERAGMEATSDYWKPVLFTLEQEGFDCLLYQASQVKALPGRPKTDKLDSVWLARITEQGSLAGSFVPPEEIRRLRTHTRYRRKLVQMRTAQKERCEKLLEDAHLKLSAVISDIHGVSGRDMLRAIAAGERNPKVLAQMARGVMRSKIARLEQALDCSFFTGEHAFILTMMLDSIDSLTAQAGVLDARIADMCQPYQRQLEQLDEIPGFGTTTAQDLIAEIGTDMNVFPTAGHLASYARQAPRVKESAGKRKGKNATGRGNPYIGGALGEASISAGRTQTFIGEKYRRLTRRMPKRKAQVAIMRSQLVIAHALLSDPDARYQDLGPDYYERKADIRRRARNHARALERLGYKVTLEAIDPGTGELHLVATAG

SEQ ID NO: 49286 - protein, 416 aa, unidentified
MDTMYERCCGLDIHKKTIEACFRSGKKKTHMSFGTTSAELRKLTIWLVENDCQSVAMESTGSYWKPIFNILELSGTDMEIIVVNARHMKNVPGRKTDVNDAEWIAELLQYGLLRPSFIPDREQRELRELSRYRKSLVGERAREINRLQKMLEGGNIKLTSVVSEVTGYSSRRLLDRLLRNDEPMTEDVISGLVHTSLAGKSKELETALDGLLSELQKKLLIKVLDHIDDMSRRIADLDDFCRKQMDRYEDALDKLDEIPGIARRTAETILIETGLDMSRFPTAKHFARWAGLAPGNNESAGKRSSGRTTKENPTLKSTLIQSAKVAARKKDSFFKARYQKIAARRGANRASVAVAHSMLIAIYHILKSGERFKDLGEDYYNQFNREKKKNYYLKKLTKLGVNLKEATLSISIQAAT

SEQ ID NO: 49287 - protein, 402 aa, unidentified
MWYVGLDWADTHHDVAVLDESGKPVGARRFSHSPRGLNDLKQFLWSFASHPEELACIVETNHGLLIAFLLSAGIPVYPVNPKTINGLRNVAGAKTDRIDAQLLAKAGYFRLSDLHRLEPDSPTVQELKTLTRDQDALVQMQTRLVNQLTACLKEYYPVALSLFSQLHQPATLRFLQAYPTPEAAAGASVEEITATLRQGKFPNPTQAAAAIVEEVHRPQLEASTVTVRTKSRLMLSLVKQLLVVIEDIASYEKEIQALFLTHPDHEIWSSLPRAGKRLAPRLLAEWGDDRTRYADAQSVQELAGTAPVPFQSGNYARAHKRFACVKPWRNDLYQFAWQSTLSEPWAASYYQRKLAEGKTHSMALRALANIWVRIMYRMWVNKTRYQAETFETARVAHTRRVA

SEQ ID NO: 49288 - protein, 381 aa, unidentified
MNTMTRDLESTVGVSLLMAFELGQRWWKVGFTTGLGQRPRTRRIAAGAMAVVLTEVARAKTRFGLPEATPVISCYEAGRDGFWLHRYLTAHGVTNHVVDSSSIEVDRRARRSKTDQLDLGGLLTLLARYQAGDRRCWRVVRVPSVEDEDARQLHRTRETLQADRTRLINRLKATLAVLGLRLPVTRDFIARVDAARLPDGCPMPPGARQRLAHDWALLTSVEHQLEELDATRQALPIDLTTPTGRAVERLQRLRAVGPAGAWVLATEIFGWREIRNARQLGALVGVVPAVYQSGEMRRDRGITRAGNHHVRRLMVQLAWGWLRWQRSSALSQWYHARFAAGGPRLRRIGIVALARKLLVALWRYVDHDVLPDGAVMKATTM

SEQ ID NO: 49289 - protein, 356 aa, unidentified
MVSVGVDIHKRSGFAVFKDDDGRVLGSFRFINNGCGIAELVQKLQVFGDVRVAMESSGNYWVRLYEALEGKGISVVLSNPLKTRAIAEAKIKTDRLDASTLADLLRADLVAESYVPSRQVRDRRALLRYRSCLVRTRSMVKNRVHALLDKYELSHGFTDLFGARGRRWLEGLELPGNDGLILKMALAEIEKLDELVEGVSNVIVKDPRVELLMGFKGIDYYIAMILVNEIGDINRFNSARKLVGWAGLCPSLHQSGGKCRMGRITKQGNRWVRWALTQAAHQAARYDPKLKGFFERVAGRGGTQKAVVAVARKMLVSIYYVLKRGEVYHGEDLELKGRKVNRLYGRVSRGLHAGRG

SEQ ID NO: 49290 - protein, 360 aa, unidentified
MLRQNTDLNFDGQPIYIGIDVHLKSWNVAIYSKDLFLKCIHQESKVEVLVNHLWKHYPGASYHSVYGAGFCGFWIHRELRAHGVHNIVVNPADVPSTQKELLHKSDPIDSKKLGRALRAGVLRGIYVPSPDCEDARSLVRLRHSTVREIGRMKNRLKSFLYTNGISYPEAFLHNGTHWSRRFMAWLKEDVHIKGEFGRRTLELLVRKVEYHRGFLLELNRELRSMMAQQVHAVDYALLRSVPGIGPVTAMSLLVELEDIRRFANSDHLASFIGIVPTRHSSGERDPDGELTFRRHELLRRMLVEASWTAVRNDPVLALGFSKACLKMKKNLAIIKVARKLVNRIAYVLRTREKYVIGTVK

SEQ ID NO: 49291 - protein, 379 aa, unidentified
MIESLPEAGRGRSIDLRYTKTVGQRGRHAQISNKARTVVRVDQTRMMQGRAKREKKPMTEEAVYVGVDVAKHILDLAVHNSKETRQFNNDHKGIASAKRYIAGLRPAKIILEATGKYEIPLVAELQANHLPVVIVNPRQVRDFARATGVLAKTDRIDARILALFGLQVQPEVRLLPDQKTRELSSFLARRRQLIEMLTAENNRLLQADINIRPGIKIHIAWLEEAISTINDYLDQQIQSSPSWLEKDNLLKSVPGVGKVVSTTLLIELPELGNLSRRKIAALVGVAPLNRDSGTLRGKRTVWGGRAKLRAVLYMAALVGVRHNPVIAAFYERLLKAGKAKKVALVACMRKLLTILNAMIRSKTVWKVDSILQNTAVEAK

SEQ ID NO: 49292 - protein, 340 aa, unidentified
METFYGGIDLHAKNAQACVINGQGVRMREKKLDNNLPQIFEFFEAFGKEIRIAIESTVNWYWIVDGLMDAGFEVKLAHPLGLKMITNAKVKTDRRDAYKLANLLRLNALPEAYVYPKETRPLRDLLRRRSDLVVQRAKSYSSLRMQFLQYNTNTMSQSALKRFAVEDLDIMKIPEVVKRYGALTLRRIALLTTQIDEIEKYLELITITDPHFNFLTEITGIGRVLGLTIYYEIGNIGRFENVRHFSSYCRLVPGIHQSSDKVKRGKGSKQGNVYLKWAFTQAAIHMLTYDKDIRAYRDRRAAKNGGKNMKANAILAHKLGMAVFNVLKNGVPFKKELLFA

SEQ ID NO: 49293 - protein, 348 aa, unidentified
MKNKSFVGIDISKNVIDVSIFREDTNIKMFPHEVFNNTRKGFGDMCSWLKKSRVVLSQALFGMEFTGCYSLDLEKFLTSKNYSFCMLSTRIVKHHPMGTIDKRDKNDSAKIADFLYRYDGTECAKPYKLPSKAMQQLKQLVNERKFLVEQRTNFMNRMQMFETKEDSAMYESDIKKLNHDIEKIDQEECELMSKEEDVFDTFQNLLTIPGIGFVNATNIIAITRNFTAFDTARQYARYVGVAPCSHTSGTSVKWRARPSAHCNGQVKADLSMAALRAVEYDVEMQMFYNRKLGGRKDSDTKRKALNAVKFKLICRMFAIGKQKRKWEVLNTSDDRKNLHIEKSKASEL

SEQ ID NO: 49294 - protein, 349 aa, unidentified
MTTMTSTAAAVIGGVDTHADVHVAAACDQLGAVLGTQAFPTTTAGYRQLLRWLRTFGDLRVVGVEGTGSYGVGLTRFLLEASVEVREVLRPNRQVRRRNGKTDVVDAIAAARAVLSGEASARPKSHDGAVEALRTLKIVHRSAHKSRTQALNQMRDLITTAPDELRTELRGLRRRQRLAVCASFRPGDRDDLVTITKLTLRTLARRIADLDEELAVLNARRRRITHAVAPRLVAAHGIGPDTATGLLLAAGDNPDRLGSERSWAALLASNPIPASSGKTTRHRLNRGGDRQANSALWRIVVVRMATDPRTKAYVERRTNEGLNTAEIIRCLKRYVARETFDLLPHELLA

SEQ ID NO: 49295 - protein, 492 aa, unidentified
MKTSRKIQSVYRNQNALVRAVFERAGDARKVLCVALDYAKRKHVALICDGHGDVLKASFPVENNAAGIAYLIKEITATARRRKIPKDQIFLGGEDEAAYIANFTEALRAKGYLVVRVNAYEAKENRENLLASTDTLDLLGIAKTLLSRRARLTGDSTSANPAYHHLREVTRCRRTLVRQQTAASNRIHALADQLFPGFLNGSKSALTPFTDASLELMKERFSAPEIARRKVASLANLLRRHSVHNPDETAAQIILLAREALPPAAHRVTTLQRTLAATVDLYQCLKRNALELRADAAITLATTPYVMLTSIPGIGFVLAAGLAGELGDPKHLGKLDSLCAYAGIVPRTLQSGGPDSPAVQGHASPRCNRILKDWTVQSAQKIHLYGPPELKDRITRWNANGQHGIFAAARHHLRLVHTLVKNEHPYLAPQARTRQASPDQIASAAHATWGVLQRKWRTVSGGLDLILDEAHPLGFWRKVMLELHGIDLPERQ

SEQ ID NO: 49296 - protein, 420 aa, unidentified
MELEALRPSVFCGIDWAEDHHDVALVDAGGAVLARLRIGDDAAGYTRLLTLLAAHGDTTGRPVPVAIETPRGLLVACLRAGDRKVFAVNPMAVARYRERYSVARKKSDALDAAVLAHVLRTDMDAHRPLPADTELAQAIAVLARAQQDAVWDRTQAHNKLRSVLREFYPAILAAFVDKRDGIMRPEARAVMTAAPTPAAAARLTKTQLVALLKRAGRKRGIEAEAARLRVVLRAGYLHQPQLVEDAYGRQTLALLRLLDAACTNADELETAAATSFARHPDAAIITSLPGLAALTGARILAEIGDDRSRFADARSLKAYSGAAPVTRASGKSRYVMTRKVKNQRLAAVGYLWAFSALSNSPGARAHYDRRRKTNERHTAAQRNLFNRLIGILYHCLQTGQAYDEQKAFQISPTAAVAAAA

SEQ ID NO: 49297 - protein, 412 aa, unidentified
MDVVYTHCCGLDIHKKLVVACLLTPGAHGQPQKEIRSFGTMTADLLELADWLRAAGCTHVAMEATGVYWQPLYNLLEEHFTLLLVNARHIKAVPGRKTDVRDCEWIADLLRHGLLRASFVPDRAQRELRALTRYRSALVRERTAEVNRLQQTLEGANVKLAAVATDVLGQSGRAMLEALVGGATDAAALAELARGKLRAKRPQLVQALTGRFGPHHRFLVAEQLGHIDELDERIARVSAEIAERMRPFAATLAQLDAIPGVGQYTAEVLVAELSTDLSRFPSAAHLASWAGMCPGNHESAGKRQSGKTRKGNPYVRAALIEAAQAAGRKKGCYLAAQYRRLAHRRGKKKAAVAVGHSILVIAYHLLTRGTPYEELGGNYFDERERQAVKRRLVQRLEDLGYEVTIQPATPAA

SEQ ID NO: 49298 - protein, 484 aa, unidentified
MAKRKMSTFERLQNGKKLSWRERQSLQRCLEEESAELEVVHPNAAGIDVGNESHFVGVRPGRGEAAVQEFGSWTADLRRMAEWLKSQGVKTVAMQSTGVYWIALYEILEQAGFEVYLVNARGTKNLPGRKSDVQECQWLRKLHTYGLLRNSFRPPEQIRSVRTLWRLRERHVEEAGRAVQHMQKALTTMNVQLANTLSNVSGTTGLAILRAILSGERDPRQLAKLRNPHVRASEEEIAHSLEGNWREDVLFELQQVVEAYDFLQRQISACDLELEKYLAALPNREISAAQPVASPSAVRPPGKKAKTKRPSKGSPSFDLAGELRRTMGVDLMTIDGINVGTAQVILSELGPDLSAFPSEAHFSAWLGLAPQRDISGGKVIAQRSRRVKNRVANALRMAAESLSRSESYLGARYRHLRARLGGLKAVKAMARYLACLVHRLLTKGQTWVDRGTADYEHRRQGREFIALQRRAAQIGMQLVVAQPQ

SEQ ID NO: 49299 - protein, 451 aa, unidentified
MPTKRNQAATLPVIDPNAAGIDVGATEMFVAVPVDRDARPVRSFKSFTVDLHKLADWLQQCGIRTVAMESTGVYWIPLFQILEQRNIDVRLVNAHHVRNVPGRKTDVADCQWLQHLHSVGLLRGSFRPEDDICAIRSLWRHRENLIQLATLHLQHMQKALDQMNVQIHHVISELAGTTGLAIVDAILAGERDPQTLAQLRDWRIKATEETIMKSLVGDYREEHLYVLRQSLDCYRHYQNLIRNLDIEIKARMRLLPSKVDPVEKPLSKERNPRKTPRRTEPHDLRLEVYRAFGVDLTQIPGINALTAQVLLTEVGTDFARFPTVGAFCSWLRLCPNPKISGGHVLSSKTRPTKNRAALALRLAAQALHRSQTFLGEYFRRMKARLGAPKAITAVAHKLARIIYHMIIMQHEFDATIFHHQERQSQDRKRKRLLVQAKELGLQLVPLVEVVP

SEQ ID NO: 49300 - protein, 407 aa, unidentified
MSVHVAPVTSSTIVVAVDVGKTSAVFSVTDAARHRLLAPSEFAMTGSGLSTAAARAMAAVPASGRVKVGVEAAGHYHRPVLEHHWPDGWEVLELNPAHVAEQRRVQGRRRIKTDVIDLEAITELVLAGYGRPATERDALVGELSAWATHRSRRVATRTATKNQLIGQLDRAFPGLTLALPDVLGTKIGRLIAAEFSDPSRLAGLGVNRLIRFAATRDLQLRRPVAERLVAAARDALPTRDAVIARQILAADLNLMADLDDQIQSAETAMGMLLPRSPYATLTSVPGWAVVRVSNYAAALGDPKRWPGPRQIYRASGLSPTQYESAHKRRDGGISREGSVALRRALIDLGIGLWLNEPAAKEYAHGLKDRGKPGGIVACALAHRANRIAHALVRDHATYEPTRWTATP

SEQ ID NO: 49301 - protein, 366 aa, unidentified
MLYLGIDQHARQITVSLRDEGGDVLQARQVSTQPDKINAFFQQLTRERLRDGESFVAVLEVCGFNDWLIRMLREYHCHKVILIQPDERKKCKTDRRDAAALSELLWANRERLLQGKPVRGLRQVDIACSTDQENRRLTTLRKEAGQARTRLVNKVRHILRRHNLQWQMPTKRLPTKAAIAWLKQLVLPEIDRLEMNHLLADVEQVQQRVKELERVIAQRCGVSAEAGLIASMPGVSYFTATSLACRVGRVERFPRAQSLANYWGLTPGCRNSGENTQRLGNITKAGSSMARWLLAQVTHKVLRKDARLREWFKRIKRRRGSTIARVAVMRKLATIIWHMLRKRKTYAECRVLAEVGTKERDKQGCL

SEQ ID NO: 49302 - protein, 348 aa, unidentified
MPVTIGVDPHKASHTTAVLDESSRLLNQQQFPATSDGYQRLREWAGSWPQRCWAVEGAHGVGRSLAQQLVADGERVVDVPAKLAARVRVLSTGHGRKTDPVDAVSVAVAAQSAPGLRQVGVEDHAVVLHLLTNRREDLVGMRTQTLNRLHRLLTDLVPAGAGRNLTADGAAVLLGQACPTGAPAATRWQLAGDLIADVRELDRRITAVEERIKAAVAQSKTTLVELFGVGPVLAAKLLGEVGDVRRFPTKHHFAAHTGTAPLEASSGQVVRHRLSRAGDRKLNHALHLMAIVQIRHPTSGQAYYRRKRAEGKSPKEALRCLKRRLSDAVYRCLLADQHDQECPAVTTG

SEQ ID NO: 49303 - protein, 369 aa, unidentified
MELANDKRKEGTAAMKDTANQYVALDVHQATLVVSVREENGSIRMHATVPTEQKAIVELLRGLRGRIHVAFEEGTQSQWLHDVIKPNAERVVVCNLRGQSQTTNKSDRIDADRLSELLRIGSLKAVYHGASELTTLKELMRSYVNLVEDSTRVMLRIKALFRARAIKTPGTSVYCAAQRKEWLAKLENRGARARAVGLYEELDVLQALRPKAKARMIAEARRQPGWKVLLSIPFLGPIRVATILAIVATPWRFRTKRQLWSYVGLAVVTRSSADDEFVDGKLRRRKRAPLTRGLNRNHNPRLKEVFKGAANAAACTEGPLKDKYEKSVAGGVREEMARLTLARTITSIALRLWKKGELWDPSKVTMQGT

SEQ ID NO: 49304 - protein, 398 aa, unidentified
MHVGWDWASQNHDITVVNDTGGICARFAIGHDEASLDGVLAELALLGLAAELPVAIERPDGIVVERLLAAGHPVVPVHPNAFHAARSRWGAGRAKSDPADSYMLADYLRTDGHRLRRLRPLDPTTRELQVLVRMRDDHVAARTAASNQLHALLEAHWPGANAIFSRLGSTIALAFLADYPTPESAARLGEARLAMFCRRHSYRGGRTASQLLQRLRDAAIAPVGLDPIVLAELVGAQTRLIRTALETIAQLDAALGSVLLAHSKAHLLAPLPRIGEVNLAQVIAEIGPLLERCDTPDQAAAACGVAPVTRQSGKSRNVQFRFSGNARARVALTCFADNARHSSPWAQHLYTAARQRGIRHPQAVRIAARAWLRVIWACWHTDTVYDPAKHRAETGHAA

SEQ ID NO: 49305 - protein, 343 aa, unidentified
MGIQHPIAVGVDPHADTLSAAAVDGAGAVVWELTVPNSPEGISQLLTCSNAEPLRWAVEGTGTFGRALTDRLLQDGAAVFEVPTRLTGRLRRRAGFGKTDRIDAVTIARAALSEPLATVTHQPLTEALRVLIRQREALVAAQVQALNRLRARLREIDPAAARQLGRIRSKATLTSLSHHTIDSTNPHHQALTLAIRLDATDTLTRHQHIHTLETRIRQLLPPAGHTLMNIPGVGLIGAATLIAHTGDIRRFPTDAHYATYCGTAPVDASSGRQQRHRLNRWGNRSLNRVIHIAIVTQLQQHGPAAGYITRRIQEGKTKPEAIRTAKRHLTRHIYRTLKQHPLT

SEQ ID NO: 49306 - protein, 394 aa, unidentified
MFFLGIDIGKRSHVASVMNEEGKVILKGFSFPNSTEGGEKLLQKIISLSPIDQYKVGMEATGHYWLSLFSFLDEHDFLIHVINPIQTDGWRKGTEIRKRKNDIIDSVLIADLMRYGTFVETSLSDENIFSLKQLSRYRTYLVGTASDFKRKIIAVLDQVFPEYDTLFSKVGIFGKASKEVLLELSSPDAINHISAGALADLLGEASRNRLGMKKAEELKTAASHSFGVKFAQETFTFQLRSMIEQLKFLEKQITDTEKEIKKIMDDIDSVIETIPGIGPINGATILGEIGDINKFSSPAKLVAYAGIDASVTQSGEFEGTHNVMSKRGSPYLRKALFSAALVASRHDPVLKAFYEKKISEGKHHLTALGAVSRKLCYIIYAILKKNEPYEVRLR

SEQ ID NO: 49307 - protein, 344 aa, unidentified
MKYYAGLDVSLEETSVCIVDGEGTIVAERKVASQPGAIAEALRDSGFALTRVGLEAGPLSPWLHAGLRAEGFAVICIETRQAKAALRAMRNKTDRNDARGIAQIMRTGWFRIVHVKSGESHELRFLLTNRKTLQRKALDIENEIRGALKAFGLKVGKVSRRRFEARVLELVADRAALHRMVVPMLKARAALLEEFARLHRMVLEVVRDDEVCRRLMTIPGVGAITALTFKTGVDMPGRFAKSKTVGAHFGLTPRKFSSGEIDYQGRISKCGDAMVRSALYEAANVMLTRCTRWSALKAWAARIAKKAGAKRARVALARKLAVIMHRMWIDGTDFQWGEQTKAAR

SEQ ID NO: 49308 - protein, 398 aa, unidentified
MKTCGLDVHKDSIFCAIYNGKSYSEVKEYSTTTPKIRQMGEYLRSEGVTKVAMESTSTYWVPVWDILLEMGFELMLVNPFLIKQMPGRKSDVKDAQWIACLLHKGLLRGSMIPSPVIQQLRTYSRKYTKLQEQKTRSLQKMDRIMVMCGFRIGSCMSNLGTKSVMLIIQALIMRETNPEVLEKLVYGNTANKKSGKLREALTGNLKEHYRVQLEWEKQEYDLFEIQTEQCLTRMRSICQEYYSREMELIKTIPGISEVSAMIIIAETGGDMSVFENSGKITGWTGLRPRNDESAGKYKSCATTKGNKYLRSVLVQVSWAASRIKNGWFKEKFNRLAMRKSRKKALIAIARKLLTVIWNVLYYKMPYNYQLVHIYDPIKVEAKINYHQMEMERMQKLLN

SEQ ID NO: 49309 - protein, 413 aa, unidentified
MEQGLITAVGVDVSKGKSMVAVRRPGGQIVMLPIQVNHTAEELAGLAERLQGFGGDIRIIMEHTGMYWRPIAHSLKEAGFFVSVVNAILIHNFSDNSLRKVKTDKADALKIANYGLTFWTELRNFSDEDETRQMLKMQCRLYERTQKTSVELRNGLISLLDQTFPGINEILPAHYCTKRGHYKWVDVSKRFWHKDCVKKLSESAFTNTYQKWCKKEGYRFSRIEAEKIYSAAQNTVATFPQNESTKTLIVQAVDCLNAVYESMAVLRTEMKRLASLLPEYEVVMAMQGAGDVTGPKLMAEIGDVRRFTNKNALVAFAGVDAPPFQSGSFEAKSRHVSKRGSPHLRRTLFQVMSVVLQRSSTDNPIYSFMDKKRAEGKHFYVYTVAGAAKFLRVYYARVKEYLLALETKQETAA
